United States Patent Application Publication US 2026/0258423 A1 - sequence listing, part 5

SEQ ID NO: 123644 - DNA, 20 bp, synthetic construct
  source 1..20: mol_type = other DNA
cataggaatgcgcttctgtg

SEQ ID NO: 123645 - DNA, 20 bp, synthetic construct
  source 1..20: mol_type = other DNA
ccataggaatgcgcttctgt

SEQ ID NO: 123646 - DNA, 20 bp, synthetic construct
  source 1..20: mol_type = other DNA
accataggaatgcgcttctg

SEQ ID NO: 123647 - DNA, 20 bp, synthetic construct
  source 1..20: mol_type = other DNA
gaccataggaatgcgcttct

SEQ ID NO: 123648 - DNA, 20 bp, synthetic construct
  source 1..20: mol_type = other DNA
ggaccataggaatgcgcttc

SEQ ID NO: 123649 - DNA, 20 bp, synthetic construct
  source 1..20: mol_type = other DNA
gggaccataggaatgcgctt

SEQ ID NO: 123650 - DNA, 20 bp, synthetic construct
  source 1..20: mol_type = other DNA
tgggaccataggaatgcgct

SEQ ID NO: 123651 - DNA, 20 bp, synthetic construct
  source 1..20: mol_type = other DNA
ctgggaccataggaatgcgc

SEQ ID NO: 123652 - DNA, 20 bp, synthetic construct
  source 1..20: mol_type = other DNA
gctgggaccataggaatgcg

SEQ ID NO: 123653 - DNA, 20 bp, synthetic construct
  source 1..20: mol_type = other DNA
agctgggaccataggaatgc

SEQ ID NO: 123654 - DNA, 20 bp, synthetic construct
  source 1..20: mol_type = other DNA
tagctgggaccataggaatg

SEQ ID NO: 123655 - DNA, 20 bp, synthetic construct
  source 1..20: mol_type = other DNA
gtagctgggaccataggaat

SEQ ID NO: 123656 - DNA, 20 bp, synthetic construct
  source 1..20: mol_type = other DNA
agtagctgggaccataggaa

SEQ ID NO: 123657 - DNA, 20 bp, synthetic construct
  source 1..20: mol_type = other DNA
aagtagctgggaccatagga

SEQ ID NO: 123658 - DNA, 20 bp, synthetic construct
  source 1..20: mol_type = other DNA
caagtagctgggaccatagg

SEQ ID NO: 123659 - DNA, 20 bp, synthetic construct
  source 1..20: mol_type = other DNA
ccaagtagctgggaccatag

SEQ ID NO: 123660 - DNA, 20 bp, synthetic construct
  source 1..20: mol_type = other DNA
cccaagtagctgggaccata

SEQ ID NO: 123661 - DNA, 20 bp, synthetic construct
  source 1..20: mol_type = other DNA
ccccaagtagctgggaccat

SEQ ID NO: 123662 - DNA, 20 bp, synthetic construct
  source 1..20: mol_type = other DNA
cccccaagtagctgggacca

SEQ ID NO: 123663 - DNA, 20 bp, synthetic construct
  source 1..20: mol_type = other DNA
ccccccaagtagctgggacc

SEQ ID NO: 123664 - DNA, 20 bp, synthetic construct
  source 1..20: mol_type = other DNA
gccccccaagtagctgggac

SEQ ID NO: 123665 - DNA, 20 bp, synthetic construct
  source 1..20: mol_type = other DNA
agccccccaagtagctggga

SEQ ID NO: 123666 - DNA, 20 bp, synthetic construct
  source 1..20: mol_type = other DNA
cagccccccaagtagctggg

SEQ ID NO: 123667 - DNA, 20 bp, synthetic construct
  source 1..20: mol_type = other DNA
tcagccccccaagtagctgg

SEQ ID NO: 123668 - DNA, 20 bp, synthetic construct
  source 1..20: mol_type = other DNA
ctcagccccccaagtagctg

SEQ ID NO: 123669 - DNA, 20 bp, synthetic construct
  source 1..20: mol_type = other DNA
cctcagccccccaagtagct

SEQ ID NO: 123670 - DNA, 20 bp, synthetic construct
  source 1..20: mol_type = other DNA
acctcagccccccaagtagc

SEQ ID NO: 123671 - DNA, 20 bp, synthetic construct
  source 1..20: mol_type = other DNA
cacctcagccccccaagtag

SEQ ID NO: 123672 - DNA, 20 bp, synthetic construct
  source 1..20: mol_type = other DNA
ccacctcagccccccaagta

SEQ ID NO: 123673 - DNA, 20 bp, synthetic construct
  source 1..20: mol_type = other DNA
cccacctcagccccccaagt

SEQ ID NO: 123674 - DNA, 20 bp, synthetic construct
  source 1..20: mol_type = other DNA
tcccacctcagccccccaag

SEQ ID NO: 123675 - DNA, 20 bp, synthetic construct
  source 1..20: mol_type = other DNA
gtcccacctcagccccccaa

SEQ ID NO: 123676 - DNA, 20 bp, synthetic construct
  source 1..20: mol_type = other DNA
tgtcccacctcagcccccca

SEQ ID NO: 123677 - DNA, 20 bp, synthetic construct
  source 1..20: mol_type = other DNA
ttgtcccacctcagcccccc

SEQ ID NO: 123678 - DNA, 20 bp, synthetic construct
  source 1..20: mol_type = other DNA
attgtcccacctcagccccc

SEQ ID NO: 123679 - DNA, 20 bp, synthetic construct
  source 1..20: mol_type = other DNA
gattgtcccacctcagcccc

SEQ ID NO: 123680 - DNA, 20 bp, synthetic construct
  source 1..20: mol_type = other DNA
cgattgtcccacctcagccc

SEQ ID NO: 123681 - DNA, 20 bp, synthetic construct
  source 1..20: mol_type = other DNA
gcgattgtcccacctcagcc

SEQ ID NO: 123682 - DNA, 20 bp, synthetic construct
  source 1..20: mol_type = other DNA
agcgattgtcccacctcagc

SEQ ID NO: 123683 - DNA, 20 bp, synthetic construct
  source 1..20: mol_type = other DNA
aagcgattgtcccacctcag

SEQ ID NO: 123684 - DNA, 20 bp, synthetic construct
  source 1..20: mol_type = other DNA
caagcgattgtcccacctca

SEQ ID NO: 123685 - DNA, 20 bp, synthetic construct
  source 1..20: mol_type = other DNA
tcaagcgattgtcccacctc

SEQ ID NO: 123686 - DNA, 20 bp, synthetic construct
  source 1..20: mol_type = other DNA
ctcaagcgattgtcccacct

SEQ ID NO: 123687 - DNA, 20 bp, synthetic construct
  source 1..20: mol_type = other DNA
gctcaagcgattgtcccacc

SEQ ID NO: 123688 - DNA, 20 bp, synthetic construct
  source 1..20: mol_type = other DNA
cgctcaagcgattgtcccac

SEQ ID NO: 123689 - DNA, 20 bp, synthetic construct
  source 1..20: mol_type = other DNA
tcgctcaagcgattgtccca

SEQ ID NO: 123690 - DNA, 20 bp, synthetic construct
  source 1..20: mol_type = other DNA
ctcgctcaagcgattgtccc

SEQ ID NO: 123691 - DNA, 20 bp, synthetic construct
  source 1..20: mol_type = other DNA
cctcgctcaagcgattgtcc

SEQ ID NO: 123692 - DNA, 20 bp, synthetic construct
  source 1..20: mol_type = other DNA
acctcgctcaagcgattgtc

SEQ ID NO: 123693 - DNA, 20 bp, synthetic construct
  source 1..20: mol_type = other DNA
aacctcgctcaagcgattgt

SEQ ID NO: 123694 - DNA, 20 bp, synthetic construct
  source 1..20: mol_type = other DNA
caacctcgctcaagcgattg

SEQ ID NO: 123695 - DNA, 20 bp, synthetic construct
  source 1..20: mol_type = other DNA
gcaacctcgctcaagcgatt

SEQ ID NO: 123696 - DNA, 20 bp, synthetic construct
  source 1..20: mol_type = other DNA
cgcaacctcgctcaagcgat

SEQ ID NO: 123697 - DNA, 20 bp, synthetic construct
  source 1..20: mol_type = other DNA
ccgcaacctcgctcaagcga

SEQ ID NO: 123698 - DNA, 20 bp, synthetic construct
  source 1..20: mol_type = other DNA
cccgcaacctcgctcaagcg

SEQ ID NO: 123699 - DNA, 20 bp, synthetic construct
  source 1..20: mol_type = other DNA
ccccgcaacctcgctcaagc

SEQ ID NO: 123700 - DNA, 20 bp, synthetic construct
  source 1..20: mol_type = other DNA
cccccgcaacctcgctcaag

SEQ ID NO: 123701 - DNA, 20 bp, synthetic construct
  source 1..20: mol_type = other DNA
acccccgcaacctcgctcaa

SEQ ID NO: 123702 - DNA, 20 bp, synthetic construct
  source 1..20: mol_type = other DNA
aacccccgcaacctcgctca

SEQ ID NO: 123703 - DNA, 20 bp, synthetic construct
  source 1..20: mol_type = other DNA
aaacccccgcaacctcgctc

SEQ ID NO: 123704 - DNA, 20 bp, synthetic construct
  source 1..20: mol_type = other DNA
caaacccccgcaacctcgct

SEQ ID NO: 123705 - DNA, 20 bp, synthetic construct
  source 1..20: mol_type = other DNA
ccaaacccccgcaacctcgc

SEQ ID NO: 123706 - DNA, 20 bp, synthetic construct
  source 1..20: mol_type = other DNA
tccaaacccccgcaacctcg

SEQ ID NO: 123707 - DNA, 20 bp, synthetic construct
  source 1..20: mol_type = other DNA
ctccaaacccccgcaacctc

SEQ ID NO: 123708 - DNA, 20 bp, synthetic construct
  source 1..20: mol_type = other DNA
cctccaaacccccgcaacct

SEQ ID NO: 123709 - DNA, 20 bp, synthetic construct
  source 1..20: mol_type = other DNA
ccctccaaacccccgcaacc

SEQ ID NO: 123710 - DNA, 20 bp, synthetic construct
  source 1..20: mol_type = other DNA
gccctccaaacccccgcaac

SEQ ID NO: 123711 - DNA, 20 bp, synthetic construct
  source 1..20: mol_type = other DNA
cgccctccaaacccccgcaa

SEQ ID NO: 123712 - DNA, 20 bp, synthetic construct
  source 1..20: mol_type = other DNA
tcgccctccaaacccccgca

SEQ ID NO: 123713 - DNA, 20 bp, synthetic construct
  source 1..20: mol_type = other DNA
atcgccctccaaacccccgc

SEQ ID NO: 123714 - DNA, 20 bp, synthetic construct
  source 1..20: mol_type = other DNA
catcgccctccaaacccccg

SEQ ID NO: 123715 - DNA, 20 bp, synthetic construct
  source 1..20: mol_type = other DNA
ccatcgccctccaaaccccc

SEQ ID NO: 123716 - DNA, 20 bp, synthetic construct
  source 1..20: mol_type = other DNA
tccatcgccctccaaacccc

SEQ ID NO: 123717 - DNA, 20 bp, synthetic construct
  source 1..20: mol_type = other DNA
ctccatcgccctccaaaccc

SEQ ID NO: 123718 - DNA, 20 bp, synthetic construct
  source 1..20: mol_type = other DNA
cctccatcgccctccaaacc

SEQ ID NO: 123719 - DNA, 20 bp, synthetic construct
  source 1..20: mol_type = other DNA
ccctccatcgccctccaaac

SEQ ID NO: 123720 - DNA, 20 bp, synthetic construct
  source 1..20: mol_type = other DNA
cccctccatcgccctccaaa

SEQ ID NO: 123721 - DNA, 20 bp, synthetic construct
  source 1..20: mol_type = other DNA
acccctccatcgccctccaa

SEQ ID NO: 123722 - DNA, 20 bp, synthetic construct
  source 1..20: mol_type = other DNA
cacccctccatcgccctcca

SEQ ID NO: 123723 - DNA, 20 bp, synthetic construct
  source 1..20: mol_type = other DNA
tcacccctccatcgccctcc

SEQ ID NO: 123724 - DNA, 20 bp, synthetic construct
  source 1..20: mol_type = other DNA
atcacccctccatcgccctc

SEQ ID NO: 123725 - DNA, 20 bp, synthetic construct
  source 1..20: mol_type = other DNA
gatcacccctccatcgccct

SEQ ID NO: 123726 - DNA, 20 bp, synthetic construct
  source 1..20: mol_type = other DNA
cgatcacccctccatcgccc

SEQ ID NO: 123727 - DNA, 20 bp, synthetic construct
  source 1..20: mol_type = other DNA
tcgatcacccctccatcgcc

SEQ ID NO: 123728 - DNA, 20 bp, synthetic construct
  source 1..20: mol_type = other DNA
ctcgatcacccctccatcgc

SEQ ID NO: 123729 - DNA, 20 bp, synthetic construct
  source 1..20: mol_type = other DNA
cctcgatcacccctccatcg

SEQ ID NO: 123730 - DNA, 20 bp, synthetic construct
  source 1..20: mol_type = other DNA
acctcgatcacccctccatc

SEQ ID NO: 123731 - DNA, 20 bp, synthetic construct
  source 1..20: mol_type = other DNA
aacctcgatcacccctccat

SEQ ID NO: 123732 - DNA, 20 bp, synthetic construct
  source 1..20: mol_type = other DNA
caacctcgatcacccctcca

SEQ ID NO: 123733 - DNA, 20 bp, synthetic construct
  source 1..20: mol_type = other DNA
gcaacctcgatcacccctcc

SEQ ID NO: 123734 - DNA, 20 bp, synthetic construct
  source 1..20: mol_type = other DNA
tgcaacctcgatcacccctc

SEQ ID NO: 123735 - DNA, 20 bp, synthetic construct
  source 1..20: mol_type = other DNA
ctgcaacctcgatcacccct

SEQ ID NO: 123736 - DNA, 20 bp, synthetic construct
  source 1..20: mol_type = other DNA
actgcaacctcgatcacccc

SEQ ID NO: 123737 - DNA, 20 bp, synthetic construct
  source 1..20: mol_type = other DNA
cactgcaacctcgatcaccc

SEQ ID NO: 123738 - DNA, 20 bp, synthetic construct
  source 1..20: mol_type = other DNA
tcactgcaacctcgatcacc

SEQ ID NO: 123739 - DNA, 20 bp, synthetic construct
  source 1..20: mol_type = other DNA
ctcactgcaacctcgatcac

SEQ ID NO: 123740 - DNA, 20 bp, synthetic construct
  source 1..20: mol_type = other DNA
gctcactgcaacctcgatca

SEQ ID NO: 123741 - DNA, 20 bp, synthetic construct
  source 1..20: mol_type = other DNA
agctcactgcaacctcgatc

SEQ ID NO: 123742 - DNA, 20 bp, synthetic construct
  source 1..20: mol_type = other DNA
cagctcactgcaacctcgat

SEQ ID NO: 123743 - DNA, 20 bp, synthetic construct
  source 1..20: mol_type = other DNA
tcagctcactgcaacctcga

SEQ ID NO: 123744 - DNA, 20 bp, synthetic construct
  source 1..20: mol_type = other DNA
ctcagctcactgcaacctcg

SEQ ID NO: 123745 - DNA, 20 bp, synthetic construct
  source 1..20: mol_type = other DNA
tctcagctcactgcaacctc

SEQ ID NO: 123746 - DNA, 20 bp, synthetic construct
  source 1..20: mol_type = other DNA
atctcagctcactgcaacct

SEQ ID NO: 123747 - DNA, 20 bp, synthetic construct
  source 1..20: mol_type = other DNA
aatctcagctcactgcaacc

SEQ ID NO: 123748 - DNA, 20 bp, synthetic construct
  source 1..20: mol_type = other DNA
caatctcagctcactgcaac

SEQ ID NO: 123749 - DNA, 20 bp, synthetic construct
  source 1..20: mol_type = other DNA
gcaatctcagctcactgcaa

SEQ ID NO: 123750 - DNA, 20 bp, synthetic construct
  source 1..20: mol_type = other DNA
tgcaatctcagctcactgca

SEQ ID NO: 123751 - DNA, 20 bp, synthetic construct
  source 1..20: mol_type = other DNA
gtgcaatctcagctcactgc

SEQ ID NO: 123752 - DNA, 20 bp, synthetic construct
  source 1..20: mol_type = other DNA
agtgcaatctcagctcactg

SEQ ID NO: 123753 - DNA, 20 bp, synthetic construct
  source 1..20: mol_type = other DNA
tagtgcaatctcagctcact

SEQ ID NO: 123754 - DNA, 20 bp, synthetic construct
  source 1..20: mol_type = other DNA
gtagtgcaatctcagctcac

SEQ ID NO: 123755 - DNA, 20 bp, synthetic construct
  source 1..20: mol_type = other DNA
agtagtgcaatctcagctca

SEQ ID NO: 123756 - DNA, 20 bp, synthetic construct
  source 1..20: mol_type = other DNA
cagtagtgcaatctcagctc

SEQ ID NO: 123757 - DNA, 20 bp, synthetic construct
  source 1..20: mol_type = other DNA
gcagtagtgcaatctcagct

SEQ ID NO: 123758 - DNA, 20 bp, synthetic construct
  source 1..20: mol_type = other DNA
tgcagtagtgcaatctcagc

SEQ ID NO: 123759 - DNA, 20 bp, synthetic construct
  source 1..20: mol_type = other DNA
gtgcagtagtgcaatctcag

SEQ ID NO: 123760 - DNA, 20 bp, synthetic construct
  source 1..20: mol_type = other DNA
agtgcagtagtgcaatctca

SEQ ID NO: 123761 - DNA, 20 bp, synthetic construct
  source 1..20: mol_type = other DNA
gagtgcagtagtgcaatctc

SEQ ID NO: 123762 - DNA, 20 bp, synthetic construct
  source 1..20: mol_type = other DNA
ggagtgcagtagtgcaatct

SEQ ID NO: 123763 - DNA, 20 bp, synthetic construct
  source 1..20: mol_type = other DNA
tggagtgcagtagtgcaatc

SEQ ID NO: 123764 - DNA, 20 bp, synthetic construct
  source 1..20: mol_type = other DNA
ctggagtgcagtagtgcaat

SEQ ID NO: 123765 - DNA, 20 bp, synthetic construct
  source 1..20: mol_type = other DNA
gctggagtgcagtagtgcaa

SEQ ID NO: 123766 - DNA, 20 bp, synthetic construct
  source 1..20: mol_type = other DNA
ggctggagtgcagtagtgca

SEQ ID NO: 123767 - DNA, 20 bp, synthetic construct
  source 1..20: mol_type = other DNA
aggctggagtgcagtagtgc

SEQ ID NO: 123768 - DNA, 20 bp, synthetic construct
  source 1..20: mol_type = other DNA
caggctggagtgcagtagtg

SEQ ID NO: 123769 - DNA, 20 bp, synthetic construct
  source 1..20: mol_type = other DNA
ccaggctggagtgcagtagt

SEQ ID NO: 123770 - DNA, 20 bp, synthetic construct
  source 1..20: mol_type = other DNA
cccaggctggagtgcagtag

SEQ ID NO: 123771 - DNA, 20 bp, synthetic construct
  source 1..20: mol_type = other DNA
gcccaggctggagtgcagta

SEQ ID NO: 123772 - DNA, 20 bp, synthetic construct
  source 1..20: mol_type = other DNA
tgcccaggctggagtgcagt

SEQ ID NO: 123773 - DNA, 20 bp, synthetic construct
  source 1..20: mol_type = other DNA
ttgcccaggctggagtgcag

SEQ ID NO: 123774 - DNA, 20 bp, synthetic construct
  source 1..20: mol_type = other DNA
attgcccaggctggagtgca

SEQ ID NO: 123775 - DNA, 20 bp, synthetic construct
  source 1..20: mol_type = other DNA
tattgcccaggctggagtgc

SEQ ID NO: 123776 - DNA, 20 bp, synthetic construct
  source 1..20: mol_type = other DNA
ctattgcccaggctggagtg

SEQ ID NO: 123777 - DNA, 20 bp, synthetic construct
  source 1..20: mol_type = other DNA
tctattgcccaggctggagt

SEQ ID NO: 123778 - DNA, 20 bp, synthetic construct
  source 1..20: mol_type = other DNA
ctctattgcccaggctggag

SEQ ID NO: 123779 - DNA, 20 bp, synthetic construct
  source 1..20: mol_type = other DNA
gctctattgcccaggctgga

SEQ ID NO: 123780 - DNA, 20 bp, synthetic construct
  source 1..20: mol_type = other DNA
ggctctattgcccaggctgg

SEQ ID NO: 123781 - DNA, 20 bp, synthetic construct
  source 1..20: mol_type = other DNA
tggctctattgcccaggctg

SEQ ID NO: 123782 - DNA, 20 bp, synthetic construct
  source 1..20: mol_type = other DNA
ctggctctattgcccaggct

SEQ ID NO: 123783 - DNA, 20 bp, synthetic construct
  source 1..20: mol_type = other DNA
tctggctctattgcccaggc

SEQ ID NO: 123784 - DNA, 20 bp, synthetic construct
  source 1..20: mol_type = other DNA
gtctggctctattgcccagg

SEQ ID NO: 123785 - DNA, 20 bp, synthetic construct
  source 1..20: mol_type = other DNA
ggtctggctctattgcccag

SEQ ID NO: 123786 - DNA, 20 bp, synthetic construct
  source 1..20: mol_type = other DNA
gggtctggctctattgccca

SEQ ID NO: 123787 - DNA, 20 bp, synthetic construct
  source 1..20: mol_type = other DNA
agggtctggctctattgccc

SEQ ID NO: 123788 - DNA, 20 bp, synthetic construct
  source 1..20: mol_type = other DNA
cagggtctggctctattgcc

SEQ ID NO: 123789 - DNA, 20 bp, synthetic construct
  source 1..20: mol_type = other DNA
acagggtctggctctattgc

SEQ ID NO: 123790 - DNA, 20 bp, synthetic construct
  source 1..20: mol_type = other DNA
gacagggtctggctctattg

SEQ ID NO: 123791 - DNA, 20 bp, synthetic construct
  source 1..20: mol_type = other DNA
agacagggtctggctctatt

SEQ ID NO: 123792 - DNA, 20 bp, synthetic construct
  source 1..20: mol_type = other DNA
gagacagggtctggctctat

SEQ ID NO: 123793 - DNA, 20 bp, synthetic construct
  source 1..20: mol_type = other DNA
tgagacagggtctggctcta

SEQ ID NO: 123794 - DNA, 20 bp, synthetic construct
  source 1..20: mol_type = other DNA
gtgagacagggtctggctct

SEQ ID NO: 123795 - DNA, 20 bp, synthetic construct
  source 1..20: mol_type = other DNA
tgtgagacagggtctggctc

SEQ ID NO: 123796 - DNA, 20 bp, synthetic construct
  source 1..20: mol_type = other DNA
ttgtgagacagggtctggct

SEQ ID NO: 123797 - DNA, 20 bp, synthetic construct
  source 1..20: mol_type = other DNA
tttgtgagacagggtctggc

SEQ ID NO: 123798 - DNA, 20 bp, synthetic construct
  source 1..20: mol_type = other DNA
ttttgtgagacagggtctgg

SEQ ID NO: 123799 - DNA, 20 bp, synthetic construct
  source 1..20: mol_type = other DNA
tttttgtgagacagggtctg

SEQ ID NO: 123800 - DNA, 20 bp, synthetic construct
  source 1..20: mol_type = other DNA
ttttttgtgagacagggtct

SEQ ID NO: 123801 - DNA, 20 bp, synthetic construct
  source 1..20: mol_type = other DNA
tttttttgtgagacagggtc

SEQ ID NO: 123802 - DNA, 20 bp, synthetic construct
  source 1..20: mol_type = other DNA
ttttttttgtgagacagggt

SEQ ID NO: 123803 - DNA, 20 bp, synthetic construct
  source 1..20: mol_type = other DNA
cttttttttgtgagacaggg

SEQ ID NO: 123804 - DNA, 20 bp, synthetic construct
  source 1..20: mol_type = other DNA
tcttttttttgtgagacagg

SEQ ID NO: 123805 - DNA, 20 bp, synthetic construct
  source 1..20: mol_type = other DNA
ttcttttttttgtgagacag

SEQ ID NO: 123806 - DNA, 20 bp, synthetic construct
  source 1..20: mol_type = other DNA
tttcttttttttgtgagaca

SEQ ID NO: 123807 - DNA, 20 bp, synthetic construct
  source 1..20: mol_type = other DNA
ttttcttttttttgtgagac

SEQ ID NO: 123808 - DNA, 20 bp, synthetic construct
  source 1..20: mol_type = other DNA
tttttcttttttttgtgaga

SEQ ID NO: 123809 - DNA, 20 bp, synthetic construct
  source 1..20: mol_type = other DNA
ttttttcttttttttgtgag

SEQ ID NO: 123810 - DNA, 20 bp, synthetic construct
  source 1..20: mol_type = other DNA
tttttttcttttttttgtga

SEQ ID NO: 123811 - DNA, 20 bp, synthetic construct
  source 1..20: mol_type = other DNA
ttttttttcttttttttgtg

SEQ ID NO: 123812 - DNA, 20 bp, synthetic construct
  source 1..20: mol_type = other DNA
cttttttttcttttttttgt

SEQ ID NO: 123813 - DNA, 20 bp, synthetic construct
  source 1..20: mol_type = other DNA
acttttttttcttttttttg

SEQ ID NO: 123814 - DNA, 20 bp, synthetic construct
  source 1..20: mol_type = other DNA
gacttttttttctttttttt

SEQ ID NO: 123815 - DNA, 20 bp, synthetic construct
  source 1..20: mol_type = other DNA
tgacttttttttcttttttt

SEQ ID NO: 123816 - DNA, 20 bp, synthetic construct
  source 1..20: mol_type = other DNA
atgacttttttttctttttt

SEQ ID NO: 123817 - DNA, 20 bp, synthetic construct
  source 1..20: mol_type = other DNA
catgacttttttttcttttt

SEQ ID NO: 123818 - DNA, 20 bp, synthetic construct
  source 1..20: mol_type = other DNA
acatgacttttttttctttt

SEQ ID NO: 123819 - DNA, 20 bp, synthetic construct
  source 1..20: mol_type = other DNA
aacatgacttttttttcttt

SEQ ID NO: 123820 - DNA, 20 bp, synthetic construct
  source 1..20: mol_type = other DNA
aaacatgacttttttttctt

SEQ ID NO: 123821 - DNA, 20 bp, synthetic construct
  source 1..20: mol_type = other DNA
gaaacatgacttttttttct

SEQ ID NO: 123822 - DNA, 20 bp, synthetic construct
  source 1..20: mol_type = other DNA
agaaacatgacttttttttc

SEQ ID NO: 123823 - DNA, 20 bp, synthetic construct
  source 1..20: mol_type = other DNA
aagaaacatgactttttttt

SEQ ID NO: 123824 - DNA, 20 bp, synthetic construct
  source 1..20: mol_type = other DNA
aaagaaacatgacttttttt

SEQ ID NO: 123825 - DNA, 20 bp, synthetic construct
  source 1..20: mol_type = other DNA
aaaagaaacatgactttttt

SEQ ID NO: 123826 - DNA, 20 bp, synthetic construct
  source 1..20: mol_type = other DNA
gaaaagaaacatgacttttt

SEQ ID NO: 123827 - DNA, 20 bp, synthetic construct
  source 1..20: mol_type = other DNA
agaaaagaaacatgactttt

SEQ ID NO: 123828 - DNA, 20 bp, synthetic construct
  source 1..20: mol_type = other DNA
aagaaaagaaacatgacttt

SEQ ID NO: 123829 - DNA, 20 bp, synthetic construct
  source 1..20: mol_type = other DNA
taagaaaagaaacatgactt

SEQ ID NO: 123830 - DNA, 20 bp, synthetic construct
  source 1..20: mol_type = other DNA
gtaagaaaagaaacatgact

SEQ ID NO: 123831 - DNA, 20 bp, synthetic construct
  source 1..20: mol_type = other DNA
agtaagaaaagaaacatgac

SEQ ID NO: 123832 - DNA, 20 bp, synthetic construct
  source 1..20: mol_type = other DNA
cagtaagaaaagaaacatga

SEQ ID NO: 123833 - DNA, 20 bp, synthetic construct
  source 1..20: mol_type = other DNA
acagtaagaaaagaaacatg

SEQ ID NO: 123834 - DNA, 20 bp, synthetic construct
  source 1..20: mol_type = other DNA
cacagtaagaaaagaaacat

SEQ ID NO: 123835 - DNA, 20 bp, synthetic construct
  source 1..20: mol_type = other DNA
tcacagtaagaaaagaaaca

SEQ ID NO: 123836 - DNA, 20 bp, synthetic construct
  source 1..20: mol_type = other DNA
ttcacagtaagaaaagaaac

SEQ ID NO: 123837 - DNA, 20 bp, synthetic construct
  source 1..20: mol_type = other DNA
tttcacagtaagaaaagaaa

SEQ ID NO: 123838 - DNA, 20 bp, synthetic construct
  source 1..20: mol_type = other DNA
ttttcacagtaagaaaagaa

SEQ ID NO: 123839 - DNA, 20 bp, synthetic construct
  source 1..20: mol_type = other DNA
attttcacagtaagaaaaga

SEQ ID NO: 123840 - DNA, 20 bp, synthetic construct
  source 1..20: mol_type = other DNA
tattttcacagtaagaaaag

SEQ ID NO: 123841 - DNA, 20 bp, synthetic construct
  source 1..20: mol_type = other DNA
ttattttcacagtaagaaaa

SEQ ID NO: 123842 - DNA, 20 bp, synthetic construct
  source 1..20: mol_type = other DNA
tttattttcacagtaagaaa

SEQ ID NO: 123843 - DNA, 20 bp, synthetic construct
  source 1..20: mol_type = other DNA
ctttattttcacagtaagaa

SEQ ID NO: 123844 - DNA, 20 bp, synthetic construct
  source 1..20: mol_type = other DNA
actttattttcacagtaaga

SEQ ID NO: 123845 - DNA, 20 bp, synthetic construct
  source 1..20: mol_type = other DNA
aactttattttcacagtaag

SEQ ID NO: 123846 - DNA, 20 bp, synthetic construct
  source 1..20: mol_type = other DNA
taactttattttcacagtaa

SEQ ID NO: 123847 - DNA, 20 bp, synthetic construct
  source 1..20: mol_type = other DNA
gtaactttattttcacagta

SEQ ID NO: 123848 - DNA, 20 bp, synthetic construct
  source 1..20: mol_type = other DNA
agtaactttattttcacagt

SEQ ID NO: 123849 - DNA, 20 bp, synthetic construct
  source 1..20: mol_type = other DNA
tagtaactttattttcacag

SEQ ID NO: 123850 - DNA, 20 bp, synthetic construct
  source 1..20: mol_type = other DNA
gtagtaactttattttcaca

SEQ ID NO: 123851 - DNA, 20 bp, synthetic construct
  source 1..20: mol_type = other DNA
agtagtaactttattttcac

SEQ ID NO: 123852 - DNA, 20 bp, synthetic construct
  source 1..20: mol_type = other DNA
aagtagtaactttattttca

SEQ ID NO: 123853 - DNA, 20 bp, synthetic construct
  source 1..20: mol_type = other DNA
aaagtagtaactttattttc

SEQ ID NO: 123854 - DNA, 20 bp, synthetic construct
  source 1..20: mol_type = other DNA
aaaagtagtaactttatttt

SEQ ID NO: 123855 - DNA, 20 bp, synthetic construct
  source 1..20: mol_type = other DNA
taaaagtagtaactttattt

SEQ ID NO: 123856 - DNA, 20 bp, synthetic construct
  source 1..20: mol_type = other DNA
ctaaaagtagtaactttatt

SEQ ID NO: 123857 - DNA, 20 bp, synthetic construct
  source 1..20: mol_type = other DNA
actaaaagtagtaactttat

SEQ ID NO: 123858 - DNA, 20 bp, synthetic construct
  source 1..20: mol_type = other DNA
tactaaaagtagtaacttta

SEQ ID NO: 123859 - DNA, 20 bp, synthetic construct
  source 1..20: mol_type = other DNA
ttactaaaagtagtaacttt

SEQ ID NO: 123860 - DNA, 20 bp, synthetic construct
  source 1..20: mol_type = other DNA
tttactaaaagtagtaactt

SEQ ID NO: 123861 - DNA, 20 bp, synthetic construct
  source 1..20: mol_type = other DNA
atttactaaaagtagtaact

SEQ ID NO: 123862 - DNA, 20 bp, synthetic construct
  source 1..20: mol_type = other DNA
aatttactaaaagtagtaac

SEQ ID NO: 123863 - DNA, 20 bp, synthetic construct
  source 1..20: mol_type = other DNA
taatttactaaaagtagtaa

SEQ ID NO: 123864 - DNA, 20 bp, synthetic construct
  source 1..20: mol_type = other DNA
ataatttactaaaagtagta

SEQ ID NO: 123865 - DNA, 20 bp, synthetic construct
  source 1..20: mol_type = other DNA
aataatttactaaaagtagt

SEQ ID NO: 123866 - DNA, 20 bp, synthetic construct
  source 1..20: mol_type = other DNA
aaataatttactaaaagtag

SEQ ID NO: 123867 - DNA, 20 bp, synthetic construct
  source 1..20: mol_type = other DNA
aaaataatttactaaaagta

SEQ ID NO: 123868 - DNA, 20 bp, synthetic construct
  source 1..20: mol_type = other DNA
taaaataatttactaaaagt

SEQ ID NO: 123869 - DNA, 20 bp, synthetic construct
  source 1..20: mol_type = other DNA
ttaaaataatttactaaaag

SEQ ID NO: 123870 - DNA, 20 bp, synthetic construct
  source 1..20: mol_type = other DNA
cttaaaataatttactaaaa

SEQ ID NO: 123871 - DNA, 20 bp, synthetic construct
  source 1..20: mol_type = other DNA
acttaaaataatttactaaa

SEQ ID NO: 123872 - DNA, 20 bp, synthetic construct
  source 1..20: mol_type = other DNA
aacttaaaataatttactaa

SEQ ID NO: 123873 - DNA, 20 bp, synthetic construct
  source 1..20: mol_type = other DNA
taacttaaaataatttacta

SEQ ID NO: 123874 - DNA, 20 bp, synthetic construct
  source 1..20: mol_type = other DNA
ataacttaaaataatttact

SEQ ID NO: 123875 - DNA, 20 bp, synthetic construct
  source 1..20: mol_type = other DNA
aataacttaaaataatttac

SEQ ID NO: 123876 - DNA, 20 bp, synthetic construct
  source 1..20: mol_type = other DNA
aaataacttaaaataattta

SEQ ID NO: 123877 - DNA, 20 bp, synthetic construct
  source 1..20: mol_type = other DNA
taaataacttaaaataattt

SEQ ID NO: 123878 - DNA, 20 bp, synthetic construct
  source 1..20: mol_type = other DNA
ataaataacttaaaataatt

SEQ ID NO: 123879 - DNA, 20 bp, synthetic construct
  source 1..20: mol_type = other DNA
tataaataacttaaaataat

SEQ ID NO: 123880 - DNA, 20 bp, synthetic construct
  source 1..20: mol_type = other DNA
atataaataacttaaaataa

SEQ ID NO: 123881 - DNA, 20 bp, synthetic construct
  source 1..20: mol_type = other DNA
tatataaataacttaaaata

SEQ ID NO: 123882 - DNA, 20 bp, synthetic construct
  source 1..20: mol_type = other DNA
atatataaataacttaaaat

SEQ ID NO: 123883 - DNA, 20 bp, synthetic construct
  source 1..20: mol_type = other DNA
aatatataaataacttaaaa

SEQ ID NO: 123884 - DNA, 20 bp, synthetic construct
  source 1..20: mol_type = other DNA
gaatatataaataacttaaa

SEQ ID NO: 123885 - DNA, 20 bp, synthetic construct
  source 1..20: mol_type = other DNA
agaatatataaataacttaa

SEQ ID NO: 123886 - DNA, 20 bp, synthetic construct
  source 1..20: mol_type = other DNA
cagaatatataaataactta

SEQ ID NO: 123887 - DNA, 20 bp, synthetic construct
  source 1..20: mol_type = other DNA
ccagaatatataaataactt

SEQ ID NO: 123888 - DNA, 20 bp, synthetic construct
  source 1..20: mol_type = other DNA
accagaatatataaataact

SEQ ID NO: 123889 - DNA, 20 bp, synthetic construct
  source 1..20: mol_type = other DNA
aaccagaatatataaataac

SEQ ID NO: 123890 - DNA, 20 bp, synthetic construct
  source 1..20: mol_type = other DNA
taaccagaatatataaataa

SEQ ID NO: 123891 - DNA, 20 bp, synthetic construct
  source 1..20: mol_type = other DNA
gtaaccagaatatataaata

SEQ ID NO: 123892 - DNA, 20 bp, synthetic construct
  source 1..20: mol_type = other DNA
tgtaaccagaatatataaat

SEQ ID NO: 123893 - DNA, 20 bp, synthetic construct
  source 1..20: mol_type = other DNA
ttgtaaccagaatatataaa

SEQ ID NO: 123894 - DNA, 20 bp, synthetic construct
  source 1..20: mol_type = other DNA
cttgtaaccagaatatataa

SEQ ID NO: 123895 - DNA, 20 bp, synthetic construct
  source 1..20: mol_type = other DNA
acttgtaaccagaatatata

SEQ ID NO: 123896 - DNA, 20 bp, synthetic construct
  source 1..20: mol_type = other DNA
gacttgtaaccagaatatat

SEQ ID NO: 123897 - DNA, 20 bp, synthetic construct
  source 1..20: mol_type = other DNA
ggacttgtaaccagaatata

SEQ ID NO: 123898 - DNA, 20 bp, synthetic construct
  source 1..20: mol_type = other DNA
aggacttgtaaccagaatat

SEQ ID NO: 123899 - DNA, 20 bp, synthetic construct
  source 1..20: mol_type = other DNA
aaggacttgtaaccagaata

SEQ ID NO: 123900 - DNA, 20 bp, synthetic construct
  source 1..20: mol_type = other DNA
aaaggacttgtaaccagaat

SEQ ID NO: 123901 - DNA, 20 bp, synthetic construct
  source 1..20: mol_type = other DNA
gaaaggacttgtaaccagaa

SEQ ID NO: 123902 - DNA, 20 bp, synthetic construct
  source 1..20: mol_type = other DNA
agaaaggacttgtaaccaga

SEQ ID NO: 123903 - DNA, 20 bp, synthetic construct
  source 1..20: mol_type = other DNA
gagaaaggacttgtaaccag

SEQ ID NO: 123904 - DNA, 20 bp, synthetic construct
  source 1..20: mol_type = other DNA
tgagaaaggacttgtaacca

SEQ ID NO: 123905 - DNA, 20 bp, synthetic construct
  source 1..20: mol_type = other DNA
ctgagaaaggacttgtaacc

SEQ ID NO: 123906 - DNA, 20 bp, synthetic construct
  source 1..20: mol_type = other DNA
tctgagaaaggacttgtaac

SEQ ID NO: 123907 - DNA, 20 bp, synthetic construct
  source 1..20: mol_type = other DNA
ttctgagaaaggacttgtaa

SEQ ID NO: 123908 - DNA, 20 bp, synthetic construct
  source 1..20: mol_type = other DNA
attctgagaaaggacttgta

SEQ ID NO: 123909 - DNA, 20 bp, synthetic construct
  source 1..20: mol_type = other DNA
tattctgagaaaggacttgt

SEQ ID NO: 123910 - DNA, 20 bp, synthetic construct
  source 1..20: mol_type = other DNA
atattctgagaaaggacttg

SEQ ID NO: 123911 - DNA, 20 bp, synthetic construct
  source 1..20: mol_type = other DNA
aatattctgagaaaggactt

SEQ ID NO: 123912 - DNA, 20 bp, synthetic construct
  source 1..20: mol_type = other DNA
caatattctgagaaaggact

SEQ ID NO: 123913 - DNA, 20 bp, synthetic construct
  source 1..20: mol_type = other DNA
acaatattctgagaaaggac

SEQ ID NO: 123914 - DNA, 20 bp, synthetic construct
  source 1..20: mol_type = other DNA
cacaatattctgagaaagga

SEQ ID NO: 123915 - DNA, 20 bp, synthetic construct
  source 1..20: mol_type = other DNA
tcacaatattctgagaaagg

SEQ ID NO: 123916 - DNA, 20 bp, synthetic construct
  source 1..20: mol_type = other DNA
ttcacaatattctgagaaag

SEQ ID NO: 123917 - DNA, 20 bp, synthetic construct
  source 1..20: mol_type = other DNA
attcacaatattctgagaaa

SEQ ID NO: 123918 - DNA, 20 bp, synthetic construct
  source 1..20: mol_type = other DNA
tattcacaatattctgagaa

SEQ ID NO: 123919 - DNA, 20 bp, synthetic construct
  source 1..20: mol_type = other DNA
atattcacaatattctgaga

SEQ ID NO: 123920 - DNA, 20 bp, synthetic construct
  source 1..20: mol_type = other DNA
aatattcacaatattctgag

SEQ ID NO: 123921 - DNA, 20 bp, synthetic construct
  source 1..20: mol_type = other DNA
aaatattcacaatattctga

SEQ ID NO: 123922 - DNA, 20 bp, synthetic construct
  source 1..20: mol_type = other DNA
aaaatattcacaatattctg

SEQ ID NO: 123923 - DNA, 20 bp, synthetic construct
  source 1..20: mol_type = other DNA
gaaaatattcacaatattct

SEQ ID NO: 123924 - DNA, 20 bp, synthetic construct
  source 1..20: mol_type = other DNA
agaaaatattcacaatattc

SEQ ID NO: 123925 - DNA, 20 bp, synthetic construct
  source 1..20: mol_type = other DNA
gagaaaatattcacaatatt

SEQ ID NO: 123926 - DNA, 20 bp, synthetic construct
  source 1..20: mol_type = other DNA
ggagaaaatattcacaatat

SEQ ID NO: 123927 - DNA, 20 bp, synthetic construct
  source 1..20: mol_type = other DNA
gggagaaaatattcacaata

SEQ ID NO: 123928 - DNA, 20 bp, synthetic construct
  source 1..20: mol_type = other DNA
tgggagaaaatattcacaat

SEQ ID NO: 123929 - DNA, 20 bp, synthetic construct
  source 1..20: mol_type = other DNA
ctgggagaaaatattcacaa

SEQ ID NO: 123930 - DNA, 20 bp, synthetic construct
  source 1..20: mol_type = other DNA
actgggagaaaatattcaca

SEQ ID NO: 123931 - DNA, 20 bp, synthetic construct
  source 1..20: mol_type = other DNA
gactgggagaaaatattcac

SEQ ID NO: 123932 - DNA, 20 bp, synthetic construct
  source 1..20: mol_type = other DNA
agactgggagaaaatattca

SEQ ID NO: 123933 - DNA, 20 bp, synthetic construct
  source 1..20: mol_type = other DNA
cagactgggagaaaatattc

SEQ ID NO: 123934 - DNA, 20 bp, synthetic construct
  source 1..20: mol_type = other DNA
gcagactgggagaaaatatt

SEQ ID NO: 123935 - DNA, 20 bp, synthetic construct
  source 1..20: mol_type = other DNA
cgcagactgggagaaaatat

SEQ ID NO: 123936 - DNA, 20 bp, synthetic construct
  source 1..20: mol_type = other DNA
ccgcagactgggagaaaata

SEQ ID NO: 123937 - DNA, 20 bp, synthetic construct
  source 1..20: mol_type = other DNA
accgcagactgggagaaaat

SEQ ID NO: 123938 - DNA, 20 bp, synthetic construct
  source 1..20: mol_type = other DNA
aaccgcagactgggagaaaa

SEQ ID NO: 123939 - DNA, 20 bp, synthetic construct
  source 1..20: mol_type = other DNA
aaaccgcagactgggagaaa

SEQ ID NO: 123940 - DNA, 20 bp, synthetic construct
  source 1..20: mol_type = other DNA
aaaaccgcagactgggagaa

SEQ ID NO: 123941 - DNA, 20 bp, synthetic construct
  source 1..20: mol_type = other DNA
aaaaaccgcagactgggaga

SEQ ID NO: 123942 - DNA, 20 bp, synthetic construct
  source 1..20: mol_type = other DNA
aaaaaaccgcagactgggag

SEQ ID NO: 123943 - DNA, 20 bp, synthetic construct
  source 1..20: mol_type = other DNA
aaaaaaaccgcagactggga

SEQ ID NO: 123944 - DNA, 20 bp, synthetic construct
  source 1..20: mol_type = other DNA
aaaaaaaaccgcagactggg

SEQ ID NO: 123945 - DNA, 20 bp, synthetic construct
  source 1..20: mol_type = other DNA
caaaaaaaaccgcagactgg

SEQ ID NO: 123946 - DNA, 20 bp, synthetic construct
  source 1..20: mol_type = other DNA
tcaaaaaaaaccgcagactg

SEQ ID NO: 123947 - DNA, 20 bp, synthetic construct
  source 1..20: mol_type = other DNA
ttcaaaaaaaaccgcagact

SEQ ID NO: 123948 - DNA, 20 bp, synthetic construct
  source 1..20: mol_type = other DNA
cttcaaaaaaaaccgcagac

SEQ ID NO: 123949 - DNA, 20 bp, synthetic construct
  source 1..20: mol_type = other DNA
tcttcaaaaaaaaccgcaga

SEQ ID NO: 123950 - DNA, 20 bp, synthetic construct
  source 1..20: mol_type = other DNA
ctcttcaaaaaaaaccgcag

SEQ ID NO: 123951 - DNA, 20 bp, synthetic construct
  source 1..20: mol_type = other DNA
gctcttcaaaaaaaaccgca

SEQ ID NO: 123952 - DNA, 20 bp, synthetic construct
  source 1..20: mol_type = other DNA
ggctcttcaaaaaaaaccgc

SEQ ID NO: 123953 - DNA, 20 bp, synthetic construct
  source 1..20: mol_type = other DNA
tggctcttcaaaaaaaaccg

SEQ ID NO: 123954 - DNA, 20 bp, synthetic construct
  source 1..20: mol_type = other DNA
ctggctcttcaaaaaaaacc

SEQ ID NO: 123955 - DNA, 20 bp, synthetic construct
  source 1..20: mol_type = other DNA
actggctcttcaaaaaaaac

SEQ ID NO: 123956 - DNA, 20 bp, synthetic construct
  source 1..20: mol_type = other DNA
tactggctcttcaaaaaaaa

SEQ ID NO: 123957 - DNA, 20 bp, synthetic construct
  source 1..20: mol_type = other DNA
atactggctcttcaaaaaaa

SEQ ID NO: 123958 - DNA, 20 bp, synthetic construct
  source 1..20: mol_type = other DNA
aatactggctcttcaaaaaa

SEQ ID NO: 123959 - DNA, 20 bp, synthetic construct
  source 1..20: mol_type = other DNA
caatactggctcttcaaaaa

SEQ ID NO: 123960 - DNA, 20 bp, synthetic construct
  source 1..20: mol_type = other DNA
acaatactggctcttcaaaa

SEQ ID NO: 123961 - DNA, 20 bp, synthetic construct
  source 1..20: mol_type = other DNA
aacaatactggctcttcaaa

SEQ ID NO: 123962 - DNA, 20 bp, synthetic construct
  source 1..20: mol_type = other DNA
taacaatactggctcttcaa

SEQ ID NO: 123963 - DNA, 20 bp, synthetic construct
  source 1..20: mol_type = other DNA
ttaacaatactggctcttca

SEQ ID NO: 123964 - DNA, 20 bp, synthetic construct
  source 1..20: mol_type = other DNA
attaacaatactggctcttc

SEQ ID NO: 123965 - DNA, 20 bp, synthetic construct
  source 1..20: mol_type = other DNA
aattaacaatactggctctt

SEQ ID NO: 123966 - DNA, 20 bp, synthetic construct
  source 1..20: mol_type = other DNA
aaattaacaatactggctct

SEQ ID NO: 123967 - DNA, 20 bp, synthetic construct
  source 1..20: mol_type = other DNA
aaaattaacaatactggctc

SEQ ID NO: 123968 - DNA, 20 bp, synthetic construct
  source 1..20: mol_type = other DNA
taaaattaacaatactggct

SEQ ID NO: 123969 - DNA, 20 bp, synthetic construct
  source 1..20: mol_type = other DNA
ttaaaattaacaatactggc

SEQ ID NO: 123970 - DNA, 20 bp, synthetic construct
  source 1..20: mol_type = other DNA
attaaaattaacaatactgg

SEQ ID NO: 123971 - DNA, 20 bp, synthetic construct
  source 1..20: mol_type = other DNA
cattaaaattaacaatactg

SEQ ID NO: 123972 - DNA, 20 bp, synthetic construct
  source 1..20: mol_type = other DNA
tcattaaaattaacaatact

SEQ ID NO: 123973 - DNA, 20 bp, synthetic construct
  source 1..20: mol_type = other DNA
ttcattaaaattaacaatac

SEQ ID NO: 123974 - DNA, 20 bp, synthetic construct
  source 1..20: mol_type = other DNA
cttcattaaaattaacaata

SEQ ID NO: 123975 - DNA, 20 bp, synthetic construct
  source 1..20: mol_type = other DNA
gcttcattaaaattaacaat

SEQ ID NO: 123976 - DNA, 20 bp, synthetic construct
  source 1..20: mol_type = other DNA
ggcttcattaaaattaacaa

SEQ ID NO: 123977 - DNA, 20 bp, synthetic construct
  source 1..20: mol_type = other DNA
aggcttcattaaaattaaca

SEQ ID NO: 123978 - DNA, 20 bp, synthetic construct
  source 1..20: mol_type = other DNA
aaggcttcattaaaattaac

SEQ ID NO: 123979 - DNA, 20 bp, synthetic construct
  source 1..20: mol_type = other DNA
taaggcttcattaaaattaa

SEQ ID NO: 123980 - DNA, 20 bp, synthetic construct
  source 1..20: mol_type = other DNA
ataaggcttcattaaaatta

SEQ ID NO: 123981 - DNA, 20 bp, synthetic construct
  source 1..20: mol_type = other DNA
aataaggcttcattaaaatt

SEQ ID NO: 123982 - DNA, 20 bp, synthetic construct
  source 1..20: mol_type = other DNA
aaataaggcttcattaaaat

SEQ ID NO: 123983 - DNA, 20 bp, synthetic construct
  source 1..20: mol_type = other DNA
taaataaggcttcattaaaa

SEQ ID NO: 123984 - DNA, 20 bp, synthetic construct
  source 1..20: mol_type = other DNA
ataaataaggcttcattaaa

SEQ ID NO: 123985 - DNA, 20 bp, synthetic construct
  source 1..20: mol_type = other DNA
gataaataaggcttcattaa

SEQ ID NO: 123986 - DNA, 20 bp, synthetic construct
  source 1..20: mol_type = other DNA
tgataaataaggcttcatta

SEQ ID NO: 123987 - DNA, 20 bp, synthetic construct
  source 1..20: mol_type = other DNA
ttgataaataaggcttcatt

SEQ ID NO: 123988 - DNA, 20 bp, synthetic construct
  source 1..20: mol_type = other DNA
cttgataaataaggcttcat

SEQ ID NO: 123989 - DNA, 20 bp, synthetic construct
  source 1..20: mol_type = other DNA
gcttgataaataaggcttca

SEQ ID NO: 123990 - DNA, 20 bp, synthetic construct
  source 1..20: mol_type = other DNA
agcttgataaataaggcttc

SEQ ID NO: 123991 - DNA, 20 bp, synthetic construct
  source 1..20: mol_type = other DNA
aagcttgataaataaggctt

SEQ ID NO: 123992 - DNA, 20 bp, synthetic construct
  source 1..20: mol_type = other DNA
aaagcttgataaataaggct

SEQ ID NO: 123993 - DNA, 20 bp, synthetic construct
  source 1..20: mol_type = other DNA
aaaagcttgataaataaggc

SEQ ID NO: 123994 - DNA, 20 bp, synthetic construct
  source 1..20: mol_type = other DNA
gaaaagcttgataaataagg

SEQ ID NO: 123995 - DNA, 20 bp, synthetic construct
  source 1..20: mol_type = other DNA
agaaaagcttgataaataag

SEQ ID NO: 123996 - DNA, 20 bp, synthetic construct
  source 1..20: mol_type = other DNA
gagaaaagcttgataaataa

SEQ ID NO: 123997 - DNA, 20 bp, synthetic construct
  source 1..20: mol_type = other DNA
agagaaaagcttgataaata

SEQ ID NO: 123998 - DNA, 20 bp, synthetic construct
  source 1..20: mol_type = other DNA
aagagaaaagcttgataaat

SEQ ID NO: 123999 - DNA, 20 bp, synthetic construct
  source 1..20: mol_type = other DNA
taagagaaaagcttgataaa

SEQ ID NO: 124000 - DNA, 20 bp, synthetic construct
  source 1..20: mol_type = other DNA
ttaagagaaaagcttgataa

SEQ ID NO: 124001 - DNA, 20 bp, synthetic construct
  source 1..20: mol_type = other DNA
cttaagagaaaagcttgata

SEQ ID NO: 124002 - DNA, 20 bp, synthetic construct
  source 1..20: mol_type = other DNA
ccttaagagaaaagcttgat

SEQ ID NO: 124003 - DNA, 20 bp, synthetic construct
  source 1..20: mol_type = other DNA
accttaagagaaaagcttga

SEQ ID NO: 124004 - DNA, 20 bp, synthetic construct
  source 1..20: mol_type = other DNA
aaccttaagagaaaagcttg

SEQ ID NO: 124005 - DNA, 20 bp, synthetic construct
  source 1..20: mol_type = other DNA
gaaccttaagagaaaagctt

SEQ ID NO: 124006 - DNA, 20 bp, synthetic construct
  source 1..20: mol_type = other DNA
tgaaccttaagagaaaagct

SEQ ID NO: 124007 - DNA, 20 bp, synthetic construct
  source 1..20: mol_type = other DNA
atgaaccttaagagaaaagc

SEQ ID NO: 124008 - DNA, 20 bp, synthetic construct
  source 1..20: mol_type = other DNA
catgaaccttaagagaaaag

SEQ ID NO: 124009 - DNA, 20 bp, synthetic construct
  source 1..20: mol_type = other DNA
gcatgaaccttaagagaaaa

SEQ ID NO: 124010 - DNA, 20 bp, synthetic construct
  source 1..20: mol_type = other DNA
agcatgaaccttaagagaaa

SEQ ID NO: 124011 - DNA, 20 bp, synthetic construct
  source 1..20: mol_type = other DNA
aagcatgaaccttaagagaa

SEQ ID NO: 124012 - DNA, 20 bp, synthetic construct
  source 1..20: mol_type = other DNA
aaagcatgaaccttaagaga

SEQ ID NO: 124013 - DNA, 20 bp, synthetic construct
  source 1..20: mol_type = other DNA
aaaagcatgaaccttaagag

SEQ ID NO: 124014 - DNA, 20 bp, synthetic construct
  source 1..20: mol_type = other DNA
aaaaagcatgaaccttaaga

SEQ ID NO: 124015 - DNA, 20 bp, synthetic construct
  source 1..20: mol_type = other DNA
aaaaaagcatgaaccttaag

SEQ ID NO: 124016 - DNA, 20 bp, synthetic construct
  source 1..20: mol_type = other DNA
caaaaaagcatgaaccttaa

SEQ ID NO: 124017 - DNA, 20 bp, synthetic construct
  source 1..20: mol_type = other DNA
acaaaaaagcatgaacctta

SEQ ID NO: 124018 - DNA, 20 bp, synthetic construct
  source 1..20: mol_type = other DNA
tacaaaaaagcatgaacctt

SEQ ID NO: 124019 - DNA, 20 bp, synthetic construct
  source 1..20: mol_type = other DNA
atacaaaaaagcatgaacct

SEQ ID NO: 124020 - DNA, 20 bp, synthetic construct
  source 1..20: mol_type = other DNA
gatacaaaaaagcatgaacc

SEQ ID NO: 124021 - DNA, 20 bp, synthetic construct
  source 1..20: mol_type = other DNA
tgatacaaaaaagcatgaac

SEQ ID NO: 124022 - DNA, 20 bp, synthetic construct
  source 1..20: mol_type = other DNA
atgatacaaaaaagcatgaa

SEQ ID NO: 124023 - DNA, 20 bp, synthetic construct
  source 1..20: mol_type = other DNA
tatgatacaaaaaagcatga

SEQ ID NO: 124024 - DNA, 20 bp, synthetic construct
  source 1..20: mol_type = other DNA
ttatgatacaaaaaagcatg

SEQ ID NO: 124025 - DNA, 20 bp, synthetic construct
  source 1..20: mol_type = other DNA
attatgatacaaaaaagcat

SEQ ID NO: 124026 - DNA, 20 bp, synthetic construct
  source 1..20: mol_type = other DNA
tattatgatacaaaaaagca

SEQ ID NO: 124027 - DNA, 20 bp, synthetic construct
  source 1..20: mol_type = other DNA
ttattatgatacaaaaaagc

SEQ ID NO: 124028 - DNA, 20 bp, synthetic construct
  source 1..20: mol_type = other DNA
cttattatgatacaaaaaag

SEQ ID NO: 124029 - DNA, 20 bp, synthetic construct
  source 1..20: mol_type = other DNA
tcttattatgatacaaaaaa

SEQ ID NO: 124030 - DNA, 20 bp, synthetic construct
  source 1..20: mol_type = other DNA
ttcttattatgatacaaaaa

SEQ ID NO: 124031 - DNA, 20 bp, synthetic construct
  source 1..20: mol_type = other DNA
tttcttattatgatacaaaa

SEQ ID NO: 124032 - DNA, 20 bp, synthetic construct
  source 1..20: mol_type = other DNA
atttcttattatgatacaaa

SEQ ID NO: 124033 - DNA, 20 bp, synthetic construct
  source 1..20: mol_type = other DNA
gatttcttattatgatacaa

SEQ ID NO: 124034 - DNA, 20 bp, synthetic construct
  source 1..20: mol_type = other DNA
agatttcttattatgataca

SEQ ID NO: 124035 - DNA, 20 bp, synthetic construct
  source 1..20: mol_type = other DNA
aagatttcttattatgatac

SEQ ID NO: 124036 - DNA, 20 bp, synthetic construct
  source 1..20: mol_type = other DNA
aaagatttcttattatgata

SEQ ID NO: 124037 - DNA, 20 bp, synthetic construct
  source 1..20: mol_type = other DNA
aaaagatttcttattatgat

SEQ ID NO: 124038 - DNA, 20 bp, synthetic construct
  source 1..20: mol_type = other DNA
taaaagatttcttattatga

SEQ ID NO: 124039 - DNA, 20 bp, synthetic construct
  source 1..20: mol_type = other DNA
gtaaaagatttcttattatg

SEQ ID NO: 124040 - DNA, 20 bp, synthetic construct
  source 1..20: mol_type = other DNA
cgtaaaagatttcttattat

SEQ ID NO: 124041 - DNA, 20 bp, synthetic construct
  source 1..20: mol_type = other DNA
acgtaaaagatttcttatta

SEQ ID NO: 124042 - DNA, 20 bp, synthetic construct
  source 1..20: mol_type = other DNA
tacgtaaaagatttcttatt

SEQ ID NO: 124043 - DNA, 20 bp, synthetic construct
  source 1..20: mol_type = other DNA
gtacgtaaaagatttcttat

SEQ ID NO: 124044 - DNA, 20 bp, synthetic construct
  source 1..20: mol_type = other DNA
ggtacgtaaaagatttctta

SEQ ID NO: 124045 - DNA, 20 bp, synthetic construct
  source 1..20: mol_type = other DNA
gggtacgtaaaagatttctt

SEQ ID NO: 124046 - DNA, 20 bp, synthetic construct
  source 1..20: mol_type = other DNA
agggtacgtaaaagatttct

SEQ ID NO: 124047 - DNA, 20 bp, synthetic construct
  source 1..20: mol_type = other DNA
tagggtacgtaaaagatttc

SEQ ID NO: 124048 - DNA, 20 bp, synthetic construct
  source 1..20: mol_type = other DNA
ctagggtacgtaaaagattt

SEQ ID NO: 124049 - DNA, 20 bp, synthetic construct
  source 1..20: mol_type = other DNA
cctagggtacgtaaaagatt

SEQ ID NO: 124050 - DNA, 20 bp, synthetic construct
  source 1..20: mol_type = other DNA
acctagggtacgtaaaagat

SEQ ID NO: 124051 - DNA, 20 bp, synthetic construct
  source 1..20: mol_type = other DNA
aacctagggtacgtaaaaga

SEQ ID NO: 124052 - DNA, 20 bp, synthetic construct
  source 1..20: mol_type = other DNA
taacctagggtacgtaaaag

SEQ ID NO: 124053 - DNA, 20 bp, synthetic construct
  source 1..20: mol_type = other DNA
ataacctagggtacgtaaaa

SEQ ID NO: 124054 - DNA, 20 bp, synthetic construct
  source 1..20: mol_type = other DNA
cataacctagggtacgtaaa

SEQ ID NO: 124055 - DNA, 20 bp, synthetic construct
  source 1..20: mol_type = other DNA
tcataacctagggtacgtaa

SEQ ID NO: 124056 - DNA, 20 bp, synthetic construct
  source 1..20: mol_type = other DNA
ttcataacctagggtacgta

SEQ ID NO: 124057 - DNA, 20 bp, synthetic construct
  source 1..20: mol_type = other DNA
attcataacctagggtacgt

SEQ ID NO: 124058 - DNA, 20 bp, synthetic construct
  source 1..20: mol_type = other DNA
cattcataacctagggtacg

SEQ ID NO: 124059 - DNA, 20 bp, synthetic construct
  source 1..20: mol_type = other DNA
acattcataacctagggtac

SEQ ID NO: 124060 - DNA, 20 bp, synthetic construct
  source 1..20: mol_type = other DNA
aacattcataacctagggta

SEQ ID NO: 124061 - DNA, 20 bp, synthetic construct
  source 1..20: mol_type = other DNA
aaacattcataacctagggt

SEQ ID NO: 124062 - DNA, 20 bp, synthetic construct
  source 1..20: mol_type = other DNA
aaaacattcataacctaggg

SEQ ID NO: 124063 - DNA, 20 bp, synthetic construct
  source 1..20: mol_type = other DNA
aaaaacattcataacctagg

SEQ ID NO: 124064 - DNA, 20 bp, synthetic construct
  source 1..20: mol_type = other DNA
taaaaacattcataacctag

SEQ ID NO: 124065 - DNA, 20 bp, synthetic construct
  source 1..20: mol_type = other DNA
ataaaaacattcataaccta

SEQ ID NO: 124066 - DNA, 20 bp, synthetic construct
  source 1..20: mol_type = other DNA
cataaaaacattcataacct

SEQ ID NO: 124067 - DNA, 20 bp, synthetic construct
  source 1..20: mol_type = other DNA
ccataaaaacattcataacc

SEQ ID NO: 124068 - DNA, 20 bp, synthetic construct
  source 1..20: mol_type = other DNA
accataaaaacattcataac

SEQ ID NO: 124069 - DNA, 20 bp, synthetic construct
  source 1..20: mol_type = other DNA
aaccataaaaacattcataa

SEQ ID NO: 124070 - DNA, 20 bp, synthetic construct
  source 1..20: mol_type = other DNA
taaccataaaaacattcata

SEQ ID NO: 124071 - DNA, 20 bp, synthetic construct
  source 1..20: mol_type = other DNA
ctaaccataaaaacattcat

SEQ ID NO: 124072 - DNA, 20 bp, synthetic construct
  source 1..20: mol_type = other DNA
cctaaccataaaaacattca

SEQ ID NO: 124073 - DNA, 20 bp, synthetic construct
  source 1..20: mol_type = other DNA
acctaaccataaaaacattc

SEQ ID NO: 124074 - DNA, 20 bp, synthetic construct
  source 1..20: mol_type = other DNA
tacctaaccataaaaacatt

SEQ ID NO: 124075 - DNA, 20 bp, synthetic construct
  source 1..20: mol_type = other DNA
atacctaaccataaaaacat

SEQ ID NO: 124076 - DNA, 20 bp, synthetic construct
  source 1..20: mol_type = other DNA
tatacctaaccataaaaaca

SEQ ID NO: 124077 - DNA, 20 bp, synthetic construct
  source 1..20: mol_type = other DNA
atatacctaaccataaaaac

SEQ ID NO: 124078 - DNA, 20 bp, synthetic construct
  source 1..20: mol_type = other DNA
catatacctaaccataaaaa

SEQ ID NO: 124079 - DNA, 20 bp, synthetic construct
  source 1..20: mol_type = other DNA
ccatatacctaaccataaaa

SEQ ID NO: 124080 - DNA, 20 bp, synthetic construct
  source 1..20: mol_type = other DNA
accatatacctaaccataaa

SEQ ID NO: 124081 - DNA, 20 bp, synthetic construct
  source 1..20: mol_type = other DNA
aaccatatacctaaccataa

SEQ ID NO: 124082 - DNA, 20 bp, synthetic construct
  source 1..20: mol_type = other DNA
caaccatatacctaaccata

SEQ ID NO: 124083 - DNA, 20 bp, synthetic construct
  source 1..20: mol_type = other DNA
tcaaccatatacctaaccat

SEQ ID NO: 124084 - DNA, 20 bp, synthetic construct
  source 1..20: mol_type = other DNA
atcaaccatatacctaacca

SEQ ID NO: 124085 - DNA, 20 bp, synthetic construct
  source 1..20: mol_type = other DNA
aatcaaccatatacctaacc

SEQ ID NO: 124086 - DNA, 20 bp, synthetic construct
  source 1..20: mol_type = other DNA
aaatcaaccatatacctaac

SEQ ID NO: 124087 - DNA, 20 bp, synthetic construct
  source 1..20: mol_type = other DNA
gaaatcaaccatatacctaa

SEQ ID NO: 124088 - DNA, 20 bp, synthetic construct
  source 1..20: mol_type = other DNA
tgaaatcaaccatataccta

SEQ ID NO: 124089 - DNA, 20 bp, synthetic construct
  source 1..20: mol_type = other DNA
ctgaaatcaaccatatacct

SEQ ID NO: 124090 - DNA, 20 bp, synthetic construct
  source 1..20: mol_type = other DNA
cctgaaatcaaccatatacc

SEQ ID NO: 124091 - DNA, 20 bp, synthetic construct
  source 1..20: mol_type = other DNA
acctgaaatcaaccatatac

SEQ ID NO: 124092 - DNA, 20 bp, synthetic construct
  source 1..20: mol_type = other DNA
aacctgaaatcaaccatata

SEQ ID NO: 124093 - DNA, 20 bp, synthetic construct
  source 1..20: mol_type = other DNA
taacctgaaatcaaccatat

SEQ ID NO: 124094 - DNA, 20 bp, synthetic construct
  source 1..20: mol_type = other DNA
ctaacctgaaatcaaccata

SEQ ID NO: 124095 - DNA, 20 bp, synthetic construct
  source 1..20: mol_type = other DNA
cctaacctgaaatcaaccat

SEQ ID NO: 124096 - DNA, 20 bp, synthetic construct
  source 1..20: mol_type = other DNA
acctaacctgaaatcaacca

SEQ ID NO: 124097 - DNA, 20 bp, synthetic construct
  source 1..20: mol_type = other DNA
aacctaacctgaaatcaacc

SEQ ID NO: 124098 - DNA, 20 bp, synthetic construct
  source 1..20: mol_type = other DNA
aaacctaacctgaaatcaac

SEQ ID NO: 124099 - DNA, 20 bp, synthetic construct
  source 1..20: mol_type = other DNA
aaaacctaacctgaaatcaa

SEQ ID NO: 124100 - DNA, 20 bp, synthetic construct
  source 1..20: mol_type = other DNA
caaaacctaacctgaaatca

SEQ ID NO: 124101 - DNA, 20 bp, synthetic construct
  source 1..20: mol_type = other DNA
acaaaacctaacctgaaatc

SEQ ID NO: 124102 - DNA, 20 bp, synthetic construct
  source 1..20: mol_type = other DNA
cacaaaacctaacctgaaat

SEQ ID NO: 124103 - DNA, 20 bp, synthetic construct
  source 1..20: mol_type = other DNA
acacaaaacctaacctgaaa

SEQ ID NO: 124104 - DNA, 20 bp, synthetic construct
  source 1..20: mol_type = other DNA
tacacaaaacctaacctgaa

SEQ ID NO: 124105 - DNA, 20 bp, synthetic construct
  source 1..20: mol_type = other DNA
ctacacaaaacctaacctga

SEQ ID NO: 124106 - DNA, 20 bp, synthetic construct
  source 1..20: mol_type = other DNA
cctacacaaaacctaacctg

SEQ ID NO: 124107 - DNA, 20 bp, synthetic construct
  source 1..20: mol_type = other DNA
ccctacacaaaacctaacct

SEQ ID NO: 124108 - DNA, 20 bp, synthetic construct
  source 1..20: mol_type = other DNA
accctacacaaaacctaacc

SEQ ID NO: 124109 - DNA, 20 bp, synthetic construct
  source 1..20: mol_type = other DNA
caccctacacaaaacctaac

SEQ ID NO: 124110 - DNA, 20 bp, synthetic construct
  source 1..20: mol_type = other DNA
acaccctacacaaaacctaa

SEQ ID NO: 124111 - DNA, 20 bp, synthetic construct
  source 1..20: mol_type = other DNA
cacaccctacacaaaaccta

SEQ ID NO: 124112 - DNA, 20 bp, synthetic construct
  source 1..20: mol_type = other DNA
tcacaccctacacaaaacct

SEQ ID NO: 124113 - DNA, 20 bp, synthetic construct
  source 1..20: mol_type = other DNA
atcacaccctacacaaaacc

SEQ ID NO: 124114 - DNA, 20 bp, synthetic construct
  source 1..20: mol_type = other DNA
catcacaccctacacaaaac

SEQ ID NO: 124115 - DNA, 20 bp, synthetic construct
  source 1..20: mol_type = other DNA
acatcacaccctacacaaaa

SEQ ID NO: 124116 - DNA, 20 bp, synthetic construct
  source 1..20: mol_type = other DNA
tacatcacaccctacacaaa

SEQ ID NO: 124117 - DNA, 20 bp, synthetic construct
  source 1..20: mol_type = other DNA
ttacatcacaccctacacaa

SEQ ID NO: 124118 - DNA, 20 bp, synthetic construct
  source 1..20: mol_type = other DNA
tttacatcacaccctacaca

SEQ ID NO: 124119 - DNA, 20 bp, synthetic construct
  source 1..20: mol_type = other DNA
ctttacatcacaccctacac

SEQ ID NO: 124120 - DNA, 20 bp, synthetic construct
  source 1..20: mol_type = other DNA
cctttacatcacaccctaca

SEQ ID NO: 124121 - DNA, 20 bp, synthetic construct
  source 1..20: mol_type = other DNA
acctttacatcacaccctac

SEQ ID NO: 124122 - DNA, 20 bp, synthetic construct
  source 1..20: mol_type = other DNA
gacctttacatcacacccta

SEQ ID NO: 124123 - DNA, 20 bp, synthetic construct
  source 1..20: mol_type = other DNA
agacctttacatcacaccct

SEQ ID NO: 124124 - DNA, 20 bp, synthetic construct
  source 1..20: mol_type = other DNA
tagacctttacatcacaccc

SEQ ID NO: 124125 - DNA, 20 bp, synthetic construct
  source 1..20: mol_type = other DNA
ctagacctttacatcacacc

SEQ ID NO: 124126 - DNA, 20 bp, synthetic construct
  source 1..20: mol_type = other DNA
gctagacctttacatcacac

SEQ ID NO: 124127 - DNA, 20 bp, synthetic construct
  source 1..20: mol_type = other DNA
agctagacctttacatcaca

SEQ ID NO: 124128 - DNA, 20 bp, synthetic construct
  source 1..20: mol_type = other DNA
aagctagacctttacatcac

SEQ ID NO: 124129 - DNA, 20 bp, synthetic construct
  source 1..20: mol_type = other DNA
gaagctagacctttacatca

SEQ ID NO: 124130 - DNA, 20 bp, synthetic construct
  source 1..20: mol_type = other DNA
tgaagctagacctttacatc

SEQ ID NO: 124131 - DNA, 20 bp, synthetic construct
  source 1..20: mol_type = other DNA
atgaagctagacctttacat

SEQ ID NO: 124132 - DNA, 20 bp, synthetic construct
  source 1..20: mol_type = other DNA
aatgaagctagacctttaca

SEQ ID NO: 124133 - DNA, 20 bp, synthetic construct
  source 1..20: mol_type = other DNA
aaatgaagctagacctttac

SEQ ID NO: 124134 - DNA, 20 bp, synthetic construct
  source 1..20: mol_type = other DNA
aaaatgaagctagaccttta

SEQ ID NO: 124135 - DNA, 20 bp, synthetic construct
  source 1..20: mol_type = other DNA
gaaaatgaagctagaccttt

SEQ ID NO: 124136 - DNA, 20 bp, synthetic construct
  source 1..20: mol_type = other DNA
agaaaatgaagctagacctt

SEQ ID NO: 124137 - DNA, 20 bp, synthetic construct
  source 1..20: mol_type = other DNA
gagaaaatgaagctagacct

SEQ ID NO: 124138 - DNA, 20 bp, synthetic construct
  source 1..20: mol_type = other DNA
ggagaaaatgaagctagacc

SEQ ID NO: 124139 - DNA, 20 bp, synthetic construct
  source 1..20: mol_type = other DNA
tggagaaaatgaagctagac

SEQ ID NO: 124140 - DNA, 20 bp, synthetic construct
  source 1..20: mol_type = other DNA
gtggagaaaatgaagctaga

SEQ ID NO: 124141 - DNA, 20 bp, synthetic construct
  source 1..20: mol_type = other DNA
ggtggagaaaatgaagctag

SEQ ID NO: 124142 - DNA, 20 bp, synthetic construct
  source 1..20: mol_type = other DNA
tggtggagaaaatgaagcta

SEQ ID NO: 124143 - DNA, 20 bp, synthetic construct
  source 1..20: mol_type = other DNA
atggtggagaaaatgaagct

SEQ ID NO: 124144 - DNA, 20 bp, synthetic construct
  source 1..20: mol_type = other DNA
tatggtggagaaaatgaagc

SEQ ID NO: 124145 - DNA, 20 bp, synthetic construct
  source 1..20: mol_type = other DNA
ttatggtggagaaaatgaag

SEQ ID NO: 124146 - DNA, 20 bp, synthetic construct
  source 1..20: mol_type = other DNA
tttatggtggagaaaatgaa

SEQ ID NO: 124147 - DNA, 20 bp, synthetic construct
  source 1..20: mol_type = other DNA
atttatggtggagaaaatga

SEQ ID NO: 124148 - DNA, 20 bp, synthetic construct
  source 1..20: mol_type = other DNA
tatttatggtggagaaaatg

SEQ ID NO: 124149 - DNA, 20 bp, synthetic construct
  source 1..20: mol_type = other DNA
atatttatggtggagaaaat

SEQ ID NO: 124150 - DNA, 20 bp, synthetic construct
  source 1..20: mol_type = other DNA
aatatttatggtggagaaaa

SEQ ID NO: 124151 - DNA, 20 bp, synthetic construct
  source 1..20: mol_type = other DNA
aaatatttatggtggagaaa

SEQ ID NO: 124152 - DNA, 20 bp, synthetic construct
  source 1..20: mol_type = other DNA
taaatatttatggtggagaa

SEQ ID NO: 124153 - DNA, 20 bp, synthetic construct
  source 1..20: mol_type = other DNA
gtaaatatttatggtggaga

SEQ ID NO: 124154 - DNA, 20 bp, synthetic construct
  source 1..20: mol_type = other DNA
agtaaatatttatggtggag

SEQ ID NO: 124155 - DNA, 20 bp, synthetic construct
  source 1..20: mol_type = other DNA
gagtaaatatttatggtgga

SEQ ID NO: 124156 - DNA, 20 bp, synthetic construct
  source 1..20: mol_type = other DNA
cgagtaaatatttatggtgg

SEQ ID NO: 124157 - DNA, 20 bp, synthetic construct
  source 1..20: mol_type = other DNA
ccgagtaaatatttatggtg

SEQ ID NO: 124158 - DNA, 20 bp, synthetic construct
  source 1..20: mol_type = other DNA
accgagtaaatatttatggt

SEQ ID NO: 124159 - DNA, 20 bp, synthetic construct
  source 1..20: mol_type = other DNA
aaccgagtaaatatttatgg

SEQ ID NO: 124160 - DNA, 20 bp, synthetic construct
  source 1..20: mol_type = other DNA
aaaccgagtaaatatttatg

SEQ ID NO: 124161 - DNA, 20 bp, synthetic construct
  source 1..20: mol_type = other DNA
gaaaccgagtaaatatttat

SEQ ID NO: 124162 - DNA, 20 bp, synthetic construct
  source 1..20: mol_type = other DNA
agaaaccgagtaaatattta

SEQ ID NO: 124163 - DNA, 20 bp, synthetic construct
  source 1..20: mol_type = other DNA
gagaaaccgagtaaatattt

SEQ ID NO: 124164 - DNA, 20 bp, synthetic construct
  source 1..20: mol_type = other DNA
agagaaaccgagtaaatatt

SEQ ID NO: 124165 - DNA, 20 bp, synthetic construct
  source 1..20: mol_type = other DNA
cagagaaaccgagtaaatat

SEQ ID NO: 124166 - DNA, 20 bp, synthetic construct
  source 1..20: mol_type = other DNA
ccagagaaaccgagtaaata

SEQ ID NO: 124167 - DNA, 20 bp, synthetic construct
  source 1..20: mol_type = other DNA
gccagagaaaccgagtaaat

SEQ ID NO: 124168 - DNA, 20 bp, synthetic construct
  source 1..20: mol_type = other DNA
tgccagagaaaccgagtaaa

SEQ ID NO: 124169 - DNA, 20 bp, synthetic construct
  source 1..20: mol_type = other DNA
gtgccagagaaaccgagtaa

SEQ ID NO: 124170 - DNA, 20 bp, synthetic construct
  source 1..20: mol_type = other DNA
ggtgccagagaaaccgagta

SEQ ID NO: 124171 - DNA, 20 bp, synthetic construct
  source 1..20: mol_type = other DNA
tggtgccagagaaaccgagt

SEQ ID NO: 124172 - DNA, 20 bp, synthetic construct
  source 1..20: mol_type = other DNA
ctggtgccagagaaaccgag

SEQ ID NO: 124173 - DNA, 20 bp, synthetic construct
  source 1..20: mol_type = other DNA
gctggtgccagagaaaccga

SEQ ID NO: 124174 - DNA, 20 bp, synthetic construct
  source 1..20: mol_type = other DNA
ggctggtgccagagaaaccg

SEQ ID NO: 124175 - DNA, 20 bp, synthetic construct
  source 1..20: mol_type = other DNA
aggctggtgccagagaaacc

SEQ ID NO: 124176 - DNA, 20 bp, synthetic construct
  source 1..20: mol_type = other DNA
gaggctggtgccagagaaac

SEQ ID NO: 124177 - DNA, 20 bp, synthetic construct
  source 1..20: mol_type = other DNA
agaggctggtgccagagaaa

SEQ ID NO: 124178 - DNA, 20 bp, synthetic construct
  source 1..20: mol_type = other DNA
cagaggctggtgccagagaa

SEQ ID NO: 124179 - DNA, 20 bp, synthetic construct
  source 1..20: mol_type = other DNA
acagaggctggtgccagaga

SEQ ID NO: 124180 - DNA, 20 bp, synthetic construct
  source 1..20: mol_type = other DNA
aacagaggctggtgccagag

SEQ ID NO: 124181 - DNA, 20 bp, synthetic construct
  source 1..20: mol_type = other DNA
aaacagaggctggtgccaga

SEQ ID NO: 124182 - DNA, 20 bp, synthetic construct
  source 1..20: mol_type = other DNA
aaaacagaggctggtgccag

SEQ ID NO: 124183 - DNA, 20 bp, synthetic construct
  source 1..20: mol_type = other DNA
gaaaacagaggctggtgcca

SEQ ID NO: 124184 - DNA, 20 bp, synthetic construct
  source 1..20: mol_type = other DNA
ggaaaacagaggctggtgcc

SEQ ID NO: 124185 - DNA, 20 bp, synthetic construct
  source 1..20: mol_type = other DNA
tggaaaacagaggctggtgc

SEQ ID NO: 124186 - DNA, 20 bp, synthetic construct
  source 1..20: mol_type = other DNA
atggaaaacagaggctggtg

SEQ ID NO: 124187 - DNA, 20 bp, synthetic construct
  source 1..20: mol_type = other DNA
aatggaaaacagaggctggt

SEQ ID NO: 124188 - DNA, 20 bp, synthetic construct
  source 1..20: mol_type = other DNA
caatggaaaacagaggctgg

SEQ ID NO: 124189 - DNA, 20 bp, synthetic construct
  source 1..20: mol_type = other DNA
ccaatggaaaacagaggctg

SEQ ID NO: 124190 - DNA, 20 bp, synthetic construct
  source 1..20: mol_type = other DNA
accaatggaaaacagaggct

SEQ ID NO: 124191 - DNA, 20 bp, synthetic construct
  source 1..20: mol_type = other DNA
caccaatggaaaacagaggc

SEQ ID NO: 124192 - DNA, 20 bp, synthetic construct
  source 1..20: mol_type = other DNA
ccaccaatggaaaacagagg

SEQ ID NO: 124193 - DNA, 20 bp, synthetic construct
  source 1..20: mol_type = other DNA
gccaccaatggaaaacagag

SEQ ID NO: 124194 - DNA, 20 bp, synthetic construct
  source 1..20: mol_type = other DNA
agccaccaatggaaaacaga

SEQ ID NO: 124195 - DNA, 20 bp, synthetic construct
  source 1..20: mol_type = other DNA
aagccaccaatggaaaacag

SEQ ID NO: 124196 - DNA, 20 bp, synthetic construct
  source 1..20: mol_type = other DNA
aaagccaccaatggaaaaca

SEQ ID NO: 124197 - DNA, 20 bp, synthetic construct
  source 1..20: mol_type = other DNA
taaagccaccaatggaaaac

SEQ ID NO: 124198 - DNA, 20 bp, synthetic construct
  source 1..20: mol_type = other DNA
ataaagccaccaatggaaaa

SEQ ID NO: 124199 - DNA, 20 bp, synthetic construct
  source 1..20: mol_type = other DNA
aataaagccaccaatggaaa

SEQ ID NO: 124200 - DNA, 20 bp, synthetic construct
  source 1..20: mol_type = other DNA
aaataaagccaccaatggaa

SEQ ID NO: 124201 - DNA, 20 bp, synthetic construct
  source 1..20: mol_type = other DNA
aaaataaagccaccaatgga

SEQ ID NO: 124202 - DNA, 20 bp, synthetic construct
  source 1..20: mol_type = other DNA
aaaaataaagccaccaatgg

SEQ ID NO: 124203 - DNA, 20 bp, synthetic construct
  source 1..20: mol_type = other DNA
aaaaaataaagccaccaatg

SEQ ID NO: 124204 - DNA, 20 bp, synthetic construct
  source 1..20: mol_type = other DNA
aaaaaaataaagccaccaat

SEQ ID NO: 124205 - DNA, 20 bp, synthetic construct
  source 1..20: mol_type = other DNA
aaaaaaaataaagccaccaa

SEQ ID NO: 124206 - DNA, 20 bp, synthetic construct
  source 1..20: mol_type = other DNA
gaaaaaaaataaagccacca

SEQ ID NO: 124207 - DNA, 20 bp, synthetic construct
  source 1..20: mol_type = other DNA
agaaaaaaaataaagccacc

SEQ ID NO: 124208 - DNA, 20 bp, synthetic construct
  source 1..20: mol_type = other DNA
cagaaaaaaaataaagccac

SEQ ID NO: 124209 - DNA, 20 bp, synthetic construct
  source 1..20: mol_type = other DNA
acagaaaaaaaataaagcca

SEQ ID NO: 124210 - DNA, 20 bp, synthetic construct
  source 1..20: mol_type = other DNA
aacagaaaaaaaataaagcc

SEQ ID NO: 124211 - DNA, 20 bp, synthetic construct
  source 1..20: mol_type = other DNA
gaacagaaaaaaaataaagc

SEQ ID NO: 124212 - DNA, 20 bp, synthetic construct
  source 1..20: mol_type = other DNA
agaacagaaaaaaaataaag

SEQ ID NO: 124213 - DNA, 20 bp, synthetic construct
  source 1..20: mol_type = other DNA
aagaacagaaaaaaaataaa

SEQ ID NO: 124214 - DNA, 20 bp, synthetic construct
  source 1..20: mol_type = other DNA
caagaacagaaaaaaaataa

SEQ ID NO: 124215 - DNA, 20 bp, synthetic construct
  source 1..20: mol_type = other DNA
tcaagaacagaaaaaaaata

SEQ ID NO: 124216 - DNA, 20 bp, synthetic construct
  source 1..20: mol_type = other DNA
ttcaagaacagaaaaaaaat

SEQ ID NO: 124217 - DNA, 20 bp, synthetic construct
  source 1..20: mol_type = other DNA
tttcaagaacagaaaaaaaa

SEQ ID NO: 124218 - DNA, 20 bp, synthetic construct
  source 1..20: mol_type = other DNA
gtttcaagaacagaaaaaaa

SEQ ID NO: 124219 - DNA, 20 bp, synthetic construct
  source 1..20: mol_type = other DNA
tgtttcaagaacagaaaaaa

SEQ ID NO: 124220 - DNA, 20 bp, synthetic construct
  source 1..20: mol_type = other DNA
ttgtttcaagaacagaaaaa

SEQ ID NO: 124221 - DNA, 20 bp, synthetic construct
  source 1..20: mol_type = other DNA
cttgtttcaagaacagaaaa

SEQ ID NO: 124222 - DNA, 20 bp, synthetic construct
  source 1..20: mol_type = other DNA
tcttgtttcaagaacagaaa

SEQ ID NO: 124223 - DNA, 20 bp, synthetic construct
  source 1..20: mol_type = other DNA
ctcttgtttcaagaacagaa

SEQ ID NO: 124224 - DNA, 20 bp, synthetic construct
  source 1..20: mol_type = other DNA
actcttgtttcaagaacaga

SEQ ID NO: 124225 - DNA, 20 bp, synthetic construct
  source 1..20: mol_type = other DNA
gactcttgtttcaagaacag

SEQ ID NO: 124226 - DNA, 20 bp, synthetic construct
  source 1..20: mol_type = other DNA
agactcttgtttcaagaaca

SEQ ID NO: 124227 - DNA, 20 bp, synthetic construct
  source 1..20: mol_type = other DNA
gagactcttgtttcaagaac

SEQ ID NO: 124228 - DNA, 20 bp, synthetic construct
  source 1..20: mol_type = other DNA
cgagactcttgtttcaagaa

SEQ ID NO: 124229 - DNA, 20 bp, synthetic construct
  source 1..20: mol_type = other DNA
tcgagactcttgtttcaaga

SEQ ID NO: 124230 - DNA, 20 bp, synthetic construct
  source 1..20: mol_type = other DNA
atcgagactcttgtttcaag

SEQ ID NO: 124231 - DNA, 20 bp, synthetic construct
  source 1..20: mol_type = other DNA
gatcgagactcttgtttcaa

SEQ ID NO: 124232 - DNA, 20 bp, synthetic construct
  source 1..20: mol_type = other DNA
agatcgagactcttgtttca

SEQ ID NO: 124233 - DNA, 20 bp, synthetic construct
  source 1..20: mol_type = other DNA
aagatcgagactcttgtttc

SEQ ID NO: 124234 - DNA, 20 bp, synthetic construct
  source 1..20: mol_type = other DNA
caagatcgagactcttgttt

SEQ ID NO: 124235 - DNA, 20 bp, synthetic construct
  source 1..20: mol_type = other DNA
acaagatcgagactcttgtt

SEQ ID NO: 124236 - DNA, 20 bp, synthetic construct
  source 1..20: mol_type = other DNA
aacaagatcgagactcttgt

SEQ ID NO: 124237 - DNA, 20 bp, synthetic construct
  source 1..20: mol_type = other DNA
taacaagatcgagactcttg

SEQ ID NO: 124238 - DNA, 20 bp, synthetic construct
  source 1..20: mol_type = other DNA
gtaacaagatcgagactctt

SEQ ID NO: 124239 - DNA, 20 bp, synthetic construct
  source 1..20: mol_type = other DNA
ggtaacaagatcgagactct

SEQ ID NO: 124240 - DNA, 20 bp, synthetic construct
  source 1..20: mol_type = other DNA
gggtaacaagatcgagactc

SEQ ID NO: 124241 - DNA, 20 bp, synthetic construct
  source 1..20: mol_type = other DNA
tgggtaacaagatcgagact

SEQ ID NO: 124242 - DNA, 20 bp, synthetic construct
  source 1..20: mol_type = other DNA
ctgggtaacaagatcgagac

SEQ ID NO: 124243 - DNA, 20 bp, synthetic construct
  source 1..20: mol_type = other DNA
cctgggtaacaagatcgaga

SEQ ID NO: 124244 - DNA, 20 bp, synthetic construct
  source 1..20: mol_type = other DNA
gcctgggtaacaagatcgag

SEQ ID NO: 124245 - DNA, 20 bp, synthetic construct
  source 1..20: mol_type = other DNA
agcctgggtaacaagatcga

SEQ ID NO: 124246 - DNA, 20 bp, synthetic construct
  source 1..20: mol_type = other DNA
cagcctgggtaacaagatcg

SEQ ID NO: 124247 - DNA, 20 bp, synthetic construct
  source 1..20: mol_type = other DNA
ccagcctgggtaacaagatc

SEQ ID NO: 124248 - DNA, 20 bp, synthetic construct
  source 1..20: mol_type = other DNA
tccagcctgggtaacaagat

SEQ ID NO: 124249 - DNA, 20 bp, synthetic construct
  source 1..20: mol_type = other DNA
ctccagcctgggtaacaaga

SEQ ID NO: 124250 - DNA, 20 bp, synthetic construct
  source 1..20: mol_type = other DNA
actccagcctgggtaacaag

SEQ ID NO: 124251 - DNA, 20 bp, synthetic construct
  source 1..20: mol_type = other DNA
cactccagcctgggtaacaa

SEQ ID NO: 124252 - DNA, 20 bp, synthetic construct
  source 1..20: mol_type = other DNA
gcactccagcctgggtaaca

SEQ ID NO: 124253 - DNA, 20 bp, synthetic construct
  source 1..20: mol_type = other DNA
tgcactccagcctgggtaac

SEQ ID NO: 124254 - DNA, 20 bp, synthetic construct
  source 1..20: mol_type = other DNA
ctgcactccagcctgggtaa

SEQ ID NO: 124255 - DNA, 20 bp, synthetic construct
  source 1..20: mol_type = other DNA
actgcactccagcctgggta

SEQ ID NO: 124256 - DNA, 20 bp, synthetic construct
  source 1..20: mol_type = other DNA
tactgcactccagcctgggt

SEQ ID NO: 124257 - DNA, 20 bp, synthetic construct
  source 1..20: mol_type = other DNA
ctactgcactccagcctggg

SEQ ID NO: 124258 - DNA, 20 bp, synthetic construct
  source 1..20: mol_type = other DNA
actactgcactccagcctgg

SEQ ID NO: 124259 - DNA, 20 bp, synthetic construct
  source 1..20: mol_type = other DNA
cactactgcactccagcctg

SEQ ID NO: 124260 - DNA, 20 bp, synthetic construct
  source 1..20: mol_type = other DNA
acactactgcactccagcct

SEQ ID NO: 124261 - DNA, 20 bp, synthetic construct
  source 1..20: mol_type = other DNA
cacactactgcactccagcc

SEQ ID NO: 124262 - DNA, 20 bp, synthetic construct
  source 1..20: mol_type = other DNA
tcacactactgcactccagc

SEQ ID NO: 124263 - DNA, 20 bp, synthetic construct
  source 1..20: mol_type = other DNA
gtcacactactgcactccag

SEQ ID NO: 124264 - DNA, 20 bp, synthetic construct
  source 1..20: mol_type = other DNA
ggtcacactactgcactcca

SEQ ID NO: 124265 - DNA, 20 bp, synthetic construct
  source 1..20: mol_type = other DNA
aggtcacactactgcactcc

SEQ ID NO: 124266 - DNA, 20 bp, synthetic construct
  source 1..20: mol_type = other DNA
aaggtcacactactgcactc

SEQ ID NO: 124267 - DNA, 20 bp, synthetic construct
  source 1..20: mol_type = other DNA
caaggtcacactactgcact

SEQ ID NO: 124268 - DNA, 20 bp, synthetic construct
  source 1..20: mol_type = other DNA
ccaaggtcacactactgcac

SEQ ID NO: 124269 - DNA, 20 bp, synthetic construct
  source 1..20: mol_type = other DNA
gccaaggtcacactactgca

SEQ ID NO: 124270 - DNA, 20 bp, synthetic construct
  source 1..20: mol_type = other DNA
agccaaggtcacactactgc

SEQ ID NO: 124271 - DNA, 20 bp, synthetic construct
  source 1..20: mol_type = other DNA
gagccaaggtcacactactg

SEQ ID NO: 124272 - DNA, 20 bp, synthetic construct
  source 1..20: mol_type = other DNA
tgagccaaggtcacactact

SEQ ID NO: 124273 - DNA, 20 bp, synthetic construct
  source 1..20: mol_type = other DNA
gtgagccaaggtcacactac

SEQ ID NO: 124274 - DNA, 20 bp, synthetic construct
  source 1..20: mol_type = other DNA
agtgagccaaggtcacacta

SEQ ID NO: 124275 - DNA, 20 bp, synthetic construct
  source 1..20: mol_type = other DNA
cagtgagccaaggtcacact

SEQ ID NO: 124276 - DNA, 20 bp, synthetic construct
  source 1..20: mol_type = other DNA
gcagtgagccaaggtcacac

SEQ ID NO: 124277 - DNA, 20 bp, synthetic construct
  source 1..20: mol_type = other DNA
tgcagtgagccaaggtcaca

SEQ ID NO: 124278 - DNA, 20 bp, synthetic construct
  source 1..20: mol_type = other DNA
ttgcagtgagccaaggtcac

SEQ ID NO: 124279 - DNA, 20 bp, synthetic construct
  source 1..20: mol_type = other DNA
gttgcagtgagccaaggtca

SEQ ID NO: 124280 - DNA, 20 bp, synthetic construct
  source 1..20: mol_type = other DNA
ggttgcagtgagccaaggtc

SEQ ID NO: 124281 - DNA, 20 bp, synthetic construct
  source 1..20: mol_type = other DNA
aggttgcagtgagccaaggt

SEQ ID NO: 124282 - DNA, 20 bp, synthetic construct
  source 1..20: mol_type = other DNA
gaggttgcagtgagccaagg

SEQ ID NO: 124283 - DNA, 20 bp, synthetic construct
  source 1..20: mol_type = other DNA
ggaggttgcagtgagccaag

SEQ ID NO: 124284 - DNA, 20 bp, synthetic construct
  source 1..20: mol_type = other DNA
tggaggttgcagtgagccaa

SEQ ID NO: 124285 - DNA, 20 bp, synthetic construct
  source 1..20: mol_type = other DNA
gtggaggttgcagtgagcca

SEQ ID NO: 124286 - DNA, 20 bp, synthetic construct
  source 1..20: mol_type = other DNA
agtggaggttgcagtgagcc

SEQ ID NO: 124287 - DNA, 20 bp, synthetic construct
  source 1..20: mol_type = other DNA
aagtggaggttgcagtgagc

SEQ ID NO: 124288 - DNA, 20 bp, synthetic construct
  source 1..20: mol_type = other DNA
gaagtggaggttgcagtgag

SEQ ID NO: 124289 - DNA, 20 bp, synthetic construct
  source 1..20: mol_type = other DNA
ggaagtggaggttgcagtga

SEQ ID NO: 124290 - DNA, 20 bp, synthetic construct
  source 1..20: mol_type = other DNA
gggaagtggaggttgcagtg

SEQ ID NO: 124291 - DNA, 20 bp, synthetic construct
  source 1..20: mol_type = other DNA
tgggaagtggaggttgcagt

SEQ ID NO: 124292 - DNA, 20 bp, synthetic construct
  source 1..20: mol_type = other DNA
ctgggaagtggaggttgcag

SEQ ID NO: 124293 - DNA, 20 bp, synthetic construct
  source 1..20: mol_type = other DNA
cctgggaagtggaggttgca

SEQ ID NO: 124294 - DNA, 20 bp, synthetic construct
  source 1..20: mol_type = other DNA
ccctgggaagtggaggttgc

SEQ ID NO: 124295 - DNA, 20 bp, synthetic construct
  source 1..20: mol_type = other DNA
accctgggaagtggaggttg

SEQ ID NO: 124296 - DNA, 20 bp, synthetic construct
  source 1..20: mol_type = other DNA
gaccctgggaagtggaggtt

SEQ ID NO: 124297 - DNA, 20 bp, synthetic construct
  source 1..20: mol_type = other DNA
tgaccctgggaagtggaggt

SEQ ID NO: 124298 - DNA, 20 bp, synthetic construct
  source 1..20: mol_type = other DNA
ttgaccctgggaagtggagg

SEQ ID NO: 124299 - DNA, 20 bp, synthetic construct
  source 1..20: mol_type = other DNA
cttgaccctgggaagtggag

SEQ ID NO: 124300 - DNA, 20 bp, synthetic construct
  source 1..20: mol_type = other DNA
gcttgaccctgggaagtgga

SEQ ID NO: 124301 - DNA, 20 bp, synthetic construct
  source 1..20: mol_type = other DNA
cgcttgaccctgggaagtgg

SEQ ID NO: 124302 - DNA, 20 bp, synthetic construct
  source 1..20: mol_type = other DNA
tcgcttgaccctgggaagtg

SEQ ID NO: 124303 - DNA, 20 bp, synthetic construct
  source 1..20: mol_type = other DNA
atcgcttgaccctgggaagt

SEQ ID NO: 124304 - DNA, 20 bp, synthetic construct
  source 1..20: mol_type = other DNA
aatcgcttgaccctgggaag

SEQ ID NO: 124305 - DNA, 20 bp, synthetic construct
  source 1..20: mol_type = other DNA
gaatcgcttgaccctgggaa

SEQ ID NO: 124306 - DNA, 20 bp, synthetic construct
  source 1..20: mol_type = other DNA
agaatcgcttgaccctggga

SEQ ID NO: 124307 - DNA, 20 bp, synthetic construct
  source 1..20: mol_type = other DNA
cagaatcgcttgaccctggg

SEQ ID NO: 124308 - DNA, 20 bp, synthetic construct
  source 1..20: mol_type = other DNA
gcagaatcgcttgaccctgg

SEQ ID NO: 124309 - DNA, 20 bp, synthetic construct
  source 1..20: mol_type = other DNA
ggcagaatcgcttgaccctg

SEQ ID NO: 124310 - DNA, 20 bp, synthetic construct
  source 1..20: mol_type = other DNA
aggcagaatcgcttgaccct

SEQ ID NO: 124311 - DNA, 20 bp, synthetic construct
  source 1..20: mol_type = other DNA
gaggcagaatcgcttgaccc

SEQ ID NO: 124312 - DNA, 20 bp, synthetic construct
  source 1..20: mol_type = other DNA
tgaggcagaatcgcttgacc

SEQ ID NO: 124313 - DNA, 20 bp, synthetic construct
  source 1..20: mol_type = other DNA
ctgaggcagaatcgcttgac

SEQ ID NO: 124314 - DNA, 20 bp, synthetic construct
  source 1..20: mol_type = other DNA
gctgaggcagaatcgcttga

SEQ ID NO: 124315 - DNA, 20 bp, synthetic construct
  source 1..20: mol_type = other DNA
ggctgaggcagaatcgcttg

SEQ ID NO: 124316 - DNA, 20 bp, synthetic construct
  source 1..20: mol_type = other DNA
aggctgaggcagaatcgctt

SEQ ID NO: 124317 - DNA, 20 bp, synthetic construct
  source 1..20: mol_type = other DNA
gaggctgaggcagaatcgct

SEQ ID NO: 124318 - DNA, 20 bp, synthetic construct
  source 1..20: mol_type = other DNA
agaggctgaggcagaatcgc

SEQ ID NO: 124319 - DNA, 20 bp, synthetic construct
  source 1..20: mol_type = other DNA
gagaggctgaggcagaatcg

SEQ ID NO: 124320 - DNA, 20 bp, synthetic construct
  source 1..20: mol_type = other DNA
cgagaggctgaggcagaatc

SEQ ID NO: 124321 - DNA, 20 bp, synthetic construct
  source 1..20: mol_type = other DNA
tcgagaggctgaggcagaat

SEQ ID NO: 124322 - DNA, 20 bp, synthetic construct
  source 1..20: mol_type = other DNA
ctcgagaggctgaggcagaa

SEQ ID NO: 124323 - DNA, 20 bp, synthetic construct
  source 1..20: mol_type = other DNA
actcgagaggctgaggcaga

SEQ ID NO: 124324 - DNA, 20 bp, synthetic construct
  source 1..20: mol_type = other DNA
tactcgagaggctgaggcag

SEQ ID NO: 124325 - DNA, 20 bp, synthetic construct
  source 1..20: mol_type = other DNA
ctactcgagaggctgaggca

SEQ ID NO: 124326 - DNA, 20 bp, synthetic construct
  source 1..20: mol_type = other DNA
gctactcgagaggctgaggc

SEQ ID NO: 124327 - DNA, 20 bp, synthetic construct
  source 1..20: mol_type = other DNA
agctactcgagaggctgagg

SEQ ID NO: 124328 - DNA, 20 bp, synthetic construct
  source 1..20: mol_type = other DNA
tagctactcgagaggctgag

SEQ ID NO: 124329 - DNA, 20 bp, synthetic construct
  source 1..20: mol_type = other DNA
ctagctactcgagaggctga

SEQ ID NO: 124330 - DNA, 20 bp, synthetic construct
  source 1..20: mol_type = other DNA
cctagctactcgagaggctg

SEQ ID NO: 124331 - DNA, 20 bp, synthetic construct
  source 1..20: mol_type = other DNA
tcctagctactcgagaggct

SEQ ID NO: 124332 - DNA, 20 bp, synthetic construct
  source 1..20: mol_type = other DNA
atcctagctactcgagaggc

SEQ ID NO: 124333 - DNA, 20 bp, synthetic construct
  source 1..20: mol_type = other DNA
aatcctagctactcgagagg

SEQ ID NO: 124334 - DNA, 20 bp, synthetic construct
  source 1..20: mol_type = other DNA
taatcctagctactcgagag

SEQ ID NO: 124335 - DNA, 20 bp, synthetic construct
  source 1..20: mol_type = other DNA
gtaatcctagctactcgaga

SEQ ID NO: 124336 - DNA, 20 bp, synthetic construct
  source 1..20: mol_type = other DNA
tgtaatcctagctactcgag

SEQ ID NO: 124337 - DNA, 20 bp, synthetic construct
  source 1..20: mol_type = other DNA
ctgtaatcctagctactcga

SEQ ID NO: 124338 - DNA, 20 bp, synthetic construct
  source 1..20: mol_type = other DNA
cctgtaatcctagctactcg

SEQ ID NO: 124339 - DNA, 20 bp, synthetic construct
  source 1..20: mol_type = other DNA
acctgtaatcctagctactc

SEQ ID NO: 124340 - DNA, 20 bp, synthetic construct
  source 1..20: mol_type = other DNA
cacctgtaatcctagctact

SEQ ID NO: 124341 - DNA, 20 bp, synthetic construct
  source 1..20: mol_type = other DNA
gcacctgtaatcctagctac

SEQ ID NO: 124342 - DNA, 20 bp, synthetic construct
  source 1..20: mol_type = other DNA
ggcacctgtaatcctagcta

SEQ ID NO: 124343 - DNA, 20 bp, synthetic construct
  source 1..20: mol_type = other DNA
gggcacctgtaatcctagct

SEQ ID NO: 124344 - DNA, 20 bp, synthetic construct
  source 1..20: mol_type = other DNA
cgggcacctgtaatcctagc

SEQ ID NO: 124345 - DNA, 20 bp, synthetic construct
  source 1..20: mol_type = other DNA
gcgggcacctgtaatcctag

SEQ ID NO: 124346 - DNA, 20 bp, synthetic construct
  source 1..20: mol_type = other DNA
ggcgggcacctgtaatccta

SEQ ID NO: 124347 - DNA, 20 bp, synthetic construct
  source 1..20: mol_type = other DNA
tggcgggcacctgtaatcct

SEQ ID NO: 124348 - DNA, 20 bp, synthetic construct
  source 1..20: mol_type = other DNA
gtggcgggcacctgtaatcc

SEQ ID NO: 124349 - DNA, 20 bp, synthetic construct
  source 1..20: mol_type = other DNA
agtggcgggcacctgtaatc

SEQ ID NO: 124350 - DNA, 20 bp, synthetic construct
  source 1..20: mol_type = other DNA
tagtggcgggcacctgtaat

SEQ ID NO: 124351 - DNA, 20 bp, synthetic construct
  source 1..20: mol_type = other DNA
gtagtggcgggcacctgtaa

SEQ ID NO: 124352 - DNA, 20 bp, synthetic construct
  source 1..20: mol_type = other DNA
tgtagtggcgggcacctgta

SEQ ID NO: 124353 - DNA, 20 bp, synthetic construct
  source 1..20: mol_type = other DNA
gtgtagtggcgggcacctgt

SEQ ID NO: 124354 - DNA, 20 bp, synthetic construct
  source 1..20: mol_type = other DNA
ggtgtagtggcgggcacctg

SEQ ID NO: 124355 - DNA, 20 bp, synthetic construct
  source 1..20: mol_type = other DNA
gggtgtagtggcgggcacct

SEQ ID NO: 124356 - DNA, 20 bp, synthetic construct
  source 1..20: mol_type = other DNA
tgggtgtagtggcgggcacc

SEQ ID NO: 124357 - DNA, 20 bp, synthetic construct
  source 1..20: mol_type = other DNA
ctgggtgtagtggcgggcac

SEQ ID NO: 124358 - DNA, 20 bp, synthetic construct
  source 1..20: mol_type = other DNA
gctgggtgtagtggcgggca

SEQ ID NO: 124359 - DNA, 20 bp, synthetic construct
  source 1..20: mol_type = other DNA
agctgggtgtagtggcgggc

SEQ ID NO: 124360 - DNA, 20 bp, synthetic construct
  source 1..20: mol_type = other DNA
tagctgggtgtagtggcggg

SEQ ID NO: 124361 - DNA, 20 bp, synthetic construct
  source 1..20: mol_type = other DNA
ttagctgggtgtagtggcgg

SEQ ID NO: 124362 - DNA, 20 bp, synthetic construct
  source 1..20: mol_type = other DNA
attagctgggtgtagtggcg

SEQ ID NO: 124363 - DNA, 20 bp, synthetic construct
  source 1..20: mol_type = other DNA
aattagctgggtgtagtggc

SEQ ID NO: 124364 - DNA, 20 bp, synthetic construct
  source 1..20: mol_type = other DNA
aaattagctgggtgtagtgg

SEQ ID NO: 124365 - DNA, 20 bp, synthetic construct
  source 1..20: mol_type = other DNA
caaattagctgggtgtagtg

SEQ ID NO: 124366 - DNA, 20 bp, synthetic construct
  source 1..20: mol_type = other DNA
acaaattagctgggtgtagt

SEQ ID NO: 124367 - DNA, 20 bp, synthetic construct
  source 1..20: mol_type = other DNA
tacaaattagctgggtgtag

SEQ ID NO: 124368 - DNA, 20 bp, synthetic construct
  source 1..20: mol_type = other DNA
atacaaattagctgggtgta

SEQ ID NO: 124369 - DNA, 20 bp, synthetic construct
  source 1..20: mol_type = other DNA
aatacaaattagctgggtgt

SEQ ID NO: 124370 - DNA, 20 bp, synthetic construct
  source 1..20: mol_type = other DNA
aaatacaaattagctgggtg

SEQ ID NO: 124371 - DNA, 20 bp, synthetic construct
  source 1..20: mol_type = other DNA
aaaatacaaattagctgggt

SEQ ID NO: 124372 - DNA, 20 bp, synthetic construct
  source 1..20: mol_type = other DNA
aaaaatacaaattagctggg

SEQ ID NO: 124373 - DNA, 20 bp, synthetic construct
  source 1..20: mol_type = other DNA
aaaaaatacaaattagctgg

SEQ ID NO: 124374 - DNA, 20 bp, synthetic construct
  source 1..20: mol_type = other DNA
aaaaaaatacaaattagctg

SEQ ID NO: 124375 - DNA, 20 bp, synthetic construct
  source 1..20: mol_type = other DNA
aaaaaaaatacaaattagct

SEQ ID NO: 124376 - DNA, 20 bp, synthetic construct
  source 1..20: mol_type = other DNA
aaaaaaaaatacaaattagc

SEQ ID NO: 124377 - DNA, 20 bp, synthetic construct
  source 1..20: mol_type = other DNA
aaaaaaaaaatacaaattag

SEQ ID NO: 124378 - DNA, 20 bp, synthetic construct
  source 1..20: mol_type = other DNA
aaaaaaaaaaatacaaatta

SEQ ID NO: 124379 - DNA, 20 bp, synthetic construct
  source 1..20: mol_type = other DNA
aaaaaaaaaaaatacaaatt

SEQ ID NO: 124380 - DNA, 20 bp, synthetic construct
  source 1..20: mol_type = other DNA
aaaaaaaaaaaaatacaaat

SEQ ID NO: 124381 - DNA, 20 bp, synthetic construct
  source 1..20: mol_type = other DNA
aaaaaaaaaaaaaatacaaa

SEQ ID NO: 124382 - DNA, 20 bp, synthetic construct
  source 1..20: mol_type = other DNA
aaaaaaaaaaaaaaatacaa

SEQ ID NO: 124383 - DNA, 20 bp, synthetic construct
  source 1..20: mol_type = other DNA
aaaaaaaaaaaaaaaataca

SEQ ID NO: 124384 - DNA, 20 bp, synthetic construct
  source 1..20: mol_type = other DNA
aaaaaaaaaaaaaaaaatac

SEQ ID NO: 124385 - DNA, 20 bp, synthetic construct
  source 1..20: mol_type = other DNA
aaaaaaaaaaaaaaaaaata

SEQ ID NO: 124386 - DNA, 20 bp, synthetic construct
  source 1..20: mol_type = other DNA
aaaaaaaaaaaaaaaaaaat

SEQ ID NO: 124387 - DNA, 20 bp, synthetic construct
  source 1..20: mol_type = other DNA
aaaaaaaaaaaaaaaaaaaa

SEQ ID NO: 124388 - DNA, 20 bp, synthetic construct
  source 1..20: mol_type = other DNA
taaaaaaaaaaaaaaaaaaa

SEQ ID NO: 124389 - DNA, 20 bp, synthetic construct
  source 1..20: mol_type = other DNA
ctaaaaaaaaaaaaaaaaaa

SEQ ID NO: 124390 - DNA, 20 bp, synthetic construct
  source 1..20: mol_type = other DNA
actaaaaaaaaaaaaaaaaa

SEQ ID NO: 124391 - DNA, 20 bp, synthetic construct
  source 1..20: mol_type = other DNA
tactaaaaaaaaaaaaaaaa

SEQ ID NO: 124392 - DNA, 20 bp, synthetic construct
  source 1..20: mol_type = other DNA
ctactaaaaaaaaaaaaaaa

SEQ ID NO: 124393 - DNA, 20 bp, synthetic construct
  source 1..20: mol_type = other DNA
tctactaaaaaaaaaaaaaa

SEQ ID NO: 124394 - DNA, 20 bp, synthetic construct
  source 1..20: mol_type = other DNA
ctctactaaaaaaaaaaaaa

SEQ ID NO: 124395 - DNA, 20 bp, synthetic construct
  source 1..20: mol_type = other DNA
tctctactaaaaaaaaaaaa

SEQ ID NO: 124396 - DNA, 20 bp, synthetic construct
  source 1..20: mol_type = other DNA
gtctctactaaaaaaaaaaa

SEQ ID NO: 124397 - DNA, 20 bp, synthetic construct
  source 1..20: mol_type = other DNA
tgtctctactaaaaaaaaaa

SEQ ID NO: 124398 - DNA, 20 bp, synthetic construct
  source 1..20: mol_type = other DNA
ctgtctctactaaaaaaaaa

SEQ ID NO: 124399 - DNA, 20 bp, synthetic construct
  source 1..20: mol_type = other DNA
cctgtctctactaaaaaaaa

SEQ ID NO: 124400 - DNA, 20 bp, synthetic construct
  source 1..20: mol_type = other DNA
ccctgtctctactaaaaaaa

SEQ ID NO: 124401 - DNA, 20 bp, synthetic construct
  source 1..20: mol_type = other DNA
accctgtctctactaaaaaa

SEQ ID NO: 124402 - DNA, 20 bp, synthetic construct
  source 1..20: mol_type = other DNA
gaccctgtctctactaaaaa

SEQ ID NO: 124403 - DNA, 20 bp, synthetic construct
  source 1..20: mol_type = other DNA
agaccctgtctctactaaaa

SEQ ID NO: 124404 - DNA, 20 bp, synthetic construct
  source 1..20: mol_type = other DNA
gagaccctgtctctactaaa

SEQ ID NO: 124405 - DNA, 20 bp, synthetic construct
  source 1..20: mol_type = other DNA
tgagaccctgtctctactaa

SEQ ID NO: 124406 - DNA, 20 bp, synthetic construct
  source 1..20: mol_type = other DNA
gtgagaccctgtctctacta

SEQ ID NO: 124407 - DNA, 20 bp, synthetic construct
  source 1..20: mol_type = other DNA
ggtgagaccctgtctctact

SEQ ID NO: 124408 - DNA, 20 bp, synthetic construct
  source 1..20: mol_type = other DNA
tggtgagaccctgtctctac

SEQ ID NO: 124409 - DNA, 20 bp, synthetic construct
  source 1..20: mol_type = other DNA
atggtgagaccctgtctcta

SEQ ID NO: 124410 - DNA, 20 bp, synthetic construct
  source 1..20: mol_type = other DNA
catggtgagaccctgtctct

SEQ ID NO: 124411 - DNA, 20 bp, synthetic construct
  source 1..20: mol_type = other DNA
acatggtgagaccctgtctc

SEQ ID NO: 124412 - DNA, 20 bp, synthetic construct
  source 1..20: mol_type = other DNA
aacatggtgagaccctgtct

SEQ ID NO: 124413 - DNA, 20 bp, synthetic construct
  source 1..20: mol_type = other DNA
caacatggtgagaccctgtc

SEQ ID NO: 124414 - DNA, 20 bp, synthetic construct
  source 1..20: mol_type = other DNA
ccaacatggtgagaccctgt

SEQ ID NO: 124415 - DNA, 20 bp, synthetic construct
  source 1..20: mol_type = other DNA
gccaacatggtgagaccctg

SEQ ID NO: 124416 - DNA, 20 bp, synthetic construct
  source 1..20: mol_type = other DNA
ggccaacatggtgagaccct

SEQ ID NO: 124417 - DNA, 20 bp, synthetic construct
  source 1..20: mol_type = other DNA
tggccaacatggtgagaccc

SEQ ID NO: 124418 - DNA, 20 bp, synthetic construct
  source 1..20: mol_type = other DNA
ctggccaacatggtgagacc

SEQ ID NO: 124419 - DNA, 20 bp, synthetic construct
  source 1..20: mol_type = other DNA
cctggccaacatggtgagac

SEQ ID NO: 124420 - DNA, 20 bp, synthetic construct
  source 1..20: mol_type = other DNA
gcctggccaacatggtgaga

SEQ ID NO: 124421 - DNA, 20 bp, synthetic construct
  source 1..20: mol_type = other DNA
agcctggccaacatggtgag

SEQ ID NO: 124422 - DNA, 20 bp, synthetic construct
  source 1..20: mol_type = other DNA
tagcctggccaacatggtga

SEQ ID NO: 124423 - DNA, 20 bp, synthetic construct
  source 1..20: mol_type = other DNA
ctagcctggccaacatggtg

SEQ ID NO: 124424 - DNA, 20 bp, synthetic construct
  source 1..20: mol_type = other DNA
actagcctggccaacatggt

SEQ ID NO: 124425 - DNA, 20 bp, synthetic construct
  source 1..20: mol_type = other DNA
gactagcctggccaacatgg

SEQ ID NO: 124426 - DNA, 20 bp, synthetic construct
  source 1..20: mol_type = other DNA
agactagcctggccaacatg

SEQ ID NO: 124427 - DNA, 20 bp, synthetic construct
  source 1..20: mol_type = other DNA
gagactagcctggccaacat

SEQ ID NO: 124428 - DNA, 20 bp, synthetic construct
  source 1..20: mol_type = other DNA
cgagactagcctggccaaca

SEQ ID NO: 124429 - DNA, 20 bp, synthetic construct
  source 1..20: mol_type = other DNA
tcgagactagcctggccaac

SEQ ID NO: 124430 - DNA, 20 bp, synthetic construct
  source 1..20: mol_type = other DNA
ttcgagactagcctggccaa

SEQ ID NO: 124431 - DNA, 20 bp, synthetic construct
  source 1..20: mol_type = other DNA
gttcgagactagcctggcca

SEQ ID NO: 124432 - DNA, 20 bp, synthetic construct
  source 1..20: mol_type = other DNA
agttcgagactagcctggcc

SEQ ID NO: 124433 - DNA, 20 bp, synthetic construct
  source 1..20: mol_type = other DNA
gagttcgagactagcctggc

SEQ ID NO: 124434 - DNA, 20 bp, synthetic construct
  source 1..20: mol_type = other DNA
ggagttcgagactagcctgg

SEQ ID NO: 124435 - DNA, 20 bp, synthetic construct
  source 1..20: mol_type = other DNA
aggagttcgagactagcctg

SEQ ID NO: 124436 - DNA, 20 bp, synthetic construct
  source 1..20: mol_type = other DNA
caggagttcgagactagcct

SEQ ID NO: 124437 - DNA, 20 bp, synthetic construct
  source 1..20: mol_type = other DNA
tcaggagttcgagactagcc

SEQ ID NO: 124438 - DNA, 20 bp, synthetic construct
  source 1..20: mol_type = other DNA
gtcaggagttcgagactagc

SEQ ID NO: 124439 - DNA, 20 bp, synthetic construct
  source 1..20: mol_type = other DNA
ggtcaggagttcgagactag

SEQ ID NO: 124440 - DNA, 20 bp, synthetic construct
  source 1..20: mol_type = other DNA
aggtcaggagttcgagacta

SEQ ID NO: 124441 - DNA, 20 bp, synthetic construct
  source 1..20: mol_type = other DNA
gaggtcaggagttcgagact

SEQ ID NO: 124442 - DNA, 20 bp, synthetic construct
  source 1..20: mol_type = other DNA
tgaggtcaggagttcgagac

SEQ ID NO: 124443 - DNA, 20 bp, synthetic construct
  source 1..20: mol_type = other DNA
ctgaggtcaggagttcgaga

SEQ ID NO: 124444 - DNA, 20 bp, synthetic construct
  source 1..20: mol_type = other DNA
cctgaggtcaggagttcgag

SEQ ID NO: 124445 - DNA, 20 bp, synthetic construct
  source 1..20: mol_type = other DNA
acctgaggtcaggagttcga

SEQ ID NO: 124446 - DNA, 20 bp, synthetic construct
  source 1..20: mol_type = other DNA
cacctgaggtcaggagttcg

SEQ ID NO: 124447 - DNA, 20 bp, synthetic construct
  source 1..20: mol_type = other DNA
tcacctgaggtcaggagttc

SEQ ID NO: 124448 - DNA, 20 bp, synthetic construct
  source 1..20: mol_type = other DNA
atcacctgaggtcaggagtt

SEQ ID NO: 124449 - DNA, 20 bp, synthetic construct
  source 1..20: mol_type = other DNA
gatcacctgaggtcaggagt

SEQ ID NO: 124450 - DNA, 20 bp, synthetic construct
  source 1..20: mol_type = other DNA
agatcacctgaggtcaggag

SEQ ID NO: 124451 - DNA, 20 bp, synthetic construct
  source 1..20: mol_type = other DNA
cagatcacctgaggtcagga

SEQ ID NO: 124452 - DNA, 20 bp, synthetic construct
  source 1..20: mol_type = other DNA
gcagatcacctgaggtcagg

SEQ ID NO: 124453 - DNA, 20 bp, synthetic construct
  source 1..20: mol_type = other DNA
agcagatcacctgaggtcag

SEQ ID NO: 124454 - DNA, 20 bp, synthetic construct
  source 1..20: mol_type = other DNA
gagcagatcacctgaggtca

SEQ ID NO: 124455 - DNA, 20 bp, synthetic construct
  source 1..20: mol_type = other DNA
tgagcagatcacctgaggtc

SEQ ID NO: 124456 - DNA, 20 bp, synthetic construct
  source 1..20: mol_type = other DNA
atgagcagatcacctgaggt

SEQ ID NO: 124457 - DNA, 20 bp, synthetic construct
  source 1..20: mol_type = other DNA
gatgagcagatcacctgagg

SEQ ID NO: 124458 - DNA, 20 bp, synthetic construct
  source 1..20: mol_type = other DNA
agatgagcagatcacctgag

SEQ ID NO: 124459 - DNA, 20 bp, synthetic construct
  source 1..20: mol_type = other DNA
gagatgagcagatcacctga

SEQ ID NO: 124460 - DNA, 20 bp, synthetic construct
  source 1..20: mol_type = other DNA
tgagatgagcagatcacctg

SEQ ID NO: 124461 - DNA, 20 bp, synthetic construct
  source 1..20: mol_type = other DNA
ctgagatgagcagatcacct

SEQ ID NO: 124462 - DNA, 20 bp, synthetic construct
  source 1..20: mol_type = other DNA
gctgagatgagcagatcacc

SEQ ID NO: 124463 - DNA, 20 bp, synthetic construct
  source 1..20: mol_type = other DNA
ggctgagatgagcagatcac

SEQ ID NO: 124464 - DNA, 20 bp, synthetic construct
  source 1..20: mol_type = other DNA
aggctgagatgagcagatca

SEQ ID NO: 124465 - DNA, 20 bp, synthetic construct
  source 1..20: mol_type = other DNA
gaggctgagatgagcagatc

SEQ ID NO: 124466 - DNA, 20 bp, synthetic construct
  source 1..20: mol_type = other DNA
ggaggctgagatgagcagat

SEQ ID NO: 124467 - DNA, 20 bp, synthetic construct
  source 1..20: mol_type = other DNA
gggaggctgagatgagcaga

SEQ ID NO: 124468 - DNA, 20 bp, synthetic construct
  source 1..20: mol_type = other DNA
tgggaggctgagatgagcag

SEQ ID NO: 124469 - DNA, 20 bp, synthetic construct
  source 1..20: mol_type = other DNA
ttgggaggctgagatgagca

SEQ ID NO: 124470 - DNA, 20 bp, synthetic construct
  source 1..20: mol_type = other DNA
tttgggaggctgagatgagc

SEQ ID NO: 124471 - DNA, 20 bp, synthetic construct
  source 1..20: mol_type = other DNA
ctttgggaggctgagatgag

SEQ ID NO: 124472 - DNA, 20 bp, synthetic construct
  source 1..20: mol_type = other DNA
actttgggaggctgagatga

SEQ ID NO: 124473 - DNA, 20 bp, synthetic construct
  source 1..20: mol_type = other DNA
aactttgggaggctgagatg

SEQ ID NO: 124474 - DNA, 20 bp, synthetic construct
  source 1..20: mol_type = other DNA
gaactttgggaggctgagat

SEQ ID NO: 124475 - DNA, 20 bp, synthetic construct
  source 1..20: mol_type = other DNA
agaactttgggaggctgaga

SEQ ID NO: 124476 - DNA, 20 bp, synthetic construct
  source 1..20: mol_type = other DNA
cagaactttgggaggctgag

SEQ ID NO: 124477 - DNA, 20 bp, synthetic construct
  source 1..20: mol_type = other DNA
ccagaactttgggaggctga

SEQ ID NO: 124478 - DNA, 20 bp, synthetic construct
  source 1..20: mol_type = other DNA
cccagaactttgggaggctg

SEQ ID NO: 124479 - DNA, 20 bp, synthetic construct
  source 1..20: mol_type = other DNA
tcccagaactttgggaggct

SEQ ID NO: 124480 - DNA, 20 bp, synthetic construct
  source 1..20: mol_type = other DNA
atcccagaactttgggaggc

SEQ ID NO: 124481 - DNA, 20 bp, synthetic construct
  source 1..20: mol_type = other DNA
aatcccagaactttgggagg

SEQ ID NO: 124482 - DNA, 20 bp, synthetic construct
  source 1..20: mol_type = other DNA
taatcccagaactttgggag

SEQ ID NO: 124483 - DNA, 20 bp, synthetic construct
  source 1..20: mol_type = other DNA
gtaatcccagaactttggga

SEQ ID NO: 124484 - DNA, 20 bp, synthetic construct
  source 1..20: mol_type = other DNA
tgtaatcccagaactttggg

SEQ ID NO: 124485 - DNA, 20 bp, synthetic construct
  source 1..20: mol_type = other DNA
ctgtaatcccagaactttgg

SEQ ID NO: 124486 - DNA, 20 bp, synthetic construct
  source 1..20: mol_type = other DNA
cctgtaatcccagaactttg

SEQ ID NO: 124487 - DNA, 20 bp, synthetic construct
  source 1..20: mol_type = other DNA
gcctgtaatcccagaacttt

SEQ ID NO: 124488 - DNA, 20 bp, synthetic construct
  source 1..20: mol_type = other DNA
tgcctgtaatcccagaactt

SEQ ID NO: 124489 - DNA, 20 bp, synthetic construct
  source 1..20: mol_type = other DNA
atgcctgtaatcccagaact

SEQ ID NO: 124490 - DNA, 20 bp, synthetic construct
  source 1..20: mol_type = other DNA
catgcctgtaatcccagaac

SEQ ID NO: 124491 - DNA, 20 bp, synthetic construct
  source 1..20: mol_type = other DNA
tcatgcctgtaatcccagaa

SEQ ID NO: 124492 - DNA, 20 bp, synthetic construct
  source 1..20: mol_type = other DNA
ctcatgcctgtaatcccaga

SEQ ID NO: 124493 - DNA, 20 bp, synthetic construct
  source 1..20: mol_type = other DNA
gctcatgcctgtaatcccag

SEQ ID NO: 124494 - DNA, 20 bp, synthetic construct
  source 1..20: mol_type = other DNA
ggctcatgcctgtaatccca

SEQ ID NO: 124495 - DNA, 20 bp, synthetic construct
  source 1..20: mol_type = other DNA
tggctcatgcctgtaatccc

SEQ ID NO: 124496 - DNA, 20 bp, synthetic construct
  source 1..20: mol_type = other DNA
gtggctcatgcctgtaatcc

SEQ ID NO: 124497 - DNA, 20 bp, synthetic construct
  source 1..20: mol_type = other DNA
agtggctcatgcctgtaatc

SEQ ID NO: 124498 - DNA, 20 bp, synthetic construct
  source 1..20: mol_type = other DNA
cagtggctcatgcctgtaat

SEQ ID NO: 124499 - DNA, 20 bp, synthetic construct
  source 1..20: mol_type = other DNA
gcagtggctcatgcctgtaa

SEQ ID NO: 124500 - DNA, 20 bp, synthetic construct
  source 1..20: mol_type = other DNA
cgcagtggctcatgcctgta

SEQ ID NO: 124501 - DNA, 20 bp, synthetic construct
  source 1..20: mol_type = other DNA
gcgcagtggctcatgcctgt

SEQ ID NO: 124502 - DNA, 20 bp, synthetic construct
  source 1..20: mol_type = other DNA
ggcgcagtggctcatgcctg

SEQ ID NO: 124503 - DNA, 20 bp, synthetic construct
  source 1..20: mol_type = other DNA
gggcgcagtggctcatgcct

SEQ ID NO: 124504 - DNA, 20 bp, synthetic construct
  source 1..20: mol_type = other DNA
tgggcgcagtggctcatgcc

SEQ ID NO: 124505 - DNA, 20 bp, synthetic construct
  source 1..20: mol_type = other DNA
ctgggcgcagtggctcatgc

SEQ ID NO: 124506 - DNA, 20 bp, synthetic construct
  source 1..20: mol_type = other DNA
gctgggcgcagtggctcatg

SEQ ID NO: 124507 - DNA, 20 bp, synthetic construct
  source 1..20: mol_type = other DNA
ggctgggcgcagtggctcat

SEQ ID NO: 124508 - DNA, 20 bp, synthetic construct
  source 1..20: mol_type = other DNA
tggctgggcgcagtggctca

SEQ ID NO: 124509 - DNA, 20 bp, synthetic construct
  source 1..20: mol_type = other DNA
atggctgggcgcagtggctc

SEQ ID NO: 124510 - DNA, 20 bp, synthetic construct
  source 1..20: mol_type = other DNA
tatggctgggcgcagtggct

SEQ ID NO: 124511 - DNA, 20 bp, synthetic construct
  source 1..20: mol_type = other DNA
ctatggctgggcgcagtggc

SEQ ID NO: 124512 - DNA, 20 bp, synthetic construct
  source 1..20: mol_type = other DNA
actatggctgggcgcagtgg

SEQ ID NO: 124513 - DNA, 20 bp, synthetic construct
  source 1..20: mol_type = other DNA
tactatggctgggcgcagtg

SEQ ID NO: 124514 - DNA, 20 bp, synthetic construct
  source 1..20: mol_type = other DNA
ctactatggctgggcgcagt

SEQ ID NO: 124515 - DNA, 20 bp, synthetic construct
  source 1..20: mol_type = other DNA
gctactatggctgggcgcag

SEQ ID NO: 124516 - DNA, 20 bp, synthetic construct
  source 1..20: mol_type = other DNA
agctactatggctgggcgca

SEQ ID NO: 124517 - DNA, 20 bp, synthetic construct
  source 1..20: mol_type = other DNA
aagctactatggctgggcgc

SEQ ID NO: 124518 - DNA, 20 bp, synthetic construct
  source 1..20: mol_type = other DNA
aaagctactatggctgggcg

SEQ ID NO: 124519 - DNA, 20 bp, synthetic construct
  source 1..20: mol_type = other DNA
taaagctactatggctgggc

SEQ ID NO: 124520 - DNA, 20 bp, synthetic construct
  source 1..20: mol_type = other DNA
ataaagctactatggctggg

SEQ ID NO: 124521 - DNA, 20 bp, synthetic construct
  source 1..20: mol_type = other DNA
aataaagctactatggctgg

SEQ ID NO: 124522 - DNA, 20 bp, synthetic construct
  source 1..20: mol_type = other DNA
caataaagctactatggctg

SEQ ID NO: 124523 - DNA, 20 bp, synthetic construct
  source 1..20: mol_type = other DNA
tcaataaagctactatggct

SEQ ID NO: 124524 - DNA, 20 bp, synthetic construct
  source 1..20: mol_type = other DNA
ttcaataaagctactatggc

SEQ ID NO: 124525 - DNA, 20 bp, synthetic construct
  source 1..20: mol_type = other DNA
attcaataaagctactatgg

SEQ ID NO: 124526 - DNA, 20 bp, synthetic construct
  source 1..20: mol_type = other DNA
aattcaataaagctactatg

SEQ ID NO: 124527 - DNA, 20 bp, synthetic construct
  source 1..20: mol_type = other DNA
gaattcaataaagctactat

SEQ ID NO: 124528 - DNA, 20 bp, synthetic construct
  source 1..20: mol_type = other DNA
tgaattcaataaagctacta

SEQ ID NO: 124529 - DNA, 20 bp, synthetic construct
  source 1..20: mol_type = other DNA
ctgaattcaataaagctact

SEQ ID NO: 124530 - DNA, 20 bp, synthetic construct
  source 1..20: mol_type = other DNA
actgaattcaataaagctac

SEQ ID NO: 124531 - DNA, 20 bp, synthetic construct
  source 1..20: mol_type = other DNA
aactgaattcaataaagcta

SEQ ID NO: 124532 - DNA, 20 bp, synthetic construct
  source 1..20: mol_type = other DNA
caactgaattcaataaagct

SEQ ID NO: 124533 - DNA, 20 bp, synthetic construct
  source 1..20: mol_type = other DNA
tcaactgaattcaataaagc

SEQ ID NO: 124534 - DNA, 20 bp, synthetic construct
  source 1..20: mol_type = other DNA
gtcaactgaattcaataaag

SEQ ID NO: 124535 - DNA, 20 bp, synthetic construct
  source 1..20: mol_type = other DNA
agtcaactgaattcaataaa

SEQ ID NO: 124536 - DNA, 20 bp, synthetic construct
  source 1..20: mol_type = other DNA
cagtcaactgaattcaataa

SEQ ID NO: 124537 - DNA, 20 bp, synthetic construct
  source 1..20: mol_type = other DNA
acagtcaactgaattcaata

SEQ ID NO: 124538 - DNA, 20 bp, synthetic construct
  source 1..20: mol_type = other DNA
tacagtcaactgaattcaat

SEQ ID NO: 124539 - DNA, 20 bp, synthetic construct
  source 1..20: mol_type = other DNA
atacagtcaactgaattcaa

SEQ ID NO: 124540 - DNA, 20 bp, synthetic construct
  source 1..20: mol_type = other DNA
aatacagtcaactgaattca

SEQ ID NO: 124541 - DNA, 20 bp, synthetic construct
  source 1..20: mol_type = other DNA
caatacagtcaactgaattc

SEQ ID NO: 124542 - DNA, 20 bp, synthetic construct
  source 1..20: mol_type = other DNA
acaatacagtcaactgaatt

SEQ ID NO: 124543 - DNA, 20 bp, synthetic construct
  source 1..20: mol_type = other DNA
tacaatacagtcaactgaat

SEQ ID NO: 124544 - DNA, 20 bp, synthetic construct
  source 1..20: mol_type = other DNA
atacaatacagtcaactgaa

SEQ ID NO: 124545 - DNA, 20 bp, synthetic construct
  source 1..20: mol_type = other DNA
catacaatacagtcaactga

SEQ ID NO: 124546 - DNA, 20 bp, synthetic construct
  source 1..20: mol_type = other DNA
acatacaatacagtcaactg

SEQ ID NO: 124547 - DNA, 20 bp, synthetic construct
  source 1..20: mol_type = other DNA
cacatacaatacagtcaact

SEQ ID NO: 124548 - DNA, 20 bp, synthetic construct
  source 1..20: mol_type = other DNA
acacatacaatacagtcaac

SEQ ID NO: 124549 - DNA, 20 bp, synthetic construct
  source 1..20: mol_type = other DNA
cacacatacaatacagtcaa

SEQ ID NO: 124550 - DNA, 20 bp, synthetic construct
  source 1..20: mol_type = other DNA
acacacatacaatacagtca

SEQ ID NO: 124551 - DNA, 20 bp, synthetic construct
  source 1..20: mol_type = other DNA
gacacacatacaatacagtc

SEQ ID NO: 124552 - DNA, 20 bp, synthetic construct
  source 1..20: mol_type = other DNA
agacacacatacaatacagt

SEQ ID NO: 124553 - DNA, 20 bp, synthetic construct
  source 1..20: mol_type = other DNA
tagacacacatacaatacag

SEQ ID NO: 124554 - DNA, 20 bp, synthetic construct
  source 1..20: mol_type = other DNA
atagacacacatacaataca

SEQ ID NO: 124555 - DNA, 20 bp, synthetic construct
  source 1..20: mol_type = other DNA
aatagacacacatacaatac

SEQ ID NO: 124556 - DNA, 20 bp, synthetic construct
  source 1..20: mol_type = other DNA
aaatagacacacatacaata

SEQ ID NO: 124557 - DNA, 20 bp, synthetic construct
  source 1..20: mol_type = other DNA
caaatagacacacatacaat

SEQ ID NO: 124558 - DNA, 20 bp, synthetic construct
  source 1..20: mol_type = other DNA
acaaatagacacacatacaa

SEQ ID NO: 124559 - DNA, 20 bp, synthetic construct
  source 1..20: mol_type = other DNA
cacaaatagacacacataca

SEQ ID NO: 124560 - DNA, 20 bp, synthetic construct
  source 1..20: mol_type = other DNA
tcacaaatagacacacatac

SEQ ID NO: 124561 - DNA, 20 bp, synthetic construct
  source 1..20: mol_type = other DNA
ttcacaaatagacacacata

SEQ ID NO: 124562 - DNA, 20 bp, synthetic construct
  source 1..20: mol_type = other DNA
gttcacaaatagacacacat

SEQ ID NO: 124563 - DNA, 20 bp, synthetic construct
  source 1..20: mol_type = other DNA
agttcacaaatagacacaca

SEQ ID NO: 124564 - DNA, 20 bp, synthetic construct
  source 1..20: mol_type = other DNA
cagttcacaaatagacacac

SEQ ID NO: 124565 - DNA, 20 bp, synthetic construct
  source 1..20: mol_type = other DNA
acagttcacaaatagacaca

SEQ ID NO: 124566 - DNA, 20 bp, synthetic construct
  source 1..20: mol_type = other DNA
aacagttcacaaatagacac

SEQ ID NO: 124567 - DNA, 20 bp, synthetic construct
  source 1..20: mol_type = other DNA
aaacagttcacaaatagaca

SEQ ID NO: 124568 - DNA, 20 bp, synthetic construct
  source 1..20: mol_type = other DNA
aaaacagttcacaaatagac

SEQ ID NO: 124569 - DNA, 20 bp, synthetic construct
  source 1..20: mol_type = other DNA
caaaacagttcacaaataga

SEQ ID NO: 124570 - DNA, 20 bp, synthetic construct
  source 1..20: mol_type = other DNA
acaaaacagttcacaaatag

SEQ ID NO: 124571 - DNA, 20 bp, synthetic construct
  source 1..20: mol_type = other DNA
aacaaaacagttcacaaata

SEQ ID NO: 124572 - DNA, 20 bp, synthetic construct
  source 1..20: mol_type = other DNA
caacaaaacagttcacaaat

SEQ ID NO: 124573 - DNA, 20 bp, synthetic construct
  source 1..20: mol_type = other DNA
acaacaaaacagttcacaaa

SEQ ID NO: 124574 - DNA, 20 bp, synthetic construct
  source 1..20: mol_type = other DNA
tacaacaaaacagttcacaa

SEQ ID NO: 124575 - DNA, 20 bp, synthetic construct
  source 1..20: mol_type = other DNA
atacaacaaaacagttcaca

SEQ ID NO: 124576 - DNA, 20 bp, synthetic construct
  source 1..20: mol_type = other DNA
aatacaacaaaacagttcac

SEQ ID NO: 124577 - DNA, 20 bp, synthetic construct
  source 1..20: mol_type = other DNA
caatacaacaaaacagttca

SEQ ID NO: 124578 - DNA, 20 bp, synthetic construct
  source 1..20: mol_type = other DNA
tcaatacaacaaaacagttc

SEQ ID NO: 124579 - DNA, 20 bp, synthetic construct
  source 1..20: mol_type = other DNA
atcaatacaacaaaacagtt

SEQ ID NO: 124580 - DNA, 20 bp, synthetic construct
  source 1..20: mol_type = other DNA
gatcaatacaacaaaacagt

SEQ ID NO: 124581 - DNA, 20 bp, synthetic construct
  source 1..20: mol_type = other DNA
agatcaatacaacaaaacag

SEQ ID NO: 124582 - DNA, 20 bp, synthetic construct
  source 1..20: mol_type = other DNA
aagatcaatacaacaaaaca

SEQ ID NO: 124583 - DNA, 20 bp, synthetic construct
  source 1..20: mol_type = other DNA
aaagatcaatacaacaaaac

SEQ ID NO: 124584 - DNA, 20 bp, synthetic construct
  source 1..20: mol_type = other DNA
caaagatcaatacaacaaaa

SEQ ID NO: 124585 - DNA, 20 bp, synthetic construct
  source 1..20: mol_type = other DNA
acaaagatcaatacaacaaa

SEQ ID NO: 124586 - DNA, 20 bp, synthetic construct
  source 1..20: mol_type = other DNA
tacaaagatcaatacaacaa

SEQ ID NO: 124587 - DNA, 20 bp, synthetic construct
  source 1..20: mol_type = other DNA
atacaaagatcaatacaaca

SEQ ID NO: 124588 - DNA, 20 bp, synthetic construct
  source 1..20: mol_type = other DNA
tatacaaagatcaatacaac

SEQ ID NO: 124589 - DNA, 20 bp, synthetic construct
  source 1..20: mol_type = other DNA
atatacaaagatcaatacaa

SEQ ID NO: 124590 - DNA, 20 bp, synthetic construct
  source 1..20: mol_type = other DNA
tatatacaaagatcaataca

SEQ ID NO: 124591 - DNA, 20 bp, synthetic construct
  source 1..20: mol_type = other DNA
atatatacaaagatcaatac

SEQ ID NO: 124592 - DNA, 20 bp, synthetic construct
  source 1..20: mol_type = other DNA
gatatatacaaagatcaata

SEQ ID NO: 124593 - DNA, 20 bp, synthetic construct
  source 1..20: mol_type = other DNA
ggatatatacaaagatcaat

SEQ ID NO: 124594 - DNA, 20 bp, synthetic construct
  source 1..20: mol_type = other DNA
aggatatatacaaagatcaa

SEQ ID NO: 124595 - DNA, 20 bp, synthetic construct
  source 1..20: mol_type = other DNA
aaggatatatacaaagatca

SEQ ID NO: 124596 - DNA, 20 bp, synthetic construct
  source 1..20: mol_type = other DNA
taaggatatatacaaagatc

SEQ ID NO: 124597 - DNA, 20 bp, synthetic construct
  source 1..20: mol_type = other DNA
ataaggatatatacaaagat

SEQ ID NO: 124598 - DNA, 20 bp, synthetic construct
  source 1..20: mol_type = other DNA
cataaggatatatacaaaga

SEQ ID NO: 124599 - DNA, 20 bp, synthetic construct
  source 1..20: mol_type = other DNA
gcataaggatatatacaaag

SEQ ID NO: 124600 - DNA, 20 bp, synthetic construct
  source 1..20: mol_type = other DNA
ggcataaggatatatacaaa

SEQ ID NO: 124601 - DNA, 20 bp, synthetic construct
  source 1..20: mol_type = other DNA
tggcataaggatatatacaa

SEQ ID NO: 124602 - DNA, 20 bp, synthetic construct
  source 1..20: mol_type = other DNA
ttggcataaggatatataca

SEQ ID NO: 124603 - DNA, 20 bp, synthetic construct
  source 1..20: mol_type = other DNA
attggcataaggatatatac

SEQ ID NO: 124604 - DNA, 20 bp, synthetic construct
  source 1..20: mol_type = other DNA
aattggcataaggatatata

SEQ ID NO: 124605 - DNA, 20 bp, synthetic construct
  source 1..20: mol_type = other DNA
gaattggcataaggatatat

SEQ ID NO: 124606 - DNA, 20 bp, synthetic construct
  source 1..20: mol_type = other DNA
agaattggcataaggatata

SEQ ID NO: 124607 - DNA, 20 bp, synthetic construct
  source 1..20: mol_type = other DNA
gagaattggcataaggatat

SEQ ID NO: 124608 - DNA, 20 bp, synthetic construct
  source 1..20: mol_type = other DNA
agagaattggcataaggata

SEQ ID NO: 124609 - DNA, 20 bp, synthetic construct
  source 1..20: mol_type = other DNA
gagagaattggcataaggat

SEQ ID NO: 124610 - DNA, 20 bp, synthetic construct
  source 1..20: mol_type = other DNA
agagagaattggcataagga

SEQ ID NO: 124611 - DNA, 20 bp, synthetic construct
  source 1..20: mol_type = other DNA
aagagagaattggcataagg

SEQ ID NO: 124612 - DNA, 20 bp, synthetic construct
  source 1..20: mol_type = other DNA
aaagagagaattggcataag

SEQ ID NO: 124613 - DNA, 20 bp, synthetic construct
  source 1..20: mol_type = other DNA
taaagagagaattggcataa

SEQ ID NO: 124614 - DNA, 20 bp, synthetic construct
  source 1..20: mol_type = other DNA
ataaagagagaattggcata

SEQ ID NO: 124615 - DNA, 20 bp, synthetic construct
  source 1..20: mol_type = other DNA
aataaagagagaattggcat

SEQ ID NO: 124616 - DNA, 20 bp, synthetic construct
  source 1..20: mol_type = other DNA
caataaagagagaattggca

SEQ ID NO: 124617 - DNA, 20 bp, synthetic construct
  source 1..20: mol_type = other DNA
gcaataaagagagaattggc

SEQ ID NO: 124618 - DNA, 20 bp, synthetic construct
  source 1..20: mol_type = other DNA
agcaataaagagagaattgg

SEQ ID NO: 124619 - DNA, 20 bp, synthetic construct
  source 1..20: mol_type = other DNA
cagcaataaagagagaattg

SEQ ID NO: 124620 - DNA, 20 bp, synthetic construct
  source 1..20: mol_type = other DNA
acagcaataaagagagaatt

SEQ ID NO: 124621 - DNA, 20 bp, synthetic construct
  source 1..20: mol_type = other DNA
aacagcaataaagagagaat

SEQ ID NO: 124622 - DNA, 20 bp, synthetic construct
  source 1..20: mol_type = other DNA
taacagcaataaagagagaa

SEQ ID NO: 124623 - DNA, 20 bp, synthetic construct
  source 1..20: mol_type = other DNA
gtaacagcaataaagagaga

SEQ ID NO: 124624 - DNA, 20 bp, synthetic construct
  source 1..20: mol_type = other DNA
agtaacagcaataaagagag

SEQ ID NO: 124625 - DNA, 20 bp, synthetic construct
  source 1..20: mol_type = other DNA
aagtaacagcaataaagaga

SEQ ID NO: 124626 - DNA, 20 bp, synthetic construct
  source 1..20: mol_type = other DNA
aaagtaacagcaataaagag

SEQ ID NO: 124627 - DNA, 20 bp, synthetic construct
  source 1..20: mol_type = other DNA
caaagtaacagcaataaaga

SEQ ID NO: 124628 - DNA, 20 bp, synthetic construct
  source 1..20: mol_type = other DNA
acaaagtaacagcaataaag

SEQ ID NO: 124629 - DNA, 20 bp, synthetic construct
  source 1..20: mol_type = other DNA
tacaaagtaacagcaataaa

SEQ ID NO: 124630 - DNA, 20 bp, synthetic construct
  source 1..20: mol_type = other DNA
ttacaaagtaacagcaataa

SEQ ID NO: 124631 - DNA, 20 bp, synthetic construct
  source 1..20: mol_type = other DNA
gttacaaagtaacagcaata

SEQ ID NO: 124632 - DNA, 20 bp, synthetic construct
  source 1..20: mol_type = other DNA
ggttacaaagtaacagcaat

SEQ ID NO: 124633 - DNA, 20 bp, synthetic construct
  source 1..20: mol_type = other DNA
tggttacaaagtaacagcaa

SEQ ID NO: 124634 - DNA, 20 bp, synthetic construct
  source 1..20: mol_type = other DNA
ttggttacaaagtaacagca

SEQ ID NO: 124635 - DNA, 20 bp, synthetic construct
  source 1..20: mol_type = other DNA
gttggttacaaagtaacagc

SEQ ID NO: 124636 - DNA, 20 bp, synthetic construct
  source 1..20: mol_type = other DNA
ggttggttacaaagtaacag

SEQ ID NO: 124637 - DNA, 20 bp, synthetic construct
  source 1..20: mol_type = other DNA
aggttggttacaaagtaaca

SEQ ID NO: 124638 - DNA, 20 bp, synthetic construct
  source 1..20: mol_type = other DNA
aaggttggttacaaagtaac

SEQ ID NO: 124639 - DNA, 20 bp, synthetic construct
  source 1..20: mol_type = other DNA
aaaggttggttacaaagtaa

SEQ ID NO: 124640 - DNA, 20 bp, synthetic construct
  source 1..20: mol_type = other DNA
taaaggttggttacaaagta

SEQ ID NO: 124641 - DNA, 20 bp, synthetic construct
  source 1..20: mol_type = other DNA
ttaaaggttggttacaaagt

SEQ ID NO: 124642 - DNA, 20 bp, synthetic construct
  source 1..20: mol_type = other DNA
cttaaaggttggttacaaag

SEQ ID NO: 124643 - DNA, 20 bp, synthetic construct
  source 1..20: mol_type = other DNA
acttaaaggttggttacaaa

SEQ ID NO: 124644 - DNA, 20 bp, synthetic construct
  source 1..20: mol_type = other DNA
aacttaaaggttggttacaa

SEQ ID NO: 124645 - DNA, 20 bp, synthetic construct
  source 1..20: mol_type = other DNA
gaacttaaaggttggttaca

SEQ ID NO: 124646 - DNA, 20 bp, synthetic construct
  source 1..20: mol_type = other DNA
tgaacttaaaggttggttac

SEQ ID NO: 124647 - DNA, 20 bp, synthetic construct
  source 1..20: mol_type = other DNA
atgaacttaaaggttggtta

SEQ ID NO: 124648 - DNA, 20 bp, synthetic construct
  source 1..20: mol_type = other DNA
tatgaacttaaaggttggtt

SEQ ID NO: 124649 - DNA, 20 bp, synthetic construct
  source 1..20: mol_type = other DNA
atatgaacttaaaggttggt

SEQ ID NO: 124650 - DNA, 20 bp, synthetic construct
  source 1..20: mol_type = other DNA
catatgaacttaaaggttgg

SEQ ID NO: 124651 - DNA, 20 bp, synthetic construct
  source 1..20: mol_type = other DNA
tcatatgaacttaaaggttg

SEQ ID NO: 124652 - DNA, 20 bp, synthetic construct
  source 1..20: mol_type = other DNA
ctcatatgaacttaaaggtt

SEQ ID NO: 124653 - DNA, 20 bp, synthetic construct
  source 1..20: mol_type = other DNA
actcatatgaacttaaaggt

SEQ ID NO: 124654 - DNA, 20 bp, synthetic construct
  source 1..20: mol_type = other DNA
gactcatatgaacttaaagg

SEQ ID NO: 124655 - DNA, 20 bp, synthetic construct
  source 1..20: mol_type = other DNA
agactcatatgaacttaaag

SEQ ID NO: 124656 - DNA, 20 bp, synthetic construct
  source 1..20: mol_type = other DNA
gagactcatatgaacttaaa

SEQ ID NO: 124657 - DNA, 20 bp, synthetic construct
  source 1..20: mol_type = other DNA
ggagactcatatgaacttaa

SEQ ID NO: 124658 - DNA, 20 bp, synthetic construct
  source 1..20: mol_type = other DNA
gggagactcatatgaactta

SEQ ID NO: 124659 - DNA, 20 bp, synthetic construct
  source 1..20: mol_type = other DNA
tgggagactcatatgaactt

SEQ ID NO: 124660 - DNA, 20 bp, synthetic construct
  source 1..20: mol_type = other DNA
ctgggagactcatatgaact

SEQ ID NO: 124661 - DNA, 20 bp, synthetic construct
  source 1..20: mol_type = other DNA
actgggagactcatatgaac

SEQ ID NO: 124662 - DNA, 20 bp, synthetic construct
  source 1..20: mol_type = other DNA
aactgggagactcatatgaa

SEQ ID NO: 124663 - DNA, 20 bp, synthetic construct
  source 1..20: mol_type = other DNA
aaactgggagactcatatga

SEQ ID NO: 124664 - DNA, 20 bp, synthetic construct
  source 1..20: mol_type = other DNA
aaaactgggagactcatatg

SEQ ID NO: 124665 - DNA, 20 bp, synthetic construct
  source 1..20: mol_type = other DNA
taaaactgggagactcatat

SEQ ID NO: 124666 - DNA, 20 bp, synthetic construct
  source 1..20: mol_type = other DNA
ataaaactgggagactcata

SEQ ID NO: 124667 - DNA, 20 bp, synthetic construct
  source 1..20: mol_type = other DNA
aataaaactgggagactcat

SEQ ID NO: 124668 - DNA, 20 bp, synthetic construct
  source 1..20: mol_type = other DNA
gaataaaactgggagactca

SEQ ID NO: 124669 - DNA, 20 bp, synthetic construct
  source 1..20: mol_type = other DNA
agaataaaactgggagactc

SEQ ID NO: 124670 - DNA, 20 bp, synthetic construct
  source 1..20: mol_type = other DNA
gagaataaaactgggagact

SEQ ID NO: 124671 - DNA, 20 bp, synthetic construct
  source 1..20: mol_type = other DNA
cgagaataaaactgggagac

SEQ ID NO: 124672 - DNA, 20 bp, synthetic construct
  source 1..20: mol_type = other DNA
acgagaataaaactgggaga

SEQ ID NO: 124673 - DNA, 20 bp, synthetic construct
  source 1..20: mol_type = other DNA
gacgagaataaaactgggag

SEQ ID NO: 124674 - DNA, 20 bp, synthetic construct
  source 1..20: mol_type = other DNA
tgacgagaataaaactggga

SEQ ID NO: 124675 - DNA, 20 bp, synthetic construct
  source 1..20: mol_type = other DNA
ttgacgagaataaaactggg

SEQ ID NO: 124676 - DNA, 20 bp, synthetic construct
  source 1..20: mol_type = other DNA
tttgacgagaataaaactgg

SEQ ID NO: 124677 - DNA, 20 bp, synthetic construct
  source 1..20: mol_type = other DNA
ttttgacgagaataaaactg

SEQ ID NO: 124678 - DNA, 20 bp, synthetic construct
  source 1..20: mol_type = other DNA
attttgacgagaataaaact

SEQ ID NO: 124679 - DNA, 20 bp, synthetic construct
  source 1..20: mol_type = other DNA
aattttgacgagaataaaac

SEQ ID NO: 124680 - DNA, 20 bp, synthetic construct
  source 1..20: mol_type = other DNA
taattttgacgagaataaaa

SEQ ID NO: 124681 - DNA, 20 bp, synthetic construct
  source 1..20: mol_type = other DNA
gtaattttgacgagaataaa

SEQ ID NO: 124682 - DNA, 20 bp, synthetic construct
  source 1..20: mol_type = other DNA
agtaattttgacgagaataa

SEQ ID NO: 124683 - DNA, 20 bp, synthetic construct
  source 1..20: mol_type = other DNA
gagtaattttgacgagaata

SEQ ID NO: 124684 - DNA, 20 bp, synthetic construct
  source 1..20: mol_type = other DNA
agagtaattttgacgagaat

SEQ ID NO: 124685 - DNA, 20 bp, synthetic construct
  source 1..20: mol_type = other DNA
aagagtaattttgacgagaa

SEQ ID NO: 124686 - DNA, 20 bp, synthetic construct
  source 1..20: mol_type = other DNA
taagagtaattttgacgaga

SEQ ID NO: 124687 - DNA, 20 bp, synthetic construct
  source 1..20: mol_type = other DNA
ataagagtaattttgacgag

SEQ ID NO: 124688 - DNA, 20 bp, synthetic construct
  source 1..20: mol_type = other DNA
aataagagtaattttgacga

SEQ ID NO: 124689 - DNA, 20 bp, synthetic construct
  source 1..20: mol_type = other DNA
gaataagagtaattttgacg

SEQ ID NO: 124690 - DNA, 20 bp, synthetic construct
  source 1..20: mol_type = other DNA
agaataagagtaattttgac

SEQ ID NO: 124691 - DNA, 20 bp, synthetic construct
  source 1..20: mol_type = other DNA
cagaataagagtaattttga

SEQ ID NO: 124692 - DNA, 20 bp, synthetic construct
  source 1..20: mol_type = other DNA
gcagaataagagtaattttg

SEQ ID NO: 124693 - DNA, 20 bp, synthetic construct
  source 1..20: mol_type = other DNA
cgcagaataagagtaatttt

SEQ ID NO: 124694 - DNA, 20 bp, synthetic construct
  source 1..20: mol_type = other DNA
acgcagaataagagtaattt

SEQ ID NO: 124695 - DNA, 20 bp, synthetic construct
  source 1..20: mol_type = other DNA
aacgcagaataagagtaatt

SEQ ID NO: 124696 - DNA, 20 bp, synthetic construct
  source 1..20: mol_type = other DNA
gaacgcagaataagagtaat

SEQ ID NO: 124697 - DNA, 20 bp, synthetic construct
  source 1..20: mol_type = other DNA
agaacgcagaataagagtaa

SEQ ID NO: 124698 - DNA, 20 bp, synthetic construct
  source 1..20: mol_type = other DNA
aagaacgcagaataagagta

SEQ ID NO: 124699 - DNA, 20 bp, synthetic construct
  source 1..20: mol_type = other DNA
aaagaacgcagaataagagt

SEQ ID NO: 124700 - DNA, 20 bp, synthetic construct
  source 1..20: mol_type = other DNA
caaagaacgcagaataagag

SEQ ID NO: 124701 - DNA, 20 bp, synthetic construct
  source 1..20: mol_type = other DNA
tcaaagaacgcagaataaga

SEQ ID NO: 124702 - DNA, 20 bp, synthetic construct
  source 1..20: mol_type = other DNA
ttcaaagaacgcagaataag

SEQ ID NO: 124703 - DNA, 20 bp, synthetic construct
  source 1..20: mol_type = other DNA
attcaaagaacgcagaataa

SEQ ID NO: 124704 - DNA, 20 bp, synthetic construct
  source 1..20: mol_type = other DNA
aattcaaagaacgcagaata

SEQ ID NO: 124705 - DNA, 20 bp, synthetic construct
  source 1..20: mol_type = other DNA
aaattcaaagaacgcagaat

SEQ ID NO: 124706 - DNA, 20 bp, synthetic construct
  source 1..20: mol_type = other DNA
caaattcaaagaacgcagaa

SEQ ID NO: 124707 - DNA, 20 bp, synthetic construct
  source 1..20: mol_type = other DNA
gcaaattcaaagaacgcaga

SEQ ID NO: 124708 - DNA, 20 bp, synthetic construct
  source 1..20: mol_type = other DNA
tgcaaattcaaagaacgcag

SEQ ID NO: 124709 - DNA, 20 bp, synthetic construct
  source 1..20: mol_type = other DNA
ttgcaaattcaaagaacgca

SEQ ID NO: 124710 - DNA, 20 bp, synthetic construct
  source 1..20: mol_type = other DNA
tttgcaaattcaaagaacgc

SEQ ID NO: 124711 - DNA, 20 bp, synthetic construct
  source 1..20: mol_type = other DNA
atttgcaaattcaaagaacg

SEQ ID NO: 124712 - DNA, 20 bp, synthetic construct
  source 1..20: mol_type = other DNA
tatttgcaaattcaaagaac

SEQ ID NO: 124713 - DNA, 20 bp, synthetic construct
  source 1..20: mol_type = other DNA
ttatttgcaaattcaaagaa

SEQ ID NO: 124714 - DNA, 20 bp, synthetic construct
  source 1..20: mol_type = other DNA
tttatttgcaaattcaaaga

SEQ ID NO: 124715 - DNA, 20 bp, synthetic construct
  source 1..20: mol_type = other DNA
atttatttgcaaattcaaag

SEQ ID NO: 124716 - DNA, 20 bp, synthetic construct
  source 1..20: mol_type = other DNA
aatttatttgcaaattcaaa

SEQ ID NO: 124717 - DNA, 20 bp, synthetic construct
  source 1..20: mol_type = other DNA
aaatttatttgcaaattcaa

SEQ ID NO: 124718 - DNA, 20 bp, synthetic construct
  source 1..20: mol_type = other DNA
aaaatttatttgcaaattca

SEQ ID NO: 124719 - DNA, 20 bp, synthetic construct
  source 1..20: mol_type = other DNA
taaaatttatttgcaaattc

SEQ ID NO: 124720 - DNA, 20 bp, synthetic construct
  source 1..20: mol_type = other DNA
ctaaaatttatttgcaaatt

SEQ ID NO: 124721 - DNA, 20 bp, synthetic construct
  source 1..20: mol_type = other DNA
tctaaaatttatttgcaaat

SEQ ID NO: 124722 - DNA, 20 bp, synthetic construct
  source 1..20: mol_type = other DNA
ttctaaaatttatttgcaaa

SEQ ID NO: 124723 - DNA, 20 bp, synthetic construct
  source 1..20: mol_type = other DNA
attctaaaatttatttgcaa

SEQ ID NO: 124724 - DNA, 20 bp, synthetic construct
  source 1..20: mol_type = other DNA
gattctaaaatttatttgca

SEQ ID NO: 124725 - DNA, 20 bp, synthetic construct
  source 1..20: mol_type = other DNA
tgattctaaaatttatttgc

SEQ ID NO: 124726 - DNA, 20 bp, synthetic construct
  source 1..20: mol_type = other DNA
ctgattctaaaatttatttg

SEQ ID NO: 124727 - DNA, 20 bp, synthetic construct
  source 1..20: mol_type = other DNA
gctgattctaaaatttattt

SEQ ID NO: 124728 - DNA, 20 bp, synthetic construct
  source 1..20: mol_type = other DNA
agctgattctaaaatttatt

SEQ ID NO: 124729 - DNA, 20 bp, synthetic construct
  source 1..20: mol_type = other DNA
aagctgattctaaaatttat

SEQ ID NO: 124730 - DNA, 20 bp, synthetic construct
  source 1..20: mol_type = other DNA
caagctgattctaaaattta

SEQ ID NO: 124731 - DNA, 20 bp, synthetic construct
  source 1..20: mol_type = other DNA
ccaagctgattctaaaattt

SEQ ID NO: 124732 - DNA, 20 bp, synthetic construct
  source 1..20: mol_type = other DNA
cccaagctgattctaaaatt

SEQ ID NO: 124733 - DNA, 20 bp, synthetic construct
  source 1..20: mol_type = other DNA
tcccaagctgattctaaaat

SEQ ID NO: 124734 - DNA, 20 bp, synthetic construct
  source 1..20: mol_type = other DNA
atcccaagctgattctaaaa

SEQ ID NO: 124735 - DNA, 20 bp, synthetic construct
  source 1..20: mol_type = other DNA
aatcccaagctgattctaaa

SEQ ID NO: 124736 - DNA, 20 bp, synthetic construct
  source 1..20: mol_type = other DNA
caatcccaagctgattctaa

SEQ ID NO: 124737 - DNA, 20 bp, synthetic construct
  source 1..20: mol_type = other DNA
acaatcccaagctgattcta

SEQ ID NO: 124738 - DNA, 20 bp, synthetic construct
  source 1..20: mol_type = other DNA
cacaatcccaagctgattct

SEQ ID NO: 124739 - DNA, 20 bp, synthetic construct
  source 1..20: mol_type = other DNA
gcacaatcccaagctgattc

SEQ ID NO: 124740 - DNA, 20 bp, synthetic construct
  source 1..20: mol_type = other DNA
tgcacaatcccaagctgatt

SEQ ID NO: 124741 - DNA, 20 bp, synthetic construct
  source 1..20: mol_type = other DNA
gtgcacaatcccaagctgat

SEQ ID NO: 124742 - DNA, 20 bp, synthetic construct
  source 1..20: mol_type = other DNA
agtgcacaatcccaagctga

SEQ ID NO: 124743 - DNA, 20 bp, synthetic construct
  source 1..20: mol_type = other DNA
cagtgcacaatcccaagctg

SEQ ID NO: 124744 - DNA, 20 bp, synthetic construct
  source 1..20: mol_type = other DNA
tcagtgcacaatcccaagct

SEQ ID NO: 124745 - DNA, 20 bp, synthetic construct
  source 1..20: mol_type = other DNA
ttcagtgcacaatcccaagc

SEQ ID NO: 124746 - DNA, 20 bp, synthetic construct
  source 1..20: mol_type = other DNA
attcagtgcacaatcccaag

SEQ ID NO: 124747 - DNA, 20 bp, synthetic construct
  source 1..20: mol_type = other DNA
gattcagtgcacaatcccaa

SEQ ID NO: 124748 - DNA, 20 bp, synthetic construct
  source 1..20: mol_type = other DNA
agattcagtgcacaatccca

SEQ ID NO: 124749 - DNA, 20 bp, synthetic construct
  source 1..20: mol_type = other DNA
aagattcagtgcacaatccc

SEQ ID NO: 124750 - DNA, 20 bp, synthetic construct
  source 1..20: mol_type = other DNA
aaagattcagtgcacaatcc

SEQ ID NO: 124751 - DNA, 20 bp, synthetic construct
  source 1..20: mol_type = other DNA
taaagattcagtgcacaatc

SEQ ID NO: 124752 - DNA, 20 bp, synthetic construct
  source 1..20: mol_type = other DNA
ataaagattcagtgcacaat

SEQ ID NO: 124753 - DNA, 20 bp, synthetic construct
  source 1..20: mol_type = other DNA
tataaagattcagtgcacaa

SEQ ID NO: 124754 - DNA, 20 bp, synthetic construct
  source 1..20: mol_type = other DNA
atataaagattcagtgcaca

SEQ ID NO: 124755 - DNA, 20 bp, synthetic construct
  source 1..20: mol_type = other DNA
gatataaagattcagtgcac

SEQ ID NO: 124756 - DNA, 20 bp, synthetic construct
  source 1..20: mol_type = other DNA
tgatataaagattcagtgca

SEQ ID NO: 124757 - DNA, 20 bp, synthetic construct
  source 1..20: mol_type = other DNA
ctgatataaagattcagtgc

SEQ ID NO: 124758 - DNA, 20 bp, synthetic construct
  source 1..20: mol_type = other DNA
actgatataaagattcagtg

SEQ ID NO: 124759 - DNA, 20 bp, synthetic construct
  source 1..20: mol_type = other DNA
aactgatataaagattcagt

SEQ ID NO: 124760 - DNA, 20 bp, synthetic construct
  source 1..20: mol_type = other DNA
gaactgatataaagattcag

SEQ ID NO: 124761 - DNA, 20 bp, synthetic construct
  source 1..20: mol_type = other DNA
agaactgatataaagattca

SEQ ID NO: 124762 - DNA, 20 bp, synthetic construct
  source 1..20: mol_type = other DNA
cagaactgatataaagattc

SEQ ID NO: 124763 - DNA, 20 bp, synthetic construct
  source 1..20: mol_type = other DNA
ccagaactgatataaagatt

SEQ ID NO: 124764 - DNA, 20 bp, synthetic construct
  source 1..20: mol_type = other DNA
cccagaactgatataaagat

SEQ ID NO: 124765 - DNA, 20 bp, synthetic construct
  source 1..20: mol_type = other DNA
tcccagaactgatataaaga

SEQ ID NO: 124766 - DNA, 20 bp, synthetic construct
  source 1..20: mol_type = other DNA
ctcccagaactgatataaag

SEQ ID NO: 124767 - DNA, 20 bp, synthetic construct
  source 1..20: mol_type = other DNA
tctcccagaactgatataaa

SEQ ID NO: 124768 - DNA, 20 bp, synthetic construct
  source 1..20: mol_type = other DNA
ttctcccagaactgatataa

SEQ ID NO: 124769 - DNA, 20 bp, synthetic construct
  source 1..20: mol_type = other DNA
tttctcccagaactgatata

SEQ ID NO: 124770 - DNA, 20 bp, synthetic construct
  source 1..20: mol_type = other DNA
atttctcccagaactgatat

SEQ ID NO: 124771 - DNA, 20 bp, synthetic construct
  source 1..20: mol_type = other DNA
tatttctcccagaactgata

SEQ ID NO: 124772 - DNA, 20 bp, synthetic construct
  source 1..20: mol_type = other DNA
atatttctcccagaactgat

SEQ ID NO: 124773 - DNA, 20 bp, synthetic construct
  source 1..20: mol_type = other DNA
gatatttctcccagaactga

SEQ ID NO: 124774 - DNA, 20 bp, synthetic construct
  source 1..20: mol_type = other DNA
agatatttctcccagaactg

SEQ ID NO: 124775 - DNA, 20 bp, synthetic construct
  source 1..20: mol_type = other DNA
aagatatttctcccagaact

SEQ ID NO: 124776 - DNA, 20 bp, synthetic construct
  source 1..20: mol_type = other DNA
taagatatttctcccagaac

SEQ ID NO: 124777 - DNA, 20 bp, synthetic construct
  source 1..20: mol_type = other DNA
ttaagatatttctcccagaa

SEQ ID NO: 124778 - DNA, 20 bp, synthetic construct
  source 1..20: mol_type = other DNA
gttaagatatttctcccaga

SEQ ID NO: 124779 - DNA, 20 bp, synthetic construct
  source 1..20: mol_type = other DNA
tgttaagatatttctcccag

SEQ ID NO: 124780 - DNA, 20 bp, synthetic construct
  source 1..20: mol_type = other DNA
ttgttaagatatttctccca

SEQ ID NO: 124781 - DNA, 20 bp, synthetic construct
  source 1..20: mol_type = other DNA
attgttaagatatttctccc

SEQ ID NO: 124782 - DNA, 20 bp, synthetic construct
  source 1..20: mol_type = other DNA
tattgttaagatatttctcc

SEQ ID NO: 124783 - DNA, 20 bp, synthetic construct
  source 1..20: mol_type = other DNA
atattgttaagatatttctc

SEQ ID NO: 124784 - DNA, 20 bp, synthetic construct
  source 1..20: mol_type = other DNA
catattgttaagatatttct

SEQ ID NO: 124785 - DNA, 20 bp, synthetic construct
  source 1..20: mol_type = other DNA
ccatattgttaagatatttc

SEQ ID NO: 124786 - DNA, 20 bp, synthetic construct
  source 1..20: mol_type = other DNA
tccatattgttaagatattt

SEQ ID NO: 124787 - DNA, 20 bp, synthetic construct
  source 1..20: mol_type = other DNA
ttccatattgttaagatatt

SEQ ID NO: 124788 - DNA, 20 bp, synthetic construct
  source 1..20: mol_type = other DNA
attccatattgttaagatat

SEQ ID NO: 124789 - DNA, 20 bp, synthetic construct
  source 1..20: mol_type = other DNA
gattccatattgttaagata

SEQ ID NO: 124790 - DNA, 20 bp, synthetic construct
  source 1..20: mol_type = other DNA
agattccatattgttaagat

SEQ ID NO: 124791 - DNA, 20 bp, synthetic construct
  source 1..20: mol_type = other DNA
aagattccatattgttaaga

SEQ ID NO: 124792 - DNA, 20 bp, synthetic construct
  source 1..20: mol_type = other DNA
gaagattccatattgttaag

SEQ ID NO: 124793 - DNA, 20 bp, synthetic construct
  source 1..20: mol_type = other DNA
tgaagattccatattgttaa

SEQ ID NO: 124794 - DNA, 20 bp, synthetic construct
  source 1..20: mol_type = other DNA
atgaagattccatattgtta

SEQ ID NO: 124795 - DNA, 20 bp, synthetic construct
  source 1..20: mol_type = other DNA
aatgaagattccatattgtt

SEQ ID NO: 124796 - DNA, 20 bp, synthetic construct
  source 1..20: mol_type = other DNA
caatgaagattccatattgt

SEQ ID NO: 124797 - DNA, 20 bp, synthetic construct
  source 1..20: mol_type = other DNA
tcaatgaagattccatattg

SEQ ID NO: 124798 - DNA, 20 bp, synthetic construct
  source 1..20: mol_type = other DNA
ctcaatgaagattccatatt

SEQ ID NO: 124799 - DNA, 20 bp, synthetic construct
  source 1..20: mol_type = other DNA
cctcaatgaagattccatat

SEQ ID NO: 124800 - DNA, 20 bp, synthetic construct
  source 1..20: mol_type = other DNA
acctcaatgaagattccata

SEQ ID NO: 124801 - DNA, 20 bp, synthetic construct
  source 1..20: mol_type = other DNA
gacctcaatgaagattccat

SEQ ID NO: 124802 - DNA, 20 bp, synthetic construct
  source 1..20: mol_type = other DNA
tgacctcaatgaagattcca

SEQ ID NO: 124803 - DNA, 20 bp, synthetic construct
  source 1..20: mol_type = other DNA
atgacctcaatgaagattcc

SEQ ID NO: 124804 - DNA, 20 bp, synthetic construct
  source 1..20: mol_type = other DNA
gatgacctcaatgaagattc

SEQ ID NO: 124805 - DNA, 20 bp, synthetic construct
  source 1..20: mol_type = other DNA
tgatgacctcaatgaagatt

SEQ ID NO: 124806 - DNA, 20 bp, synthetic construct
  source 1..20: mol_type = other DNA
atgatgacctcaatgaagat

SEQ ID NO: 124807 - DNA, 20 bp, synthetic construct
  source 1..20: mol_type = other DNA
tatgatgacctcaatgaaga

SEQ ID NO: 124808 - DNA, 20 bp, synthetic construct
  source 1..20: mol_type = other DNA
atatgatgacctcaatgaag

SEQ ID NO: 124809 - DNA, 20 bp, synthetic construct
  source 1..20: mol_type = other DNA
tatatgatgacctcaatgaa

SEQ ID NO: 124810 - DNA, 20 bp, synthetic construct
  source 1..20: mol_type = other DNA
gtatatgatgacctcaatga

SEQ ID NO: 124811 - DNA, 20 bp, synthetic construct
  source 1..20: mol_type = other DNA
agtatatgatgacctcaatg

SEQ ID NO: 124812 - DNA, 20 bp, synthetic construct
  source 1..20: mol_type = other DNA
cagtatatgatgacctcaat

SEQ ID NO: 124813 - DNA, 20 bp, synthetic construct
  source 1..20: mol_type = other DNA
gcagtatatgatgacctcaa

SEQ ID NO: 124814 - DNA, 20 bp, synthetic construct
  source 1..20: mol_type = other DNA
agcagtatatgatgacctca

SEQ ID NO: 124815 - DNA, 20 bp, synthetic construct
  source 1..20: mol_type = other DNA
gagcagtatatgatgacctc

SEQ ID NO: 124816 - DNA, 20 bp, synthetic construct
  source 1..20: mol_type = other DNA
ggagcagtatatgatgacct

SEQ ID NO: 124817 - DNA, 20 bp, synthetic construct
  source 1..20: mol_type = other DNA
tggagcagtatatgatgacc

SEQ ID NO: 124818 - DNA, 20 bp, synthetic construct
  source 1..20: mol_type = other DNA
atggagcagtatatgatgac

SEQ ID NO: 124819 - DNA, 20 bp, synthetic construct
  source 1..20: mol_type = other DNA
aatggagcagtatatgatga

SEQ ID NO: 124820 - DNA, 20 bp, synthetic construct
  source 1..20: mol_type = other DNA
aaatggagcagtatatgatg

SEQ ID NO: 124821 - DNA, 20 bp, synthetic construct
  source 1..20: mol_type = other DNA
taaatggagcagtatatgat

SEQ ID NO: 124822 - DNA, 20 bp, synthetic construct
  source 1..20: mol_type = other DNA
ataaatggagcagtatatga

SEQ ID NO: 124823 - DNA, 20 bp, synthetic construct
  source 1..20: mol_type = other DNA
aataaatggagcagtatatg

SEQ ID NO: 124824 - DNA, 20 bp, synthetic construct
  source 1..20: mol_type = other DNA
aaataaatggagcagtatat

SEQ ID NO: 124825 - DNA, 20 bp, synthetic construct
  source 1..20: mol_type = other DNA
taaataaatggagcagtata

SEQ ID NO: 124826 - DNA, 20 bp, synthetic construct
  source 1..20: mol_type = other DNA
ttaaataaatggagcagtat

SEQ ID NO: 124827 - DNA, 20 bp, synthetic construct
  source 1..20: mol_type = other DNA
cttaaataaatggagcagta

SEQ ID NO: 124828 - DNA, 20 bp, synthetic construct
  source 1..20: mol_type = other DNA
acttaaataaatggagcagt

SEQ ID NO: 124829 - DNA, 20 bp, synthetic construct
  source 1..20: mol_type = other DNA
gacttaaataaatggagcag

SEQ ID NO: 124830 - DNA, 20 bp, synthetic construct
  source 1..20: mol_type = other DNA
agacttaaataaatggagca

SEQ ID NO: 124831 - DNA, 20 bp, synthetic construct
  source 1..20: mol_type = other DNA
aagacttaaataaatggagc

SEQ ID NO: 124832 - DNA, 20 bp, synthetic construct
  source 1..20: mol_type = other DNA
taagacttaaataaatggag

SEQ ID NO: 124833 - DNA, 20 bp, synthetic construct
  source 1..20: mol_type = other DNA
ttaagacttaaataaatgga

SEQ ID NO: 124834 - DNA, 20 bp, synthetic construct
  source 1..20: mol_type = other DNA
cttaagacttaaataaatgg

SEQ ID NO: 124835 - DNA, 20 bp, synthetic construct
  source 1..20: mol_type = other DNA
acttaagacttaaataaatg

SEQ ID NO: 124836 - DNA, 20 bp, synthetic construct
  source 1..20: mol_type = other DNA
aacttaagacttaaataaat

SEQ ID NO: 124837 - DNA, 20 bp, synthetic construct
  source 1..20: mol_type = other DNA
aaacttaagacttaaataaa

SEQ ID NO: 124838 - DNA, 20 bp, synthetic construct
  source 1..20: mol_type = other DNA
gaaacttaagacttaaataa

SEQ ID NO: 124839 - DNA, 20 bp, synthetic construct
  source 1..20: mol_type = other DNA
tgaaacttaagacttaaata

SEQ ID NO: 124840 - DNA, 20 bp, synthetic construct
  source 1..20: mol_type = other DNA
gtgaaacttaagacttaaat

SEQ ID NO: 124841 - DNA, 20 bp, synthetic construct
  source 1..20: mol_type = other DNA
ggtgaaacttaagacttaaa

SEQ ID NO: 124842 - DNA, 20 bp, synthetic construct
  source 1..20: mol_type = other DNA
tggtgaaacttaagacttaa

SEQ ID NO: 124843 - DNA, 20 bp, synthetic construct
  source 1..20: mol_type = other DNA
ctggtgaaacttaagactta

SEQ ID NO: 124844 - DNA, 20 bp, synthetic construct
  source 1..20: mol_type = other DNA
actggtgaaacttaagactt

SEQ ID NO: 124845 - DNA, 20 bp, synthetic construct
  source 1..20: mol_type = other DNA
cactggtgaaacttaagact

SEQ ID NO: 124846 - DNA, 20 bp, synthetic construct
  source 1..20: mol_type = other DNA
acactggtgaaacttaagac

SEQ ID NO: 124847 - DNA, 20 bp, synthetic construct
  source 1..20: mol_type = other DNA
aacactggtgaaacttaaga

SEQ ID NO: 124848 - DNA, 20 bp, synthetic construct
  source 1..20: mol_type = other DNA
aaacactggtgaaacttaag

SEQ ID NO: 124849 - DNA, 20 bp, synthetic construct
  source 1..20: mol_type = other DNA
aaaacactggtgaaacttaa

SEQ ID NO: 124850 - DNA, 20 bp, synthetic construct
  source 1..20: mol_type = other DNA
gaaaacactggtgaaactta

SEQ ID NO: 124851 - DNA, 20 bp, synthetic construct
  source 1..20: mol_type = other DNA
agaaaacactggtgaaactt

SEQ ID NO: 124852 - DNA, 20 bp, synthetic construct
  source 1..20: mol_type = other DNA
tagaaaacactggtgaaact

SEQ ID NO: 124853 - DNA, 20 bp, synthetic construct
  source 1..20: mol_type = other DNA
ctagaaaacactggtgaaac

SEQ ID NO: 124854 - DNA, 20 bp, synthetic construct
  source 1..20: mol_type = other DNA
actagaaaacactggtgaaa

SEQ ID NO: 124855 - DNA, 20 bp, synthetic construct
  source 1..20: mol_type = other DNA
aactagaaaacactggtgaa

SEQ ID NO: 124856 - DNA, 20 bp, synthetic construct
  source 1..20: mol_type = other DNA
aaactagaaaacactggtga

SEQ ID NO: 124857 - DNA, 20 bp, synthetic construct
  source 1..20: mol_type = other DNA
aaaactagaaaacactggtg

SEQ ID NO: 124858 - DNA, 20 bp, synthetic construct
  source 1..20: mol_type = other DNA
gaaaactagaaaacactggt

SEQ ID NO: 124859 - DNA, 20 bp, synthetic construct
  source 1..20: mol_type = other DNA
agaaaactagaaaacactgg

SEQ ID NO: 124860 - DNA, 20 bp, synthetic construct
  source 1..20: mol_type = other DNA
aagaaaactagaaaacactg

SEQ ID NO: 124861 - DNA, 20 bp, synthetic construct
  source 1..20: mol_type = other DNA
aaagaaaactagaaaacact

SEQ ID NO: 124862 - DNA, 20 bp, synthetic construct
  source 1..20: mol_type = other DNA
caaagaaaactagaaaacac

SEQ ID NO: 124863 - DNA, 20 bp, synthetic construct
  source 1..20: mol_type = other DNA
acaaagaaaactagaaaaca

SEQ ID NO: 124864 - DNA, 20 bp, synthetic construct
  source 1..20: mol_type = other DNA
tacaaagaaaactagaaaac

SEQ ID NO: 124865 - DNA, 20 bp, synthetic construct
  source 1..20: mol_type = other DNA
atacaaagaaaactagaaaa

SEQ ID NO: 124866 - DNA, 20 bp, synthetic construct
  source 1..20: mol_type = other DNA
gatacaaagaaaactagaaa

SEQ ID NO: 124867 - DNA, 20 bp, synthetic construct
  source 1..20: mol_type = other DNA
tgatacaaagaaaactagaa

SEQ ID NO: 124868 - DNA, 20 bp, synthetic construct
  source 1..20: mol_type = other DNA
ctgatacaaagaaaactaga

SEQ ID NO: 124869 - DNA, 20 bp, synthetic construct
  source 1..20: mol_type = other DNA
actgatacaaagaaaactag

SEQ ID NO: 124870 - DNA, 20 bp, synthetic construct
  source 1..20: mol_type = other DNA
aactgatacaaagaaaacta

SEQ ID NO: 124871 - DNA, 20 bp, synthetic construct
  source 1..20: mol_type = other DNA
aaactgatacaaagaaaact

SEQ ID NO: 124872 - DNA, 20 bp, synthetic construct
  source 1..20: mol_type = other DNA
aaaactgatacaaagaaaac

SEQ ID NO: 124873 - DNA, 20 bp, synthetic construct
  source 1..20: mol_type = other DNA
caaaactgatacaaagaaaa

SEQ ID NO: 124874 - DNA, 20 bp, synthetic construct
  source 1..20: mol_type = other DNA
acaaaactgatacaaagaaa

SEQ ID NO: 124875 - DNA, 20 bp, synthetic construct
  source 1..20: mol_type = other DNA
cacaaaactgatacaaagaa

SEQ ID NO: 124876 - DNA, 20 bp, synthetic construct
  source 1..20: mol_type = other DNA
gcacaaaactgatacaaaga

SEQ ID NO: 124877 - DNA, 20 bp, synthetic construct
  source 1..20: mol_type = other DNA
ggcacaaaactgatacaaag

SEQ ID NO: 124878 - DNA, 20 bp, synthetic construct
  source 1..20: mol_type = other DNA
aggcacaaaactgatacaaa

SEQ ID NO: 124879 - DNA, 20 bp, synthetic construct
  source 1..20: mol_type = other DNA
caggcacaaaactgatacaa

SEQ ID NO: 124880 - DNA, 20 bp, synthetic construct
  source 1..20: mol_type = other DNA
gcaggcacaaaactgataca

SEQ ID NO: 124881 - DNA, 20 bp, synthetic construct
  source 1..20: mol_type = other DNA
agcaggcacaaaactgatac

SEQ ID NO: 124882 - DNA, 20 bp, synthetic construct
  source 1..20: mol_type = other DNA
aagcaggcacaaaactgata

SEQ ID NO: 124883 - DNA, 20 bp, synthetic construct
  source 1..20: mol_type = other DNA
aaagcaggcacaaaactgat

SEQ ID NO: 124884 - DNA, 20 bp, synthetic construct
  source 1..20: mol_type = other DNA
gaaagcaggcacaaaactga

SEQ ID NO: 124885 - DNA, 20 bp, synthetic construct
  source 1..20: mol_type = other DNA
agaaagcaggcacaaaactg

SEQ ID NO: 124886 - DNA, 20 bp, synthetic construct
  source 1..20: mol_type = other DNA
aagaaagcaggcacaaaact

SEQ ID NO: 124887 - DNA, 20 bp, synthetic construct
  source 1..20: mol_type = other DNA
taagaaagcaggcacaaaac

SEQ ID NO: 124888 - DNA, 20 bp, synthetic construct
  source 1..20: mol_type = other DNA
ttaagaaagcaggcacaaaa

SEQ ID NO: 124889 - DNA, 20 bp, synthetic construct
  source 1..20: mol_type = other DNA
tttaagaaagcaggcacaaa

SEQ ID NO: 124890 - DNA, 20 bp, synthetic construct
  source 1..20: mol_type = other DNA
atttaagaaagcaggcacaa

SEQ ID NO: 124891 - DNA, 20 bp, synthetic construct
  source 1..20: mol_type = other DNA
aatttaagaaagcaggcaca

SEQ ID NO: 124892 - DNA, 20 bp, synthetic construct
  source 1..20: mol_type = other DNA
aaatttaagaaagcaggcac

SEQ ID NO: 124893 - DNA, 20 bp, synthetic construct
  source 1..20: mol_type = other DNA
taaatttaagaaagcaggca

SEQ ID NO: 124894 - DNA, 20 bp, synthetic construct
  source 1..20: mol_type = other DNA
ataaatttaagaaagcaggc

SEQ ID NO: 124895 - DNA, 20 bp, synthetic construct
  source 1..20: mol_type = other DNA
gataaatttaagaaagcagg

SEQ ID NO: 124896 - DNA, 20 bp, synthetic construct
  source 1..20: mol_type = other DNA
ggataaatttaagaaagcag

SEQ ID NO: 124897 - DNA, 20 bp, synthetic construct
  source 1..20: mol_type = other DNA
gggataaatttaagaaagca

SEQ ID NO: 124898 - DNA, 20 bp, synthetic construct
  source 1..20: mol_type = other DNA
agggataaatttaagaaagc

SEQ ID NO: 124899 - DNA, 20 bp, synthetic construct
  source 1..20: mol_type = other DNA
aagggataaatttaagaaag

SEQ ID NO: 124900 - DNA, 20 bp, synthetic construct
  source 1..20: mol_type = other DNA
taagggataaatttaagaaa

SEQ ID NO: 124901 - DNA, 20 bp, synthetic construct
  source 1..20: mol_type = other DNA
ttaagggataaatttaagaa

SEQ ID NO: 124902 - DNA, 20 bp, synthetic construct
  source 1..20: mol_type = other DNA
attaagggataaatttaaga

SEQ ID NO: 124903 - DNA, 20 bp, synthetic construct
  source 1..20: mol_type = other DNA
tattaagggataaatttaag

SEQ ID NO: 124904 - DNA, 20 bp, synthetic construct
  source 1..20: mol_type = other DNA
atattaagggataaatttaa

SEQ ID NO: 124905 - DNA, 20 bp, synthetic construct
  source 1..20: mol_type = other DNA
aatattaagggataaattta

SEQ ID NO: 124906 - DNA, 20 bp, synthetic construct
  source 1..20: mol_type = other DNA
aaatattaagggataaattt

SEQ ID NO: 124907 - DNA, 20 bp, synthetic construct
  source 1..20: mol_type = other DNA
gaaatattaagggataaatt

SEQ ID NO: 124908 - DNA, 20 bp, synthetic construct
  source 1..20: mol_type = other DNA
tgaaatattaagggataaat

SEQ ID NO: 124909 - DNA, 20 bp, synthetic construct
  source 1..20: mol_type = other DNA
atgaaatattaagggataaa

SEQ ID NO: 124910 - DNA, 20 bp, synthetic construct
  source 1..20: mol_type = other DNA
gatgaaatattaagggataa

SEQ ID NO: 124911 - DNA, 20 bp, synthetic construct
  source 1..20: mol_type = other DNA
agatgaaatattaagggata

SEQ ID NO: 124912 - DNA, 20 bp, synthetic construct
  source 1..20: mol_type = other DNA
cagatgaaatattaagggat

SEQ ID NO: 124913 - DNA, 20 bp, synthetic construct
  source 1..20: mol_type = other DNA
acagatgaaatattaaggga

SEQ ID NO: 124914 - DNA, 20 bp, synthetic construct
  source 1..20: mol_type = other DNA
aacagatgaaatattaaggg

SEQ ID NO: 124915 - DNA, 20 bp, synthetic construct
  source 1..20: mol_type = other DNA
aaacagatgaaatattaagg

SEQ ID NO: 124916 - DNA, 20 bp, synthetic construct
  source 1..20: mol_type = other DNA
aaaacagatgaaatattaag

SEQ ID NO: 124917 - DNA, 20 bp, synthetic construct
  source 1..20: mol_type = other DNA
caaaacagatgaaatattaa

SEQ ID NO: 124918 - DNA, 20 bp, synthetic construct
  source 1..20: mol_type = other DNA
acaaaacagatgaaatatta

SEQ ID NO: 124919 - DNA, 20 bp, synthetic construct
  source 1..20: mol_type = other DNA
cacaaaacagatgaaatatt

SEQ ID NO: 124920 - DNA, 20 bp, synthetic construct
  source 1..20: mol_type = other DNA
gcacaaaacagatgaaatat

SEQ ID NO: 124921 - DNA, 20 bp, synthetic construct
  source 1..20: mol_type = other DNA
agcacaaaacagatgaaata

SEQ ID NO: 124922 - DNA, 20 bp, synthetic construct
  source 1..20: mol_type = other DNA
cagcacaaaacagatgaaat

SEQ ID NO: 124923 - DNA, 20 bp, synthetic construct
  source 1..20: mol_type = other DNA
acagcacaaaacagatgaaa

SEQ ID NO: 124924 - DNA, 20 bp, synthetic construct
  source 1..20: mol_type = other DNA
aacagcacaaaacagatgaa

SEQ ID NO: 124925 - DNA, 20 bp, synthetic construct
  source 1..20: mol_type = other DNA
caacagcacaaaacagatga

SEQ ID NO: 124926 - DNA, 20 bp, synthetic construct
  source 1..20: mol_type = other DNA
acaacagcacaaaacagatg

SEQ ID NO: 124927 - DNA, 20 bp, synthetic construct
  source 1..20: mol_type = other DNA
cacaacagcacaaaacagat

SEQ ID NO: 124928 - DNA, 20 bp, synthetic construct
  source 1..20: mol_type = other DNA
tcacaacagcacaaaacaga

SEQ ID NO: 124929 - DNA, 20 bp, synthetic construct
  source 1..20: mol_type = other DNA
ctcacaacagcacaaaacag

SEQ ID NO: 124930 - DNA, 20 bp, synthetic construct
  source 1..20: mol_type = other DNA
actcacaacagcacaaaaca

SEQ ID NO: 124931 - DNA, 20 bp, synthetic construct
  source 1..20: mol_type = other DNA
aactcacaacagcacaaaac

SEQ ID NO: 124932 - DNA, 20 bp, synthetic construct
  source 1..20: mol_type = other DNA
taactcacaacagcacaaaa

SEQ ID NO: 124933 - DNA, 20 bp, synthetic construct
  source 1..20: mol_type = other DNA
ataactcacaacagcacaaa

SEQ ID NO: 124934 - DNA, 20 bp, synthetic construct
  source 1..20: mol_type = other DNA
tataactcacaacagcacaa

SEQ ID NO: 124935 - DNA, 20 bp, synthetic construct
  source 1..20: mol_type = other DNA
atataactcacaacagcaca

SEQ ID NO: 124936 - DNA, 20 bp, synthetic construct
  source 1..20: mol_type = other DNA
aatataactcacaacagcac

SEQ ID NO: 124937 - DNA, 20 bp, synthetic construct
  source 1..20: mol_type = other DNA
aaatataactcacaacagca

SEQ ID NO: 124938 - DNA, 20 bp, synthetic construct
  source 1..20: mol_type = other DNA
aaaatataactcacaacagc

SEQ ID NO: 124939 - DNA, 20 bp, synthetic construct
  source 1..20: mol_type = other DNA
taaaatataactcacaacag

SEQ ID NO: 124940 - DNA, 20 bp, synthetic construct
  source 1..20: mol_type = other DNA
ttaaaatataactcacaaca

SEQ ID NO: 124941 - DNA, 20 bp, synthetic construct
  source 1..20: mol_type = other DNA
tttaaaatataactcacaac

SEQ ID NO: 124942 - DNA, 20 bp, synthetic construct
  source 1..20: mol_type = other DNA
ttttaaaatataactcacaa

SEQ ID NO: 124943 - DNA, 20 bp, synthetic construct
  source 1..20: mol_type = other DNA
tttttaaaatataactcaca

SEQ ID NO: 124944 - DNA, 20 bp, synthetic construct
  source 1..20: mol_type = other DNA
gtttttaaaatataactcac

SEQ ID NO: 124945 - DNA, 20 bp, synthetic construct
  source 1..20: mol_type = other DNA
agtttttaaaatataactca

SEQ ID NO: 124946 - DNA, 20 bp, synthetic construct
  source 1..20: mol_type = other DNA
aagtttttaaaatataactc

SEQ ID NO: 124947 - DNA, 20 bp, synthetic construct
  source 1..20: mol_type = other DNA
aaagtttttaaaatataact

SEQ ID NO: 124948 - DNA, 20 bp, synthetic construct
  source 1..20: mol_type = other DNA
gaaagtttttaaaatataac

SEQ ID NO: 124949 - DNA, 20 bp, synthetic construct
  source 1..20: mol_type = other DNA
tgaaagtttttaaaatataa

SEQ ID NO: 124950 - DNA, 20 bp, synthetic construct
  source 1..20: mol_type = other DNA
ttgaaagtttttaaaatata

SEQ ID NO: 124951 - DNA, 20 bp, synthetic construct
  source 1..20: mol_type = other DNA
gttgaaagtttttaaaatat

SEQ ID NO: 124952 - DNA, 20 bp, synthetic construct
  source 1..20: mol_type = other DNA
cgttgaaagtttttaaaata

SEQ ID NO: 124953 - DNA, 20 bp, synthetic construct
  source 1..20: mol_type = other DNA
acgttgaaagtttttaaaat

SEQ ID NO: 124954 - DNA, 20 bp, synthetic construct
  source 1..20: mol_type = other DNA
aacgttgaaagtttttaaaa

SEQ ID NO: 124955 - DNA, 20 bp, synthetic construct
  source 1..20: mol_type = other DNA
aaacgttgaaagtttttaaa

SEQ ID NO: 124956 - DNA, 20 bp, synthetic construct
  source 1..20: mol_type = other DNA
caaacgttgaaagtttttaa

SEQ ID NO: 124957 - DNA, 20 bp, synthetic construct
  source 1..20: mol_type = other DNA
acaaacgttgaaagttttta

SEQ ID NO: 124958 - DNA, 20 bp, synthetic construct
  source 1..20: mol_type = other DNA
aacaaacgttgaaagttttt

SEQ ID NO: 124959 - DNA, 20 bp, synthetic construct
  source 1..20: mol_type = other DNA
aaacaaacgttgaaagtttt

SEQ ID NO: 124960 - DNA, 20 bp, synthetic construct
  source 1..20: mol_type = other DNA
taaacaaacgttgaaagttt

SEQ ID NO: 124961 - DNA, 20 bp, synthetic construct
  source 1..20: mol_type = other DNA
ataaacaaacgttgaaagtt

SEQ ID NO: 124962 - DNA, 20 bp, synthetic construct
  source 1..20: mol_type = other DNA
aataaacaaacgttgaaagt

SEQ ID NO: 124963 - DNA, 20 bp, synthetic construct
  source 1..20: mol_type = other DNA
gaataaacaaacgttgaaag

SEQ ID NO: 124964 - DNA, 20 bp, synthetic construct
  source 1..20: mol_type = other DNA
cgaataaacaaacgttgaaa

SEQ ID NO: 124965 - DNA, 20 bp, synthetic construct
  source 1..20: mol_type = other DNA
acgaataaacaaacgttgaa

SEQ ID NO: 124966 - DNA, 20 bp, synthetic construct
  source 1..20: mol_type = other DNA
tacgaataaacaaacgttga

SEQ ID NO: 124967 - DNA, 20 bp, synthetic construct
  source 1..20: mol_type = other DNA
ttacgaataaacaaacgttg

SEQ ID NO: 124968 - DNA, 20 bp, synthetic construct
  source 1..20: mol_type = other DNA
tttacgaataaacaaacgtt

SEQ ID NO: 124969 - DNA, 20 bp, synthetic construct
  source 1..20: mol_type = other DNA
atttacgaataaacaaacgt

SEQ ID NO: 124970 - DNA, 20 bp, synthetic construct
  source 1..20: mol_type = other DNA
tatttacgaataaacaaacg

SEQ ID NO: 124971 - DNA, 20 bp, synthetic construct
  source 1..20: mol_type = other DNA
ctatttacgaataaacaaac

SEQ ID NO: 124972 - DNA, 20 bp, synthetic construct
  source 1..20: mol_type = other DNA
tctatttacgaataaacaaa

SEQ ID NO: 124973 - DNA, 20 bp, synthetic construct
  source 1..20: mol_type = other DNA
ctctatttacgaataaacaa

SEQ ID NO: 124974 - DNA, 20 bp, synthetic construct
  source 1..20: mol_type = other DNA
tctctatttacgaataaaca

SEQ ID NO: 124975 - DNA, 20 bp, synthetic construct
  source 1..20: mol_type = other DNA
atctctatttacgaataaac

SEQ ID NO: 124976 - DNA, 20 bp, synthetic construct
  source 1..20: mol_type = other DNA
catctctatttacgaataaa

SEQ ID NO: 124977 - DNA, 20 bp, synthetic construct
  source 1..20: mol_type = other DNA
gcatctctatttacgaataa

SEQ ID NO: 124978 - DNA, 20 bp, synthetic construct
  source 1..20: mol_type = other DNA
tgcatctctatttacgaata

SEQ ID NO: 124979 - DNA, 20 bp, synthetic construct
  source 1..20: mol_type = other DNA
gtgcatctctatttacgaat

SEQ ID NO: 124980 - DNA, 20 bp, synthetic construct
  source 1..20: mol_type = other DNA
agtgcatctctatttacgaa

SEQ ID NO: 124981 - DNA, 20 bp, synthetic construct
  source 1..20: mol_type = other DNA
aagtgcatctctatttacga

SEQ ID NO: 124982 - DNA, 20 bp, synthetic construct
  source 1..20: mol_type = other DNA
caagtgcatctctatttacg

SEQ ID NO: 124983 - DNA, 20 bp, synthetic construct
  source 1..20: mol_type = other DNA
tcaagtgcatctctatttac

SEQ ID NO: 124984 - DNA, 20 bp, synthetic construct
  source 1..20: mol_type = other DNA
atcaagtgcatctctattta

SEQ ID NO: 124985 - DNA, 20 bp, synthetic construct
  source 1..20: mol_type = other DNA
aatcaagtgcatctctattt

SEQ ID NO: 124986 - DNA, 20 bp, synthetic construct
  source 1..20: mol_type = other DNA
aaatcaagtgcatctctatt

SEQ ID NO: 124987 - DNA, 20 bp, synthetic construct
  source 1..20: mol_type = other DNA
aaaatcaagtgcatctctat

SEQ ID NO: 124988 - DNA, 20 bp, synthetic construct
  source 1..20: mol_type = other DNA
aaaaatcaagtgcatctcta

SEQ ID NO: 124989 - DNA, 20 bp, synthetic construct
  source 1..20: mol_type = other DNA
caaaaatcaagtgcatctct

SEQ ID NO: 124990 - DNA, 20 bp, synthetic construct
  source 1..20: mol_type = other DNA
tcaaaaatcaagtgcatctc

SEQ ID NO: 124991 - DNA, 20 bp, synthetic construct
  source 1..20: mol_type = other DNA
ttcaaaaatcaagtgcatct

SEQ ID NO: 124992 - DNA, 20 bp, synthetic construct
  source 1..20: mol_type = other DNA
attcaaaaatcaagtgcatc

SEQ ID NO: 124993 - DNA, 20 bp, synthetic construct
  source 1..20: mol_type = other DNA
tattcaaaaatcaagtgcat

SEQ ID NO: 124994 - DNA, 20 bp, synthetic construct
  source 1..20: mol_type = other DNA
atattcaaaaatcaagtgca

SEQ ID NO: 124995 - DNA, 20 bp, synthetic construct
  source 1..20: mol_type = other DNA
aatattcaaaaatcaagtgc

SEQ ID NO: 124996 - DNA, 20 bp, synthetic construct
  source 1..20: mol_type = other DNA
caatattcaaaaatcaagtg

SEQ ID NO: 124997 - DNA, 20 bp, synthetic construct
  source 1..20: mol_type = other DNA
tcaatattcaaaaatcaagt

SEQ ID NO: 124998 - DNA, 20 bp, synthetic construct
  source 1..20: mol_type = other DNA
gtcaatattcaaaaatcaag

SEQ ID NO: 124999 - DNA, 20 bp, synthetic construct
  source 1..20: mol_type = other DNA
ggtcaatattcaaaaatcaa

SEQ ID NO: 125000 - DNA, 20 bp, synthetic construct
  source 1..20: mol_type = other DNA
aggtcaatattcaaaaatca

SEQ ID NO: 125001 - DNA, 20 bp, synthetic construct
  source 1..20: mol_type = other DNA
aaggtcaatattcaaaaatc

SEQ ID NO: 125002 - DNA, 20 bp, synthetic construct
  source 1..20: mol_type = other DNA
caaggtcaatattcaaaaat

SEQ ID NO: 125003 - DNA, 20 bp, synthetic construct
  source 1..20: mol_type = other DNA
acaaggtcaatattcaaaaa

SEQ ID NO: 125004 - DNA, 20 bp, synthetic construct
  source 1..20: mol_type = other DNA
cacaaggtcaatattcaaaa

SEQ ID NO: 125005 - DNA, 20 bp, synthetic construct
  source 1..20: mol_type = other DNA
acacaaggtcaatattcaaa

SEQ ID NO: 125006 - DNA, 20 bp, synthetic construct
  source 1..20: mol_type = other DNA
gacacaaggtcaatattcaa

SEQ ID NO: 125007 - DNA, 20 bp, synthetic construct
  source 1..20: mol_type = other DNA
agacacaaggtcaatattca

SEQ ID NO: 125008 - DNA, 20 bp, synthetic construct
  source 1..20: mol_type = other DNA
aagacacaaggtcaatattc

SEQ ID NO: 125009 - DNA, 20 bp, synthetic construct
  source 1..20: mol_type = other DNA
caagacacaaggtcaatatt

SEQ ID NO: 125010 - DNA, 20 bp, synthetic construct
  source 1..20: mol_type = other DNA
tcaagacacaaggtcaatat

SEQ ID NO: 125011 - DNA, 20 bp, synthetic construct
  source 1..20: mol_type = other DNA
atcaagacacaaggtcaata

SEQ ID NO: 125012 - DNA, 20 bp, synthetic construct
  source 1..20: mol_type = other DNA
catcaagacacaaggtcaat

SEQ ID NO: 125013 - DNA, 20 bp, synthetic construct
  source 1..20: mol_type = other DNA
acatcaagacacaaggtcaa

SEQ ID NO: 125014 - DNA, 20 bp, synthetic construct
  source 1..20: mol_type = other DNA
cacatcaagacacaaggtca

SEQ ID NO: 125015 - DNA, 20 bp, synthetic construct
  source 1..20: mol_type = other DNA
acacatcaagacacaaggtc

SEQ ID NO: 125016 - DNA, 20 bp, synthetic construct
  source 1..20: mol_type = other DNA
aacacatcaagacacaaggt

SEQ ID NO: 125017 - DNA, 20 bp, synthetic construct
  source 1..20: mol_type = other DNA
caacacatcaagacacaagg

SEQ ID NO: 125018 - DNA, 20 bp, synthetic construct
  source 1..20: mol_type = other DNA
ccaacacatcaagacacaag

SEQ ID NO: 125019 - DNA, 20 bp, synthetic construct
  source 1..20: mol_type = other DNA
accaacacatcaagacacaa

SEQ ID NO: 125020 - DNA, 20 bp, synthetic construct
  source 1..20: mol_type = other DNA
taccaacacatcaagacaca

SEQ ID NO: 125021 - DNA, 20 bp, synthetic construct
  source 1..20: mol_type = other DNA
ttaccaacacatcaagacac

SEQ ID NO: 125022 - DNA, 20 bp, synthetic construct
  source 1..20: mol_type = other DNA
tttaccaacacatcaagaca

SEQ ID NO: 125023 - DNA, 20 bp, synthetic construct
  source 1..20: mol_type = other DNA
gtttaccaacacatcaagac

SEQ ID NO: 125024 - DNA, 20 bp, synthetic construct
  source 1..20: mol_type = other DNA
ggtttaccaacacatcaaga

SEQ ID NO: 125025 - DNA, 20 bp, synthetic construct
  source 1..20: mol_type = other DNA
gggtttaccaacacatcaag

SEQ ID NO: 125026 - DNA, 20 bp, synthetic construct
  source 1..20: mol_type = other DNA
tgggtttaccaacacatcaa

SEQ ID NO: 125027 - DNA, 20 bp, synthetic construct
  source 1..20: mol_type = other DNA
gtgggtttaccaacacatca

SEQ ID NO: 125028 - DNA, 20 bp, synthetic construct
  source 1..20: mol_type = other DNA
agtgggtttaccaacacatc

SEQ ID NO: 125029 - DNA, 20 bp, synthetic construct
  source 1..20: mol_type = other DNA
cagtgggtttaccaacacat

SEQ ID NO: 125030 - DNA, 20 bp, synthetic construct
  source 1..20: mol_type = other DNA
acagtgggtttaccaacaca

SEQ ID NO: 125031 - DNA, 20 bp, synthetic construct
  source 1..20: mol_type = other DNA
aacagtgggtttaccaacac

SEQ ID NO: 125032 - DNA, 20 bp, synthetic construct
  source 1..20: mol_type = other DNA
aaacagtgggtttaccaaca

SEQ ID NO: 125033 - DNA, 20 bp, synthetic construct
  source 1..20: mol_type = other DNA
gaaacagtgggtttaccaac

SEQ ID NO: 125034 - DNA, 20 bp, synthetic construct
  source 1..20: mol_type = other DNA
agaaacagtgggtttaccaa

SEQ ID NO: 125035 - DNA, 20 bp, synthetic construct
  source 1..20: mol_type = other DNA
cagaaacagtgggtttacca

SEQ ID NO: 125036 - DNA, 20 bp, synthetic construct
  source 1..20: mol_type = other DNA
ccagaaacagtgggtttacc

SEQ ID NO: 125037 - DNA, 20 bp, synthetic construct
  source 1..20: mol_type = other DNA
gccagaaacagtgggtttac

SEQ ID NO: 125038 - DNA, 20 bp, synthetic construct
  source 1..20: mol_type = other DNA
tgccagaaacagtgggttta

SEQ ID NO: 125039 - DNA, 20 bp, synthetic construct
  source 1..20: mol_type = other DNA
ctgccagaaacagtgggttt

SEQ ID NO: 125040 - DNA, 20 bp, synthetic construct
  source 1..20: mol_type = other DNA
gctgccagaaacagtgggtt

SEQ ID NO: 125041 - DNA, 20 bp, synthetic construct
  source 1..20: mol_type = other DNA
ggctgccagaaacagtgggt

SEQ ID NO: 125042 - DNA, 20 bp, synthetic construct
  source 1..20: mol_type = other DNA
gggctgccagaaacagtggg

SEQ ID NO: 125043 - DNA, 20 bp, synthetic construct
  source 1..20: mol_type = other DNA
agggctgccagaaacagtgg

SEQ ID NO: 125044 - DNA, 20 bp, synthetic construct
  source 1..20: mol_type = other DNA
aagggctgccagaaacagtg

SEQ ID NO: 125045 - DNA, 20 bp, synthetic construct
  source 1..20: mol_type = other DNA
aaagggctgccagaaacagt

SEQ ID NO: 125046 - DNA, 20 bp, synthetic construct
  source 1..20: mol_type = other DNA
taaagggctgccagaaacag

SEQ ID NO: 125047 - DNA, 20 bp, synthetic construct
  source 1..20: mol_type = other DNA
ttaaagggctgccagaaaca

SEQ ID NO: 125048 - DNA, 20 bp, synthetic construct
  source 1..20: mol_type = other DNA
cttaaagggctgccagaaac

SEQ ID NO: 125049 - DNA, 20 bp, synthetic construct
  source 1..20: mol_type = other DNA
tcttaaagggctgccagaaa

SEQ ID NO: 125050 - DNA, 20 bp, synthetic construct
  source 1..20: mol_type = other DNA
gtcttaaagggctgccagaa

SEQ ID NO: 125051 - DNA, 20 bp, synthetic construct
  source 1..20: mol_type = other DNA
agtcttaaagggctgccaga

SEQ ID NO: 125052 - DNA, 20 bp, synthetic construct
  source 1..20: mol_type = other DNA
aagtcttaaagggctgccag

SEQ ID NO: 125053 - DNA, 20 bp, synthetic construct
  source 1..20: mol_type = other DNA
taagtcttaaagggctgcca

SEQ ID NO: 125054 - DNA, 20 bp, synthetic construct
  source 1..20: mol_type = other DNA
ttaagtcttaaagggctgcc

SEQ ID NO: 125055 - DNA, 20 bp, synthetic construct
  source 1..20: mol_type = other DNA
tttaagtcttaaagggctgc

SEQ ID NO: 125056 - DNA, 20 bp, synthetic construct
  source 1..20: mol_type = other DNA
gtttaagtcttaaagggctg

SEQ ID NO: 125057 - DNA, 20 bp, synthetic construct
  source 1..20: mol_type = other DNA
tgtttaagtcttaaagggct

SEQ ID NO: 125058 - DNA, 20 bp, synthetic construct
  source 1..20: mol_type = other DNA
atgtttaagtcttaaagggc

SEQ ID NO: 125059 - DNA, 20 bp, synthetic construct
  source 1..20: mol_type = other DNA
tatgtttaagtcttaaaggg

SEQ ID NO: 125060 - DNA, 20 bp, synthetic construct
  source 1..20: mol_type = other DNA
gtatgtttaagtcttaaagg

SEQ ID NO: 125061 - DNA, 20 bp, synthetic construct
  source 1..20: mol_type = other DNA
tgtatgtttaagtcttaaag

SEQ ID NO: 125062 - DNA, 20 bp, synthetic construct
  source 1..20: mol_type = other DNA
ttgtatgtttaagtcttaaa

SEQ ID NO: 125063 - DNA, 20 bp, synthetic construct
  source 1..20: mol_type = other DNA
attgtatgtttaagtcttaa

SEQ ID NO: 125064 - DNA, 20 bp, synthetic construct
  source 1..20: mol_type = other DNA
gattgtatgtttaagtctta

SEQ ID NO: 125065 - DNA, 20 bp, synthetic construct
  source 1..20: mol_type = other DNA
tgattgtatgtttaagtctt

SEQ ID NO: 125066 - DNA, 20 bp, synthetic construct
  source 1..20: mol_type = other DNA
atgattgtatgtttaagtct

SEQ ID NO: 125067 - DNA, 20 bp, synthetic construct
  source 1..20: mol_type = other DNA
catgattgtatgtttaagtc

SEQ ID NO: 125068 - DNA, 20 bp, synthetic construct
  source 1..20: mol_type = other DNA
tcatgattgtatgtttaagt

SEQ ID NO: 125069 - DNA, 20 bp, synthetic construct
  source 1..20: mol_type = other DNA
atcatgattgtatgtttaag

SEQ ID NO: 125070 - DNA, 20 bp, synthetic construct
  source 1..20: mol_type = other DNA
gatcatgattgtatgtttaa

SEQ ID NO: 125071 - DNA, 20 bp, synthetic construct
  source 1..20: mol_type = other DNA
agatcatgattgtatgttta

SEQ ID NO: 125072 - DNA, 20 bp, synthetic construct
  source 1..20: mol_type = other DNA
tagatcatgattgtatgttt

SEQ ID NO: 125073 - DNA, 20 bp, synthetic construct
  source 1..20: mol_type = other DNA
ttagatcatgattgtatgtt

SEQ ID NO: 125074 - DNA, 20 bp, synthetic construct
  source 1..20: mol_type = other DNA
attagatcatgattgtatgt

SEQ ID NO: 125075 - DNA, 20 bp, synthetic construct
  source 1..20: mol_type = other DNA
gattagatcatgattgtatg

SEQ ID NO: 125076 - DNA, 20 bp, synthetic construct
  source 1..20: mol_type = other DNA
tgattagatcatgattgtat

SEQ ID NO: 125077 - DNA, 20 bp, synthetic construct
  source 1..20: mol_type = other DNA
gtgattagatcatgattgta

SEQ ID NO: 125078 - DNA, 20 bp, synthetic construct
  source 1..20: mol_type = other DNA
ggtgattagatcatgattgt

SEQ ID NO: 125079 - DNA, 20 bp, synthetic construct
  source 1..20: mol_type = other DNA
tggtgattagatcatgattg

SEQ ID NO: 125080 - DNA, 20 bp, synthetic construct
  source 1..20: mol_type = other DNA
atggtgattagatcatgatt

SEQ ID NO: 125081 - DNA, 20 bp, synthetic construct
  source 1..20: mol_type = other DNA
catggtgattagatcatgat

SEQ ID NO: 125082 - DNA, 20 bp, synthetic construct
  source 1..20: mol_type = other DNA
acatggtgattagatcatga

SEQ ID NO: 125083 - DNA, 20 bp, synthetic construct
  source 1..20: mol_type = other DNA
aacatggtgattagatcatg

SEQ ID NO: 125084 - DNA, 20 bp, synthetic construct
  source 1..20: mol_type = other DNA
caacatggtgattagatcat

SEQ ID NO: 125085 - DNA, 20 bp, synthetic construct
  source 1..20: mol_type = other DNA
ccaacatggtgattagatca

SEQ ID NO: 125086 - DNA, 20 bp, synthetic construct
  source 1..20: mol_type = other DNA
accaacatggtgattagatc

SEQ ID NO: 125087 - DNA, 20 bp, synthetic construct
  source 1..20: mol_type = other DNA
caccaacatggtgattagat

SEQ ID NO: 125088 - DNA, 20 bp, synthetic construct
  source 1..20: mol_type = other DNA
acaccaacatggtgattaga

SEQ ID NO: 125089 - DNA, 20 bp, synthetic construct
  source 1..20: mol_type = other DNA
aacaccaacatggtgattag

SEQ ID NO: 125090 - DNA, 20 bp, synthetic construct
  source 1..20: mol_type = other DNA
aaacaccaacatggtgatta

SEQ ID NO: 125091 - DNA, 20 bp, synthetic construct
  source 1..20: mol_type = other DNA
aaaacaccaacatggtgatt

SEQ ID NO: 125092 - DNA, 20 bp, synthetic construct
  source 1..20: mol_type = other DNA
aaaaacaccaacatggtgat

SEQ ID NO: 125093 - DNA, 20 bp, synthetic construct
  source 1..20: mol_type = other DNA
caaaaacaccaacatggtga

SEQ ID NO: 125094 - DNA, 20 bp, synthetic construct
  source 1..20: mol_type = other DNA
ccaaaaacaccaacatggtg

SEQ ID NO: 125095 - DNA, 20 bp, synthetic construct
  source 1..20: mol_type = other DNA
cccaaaaacaccaacatggt

SEQ ID NO: 125096 - DNA, 20 bp, synthetic construct
  source 1..20: mol_type = other DNA
acccaaaaacaccaacatgg

SEQ ID NO: 125097 - DNA, 20 bp, synthetic construct
  source 1..20: mol_type = other DNA
aacccaaaaacaccaacatg

SEQ ID NO: 125098 - DNA, 20 bp, synthetic construct
  source 1..20: mol_type = other DNA
aaacccaaaaacaccaacat

SEQ ID NO: 125099 - DNA, 20 bp, synthetic construct
  source 1..20: mol_type = other DNA
aaaacccaaaaacaccaaca

SEQ ID NO: 125100 - DNA, 20 bp, synthetic construct
  source 1..20: mol_type = other DNA
aaaaacccaaaaacaccaac

SEQ ID NO: 125101 - DNA, 20 bp, synthetic construct
  source 1..20: mol_type = other DNA
aaaaaacccaaaaacaccaa

SEQ ID NO: 125102 - DNA, 20 bp, synthetic construct
  source 1..20: mol_type = other DNA
aaaaaaacccaaaaacacca

SEQ ID NO: 125103 - DNA, 20 bp, synthetic construct
  source 1..20: mol_type = other DNA
aaaaaaaacccaaaaacacc

SEQ ID NO: 125104 - DNA, 20 bp, synthetic construct
  source 1..20: mol_type = other DNA
aaaaaaaaacccaaaaacac

SEQ ID NO: 125105 - DNA, 20 bp, synthetic construct
  source 1..20: mol_type = other DNA
aaaaaaaaaacccaaaaaca

SEQ ID NO: 125106 - DNA, 20 bp, synthetic construct
  source 1..20: mol_type = other DNA
aaaaaaaaaaacccaaaaac

SEQ ID NO: 125107 - DNA, 20 bp, synthetic construct
  source 1..20: mol_type = other DNA
aaaaaaaaaaaacccaaaaa

SEQ ID NO: 125108 - DNA, 20 bp, synthetic construct
  source 1..20: mol_type = other DNA
caaaaaaaaaaaacccaaaa

SEQ ID NO: 125109 - DNA, 20 bp, synthetic construct
  source 1..20: mol_type = other DNA
acaaaaaaaaaaaacccaaa

SEQ ID NO: 125110 - DNA, 20 bp, synthetic construct
  source 1..20: mol_type = other DNA
gacaaaaaaaaaaaacccaa

SEQ ID NO: 125111 - DNA, 20 bp, synthetic construct
  source 1..20: mol_type = other DNA
agacaaaaaaaaaaaaccca

SEQ ID NO: 125112 - DNA, 20 bp, synthetic construct
  source 1..20: mol_type = other DNA
aagacaaaaaaaaaaaaccc

SEQ ID NO: 125113 - DNA, 20 bp, synthetic construct
  source 1..20: mol_type = other DNA
taagacaaaaaaaaaaaacc

SEQ ID NO: 125114 - DNA, 20 bp, synthetic construct
  source 1..20: mol_type = other DNA
ataagacaaaaaaaaaaaac

SEQ ID NO: 125115 - DNA, 20 bp, synthetic construct
  source 1..20: mol_type = other DNA
aataagacaaaaaaaaaaaa

SEQ ID NO: 125116 - DNA, 20 bp, synthetic construct
  source 1..20: mol_type = other DNA
caataagacaaaaaaaaaaa

SEQ ID NO: 125117 - DNA, 20 bp, synthetic construct
  source 1..20: mol_type = other DNA
acaataagacaaaaaaaaaa

SEQ ID NO: 125118 - DNA, 20 bp, synthetic construct
  source 1..20: mol_type = other DNA
tacaataagacaaaaaaaaa

SEQ ID NO: 125119 - DNA, 20 bp, synthetic construct
  source 1..20: mol_type = other DNA
gtacaataagacaaaaaaaa

SEQ ID NO: 125120 - DNA, 20 bp, synthetic construct
  source 1..20: mol_type = other DNA
agtacaataagacaaaaaaa

SEQ ID NO: 125121 - DNA, 20 bp, synthetic construct
  source 1..20: mol_type = other DNA
cagtacaataagacaaaaaa

SEQ ID NO: 125122 - DNA, 20 bp, synthetic construct
  source 1..20: mol_type = other DNA
ccagtacaataagacaaaaa

SEQ ID NO: 125123 - DNA, 20 bp, synthetic construct
  source 1..20: mol_type = other DNA
accagtacaataagacaaaa

SEQ ID NO: 125124 - DNA, 20 bp, synthetic construct
  source 1..20: mol_type = other DNA
caccagtacaataagacaaa

SEQ ID NO: 125125 - DNA, 20 bp, synthetic construct
  source 1..20: mol_type = other DNA
gcaccagtacaataagacaa

SEQ ID NO: 125126 - DNA, 20 bp, synthetic construct
  source 1..20: mol_type = other DNA
tgcaccagtacaataagaca

SEQ ID NO: 125127 - DNA, 20 bp, synthetic construct
  source 1..20: mol_type = other DNA
atgcaccagtacaataagac

SEQ ID NO: 125128 - DNA, 20 bp, synthetic construct
  source 1..20: mol_type = other DNA
aatgcaccagtacaataaga

SEQ ID NO: 125129 - DNA, 20 bp, synthetic construct
  source 1..20: mol_type = other DNA
taatgcaccagtacaataag

SEQ ID NO: 125130 - DNA, 20 bp, synthetic construct
  source 1..20: mol_type = other DNA
gtaatgcaccagtacaataa

SEQ ID NO: 125131 - DNA, 20 bp, synthetic construct
  source 1..20: mol_type = other DNA
agtaatgcaccagtacaata

SEQ ID NO: 125132 - DNA, 20 bp, synthetic construct
  source 1..20: mol_type = other DNA
cagtaatgcaccagtacaat

SEQ ID NO: 125133 - DNA, 20 bp, synthetic construct
  source 1..20: mol_type = other DNA
tcagtaatgcaccagtacaa

SEQ ID NO: 125134 - DNA, 20 bp, synthetic construct
  source 1..20: mol_type = other DNA
ttcagtaatgcaccagtaca

SEQ ID NO: 125135 - DNA, 20 bp, synthetic construct
  source 1..20: mol_type = other DNA
tttcagtaatgcaccagtac

SEQ ID NO: 125136 - DNA, 20 bp, synthetic construct
  source 1..20: mol_type = other DNA
ttttcagtaatgcaccagta

SEQ ID NO: 125137 - DNA, 20 bp, synthetic construct
  source 1..20: mol_type = other DNA
tttttcagtaatgcaccagt

SEQ ID NO: 125138 - DNA, 20 bp, synthetic construct
  source 1..20: mol_type = other DNA
ctttttcagtaatgcaccag

SEQ ID NO: 125139 - DNA, 20 bp, synthetic construct
  source 1..20: mol_type = other DNA
cctttttcagtaatgcacca

SEQ ID NO: 125140 - DNA, 20 bp, synthetic construct
  source 1..20: mol_type = other DNA
gcctttttcagtaatgcacc

SEQ ID NO: 125141 - DNA, 20 bp, synthetic construct
  source 1..20: mol_type = other DNA
tgcctttttcagtaatgcac

SEQ ID NO: 125142 - DNA, 20 bp, synthetic construct
  source 1..20: mol_type = other DNA
atgcctttttcagtaatgca

SEQ ID NO: 125143 - DNA, 20 bp, synthetic construct
  source 1..20: mol_type = other DNA
catgcctttttcagtaatgc

SEQ ID NO: 125144 - DNA, 20 bp, synthetic construct
  source 1..20: mol_type = other DNA
tcatgcctttttcagtaatg

SEQ ID NO: 125145 - DNA, 20 bp, synthetic construct
  source 1..20: mol_type = other DNA
ctcatgcctttttcagtaat

SEQ ID NO: 125146 - DNA, 20 bp, synthetic construct
  source 1..20: mol_type = other DNA
tctcatgcctttttcagtaa

SEQ ID NO: 125147 - DNA, 20 bp, synthetic construct
  source 1..20: mol_type = other DNA
atctcatgcctttttcagta

SEQ ID NO: 125148 - DNA, 20 bp, synthetic construct
  source 1..20: mol_type = other DNA
aatctcatgcctttttcagt

SEQ ID NO: 125149 - DNA, 20 bp, synthetic construct
  source 1..20: mol_type = other DNA
aaatctcatgcctttttcag

SEQ ID NO: 125150 - DNA, 20 bp, synthetic construct
  source 1..20: mol_type = other DNA
aaaatctcatgcctttttca

SEQ ID NO: 125151 - DNA, 20 bp, synthetic construct
  source 1..20: mol_type = other DNA
caaaatctcatgcctttttc

SEQ ID NO: 125152 - DNA, 20 bp, synthetic construct
  source 1..20: mol_type = other DNA
gcaaaatctcatgccttttt

SEQ ID NO: 125153 - DNA, 20 bp, synthetic construct
  source 1..20: mol_type = other DNA
ggcaaaatctcatgcctttt

SEQ ID NO: 125154 - DNA, 20 bp, synthetic construct
  source 1..20: mol_type = other DNA
tggcaaaatctcatgccttt

SEQ ID NO: 125155 - DNA, 20 bp, synthetic construct
  source 1..20: mol_type = other DNA
atggcaaaatctcatgcctt

SEQ ID NO: 125156 - DNA, 20 bp, synthetic construct
  source 1..20: mol_type = other DNA
catggcaaaatctcatgcct

SEQ ID NO: 125157 - DNA, 20 bp, synthetic construct
  source 1..20: mol_type = other DNA
gcatggcaaaatctcatgcc

SEQ ID NO: 125158 - DNA, 20 bp, synthetic construct
  source 1..20: mol_type = other DNA
agcatggcaaaatctcatgc

SEQ ID NO: 125159 - DNA, 20 bp, synthetic construct
  source 1..20: mol_type = other DNA
gagcatggcaaaatctcatg

SEQ ID NO: 125160 - DNA, 20 bp, synthetic construct
  source 1..20: mol_type = other DNA
ggagcatggcaaaatctcat

SEQ ID NO: 125161 - DNA, 20 bp, synthetic construct
  source 1..20: mol_type = other DNA
gggagcatggcaaaatctca

SEQ ID NO: 125162 - DNA, 20 bp, synthetic construct
  source 1..20: mol_type = other DNA
tgggagcatggcaaaatctc

SEQ ID NO: 125163 - DNA, 20 bp, synthetic construct
  source 1..20: mol_type = other DNA
atgggagcatggcaaaatct

SEQ ID NO: 125164 - DNA, 20 bp, synthetic construct
  source 1..20: mol_type = other DNA
aatgggagcatggcaaaatc

SEQ ID NO: 125165 - DNA, 20 bp, synthetic construct
  source 1..20: mol_type = other DNA
aaatgggagcatggcaaaat

SEQ ID NO: 125166 - DNA, 20 bp, synthetic construct
  source 1..20: mol_type = other DNA
aaaatgggagcatggcaaaa

SEQ ID NO: 125167 - DNA, 20 bp, synthetic construct
  source 1..20: mol_type = other DNA
aaaaatgggagcatggcaaa

SEQ ID NO: 125168 - DNA, 20 bp, synthetic construct
  source 1..20: mol_type = other DNA
taaaaatgggagcatggcaa

SEQ ID NO: 125169 - DNA, 20 bp, synthetic construct
  source 1..20: mol_type = other DNA
ctaaaaatgggagcatggca

SEQ ID NO: 125170 - DNA, 20 bp, synthetic construct
  source 1..20: mol_type = other DNA
cctaaaaatgggagcatggc

SEQ ID NO: 125171 - DNA, 20 bp, synthetic construct
  source 1..20: mol_type = other DNA
ccctaaaaatgggagcatgg

SEQ ID NO: 125172 - DNA, 20 bp, synthetic construct
  source 1..20: mol_type = other DNA
cccctaaaaatgggagcatg

SEQ ID NO: 125173 - DNA, 20 bp, synthetic construct
  source 1..20: mol_type = other DNA
acccctaaaaatgggagcat

SEQ ID NO: 125174 - DNA, 20 bp, synthetic construct
  source 1..20: mol_type = other DNA
cacccctaaaaatgggagca

SEQ ID NO: 125175 - DNA, 20 bp, synthetic construct
  source 1..20: mol_type = other DNA
tcacccctaaaaatgggagc

SEQ ID NO: 125176 - DNA, 20 bp, synthetic construct
  source 1..20: mol_type = other DNA
ctcacccctaaaaatgggag

SEQ ID NO: 125177 - DNA, 20 bp, synthetic construct
  source 1..20: mol_type = other DNA
tctcacccctaaaaatggga

SEQ ID NO: 125178 - DNA, 20 bp, synthetic construct
  source 1..20: mol_type = other DNA
gtctcacccctaaaaatggg

SEQ ID NO: 125179 - DNA, 20 bp, synthetic construct
  source 1..20: mol_type = other DNA
tgtctcacccctaaaaatgg

SEQ ID NO: 125180 - DNA, 20 bp, synthetic construct
  source 1..20: mol_type = other DNA
atgtctcacccctaaaaatg

SEQ ID NO: 125181 - DNA, 20 bp, synthetic construct
  source 1..20: mol_type = other DNA
aatgtctcacccctaaaaat

SEQ ID NO: 125182 - DNA, 20 bp, synthetic construct
  source 1..20: mol_type = other DNA
caatgtctcacccctaaaaa

SEQ ID NO: 125183 - DNA, 20 bp, synthetic construct
  source 1..20: mol_type = other DNA
acaatgtctcacccctaaaa

SEQ ID NO: 125184 - DNA, 20 bp, synthetic construct
  source 1..20: mol_type = other DNA
gacaatgtctcacccctaaa

SEQ ID NO: 125185 - DNA, 20 bp, synthetic construct
  source 1..20: mol_type = other DNA
agacaatgtctcacccctaa

SEQ ID NO: 125186 - DNA, 20 bp, synthetic construct
  source 1..20: mol_type = other DNA
aagacaatgtctcaccccta

SEQ ID NO: 125187 - DNA, 20 bp, synthetic construct
  source 1..20: mol_type = other DNA
aaagacaatgtctcacccct

SEQ ID NO: 125188 - DNA, 20 bp, synthetic construct
  source 1..20: mol_type = other DNA
gaaagacaatgtctcacccc

SEQ ID NO: 125189 - DNA, 20 bp, synthetic construct
  source 1..20: mol_type = other DNA
tgaaagacaatgtctcaccc

SEQ ID NO: 125190 - DNA, 20 bp, synthetic construct
  source 1..20: mol_type = other DNA
gtgaaagacaatgtctcacc

SEQ ID NO: 125191 - DNA, 20 bp, synthetic construct
  source 1..20: mol_type = other DNA
agtgaaagacaatgtctcac

SEQ ID NO: 125192 - DNA, 20 bp, synthetic construct
  source 1..20: mol_type = other DNA
tagtgaaagacaatgtctca

SEQ ID NO: 125193 - DNA, 20 bp, synthetic construct
  source 1..20: mol_type = other DNA
atagtgaaagacaatgtctc

SEQ ID NO: 125194 - DNA, 20 bp, synthetic construct
  source 1..20: mol_type = other DNA
aatagtgaaagacaatgtct

SEQ ID NO: 125195 - DNA, 20 bp, synthetic construct
  source 1..20: mol_type = other DNA
taatagtgaaagacaatgtc

SEQ ID NO: 125196 - DNA, 20 bp, synthetic construct
  source 1..20: mol_type = other DNA
ttaatagtgaaagacaatgt

SEQ ID NO: 125197 - DNA, 20 bp, synthetic construct
  source 1..20: mol_type = other DNA
cttaatagtgaaagacaatg

SEQ ID NO: 125198 - DNA, 20 bp, synthetic construct
  source 1..20: mol_type = other DNA
gcttaatagtgaaagacaat

SEQ ID NO: 125199 - DNA, 20 bp, synthetic construct
  source 1..20: mol_type = other DNA
tgcttaatagtgaaagacaa

SEQ ID NO: 125200 - DNA, 20 bp, synthetic construct
  source 1..20: mol_type = other DNA
atgcttaatagtgaaagaca

SEQ ID NO: 125201 - DNA, 20 bp, synthetic construct
  source 1..20: mol_type = other DNA
tatgcttaatagtgaaagac

SEQ ID NO: 125202 - DNA, 20 bp, synthetic construct
  source 1..20: mol_type = other DNA
gtatgcttaatagtgaaaga

SEQ ID NO: 125203 - DNA, 20 bp, synthetic construct
  source 1..20: mol_type = other DNA
tgtatgcttaatagtgaaag

SEQ ID NO: 125204 - DNA, 20 bp, synthetic construct
  source 1..20: mol_type = other DNA
ctgtatgcttaatagtgaaa

SEQ ID NO: 125205 - DNA, 20 bp, synthetic construct
  source 1..20: mol_type = other DNA
actgtatgcttaatagtgaa

SEQ ID NO: 125206 - DNA, 20 bp, synthetic construct
  source 1..20: mol_type = other DNA
aactgtatgcttaatagtga

SEQ ID NO: 125207 - DNA, 20 bp, synthetic construct
  source 1..20: mol_type = other DNA
taactgtatgcttaatagtg

SEQ ID NO: 125208 - DNA, 20 bp, synthetic construct
  source 1..20: mol_type = other DNA
ctaactgtatgcttaatagt

SEQ ID NO: 125209 - DNA, 20 bp, synthetic construct
  source 1..20: mol_type = other DNA
cctaactgtatgcttaatag

SEQ ID NO: 125210 - DNA, 20 bp, synthetic construct
  source 1..20: mol_type = other DNA
acctaactgtatgcttaata

SEQ ID NO: 125211 - DNA, 20 bp, synthetic construct
  source 1..20: mol_type = other DNA
cacctaactgtatgcttaat

SEQ ID NO: 125212 - DNA, 20 bp, synthetic construct
  source 1..20: mol_type = other DNA
acacctaactgtatgcttaa

SEQ ID NO: 125213 - DNA, 20 bp, synthetic construct
  source 1..20: mol_type = other DNA
aacacctaactgtatgctta

SEQ ID NO: 125214 - DNA, 20 bp, synthetic construct
  source 1..20: mol_type = other DNA
taacacctaactgtatgctt

SEQ ID NO: 125215 - DNA, 20 bp, synthetic construct
  source 1..20: mol_type = other DNA
gtaacacctaactgtatgct

SEQ ID NO: 125216 - DNA, 20 bp, synthetic construct
  source 1..20: mol_type = other DNA
agtaacacctaactgtatgc

SEQ ID NO: 125217 - DNA, 20 bp, synthetic construct
  source 1..20: mol_type = other DNA
aagtaacacctaactgtatg

SEQ ID NO: 125218 - DNA, 20 bp, synthetic construct
  source 1..20: mol_type = other DNA
gaagtaacacctaactgtat

SEQ ID NO: 125219 - DNA, 20 bp, synthetic construct
  source 1..20: mol_type = other DNA
tgaagtaacacctaactgta

SEQ ID NO: 125220 - DNA, 20 bp, synthetic construct
  source 1..20: mol_type = other DNA
ctgaagtaacacctaactgt

SEQ ID NO: 125221 - DNA, 20 bp, synthetic construct
  source 1..20: mol_type = other DNA
actgaagtaacacctaactg

SEQ ID NO: 125222 - DNA, 20 bp, synthetic construct
  source 1..20: mol_type = other DNA
aactgaagtaacacctaact

SEQ ID NO: 125223 - DNA, 20 bp, synthetic construct
  source 1..20: mol_type = other DNA
gaactgaagtaacacctaac

SEQ ID NO: 125224 - DNA, 20 bp, synthetic construct
  source 1..20: mol_type = other DNA
ggaactgaagtaacacctaa

SEQ ID NO: 125225 - DNA, 20 bp, synthetic construct
  source 1..20: mol_type = other DNA
aggaactgaagtaacaccta

SEQ ID NO: 125226 - DNA, 20 bp, synthetic construct
  source 1..20: mol_type = other DNA
taggaactgaagtaacacct

SEQ ID NO: 125227 - DNA, 20 bp, synthetic construct
  source 1..20: mol_type = other DNA
ttaggaactgaagtaacacc

SEQ ID NO: 125228 - DNA, 20 bp, synthetic construct
  source 1..20: mol_type = other DNA
attaggaactgaagtaacac

SEQ ID NO: 125229 - DNA, 20 bp, synthetic construct
  source 1..20: mol_type = other DNA
aattaggaactgaagtaaca

SEQ ID NO: 125230 - DNA, 20 bp, synthetic construct
  source 1..20: mol_type = other DNA
aaattaggaactgaagtaac

SEQ ID NO: 125231 - DNA, 20 bp, synthetic construct
  source 1..20: mol_type = other DNA
caaattaggaactgaagtaa

SEQ ID NO: 125232 - DNA, 20 bp, synthetic construct
  source 1..20: mol_type = other DNA
gcaaattaggaactgaagta

SEQ ID NO: 125233 - DNA, 20 bp, synthetic construct
  source 1..20: mol_type = other DNA
tgcaaattaggaactgaagt

SEQ ID NO: 125234 - DNA, 20 bp, synthetic construct
  source 1..20: mol_type = other DNA
ctgcaaattaggaactgaag

SEQ ID NO: 125235 - DNA, 20 bp, synthetic construct
  source 1..20: mol_type = other DNA
tctgcaaattaggaactgaa

SEQ ID NO: 125236 - DNA, 20 bp, synthetic construct
  source 1..20: mol_type = other DNA
ctctgcaaattaggaactga

SEQ ID NO: 125237 - DNA, 20 bp, synthetic construct
  source 1..20: mol_type = other DNA
cctctgcaaattaggaactg

SEQ ID NO: 125238 - DNA, 20 bp, synthetic construct
  source 1..20: mol_type = other DNA
acctctgcaaattaggaact

SEQ ID NO: 125239 - DNA, 20 bp, synthetic construct
  source 1..20: mol_type = other DNA
cacctctgcaaattaggaac

SEQ ID NO: 125240 - DNA, 20 bp, synthetic construct
  source 1..20: mol_type = other DNA
ccacctctgcaaattaggaa

SEQ ID NO: 125241 - DNA, 20 bp, synthetic construct
  source 1..20: mol_type = other DNA
cccacctctgcaaattagga

SEQ ID NO: 125242 - DNA, 20 bp, synthetic construct
  source 1..20: mol_type = other DNA
acccacctctgcaaattagg

SEQ ID NO: 125243 - DNA, 20 bp, synthetic construct
  source 1..20: mol_type = other DNA
aacccacctctgcaaattag

SEQ ID NO: 125244 - DNA, 20 bp, synthetic construct
  source 1..20: mol_type = other DNA
aaacccacctctgcaaatta

SEQ ID NO: 125245 - DNA, 20 bp, synthetic construct
  source 1..20: mol_type = other DNA
caaacccacctctgcaaatt

SEQ ID NO: 125246 - DNA, 20 bp, synthetic construct
  source 1..20: mol_type = other DNA
acaaacccacctctgcaaat

SEQ ID NO: 125247 - DNA, 20 bp, synthetic construct
  source 1..20: mol_type = other DNA
aacaaacccacctctgcaaa

SEQ ID NO: 125248 - DNA, 20 bp, synthetic construct
  source 1..20: mol_type = other DNA
aaacaaacccacctctgcaa

SEQ ID NO: 125249 - DNA, 20 bp, synthetic construct
  source 1..20: mol_type = other DNA
aaaacaaacccacctctgca

SEQ ID NO: 125250 - DNA, 20 bp, synthetic construct
  source 1..20: mol_type = other DNA
gaaaacaaacccacctctgc

SEQ ID NO: 125251 - DNA, 20 bp, synthetic construct
  source 1..20: mol_type = other DNA
agaaaacaaacccacctctg

SEQ ID NO: 125252 - DNA, 20 bp, synthetic construct
  source 1..20: mol_type = other DNA
aagaaaacaaacccacctct

SEQ ID NO: 125253 - DNA, 20 bp, synthetic construct
  source 1..20: mol_type = other DNA
aaagaaaacaaacccacctc

SEQ ID NO: 125254 - DNA, 20 bp, synthetic construct
  source 1..20: mol_type = other DNA
aaaagaaaacaaacccacct

SEQ ID NO: 125255 - DNA, 20 bp, synthetic construct
  source 1..20: mol_type = other DNA
aaaaagaaaacaaacccacc

SEQ ID NO: 125256 - DNA, 20 bp, synthetic construct
  source 1..20: mol_type = other DNA
taaaaagaaaacaaacccac

SEQ ID NO: 125257 - DNA, 20 bp, synthetic construct
  source 1..20: mol_type = other DNA
ttaaaaagaaaacaaaccca

SEQ ID NO: 125258 - DNA, 20 bp, synthetic construct
  source 1..20: mol_type = other DNA
attaaaaagaaaacaaaccc

SEQ ID NO: 125259 - DNA, 20 bp, synthetic construct
  source 1..20: mol_type = other DNA
gattaaaaagaaaacaaacc

SEQ ID NO: 125260 - DNA, 20 bp, synthetic construct
  source 1..20: mol_type = other DNA
tgattaaaaagaaaacaaac

SEQ ID NO: 125261 - DNA, 20 bp, synthetic construct
  source 1..20: mol_type = other DNA
atgattaaaaagaaaacaaa

SEQ ID NO: 125262 - DNA, 20 bp, synthetic construct
  source 1..20: mol_type = other DNA
catgattaaaaagaaaacaa

SEQ ID NO: 125263 - DNA, 20 bp, synthetic construct
  source 1..20: mol_type = other DNA
tcatgattaaaaagaaaaca

SEQ ID NO: 125264 - DNA, 20 bp, synthetic construct
  source 1..20: mol_type = other DNA
ttcatgattaaaaagaaaac

SEQ ID NO: 125265 - DNA, 20 bp, synthetic construct
  source 1..20: mol_type = other DNA
attcatgattaaaaagaaaa

SEQ ID NO: 125266 - DNA, 20 bp, synthetic construct
  source 1..20: mol_type = other DNA
cattcatgattaaaaagaaa

SEQ ID NO: 125267 - DNA, 20 bp, synthetic construct
  source 1..20: mol_type = other DNA
ccattcatgattaaaaagaa

SEQ ID NO: 125268 - DNA, 20 bp, synthetic construct
  source 1..20: mol_type = other DNA
accattcatgattaaaaaga

SEQ ID NO: 125269 - DNA, 20 bp, synthetic construct
  source 1..20: mol_type = other DNA
aaccattcatgattaaaaag

SEQ ID NO: 125270 - DNA, 20 bp, synthetic construct
  source 1..20: mol_type = other DNA
caaccattcatgattaaaaa

SEQ ID NO: 125271 - DNA, 20 bp, synthetic construct
  source 1..20: mol_type = other DNA
acaaccattcatgattaaaa

SEQ ID NO: 125272 - DNA, 20 bp, synthetic construct
  source 1..20: mol_type = other DNA
aacaaccattcatgattaaa

SEQ ID NO: 125273 - DNA, 20 bp, synthetic construct
  source 1..20: mol_type = other DNA
caacaaccattcatgattaa

SEQ ID NO: 125274 - DNA, 20 bp, synthetic construct
  source 1..20: mol_type = other DNA
ccaacaaccattcatgatta

SEQ ID NO: 125275 - DNA, 20 bp, synthetic construct
  source 1..20: mol_type = other DNA
tccaacaaccattcatgatt

SEQ ID NO: 125276 - DNA, 20 bp, synthetic construct
  source 1..20: mol_type = other DNA
atccaacaaccattcatgat

SEQ ID NO: 125277 - DNA, 20 bp, synthetic construct
  source 1..20: mol_type = other DNA
aatccaacaaccattcatga

SEQ ID NO: 125278 - DNA, 20 bp, synthetic construct
  source 1..20: mol_type = other DNA
taatccaacaaccattcatg

SEQ ID NO: 125279 - DNA, 20 bp, synthetic construct
  source 1..20: mol_type = other DNA
ataatccaacaaccattcat

SEQ ID NO: 125280 - DNA, 20 bp, synthetic construct
  source 1..20: mol_type = other DNA
cataatccaacaaccattca

SEQ ID NO: 125281 - DNA, 20 bp, synthetic construct
  source 1..20: mol_type = other DNA
acataatccaacaaccattc

SEQ ID NO: 125282 - DNA, 20 bp, synthetic construct
  source 1..20: mol_type = other DNA
aacataatccaacaaccatt

SEQ ID NO: 125283 - DNA, 20 bp, synthetic construct
  source 1..20: mol_type = other DNA
gaacataatccaacaaccat

SEQ ID NO: 125284 - DNA, 20 bp, synthetic construct
  source 1..20: mol_type = other DNA
tgaacataatccaacaacca

SEQ ID NO: 125285 - DNA, 20 bp, synthetic construct
  source 1..20: mol_type = other DNA
ttgaacataatccaacaacc

SEQ ID NO: 125286 - DNA, 20 bp, synthetic construct
  source 1..20: mol_type = other DNA
tttgaacataatccaacaac

SEQ ID NO: 125287 - DNA, 20 bp, synthetic construct
  source 1..20: mol_type = other DNA
atttgaacataatccaacaa

SEQ ID NO: 125288 - DNA, 20 bp, synthetic construct
  source 1..20: mol_type = other DNA
tatttgaacataatccaaca

SEQ ID NO: 125289 - DNA, 20 bp, synthetic construct
  source 1..20: mol_type = other DNA
gtatttgaacataatccaac

SEQ ID NO: 125290 - DNA, 20 bp, synthetic construct
  source 1..20: mol_type = other DNA
agtatttgaacataatccaa

SEQ ID NO: 125291 - DNA, 20 bp, synthetic construct
  source 1..20: mol_type = other DNA
aagtatttgaacataatcca

SEQ ID NO: 125292 - DNA, 20 bp, synthetic construct
  source 1..20: mol_type = other DNA
taagtatttgaacataatcc

SEQ ID NO: 125293 - DNA, 20 bp, synthetic construct
  source 1..20: mol_type = other DNA
ataagtatttgaacataatc

SEQ ID NO: 125294 - DNA, 20 bp, synthetic construct
  source 1..20: mol_type = other DNA
gataagtatttgaacataat

SEQ ID NO: 125295 - DNA, 20 bp, synthetic construct
  source 1..20: mol_type = other DNA
tgataagtatttgaacataa

SEQ ID NO: 125296 - DNA, 20 bp, synthetic construct
  source 1..20: mol_type = other DNA
atgataagtatttgaacata

SEQ ID NO: 125297 - DNA, 20 bp, synthetic construct
  source 1..20: mol_type = other DNA
gatgataagtatttgaacat

SEQ ID NO: 125298 - DNA, 20 bp, synthetic construct
  source 1..20: mol_type = other DNA
agatgataagtatttgaaca

SEQ ID NO: 125299 - DNA, 20 bp, synthetic construct
  source 1..20: mol_type = other DNA
tagatgataagtatttgaac

SEQ ID NO: 125300 - DNA, 20 bp, synthetic construct
  source 1..20: mol_type = other DNA
gtagatgataagtatttgaa

SEQ ID NO: 125301 - DNA, 20 bp, synthetic construct
  source 1..20: mol_type = other DNA
agtagatgataagtatttga

SEQ ID NO: 125302 - DNA, 20 bp, synthetic construct
  source 1..20: mol_type = other DNA
tagtagatgataagtatttg

SEQ ID NO: 125303 - DNA, 20 bp, synthetic construct
  source 1..20: mol_type = other DNA
ttagtagatgataagtattt

SEQ ID NO: 125304 - DNA, 20 bp, synthetic construct
  source 1..20: mol_type = other DNA
cttagtagatgataagtatt

SEQ ID NO: 125305 - DNA, 20 bp, synthetic construct
  source 1..20: mol_type = other DNA
acttagtagatgataagtat

SEQ ID NO: 125306 - DNA, 20 bp, synthetic construct
  source 1..20: mol_type = other DNA
tacttagtagatgataagta

SEQ ID NO: 125307 - DNA, 20 bp, synthetic construct
  source 1..20: mol_type = other DNA
atacttagtagatgataagt

SEQ ID NO: 125308 - DNA, 20 bp, synthetic construct
  source 1..20: mol_type = other DNA
tatacttagtagatgataag

SEQ ID NO: 125309 - DNA, 20 bp, synthetic construct
  source 1..20: mol_type = other DNA
atatacttagtagatgataa

SEQ ID NO: 125310 - DNA, 20 bp, synthetic construct
  source 1..20: mol_type = other DNA
gatatacttagtagatgata

SEQ ID NO: 125311 - DNA, 20 bp, synthetic construct
  source 1..20: mol_type = other DNA
tgatatacttagtagatgat

SEQ ID NO: 125312 - DNA, 20 bp, synthetic construct
  source 1..20: mol_type = other DNA
atgatatacttagtagatga

SEQ ID NO: 125313 - DNA, 20 bp, synthetic construct
  source 1..20: mol_type = other DNA
tatgatatacttagtagatg

SEQ ID NO: 125314 - DNA, 20 bp, synthetic construct
  source 1..20: mol_type = other DNA
atatgatatacttagtagat

SEQ ID NO: 125315 - DNA, 20 bp, synthetic construct
  source 1..20: mol_type = other DNA
aatatgatatacttagtaga

SEQ ID NO: 125316 - DNA, 20 bp, synthetic construct
  source 1..20: mol_type = other DNA
caatatgatatacttagtag

SEQ ID NO: 125317 - DNA, 20 bp, synthetic construct
  source 1..20: mol_type = other DNA
tcaatatgatatacttagta

SEQ ID NO: 125318 - DNA, 20 bp, synthetic construct
  source 1..20: mol_type = other DNA
gtcaatatgatatacttagt

SEQ ID NO: 125319 - DNA, 20 bp, synthetic construct
  source 1..20: mol_type = other DNA
ggtcaatatgatatacttag

SEQ ID NO: 125320 - DNA, 20 bp, synthetic construct
  source 1..20: mol_type = other DNA
tggtcaatatgatatactta

SEQ ID NO: 125321 - DNA, 20 bp, synthetic construct
  source 1..20: mol_type = other DNA
ctggtcaatatgatatactt

SEQ ID NO: 125322 - DNA, 20 bp, synthetic construct
  source 1..20: mol_type = other DNA
cctggtcaatatgatatact

SEQ ID NO: 125323 - DNA, 20 bp, synthetic construct
  source 1..20: mol_type = other DNA
tcctggtcaatatgatatac

SEQ ID NO: 125324 - DNA, 20 bp, synthetic construct
  source 1..20: mol_type = other DNA
ttcctggtcaatatgatata

SEQ ID NO: 125325 - DNA, 20 bp, synthetic construct
  source 1..20: mol_type = other DNA
gttcctggtcaatatgatat

SEQ ID NO: 125326 - DNA, 20 bp, synthetic construct
  source 1..20: mol_type = other DNA
tgttcctggtcaatatgata

SEQ ID NO: 125327 - DNA, 20 bp, synthetic construct
  source 1..20: mol_type = other DNA
ctgttcctggtcaatatgat

SEQ ID NO: 125328 - DNA, 20 bp, synthetic construct
  source 1..20: mol_type = other DNA
actgttcctggtcaatatga

SEQ ID NO: 125329 - DNA, 20 bp, synthetic construct
  source 1..20: mol_type = other DNA
cactgttcctggtcaatatg

SEQ ID NO: 125330 - DNA, 20 bp, synthetic construct
  source 1..20: mol_type = other DNA
ccactgttcctggtcaatat

SEQ ID NO: 125331 - DNA, 20 bp, synthetic construct
  source 1..20: mol_type = other DNA
gccactgttcctggtcaata

SEQ ID NO: 125332 - DNA, 20 bp, synthetic construct
  source 1..20: mol_type = other DNA
agccactgttcctggtcaat

SEQ ID NO: 125333 - DNA, 20 bp, synthetic construct
  source 1..20: mol_type = other DNA
gagccactgttcctggtcaa

SEQ ID NO: 125334 - DNA, 20 bp, synthetic construct
  source 1..20: mol_type = other DNA
tgagccactgttcctggtca

SEQ ID NO: 125335 - DNA, 20 bp, synthetic construct
  source 1..20: mol_type = other DNA
atgagccactgttcctggtc

SEQ ID NO: 125336 - DNA, 20 bp, synthetic construct
  source 1..20: mol_type = other DNA
tatgagccactgttcctggt

SEQ ID NO: 125337 - DNA, 20 bp, synthetic construct
  source 1..20: mol_type = other DNA
gtatgagccactgttcctgg

SEQ ID NO: 125338 - DNA, 20 bp, synthetic construct
  source 1..20: mol_type = other DNA
ggtatgagccactgttcctg

SEQ ID NO: 125339 - DNA, 20 bp, synthetic construct
  source 1..20: mol_type = other DNA
aggtatgagccactgttcct

SEQ ID NO: 125340 - DNA, 20 bp, synthetic construct
  source 1..20: mol_type = other DNA
caggtatgagccactgttcc

SEQ ID NO: 125341 - DNA, 20 bp, synthetic construct
  source 1..20: mol_type = other DNA
acaggtatgagccactgttc

SEQ ID NO: 125342 - DNA, 20 bp, synthetic construct
  source 1..20: mol_type = other DNA
tacaggtatgagccactgtt

SEQ ID NO: 125343 - DNA, 20 bp, synthetic construct
  source 1..20: mol_type = other DNA
ttacaggtatgagccactgt

SEQ ID NO: 125344 - DNA, 20 bp, synthetic construct
  source 1..20: mol_type = other DNA
gttacaggtatgagccactg

SEQ ID NO: 125345 - DNA, 20 bp, synthetic construct
  source 1..20: mol_type = other DNA
ggttacaggtatgagccact

SEQ ID NO: 125346 - DNA, 20 bp, synthetic construct
  source 1..20: mol_type = other DNA
aggttacaggtatgagccac

SEQ ID NO: 125347 - DNA, 20 bp, synthetic construct
  source 1..20: mol_type = other DNA
gaggttacaggtatgagcca

SEQ ID NO: 125348 - DNA, 20 bp, synthetic construct
  source 1..20: mol_type = other DNA
tgaggttacaggtatgagcc

SEQ ID NO: 125349 - DNA, 20 bp, synthetic construct
  source 1..20: mol_type = other DNA
ctgaggttacaggtatgagc

SEQ ID NO: 125350 - DNA, 20 bp, synthetic construct
  source 1..20: mol_type = other DNA
tctgaggttacaggtatgag

SEQ ID NO: 125351 - DNA, 20 bp, synthetic construct
  source 1..20: mol_type = other DNA
ctctgaggttacaggtatga

SEQ ID NO: 125352 - DNA, 20 bp, synthetic construct
  source 1..20: mol_type = other DNA
gctctgaggttacaggtatg

SEQ ID NO: 125353 - DNA, 20 bp, synthetic construct
  source 1..20: mol_type = other DNA
agctctgaggttacaggtat

SEQ ID NO: 125354 - DNA, 20 bp, synthetic construct
  source 1..20: mol_type = other DNA
aagctctgaggttacaggta

SEQ ID NO: 125355 - DNA, 20 bp, synthetic construct
  source 1..20: mol_type = other DNA
aaagctctgaggttacaggt

SEQ ID NO: 125356 - DNA, 20 bp, synthetic construct
  source 1..20: mol_type = other DNA
caaagctctgaggttacagg

SEQ ID NO: 125357 - DNA, 20 bp, synthetic construct
  source 1..20: mol_type = other DNA
ccaaagctctgaggttacag

SEQ ID NO: 125358 - DNA, 20 bp, synthetic construct
  source 1..20: mol_type = other DNA
cccaaagctctgaggttaca

SEQ ID NO: 125359 - DNA, 20 bp, synthetic construct
  source 1..20: mol_type = other DNA
tcccaaagctctgaggttac

SEQ ID NO: 125360 - DNA, 20 bp, synthetic construct
  source 1..20: mol_type = other DNA
ctcccaaagctctgaggtta

SEQ ID NO: 125361 - DNA, 20 bp, synthetic construct
  source 1..20: mol_type = other DNA
cctcccaaagctctgaggtt

SEQ ID NO: 125362 - DNA, 20 bp, synthetic construct
  source 1..20: mol_type = other DNA
gcctcccaaagctctgaggt

SEQ ID NO: 125363 - DNA, 20 bp, synthetic construct
  source 1..20: mol_type = other DNA
ggcctcccaaagctctgagg

SEQ ID NO: 125364 - DNA, 20 bp, synthetic construct
  source 1..20: mol_type = other DNA
tggcctcccaaagctctgag

SEQ ID NO: 125365 - DNA, 20 bp, synthetic construct
  source 1..20: mol_type = other DNA
ttggcctcccaaagctctga

SEQ ID NO: 125366 - DNA, 20 bp, synthetic construct
  source 1..20: mol_type = other DNA
cttggcctcccaaagctctg

SEQ ID NO: 125367 - DNA, 20 bp, synthetic construct
  source 1..20: mol_type = other DNA
ccttggcctcccaaagctct

SEQ ID NO: 125368 - DNA, 20 bp, synthetic construct
  source 1..20: mol_type = other DNA
gccttggcctcccaaagctc

SEQ ID NO: 125369 - DNA, 20 bp, synthetic construct
  source 1..20: mol_type = other DNA
tgccttggcctcccaaagct

SEQ ID NO: 125370 - DNA, 20 bp, synthetic construct
  source 1..20: mol_type = other DNA
ctgccttggcctcccaaagc

SEQ ID NO: 125371 - DNA, 20 bp, synthetic construct
  source 1..20: mol_type = other DNA
cctgccttggcctcccaaag

SEQ ID NO: 125372 - DNA, 20 bp, synthetic construct
  source 1..20: mol_type = other DNA
tcctgccttggcctcccaaa

SEQ ID NO: 125373 - DNA, 20 bp, synthetic construct
  source 1..20: mol_type = other DNA
ctcctgccttggcctcccaa

SEQ ID NO: 125374 - DNA, 20 bp, synthetic construct
  source 1..20: mol_type = other DNA
cctcctgccttggcctccca

SEQ ID NO: 125375 - DNA, 20 bp, synthetic construct
  source 1..20: mol_type = other DNA
tcctcctgccttggcctccc

SEQ ID NO: 125376 - DNA, 20 bp, synthetic construct
  source 1..20: mol_type = other DNA
atcctcctgccttggcctcc

SEQ ID NO: 125377 - DNA, 20 bp, synthetic construct
  source 1..20: mol_type = other DNA
gatcctcctgccttggcctc

SEQ ID NO: 125378 - DNA, 20 bp, synthetic construct
  source 1..20: mol_type = other DNA
cgatcctcctgccttggcct

SEQ ID NO: 125379 - DNA, 20 bp, synthetic construct
  source 1..20: mol_type = other DNA
gcgatcctcctgccttggcc

SEQ ID NO: 125380 - DNA, 20 bp, synthetic construct
  source 1..20: mol_type = other DNA
agcgatcctcctgccttggc

SEQ ID NO: 125381 - DNA, 20 bp, synthetic construct
  source 1..20: mol_type = other DNA
aagcgatcctcctgccttgg

SEQ ID NO: 125382 - DNA, 20 bp, synthetic construct
  source 1..20: mol_type = other DNA
caagcgatcctcctgccttg

SEQ ID NO: 125383 - DNA, 20 bp, synthetic construct
  source 1..20: mol_type = other DNA
tcaagcgatcctcctgcctt

SEQ ID NO: 125384 - DNA, 20 bp, synthetic construct
  source 1..20: mol_type = other DNA
ctcaagcgatcctcctgcct

SEQ ID NO: 125385 - DNA, 20 bp, synthetic construct
  source 1..20: mol_type = other DNA
cctcaagcgatcctcctgcc

SEQ ID NO: 125386 - DNA, 20 bp, synthetic construct
  source 1..20: mol_type = other DNA
gcctcaagcgatcctcctgc

SEQ ID NO: 125387 - DNA, 20 bp, synthetic construct
  source 1..20: mol_type = other DNA
ggcctcaagcgatcctcctg

SEQ ID NO: 125388 - DNA, 20 bp, synthetic construct
  source 1..20: mol_type = other DNA
tggcctcaagcgatcctcct

SEQ ID NO: 125389 - DNA, 20 bp, synthetic construct
  source 1..20: mol_type = other DNA
ctggcctcaagcgatcctcc

SEQ ID NO: 125390 - DNA, 20 bp, synthetic construct
  source 1..20: mol_type = other DNA
cctggcctcaagcgatcctc

SEQ ID NO: 125391 - DNA, 20 bp, synthetic construct
  source 1..20: mol_type = other DNA
tcctggcctcaagcgatcct

SEQ ID NO: 125392 - DNA, 20 bp, synthetic construct
  source 1..20: mol_type = other DNA
ctcctggcctcaagcgatcc

SEQ ID NO: 125393 - DNA, 20 bp, synthetic construct
  source 1..20: mol_type = other DNA
actcctggcctcaagcgatc

SEQ ID NO: 125394 - DNA, 20 bp, synthetic construct
  source 1..20: mol_type = other DNA
aactcctggcctcaagcgat

SEQ ID NO: 125395 - DNA, 20 bp, synthetic construct
  source 1..20: mol_type = other DNA
gaactcctggcctcaagcga

SEQ ID NO: 125396 - DNA, 20 bp, synthetic construct
  source 1..20: mol_type = other DNA
tgaactcctggcctcaagcg

SEQ ID NO: 125397 - DNA, 20 bp, synthetic construct
  source 1..20: mol_type = other DNA
ttgaactcctggcctcaagc

SEQ ID NO: 125398 - DNA, 20 bp, synthetic construct
  source 1..20: mol_type = other DNA
cttgaactcctggcctcaag

SEQ ID NO: 125399 - DNA, 20 bp, synthetic construct
  source 1..20: mol_type = other DNA
tcttgaactcctggcctcaa

SEQ ID NO: 125400 - DNA, 20 bp, synthetic construct
  source 1..20: mol_type = other DNA
gtcttgaactcctggcctca

SEQ ID NO: 125401 - DNA, 20 bp, synthetic construct
  source 1..20: mol_type = other DNA
ggtcttgaactcctggcctc

SEQ ID NO: 125402 - DNA, 20 bp, synthetic construct
  source 1..20: mol_type = other DNA
tggtcttgaactcctggcct

SEQ ID NO: 125403 - DNA, 20 bp, synthetic construct
  source 1..20: mol_type = other DNA
ttggtcttgaactcctggcc

SEQ ID NO: 125404 - DNA, 20 bp, synthetic construct
  source 1..20: mol_type = other DNA
gttggtcttgaactcctggc

SEQ ID NO: 125405 - DNA, 20 bp, synthetic construct
  source 1..20: mol_type = other DNA
ggttggtcttgaactcctgg

SEQ ID NO: 125406 - DNA, 20 bp, synthetic construct
  source 1..20: mol_type = other DNA
aggttggtcttgaactcctg

SEQ ID NO: 125407 - DNA, 20 bp, synthetic construct
  source 1..20: mol_type = other DNA
caggttggtcttgaactcct

SEQ ID NO: 125408 - DNA, 20 bp, synthetic construct
  source 1..20: mol_type = other DNA
ccaggttggtcttgaactcc

SEQ ID NO: 125409 - DNA, 20 bp, synthetic construct
  source 1..20: mol_type = other DNA
cccaggttggtcttgaactc

SEQ ID NO: 125410 - DNA, 20 bp, synthetic construct
  source 1..20: mol_type = other DNA
acccaggttggtcttgaact

SEQ ID NO: 125411 - DNA, 20 bp, synthetic construct
  source 1..20: mol_type = other DNA
cacccaggttggtcttgaac

SEQ ID NO: 125412 - DNA, 20 bp, synthetic construct
  source 1..20: mol_type = other DNA
tcacccaggttggtcttgaa

SEQ ID NO: 125413 - DNA, 20 bp, synthetic construct
  source 1..20: mol_type = other DNA
atcacccaggttggtcttga

SEQ ID NO: 125414 - DNA, 20 bp, synthetic construct
  source 1..20: mol_type = other DNA
catcacccaggttggtcttg

SEQ ID NO: 125415 - DNA, 20 bp, synthetic construct
  source 1..20: mol_type = other DNA
acatcacccaggttggtctt

SEQ ID NO: 125416 - DNA, 20 bp, synthetic construct
  source 1..20: mol_type = other DNA
tacatcacccaggttggtct

SEQ ID NO: 125417 - DNA, 20 bp, synthetic construct
  source 1..20: mol_type = other DNA
ctacatcacccaggttggtc

SEQ ID NO: 125418 - DNA, 20 bp, synthetic construct
  source 1..20: mol_type = other DNA
cctacatcacccaggttggt

SEQ ID NO: 125419 - DNA, 20 bp, synthetic construct
  source 1..20: mol_type = other DNA
tcctacatcacccaggttgg

SEQ ID NO: 125420 - DNA, 20 bp, synthetic construct
  source 1..20: mol_type = other DNA
ttcctacatcacccaggttg

SEQ ID NO: 125421 - DNA, 20 bp, synthetic construct
  source 1..20: mol_type = other DNA
tttcctacatcacccaggtt

SEQ ID NO: 125422 - DNA, 20 bp, synthetic construct
  source 1..20: mol_type = other DNA
ttttcctacatcacccaggt

SEQ ID NO: 125423 - DNA, 20 bp, synthetic construct
  source 1..20: mol_type = other DNA
gttttcctacatcacccagg

SEQ ID NO: 125424 - DNA, 20 bp, synthetic construct
  source 1..20: mol_type = other DNA
ggttttcctacatcacccag

SEQ ID NO: 125425 - DNA, 20 bp, synthetic construct
  source 1..20: mol_type = other DNA
gggttttcctacatcaccca

SEQ ID NO: 125426 - DNA, 20 bp, synthetic construct
  source 1..20: mol_type = other DNA
ggggttttcctacatcaccc

SEQ ID NO: 125427 - DNA, 20 bp, synthetic construct
  source 1..20: mol_type = other DNA
tggggttttcctacatcacc

SEQ ID NO: 125428 - DNA, 20 bp, synthetic construct
  source 1..20: mol_type = other DNA
atggggttttcctacatcac

SEQ ID NO: 125429 - DNA, 20 bp, synthetic construct
  source 1..20: mol_type = other DNA
tatggggttttcctacatca

SEQ ID NO: 125430 - DNA, 20 bp, synthetic construct
  source 1..20: mol_type = other DNA
atatggggttttcctacatc

SEQ ID NO: 125431 - DNA, 20 bp, synthetic construct
  source 1..20: mol_type = other DNA
gatatggggttttcctacat

SEQ ID NO: 125432 - DNA, 20 bp, synthetic construct
  source 1..20: mol_type = other DNA
agatatggggttttcctaca

SEQ ID NO: 125433 - DNA, 20 bp, synthetic construct
  source 1..20: mol_type = other DNA
tagatatggggttttcctac

SEQ ID NO: 125434 - DNA, 20 bp, synthetic construct
  source 1..20: mol_type = other DNA
gtagatatggggttttccta

SEQ ID NO: 125435 - DNA, 20 bp, synthetic construct
  source 1..20: mol_type = other DNA
tgtagatatggggttttcct

SEQ ID NO: 125436 - DNA, 20 bp, synthetic construct
  source 1..20: mol_type = other DNA
ttgtagatatggggttttcc

SEQ ID NO: 125437 - DNA, 20 bp, synthetic construct
  source 1..20: mol_type = other DNA
tttgtagatatggggttttc

SEQ ID NO: 125438 - DNA, 20 bp, synthetic construct
  source 1..20: mol_type = other DNA
ttttgtagatatggggtttt

SEQ ID NO: 125439 - DNA, 20 bp, synthetic construct
  source 1..20: mol_type = other DNA
gttttgtagatatggggttt

SEQ ID NO: 125440 - DNA, 20 bp, synthetic construct
  source 1..20: mol_type = other DNA
tgttttgtagatatggggtt

SEQ ID NO: 125441 - DNA, 20 bp, synthetic construct
  source 1..20: mol_type = other DNA
ttgttttgtagatatggggt

SEQ ID NO: 125442 - DNA, 20 bp, synthetic construct
  source 1..20: mol_type = other DNA
attgttttgtagatatgggg

SEQ ID NO: 125443 - DNA, 20 bp, synthetic construct
  source 1..20: mol_type = other DNA
aattgttttgtagatatggg

SEQ ID NO: 125444 - DNA, 20 bp, synthetic construct
  source 1..20: mol_type = other DNA
aaattgttttgtagatatgg

SEQ ID NO: 125445 - DNA, 20 bp, synthetic construct
  source 1..20: mol_type = other DNA
taaattgttttgtagatatg

SEQ ID NO: 125446 - DNA, 20 bp, synthetic construct
  source 1..20: mol_type = other DNA
ttaaattgttttgtagatat

SEQ ID NO: 125447 - DNA, 20 bp, synthetic construct
  source 1..20: mol_type = other DNA
tttaaattgttttgtagata

SEQ ID NO: 125448 - DNA, 20 bp, synthetic construct
  source 1..20: mol_type = other DNA
ttttaaattgttttgtagat

SEQ ID NO: 125449 - DNA, 20 bp, synthetic construct
  source 1..20: mol_type = other DNA
tttttaaattgttttgtaga

SEQ ID NO: 125450 - DNA, 20 bp, synthetic construct
  source 1..20: mol_type = other DNA
atttttaaattgttttgtag

SEQ ID NO: 125451 - DNA, 20 bp, synthetic construct
  source 1..20: mol_type = other DNA
aatttttaaattgttttgta

SEQ ID NO: 125452 - DNA, 20 bp, synthetic construct
  source 1..20: mol_type = other DNA
aaatttttaaattgttttgt

SEQ ID NO: 125453 - DNA, 20 bp, synthetic construct
  source 1..20: mol_type = other DNA
caaatttttaaattgttttg

SEQ ID NO: 125454 - DNA, 20 bp, synthetic construct
  source 1..20: mol_type = other DNA
gcaaatttttaaattgtttt

SEQ ID NO: 125455 - DNA, 20 bp, synthetic construct
  source 1..20: mol_type = other DNA
agcaaatttttaaattgttt

SEQ ID NO: 125456 - DNA, 20 bp, synthetic construct
  source 1..20: mol_type = other DNA
cagcaaatttttaaattgtt

SEQ ID NO: 125457 - DNA, 20 bp, synthetic construct
  source 1..20: mol_type = other DNA
ccagcaaatttttaaattgt

SEQ ID NO: 125458 - DNA, 20 bp, synthetic construct
  source 1..20: mol_type = other DNA
cccagcaaatttttaaattg

SEQ ID NO: 125459 - DNA, 20 bp, synthetic construct
  source 1..20: mol_type = other DNA
acccagcaaatttttaaatt

SEQ ID NO: 125460 - DNA, 20 bp, synthetic construct
  source 1..20: mol_type = other DNA
cacccagcaaatttttaaat

SEQ ID NO: 125461 - DNA, 20 bp, synthetic construct
  source 1..20: mol_type = other DNA
acacccagcaaatttttaaa

SEQ ID NO: 125462 - DNA, 20 bp, synthetic construct
  source 1..20: mol_type = other DNA
cacacccagcaaatttttaa

SEQ ID NO: 125463 - DNA, 20 bp, synthetic construct
  source 1..20: mol_type = other DNA
ccacacccagcaaattttta

SEQ ID NO: 125464 - DNA, 20 bp, synthetic construct
  source 1..20: mol_type = other DNA
accacacccagcaaattttt

SEQ ID NO: 125465 - DNA, 20 bp, synthetic construct
  source 1..20: mol_type = other DNA
caccacacccagcaaatttt

SEQ ID NO: 125466 - DNA, 20 bp, synthetic construct
  source 1..20: mol_type = other DNA
ccaccacacccagcaaattt

SEQ ID NO: 125467 - DNA, 20 bp, synthetic construct
  source 1..20: mol_type = other DNA
gccaccacacccagcaaatt

SEQ ID NO: 125468 - DNA, 20 bp, synthetic construct
  source 1..20: mol_type = other DNA
tgccaccacacccagcaaat

SEQ ID NO: 125469 - DNA, 20 bp, synthetic construct
  source 1..20: mol_type = other DNA
gtgccaccacacccagcaaa

SEQ ID NO: 125470 - DNA, 20 bp, synthetic construct
  source 1..20: mol_type = other DNA
tgtgccaccacacccagcaa

SEQ ID NO: 125471 - DNA, 20 bp, synthetic construct
  source 1..20: mol_type = other DNA
gtgtgccaccacacccagca

SEQ ID NO: 125472 - DNA, 20 bp, synthetic construct
  source 1..20: mol_type = other DNA
tgtgtgccaccacacccagc

SEQ ID NO: 125473 - DNA, 20 bp, synthetic construct
  source 1..20: mol_type = other DNA
gtgtgtgccaccacacccag

SEQ ID NO: 125474 - DNA, 20 bp, synthetic construct
  source 1..20: mol_type = other DNA
ggtgtgtgccaccacaccca

SEQ ID NO: 125475 - DNA, 20 bp, synthetic construct
  source 1..20: mol_type = other DNA
aggtgtgtgccaccacaccc

SEQ ID NO: 125476 - DNA, 20 bp, synthetic construct
  source 1..20: mol_type = other DNA
caggtgtgtgccaccacacc

SEQ ID NO: 125477 - DNA, 20 bp, synthetic construct
  source 1..20: mol_type = other DNA
acaggtgtgtgccaccacac

SEQ ID NO: 125478 - DNA, 20 bp, synthetic construct
  source 1..20: mol_type = other DNA
tacaggtgtgtgccaccaca

SEQ ID NO: 125479 - DNA, 20 bp, synthetic construct
  source 1..20: mol_type = other DNA
ctacaggtgtgtgccaccac

SEQ ID NO: 125480 - DNA, 20 bp, synthetic construct
  source 1..20: mol_type = other DNA
actacaggtgtgtgccacca

SEQ ID NO: 125481 - DNA, 20 bp, synthetic construct
  source 1..20: mol_type = other DNA
gactacaggtgtgtgccacc

SEQ ID NO: 125482 - DNA, 20 bp, synthetic construct
  source 1..20: mol_type = other DNA
ggactacaggtgtgtgccac

SEQ ID NO: 125483 - DNA, 20 bp, synthetic construct
  source 1..20: mol_type = other DNA
aggactacaggtgtgtgcca

SEQ ID NO: 125484 - DNA, 20 bp, synthetic construct
  source 1..20: mol_type = other DNA
taggactacaggtgtgtgcc

SEQ ID NO: 125485 - DNA, 20 bp, synthetic construct
  source 1..20: mol_type = other DNA
ttaggactacaggtgtgtgc

SEQ ID NO: 125486 - DNA, 20 bp, synthetic construct
  source 1..20: mol_type = other DNA
gttaggactacaggtgtgtg

SEQ ID NO: 125487 - DNA, 20 bp, synthetic construct
  source 1..20: mol_type = other DNA
agttaggactacaggtgtgt

SEQ ID NO: 125488 - DNA, 20 bp, synthetic construct
  source 1..20: mol_type = other DNA
tagttaggactacaggtgtg

SEQ ID NO: 125489 - DNA, 20 bp, synthetic construct
  source 1..20: mol_type = other DNA
gtagttaggactacaggtgt

SEQ ID NO: 125490 - DNA, 20 bp, synthetic construct
  source 1..20: mol_type = other DNA
agtagttaggactacaggtg

SEQ ID NO: 125491 - DNA, 20 bp, synthetic construct
  source 1..20: mol_type = other DNA
aagtagttaggactacaggt

SEQ ID NO: 125492 - DNA, 20 bp, synthetic construct
  source 1..20: mol_type = other DNA
caagtagttaggactacagg

SEQ ID NO: 125493 - DNA, 20 bp, synthetic construct
  source 1..20: mol_type = other DNA
tcaagtagttaggactacag

SEQ ID NO: 125494 - DNA, 20 bp, synthetic construct
  source 1..20: mol_type = other DNA
ctcaagtagttaggactaca

SEQ ID NO: 125495 - DNA, 20 bp, synthetic construct
  source 1..20: mol_type = other DNA
tctcaagtagttaggactac

SEQ ID NO: 125496 - DNA, 20 bp, synthetic construct
  source 1..20: mol_type = other DNA
ctctcaagtagttaggacta

SEQ ID NO: 125497 - DNA, 20 bp, synthetic construct
  source 1..20: mol_type = other DNA
cctctcaagtagttaggact

SEQ ID NO: 125498 - DNA, 20 bp, synthetic construct
  source 1..20: mol_type = other DNA
gcctctcaagtagttaggac

SEQ ID NO: 125499 - DNA, 20 bp, synthetic construct
  source 1..20: mol_type = other DNA
agcctctcaagtagttagga

SEQ ID NO: 125500 - DNA, 20 bp, synthetic construct
  source 1..20: mol_type = other DNA
cagcctctcaagtagttagg

SEQ ID NO: 125501 - DNA, 20 bp, synthetic construct
  source 1..20: mol_type = other DNA
tcagcctctcaagtagttag

SEQ ID NO: 125502 - DNA, 20 bp, synthetic construct
  source 1..20: mol_type = other DNA
ctcagcctctcaagtagtta

SEQ ID NO: 125503 - DNA, 20 bp, synthetic construct
  source 1..20: mol_type = other DNA
cctcagcctctcaagtagtt

SEQ ID NO: 125504 - DNA, 20 bp, synthetic construct
  source 1..20: mol_type = other DNA
tcctcagcctctcaagtagt

SEQ ID NO: 125505 - DNA, 20 bp, synthetic construct
  source 1..20: mol_type = other DNA
ttcctcagcctctcaagtag

SEQ ID NO: 125506 - DNA, 20 bp, synthetic construct
  source 1..20: mol_type = other DNA
cttcctcagcctctcaagta

SEQ ID NO: 125507 - DNA, 20 bp, synthetic construct
  source 1..20: mol_type = other DNA
ccttcctcagcctctcaagt

SEQ ID NO: 125508 - DNA, 20 bp, synthetic construct
  source 1..20: mol_type = other DNA
tccttcctcagcctctcaag

SEQ ID NO: 125509 - DNA, 20 bp, synthetic construct
  source 1..20: mol_type = other DNA
ctccttcctcagcctctcaa

SEQ ID NO: 125510 - DNA, 20 bp, synthetic construct
  source 1..20: mol_type = other DNA
tctccttcctcagcctctca

SEQ ID NO: 125511 - DNA, 20 bp, synthetic construct
  source 1..20: mol_type = other DNA
ttctccttcctcagcctctc

SEQ ID NO: 125512 - DNA, 20 bp, synthetic construct
  source 1..20: mol_type = other DNA
attctccttcctcagcctct

SEQ ID NO: 125513 - DNA, 20 bp, synthetic construct
  source 1..20: mol_type = other DNA
aattctccttcctcagcctc

SEQ ID NO: 125514 - DNA, 20 bp, synthetic construct
  source 1..20: mol_type = other DNA
caattctccttcctcagcct

SEQ ID NO: 125515 - DNA, 20 bp, synthetic construct
  source 1..20: mol_type = other DNA
gcaattctccttcctcagcc

SEQ ID NO: 125516 - DNA, 20 bp, synthetic construct
  source 1..20: mol_type = other DNA
agcaattctccttcctcagc

SEQ ID NO: 125517 - DNA, 20 bp, synthetic construct
  source 1..20: mol_type = other DNA
aagcaattctccttcctcag

SEQ ID NO: 125518 - DNA, 20 bp, synthetic construct
  source 1..20: mol_type = other DNA
caagcaattctccttcctca

SEQ ID NO: 125519 - DNA, 20 bp, synthetic construct
  source 1..20: mol_type = other DNA
tcaagcaattctccttcctc

SEQ ID NO: 125520 - DNA, 20 bp, synthetic construct
  source 1..20: mol_type = other DNA
ctcaagcaattctccttcct

SEQ ID NO: 125521 - DNA, 20 bp, synthetic construct
  source 1..20: mol_type = other DNA
gctcaagcaattctccttcc

SEQ ID NO: 125522 - DNA, 20 bp, synthetic construct
  source 1..20: mol_type = other DNA
ggctcaagcaattctccttc

SEQ ID NO: 125523 - DNA, 20 bp, synthetic construct
  source 1..20: mol_type = other DNA
gggctcaagcaattctcctt

SEQ ID NO: 125524 - DNA, 20 bp, synthetic construct
  source 1..20: mol_type = other DNA
tgggctcaagcaattctcct

SEQ ID NO: 125525 - DNA, 20 bp, synthetic construct
  source 1..20: mol_type = other DNA
ctgggctcaagcaattctcc

SEQ ID NO: 125526 - DNA, 20 bp, synthetic construct
  source 1..20: mol_type = other DNA
actgggctcaagcaattctc

SEQ ID NO: 125527 - DNA, 20 bp, synthetic construct
  source 1..20: mol_type = other DNA
tactgggctcaagcaattct

SEQ ID NO: 125528 - DNA, 20 bp, synthetic construct
  source 1..20: mol_type = other DNA
ctactgggctcaagcaattc

SEQ ID NO: 125529 - DNA, 20 bp, synthetic construct
  source 1..20: mol_type = other DNA
actactgggctcaagcaatt

SEQ ID NO: 125530 - DNA, 20 bp, synthetic construct
  source 1..20: mol_type = other DNA
aactactgggctcaagcaat

SEQ ID NO: 125531 - DNA, 20 bp, synthetic construct
  source 1..20: mol_type = other DNA
aaactactgggctcaagcaa

SEQ ID NO: 125532 - DNA, 20 bp, synthetic construct
  source 1..20: mol_type = other DNA
taaactactgggctcaagca

SEQ ID NO: 125533 - DNA, 20 bp, synthetic construct
  source 1..20: mol_type = other DNA
ttaaactactgggctcaagc

SEQ ID NO: 125534 - DNA, 20 bp, synthetic construct
  source 1..20: mol_type = other DNA
tttaaactactgggctcaag

SEQ ID NO: 125535 - DNA, 20 bp, synthetic construct
  source 1..20: mol_type = other DNA
ctttaaactactgggctcaa

SEQ ID NO: 125536 - DNA, 20 bp, synthetic construct
  source 1..20: mol_type = other DNA
gctttaaactactgggctca

SEQ ID NO: 125537 - DNA, 20 bp, synthetic construct
  source 1..20: mol_type = other DNA
tgctttaaactactgggctc

SEQ ID NO: 125538 - DNA, 20 bp, synthetic construct
  source 1..20: mol_type = other DNA
ctgctttaaactactgggct

SEQ ID NO: 125539 - DNA, 20 bp, synthetic construct
  source 1..20: mol_type = other DNA
gctgctttaaactactgggc

SEQ ID NO: 125540 - DNA, 20 bp, synthetic construct
  source 1..20: mol_type = other DNA
tgctgctttaaactactggg

SEQ ID NO: 125541 - DNA, 20 bp, synthetic construct
  source 1..20: mol_type = other DNA
ctgctgctttaaactactgg

SEQ ID NO: 125542 - DNA, 20 bp, synthetic construct
  source 1..20: mol_type = other DNA
actgctgctttaaactactg

SEQ ID NO: 125543 - DNA, 20 bp, synthetic construct
  source 1..20: mol_type = other DNA
cactgctgctttaaactact

SEQ ID NO: 125544 - DNA, 20 bp, synthetic construct
  source 1..20: mol_type = other DNA
tcactgctgctttaaactac

SEQ ID NO: 125545 - DNA, 20 bp, synthetic construct
  source 1..20: mol_type = other DNA
ctcactgctgctttaaacta

SEQ ID NO: 125546 - DNA, 20 bp, synthetic construct
  source 1..20: mol_type = other DNA
gctcactgctgctttaaact

SEQ ID NO: 125547 - DNA, 20 bp, synthetic construct
  source 1..20: mol_type = other DNA
agctcactgctgctttaaac

SEQ ID NO: 125548 - DNA, 20 bp, synthetic construct
  source 1..20: mol_type = other DNA
cagctcactgctgctttaaa

SEQ ID NO: 125549 - DNA, 20 bp, synthetic construct
  source 1..20: mol_type = other DNA
acagctcactgctgctttaa

SEQ ID NO: 125550 - DNA, 20 bp, synthetic construct
  source 1..20: mol_type = other DNA
cacagctcactgctgcttta

SEQ ID NO: 125551 - DNA, 20 bp, synthetic construct
  source 1..20: mol_type = other DNA
tcacagctcactgctgcttt

SEQ ID NO: 125552 - DNA, 20 bp, synthetic construct
  source 1..20: mol_type = other DNA
atcacagctcactgctgctt

SEQ ID NO: 125553 - DNA, 20 bp, synthetic construct
  source 1..20: mol_type = other DNA
aatcacagctcactgctgct

SEQ ID NO: 125554 - DNA, 20 bp, synthetic construct
  source 1..20: mol_type = other DNA
caatcacagctcactgctgc

SEQ ID NO: 125555 - DNA, 20 bp, synthetic construct
  source 1..20: mol_type = other DNA
acaatcacagctcactgctg

SEQ ID NO: 125556 - DNA, 20 bp, synthetic construct
  source 1..20: mol_type = other DNA
tacaatcacagctcactgct

SEQ ID NO: 125557 - DNA, 20 bp, synthetic construct
  source 1..20: mol_type = other DNA
gtacaatcacagctcactgc

SEQ ID NO: 125558 - DNA, 20 bp, synthetic construct
  source 1..20: mol_type = other DNA
ggtacaatcacagctcactg

SEQ ID NO: 125559 - DNA, 20 bp, synthetic construct
  source 1..20: mol_type = other DNA
tggtacaatcacagctcact

SEQ ID NO: 125560 - DNA, 20 bp, synthetic construct
  source 1..20: mol_type = other DNA
gtggtacaatcacagctcac

SEQ ID NO: 125561 - DNA, 20 bp, synthetic construct
  source 1..20: mol_type = other DNA
agtggtacaatcacagctca

SEQ ID NO: 125562 - DNA, 20 bp, synthetic construct
  source 1..20: mol_type = other DNA
cagtggtacaatcacagctc

SEQ ID NO: 125563 - DNA, 20 bp, synthetic construct
  source 1..20: mol_type = other DNA
acagtggtacaatcacagct

SEQ ID NO: 125564 - DNA, 20 bp, synthetic construct
  source 1..20: mol_type = other DNA
tacagtggtacaatcacagc

SEQ ID NO: 125565 - DNA, 20 bp, synthetic construct
  source 1..20: mol_type = other DNA
gtacagtggtacaatcacag

SEQ ID NO: 125566 - DNA, 20 bp, synthetic construct
  source 1..20: mol_type = other DNA
agtacagtggtacaatcaca

SEQ ID NO: 125567 - DNA, 20 bp, synthetic construct
  source 1..20: mol_type = other DNA
gagtacagtggtacaatcac

SEQ ID NO: 125568 - DNA, 20 bp, synthetic construct
  source 1..20: mol_type = other DNA
ggagtacagtggtacaatca

SEQ ID NO: 125569 - DNA, 20 bp, synthetic construct
  source 1..20: mol_type = other DNA
tggagtacagtggtacaatc

SEQ ID NO: 125570 - DNA, 20 bp, synthetic construct
  source 1..20: mol_type = other DNA
ctggagtacagtggtacaat

SEQ ID NO: 125571 - DNA, 20 bp, synthetic construct
  source 1..20: mol_type = other DNA
gctggagtacagtggtacaa

SEQ ID NO: 125572 - DNA, 20 bp, synthetic construct
  source 1..20: mol_type = other DNA
ggctggagtacagtggtaca

SEQ ID NO: 125573 - DNA, 20 bp, synthetic construct
  source 1..20: mol_type = other DNA
aggctggagtacagtggtac

SEQ ID NO: 125574 - DNA, 20 bp, synthetic construct
  source 1..20: mol_type = other DNA
caggctggagtacagtggta

SEQ ID NO: 125575 - DNA, 20 bp, synthetic construct
  source 1..20: mol_type = other DNA
ccaggctggagtacagtggt

SEQ ID NO: 125576 - DNA, 20 bp, synthetic construct
  source 1..20: mol_type = other DNA
cccaggctggagtacagtgg

SEQ ID NO: 125577 - DNA, 20 bp, synthetic construct
  source 1..20: mol_type = other DNA
acccaggctggagtacagtg

SEQ ID NO: 125578 - DNA, 20 bp, synthetic construct
  source 1..20: mol_type = other DNA
cacccaggctggagtacagt

SEQ ID NO: 125579 - DNA, 20 bp, synthetic construct
  source 1..20: mol_type = other DNA
tcacccaggctggagtacag

SEQ ID NO: 125580 - DNA, 20 bp, synthetic construct
  source 1..20: mol_type = other DNA
gtcacccaggctggagtaca

SEQ ID NO: 125581 - DNA, 20 bp, synthetic construct
  source 1..20: mol_type = other DNA
tgtcacccaggctggagtac

SEQ ID NO: 125582 - DNA, 20 bp, synthetic construct
  source 1..20: mol_type = other DNA
ctgtcacccaggctggagta

SEQ ID NO: 125583 - DNA, 20 bp, synthetic construct
  source 1..20: mol_type = other DNA
tctgtcacccaggctggagt

SEQ ID NO: 125584 - DNA, 20 bp, synthetic construct
  source 1..20: mol_type = other DNA
ttctgtcacccaggctggag

SEQ ID NO: 125585 - DNA, 20 bp, synthetic construct
  source 1..20: mol_type = other DNA
cttctgtcacccaggctgga

SEQ ID NO: 125586 - DNA, 20 bp, synthetic construct
  source 1..20: mol_type = other DNA
ccttctgtcacccaggctgg

SEQ ID NO: 125587 - DNA, 20 bp, synthetic construct
  source 1..20: mol_type = other DNA
tccttctgtcacccaggctg

SEQ ID NO: 125588 - DNA, 20 bp, synthetic construct
  source 1..20: mol_type = other DNA
ctccttctgtcacccaggct

SEQ ID NO: 125589 - DNA, 20 bp, synthetic construct
  source 1..20: mol_type = other DNA
tctccttctgtcacccaggc

SEQ ID NO: 125590 - DNA, 20 bp, synthetic construct
  source 1..20: mol_type = other DNA
gtctccttctgtcacccagg

SEQ ID NO: 125591 - DNA, 20 bp, synthetic construct
  source 1..20: mol_type = other DNA
ggtctccttctgtcacccag

SEQ ID NO: 125592 - DNA, 20 bp, synthetic construct
  source 1..20: mol_type = other DNA
gggtctccttctgtcaccca

SEQ ID NO: 125593 - DNA, 20 bp, synthetic construct
  source 1..20: mol_type = other DNA
agggtctccttctgtcaccc

SEQ ID NO: 125594 - DNA, 20 bp, synthetic construct
  source 1..20: mol_type = other DNA
cagggtctccttctgtcacc

SEQ ID NO: 125595 - DNA, 20 bp, synthetic construct
  source 1..20: mol_type = other DNA
acagggtctccttctgtcac

SEQ ID NO: 125596 - DNA, 20 bp, synthetic construct
  source 1..20: mol_type = other DNA
tacagggtctccttctgtca

SEQ ID NO: 125597 - DNA, 20 bp, synthetic construct
  source 1..20: mol_type = other DNA
atacagggtctccttctgtc

SEQ ID NO: 125598 - DNA, 20 bp, synthetic construct
  source 1..20: mol_type = other DNA
aatacagggtctccttctgt

SEQ ID NO: 125599 - DNA, 20 bp, synthetic construct
  source 1..20: mol_type = other DNA
aaatacagggtctccttctg

SEQ ID NO: 125600 - DNA, 20 bp, synthetic construct
  source 1..20: mol_type = other DNA
taaatacagggtctccttct

SEQ ID NO: 125601 - DNA, 20 bp, synthetic construct
  source 1..20: mol_type = other DNA
ttaaatacagggtctccttc

SEQ ID NO: 125602 - DNA, 20 bp, synthetic construct
  source 1..20: mol_type = other DNA
tttaaatacagggtctcctt

SEQ ID NO: 125603 - DNA, 20 bp, synthetic construct
  source 1..20: mol_type = other DNA
ctttaaatacagggtctcct

SEQ ID NO: 125604 - DNA, 20 bp, synthetic construct
  source 1..20: mol_type = other DNA
actttaaatacagggtctcc

SEQ ID NO: 125605 - DNA, 20 bp, synthetic construct
  source 1..20: mol_type = other DNA
cactttaaatacagggtctc

SEQ ID NO: 125606 - DNA, 20 bp, synthetic construct
  source 1..20: mol_type = other DNA
acactttaaatacagggtct

SEQ ID NO: 125607 - DNA, 20 bp, synthetic construct
  source 1..20: mol_type = other DNA
cacactttaaatacagggtc

SEQ ID NO: 125608 - DNA, 20 bp, synthetic construct
  source 1..20: mol_type = other DNA
acacactttaaatacagggt

SEQ ID NO: 125609 - DNA, 20 bp, synthetic construct
  source 1..20: mol_type = other DNA
cacacactttaaatacaggg

SEQ ID NO: 125610 - DNA, 20 bp, synthetic construct
  source 1..20: mol_type = other DNA
acacacactttaaatacagg

SEQ ID NO: 125611 - DNA, 20 bp, synthetic construct
  source 1..20: mol_type = other DNA
cacacacactttaaatacag

SEQ ID NO: 125612 - DNA, 20 bp, synthetic construct
  source 1..20: mol_type = other DNA
acacacacactttaaataca

SEQ ID NO: 125613 - DNA, 20 bp, synthetic construct
  source 1..20: mol_type = other DNA
tacacacacactttaaatac

SEQ ID NO: 125614 - DNA, 20 bp, synthetic construct
  source 1..20: mol_type = other DNA
atacacacacactttaaata

SEQ ID NO: 125615 - DNA, 20 bp, synthetic construct
  source 1..20: mol_type = other DNA
catacacacacactttaaat

SEQ ID NO: 125616 - DNA, 20 bp, synthetic construct
  source 1..20: mol_type = other DNA
gcatacacacacactttaaa

SEQ ID NO: 125617 - DNA, 20 bp, synthetic construct
  source 1..20: mol_type = other DNA
cgcatacacacacactttaa

SEQ ID NO: 125618 - DNA, 20 bp, synthetic construct
  source 1..20: mol_type = other DNA
acgcatacacacacacttta

SEQ ID NO: 125619 - DNA, 20 bp, synthetic construct
  source 1..20: mol_type = other DNA
cacgcatacacacacacttt

SEQ ID NO: 125620 - DNA, 20 bp, synthetic construct
  source 1..20: mol_type = other DNA
gcacgcatacacacacactt

SEQ ID NO: 125621 - DNA, 20 bp, synthetic construct
  source 1..20: mol_type = other DNA
cgcacgcatacacacacact

SEQ ID NO: 125622 - DNA, 20 bp, synthetic construct
  source 1..20: mol_type = other DNA
gcgcacgcatacacacacac

SEQ ID NO: 125623 - DNA, 20 bp, synthetic construct
  source 1..20: mol_type = other DNA
tgcgcacgcatacacacaca

SEQ ID NO: 125624 - DNA, 20 bp, synthetic construct
  source 1..20: mol_type = other DNA
atgcgcacgcatacacacac

SEQ ID NO: 125625 - DNA, 20 bp, synthetic construct
  source 1..20: mol_type = other DNA
tatgcgcacgcatacacaca

SEQ ID NO: 125626 - DNA, 20 bp, synthetic construct
  source 1..20: mol_type = other DNA
ctatgcgcacgcatacacac

SEQ ID NO: 125627 - DNA, 20 bp, synthetic construct
  source 1..20: mol_type = other DNA
tctatgcgcacgcatacaca

SEQ ID NO: 125628 - DNA, 20 bp, synthetic construct
  source 1..20: mol_type = other DNA
atctatgcgcacgcatacac

SEQ ID NO: 125629 - DNA, 20 bp, synthetic construct
  source 1..20: mol_type = other DNA
catctatgcgcacgcataca

SEQ ID NO: 125630 - DNA, 20 bp, synthetic construct
  source 1..20: mol_type = other DNA
ccatctatgcgcacgcatac

SEQ ID NO: 125631 - DNA, 20 bp, synthetic construct
  source 1..20: mol_type = other DNA
tccatctatgcgcacgcata

SEQ ID NO: 125632 - DNA, 20 bp, synthetic construct
  source 1..20: mol_type = other DNA
atccatctatgcgcacgcat

SEQ ID NO: 125633 - DNA, 20 bp, synthetic construct
  source 1..20: mol_type = other DNA
tatccatctatgcgcacgca

SEQ ID NO: 125634 - DNA, 20 bp, synthetic construct
  source 1..20: mol_type = other DNA
ctatccatctatgcgcacgc

SEQ ID NO: 125635 - DNA, 20 bp, synthetic construct
  source 1..20: mol_type = other DNA
tctatccatctatgcgcacg

SEQ ID NO: 125636 - DNA, 20 bp, synthetic construct
  source 1..20: mol_type = other DNA
atctatccatctatgcgcac

SEQ ID NO: 125637 - DNA, 20 bp, synthetic construct
  source 1..20: mol_type = other DNA
tatctatccatctatgcgca

SEQ ID NO: 125638 - DNA, 20 bp, synthetic construct
  source 1..20: mol_type = other DNA
ttatctatccatctatgcgc

SEQ ID NO: 125639 - DNA, 20 bp, synthetic construct
  source 1..20: mol_type = other DNA
attatctatccatctatgcg

SEQ ID NO: 125640 - DNA, 20 bp, synthetic construct
  source 1..20: mol_type = other DNA
tattatctatccatctatgc

SEQ ID NO: 125641 - DNA, 20 bp, synthetic construct
  source 1..20: mol_type = other DNA
ttattatctatccatctatg

SEQ ID NO: 125642 - DNA, 20 bp, synthetic construct
  source 1..20: mol_type = other DNA
attattatctatccatctat

SEQ ID NO: 125643 - DNA, 20 bp, synthetic construct
  source 1..20: mol_type = other DNA
cattattatctatccatcta

SEQ ID NO: 125644 - DNA, 20 bp, synthetic construct
  source 1..20: mol_type = other DNA
acattattatctatccatct

SEQ ID NO: 125645 - DNA, 20 bp, synthetic construct
  source 1..20: mol_type = other DNA
tacattattatctatccatc

SEQ ID NO: 125646 - DNA, 20 bp, synthetic construct
  source 1..20: mol_type = other DNA
ttacattattatctatccat

SEQ ID NO: 125647 - DNA, 20 bp, synthetic construct
  source 1..20: mol_type = other DNA
attacattattatctatcca

SEQ ID NO: 125648 - DNA, 20 bp, synthetic construct
  source 1..20: mol_type = other DNA
aattacattattatctatcc

SEQ ID NO: 125649 - DNA, 20 bp, synthetic construct
  source 1..20: mol_type = other DNA
gaattacattattatctatc

SEQ ID NO: 125650 - DNA, 20 bp, synthetic construct
  source 1..20: mol_type = other DNA
ggaattacattattatctat

SEQ ID NO: 125651 - DNA, 20 bp, synthetic construct
  source 1..20: mol_type = other DNA
tggaattacattattatcta

SEQ ID NO: 125652 - DNA, 20 bp, synthetic construct
  source 1..20: mol_type = other DNA
atggaattacattattatct

SEQ ID NO: 125653 - DNA, 20 bp, synthetic construct
  source 1..20: mol_type = other DNA
aatggaattacattattatc

SEQ ID NO: 125654 - DNA, 20 bp, synthetic construct
  source 1..20: mol_type = other DNA
taatggaattacattattat

SEQ ID NO: 125655 - DNA, 20 bp, synthetic construct
  source 1..20: mol_type = other DNA
ataatggaattacattatta

SEQ ID NO: 125656 - DNA, 20 bp, synthetic construct
  source 1..20: mol_type = other DNA
cataatggaattacattatt

SEQ ID NO: 125657 - DNA, 20 bp, synthetic construct
  source 1..20: mol_type = other DNA
ccataatggaattacattat

SEQ ID NO: 125658 - DNA, 20 bp, synthetic construct
  source 1..20: mol_type = other DNA
accataatggaattacatta

SEQ ID NO: 125659 - DNA, 20 bp, synthetic construct
  source 1..20: mol_type = other DNA
gaccataatggaattacatt

SEQ ID NO: 125660 - DNA, 20 bp, synthetic construct
  source 1..20: mol_type = other DNA
tgaccataatggaattacat

SEQ ID NO: 125661 - DNA, 20 bp, synthetic construct
  source 1..20: mol_type = other DNA
atgaccataatggaattaca

SEQ ID NO: 125662 - DNA, 20 bp, synthetic construct
  source 1..20: mol_type = other DNA
tatgaccataatggaattac

SEQ ID NO: 125663 - DNA, 20 bp, synthetic construct
  source 1..20: mol_type = other DNA
gtatgaccataatggaatta

SEQ ID NO: 125664 - DNA, 20 bp, synthetic construct
  source 1..20: mol_type = other DNA
tgtatgaccataatggaatt

SEQ ID NO: 125665 - DNA, 20 bp, synthetic construct
  source 1..20: mol_type = other DNA
ttgtatgaccataatggaat

SEQ ID NO: 125666 - DNA, 20 bp, synthetic construct
  source 1..20: mol_type = other DNA
tttgtatgaccataatggaa

SEQ ID NO: 125667 - DNA, 20 bp, synthetic construct
  source 1..20: mol_type = other DNA
gtttgtatgaccataatgga

SEQ ID NO: 125668 - DNA, 20 bp, synthetic construct
  source 1..20: mol_type = other DNA
agtttgtatgaccataatgg

SEQ ID NO: 125669 - DNA, 20 bp, synthetic construct
  source 1..20: mol_type = other DNA
cagtttgtatgaccataatg

SEQ ID NO: 125670 - DNA, 20 bp, synthetic construct
  source 1..20: mol_type = other DNA
tcagtttgtatgaccataat

SEQ ID NO: 125671 - DNA, 20 bp, synthetic construct
  source 1..20: mol_type = other DNA
atcagtttgtatgaccataa

SEQ ID NO: 125672 - DNA, 20 bp, synthetic construct
  source 1..20: mol_type = other DNA
tatcagtttgtatgaccata

SEQ ID NO: 125673 - DNA, 20 bp, synthetic construct
  source 1..20: mol_type = other DNA
atatcagtttgtatgaccat

SEQ ID NO: 125674 - DNA, 20 bp, synthetic construct
  source 1..20: mol_type = other DNA
catatcagtttgtatgacca

SEQ ID NO: 125675 - DNA, 20 bp, synthetic construct
  source 1..20: mol_type = other DNA
tcatatcagtttgtatgacc

SEQ ID NO: 125676 - DNA, 20 bp, synthetic construct
  source 1..20: mol_type = other DNA
ttcatatcagtttgtatgac

SEQ ID NO: 125677 - DNA, 20 bp, synthetic construct
  source 1..20: mol_type = other DNA
tttcatatcagtttgtatga

SEQ ID NO: 125678 - DNA, 20 bp, synthetic construct
  source 1..20: mol_type = other DNA
atttcatatcagtttgtatg

SEQ ID NO: 125679 - DNA, 20 bp, synthetic construct
  source 1..20: mol_type = other DNA
catttcatatcagtttgtat

SEQ ID NO: 125680 - DNA, 20 bp, synthetic construct
  source 1..20: mol_type = other DNA
gcatttcatatcagtttgta

SEQ ID NO: 125681 - DNA, 20 bp, synthetic construct
  source 1..20: mol_type = other DNA
ggcatttcatatcagtttgt

SEQ ID NO: 125682 - DNA, 20 bp, synthetic construct
  source 1..20: mol_type = other DNA
tggcatttcatatcagtttg

SEQ ID NO: 125683 - DNA, 20 bp, synthetic construct
  source 1..20: mol_type = other DNA
atggcatttcatatcagttt

SEQ ID NO: 125684 - DNA, 20 bp, synthetic construct
  source 1..20: mol_type = other DNA
aatggcatttcatatcagtt

SEQ ID NO: 125685 - DNA, 20 bp, synthetic construct
  source 1..20: mol_type = other DNA
aaatggcatttcatatcagt

SEQ ID NO: 125686 - DNA, 20 bp, synthetic construct
  source 1..20: mol_type = other DNA
aaaatggcatttcatatcag

SEQ ID NO: 125687 - DNA, 20 bp, synthetic construct
  source 1..20: mol_type = other DNA
taaaatggcatttcatatca

SEQ ID NO: 125688 - DNA, 20 bp, synthetic construct
  source 1..20: mol_type = other DNA
ataaaatggcatttcatatc

SEQ ID NO: 125689 - DNA, 20 bp, synthetic construct
  source 1..20: mol_type = other DNA
gataaaatggcatttcatat

SEQ ID NO: 125690 - DNA, 20 bp, synthetic construct
  source 1..20: mol_type = other DNA
tgataaaatggcatttcata

SEQ ID NO: 125691 - DNA, 20 bp, synthetic construct
  source 1..20: mol_type = other DNA
atgataaaatggcatttcat

SEQ ID NO: 125692 - DNA, 20 bp, synthetic construct
  source 1..20: mol_type = other DNA
tatgataaaatggcatttca

SEQ ID NO: 125693 - DNA, 20 bp, synthetic construct
  source 1..20: mol_type = other DNA
atatgataaaatggcatttc

SEQ ID NO: 125694 - DNA, 20 bp, synthetic construct
  source 1..20: mol_type = other DNA
tatatgataaaatggcattt

SEQ ID NO: 125695 - DNA, 20 bp, synthetic construct
  source 1..20: mol_type = other DNA
ttatatgataaaatggcatt

SEQ ID NO: 125696 - DNA, 20 bp, synthetic construct
  source 1..20: mol_type = other DNA
gttatatgataaaatggcat

SEQ ID NO: 125697 - DNA, 20 bp, synthetic construct
  source 1..20: mol_type = other DNA
tgttatatgataaaatggca

SEQ ID NO: 125698 - DNA, 20 bp, synthetic construct
  source 1..20: mol_type = other DNA
ttgttatatgataaaatggc

SEQ ID NO: 125699 - DNA, 20 bp, synthetic construct
  source 1..20: mol_type = other DNA
cttgttatatgataaaatgg

SEQ ID NO: 125700 - DNA, 20 bp, synthetic construct
  source 1..20: mol_type = other DNA
acttgttatatgataaaatg

SEQ ID NO: 125701 - DNA, 20 bp, synthetic construct
  source 1..20: mol_type = other DNA
cacttgttatatgataaaat

SEQ ID NO: 125702 - DNA, 20 bp, synthetic construct
  source 1..20: mol_type = other DNA
acacttgttatatgataaaa

SEQ ID NO: 125703 - DNA, 20 bp, synthetic construct
  source 1..20: mol_type = other DNA
gacacttgttatatgataaa

SEQ ID NO: 125704 - DNA, 20 bp, synthetic construct
  source 1..20: mol_type = other DNA
agacacttgttatatgataa

SEQ ID NO: 125705 - DNA, 20 bp, synthetic construct
  source 1..20: mol_type = other DNA
aagacacttgttatatgata

SEQ ID NO: 125706 - DNA, 20 bp, synthetic construct
  source 1..20: mol_type = other DNA
aaagacacttgttatatgat

SEQ ID NO: 125707 - DNA, 20 bp, synthetic construct
  source 1..20: mol_type = other DNA
aaaagacacttgttatatga

SEQ ID NO: 125708 - DNA, 20 bp, synthetic construct
  source 1..20: mol_type = other DNA
aaaaagacacttgttatatg

SEQ ID NO: 125709 - DNA, 20 bp, synthetic construct
  source 1..20: mol_type = other DNA
caaaaagacacttgttatat

SEQ ID NO: 125710 - DNA, 20 bp, synthetic construct
  source 1..20: mol_type = other DNA
acaaaaagacacttgttata

SEQ ID NO: 125711 - DNA, 20 bp, synthetic construct
  source 1..20: mol_type = other DNA
cacaaaaagacacttgttat

SEQ ID NO: 125712 - DNA, 20 bp, synthetic construct
  source 1..20: mol_type = other DNA
ccacaaaaagacacttgtta

SEQ ID NO: 125713 - DNA, 20 bp, synthetic construct
  source 1..20: mol_type = other DNA
accacaaaaagacacttgtt

SEQ ID NO: 125714 - DNA, 20 bp, synthetic construct
  source 1..20: mol_type = other DNA
aaccacaaaaagacacttgt

SEQ ID NO: 125715 - DNA, 20 bp, synthetic construct
  source 1..20: mol_type = other DNA
caaccacaaaaagacacttg

SEQ ID NO: 125716 - DNA, 20 bp, synthetic construct
  source 1..20: mol_type = other DNA
tcaaccacaaaaagacactt

SEQ ID NO: 125717 - DNA, 20 bp, synthetic construct
  source 1..20: mol_type = other DNA
ttcaaccacaaaaagacact

SEQ ID NO: 125718 - DNA, 20 bp, synthetic construct
  source 1..20: mol_type = other DNA
attcaaccacaaaaagacac

SEQ ID NO: 125719 - DNA, 20 bp, synthetic construct
  source 1..20: mol_type = other DNA
aattcaaccacaaaaagaca

SEQ ID NO: 125720 - DNA, 20 bp, synthetic construct
  source 1..20: mol_type = other DNA
aaattcaaccacaaaaagac

SEQ ID NO: 125721 - DNA, 20 bp, synthetic construct
  source 1..20: mol_type = other DNA
caaattcaaccacaaaaaga

SEQ ID NO: 125722 - DNA, 20 bp, synthetic construct
  source 1..20: mol_type = other DNA
acaaattcaaccacaaaaag

SEQ ID NO: 125723 - DNA, 20 bp, synthetic construct
  source 1..20: mol_type = other DNA
aacaaattcaaccacaaaaa

SEQ ID NO: 125724 - DNA, 20 bp, synthetic construct
  source 1..20: mol_type = other DNA
aaacaaattcaaccacaaaa

SEQ ID NO: 125725 - DNA, 20 bp, synthetic construct
  source 1..20: mol_type = other DNA
gaaacaaattcaaccacaaa

SEQ ID NO: 125726 - DNA, 20 bp, synthetic construct
  source 1..20: mol_type = other DNA
agaaacaaattcaaccacaa

SEQ ID NO: 125727 - DNA, 20 bp, synthetic construct
  source 1..20: mol_type = other DNA
cagaaacaaattcaaccaca

SEQ ID NO: 125728 - DNA, 20 bp, synthetic construct
  source 1..20: mol_type = other DNA
ccagaaacaaattcaaccac

SEQ ID NO: 125729 - DNA, 20 bp, synthetic construct
  source 1..20: mol_type = other DNA
tccagaaacaaattcaacca

SEQ ID NO: 125730 - DNA, 20 bp, synthetic construct
  source 1..20: mol_type = other DNA
atccagaaacaaattcaacc

SEQ ID NO: 125731 - DNA, 20 bp, synthetic construct
  source 1..20: mol_type = other DNA
aatccagaaacaaattcaac

SEQ ID NO: 125732 - DNA, 20 bp, synthetic construct
  source 1..20: mol_type = other DNA
aaatccagaaacaaattcaa

SEQ ID NO: 125733 - DNA, 20 bp, synthetic construct
  source 1..20: mol_type = other DNA
aaaatccagaaacaaattca

SEQ ID NO: 125734 - DNA, 20 bp, synthetic construct
  source 1..20: mol_type = other DNA
aaaaatccagaaacaaattc

SEQ ID NO: 125735 - DNA, 20 bp, synthetic construct
  source 1..20: mol_type = other DNA
gaaaaatccagaaacaaatt

SEQ ID NO: 125736 - DNA, 20 bp, synthetic construct
  source 1..20: mol_type = other DNA
tgaaaaatccagaaacaaat

SEQ ID NO: 125737 - DNA, 20 bp, synthetic construct
  source 1..20: mol_type = other DNA
gtgaaaaatccagaaacaaa

SEQ ID NO: 125738 - DNA, 20 bp, synthetic construct
  source 1..20: mol_type = other DNA
agtgaaaaatccagaaacaa

SEQ ID NO: 125739 - DNA, 20 bp, synthetic construct
  source 1..20: mol_type = other DNA
gagtgaaaaatccagaaaca

SEQ ID NO: 125740 - DNA, 20 bp, synthetic construct
  source 1..20: mol_type = other DNA
agagtgaaaaatccagaaac

SEQ ID NO: 125741 - DNA, 20 bp, synthetic construct
  source 1..20: mol_type = other DNA
cagagtgaaaaatccagaaa

SEQ ID NO: 125742 - DNA, 20 bp, synthetic construct
  source 1..20: mol_type = other DNA
gcagagtgaaaaatccagaa

SEQ ID NO: 125743 - DNA, 20 bp, synthetic construct
  source 1..20: mol_type = other DNA
agcagagtgaaaaatccaga

SEQ ID NO: 125744 - DNA, 20 bp, synthetic construct
  source 1..20: mol_type = other DNA
aagcagagtgaaaaatccag

SEQ ID NO: 125745 - DNA, 20 bp, synthetic construct
  source 1..20: mol_type = other DNA
gaagcagagtgaaaaatcca

SEQ ID NO: 125746 - DNA, 20 bp, synthetic construct
  source 1..20: mol_type = other DNA
tgaagcagagtgaaaaatcc

SEQ ID NO: 125747 - DNA, 20 bp, synthetic construct
  source 1..20: mol_type = other DNA
gtgaagcagagtgaaaaatc

SEQ ID NO: 125748 - DNA, 20 bp, synthetic construct
  source 1..20: mol_type = other DNA
agtgaagcagagtgaaaaat

SEQ ID NO: 125749 - DNA, 20 bp, synthetic construct
  source 1..20: mol_type = other DNA
tagtgaagcagagtgaaaaa

SEQ ID NO: 125750 - DNA, 20 bp, synthetic construct
  source 1..20: mol_type = other DNA
ttagtgaagcagagtgaaaa

SEQ ID NO: 125751 - DNA, 20 bp, synthetic construct
  source 1..20: mol_type = other DNA
attagtgaagcagagtgaaa

SEQ ID NO: 125752 - DNA, 20 bp, synthetic construct
  source 1..20: mol_type = other DNA
gattagtgaagcagagtgaa

SEQ ID NO: 125753 - DNA, 20 bp, synthetic construct
  source 1..20: mol_type = other DNA
agattagtgaagcagagtga

SEQ ID NO: 125754 - DNA, 20 bp, synthetic construct
  source 1..20: mol_type = other DNA
tagattagtgaagcagagtg

SEQ ID NO: 125755 - DNA, 20 bp, synthetic construct
  source 1..20: mol_type = other DNA
ttagattagtgaagcagagt

SEQ ID NO: 125756 - DNA, 20 bp, synthetic construct
  source 1..20: mol_type = other DNA
attagattagtgaagcagag

SEQ ID NO: 125757 - DNA, 20 bp, synthetic construct
  source 1..20: mol_type = other DNA
tattagattagtgaagcaga

SEQ ID NO: 125758 - DNA, 20 bp, synthetic construct
  source 1..20: mol_type = other DNA
ctattagattagtgaagcag

SEQ ID NO: 125759 - DNA, 20 bp, synthetic construct
  source 1..20: mol_type = other DNA
cctattagattagtgaagca

SEQ ID NO: 125760 - DNA, 20 bp, synthetic construct
  source 1..20: mol_type = other DNA
tcctattagattagtgaagc

SEQ ID NO: 125761 - DNA, 20 bp, synthetic construct
  source 1..20: mol_type = other DNA
gtcctattagattagtgaag

SEQ ID NO: 125762 - DNA, 20 bp, synthetic construct
  source 1..20: mol_type = other DNA
agtcctattagattagtgaa

SEQ ID NO: 125763 - DNA, 20 bp, synthetic construct
  source 1..20: mol_type = other DNA
tagtcctattagattagtga

SEQ ID NO: 125764 - DNA, 20 bp, synthetic construct
  source 1..20: mol_type = other DNA
gtagtcctattagattagtg

SEQ ID NO: 125765 - DNA, 20 bp, synthetic construct
  source 1..20: mol_type = other DNA
ggtagtcctattagattagt

SEQ ID NO: 125766 - DNA, 20 bp, synthetic construct
  source 1..20: mol_type = other DNA
aggtagtcctattagattag

SEQ ID NO: 125767 - DNA, 20 bp, synthetic construct
  source 1..20: mol_type = other DNA
aaggtagtcctattagatta

SEQ ID NO: 125768 - DNA, 20 bp, synthetic construct
  source 1..20: mol_type = other DNA
gaaggtagtcctattagatt

SEQ ID NO: 125769 - DNA, 20 bp, synthetic construct
  source 1..20: mol_type = other DNA
agaaggtagtcctattagat

SEQ ID NO: 125770 - DNA, 20 bp, synthetic construct
  source 1..20: mol_type = other DNA
gagaaggtagtcctattaga

SEQ ID NO: 125771 - DNA, 20 bp, synthetic construct
  source 1..20: mol_type = other DNA
tgagaaggtagtcctattag

SEQ ID NO: 125772 - DNA, 20 bp, synthetic construct
  source 1..20: mol_type = other DNA
atgagaaggtagtcctatta

SEQ ID NO: 125773 - DNA, 20 bp, synthetic construct
  source 1..20: mol_type = other DNA
gatgagaaggtagtcctatt

SEQ ID NO: 125774 - DNA, 20 bp, synthetic construct
  source 1..20: mol_type = other DNA
ggatgagaaggtagtcctat

SEQ ID NO: 125775 - DNA, 20 bp, synthetic construct
  source 1..20: mol_type = other DNA
tggatgagaaggtagtccta

SEQ ID NO: 125776 - DNA, 20 bp, synthetic construct
  source 1..20: mol_type = other DNA
gtggatgagaaggtagtcct

SEQ ID NO: 125777 - DNA, 20 bp, synthetic construct
  source 1..20: mol_type = other DNA
agtggatgagaaggtagtcc

SEQ ID NO: 125778 - DNA, 20 bp, synthetic construct
  source 1..20: mol_type = other DNA
gagtggatgagaaggtagtc

SEQ ID NO: 125779 - DNA, 20 bp, synthetic construct
  source 1..20: mol_type = other DNA
tgagtggatgagaaggtagt

SEQ ID NO: 125780 - DNA, 20 bp, synthetic construct
  source 1..20: mol_type = other DNA
gtgagtggatgagaaggtag

SEQ ID NO: 125781 - DNA, 20 bp, synthetic construct
  source 1..20: mol_type = other DNA
agtgagtggatgagaaggta

SEQ ID NO: 125782 - DNA, 20 bp, synthetic construct
  source 1..20: mol_type = other DNA
cagtgagtggatgagaaggt

SEQ ID NO: 125783 - DNA, 20 bp, synthetic construct
  source 1..20: mol_type = other DNA
gcagtgagtggatgagaagg

SEQ ID NO: 125784 - DNA, 20 bp, synthetic construct
  source 1..20: mol_type = other DNA
ggcagtgagtggatgagaag

SEQ ID NO: 125785 - DNA, 20 bp, synthetic construct
  source 1..20: mol_type = other DNA
tggcagtgagtggatgagaa

SEQ ID NO: 125786 - DNA, 20 bp, synthetic construct
  source 1..20: mol_type = other DNA
ttggcagtgagtggatgaga

SEQ ID NO: 125787 - DNA, 20 bp, synthetic construct
  source 1..20: mol_type = other DNA
gttggcagtgagtggatgag

SEQ ID NO: 125788 - DNA, 20 bp, synthetic construct
  source 1..20: mol_type = other DNA
tgttggcagtgagtggatga

SEQ ID NO: 125789 - DNA, 20 bp, synthetic construct
  source 1..20: mol_type = other DNA
atgttggcagtgagtggatg

SEQ ID NO: 125790 - DNA, 20 bp, synthetic construct
  source 1..20: mol_type = other DNA
aatgttggcagtgagtggat

SEQ ID NO: 125791 - DNA, 20 bp, synthetic construct
  source 1..20: mol_type = other DNA
caatgttggcagtgagtgga

SEQ ID NO: 125792 - DNA, 20 bp, synthetic construct
  source 1..20: mol_type = other DNA
tcaatgttggcagtgagtgg

SEQ ID NO: 125793 - DNA, 20 bp, synthetic construct
  source 1..20: mol_type = other DNA
atcaatgttggcagtgagtg

SEQ ID NO: 125794 - DNA, 20 bp, synthetic construct
  source 1..20: mol_type = other DNA
aatcaatgttggcagtgagt

SEQ ID NO: 125795 - DNA, 20 bp, synthetic construct
  source 1..20: mol_type = other DNA
aaatcaatgttggcagtgag

SEQ ID NO: 125796 - DNA, 20 bp, synthetic construct
  source 1..20: mol_type = other DNA
aaaatcaatgttggcagtga

SEQ ID NO: 125797 - DNA, 20 bp, synthetic construct
  source 1..20: mol_type = other DNA
aaaaatcaatgttggcagtg

SEQ ID NO: 125798 - DNA, 20 bp, synthetic construct
  source 1..20: mol_type = other DNA
aaaaaatcaatgttggcagt

SEQ ID NO: 125799 - DNA, 20 bp, synthetic construct
  source 1..20: mol_type = other DNA
aaaaaaatcaatgttggcag

SEQ ID NO: 125800 - DNA, 20 bp, synthetic construct
  source 1..20: mol_type = other DNA
aaaaaaaatcaatgttggca

SEQ ID NO: 125801 - DNA, 20 bp, synthetic construct
  source 1..20: mol_type = other DNA
aaaaaaaaatcaatgttggc

SEQ ID NO: 125802 - DNA, 20 bp, synthetic construct
  source 1..20: mol_type = other DNA
aaaaaaaaaatcaatgttgg

SEQ ID NO: 125803 - DNA, 20 bp, synthetic construct
  source 1..20: mol_type = other DNA
gaaaaaaaaaatcaatgttg

SEQ ID NO: 125804 - DNA, 20 bp, synthetic construct
  source 1..20: mol_type = other DNA
tgaaaaaaaaaatcaatgtt

SEQ ID NO: 125805 - DNA, 20 bp, synthetic construct
  source 1..20: mol_type = other DNA
ctgaaaaaaaaaatcaatgt

SEQ ID NO: 125806 - DNA, 20 bp, synthetic construct
  source 1..20: mol_type = other DNA
tctgaaaaaaaaaatcaatg

SEQ ID NO: 125807 - DNA, 20 bp, synthetic construct
  source 1..20: mol_type = other DNA
atctgaaaaaaaaaatcaat

SEQ ID NO: 125808 - DNA, 20 bp, synthetic construct
  source 1..20: mol_type = other DNA
aatctgaaaaaaaaaatcaa

SEQ ID NO: 125809 - DNA, 20 bp, synthetic construct
  source 1..20: mol_type = other DNA
taatctgaaaaaaaaaatca

SEQ ID NO: 125810 - DNA, 20 bp, synthetic construct
  source 1..20: mol_type = other DNA
gtaatctgaaaaaaaaaatc

SEQ ID NO: 125811 - DNA, 20 bp, synthetic construct
  source 1..20: mol_type = other DNA
ggtaatctgaaaaaaaaaat

SEQ ID NO: 125812 - DNA, 20 bp, synthetic construct
  source 1..20: mol_type = other DNA
aggtaatctgaaaaaaaaaa

SEQ ID NO: 125813 - DNA, 20 bp, synthetic construct
  source 1..20: mol_type = other DNA
aaggtaatctgaaaaaaaaa

SEQ ID NO: 125814 - DNA, 20 bp, synthetic construct
  source 1..20: mol_type = other DNA
caaggtaatctgaaaaaaaa

SEQ ID NO: 125815 - DNA, 20 bp, synthetic construct
  source 1..20: mol_type = other DNA
tcaaggtaatctgaaaaaaa

SEQ ID NO: 125816 - DNA, 20 bp, synthetic construct
  source 1..20: mol_type = other DNA
ttcaaggtaatctgaaaaaa

SEQ ID NO: 125817 - DNA, 20 bp, synthetic construct
  source 1..20: mol_type = other DNA
attcaaggtaatctgaaaaa

SEQ ID NO: 125818 - DNA, 20 bp, synthetic construct
  source 1..20: mol_type = other DNA
aattcaaggtaatctgaaaa

SEQ ID NO: 125819 - DNA, 20 bp, synthetic construct
  source 1..20: mol_type = other DNA
aaattcaaggtaatctgaaa

SEQ ID NO: 125820 - DNA, 20 bp, synthetic construct
  source 1..20: mol_type = other DNA
aaaattcaaggtaatctgaa

SEQ ID NO: 125821 - DNA, 20 bp, synthetic construct
  source 1..20: mol_type = other DNA
gaaaattcaaggtaatctga

SEQ ID NO: 125822 - DNA, 20 bp, synthetic construct
  source 1..20: mol_type = other DNA
agaaaattcaaggtaatctg

SEQ ID NO: 125823 - DNA, 20 bp, synthetic construct
  source 1..20: mol_type = other DNA
cagaaaattcaaggtaatct

SEQ ID NO: 125824 - DNA, 20 bp, synthetic construct
  source 1..20: mol_type = other DNA
acagaaaattcaaggtaatc

SEQ ID NO: 125825 - DNA, 20 bp, synthetic construct
  source 1..20: mol_type = other DNA
aacagaaaattcaaggtaat

SEQ ID NO: 125826 - DNA, 20 bp, synthetic construct
  source 1..20: mol_type = other DNA
aaacagaaaattcaaggtaa

SEQ ID NO: 125827 - DNA, 20 bp, synthetic construct
  source 1..20: mol_type = other DNA
taaacagaaaattcaaggta

SEQ ID NO: 125828 - DNA, 20 bp, synthetic construct
  source 1..20: mol_type = other DNA
ataaacagaaaattcaaggt

SEQ ID NO: 125829 - DNA, 20 bp, synthetic construct
  source 1..20: mol_type = other DNA
aataaacagaaaattcaagg

SEQ ID NO: 125830 - DNA, 20 bp, synthetic construct
  source 1..20: mol_type = other DNA
aaataaacagaaaattcaag

SEQ ID NO: 125831 - DNA, 20 bp, synthetic construct
  source 1..20: mol_type = other DNA
aaaataaacagaaaattcaa

SEQ ID NO: 125832 - DNA, 20 bp, synthetic construct
  source 1..20: mol_type = other DNA
aaaaataaacagaaaattca

SEQ ID NO: 125833 - DNA, 20 bp, synthetic construct
  source 1..20: mol_type = other DNA
gaaaaataaacagaaaattc

SEQ ID NO: 125834 - DNA, 20 bp, synthetic construct
  source 1..20: mol_type = other DNA
ggaaaaataaacagaaaatt

SEQ ID NO: 125835 - DNA, 20 bp, synthetic construct
  source 1..20: mol_type = other DNA
tggaaaaataaacagaaaat

SEQ ID NO: 125836 - DNA, 20 bp, synthetic construct
  source 1..20: mol_type = other DNA
atggaaaaataaacagaaaa

SEQ ID NO: 125837 - DNA, 20 bp, synthetic construct
  source 1..20: mol_type = other DNA
tatggaaaaataaacagaaa

SEQ ID NO: 125838 - DNA, 20 bp, synthetic construct
  source 1..20: mol_type = other DNA
atatggaaaaataaacagaa

SEQ ID NO: 125839 - DNA, 20 bp, synthetic construct
  source 1..20: mol_type = other DNA
catatggaaaaataaacaga

SEQ ID NO: 125840 - DNA, 20 bp, synthetic construct
  source 1..20: mol_type = other DNA
tcatatggaaaaataaacag

SEQ ID NO: 125841 - DNA, 20 bp, synthetic construct
  source 1..20: mol_type = other DNA
ttcatatggaaaaataaaca

SEQ ID NO: 125842 - DNA, 20 bp, synthetic construct
  source 1..20: mol_type = other DNA
gttcatatggaaaaataaac

SEQ ID NO: 125843 - DNA, 20 bp, synthetic construct
  source 1..20: mol_type = other DNA
agttcatatggaaaaataaa

SEQ ID NO: 125844 - DNA, 20 bp, synthetic construct
  source 1..20: mol_type = other DNA
gagttcatatggaaaaataa

SEQ ID NO: 125845 - DNA, 20 bp, synthetic construct
  source 1..20: mol_type = other DNA
agagttcatatggaaaaata

SEQ ID NO: 125846 - DNA, 20 bp, synthetic construct
  source 1..20: mol_type = other DNA
tagagttcatatggaaaaat

SEQ ID NO: 125847 - DNA, 20 bp, synthetic construct
  source 1..20: mol_type = other DNA
atagagttcatatggaaaaa

SEQ ID NO: 125848 - DNA, 20 bp, synthetic construct
  source 1..20: mol_type = other DNA
tatagagttcatatggaaaa

SEQ ID NO: 125849 - DNA, 20 bp, synthetic construct
  source 1..20: mol_type = other DNA
ttatagagttcatatggaaa

SEQ ID NO: 125850 - DNA, 20 bp, synthetic construct
  source 1..20: mol_type = other DNA
attatagagttcatatggaa

SEQ ID NO: 125851 - DNA, 20 bp, synthetic construct
  source 1..20: mol_type = other DNA
aattatagagttcatatgga

SEQ ID NO: 125852 - DNA, 20 bp, synthetic construct
  source 1..20: mol_type = other DNA
taattatagagttcatatgg

SEQ ID NO: 125853 - DNA, 20 bp, synthetic construct
  source 1..20: mol_type = other DNA
ttaattatagagttcatatg

SEQ ID NO: 125854 - DNA, 20 bp, synthetic construct
  source 1..20: mol_type = other DNA
gttaattatagagttcatat

SEQ ID NO: 125855 - DNA, 20 bp, synthetic construct
  source 1..20: mol_type = other DNA
agttaattatagagttcata

SEQ ID NO: 125856 - DNA, 20 bp, synthetic construct
  source 1..20: mol_type = other DNA
aagttaattatagagttcat

SEQ ID NO: 125857 - DNA, 20 bp, synthetic construct
  source 1..20: mol_type = other DNA
taagttaattatagagttca

SEQ ID NO: 125858 - DNA, 20 bp, synthetic construct
  source 1..20: mol_type = other DNA
gtaagttaattatagagttc

SEQ ID NO: 125859 - DNA, 20 bp, synthetic construct
  source 1..20: mol_type = other DNA
agtaagttaattatagagtt

SEQ ID NO: 125860 - DNA, 20 bp, synthetic construct
  source 1..20: mol_type = other DNA
tagtaagttaattatagagt

SEQ ID NO: 125861 - DNA, 20 bp, synthetic construct
  source 1..20: mol_type = other DNA
gtagtaagttaattatagag

SEQ ID NO: 125862 - DNA, 20 bp, synthetic construct
  source 1..20: mol_type = other DNA
agtagtaagttaattataga

SEQ ID NO: 125863 - DNA, 20 bp, synthetic construct
  source 1..20: mol_type = other DNA
tagtagtaagttaattatag

SEQ ID NO: 125864 - DNA, 20 bp, synthetic construct
  source 1..20: mol_type = other DNA
ttagtagtaagttaattata

SEQ ID NO: 125865 - DNA, 20 bp, synthetic construct
  source 1..20: mol_type = other DNA
tttagtagtaagttaattat

SEQ ID NO: 125866 - DNA, 20 bp, synthetic construct
  source 1..20: mol_type = other DNA
ttttagtagtaagttaatta

SEQ ID NO: 125867 - DNA, 20 bp, synthetic construct
  source 1..20: mol_type = other DNA
tttttagtagtaagttaatt

SEQ ID NO: 125868 - DNA, 20 bp, synthetic construct
  source 1..20: mol_type = other DNA
ttttttagtagtaagttaat

SEQ ID NO: 125869 - DNA, 20 bp, synthetic construct
  source 1..20: mol_type = other DNA
tttttttagtagtaagttaa

SEQ ID NO: 125870 - DNA, 20 bp, synthetic construct
  source 1..20: mol_type = other DNA
atttttttagtagtaagtta

SEQ ID NO: 125871 - DNA, 20 bp, synthetic construct
  source 1..20: mol_type = other DNA
gatttttttagtagtaagtt

SEQ ID NO: 125872 - DNA, 20 bp, synthetic construct
  source 1..20: mol_type = other DNA
tgatttttttagtagtaagt

SEQ ID NO: 125873 - DNA, 20 bp, synthetic construct
  source 1..20: mol_type = other DNA
ctgatttttttagtagtaag

SEQ ID NO: 125874 - DNA, 20 bp, synthetic construct
  source 1..20: mol_type = other DNA
actgatttttttagtagtaa

SEQ ID NO: 125875 - DNA, 20 bp, synthetic construct
  source 1..20: mol_type = other DNA
aactgatttttttagtagta

SEQ ID NO: 125876 - DNA, 20 bp, synthetic construct
  source 1..20: mol_type = other DNA
caactgatttttttagtagt

SEQ ID NO: 125877 - DNA, 20 bp, synthetic construct
  source 1..20: mol_type = other DNA
gcaactgatttttttagtag

SEQ ID NO: 125878 - DNA, 20 bp, synthetic construct
  source 1..20: mol_type = other DNA
ggcaactgatttttttagta

SEQ ID NO: 125879 - DNA, 20 bp, synthetic construct
  source 1..20: mol_type = other DNA
aggcaactgatttttttagt

SEQ ID NO: 125880 - DNA, 20 bp, synthetic construct
  source 1..20: mol_type = other DNA
aaggcaactgatttttttag

SEQ ID NO: 125881 - DNA, 20 bp, synthetic construct
  source 1..20: mol_type = other DNA
aaaggcaactgattttttta

SEQ ID NO: 125882 - DNA, 20 bp, synthetic construct
  source 1..20: mol_type = other DNA
aaaaggcaactgattttttt

SEQ ID NO: 125883 - DNA, 20 bp, synthetic construct
  source 1..20: mol_type = other DNA
aaaaaggcaactgatttttt

SEQ ID NO: 125884 - DNA, 20 bp, synthetic construct
  source 1..20: mol_type = other DNA
taaaaaggcaactgattttt

SEQ ID NO: 125885 - DNA, 20 bp, synthetic construct
  source 1..20: mol_type = other DNA
ttaaaaaggcaactgatttt

SEQ ID NO: 125886 - DNA, 20 bp, synthetic construct
  source 1..20: mol_type = other DNA
tttaaaaaggcaactgattt

SEQ ID NO: 125887 - DNA, 20 bp, synthetic construct
  source 1..20: mol_type = other DNA
ttttaaaaaggcaactgatt

SEQ ID NO: 125888 - DNA, 20 bp, synthetic construct
  source 1..20: mol_type = other DNA
gttttaaaaaggcaactgat

SEQ ID NO: 125889 - DNA, 20 bp, synthetic construct
  source 1..20: mol_type = other DNA
ggttttaaaaaggcaactga

SEQ ID NO: 125890 - DNA, 20 bp, synthetic construct
  source 1..20: mol_type = other DNA
tggttttaaaaaggcaactg

SEQ ID NO: 125891 - DNA, 20 bp, synthetic construct
  source 1..20: mol_type = other DNA
ttggttttaaaaaggcaact

SEQ ID NO: 125892 - DNA, 20 bp, synthetic construct
  source 1..20: mol_type = other DNA
gttggttttaaaaaggcaac

SEQ ID NO: 125893 - DNA, 20 bp, synthetic construct
  source 1..20: mol_type = other DNA
agttggttttaaaaaggcaa

SEQ ID NO: 125894 - DNA, 20 bp, synthetic construct
  source 1..20: mol_type = other DNA
cagttggttttaaaaaggca

SEQ ID NO: 125895 - DNA, 20 bp, synthetic construct
  source 1..20: mol_type = other DNA
tcagttggttttaaaaaggc

SEQ ID NO: 125896 - DNA, 20 bp, synthetic construct
  source 1..20: mol_type = other DNA
atcagttggttttaaaaagg

SEQ ID NO: 125897 - DNA, 20 bp, synthetic construct
  source 1..20: mol_type = other DNA
gatcagttggttttaaaaag

SEQ ID NO: 125898 - DNA, 20 bp, synthetic construct
  source 1..20: mol_type = other DNA
agatcagttggttttaaaaa

SEQ ID NO: 125899 - DNA, 20 bp, synthetic construct
  source 1..20: mol_type = other DNA
aagatcagttggttttaaaa

SEQ ID NO: 125900 - DNA, 20 bp, synthetic construct
  source 1..20: mol_type = other DNA
aaagatcagttggttttaaa

SEQ ID NO: 125901 - DNA, 20 bp, synthetic construct
  source 1..20: mol_type = other DNA
taaagatcagttggttttaa

SEQ ID NO: 125902 - DNA, 20 bp, synthetic construct
  source 1..20: mol_type = other DNA
ttaaagatcagttggtttta

SEQ ID NO: 125903 - DNA, 20 bp, synthetic construct
  source 1..20: mol_type = other DNA
tttaaagatcagttggtttt

SEQ ID NO: 125904 - DNA, 20 bp, synthetic construct
  source 1..20: mol_type = other DNA
ttttaaagatcagttggttt

SEQ ID NO: 125905 - DNA, 20 bp, synthetic construct
  source 1..20: mol_type = other DNA
attttaaagatcagttggtt

SEQ ID NO: 125906 - DNA, 20 bp, synthetic construct
  source 1..20: mol_type = other DNA
tattttaaagatcagttggt

SEQ ID NO: 125907 - DNA, 20 bp, synthetic construct
  source 1..20: mol_type = other DNA
atattttaaagatcagttgg

SEQ ID NO: 125908 - DNA, 20 bp, synthetic construct
  source 1..20: mol_type = other DNA
tatattttaaagatcagttg

SEQ ID NO: 125909 - DNA, 20 bp, synthetic construct
  source 1..20: mol_type = other DNA
atatattttaaagatcagtt

SEQ ID NO: 125910 - DNA, 20 bp, synthetic construct
  source 1..20: mol_type = other DNA
gatatattttaaagatcagt

SEQ ID NO: 125911 - DNA, 20 bp, synthetic construct
  source 1..20: mol_type = other DNA
agatatattttaaagatcag

SEQ ID NO: 125912 - DNA, 20 bp, synthetic construct
  source 1..20: mol_type = other DNA
aagatatattttaaagatca

SEQ ID NO: 125913 - DNA, 20 bp, synthetic construct
  source 1..20: mol_type = other DNA
caagatatattttaaagatc

SEQ ID NO: 125914 - DNA, 20 bp, synthetic construct
  source 1..20: mol_type = other DNA
ccaagatatattttaaagat

SEQ ID NO: 125915 - DNA, 20 bp, synthetic construct
  source 1..20: mol_type = other DNA
gccaagatatattttaaaga

SEQ ID NO: 125916 - DNA, 20 bp, synthetic construct
  source 1..20: mol_type = other DNA
agccaagatatattttaaag

SEQ ID NO: 125917 - DNA, 20 bp, synthetic construct
  source 1..20: mol_type = other DNA
cagccaagatatattttaaa

SEQ ID NO: 125918 - DNA, 20 bp, synthetic construct
  source 1..20: mol_type = other DNA
ccagccaagatatattttaa

SEQ ID NO: 125919 - DNA, 20 bp, synthetic construct
  source 1..20: mol_type = other DNA
cccagccaagatatatttta

SEQ ID NO: 125920 - DNA, 20 bp, synthetic construct
  source 1..20: mol_type = other DNA
gcccagccaagatatatttt

SEQ ID NO: 125921 - DNA, 20 bp, synthetic construct
  source 1..20: mol_type = other DNA
ggcccagccaagatatattt

SEQ ID NO: 125922 - DNA, 20 bp, synthetic construct
  source 1..20: mol_type = other DNA
gggcccagccaagatatatt

SEQ ID NO: 125923 - DNA, 20 bp, synthetic construct
  source 1..20: mol_type = other DNA
cgggcccagccaagatatat

SEQ ID NO: 125924 - DNA, 20 bp, synthetic construct
  source 1..20: mol_type = other DNA
ccgggcccagccaagatata

SEQ ID NO: 125925 - DNA, 20 bp, synthetic construct
  source 1..20: mol_type = other DNA
accgggcccagccaagatat

SEQ ID NO: 125926 - DNA, 20 bp, synthetic construct
  source 1..20: mol_type = other DNA
caccgggcccagccaagata

SEQ ID NO: 125927 - DNA, 20 bp, synthetic construct
  source 1..20: mol_type = other DNA
ccaccgggcccagccaagat

SEQ ID NO: 125928 - DNA, 20 bp, synthetic construct
  source 1..20: mol_type = other DNA
gccaccgggcccagccaaga

SEQ ID NO: 125929 - DNA, 20 bp, synthetic construct
  source 1..20: mol_type = other DNA
tgccaccgggcccagccaag

SEQ ID NO: 125930 - DNA, 20 bp, synthetic construct
  source 1..20: mol_type = other DNA
ctgccaccgggcccagccaa

SEQ ID NO: 125931 - DNA, 20 bp, synthetic construct
  source 1..20: mol_type = other DNA
cctgccaccgggcccagcca

SEQ ID NO: 125932 - DNA, 20 bp, synthetic construct
  source 1..20: mol_type = other DNA
gcctgccaccgggcccagcc

SEQ ID NO: 125933 - DNA, 20 bp, synthetic construct
  source 1..20: mol_type = other DNA
tgcctgccaccgggcccagc

SEQ ID NO: 125934 - DNA, 20 bp, synthetic construct
  source 1..20: mol_type = other DNA
gtgcctgccaccgggcccag

SEQ ID NO: 125935 - DNA, 20 bp, synthetic construct
  source 1..20: mol_type = other DNA
ggtgcctgccaccgggccca

SEQ ID NO: 125936 - DNA, 20 bp, synthetic construct
  source 1..20: mol_type = other DNA
aggtgcctgccaccgggccc

SEQ ID NO: 125937 - DNA, 20 bp, synthetic construct
  source 1..20: mol_type = other DNA
caggtgcctgccaccgggcc

SEQ ID NO: 125938 - DNA, 20 bp, synthetic construct
  source 1..20: mol_type = other DNA
acaggtgcctgccaccgggc

SEQ ID NO: 125939 - DNA, 20 bp, synthetic construct
  source 1..20: mol_type = other DNA
tacaggtgcctgccaccggg

SEQ ID NO: 125940 - DNA, 20 bp, synthetic construct
  source 1..20: mol_type = other DNA
ttacaggtgcctgccaccgg

SEQ ID NO: 125941 - DNA, 20 bp, synthetic construct
  source 1..20: mol_type = other DNA
attacaggtgcctgccaccg

SEQ ID NO: 125942 - DNA, 20 bp, synthetic construct
  source 1..20: mol_type = other DNA
aattacaggtgcctgccacc

SEQ ID NO: 125943 - DNA, 20 bp, synthetic construct
  source 1..20: mol_type = other DNA
gaattacaggtgcctgccac

SEQ ID NO: 125944 - DNA, 20 bp, synthetic construct
  source 1..20: mol_type = other DNA
agaattacaggtgcctgcca

SEQ ID NO: 125945 - DNA, 20 bp, synthetic construct
  source 1..20: mol_type = other DNA
tagaattacaggtgcctgcc

SEQ ID NO: 125946 - DNA, 20 bp, synthetic construct
  source 1..20: mol_type = other DNA
ctagaattacaggtgcctgc

SEQ ID NO: 125947 - DNA, 20 bp, synthetic construct
  source 1..20: mol_type = other DNA
gctagaattacaggtgcctg

SEQ ID NO: 125948 - DNA, 20 bp, synthetic construct
  source 1..20: mol_type = other DNA
agctagaattacaggtgcct

SEQ ID NO: 125949 - DNA, 20 bp, synthetic construct
  source 1..20: mol_type = other DNA
tagctagaattacaggtgcc

SEQ ID NO: 125950 - DNA, 20 bp, synthetic construct
  source 1..20: mol_type = other DNA
gtagctagaattacaggtgc

SEQ ID NO: 125951 - DNA, 20 bp, synthetic construct
  source 1..20: mol_type = other DNA
agtagctagaattacaggtg

SEQ ID NO: 125952 - DNA, 20 bp, synthetic construct
  source 1..20: mol_type = other DNA
aagtagctagaattacaggt

SEQ ID NO: 125953 - DNA, 20 bp, synthetic construct
  source 1..20: mol_type = other DNA
caagtagctagaattacagg

SEQ ID NO: 125954 - DNA, 20 bp, synthetic construct
  source 1..20: mol_type = other DNA
ccaagtagctagaattacag

SEQ ID NO: 125955 - DNA, 20 bp, synthetic construct
  source 1..20: mol_type = other DNA
cccaagtagctagaattaca

SEQ ID NO: 125956 - DNA, 20 bp, synthetic construct
  source 1..20: mol_type = other DNA
tcccaagtagctagaattac

SEQ ID NO: 125957 - DNA, 20 bp, synthetic construct
  source 1..20: mol_type = other DNA
ctcccaagtagctagaatta

SEQ ID NO: 125958 - DNA, 20 bp, synthetic construct
  source 1..20: mol_type = other DNA
tctcccaagtagctagaatt

SEQ ID NO: 125959 - DNA, 20 bp, synthetic construct
  source 1..20: mol_type = other DNA
gtctcccaagtagctagaat

SEQ ID NO: 125960 - DNA, 20 bp, synthetic construct
  source 1..20: mol_type = other DNA
agtctcccaagtagctagaa

SEQ ID NO: 125961 - DNA, 20 bp, synthetic construct
  source 1..20: mol_type = other DNA
cagtctcccaagtagctaga

SEQ ID NO: 125962 - DNA, 20 bp, synthetic construct
  source 1..20: mol_type = other DNA
tcagtctcccaagtagctag

SEQ ID NO: 125963 - DNA, 20 bp, synthetic construct
  source 1..20: mol_type = other DNA
ctcagtctcccaagtagcta

SEQ ID NO: 125964 - DNA, 20 bp, synthetic construct
  source 1..20: mol_type = other DNA
cctcagtctcccaagtagct

SEQ ID NO: 125965 - DNA, 20 bp, synthetic construct
  source 1..20: mol_type = other DNA
gcctcagtctcccaagtagc

SEQ ID NO: 125966 - DNA, 20 bp, synthetic construct
  source 1..20: mol_type = other DNA
tgcctcagtctcccaagtag

SEQ ID NO: 125967 - DNA, 20 bp, synthetic construct
  source 1..20: mol_type = other DNA
ctgcctcagtctcccaagta

SEQ ID NO: 125968 - DNA, 20 bp, synthetic construct
  source 1..20: mol_type = other DNA
tctgcctcagtctcccaagt

SEQ ID NO: 125969 - DNA, 20 bp, synthetic construct
  source 1..20: mol_type = other DNA
ttctgcctcagtctcccaag

SEQ ID NO: 125970 - DNA, 20 bp, synthetic construct
  source 1..20: mol_type = other DNA
cttctgcctcagtctcccaa

SEQ ID NO: 125971 - DNA, 20 bp, synthetic construct
  source 1..20: mol_type = other DNA
tcttctgcctcagtctccca

SEQ ID NO: 125972 - DNA, 20 bp, synthetic construct
  source 1..20: mol_type = other DNA
ttcttctgcctcagtctccc

SEQ ID NO: 125973 - DNA, 20 bp, synthetic construct
  source 1..20: mol_type = other DNA
attcttctgcctcagtctcc

SEQ ID NO: 125974 - DNA, 20 bp, synthetic construct
  source 1..20: mol_type = other DNA
aattcttctgcctcagtctc

SEQ ID NO: 125975 - DNA, 20 bp, synthetic construct
  source 1..20: mol_type = other DNA
caattcttctgcctcagtct

SEQ ID NO: 125976 - DNA, 20 bp, synthetic construct
  source 1..20: mol_type = other DNA
gcaattcttctgcctcagtc

SEQ ID NO: 125977 - DNA, 20 bp, synthetic construct
  source 1..20: mol_type = other DNA
agcaattcttctgcctcagt

SEQ ID NO: 125978 - DNA, 20 bp, synthetic construct
  source 1..20: mol_type = other DNA
aagcaattcttctgcctcag

SEQ ID NO: 125979 - DNA, 20 bp, synthetic construct
  source 1..20: mol_type = other DNA
caagcaattcttctgcctca

SEQ ID NO: 125980 - DNA, 20 bp, synthetic construct
  source 1..20: mol_type = other DNA
tcaagcaattcttctgcctc

SEQ ID NO: 125981 - DNA, 20 bp, synthetic construct
  source 1..20: mol_type = other DNA
ttcaagcaattcttctgcct

SEQ ID NO: 125982 - DNA, 20 bp, synthetic construct
  source 1..20: mol_type = other DNA
gttcaagcaattcttctgcc

SEQ ID NO: 125983 - DNA, 20 bp, synthetic construct
  source 1..20: mol_type = other DNA
ggttcaagcaattcttctgc

SEQ ID NO: 125984 - DNA, 20 bp, synthetic construct
  source 1..20: mol_type = other DNA
gggttcaagcaattcttctg

SEQ ID NO: 125985 - DNA, 20 bp, synthetic construct
  source 1..20: mol_type = other DNA
tgggttcaagcaattcttct

SEQ ID NO: 125986 - DNA, 20 bp, synthetic construct
  source 1..20: mol_type = other DNA
ctgggttcaagcaattcttc

SEQ ID NO: 125987 - DNA, 20 bp, synthetic construct
  source 1..20: mol_type = other DNA
cctgggttcaagcaattctt

SEQ ID NO: 125988 - DNA, 20 bp, synthetic construct
  source 1..20: mol_type = other DNA
tcctgggttcaagcaattct

SEQ ID NO: 125989 - DNA, 20 bp, synthetic construct
  source 1..20: mol_type = other DNA
ctcctgggttcaagcaattc

SEQ ID NO: 125990 - DNA, 20 bp, synthetic construct
  source 1..20: mol_type = other DNA
cctcctgggttcaagcaatt

SEQ ID NO: 125991 - DNA, 20 bp, synthetic construct
  source 1..20: mol_type = other DNA
gcctcctgggttcaagcaat

SEQ ID NO: 125992 - DNA, 20 bp, synthetic construct
  source 1..20: mol_type = other DNA
cgcctcctgggttcaagcaa

SEQ ID NO: 125993 - DNA, 20 bp, synthetic construct
  source 1..20: mol_type = other DNA
ccgcctcctgggttcaagca

SEQ ID NO: 125994 - DNA, 20 bp, synthetic construct
  source 1..20: mol_type = other DNA
tccgcctcctgggttcaagc

SEQ ID NO: 125995 - DNA, 20 bp, synthetic construct
  source 1..20: mol_type = other DNA
ttccgcctcctgggttcaag

SEQ ID NO: 125996 - DNA, 20 bp, synthetic construct
  source 1..20: mol_type = other DNA
cttccgcctcctgggttcaa

SEQ ID NO: 125997 - DNA, 20 bp, synthetic construct
  source 1..20: mol_type = other DNA
acttccgcctcctgggttca

SEQ ID NO: 125998 - DNA, 20 bp, synthetic construct
  source 1..20: mol_type = other DNA
aacttccgcctcctgggttc

SEQ ID NO: 125999 - DNA, 20 bp, synthetic construct
  source 1..20: mol_type = other DNA
caacttccgcctcctgggtt

SEQ ID NO: 126000 - DNA, 20 bp, synthetic construct
  source 1..20: mol_type = other DNA
acaacttccgcctcctgggt

SEQ ID NO: 126001 - DNA, 20 bp, synthetic construct
  source 1..20: mol_type = other DNA
tacaacttccgcctcctggg

SEQ ID NO: 126002 - DNA, 20 bp, synthetic construct
  source 1..20: mol_type = other DNA
ctacaacttccgcctcctgg

SEQ ID NO: 126003 - DNA, 20 bp, synthetic construct
  source 1..20: mol_type = other DNA
actacaacttccgcctcctg

SEQ ID NO: 126004 - DNA, 20 bp, synthetic construct
  source 1..20: mol_type = other DNA
aactacaacttccgcctcct

SEQ ID NO: 126005 - DNA, 20 bp, synthetic construct
  source 1..20: mol_type = other DNA
caactacaacttccgcctcc

SEQ ID NO: 126006 - DNA, 20 bp, synthetic construct
  source 1..20: mol_type = other DNA
tcaactacaacttccgcctc

SEQ ID NO: 126007 - DNA, 20 bp, synthetic construct
  source 1..20: mol_type = other DNA
ctcaactacaacttccgcct

SEQ ID NO: 126008 - DNA, 20 bp, synthetic construct
  source 1..20: mol_type = other DNA
actcaactacaacttccgcc

SEQ ID NO: 126009 - DNA, 20 bp, synthetic construct
  source 1..20: mol_type = other DNA
aactcaactacaacttccgc

SEQ ID NO: 126010 - DNA, 20 bp, synthetic construct
  source 1..20: mol_type = other DNA
caactcaactacaacttccg

SEQ ID NO: 126011 - DNA, 20 bp, synthetic construct
  source 1..20: mol_type = other DNA
tcaactcaactacaacttcc

SEQ ID NO: 126012 - DNA, 20 bp, synthetic construct
  source 1..20: mol_type = other DNA
ctcaactcaactacaacttc

SEQ ID NO: 126013 - DNA, 20 bp, synthetic construct
  source 1..20: mol_type = other DNA
tctcaactcaactacaactt

SEQ ID NO: 126014 - DNA, 20 bp, synthetic construct
  source 1..20: mol_type = other DNA
atctcaactcaactacaact

SEQ ID NO: 126015 - DNA, 20 bp, synthetic construct
  source 1..20: mol_type = other DNA
aatctcaactcaactacaac

SEQ ID NO: 126016 - DNA, 20 bp, synthetic construct
  source 1..20: mol_type = other DNA
caatctcaactcaactacaa

SEQ ID NO: 126017 - DNA, 20 bp, synthetic construct
  source 1..20: mol_type = other DNA
gcaatctcaactcaactaca

SEQ ID NO: 126018 - DNA, 20 bp, synthetic construct
  source 1..20: mol_type = other DNA
cgcaatctcaactcaactac

SEQ ID NO: 126019 - DNA, 20 bp, synthetic construct
  source 1..20: mol_type = other DNA
gcgcaatctcaactcaacta

SEQ ID NO: 126020 - DNA, 20 bp, synthetic construct
  source 1..20: mol_type = other DNA
tgcgcaatctcaactcaact

SEQ ID NO: 126021 - DNA, 20 bp, synthetic construct
  source 1..20: mol_type = other DNA
gtgcgcaatctcaactcaac

SEQ ID NO: 126022 - DNA, 20 bp, synthetic construct
  source 1..20: mol_type = other DNA
ggtgcgcaatctcaactcaa

SEQ ID NO: 126023 - DNA, 20 bp, synthetic construct
  source 1..20: mol_type = other DNA
aggtgcgcaatctcaactca

SEQ ID NO: 126024 - DNA, 20 bp, synthetic construct
  source 1..20: mol_type = other DNA
caggtgcgcaatctcaactc

SEQ ID NO: 126025 - DNA, 20 bp, synthetic construct
  source 1..20: mol_type = other DNA
acaggtgcgcaatctcaact

SEQ ID NO: 126026 - DNA, 20 bp, synthetic construct
  source 1..20: mol_type = other DNA
tacaggtgcgcaatctcaac

SEQ ID NO: 126027 - DNA, 20 bp, synthetic construct
  source 1..20: mol_type = other DNA
gtacaggtgcgcaatctcaa

SEQ ID NO: 126028 - DNA, 20 bp, synthetic construct
  source 1..20: mol_type = other DNA
agtacaggtgcgcaatctca

SEQ ID NO: 126029 - DNA, 20 bp, synthetic construct
  source 1..20: mol_type = other DNA
gagtacaggtgcgcaatctc

SEQ ID NO: 126030 - DNA, 20 bp, synthetic construct
  source 1..20: mol_type = other DNA
ggagtacaggtgcgcaatct

SEQ ID NO: 126031 - DNA, 20 bp, synthetic construct
  source 1..20: mol_type = other DNA
tggagtacaggtgcgcaatc

SEQ ID NO: 126032 - DNA, 20 bp, synthetic construct
  source 1..20: mol_type = other DNA
ctggagtacaggtgcgcaat

SEQ ID NO: 126033 - DNA, 20 bp, synthetic construct
  source 1..20: mol_type = other DNA
gctggagtacaggtgcgcaa

SEQ ID NO: 126034 - DNA, 20 bp, synthetic construct
  source 1..20: mol_type = other DNA
ggctggagtacaggtgcgca

SEQ ID NO: 126035 - DNA, 20 bp, synthetic construct
  source 1..20: mol_type = other DNA
aggctggagtacaggtgcgc

SEQ ID NO: 126036 - DNA, 20 bp, synthetic construct
  source 1..20: mol_type = other DNA
caggctggagtacaggtgcg

SEQ ID NO: 126037 - DNA, 20 bp, synthetic construct
  source 1..20: mol_type = other DNA
ccaggctggagtacaggtgc

SEQ ID NO: 126038 - DNA, 20 bp, synthetic construct
  source 1..20: mol_type = other DNA
cccaggctggagtacaggtg

SEQ ID NO: 126039 - DNA, 20 bp, synthetic construct
  source 1..20: mol_type = other DNA
acccaggctggagtacaggt

SEQ ID NO: 126040 - DNA, 20 bp, synthetic construct
  source 1..20: mol_type = other DNA
cacccaggctggagtacagg

SEQ ID NO: 126041 - DNA, 20 bp, synthetic construct
  source 1..20: mol_type = other DNA
tcacccaggctggagtacag

SEQ ID NO: 126042 - DNA, 20 bp, synthetic construct
  source 1..20: mol_type = other DNA
gtcacccaggctggagtaca

SEQ ID NO: 126043 - DNA, 20 bp, synthetic construct
  source 1..20: mol_type = other DNA
tgtcacccaggctggagtac

SEQ ID NO: 126044 - DNA, 20 bp, synthetic construct
  source 1..20: mol_type = other DNA
ctgtcacccaggctggagta

SEQ ID NO: 126045 - DNA, 20 bp, synthetic construct
  source 1..20: mol_type = other DNA
tctgtcacccaggctggagt

SEQ ID NO: 126046 - DNA, 20 bp, synthetic construct
  source 1..20: mol_type = other DNA
ctctgtcacccaggctggag

SEQ ID NO: 126047 - DNA, 20 bp, synthetic construct
  source 1..20: mol_type = other DNA
gctctgtcacccaggctgga

SEQ ID NO: 126048 - DNA, 20 bp, synthetic construct
  source 1..20: mol_type = other DNA
tgctctgtcacccaggctgg

SEQ ID NO: 126049 - DNA, 20 bp, synthetic construct
  source 1..20: mol_type = other DNA
ttgctctgtcacccaggctg

SEQ ID NO: 126050 - DNA, 20 bp, synthetic construct
  source 1..20: mol_type = other DNA
cttgctctgtcacccaggct

SEQ ID NO: 126051 - DNA, 20 bp, synthetic construct
  source 1..20: mol_type = other DNA
tcttgctctgtcacccaggc

SEQ ID NO: 126052 - DNA, 20 bp, synthetic construct
  source 1..20: mol_type = other DNA
atcttgctctgtcacccagg

SEQ ID NO: 126053 - DNA, 20 bp, synthetic construct
  source 1..20: mol_type = other DNA
aatcttgctctgtcacccag

SEQ ID NO: 126054 - DNA, 20 bp, synthetic construct
  source 1..20: mol_type = other DNA
gaatcttgctctgtcaccca

SEQ ID NO: 126055 - DNA, 20 bp, synthetic construct
  source 1..20: mol_type = other DNA
ggaatcttgctctgtcaccc

SEQ ID NO: 126056 - DNA, 20 bp, synthetic construct
  source 1..20: mol_type = other DNA
gggaatcttgctctgtcacc

SEQ ID NO: 126057 - DNA, 20 bp, synthetic construct
  source 1..20: mol_type = other DNA
agggaatcttgctctgtcac

SEQ ID NO: 126058 - DNA, 20 bp, synthetic construct
  source 1..20: mol_type = other DNA
gagggaatcttgctctgtca

SEQ ID NO: 126059 - DNA, 20 bp, synthetic construct
  source 1..20: mol_type = other DNA
agagggaatcttgctctgtc

SEQ ID NO: 126060 - DNA, 20 bp, synthetic construct
  source 1..20: mol_type = other DNA
aagagggaatcttgctctgt

SEQ ID NO: 126061 - DNA, 20 bp, synthetic construct
  source 1..20: mol_type = other DNA
taagagggaatcttgctctg

SEQ ID NO: 126062 - DNA, 20 bp, synthetic construct
  source 1..20: mol_type = other DNA
ttaagagggaatcttgctct

SEQ ID NO: 126063 - DNA, 20 bp, synthetic construct
  source 1..20: mol_type = other DNA
tttaagagggaatcttgctc

SEQ ID NO: 126064 - DNA, 20 bp, synthetic construct
  source 1..20: mol_type = other DNA
ttttaagagggaatcttgct

SEQ ID NO: 126065 - DNA, 20 bp, synthetic construct
  source 1..20: mol_type = other DNA
tttttaagagggaatcttgc

SEQ ID NO: 126066 - DNA, 20 bp, synthetic construct
  source 1..20: mol_type = other DNA
ttttttaagagggaatcttg

SEQ ID NO: 126067 - DNA, 20 bp, synthetic construct
  source 1..20: mol_type = other DNA
tttttttaagagggaatctt

SEQ ID NO: 126068 - DNA, 20 bp, synthetic construct
  source 1..20: mol_type = other DNA
ttttttttaagagggaatct

SEQ ID NO: 126069 - DNA, 20 bp, synthetic construct
  source 1..20: mol_type = other DNA
tttttttttaagagggaatc

SEQ ID NO: 126070 - DNA, 20 bp, synthetic construct
  source 1..20: mol_type = other DNA
ttttttttttaagagggaat

SEQ ID NO: 126071 - DNA, 20 bp, synthetic construct
  source 1..20: mol_type = other DNA
tttttttttttaagagggaa

SEQ ID NO: 126072 - DNA, 20 bp, synthetic construct
  source 1..20: mol_type = other DNA
ttttttttttttaagaggga

SEQ ID NO: 126073 - DNA, 20 bp, synthetic construct
  source 1..20: mol_type = other DNA
tttttttttttttaagaggg

SEQ ID NO: 126074 - DNA, 20 bp, synthetic construct
  source 1..20: mol_type = other DNA
ttttttttttttttaagagg

SEQ ID NO: 126075 - DNA, 20 bp, synthetic construct
  source 1..20: mol_type = other DNA
tttttttttttttttaagag

SEQ ID NO: 126076 - DNA, 20 bp, synthetic construct
  source 1..20: mol_type = other DNA
ttttttttttttttttaaga

SEQ ID NO: 126077 - DNA, 20 bp, synthetic construct
  source 1..20: mol_type = other DNA
tttttttttttttttttaag

SEQ ID NO: 126078 - DNA, 20 bp, synthetic construct
  source 1..20: mol_type = other DNA
ttttttttttttttttttaa

SEQ ID NO: 126079 - DNA, 20 bp, synthetic construct
  source 1..20: mol_type = other DNA
ttttttttttttttttttta

SEQ ID NO: 126080 - DNA, 20 bp, synthetic construct
  source 1..20: mol_type = other DNA
tttttttttttttttttttt

SEQ ID NO: 126081 - DNA, 20 bp, synthetic construct
  source 1..20: mol_type = other DNA
cttttttttttttttttttt

SEQ ID NO: 126082 - DNA, 20 bp, synthetic construct
  source 1..20: mol_type = other DNA
tctttttttttttttttttt

SEQ ID NO: 126083 - DNA, 20 bp, synthetic construct
  source 1..20: mol_type = other DNA
ttcttttttttttttttttt

SEQ ID NO: 126084 - DNA, 20 bp, synthetic construct
  source 1..20: mol_type = other DNA
tttctttttttttttttttt

SEQ ID NO: 126085 - DNA, 20 bp, synthetic construct
  source 1..20: mol_type = other DNA
gtttcttttttttttttttt

SEQ ID NO: 126086 - DNA, 20 bp, synthetic construct
  source 1..20: mol_type = other DNA
tgtttctttttttttttttt

SEQ ID NO: 126087 - DNA, 20 bp, synthetic construct
  source 1..20: mol_type = other DNA
ctgtttcttttttttttttt

SEQ ID NO: 126088 - DNA, 20 bp, synthetic construct
  source 1..20: mol_type = other DNA
tctgtttctttttttttttt

SEQ ID NO: 126089 - DNA, 20 bp, synthetic construct
  source 1..20: mol_type = other DNA
ttctgtttcttttttttttt

SEQ ID NO: 126090 - DNA, 20 bp, synthetic construct
  source 1..20: mol_type = other DNA
tttctgtttctttttttttt

SEQ ID NO: 126091 - DNA, 20 bp, synthetic construct
  source 1..20: mol_type = other DNA
ttttctgtttcttttttttt

SEQ ID NO: 126092 - DNA, 20 bp, synthetic construct
  source 1..20: mol_type = other DNA
cttttctgtttctttttttt

SEQ ID NO: 126093 - DNA, 20 bp, synthetic construct
  source 1..20: mol_type = other DNA
tcttttctgtttcttttttt

SEQ ID NO: 126094 - DNA, 20 bp, synthetic construct
  source 1..20: mol_type = other DNA
atcttttctgtttctttttt

SEQ ID NO: 126095 - DNA, 20 bp, synthetic construct
  source 1..20: mol_type = other DNA
tatcttttctgtttcttttt

SEQ ID NO: 126096 - DNA, 20 bp, synthetic construct
  source 1..20: mol_type = other DNA
ttatcttttctgtttctttt

SEQ ID NO: 126097 - DNA, 20 bp, synthetic construct
  source 1..20: mol_type = other DNA
tttatcttttctgtttcttt

SEQ ID NO: 126098 - DNA, 20 bp, synthetic construct
  source 1..20: mol_type = other DNA
atttatcttttctgtttctt

SEQ ID NO: 126099 - DNA, 20 bp, synthetic construct
  source 1..20: mol_type = other DNA
gatttatcttttctgtttct

SEQ ID NO: 126100 - DNA, 20 bp, synthetic construct
  source 1..20: mol_type = other DNA
agatttatcttttctgtttc

SEQ ID NO: 126101 - DNA, 20 bp, synthetic construct
  source 1..20: mol_type = other DNA
aagatttatcttttctgttt

SEQ ID NO: 126102 - DNA, 20 bp, synthetic construct
  source 1..20: mol_type = other DNA
aaagatttatcttttctgtt

SEQ ID NO: 126103 - DNA, 20 bp, synthetic construct
  source 1..20: mol_type = other DNA
aaaagatttatcttttctgt

SEQ ID NO: 126104 - DNA, 20 bp, synthetic construct
  source 1..20: mol_type = other DNA
aaaaagatttatcttttctg

SEQ ID NO: 126105 - DNA, 20 bp, synthetic construct
  source 1..20: mol_type = other DNA
taaaaagatttatcttttct

SEQ ID NO: 126106 - DNA, 20 bp, synthetic construct
  source 1..20: mol_type = other DNA
gtaaaaagatttatcttttc

SEQ ID NO: 126107 - DNA, 20 bp, synthetic construct
  source 1..20: mol_type = other DNA
tgtaaaaagatttatctttt

SEQ ID NO: 126108 - DNA, 20 bp, synthetic construct
  source 1..20: mol_type = other DNA
ttgtaaaaagatttatcttt

SEQ ID NO: 126109 - DNA, 20 bp, synthetic construct
  source 1..20: mol_type = other DNA
attgtaaaaagatttatctt

SEQ ID NO: 126110 - DNA, 20 bp, synthetic construct
  source 1..20: mol_type = other DNA
tattgtaaaaagatttatct

SEQ ID NO: 126111 - DNA, 20 bp, synthetic construct
  source 1..20: mol_type = other DNA
ttattgtaaaaagatttatc

SEQ ID NO: 126112 - DNA, 20 bp, synthetic construct
  source 1..20: mol_type = other DNA
attattgtaaaaagatttat

SEQ ID NO: 126113 - DNA, 20 bp, synthetic construct
  source 1..20: mol_type = other DNA
aattattgtaaaaagattta

SEQ ID NO: 126114 - DNA, 20 bp, synthetic construct
  source 1..20: mol_type = other DNA
aaattattgtaaaaagattt

SEQ ID NO: 126115 - DNA, 20 bp, synthetic construct
  source 1..20: mol_type = other DNA
caaattattgtaaaaagatt

SEQ ID NO: 126116 - DNA, 20 bp, synthetic construct
  source 1..20: mol_type = other DNA
acaaattattgtaaaaagat

SEQ ID NO: 126117 - DNA, 20 bp, synthetic construct
  source 1..20: mol_type = other DNA
aacaaattattgtaaaaaga

SEQ ID NO: 126118 - DNA, 20 bp, synthetic construct
  source 1..20: mol_type = other DNA
gaacaaattattgtaaaaag

SEQ ID NO: 126119 - DNA, 20 bp, synthetic construct
  source 1..20: mol_type = other DNA
ggaacaaattattgtaaaaa

SEQ ID NO: 126120 - DNA, 20 bp, synthetic construct
  source 1..20: mol_type = other DNA
tggaacaaattattgtaaaa

SEQ ID NO: 126121 - DNA, 20 bp, synthetic construct
  source 1..20: mol_type = other DNA
ttggaacaaattattgtaaa

SEQ ID NO: 126122 - DNA, 20 bp, synthetic construct
  source 1..20: mol_type = other DNA
attggaacaaattattgtaa

SEQ ID NO: 126123 - DNA, 20 bp, synthetic construct
  source 1..20: mol_type = other DNA
aattggaacaaattattgta

SEQ ID NO: 126124 - DNA, 20 bp, synthetic construct
  source 1..20: mol_type = other DNA
taattggaacaaattattgt

SEQ ID NO: 126125 - DNA, 20 bp, synthetic construct
  source 1..20: mol_type = other DNA
ctaattggaacaaattattg

SEQ ID NO: 126126 - DNA, 20 bp, synthetic construct
  source 1..20: mol_type = other DNA
cctaattggaacaaattatt

SEQ ID NO: 126127 - DNA, 20 bp, synthetic construct
  source 1..20: mol_type = other DNA
ccctaattggaacaaattat

SEQ ID NO: 126128 - DNA, 20 bp, synthetic construct
  source 1..20: mol_type = other DNA
accctaattggaacaaatta

SEQ ID NO: 126129 - DNA, 20 bp, synthetic construct
  source 1..20: mol_type = other DNA
gaccctaattggaacaaatt

SEQ ID NO: 126130 - DNA, 20 bp, synthetic construct
  source 1..20: mol_type = other DNA
ggaccctaattggaacaaat

SEQ ID NO: 126131 - DNA, 20 bp, synthetic construct
  source 1..20: mol_type = other DNA
tggaccctaattggaacaaa

SEQ ID NO: 126132 - DNA, 20 bp, synthetic construct
  source 1..20: mol_type = other DNA
ttggaccctaattggaacaa

SEQ ID NO: 126133 - DNA, 20 bp, synthetic construct
  source 1..20: mol_type = other DNA
cttggaccctaattggaaca

SEQ ID NO: 126134 - DNA, 20 bp, synthetic construct
  source 1..20: mol_type = other DNA
acttggaccctaattggaac

SEQ ID NO: 126135 - DNA, 20 bp, synthetic construct
  source 1..20: mol_type = other DNA
gacttggaccctaattggaa

SEQ ID NO: 126136 - DNA, 20 bp, synthetic construct
  source 1..20: mol_type = other DNA
tgacttggaccctaattgga

SEQ ID NO: 126137 - DNA, 20 bp, synthetic construct
  source 1..20: mol_type = other DNA
ctgacttggaccctaattgg

SEQ ID NO: 126138 - DNA, 20 bp, synthetic construct
  source 1..20: mol_type = other DNA
cctgacttggaccctaattg

SEQ ID NO: 126139 - DNA, 20 bp, synthetic construct
  source 1..20: mol_type = other DNA
gcctgacttggaccctaatt

SEQ ID NO: 126140 - DNA, 20 bp, synthetic construct
  source 1..20: mol_type = other DNA
agcctgacttggaccctaat

SEQ ID NO: 126141 - DNA, 20 bp, synthetic construct
  source 1..20: mol_type = other DNA
aagcctgacttggaccctaa

SEQ ID NO: 126142 - DNA, 20 bp, synthetic construct
  source 1..20: mol_type = other DNA
caagcctgacttggacccta

SEQ ID NO: 126143 - DNA, 20 bp, synthetic construct
  source 1..20: mol_type = other DNA
gcaagcctgacttggaccct

SEQ ID NO: 126144 - DNA, 20 bp, synthetic construct
  source 1..20: mol_type = other DNA
tgcaagcctgacttggaccc

SEQ ID NO: 126145 - DNA, 20 bp, synthetic construct
  source 1..20: mol_type = other DNA
ttgcaagcctgacttggacc

SEQ ID NO: 126146 - DNA, 20 bp, synthetic construct
  source 1..20: mol_type = other DNA
attgcaagcctgacttggac

SEQ ID NO: 126147 - DNA, 20 bp, synthetic construct
  source 1..20: mol_type = other DNA
aattgcaagcctgacttgga

SEQ ID NO: 126148 - DNA, 20 bp, synthetic construct
  source 1..20: mol_type = other DNA
aaattgcaagcctgacttgg

SEQ ID NO: 126149 - DNA, 20 bp, synthetic construct
  source 1..20: mol_type = other DNA
caaattgcaagcctgacttg

SEQ ID NO: 126150 - DNA, 20 bp, synthetic construct
  source 1..20: mol_type = other DNA
ccaaattgcaagcctgactt

SEQ ID NO: 126151 - DNA, 20 bp, synthetic construct
  source 1..20: mol_type = other DNA
tccaaattgcaagcctgact

SEQ ID NO: 126152 - DNA, 20 bp, synthetic construct
  source 1..20: mol_type = other DNA
atccaaattgcaagcctgac

SEQ ID NO: 126153 - DNA, 20 bp, synthetic construct
  source 1..20: mol_type = other DNA
aatccaaattgcaagcctga

SEQ ID NO: 126154 - DNA, 20 bp, synthetic construct
  source 1..20: mol_type = other DNA
aaatccaaattgcaagcctg

SEQ ID NO: 126155 - DNA, 20 bp, synthetic construct
  source 1..20: mol_type = other DNA
caaatccaaattgcaagcct

SEQ ID NO: 126156 - DNA, 20 bp, synthetic construct
  source 1..20: mol_type = other DNA
acaaatccaaattgcaagcc

SEQ ID NO: 126157 - DNA, 20 bp, synthetic construct
  source 1..20: mol_type = other DNA
aacaaatccaaattgcaagc

SEQ ID NO: 126158 - DNA, 20 bp, synthetic construct
  source 1..20: mol_type = other DNA
aaacaaatccaaattgcaag

SEQ ID NO: 126159 - DNA, 20 bp, synthetic construct
  source 1..20: mol_type = other DNA
taaacaaatccaaattgcaa

SEQ ID NO: 126160 - DNA, 20 bp, synthetic construct
  source 1..20: mol_type = other DNA
ataaacaaatccaaattgca

SEQ ID NO: 126161 - DNA, 20 bp, synthetic construct
  source 1..20: mol_type = other DNA
tataaacaaatccaaattgc

SEQ ID NO: 126162 - DNA, 20 bp, synthetic construct
  source 1..20: mol_type = other DNA
atataaacaaatccaaattg

SEQ ID NO: 126163 - DNA, 20 bp, synthetic construct
  source 1..20: mol_type = other DNA
catataaacaaatccaaatt

SEQ ID NO: 126164 - DNA, 20 bp, synthetic construct
  source 1..20: mol_type = other DNA
acatataaacaaatccaaat

SEQ ID NO: 126165 - DNA, 20 bp, synthetic construct
  source 1..20: mol_type = other DNA
aacatataaacaaatccaaa

SEQ ID NO: 126166 - DNA, 20 bp, synthetic construct
  source 1..20: mol_type = other DNA
caacatataaacaaatccaa

SEQ ID NO: 126167 - DNA, 20 bp, synthetic construct
  source 1..20: mol_type = other DNA
tcaacatataaacaaatcca

SEQ ID NO: 126168 - DNA, 20 bp, synthetic construct
  source 1..20: mol_type = other DNA
ttcaacatataaacaaatcc

SEQ ID NO: 126169 - DNA, 20 bp, synthetic construct
  source 1..20: mol_type = other DNA
cttcaacatataaacaaatc

SEQ ID NO: 126170 - DNA, 20 bp, synthetic construct
  source 1..20: mol_type = other DNA
acttcaacatataaacaaat

SEQ ID NO: 126171 - DNA, 20 bp, synthetic construct
  source 1..20: mol_type = other DNA
gacttcaacatataaacaaa

SEQ ID NO: 126172 - DNA, 20 bp, synthetic construct
  source 1..20: mol_type = other DNA
agacttcaacatataaacaa

SEQ ID NO: 126173 - DNA, 20 bp, synthetic construct
  source 1..20: mol_type = other DNA
aagacttcaacatataaaca

SEQ ID NO: 126174 - DNA, 20 bp, synthetic construct
  source 1..20: mol_type = other DNA
aaagacttcaacatataaac

SEQ ID NO: 126175 - DNA, 20 bp, synthetic construct
  source 1..20: mol_type = other DNA
aaaagacttcaacatataaa

SEQ ID NO: 126176 - DNA, 20 bp, synthetic construct
  source 1..20: mol_type = other DNA
aaaaagacttcaacatataa

SEQ ID NO: 126177 - DNA, 20 bp, synthetic construct
  source 1..20: mol_type = other DNA
aaaaaagacttcaacatata

SEQ ID NO: 126178 - DNA, 20 bp, synthetic construct
  source 1..20: mol_type = other DNA
aaaaaaagacttcaacatat

SEQ ID NO: 126179 - DNA, 20 bp, synthetic construct
  source 1..20: mol_type = other DNA
aaaaaaaagacttcaacata

SEQ ID NO: 126180 - DNA, 20 bp, synthetic construct
  source 1..20: mol_type = other DNA
aaaaaaaaagacttcaacat

SEQ ID NO: 126181 - DNA, 20 bp, synthetic construct
  source 1..20: mol_type = other DNA
aaaaaaaaaagacttcaaca

SEQ ID NO: 126182 - DNA, 20 bp, synthetic construct
  source 1..20: mol_type = other DNA
aaaaaaaaaaagacttcaac

SEQ ID NO: 126183 - DNA, 20 bp, synthetic construct
  source 1..20: mol_type = other DNA
aaaaaaaaaaaagacttcaa

SEQ ID NO: 126184 - DNA, 20 bp, synthetic construct
  source 1..20: mol_type = other DNA
aaaaaaaaaaaaagacttca

SEQ ID NO: 126185 - DNA, 20 bp, synthetic construct
  source 1..20: mol_type = other DNA
taaaaaaaaaaaaagacttc

SEQ ID NO: 126186 - DNA, 20 bp, synthetic construct
  source 1..20: mol_type = other DNA
ttaaaaaaaaaaaaagactt

SEQ ID NO: 126187 - DNA, 20 bp, synthetic construct
  source 1..20: mol_type = other DNA
attaaaaaaaaaaaaagact

SEQ ID NO: 126188 - DNA, 20 bp, synthetic construct
  source 1..20: mol_type = other DNA
aattaaaaaaaaaaaaagac

SEQ ID NO: 126189 - DNA, 20 bp, synthetic construct
  source 1..20: mol_type = other DNA
caattaaaaaaaaaaaaaga

SEQ ID NO: 126190 - DNA, 20 bp, synthetic construct
  source 1..20: mol_type = other DNA
acaattaaaaaaaaaaaaag

SEQ ID NO: 126191 - DNA, 20 bp, synthetic construct
  source 1..20: mol_type = other DNA
aacaattaaaaaaaaaaaaa

SEQ ID NO: 126192 - DNA, 20 bp, synthetic construct
  source 1..20: mol_type = other DNA
aaacaattaaaaaaaaaaaa

SEQ ID NO: 126193 - DNA, 20 bp, synthetic construct
  source 1..20: mol_type = other DNA
gaaacaattaaaaaaaaaaa

SEQ ID NO: 126194 - DNA, 20 bp, synthetic construct
  source 1..20: mol_type = other DNA
tgaaacaattaaaaaaaaaa

SEQ ID NO: 126195 - DNA, 20 bp, synthetic construct
  source 1..20: mol_type = other DNA
atgaaacaattaaaaaaaaa

SEQ ID NO: 126196 - DNA, 20 bp, synthetic construct
  source 1..20: mol_type = other DNA
tatgaaacaattaaaaaaaa

SEQ ID NO: 126197 - DNA, 20 bp, synthetic construct
  source 1..20: mol_type = other DNA
atatgaaacaattaaaaaaa

SEQ ID NO: 126198 - DNA, 20 bp, synthetic construct
  source 1..20: mol_type = other DNA
aatatgaaacaattaaaaaa

SEQ ID NO: 126199 - DNA, 20 bp, synthetic construct
  source 1..20: mol_type = other DNA
caatatgaaacaattaaaaa

SEQ ID NO: 126200 - DNA, 20 bp, synthetic construct
  source 1..20: mol_type = other DNA
acaatatgaaacaattaaaa

SEQ ID NO: 126201 - DNA, 20 bp, synthetic construct
  source 1..20: mol_type = other DNA
cacaatatgaaacaattaaa

SEQ ID NO: 126202 - DNA, 20 bp, synthetic construct
  source 1..20: mol_type = other DNA
ccacaatatgaaacaattaa

SEQ ID NO: 126203 - DNA, 20 bp, synthetic construct
  source 1..20: mol_type = other DNA
accacaatatgaaacaatta

SEQ ID NO: 126204 - DNA, 20 bp, synthetic construct
  source 1..20: mol_type = other DNA
taccacaatatgaaacaatt

SEQ ID NO: 126205 - DNA, 20 bp, synthetic construct
  source 1..20: mol_type = other DNA
ttaccacaatatgaaacaat

SEQ ID NO: 126206 - DNA, 20 bp, synthetic construct
  source 1..20: mol_type = other DNA
gttaccacaatatgaaacaa

SEQ ID NO: 126207 - DNA, 20 bp, synthetic construct
  source 1..20: mol_type = other DNA
agttaccacaatatgaaaca

SEQ ID NO: 126208 - DNA, 20 bp, synthetic construct
  source 1..20: mol_type = other DNA
aagttaccacaatatgaaac

SEQ ID NO: 126209 - DNA, 20 bp, synthetic construct
  source 1..20: mol_type = other DNA
aaagttaccacaatatgaaa

SEQ ID NO: 126210 - DNA, 20 bp, synthetic construct
  source 1..20: mol_type = other DNA
aaaagttaccacaatatgaa

SEQ ID NO: 126211 - DNA, 20 bp, synthetic construct
  source 1..20: mol_type = other DNA
aaaaagttaccacaatatga

SEQ ID NO: 126212 - DNA, 20 bp, synthetic construct
  source 1..20: mol_type = other DNA
aaaaaagttaccacaatatg

SEQ ID NO: 126213 - DNA, 20 bp, synthetic construct
  source 1..20: mol_type = other DNA
aaaaaaagttaccacaatat

SEQ ID NO: 126214 - DNA, 20 bp, synthetic construct
  source 1..20: mol_type = other DNA
aaaaaaaagttaccacaata

SEQ ID NO: 126215 - DNA, 20 bp, synthetic construct
  source 1..20: mol_type = other DNA
aaaaaaaaagttaccacaat

SEQ ID NO: 126216 - DNA, 20 bp, synthetic construct
  source 1..20: mol_type = other DNA
aaaaaaaaaagttaccacaa

SEQ ID NO: 126217 - DNA, 20 bp, synthetic construct
  source 1..20: mol_type = other DNA
aaaaaaaaaaagttaccaca

SEQ ID NO: 126218 - DNA, 20 bp, synthetic construct
  source 1..20: mol_type = other DNA
aaaaaaaaaaaagttaccac

SEQ ID NO: 126219 - DNA, 20 bp, synthetic construct
  source 1..20: mol_type = other DNA
aaaaaaaaaaaaagttacca

SEQ ID NO: 126220 - DNA, 20 bp, synthetic construct
  source 1..20: mol_type = other DNA
aaaaaaaaaaaaaagttacc

SEQ ID NO: 126221 - DNA, 20 bp, synthetic construct
  source 1..20: mol_type = other DNA
aaaaaaaaaaaaaaagttac

SEQ ID NO: 126222 - DNA, 20 bp, synthetic construct
  source 1..20: mol_type = other DNA
aaaaaaaaaaaaaaaagtta

SEQ ID NO: 126223 - DNA, 20 bp, synthetic construct
  source 1..20: mol_type = other DNA
aaaaaaaaaaaaaaaaagtt

SEQ ID NO: 126224 - DNA, 20 bp, synthetic construct
  source 1..20: mol_type = other DNA
caaaaaaaaaaaaaaaaagt

SEQ ID NO: 126225 - DNA, 20 bp, synthetic construct
  source 1..20: mol_type = other DNA
tcaaaaaaaaaaaaaaaaag

SEQ ID NO: 126226 - DNA, 20 bp, synthetic construct
  source 1..20: mol_type = other DNA
ctcaaaaaaaaaaaaaaaaa

SEQ ID NO: 126227 - DNA, 20 bp, synthetic construct
  source 1..20: mol_type = other DNA
tctcaaaaaaaaaaaaaaaa

SEQ ID NO: 126228 - DNA, 20 bp, synthetic construct
  source 1..20: mol_type = other DNA
atctcaaaaaaaaaaaaaaa

SEQ ID NO: 126229 - DNA, 20 bp, synthetic construct
  source 1..20: mol_type = other DNA
catctcaaaaaaaaaaaaaa

SEQ ID NO: 126230 - DNA, 20 bp, synthetic construct
  source 1..20: mol_type = other DNA
ccatctcaaaaaaaaaaaaa

SEQ ID NO: 126231 - DNA, 20 bp, synthetic construct
  source 1..20: mol_type = other DNA
tccatctcaaaaaaaaaaaa

SEQ ID NO: 126232 - DNA, 20 bp, synthetic construct
  source 1..20: mol_type = other DNA
ttccatctcaaaaaaaaaaa

SEQ ID NO: 126233 - DNA, 20 bp, synthetic construct
  source 1..20: mol_type = other DNA
attccatctcaaaaaaaaaa

SEQ ID NO: 126234 - DNA, 20 bp, synthetic construct
  source 1..20: mol_type = other DNA
gattccatctcaaaaaaaaa

SEQ ID NO: 126235 - DNA, 20 bp, synthetic construct
  source 1..20: mol_type = other DNA
agattccatctcaaaaaaaa

SEQ ID NO: 126236 - DNA, 20 bp, synthetic construct
  source 1..20: mol_type = other DNA
aagattccatctcaaaaaaa

SEQ ID NO: 126237 - DNA, 20 bp, synthetic construct
  source 1..20: mol_type = other DNA
caagattccatctcaaaaaa

SEQ ID NO: 126238 - DNA, 20 bp, synthetic construct
  source 1..20: mol_type = other DNA
ccaagattccatctcaaaaa

SEQ ID NO: 126239 - DNA, 20 bp, synthetic construct
  source 1..20: mol_type = other DNA
gccaagattccatctcaaaa

SEQ ID NO: 126240 - DNA, 20 bp, synthetic construct
  source 1..20: mol_type = other DNA
agccaagattccatctcaaa

SEQ ID NO: 126241 - DNA, 20 bp, synthetic construct
  source 1..20: mol_type = other DNA
gagccaagattccatctcaa

SEQ ID NO: 126242 - DNA, 20 bp, synthetic construct
  source 1..20: mol_type = other DNA
agagccaagattccatctca

SEQ ID NO: 126243 - DNA, 20 bp, synthetic construct
  source 1..20: mol_type = other DNA
cagagccaagattccatctc

SEQ ID NO: 126244 - DNA, 20 bp, synthetic construct
  source 1..20: mol_type = other DNA
acagagccaagattccatct

SEQ ID NO: 126245 - DNA, 20 bp, synthetic construct
  source 1..20: mol_type = other DNA
gacagagccaagattccatc

SEQ ID NO: 126246 - DNA, 20 bp, synthetic construct
  source 1..20: mol_type = other DNA
tgacagagccaagattccat

SEQ ID NO: 126247 - DNA, 20 bp, synthetic construct
  source 1..20: mol_type = other DNA
gtgacagagccaagattcca

SEQ ID NO: 126248 - DNA, 20 bp, synthetic construct
  source 1..20: mol_type = other DNA
ggtgacagagccaagattcc

SEQ ID NO: 126249 - DNA, 20 bp, synthetic construct
  source 1..20: mol_type = other DNA
aggtgacagagccaagattc

SEQ ID NO: 126250 - DNA, 20 bp, synthetic construct
  source 1..20: mol_type = other DNA
taggtgacagagccaagatt

SEQ ID NO: 126251 - DNA, 20 bp, synthetic construct
  source 1..20: mol_type = other DNA
ctaggtgacagagccaagat

SEQ ID NO: 126252 - DNA, 20 bp, synthetic construct
  source 1..20: mol_type = other DNA
cctaggtgacagagccaaga

SEQ ID NO: 126253 - DNA, 20 bp, synthetic construct
  source 1..20: mol_type = other DNA
gcctaggtgacagagccaag

SEQ ID NO: 126254 - DNA, 20 bp, synthetic construct
  source 1..20: mol_type = other DNA
agcctaggtgacagagccaa

SEQ ID NO: 126255 - DNA, 20 bp, synthetic construct
  source 1..20: mol_type = other DNA
cagcctaggtgacagagcca

SEQ ID NO: 126256 - DNA, 20 bp, synthetic construct
  source 1..20: mol_type = other DNA
ccagcctaggtgacagagcc

SEQ ID NO: 126257 - DNA, 20 bp, synthetic construct
  source 1..20: mol_type = other DNA
tccagcctaggtgacagagc

SEQ ID NO: 126258 - DNA, 20 bp, synthetic construct
  source 1..20: mol_type = other DNA
ctccagcctaggtgacagag

SEQ ID NO: 126259 - DNA, 20 bp, synthetic construct
  source 1..20: mol_type = other DNA
actccagcctaggtgacaga

SEQ ID NO: 126260 - DNA, 20 bp, synthetic construct
  source 1..20: mol_type = other DNA
tactccagcctaggtgacag

SEQ ID NO: 126261 - DNA, 20 bp, synthetic construct
  source 1..20: mol_type = other DNA
gtactccagcctaggtgaca

SEQ ID NO: 126262 - DNA, 20 bp, synthetic construct
  source 1..20: mol_type = other DNA
tgtactccagcctaggtgac

SEQ ID NO: 126263 - DNA, 20 bp, synthetic construct
  source 1..20: mol_type = other DNA
ctgtactccagcctaggtga

SEQ ID NO: 126264 - DNA, 20 bp, synthetic construct
  source 1..20: mol_type = other DNA
actgtactccagcctaggtg

SEQ ID NO: 126265 - DNA, 20 bp, synthetic construct
  source 1..20: mol_type = other DNA
cactgtactccagcctaggt

SEQ ID NO: 126266 - DNA, 20 bp, synthetic construct
  source 1..20: mol_type = other DNA
ccactgtactccagcctagg

SEQ ID NO: 126267 - DNA, 20 bp, synthetic construct
  source 1..20: mol_type = other DNA
gccactgtactccagcctag

SEQ ID NO: 126268 - DNA, 20 bp, synthetic construct
  source 1..20: mol_type = other DNA
tgccactgtactccagccta

SEQ ID NO: 126269 - DNA, 20 bp, synthetic construct
  source 1..20: mol_type = other DNA
gtgccactgtactccagcct

SEQ ID NO: 126270 - DNA, 20 bp, synthetic construct
  source 1..20: mol_type = other DNA
tgtgccactgtactccagcc

SEQ ID NO: 126271 - DNA, 20 bp, synthetic construct
  source 1..20: mol_type = other DNA
ttgtgccactgtactccagc

SEQ ID NO: 126272 - DNA, 20 bp, synthetic construct
  source 1..20: mol_type = other DNA
attgtgccactgtactccag

SEQ ID NO: 126273 - DNA, 20 bp, synthetic construct
  source 1..20: mol_type = other DNA
gattgtgccactgtactcca

SEQ ID NO: 126274 - DNA, 20 bp, synthetic construct
  source 1..20: mol_type = other DNA
agattgtgccactgtactcc

SEQ ID NO: 126275 - DNA, 20 bp, synthetic construct
  source 1..20: mol_type = other DNA
gagattgtgccactgtactc

SEQ ID NO: 126276 - DNA, 20 bp, synthetic construct
  source 1..20: mol_type = other DNA
tgagattgtgccactgtact

SEQ ID NO: 126277 - DNA, 20 bp, synthetic construct
  source 1..20: mol_type = other DNA
ttgagattgtgccactgtac

SEQ ID NO: 126278 - DNA, 20 bp, synthetic construct
  source 1..20: mol_type = other DNA
gttgagattgtgccactgta

SEQ ID NO: 126279 - DNA, 20 bp, synthetic construct
  source 1..20: mol_type = other DNA
agttgagattgtgccactgt

SEQ ID NO: 126280 - DNA, 20 bp, synthetic construct
  source 1..20: mol_type = other DNA
gagttgagattgtgccactg

SEQ ID NO: 126281 - DNA, 20 bp, synthetic construct
  source 1..20: mol_type = other DNA
tgagttgagattgtgccact

SEQ ID NO: 126282 - DNA, 20 bp, synthetic construct
  source 1..20: mol_type = other DNA
gtgagttgagattgtgccac

SEQ ID NO: 126283 - DNA, 20 bp, synthetic construct
  source 1..20: mol_type = other DNA
agtgagttgagattgtgcca

SEQ ID NO: 126284 - DNA, 20 bp, synthetic construct
  source 1..20: mol_type = other DNA
cagtgagttgagattgtgcc

SEQ ID NO: 126285 - DNA, 20 bp, synthetic construct
  source 1..20: mol_type = other DNA
gcagtgagttgagattgtgc

SEQ ID NO: 126286 - DNA, 20 bp, synthetic construct
  source 1..20: mol_type = other DNA
tgcagtgagttgagattgtg

SEQ ID NO: 126287 - DNA, 20 bp, synthetic construct
  source 1..20: mol_type = other DNA
ttgcagtgagttgagattgt

SEQ ID NO: 126288 - DNA, 20 bp, synthetic construct
  source 1..20: mol_type = other DNA
gttgcagtgagttgagattg

SEQ ID NO: 126289 - DNA, 20 bp, synthetic construct
  source 1..20: mol_type = other DNA
ggttgcagtgagttgagatt

SEQ ID NO: 126290 - DNA, 20 bp, synthetic construct
  source 1..20: mol_type = other DNA
aggttgcagtgagttgagat

SEQ ID NO: 126291 - DNA, 20 bp, synthetic construct
  source 1..20: mol_type = other DNA
gaggttgcagtgagttgaga

SEQ ID NO: 126292 - DNA, 20 bp, synthetic construct
  source 1..20: mol_type = other DNA
ggaggttgcagtgagttgag

SEQ ID NO: 126293 - DNA, 20 bp, synthetic construct
  source 1..20: mol_type = other DNA
gggaggttgcagtgagttga

SEQ ID NO: 126294 - DNA, 20 bp, synthetic construct
  source 1..20: mol_type = other DNA
ggggaggttgcagtgagttg

SEQ ID NO: 126295 - DNA, 20 bp, synthetic construct
  source 1..20: mol_type = other DNA
gggggaggttgcagtgagtt

SEQ ID NO: 126296 - DNA, 20 bp, synthetic construct
  source 1..20: mol_type = other DNA
agggggaggttgcagtgagt

SEQ ID NO: 126297 - DNA, 20 bp, synthetic construct
  source 1..20: mol_type = other DNA
gagggggaggttgcagtgag

SEQ ID NO: 126298 - DNA, 20 bp, synthetic construct
  source 1..20: mol_type = other DNA
agagggggaggttgcagtga

SEQ ID NO: 126299 - DNA, 20 bp, synthetic construct
  source 1..20: mol_type = other DNA
cagagggggaggttgcagtg

SEQ ID NO: 126300 - DNA, 20 bp, synthetic construct
  source 1..20: mol_type = other DNA
ccagagggggaggttgcagt

SEQ ID NO: 126301 - DNA, 20 bp, synthetic construct
  source 1..20: mol_type = other DNA
cccagagggggaggttgcag

SEQ ID NO: 126302 - DNA, 20 bp, synthetic construct
  source 1..20: mol_type = other DNA
ccccagagggggaggttgca

SEQ ID NO: 126303 - DNA, 20 bp, synthetic construct
  source 1..20: mol_type = other DNA
accccagagggggaggttgc

SEQ ID NO: 126304 - DNA, 20 bp, synthetic construct
  source 1..20: mol_type = other DNA
aaccccagagggggaggttg

SEQ ID NO: 126305 - DNA, 20 bp, synthetic construct
  source 1..20: mol_type = other DNA
gaaccccagagggggaggtt

SEQ ID NO: 126306 - DNA, 20 bp, synthetic construct
  source 1..20: mol_type = other DNA
tgaaccccagagggggaggt

SEQ ID NO: 126307 - DNA, 20 bp, synthetic construct
  source 1..20: mol_type = other DNA
ttgaaccccagagggggagg

SEQ ID NO: 126308 - DNA, 20 bp, synthetic construct
  source 1..20: mol_type = other DNA
cttgaaccccagagggggag

SEQ ID NO: 126309 - DNA, 20 bp, synthetic construct
  source 1..20: mol_type = other DNA
gcttgaaccccagaggggga

SEQ ID NO: 126310 - DNA, 20 bp, synthetic construct
  source 1..20: mol_type = other DNA
tgcttgaaccccagaggggg

SEQ ID NO: 126311 - DNA, 20 bp, synthetic construct
  source 1..20: mol_type = other DNA
ttgcttgaaccccagagggg

SEQ ID NO: 126312 - DNA, 20 bp, synthetic construct
  source 1..20: mol_type = other DNA
attgcttgaaccccagaggg

SEQ ID NO: 126313 - DNA, 20 bp, synthetic construct
  source 1..20: mol_type = other DNA
aattgcttgaaccccagagg

SEQ ID NO: 126314 - DNA, 20 bp, synthetic construct
  source 1..20: mol_type = other DNA
gaattgcttgaaccccagag

SEQ ID NO: 126315 - DNA, 20 bp, synthetic construct
  source 1..20: mol_type = other DNA
agaattgcttgaaccccaga

SEQ ID NO: 126316 - DNA, 20 bp, synthetic construct
  source 1..20: mol_type = other DNA
gagaattgcttgaaccccag

SEQ ID NO: 126317 - DNA, 20 bp, synthetic construct
  source 1..20: mol_type = other DNA
ggagaattgcttgaacccca

SEQ ID NO: 126318 - DNA, 20 bp, synthetic construct
  source 1..20: mol_type = other DNA
aggagaattgcttgaacccc

SEQ ID NO: 126319 - DNA, 20 bp, synthetic construct
  source 1..20: mol_type = other DNA
caggagaattgcttgaaccc

SEQ ID NO: 126320 - DNA, 20 bp, synthetic construct
  source 1..20: mol_type = other DNA
gcaggagaattgcttgaacc

SEQ ID NO: 126321 - DNA, 20 bp, synthetic construct
  source 1..20: mol_type = other DNA
ggcaggagaattgcttgaac

SEQ ID NO: 126322 - DNA, 20 bp, synthetic construct
  source 1..20: mol_type = other DNA
aggcaggagaattgcttgaa

SEQ ID NO: 126323 - DNA, 20 bp, synthetic construct
  source 1..20: mol_type = other DNA
gaggcaggagaattgcttga

SEQ ID NO: 126324 - DNA, 20 bp, synthetic construct
  source 1..20: mol_type = other DNA
tgaggcaggagaattgcttg

SEQ ID NO: 126325 - DNA, 20 bp, synthetic construct
  source 1..20: mol_type = other DNA
ctgaggcaggagaattgctt

SEQ ID NO: 126326 - DNA, 20 bp, synthetic construct
  source 1..20: mol_type = other DNA
gctgaggcaggagaattgct

SEQ ID NO: 126327 - DNA, 20 bp, synthetic construct
  source 1..20: mol_type = other DNA
ggctgaggcaggagaattgc

SEQ ID NO: 126328 - DNA, 20 bp, synthetic construct
  source 1..20: mol_type = other DNA
aggctgaggcaggagaattg

SEQ ID NO: 126329 - DNA, 20 bp, synthetic construct
  source 1..20: mol_type = other DNA
gaggctgaggcaggagaatt

SEQ ID NO: 126330 - DNA, 20 bp, synthetic construct
  source 1..20: mol_type = other DNA
ggaggctgaggcaggagaat

SEQ ID NO: 126331 - DNA, 20 bp, synthetic construct
  source 1..20: mol_type = other DNA
gggaggctgaggcaggagaa

SEQ ID NO: 126332 - DNA, 20 bp, synthetic construct
  source 1..20: mol_type = other DNA
tgggaggctgaggcaggaga

SEQ ID NO: 126333 - DNA, 20 bp, synthetic construct
  source 1..20: mol_type = other DNA
ttgggaggctgaggcaggag

SEQ ID NO: 126334 - DNA, 20 bp, synthetic construct
  source 1..20: mol_type = other DNA
cttgggaggctgaggcagga

SEQ ID NO: 126335 - DNA, 20 bp, synthetic construct
  source 1..20: mol_type = other DNA
acttgggaggctgaggcagg

SEQ ID NO: 126336 - DNA, 20 bp, synthetic construct
  source 1..20: mol_type = other DNA
tacttgggaggctgaggcag

SEQ ID NO: 126337 - DNA, 20 bp, synthetic construct
  source 1..20: mol_type = other DNA
ctacttgggaggctgaggca

SEQ ID NO: 126338 - DNA, 20 bp, synthetic construct
  source 1..20: mol_type = other DNA
gctacttgggaggctgaggc

SEQ ID NO: 126339 - DNA, 20 bp, synthetic construct
  source 1..20: mol_type = other DNA
ggctacttgggaggctgagg

SEQ ID NO: 126340 - DNA, 20 bp, synthetic construct
  source 1..20: mol_type = other DNA
gggctacttgggaggctgag

SEQ ID NO: 126341 - DNA, 20 bp, synthetic construct
  source 1..20: mol_type = other DNA
tgggctacttgggaggctga

SEQ ID NO: 126342 - DNA, 20 bp, synthetic construct
  source 1..20: mol_type = other DNA
ctgggctacttgggaggctg

SEQ ID NO: 126343 - DNA, 20 bp, synthetic construct
  source 1..20: mol_type = other DNA
gctgggctacttgggaggct

SEQ ID NO: 126344 - DNA, 20 bp, synthetic construct
  source 1..20: mol_type = other DNA
ggctgggctacttgggaggc

SEQ ID NO: 126345 - DNA, 20 bp, synthetic construct
  source 1..20: mol_type = other DNA
aggctgggctacttgggagg

SEQ ID NO: 126346 - DNA, 20 bp, synthetic construct
  source 1..20: mol_type = other DNA
aaggctgggctacttgggag

SEQ ID NO: 126347 - DNA, 20 bp, synthetic construct
  source 1..20: mol_type = other DNA
aaaggctgggctacttggga

SEQ ID NO: 126348 - DNA, 20 bp, synthetic construct
  source 1..20: mol_type = other DNA
aaaaggctgggctacttggg

SEQ ID NO: 126349 - DNA, 20 bp, synthetic construct
  source 1..20: mol_type = other DNA
aaaaaggctgggctacttgg

SEQ ID NO: 126350 - DNA, 20 bp, synthetic construct
  source 1..20: mol_type = other DNA
aaaaaaggctgggctacttg

SEQ ID NO: 126351 - DNA, 20 bp, synthetic construct
  source 1..20: mol_type = other DNA
aaaaaaaggctgggctactt

SEQ ID NO: 126352 - DNA, 20 bp, synthetic construct
  source 1..20: mol_type = other DNA
aaaaaaaaggctgggctact

SEQ ID NO: 126353 - DNA, 20 bp, synthetic construct
  source 1..20: mol_type = other DNA
aaaaaaaaaggctgggctac

SEQ ID NO: 126354 - DNA, 20 bp, synthetic construct
  source 1..20: mol_type = other DNA
aaaaaaaaaaggctgggcta

SEQ ID NO: 126355 - DNA, 20 bp, synthetic construct
  source 1..20: mol_type = other DNA
caaaaaaaaaaggctgggct

SEQ ID NO: 126356 - DNA, 20 bp, synthetic construct
  source 1..20: mol_type = other DNA
tcaaaaaaaaaaggctgggc

SEQ ID NO: 126357 - DNA, 20 bp, synthetic construct
  source 1..20: mol_type = other DNA
ctcaaaaaaaaaaggctggg

SEQ ID NO: 126358 - DNA, 20 bp, synthetic construct
  source 1..20: mol_type = other DNA
tctcaaaaaaaaaaggctgg

SEQ ID NO: 126359 - DNA, 20 bp, synthetic construct
  source 1..20: mol_type = other DNA
gtctcaaaaaaaaaaggctg

SEQ ID NO: 126360 - DNA, 20 bp, synthetic construct
  source 1..20: mol_type = other DNA
tgtctcaaaaaaaaaaggct

SEQ ID NO: 126361 - DNA, 20 bp, synthetic construct
  source 1..20: mol_type = other DNA
ctgtctcaaaaaaaaaaggc

SEQ ID NO: 126362 - DNA, 20 bp, synthetic construct
  source 1..20: mol_type = other DNA
tctgtctcaaaaaaaaaagg

SEQ ID NO: 126363 - DNA, 20 bp, synthetic construct
  source 1..20: mol_type = other DNA
ctctgtctcaaaaaaaaaag

SEQ ID NO: 126364 - DNA, 20 bp, synthetic construct
  source 1..20: mol_type = other DNA
actctgtctcaaaaaaaaaa

SEQ ID NO: 126365 - DNA, 20 bp, synthetic construct
  source 1..20: mol_type = other DNA
gactctgtctcaaaaaaaaa

SEQ ID NO: 126366 - DNA, 20 bp, synthetic construct
  source 1..20: mol_type = other DNA
agactctgtctcaaaaaaaa

SEQ ID NO: 126367 - DNA, 20 bp, synthetic construct
  source 1..20: mol_type = other DNA
gagactctgtctcaaaaaaa

SEQ ID NO: 126368 - DNA, 20 bp, synthetic construct
  source 1..20: mol_type = other DNA
cgagactctgtctcaaaaaa

SEQ ID NO: 126369 - DNA, 20 bp, synthetic construct
  source 1..20: mol_type = other DNA
gcgagactctgtctcaaaaa

SEQ ID NO: 126370 - DNA, 20 bp, synthetic construct
  source 1..20: mol_type = other DNA
agcgagactctgtctcaaaa

SEQ ID NO: 126371 - DNA, 20 bp, synthetic construct
  source 1..20: mol_type = other DNA
gagcgagactctgtctcaaa

SEQ ID NO: 126372 - DNA, 20 bp, synthetic construct
  source 1..20: mol_type = other DNA
agagcgagactctgtctcaa

SEQ ID NO: 126373 - DNA, 20 bp, synthetic construct
  source 1..20: mol_type = other DNA
cagagcgagactctgtctca

SEQ ID NO: 126374 - DNA, 20 bp, synthetic construct
  source 1..20: mol_type = other DNA
acagagcgagactctgtctc

SEQ ID NO: 126375 - DNA, 20 bp, synthetic construct
  source 1..20: mol_type = other DNA
aacagagcgagactctgtct

SEQ ID NO: 126376 - DNA, 20 bp, synthetic construct
  source 1..20: mol_type = other DNA
caacagagcgagactctgtc

SEQ ID NO: 126377 - DNA, 20 bp, synthetic construct
  source 1..20: mol_type = other DNA
gcaacagagcgagactctgt

SEQ ID NO: 126378 - DNA, 20 bp, synthetic construct
  source 1..20: mol_type = other DNA
ggcaacagagcgagactctg

SEQ ID NO: 126379 - DNA, 20 bp, synthetic construct
  source 1..20: mol_type = other DNA
gggcaacagagcgagactct

SEQ ID NO: 126380 - DNA, 20 bp, synthetic construct
  source 1..20: mol_type = other DNA
tgggcaacagagcgagactc

SEQ ID NO: 126381 - DNA, 20 bp, synthetic construct
  source 1..20: mol_type = other DNA
ctgggcaacagagcgagact

SEQ ID NO: 126382 - DNA, 20 bp, synthetic construct
  source 1..20: mol_type = other DNA
cctgggcaacagagcgagac

SEQ ID NO: 126383 - DNA, 20 bp, synthetic construct
  source 1..20: mol_type = other DNA
gcctgggcaacagagcgaga

SEQ ID NO: 126384 - DNA, 20 bp, synthetic construct
  source 1..20: mol_type = other DNA
agcctgggcaacagagcgag

SEQ ID NO: 126385 - DNA, 20 bp, synthetic construct
  source 1..20: mol_type = other DNA
cagcctgggcaacagagcga

SEQ ID NO: 126386 - DNA, 20 bp, synthetic construct
  source 1..20: mol_type = other DNA
ccagcctgggcaacagagcg

SEQ ID NO: 126387 - DNA, 20 bp, synthetic construct
  source 1..20: mol_type = other DNA
tccagcctgggcaacagagc

SEQ ID NO: 126388 - DNA, 20 bp, synthetic construct
  source 1..20: mol_type = other DNA
ctccagcctgggcaacagag

SEQ ID NO: 126389 - DNA, 20 bp, synthetic construct
  source 1..20: mol_type = other DNA
actccagcctgggcaacaga

SEQ ID NO: 126390 - DNA, 20 bp, synthetic construct
  source 1..20: mol_type = other DNA
cactccagcctgggcaacag

SEQ ID NO: 126391 - DNA, 20 bp, synthetic construct
  source 1..20: mol_type = other DNA
gcactccagcctgggcaaca

SEQ ID NO: 126392 - DNA, 20 bp, synthetic construct
  source 1..20: mol_type = other DNA
tgcactccagcctgggcaac

SEQ ID NO: 126393 - DNA, 20 bp, synthetic construct
  source 1..20: mol_type = other DNA
ctgcactccagcctgggcaa

SEQ ID NO: 126394 - DNA, 20 bp, synthetic construct
  source 1..20: mol_type = other DNA
actgcactccagcctgggca

SEQ ID NO: 126395 - DNA, 20 bp, synthetic construct
  source 1..20: mol_type = other DNA
cactgcactccagcctgggc

SEQ ID NO: 126396 - DNA, 20 bp, synthetic construct
  source 1..20: mol_type = other DNA
tcactgcactccagcctggg

SEQ ID NO: 126397 - DNA, 20 bp, synthetic construct
  source 1..20: mol_type = other DNA
atcactgcactccagcctgg

SEQ ID NO: 126398 - DNA, 20 bp, synthetic construct
  source 1..20: mol_type = other DNA
catcactgcactccagcctg

SEQ ID NO: 126399 - DNA, 20 bp, synthetic construct
  source 1..20: mol_type = other DNA
gcatcactgcactccagcct

SEQ ID NO: 126400 - DNA, 20 bp, synthetic construct
  source 1..20: mol_type = other DNA
cgcatcactgcactccagcc

SEQ ID NO: 126401 - DNA, 20 bp, synthetic construct
  source 1..20: mol_type = other DNA
tcgcatcactgcactccagc

SEQ ID NO: 126402 - DNA, 20 bp, synthetic construct
  source 1..20: mol_type = other DNA
atcgcatcactgcactccag

SEQ ID NO: 126403 - DNA, 20 bp, synthetic construct
  source 1..20: mol_type = other DNA
gatcgcatcactgcactcca

SEQ ID NO: 126404 - DNA, 20 bp, synthetic construct
  source 1..20: mol_type = other DNA
agatcgcatcactgcactcc

SEQ ID NO: 126405 - DNA, 20 bp, synthetic construct
  source 1..20: mol_type = other DNA
gagatcgcatcactgcactc

SEQ ID NO: 126406 - DNA, 20 bp, synthetic construct
  source 1..20: mol_type = other DNA
cgagatcgcatcactgcact

SEQ ID NO: 126407 - DNA, 20 bp, synthetic construct
  source 1..20: mol_type = other DNA
ccgagatcgcatcactgcac

SEQ ID NO: 126408 - DNA, 20 bp, synthetic construct
  source 1..20: mol_type = other DNA
gccgagatcgcatcactgca

SEQ ID NO: 126409 - DNA, 20 bp, synthetic construct
  source 1..20: mol_type = other DNA
agccgagatcgcatcactgc

SEQ ID NO: 126410 - DNA, 20 bp, synthetic construct
  source 1..20: mol_type = other DNA
gagccgagatcgcatcactg

SEQ ID NO: 126411 - DNA, 20 bp, synthetic construct
  source 1..20: mol_type = other DNA
tgagccgagatcgcatcact

SEQ ID NO: 126412 - DNA, 20 bp, synthetic construct
  source 1..20: mol_type = other DNA
gtgagccgagatcgcatcac

SEQ ID NO: 126413 - DNA, 20 bp, synthetic construct
  source 1..20: mol_type = other DNA
agtgagccgagatcgcatca

SEQ ID NO: 126414 - DNA, 20 bp, synthetic construct
  source 1..20: mol_type = other DNA
cagtgagccgagatcgcatc

SEQ ID NO: 126415 - DNA, 20 bp, synthetic construct
  source 1..20: mol_type = other DNA
gcagtgagccgagatcgcat

SEQ ID NO: 126416 - DNA, 20 bp, synthetic construct
  source 1..20: mol_type = other DNA
tgcagtgagccgagatcgca

SEQ ID NO: 126417 - DNA, 20 bp, synthetic construct
  source 1..20: mol_type = other DNA
ttgcagtgagccgagatcgc

SEQ ID NO: 126418 - DNA, 20 bp, synthetic construct
  source 1..20: mol_type = other DNA
cttgcagtgagccgagatcg

SEQ ID NO: 126419 - DNA, 20 bp, synthetic construct
  source 1..20: mol_type = other DNA
gcttgcagtgagccgagatc

SEQ ID NO: 126420 - DNA, 20 bp, synthetic construct
  source 1..20: mol_type = other DNA
agcttgcagtgagccgagat

SEQ ID NO: 126421 - DNA, 20 bp, synthetic construct
  source 1..20: mol_type = other DNA
gagcttgcagtgagccgaga

SEQ ID NO: 126422 - DNA, 20 bp, synthetic construct
  source 1..20: mol_type = other DNA
ggagcttgcagtgagccgag

SEQ ID NO: 126423 - DNA, 20 bp, synthetic construct
  source 1..20: mol_type = other DNA
cggagcttgcagtgagccga

SEQ ID NO: 126424 - DNA, 20 bp, synthetic construct
  source 1..20: mol_type = other DNA
gcggagcttgcagtgagccg

SEQ ID NO: 126425 - DNA, 20 bp, synthetic construct
  source 1..20: mol_type = other DNA
ggcggagcttgcagtgagcc

SEQ ID NO: 126426 - DNA, 20 bp, synthetic construct
  source 1..20: mol_type = other DNA
aggcggagcttgcagtgagc

SEQ ID NO: 126427 - DNA, 20 bp, synthetic construct
  source 1..20: mol_type = other DNA
gaggcggagcttgcagtgag

SEQ ID NO: 126428 - DNA, 20 bp, synthetic construct
  source 1..20: mol_type = other DNA
agaggcggagcttgcagtga

SEQ ID NO: 126429 - DNA, 20 bp, synthetic construct
  source 1..20: mol_type = other DNA
aagaggcggagcttgcagtg

SEQ ID NO: 126430 - DNA, 20 bp, synthetic construct
  source 1..20: mol_type = other DNA
caagaggcggagcttgcagt

SEQ ID NO: 126431 - DNA, 20 bp, synthetic construct
  source 1..20: mol_type = other DNA
ccaagaggcggagcttgcag

SEQ ID NO: 126432 - DNA, 20 bp, synthetic construct
  source 1..20: mol_type = other DNA
cccaagaggcggagcttgca

SEQ ID NO: 126433 - DNA, 20 bp, synthetic construct
  source 1..20: mol_type = other DNA
acccaagaggcggagcttgc

SEQ ID NO: 126434 - DNA, 20 bp, synthetic construct
  source 1..20: mol_type = other DNA
aacccaagaggcggagcttg

SEQ ID NO: 126435 - DNA, 20 bp, synthetic construct
  source 1..20: mol_type = other DNA
gaacccaagaggcggagctt

SEQ ID NO: 126436 - DNA, 20 bp, synthetic construct
  source 1..20: mol_type = other DNA
tgaacccaagaggcggagct

SEQ ID NO: 126437 - DNA, 20 bp, synthetic construct
  source 1..20: mol_type = other DNA
atgaacccaagaggcggagc

SEQ ID NO: 126438 - DNA, 20 bp, synthetic construct
  source 1..20: mol_type = other DNA
catgaacccaagaggcggag

SEQ ID NO: 126439 - DNA, 20 bp, synthetic construct
  source 1..20: mol_type = other DNA
gcatgaacccaagaggcgga

SEQ ID NO: 126440 - DNA, 20 bp, synthetic construct
  source 1..20: mol_type = other DNA
ggcatgaacccaagaggcgg

SEQ ID NO: 126441 - DNA, 20 bp, synthetic construct
  source 1..20: mol_type = other DNA
tggcatgaacccaagaggcg

SEQ ID NO: 126442 - DNA, 20 bp, synthetic construct
  source 1..20: mol_type = other DNA
atggcatgaacccaagaggc

SEQ ID NO: 126443 - DNA, 20 bp, synthetic construct
  source 1..20: mol_type = other DNA
aatggcatgaacccaagagg

SEQ ID NO: 126444 - DNA, 20 bp, synthetic construct
  source 1..20: mol_type = other DNA
gaatggcatgaacccaagag

SEQ ID NO: 126445 - DNA, 20 bp, synthetic construct
  source 1..20: mol_type = other DNA
agaatggcatgaacccaaga

SEQ ID NO: 126446 - DNA, 20 bp, synthetic construct
  source 1..20: mol_type = other DNA
gagaatggcatgaacccaag

SEQ ID NO: 126447 - DNA, 20 bp, synthetic construct
  source 1..20: mol_type = other DNA
ggagaatggcatgaacccaa

SEQ ID NO: 126448 - DNA, 20 bp, synthetic construct
  source 1..20: mol_type = other DNA
aggagaatggcatgaaccca

SEQ ID NO: 126449 - DNA, 20 bp, synthetic construct
  source 1..20: mol_type = other DNA
caggagaatggcatgaaccc

SEQ ID NO: 126450 - DNA, 20 bp, synthetic construct
  source 1..20: mol_type = other DNA
gcaggagaatggcatgaacc

SEQ ID NO: 126451 - DNA, 20 bp, synthetic construct
  source 1..20: mol_type = other DNA
ggcaggagaatggcatgaac

SEQ ID NO: 126452 - DNA, 20 bp, synthetic construct
  source 1..20: mol_type = other DNA
aggcaggagaatggcatgaa

SEQ ID NO: 126453 - DNA, 20 bp, synthetic construct
  source 1..20: mol_type = other DNA
gaggcaggagaatggcatga

SEQ ID NO: 126454 - DNA, 20 bp, synthetic construct
  source 1..20: mol_type = other DNA
tgaggcaggagaatggcatg

SEQ ID NO: 126455 - DNA, 20 bp, synthetic construct
  source 1..20: mol_type = other DNA
ctgaggcaggagaatggcat

SEQ ID NO: 126456 - DNA, 20 bp, synthetic construct
  source 1..20: mol_type = other DNA
gctgaggcaggagaatggca

SEQ ID NO: 126457 - DNA, 20 bp, synthetic construct
  source 1..20: mol_type = other DNA
ggctgaggcaggagaatggc

SEQ ID NO: 126458 - DNA, 20 bp, synthetic construct
  source 1..20: mol_type = other DNA
aggctgaggcaggagaatgg

SEQ ID NO: 126459 - DNA, 20 bp, synthetic construct
  source 1..20: mol_type = other DNA
gaggctgaggcaggagaatg

SEQ ID NO: 126460 - DNA, 20 bp, synthetic construct
  source 1..20: mol_type = other DNA
ggaggctgaggcaggagaat

SEQ ID NO: 126461 - DNA, 20 bp, synthetic construct
  source 1..20: mol_type = other DNA
aggaggctgaggcaggagaa

SEQ ID NO: 126462 - DNA, 20 bp, synthetic construct
  source 1..20: mol_type = other DNA
caggaggctgaggcaggaga

SEQ ID NO: 126463 - DNA, 20 bp, synthetic construct
  source 1..20: mol_type = other DNA
tcaggaggctgaggcaggag

SEQ ID NO: 126464 - DNA, 20 bp, synthetic construct
  source 1..20: mol_type = other DNA
ctcaggaggctgaggcagga

SEQ ID NO: 126465 - DNA, 20 bp, synthetic construct
  source 1..20: mol_type = other DNA
actcaggaggctgaggcagg

SEQ ID NO: 126466 - DNA, 20 bp, synthetic construct
  source 1..20: mol_type = other DNA
tactcaggaggctgaggcag

SEQ ID NO: 126467 - DNA, 20 bp, synthetic construct
  source 1..20: mol_type = other DNA
ctactcaggaggctgaggca

SEQ ID NO: 126468 - DNA, 20 bp, synthetic construct
  source 1..20: mol_type = other DNA
gctactcaggaggctgaggc

SEQ ID NO: 126469 - DNA, 20 bp, synthetic construct
  source 1..20: mol_type = other DNA
agctactcaggaggctgagg

SEQ ID NO: 126470 - DNA, 20 bp, synthetic construct
  source 1..20: mol_type = other DNA
cagctactcaggaggctgag

SEQ ID NO: 126471 - DNA, 20 bp, synthetic construct
  source 1..20: mol_type = other DNA
ccagctactcaggaggctga

SEQ ID NO: 126472 - DNA, 20 bp, synthetic construct
  source 1..20: mol_type = other DNA
cccagctactcaggaggctg

SEQ ID NO: 126473 - DNA, 20 bp, synthetic construct
  source 1..20: mol_type = other DNA
tcccagctactcaggaggct

SEQ ID NO: 126474 - DNA, 20 bp, synthetic construct
  source 1..20: mol_type = other DNA
gtcccagctactcaggaggc

SEQ ID NO: 126475 - DNA, 20 bp, synthetic construct
  source 1..20: mol_type = other DNA
agtcccagctactcaggagg

SEQ ID NO: 126476 - DNA, 20 bp, synthetic construct
  source 1..20: mol_type = other DNA
tagtcccagctactcaggag

SEQ ID NO: 126477 - DNA, 20 bp, synthetic construct
  source 1..20: mol_type = other DNA
gtagtcccagctactcagga

SEQ ID NO: 126478 - DNA, 20 bp, synthetic construct
  source 1..20: mol_type = other DNA
tgtagtcccagctactcagg

SEQ ID NO: 126479 - DNA, 20 bp, synthetic construct
  source 1..20: mol_type = other DNA
atgtagtcccagctactcag

SEQ ID NO: 126480 - DNA, 20 bp, synthetic construct
  source 1..20: mol_type = other DNA
aatgtagtcccagctactca

SEQ ID NO: 126481 - DNA, 20 bp, synthetic construct
  source 1..20: mol_type = other DNA
gaatgtagtcccagctactc

SEQ ID NO: 126482 - DNA, 20 bp, synthetic construct
  source 1..20: mol_type = other DNA
cgaatgtagtcccagctact

SEQ ID NO: 126483 - DNA, 20 bp, synthetic construct
  source 1..20: mol_type = other DNA
gcgaatgtagtcccagctac

SEQ ID NO: 126484 - DNA, 20 bp, synthetic construct
  source 1..20: mol_type = other DNA
ggcgaatgtagtcccagcta

SEQ ID NO: 126485 - DNA, 20 bp, synthetic construct
  source 1..20: mol_type = other DNA
gggcgaatgtagtcccagct

SEQ ID NO: 126486 - DNA, 20 bp, synthetic construct
  source 1..20: mol_type = other DNA
cgggcgaatgtagtcccagc

SEQ ID NO: 126487 - DNA, 20 bp, synthetic construct
  source 1..20: mol_type = other DNA
gcgggcgaatgtagtcccag

SEQ ID NO: 126488 - DNA, 20 bp, synthetic construct
  source 1..20: mol_type = other DNA
ggcgggcgaatgtagtccca

SEQ ID NO: 126489 - DNA, 20 bp, synthetic construct
  source 1..20: mol_type = other DNA
tggcgggcgaatgtagtccc

SEQ ID NO: 126490 - DNA, 20 bp, synthetic construct
  source 1..20: mol_type = other DNA
gtggcgggcgaatgtagtcc

SEQ ID NO: 126491 - DNA, 20 bp, synthetic construct
  source 1..20: mol_type = other DNA
ggtggcgggcgaatgtagtc

SEQ ID NO: 126492 - DNA, 20 bp, synthetic construct
  source 1..20: mol_type = other DNA
tggtggcgggcgaatgtagt

SEQ ID NO: 126493 - DNA, 20 bp, synthetic construct
  source 1..20: mol_type = other DNA
gtggtggcgggcgaatgtag

SEQ ID NO: 126494 - DNA, 20 bp, synthetic construct
  source 1..20: mol_type = other DNA
tgtggtggcgggcgaatgta

SEQ ID NO: 126495 - DNA, 20 bp, synthetic construct
  source 1..20: mol_type = other DNA
gtgtggtggcgggcgaatgt

SEQ ID NO: 126496 - DNA, 20 bp, synthetic construct
  source 1..20: mol_type = other DNA
ggtgtggtggcgggcgaatg

SEQ ID NO: 126497 - DNA, 20 bp, synthetic construct
  source 1..20: mol_type = other DNA
gggtgtggtggcgggcgaat

SEQ ID NO: 126498 - DNA, 20 bp, synthetic construct
  source 1..20: mol_type = other DNA
cgggtgtggtggcgggcgaa

SEQ ID NO: 126499 - DNA, 20 bp, synthetic construct
  source 1..20: mol_type = other DNA
ccgggtgtggtggcgggcga

SEQ ID NO: 126500 - DNA, 20 bp, synthetic construct
  source 1..20: mol_type = other DNA
gccgggtgtggtggcgggcg

SEQ ID NO: 126501 - DNA, 20 bp, synthetic construct
  source 1..20: mol_type = other DNA
agccgggtgtggtggcgggc

SEQ ID NO: 126502 - DNA, 20 bp, synthetic construct
  source 1..20: mol_type = other DNA
tagccgggtgtggtggcggg

SEQ ID NO: 126503 - DNA, 20 bp, synthetic construct
  source 1..20: mol_type = other DNA
ttagccgggtgtggtggcgg

SEQ ID NO: 126504 - DNA, 20 bp, synthetic construct
  source 1..20: mol_type = other DNA
attagccgggtgtggtggcg

SEQ ID NO: 126505 - DNA, 20 bp, synthetic construct
  source 1..20: mol_type = other DNA
aattagccgggtgtggtggc

SEQ ID NO: 126506 - DNA, 20 bp, synthetic construct
  source 1..20: mol_type = other DNA
aaattagccgggtgtggtgg

SEQ ID NO: 126507 - DNA, 20 bp, synthetic construct
  source 1..20: mol_type = other DNA
aaaattagccgggtgtggtg

SEQ ID NO: 126508 - DNA, 20 bp, synthetic construct
  source 1..20: mol_type = other DNA
aaaaattagccgggtgtggt

SEQ ID NO: 126509 - DNA, 20 bp, synthetic construct
  source 1..20: mol_type = other DNA
aaaaaattagccgggtgtgg

SEQ ID NO: 126510 - DNA, 20 bp, synthetic construct
  source 1..20: mol_type = other DNA
aaaaaaattagccgggtgtg

SEQ ID NO: 126511 - DNA, 20 bp, synthetic construct
  source 1..20: mol_type = other DNA
caaaaaaattagccgggtgt

SEQ ID NO: 126512 - DNA, 20 bp, synthetic construct
  source 1..20: mol_type = other DNA
acaaaaaaattagccgggtg

SEQ ID NO: 126513 - DNA, 20 bp, synthetic construct
  source 1..20: mol_type = other DNA
tacaaaaaaattagccgggt

SEQ ID NO: 126514 - DNA, 20 bp, synthetic construct
  source 1..20: mol_type = other DNA
atacaaaaaaattagccggg

SEQ ID NO: 126515 - DNA, 20 bp, synthetic construct
  source 1..20: mol_type = other DNA
aatacaaaaaaattagccgg

SEQ ID NO: 126516 - DNA, 20 bp, synthetic construct
  source 1..20: mol_type = other DNA
aaatacaaaaaaattagccg

SEQ ID NO: 126517 - DNA, 20 bp, synthetic construct
  source 1..20: mol_type = other DNA
aaaatacaaaaaaattagcc

SEQ ID NO: 126518 - DNA, 20 bp, synthetic construct
  source 1..20: mol_type = other DNA
aaaaatacaaaaaaattagc

SEQ ID NO: 126519 - DNA, 20 bp, synthetic construct
  source 1..20: mol_type = other DNA
taaaaatacaaaaaaattag

SEQ ID NO: 126520 - DNA, 20 bp, synthetic construct
  source 1..20: mol_type = other DNA
ctaaaaatacaaaaaaatta

SEQ ID NO: 126521 - DNA, 20 bp, synthetic construct
  source 1..20: mol_type = other DNA
actaaaaatacaaaaaaatt

SEQ ID NO: 126522 - DNA, 20 bp, synthetic construct
  source 1..20: mol_type = other DNA
tactaaaaatacaaaaaaat

SEQ ID NO: 126523 - DNA, 20 bp, synthetic construct
  source 1..20: mol_type = other DNA
ctactaaaaatacaaaaaaa

SEQ ID NO: 126524 - DNA, 20 bp, synthetic construct
  source 1..20: mol_type = other DNA
tctactaaaaatacaaaaaa

SEQ ID NO: 126525 - DNA, 20 bp, synthetic construct
  source 1..20: mol_type = other DNA
ctctactaaaaatacaaaaa

SEQ ID NO: 126526 - DNA, 20 bp, synthetic construct
  source 1..20: mol_type = other DNA
tctctactaaaaatacaaaa

SEQ ID NO: 126527 - DNA, 20 bp, synthetic construct
  source 1..20: mol_type = other DNA
gtctctactaaaaatacaaa

SEQ ID NO: 126528 - DNA, 20 bp, synthetic construct
  source 1..20: mol_type = other DNA
tgtctctactaaaaatacaa

SEQ ID NO: 126529 - DNA, 20 bp, synthetic construct
  source 1..20: mol_type = other DNA
ctgtctctactaaaaataca

SEQ ID NO: 126530 - DNA, 20 bp, synthetic construct
  source 1..20: mol_type = other DNA
cctgtctctactaaaaatac

SEQ ID NO: 126531 - DNA, 20 bp, synthetic construct
  source 1..20: mol_type = other DNA
ccctgtctctactaaaaata

SEQ ID NO: 126532 - DNA, 20 bp, synthetic construct
  source 1..20: mol_type = other DNA
accctgtctctactaaaaat

SEQ ID NO: 126533 - DNA, 20 bp, synthetic construct
  source 1..20: mol_type = other DNA
aaccctgtctctactaaaaa

SEQ ID NO: 126534 - DNA, 20 bp, synthetic construct
  source 1..20: mol_type = other DNA
aaaccctgtctctactaaaa

SEQ ID NO: 126535 - DNA, 20 bp, synthetic construct
  source 1..20: mol_type = other DNA
gaaaccctgtctctactaaa

SEQ ID NO: 126536 - DNA, 20 bp, synthetic construct
  source 1..20: mol_type = other DNA
tgaaaccctgtctctactaa

SEQ ID NO: 126537 - DNA, 20 bp, synthetic construct
  source 1..20: mol_type = other DNA
gtgaaaccctgtctctacta

SEQ ID NO: 126538 - DNA, 20 bp, synthetic construct
  source 1..20: mol_type = other DNA
ggtgaaaccctgtctctact

SEQ ID NO: 126539 - DNA, 20 bp, synthetic construct
  source 1..20: mol_type = other DNA
cggtgaaaccctgtctctac

SEQ ID NO: 126540 - DNA, 20 bp, synthetic construct
  source 1..20: mol_type = other DNA
acggtgaaaccctgtctcta

SEQ ID NO: 126541 - DNA, 20 bp, synthetic construct
  source 1..20: mol_type = other DNA
cacggtgaaaccctgtctct

SEQ ID NO: 126542 - DNA, 20 bp, synthetic construct
  source 1..20: mol_type = other DNA
acacggtgaaaccctgtctc

SEQ ID NO: 126543 - DNA, 20 bp, synthetic construct
  source 1..20: mol_type = other DNA
aacacggtgaaaccctgtct

SEQ ID NO: 126544 - DNA, 20 bp, synthetic construct
  source 1..20: mol_type = other DNA
taacacggtgaaaccctgtc

SEQ ID NO: 126545 - DNA, 20 bp, synthetic construct
  source 1..20: mol_type = other DNA
ctaacacggtgaaaccctgt

SEQ ID NO: 126546 - DNA, 20 bp, synthetic construct
  source 1..20: mol_type = other DNA
gctaacacggtgaaaccctg

SEQ ID NO: 126547 - DNA, 20 bp, synthetic construct
  source 1..20: mol_type = other DNA
ggctaacacggtgaaaccct

SEQ ID NO: 126548 - DNA, 20 bp, synthetic construct
  source 1..20: mol_type = other DNA
tggctaacacggtgaaaccc

SEQ ID NO: 126549 - DNA, 20 bp, synthetic construct
  source 1..20: mol_type = other DNA
ctggctaacacggtgaaacc

SEQ ID NO: 126550 - DNA, 20 bp, synthetic construct
  source 1..20: mol_type = other DNA
cctggctaacacggtgaaac

SEQ ID NO: 126551 - DNA, 20 bp, synthetic construct
  source 1..20: mol_type = other DNA
tcctggctaacacggtgaaa

SEQ ID NO: 126552 - DNA, 20 bp, synthetic construct
  source 1..20: mol_type = other DNA
atcctggctaacacggtgaa

SEQ ID NO: 126553 - DNA, 20 bp, synthetic construct
  source 1..20: mol_type = other DNA
catcctggctaacacggtga

SEQ ID NO: 126554 - DNA, 20 bp, synthetic construct
  source 1..20: mol_type = other DNA
ccatcctggctaacacggtg

SEQ ID NO: 126555 - DNA, 20 bp, synthetic construct
  source 1..20: mol_type = other DNA
accatcctggctaacacggt

SEQ ID NO: 126556 - DNA, 20 bp, synthetic construct
  source 1..20: mol_type = other DNA
taccatcctggctaacacgg

SEQ ID NO: 126557 - DNA, 20 bp, synthetic construct
  source 1..20: mol_type = other DNA
ataccatcctggctaacacg

SEQ ID NO: 126558 - DNA, 20 bp, synthetic construct
  source 1..20: mol_type = other DNA
gataccatcctggctaacac

SEQ ID NO: 126559 - DNA, 20 bp, synthetic construct
  source 1..20: mol_type = other DNA
cgataccatcctggctaaca

SEQ ID NO: 126560 - DNA, 20 bp, synthetic construct
  source 1..20: mol_type = other DNA
tcgataccatcctggctaac

SEQ ID NO: 126561 - DNA, 20 bp, synthetic construct
  source 1..20: mol_type = other DNA
atcgataccatcctggctaa

SEQ ID NO: 126562 - DNA, 20 bp, synthetic construct
  source 1..20: mol_type = other DNA
gatcgataccatcctggcta

SEQ ID NO: 126563 - DNA, 20 bp, synthetic construct
  source 1..20: mol_type = other DNA
agatcgataccatcctggct

SEQ ID NO: 126564 - DNA, 20 bp, synthetic construct
  source 1..20: mol_type = other DNA
gagatcgataccatcctggc

SEQ ID NO: 126565 - DNA, 20 bp, synthetic construct
  source 1..20: mol_type = other DNA
ggagatcgataccatcctgg

SEQ ID NO: 126566 - DNA, 20 bp, synthetic construct
  source 1..20: mol_type = other DNA
aggagatcgataccatcctg

SEQ ID NO: 126567 - DNA, 20 bp, synthetic construct
  source 1..20: mol_type = other DNA
caggagatcgataccatcct

SEQ ID NO: 126568 - DNA, 20 bp, synthetic construct
  source 1..20: mol_type = other DNA
tcaggagatcgataccatcc

SEQ ID NO: 126569 - DNA, 20 bp, synthetic construct
  source 1..20: mol_type = other DNA
gtcaggagatcgataccatc

SEQ ID NO: 126570 - DNA, 20 bp, synthetic construct
  source 1..20: mol_type = other DNA
ggtcaggagatcgataccat

SEQ ID NO: 126571 - DNA, 20 bp, synthetic construct
  source 1..20: mol_type = other DNA
aggtcaggagatcgatacca

SEQ ID NO: 126572 - DNA, 20 bp, synthetic construct
  source 1..20: mol_type = other DNA
gaggtcaggagatcgatacc

SEQ ID NO: 126573 - DNA, 20 bp, synthetic construct
  source 1..20: mol_type = other DNA
cgaggtcaggagatcgatac

SEQ ID NO: 126574 - DNA, 20 bp, synthetic construct
  source 1..20: mol_type = other DNA
acgaggtcaggagatcgata

SEQ ID NO: 126575 - DNA, 20 bp, synthetic construct
  source 1..20: mol_type = other DNA
cacgaggtcaggagatcgat

SEQ ID NO: 126576 - DNA, 20 bp, synthetic construct
  source 1..20: mol_type = other DNA
tcacgaggtcaggagatcga

SEQ ID NO: 126577 - DNA, 20 bp, synthetic construct
  source 1..20: mol_type = other DNA
atcacgaggtcaggagatcg

SEQ ID NO: 126578 - DNA, 20 bp, synthetic construct
  source 1..20: mol_type = other DNA
gatcacgaggtcaggagatc

SEQ ID NO: 126579 - DNA, 20 bp, synthetic construct
  source 1..20: mol_type = other DNA
ggatcacgaggtcaggagat

SEQ ID NO: 126580 - DNA, 20 bp, synthetic construct
  source 1..20: mol_type = other DNA
cggatcacgaggtcaggaga

SEQ ID NO: 126581 - DNA, 20 bp, synthetic construct
  source 1..20: mol_type = other DNA
gcggatcacgaggtcaggag

SEQ ID NO: 126582 - DNA, 20 bp, synthetic construct
  source 1..20: mol_type = other DNA
ggcggatcacgaggtcagga

SEQ ID NO: 126583 - DNA, 20 bp, synthetic construct
  source 1..20: mol_type = other DNA
gggcggatcacgaggtcagg

SEQ ID NO: 126584 - DNA, 20 bp, synthetic construct
  source 1..20: mol_type = other DNA
cgggcggatcacgaggtcag

SEQ ID NO: 126585 - DNA, 20 bp, synthetic construct
  source 1..20: mol_type = other DNA
gcgggcggatcacgaggtca

SEQ ID NO: 126586 - DNA, 20 bp, synthetic construct
  source 1..20: mol_type = other DNA
ggcgggcggatcacgaggtc

SEQ ID NO: 126587 - DNA, 20 bp, synthetic construct
  source 1..20: mol_type = other DNA
aggcgggcggatcacgaggt

SEQ ID NO: 126588 - DNA, 20 bp, synthetic construct
  source 1..20: mol_type = other DNA
gaggcgggcggatcacgagg

SEQ ID NO: 126589 - DNA, 20 bp, synthetic construct
  source 1..20: mol_type = other DNA
cgaggcgggcggatcacgag

SEQ ID NO: 126590 - DNA, 20 bp, synthetic construct
  source 1..20: mol_type = other DNA
ccgaggcgggcggatcacga

SEQ ID NO: 126591 - DNA, 20 bp, synthetic construct
  source 1..20: mol_type = other DNA
gccgaggcgggcggatcacg

SEQ ID NO: 126592 - DNA, 20 bp, synthetic construct
  source 1..20: mol_type = other DNA
ggccgaggcgggcggatcac

SEQ ID NO: 126593 - DNA, 20 bp, synthetic construct
  source 1..20: mol_type = other DNA
aggccgaggcgggcggatca

SEQ ID NO: 126594 - DNA, 20 bp, synthetic construct
  source 1..20: mol_type = other DNA
gaggccgaggcgggcggatc

SEQ ID NO: 126595 - DNA, 20 bp, synthetic construct
  source 1..20: mol_type = other DNA
ggaggccgaggcgggcggat

SEQ ID NO: 126596 - DNA, 20 bp, synthetic construct
  source 1..20: mol_type = other DNA
gggaggccgaggcgggcgga

SEQ ID NO: 126597 - DNA, 20 bp, synthetic construct
  source 1..20: mol_type = other DNA
tgggaggccgaggcgggcgg

SEQ ID NO: 126598 - DNA, 20 bp, synthetic construct
  source 1..20: mol_type = other DNA
ttgggaggccgaggcgggcg

SEQ ID NO: 126599 - DNA, 20 bp, synthetic construct
  source 1..20: mol_type = other DNA
tttgggaggccgaggcgggc

SEQ ID NO: 126600 - DNA, 20 bp, synthetic construct
  source 1..20: mol_type = other DNA
ctttgggaggccgaggcggg

SEQ ID NO: 126601 - DNA, 20 bp, synthetic construct
  source 1..20: mol_type = other DNA
actttgggaggccgaggcgg

SEQ ID NO: 126602 - DNA, 20 bp, synthetic construct
  source 1..20: mol_type = other DNA
cactttgggaggccgaggcg

SEQ ID NO: 126603 - DNA, 20 bp, synthetic construct
  source 1..20: mol_type = other DNA
gcactttgggaggccgaggc

SEQ ID NO: 126604 - DNA, 20 bp, synthetic construct
  source 1..20: mol_type = other DNA
agcactttgggaggccgagg

SEQ ID NO: 126605 - DNA, 20 bp, synthetic construct
  source 1..20: mol_type = other DNA
cagcactttgggaggccgag

SEQ ID NO: 126606 - DNA, 20 bp, synthetic construct
  source 1..20: mol_type = other DNA
ccagcactttgggaggccga

SEQ ID NO: 126607 - DNA, 20 bp, synthetic construct
  source 1..20: mol_type = other DNA
cccagcactttgggaggccg

SEQ ID NO: 126608 - DNA, 20 bp, synthetic construct
  source 1..20: mol_type = other DNA
tcccagcactttgggaggcc

SEQ ID NO: 126609 - DNA, 20 bp, synthetic construct
  source 1..20: mol_type = other DNA
atcccagcactttgggaggc

SEQ ID NO: 126610 - DNA, 20 bp, synthetic construct
  source 1..20: mol_type = other DNA
aatcccagcactttgggagg

SEQ ID NO: 126611 - DNA, 20 bp, synthetic construct
  source 1..20: mol_type = other DNA
taatcccagcactttgggag

SEQ ID NO: 126612 - DNA, 20 bp, synthetic construct
  source 1..20: mol_type = other DNA
gtaatcccagcactttggga

SEQ ID NO: 126613 - DNA, 20 bp, synthetic construct
  source 1..20: mol_type = other DNA
tgtaatcccagcactttggg

SEQ ID NO: 126614 - DNA, 20 bp, synthetic construct
  source 1..20: mol_type = other DNA
ctgtaatcccagcactttgg

SEQ ID NO: 126615 - DNA, 20 bp, synthetic construct
  source 1..20: mol_type = other DNA
cctgtaatcccagcactttg

SEQ ID NO: 126616 - DNA, 20 bp, synthetic construct
  source 1..20: mol_type = other DNA
acctgtaatcccagcacttt

SEQ ID NO: 126617 - DNA, 20 bp, synthetic construct
  source 1..20: mol_type = other DNA
cacctgtaatcccagcactt

SEQ ID NO: 126618 - DNA, 20 bp, synthetic construct
  source 1..20: mol_type = other DNA
acacctgtaatcccagcact

SEQ ID NO: 126619 - DNA, 20 bp, synthetic construct
  source 1..20: mol_type = other DNA
cacacctgtaatcccagcac

SEQ ID NO: 126620 - DNA, 20 bp, synthetic construct
  source 1..20: mol_type = other DNA
tcacacctgtaatcccagca

SEQ ID NO: 126621 - DNA, 20 bp, synthetic construct
  source 1..20: mol_type = other DNA
ctcacacctgtaatcccagc

SEQ ID NO: 126622 - DNA, 20 bp, synthetic construct
  source 1..20: mol_type = other DNA
gctcacacctgtaatcccag

SEQ ID NO: 126623 - DNA, 20 bp, synthetic construct
  source 1..20: mol_type = other DNA
ggctcacacctgtaatccca

SEQ ID NO: 126624 - DNA, 20 bp, synthetic construct
  source 1..20: mol_type = other DNA
tggctcacacctgtaatccc

SEQ ID NO: 126625 - DNA, 20 bp, synthetic construct
  source 1..20: mol_type = other DNA
gtggctcacacctgtaatcc

SEQ ID NO: 126626 - DNA, 20 bp, synthetic construct
  source 1..20: mol_type = other DNA
agtggctcacacctgtaatc

SEQ ID NO: 126627 - DNA, 20 bp, synthetic construct
  source 1..20: mol_type = other DNA
cagtggctcacacctgtaat

SEQ ID NO: 126628 - DNA, 20 bp, synthetic construct
  source 1..20: mol_type = other DNA
gcagtggctcacacctgtaa

SEQ ID NO: 126629 - DNA, 20 bp, synthetic construct
  source 1..20: mol_type = other DNA
cgcagtggctcacacctgta

SEQ ID NO: 126630 - DNA, 20 bp, synthetic construct
  source 1..20: mol_type = other DNA
gcgcagtggctcacacctgt

SEQ ID NO: 126631 - DNA, 20 bp, synthetic construct
  source 1..20: mol_type = other DNA
ggcgcagtggctcacacctg

SEQ ID NO: 126632 - DNA, 20 bp, synthetic construct
  source 1..20: mol_type = other DNA
gggcgcagtggctcacacct

SEQ ID NO: 126633 - DNA, 20 bp, synthetic construct
  source 1..20: mol_type = other DNA
cgggcgcagtggctcacacc

SEQ ID NO: 126634 - DNA, 20 bp, synthetic construct
  source 1..20: mol_type = other DNA
ccgggcgcagtggctcacac

SEQ ID NO: 126635 - DNA, 20 bp, synthetic construct
  source 1..20: mol_type = other DNA
gccgggcgcagtggctcaca

SEQ ID NO: 126636 - DNA, 20 bp, synthetic construct
  source 1..20: mol_type = other DNA
ggccgggcgcagtggctcac

SEQ ID NO: 126637 - DNA, 20 bp, synthetic construct
  source 1..20: mol_type = other DNA
aggccgggcgcagtggctca

SEQ ID NO: 126638 - DNA, 20 bp, synthetic construct
  source 1..20: mol_type = other DNA
aaggccgggcgcagtggctc

SEQ ID NO: 126639 - DNA, 20 bp, synthetic construct
  source 1..20: mol_type = other DNA
caaggccgggcgcagtggct

SEQ ID NO: 126640 - DNA, 20 bp, synthetic construct
  source 1..20: mol_type = other DNA
acaaggccgggcgcagtggc

SEQ ID NO: 126641 - DNA, 20 bp, synthetic construct
  source 1..20: mol_type = other DNA
tacaaggccgggcgcagtgg

SEQ ID NO: 126642 - DNA, 20 bp, synthetic construct
  source 1..20: mol_type = other DNA
atacaaggccgggcgcagtg

SEQ ID NO: 126643 - DNA, 20 bp, synthetic construct
  source 1..20: mol_type = other DNA
aatacaaggccgggcgcagt

SEQ ID NO: 126644 - DNA, 20 bp, synthetic construct
  source 1..20: mol_type = other DNA
aaatacaaggccgggcgcag

SEQ ID NO: 126645 - DNA, 20 bp, synthetic construct
  source 1..20: mol_type = other DNA
aaaatacaaggccgggcgca

SEQ ID NO: 126646 - DNA, 20 bp, synthetic construct
  source 1..20: mol_type = other DNA
aaaaatacaaggccgggcgc

SEQ ID NO: 126647 - DNA, 20 bp, synthetic construct
  source 1..20: mol_type = other DNA
taaaaatacaaggccgggcg

SEQ ID NO: 126648 - DNA, 20 bp, synthetic construct
  source 1..20: mol_type = other DNA
ttaaaaatacaaggccgggc

SEQ ID NO: 126649 - DNA, 20 bp, synthetic construct
  source 1..20: mol_type = other DNA
attaaaaatacaaggccggg

SEQ ID NO: 126650 - DNA, 20 bp, synthetic construct
  source 1..20: mol_type = other DNA
tattaaaaatacaaggccgg

SEQ ID NO: 126651 - DNA, 20 bp, synthetic construct
  source 1..20: mol_type = other DNA
ctattaaaaatacaaggccg

SEQ ID NO: 126652 - DNA, 20 bp, synthetic construct
  source 1..20: mol_type = other DNA
tctattaaaaatacaaggcc

SEQ ID NO: 126653 - DNA, 20 bp, synthetic construct
  source 1..20: mol_type = other DNA
ctctattaaaaatacaaggc

SEQ ID NO: 126654 - DNA, 20 bp, synthetic construct
  source 1..20: mol_type = other DNA
tctctattaaaaatacaagg

SEQ ID NO: 126655 - DNA, 20 bp, synthetic construct
  source 1..20: mol_type = other DNA
atctctattaaaaatacaag

SEQ ID NO: 126656 - DNA, 20 bp, synthetic construct
  source 1..20: mol_type = other DNA
catctctattaaaaatacaa

SEQ ID NO: 126657 - DNA, 20 bp, synthetic construct
  source 1..20: mol_type = other DNA
ccatctctattaaaaataca

SEQ ID NO: 126658 - DNA, 20 bp, synthetic construct
  source 1..20: mol_type = other DNA
cccatctctattaaaaatac

SEQ ID NO: 126659 - DNA, 20 bp, synthetic construct
  source 1..20: mol_type = other DNA
ccccatctctattaaaaata

SEQ ID NO: 126660 - DNA, 20 bp, synthetic construct
  source 1..20: mol_type = other DNA
accccatctctattaaaaat

SEQ ID NO: 126661 - DNA, 20 bp, synthetic construct
  source 1..20: mol_type = other DNA
aaccccatctctattaaaaa

SEQ ID NO: 126662 - DNA, 20 bp, synthetic construct
  source 1..20: mol_type = other DNA
aaaccccatctctattaaaa

SEQ ID NO: 126663 - DNA, 20 bp, synthetic construct
  source 1..20: mol_type = other DNA
gaaaccccatctctattaaa

SEQ ID NO: 126664 - DNA, 20 bp, synthetic construct
  source 1..20: mol_type = other DNA
tgaaaccccatctctattaa

SEQ ID NO: 126665 - DNA, 20 bp, synthetic construct
  source 1..20: mol_type = other DNA
gtgaaaccccatctctatta

SEQ ID NO: 126666 - DNA, 20 bp, synthetic construct
  source 1..20: mol_type = other DNA
ggtgaaaccccatctctatt

SEQ ID NO: 126667 - DNA, 20 bp, synthetic construct
  source 1..20: mol_type = other DNA
tggtgaaaccccatctctat

SEQ ID NO: 126668 - DNA, 20 bp, synthetic construct
  source 1..20: mol_type = other DNA
atggtgaaaccccatctcta

SEQ ID NO: 126669 - DNA, 20 bp, synthetic construct
  source 1..20: mol_type = other DNA
catggtgaaaccccatctct

SEQ ID NO: 126670 - DNA, 20 bp, synthetic construct
  source 1..20: mol_type = other DNA
acatggtgaaaccccatctc

SEQ ID NO: 126671 - DNA, 20 bp, synthetic construct
  source 1..20: mol_type = other DNA
aacatggtgaaaccccatct

SEQ ID NO: 126672 - DNA, 20 bp, synthetic construct
  source 1..20: mol_type = other DNA
caacatggtgaaaccccatc

SEQ ID NO: 126673 - DNA, 20 bp, synthetic construct
  source 1..20: mol_type = other DNA
ccaacatggtgaaaccccat

SEQ ID NO: 126674 - DNA, 20 bp, synthetic construct
  source 1..20: mol_type = other DNA
gccaacatggtgaaacccca

SEQ ID NO: 126675 - DNA, 20 bp, synthetic construct
  source 1..20: mol_type = other DNA
ggccaacatggtgaaacccc

SEQ ID NO: 126676 - DNA, 20 bp, synthetic construct
  source 1..20: mol_type = other DNA
tggccaacatggtgaaaccc

SEQ ID NO: 126677 - DNA, 20 bp, synthetic construct
  source 1..20: mol_type = other DNA
ctggccaacatggtgaaacc

SEQ ID NO: 126678 - DNA, 20 bp, synthetic construct
  source 1..20: mol_type = other DNA
gctggccaacatggtgaaac

SEQ ID NO: 126679 - DNA, 20 bp, synthetic construct
  source 1..20: mol_type = other DNA
ggctggccaacatggtgaaa

SEQ ID NO: 126680 - DNA, 20 bp, synthetic construct
  source 1..20: mol_type = other DNA
gggctggccaacatggtgaa

SEQ ID NO: 126681 - DNA, 20 bp, synthetic construct
  source 1..20: mol_type = other DNA
cgggctggccaacatggtga

SEQ ID NO: 126682 - DNA, 20 bp, synthetic construct
  source 1..20: mol_type = other DNA
ccgggctggccaacatggtg

SEQ ID NO: 126683 - DNA, 20 bp, synthetic construct
  source 1..20: mol_type = other DNA
accgggctggccaacatggt

SEQ ID NO: 126684 - DNA, 20 bp, synthetic construct
  source 1..20: mol_type = other DNA
gaccgggctggccaacatgg

SEQ ID NO: 126685 - DNA, 20 bp, synthetic construct
  source 1..20: mol_type = other DNA
agaccgggctggccaacatg

SEQ ID NO: 126686 - DNA, 20 bp, synthetic construct
  source 1..20: mol_type = other DNA
aagaccgggctggccaacat

SEQ ID NO: 126687 - DNA, 20 bp, synthetic construct
  source 1..20: mol_type = other DNA
caagaccgggctggccaaca

SEQ ID NO: 126688 - DNA, 20 bp, synthetic construct
  source 1..20: mol_type = other DNA
tcaagaccgggctggccaac

SEQ ID NO: 126689 - DNA, 20 bp, synthetic construct
  source 1..20: mol_type = other DNA
ttcaagaccgggctggccaa

SEQ ID NO: 126690 - DNA, 20 bp, synthetic construct
  source 1..20: mol_type = other DNA
gttcaagaccgggctggcca

SEQ ID NO: 126691 - DNA, 20 bp, synthetic construct
  source 1..20: mol_type = other DNA
agttcaagaccgggctggcc

SEQ ID NO: 126692 - DNA, 20 bp, synthetic construct
  source 1..20: mol_type = other DNA
gagttcaagaccgggctggc

SEQ ID NO: 126693 - DNA, 20 bp, synthetic construct
  source 1..20: mol_type = other DNA
ggagttcaagaccgggctgg

SEQ ID NO: 126694 - DNA, 20 bp, synthetic construct
  source 1..20: mol_type = other DNA
aggagttcaagaccgggctg

SEQ ID NO: 126695 - DNA, 20 bp, synthetic construct
  source 1..20: mol_type = other DNA
caggagttcaagaccgggct

SEQ ID NO: 126696 - DNA, 20 bp, synthetic construct
  source 1..20: mol_type = other DNA
tcaggagttcaagaccgggc

SEQ ID NO: 126697 - DNA, 20 bp, synthetic construct
  source 1..20: mol_type = other DNA
gtcaggagttcaagaccggg

SEQ ID NO: 126698 - DNA, 20 bp, synthetic construct
  source 1..20: mol_type = other DNA
ggtcaggagttcaagaccgg

SEQ ID NO: 126699 - DNA, 20 bp, synthetic construct
  source 1..20: mol_type = other DNA
aggtcaggagttcaagaccg

SEQ ID NO: 126700 - DNA, 20 bp, synthetic construct
  source 1..20: mol_type = other DNA
gaggtcaggagttcaagacc

SEQ ID NO: 126701 - DNA, 20 bp, synthetic construct
  source 1..20: mol_type = other DNA
tgaggtcaggagttcaagac

SEQ ID NO: 126702 - DNA, 20 bp, synthetic construct
  source 1..20: mol_type = other DNA
ttgaggtcaggagttcaaga

SEQ ID NO: 126703 - DNA, 20 bp, synthetic construct
  source 1..20: mol_type = other DNA
tttgaggtcaggagttcaag

SEQ ID NO: 126704 - DNA, 20 bp, synthetic construct
  source 1..20: mol_type = other DNA
atttgaggtcaggagttcaa

SEQ ID NO: 126705 - DNA, 20 bp, synthetic construct
  source 1..20: mol_type = other DNA
catttgaggtcaggagttca

SEQ ID NO: 126706 - DNA, 20 bp, synthetic construct
  source 1..20: mol_type = other DNA
tcatttgaggtcaggagttc

SEQ ID NO: 126707 - DNA, 20 bp, synthetic construct
  source 1..20: mol_type = other DNA
atcatttgaggtcaggagtt

SEQ ID NO: 126708 - DNA, 20 bp, synthetic construct
  source 1..20: mol_type = other DNA
gatcatttgaggtcaggagt

SEQ ID NO: 126709 - DNA, 20 bp, synthetic construct
  source 1..20: mol_type = other DNA
ggatcatttgaggtcaggag

SEQ ID NO: 126710 - DNA, 20 bp, synthetic construct
  source 1..20: mol_type = other DNA
tggatcatttgaggtcagga

SEQ ID NO: 126711 - DNA, 20 bp, synthetic construct
  source 1..20: mol_type = other DNA
gtggatcatttgaggtcagg

SEQ ID NO: 126712 - DNA, 20 bp, synthetic construct
  source 1..20: mol_type = other DNA
ggtggatcatttgaggtcag

SEQ ID NO: 126713 - DNA, 20 bp, synthetic construct
  source 1..20: mol_type = other DNA
gggtggatcatttgaggtca

SEQ ID NO: 126714 - DNA, 20 bp, synthetic construct
  source 1..20: mol_type = other DNA
cgggtggatcatttgaggtc

SEQ ID NO: 126715 - DNA, 20 bp, synthetic construct
  source 1..20: mol_type = other DNA
gcgggtggatcatttgaggt

SEQ ID NO: 126716 - DNA, 20 bp, synthetic construct
  source 1..20: mol_type = other DNA
ggcgggtggatcatttgagg

SEQ ID NO: 126717 - DNA, 20 bp, synthetic construct
  source 1..20: mol_type = other DNA
aggcgggtggatcatttgag

SEQ ID NO: 126718 - DNA, 20 bp, synthetic construct
  source 1..20: mol_type = other DNA
gaggcgggtggatcatttga

SEQ ID NO: 126719 - DNA, 20 bp, synthetic construct
  source 1..20: mol_type = other DNA
cgaggcgggtggatcatttg

SEQ ID NO: 126720 - DNA, 20 bp, synthetic construct
  source 1..20: mol_type = other DNA
ccgaggcgggtggatcattt

SEQ ID NO: 126721 - DNA, 20 bp, synthetic construct
  source 1..20: mol_type = other DNA
gccgaggcgggtggatcatt

SEQ ID NO: 126722 - DNA, 20 bp, synthetic construct
  source 1..20: mol_type = other DNA
ggccgaggcgggtggatcat

SEQ ID NO: 126723 - DNA, 20 bp, synthetic construct
  source 1..20: mol_type = other DNA
aggccgaggcgggtggatca

SEQ ID NO: 126724 - DNA, 20 bp, synthetic construct
  source 1..20: mol_type = other DNA
gaggccgaggcgggtggatc

SEQ ID NO: 126725 - DNA, 20 bp, synthetic construct
  source 1..20: mol_type = other DNA
ggaggccgaggcgggtggat

SEQ ID NO: 126726 - DNA, 20 bp, synthetic construct
  source 1..20: mol_type = other DNA
gggaggccgaggcgggtgga

SEQ ID NO: 126727 - DNA, 20 bp, synthetic construct
  source 1..20: mol_type = other DNA
tgggaggccgaggcgggtgg

SEQ ID NO: 126728 - DNA, 20 bp, synthetic construct
  source 1..20: mol_type = other DNA
ttgggaggccgaggcgggtg

SEQ ID NO: 126729 - DNA, 20 bp, synthetic construct
  source 1..20: mol_type = other DNA
tttgggaggccgaggcgggt

SEQ ID NO: 126730 - DNA, 20 bp, synthetic construct
  source 1..20: mol_type = other DNA
ctttgggaggccgaggcggg

SEQ ID NO: 126731 - DNA, 20 bp, synthetic construct
  source 1..20: mol_type = other DNA
actttgggaggccgaggcgg

SEQ ID NO: 126732 - DNA, 20 bp, synthetic construct
  source 1..20: mol_type = other DNA
cactttgggaggccgaggcg

SEQ ID NO: 126733 - DNA, 20 bp, synthetic construct
  source 1..20: mol_type = other DNA
gcactttgggaggccgaggc

SEQ ID NO: 126734 - DNA, 20 bp, synthetic construct
  source 1..20: mol_type = other DNA
agcactttgggaggccgagg

SEQ ID NO: 126735 - DNA, 20 bp, synthetic construct
  source 1..20: mol_type = other DNA
cagcactttgggaggccgag

SEQ ID NO: 126736 - DNA, 20 bp, synthetic construct
  source 1..20: mol_type = other DNA
ccagcactttgggaggccga

SEQ ID NO: 126737 - DNA, 20 bp, synthetic construct
  source 1..20: mol_type = other DNA
cccagcactttgggaggccg

SEQ ID NO: 126738 - DNA, 20 bp, synthetic construct
  source 1..20: mol_type = other DNA
tcccagcactttgggaggcc

SEQ ID NO: 126739 - DNA, 20 bp, synthetic construct
  source 1..20: mol_type = other DNA
atcccagcactttgggaggc

SEQ ID NO: 126740 - DNA, 20 bp, synthetic construct
  source 1..20: mol_type = other DNA
aatcccagcactttgggagg

SEQ ID NO: 126741 - DNA, 20 bp, synthetic construct
  source 1..20: mol_type = other DNA
taatcccagcactttgggag

SEQ ID NO: 126742 - DNA, 20 bp, synthetic construct
  source 1..20: mol_type = other DNA
gtaatcccagcactttggga

SEQ ID NO: 126743 - DNA, 20 bp, synthetic construct
  source 1..20: mol_type = other DNA
tgtaatcccagcactttggg

SEQ ID NO: 126744 - DNA, 20 bp, synthetic construct
  source 1..20: mol_type = other DNA
ctgtaatcccagcactttgg

SEQ ID NO: 126745 - DNA, 20 bp, synthetic construct
  source 1..20: mol_type = other DNA
cctgtaatcccagcactttg

SEQ ID NO: 126746 - DNA, 20 bp, synthetic construct
  source 1..20: mol_type = other DNA
acctgtaatcccagcacttt

SEQ ID NO: 126747 - DNA, 20 bp, synthetic construct
  source 1..20: mol_type = other DNA
cacctgtaatcccagcactt

SEQ ID NO: 126748 - DNA, 20 bp, synthetic construct
  source 1..20: mol_type = other DNA
acacctgtaatcccagcact

SEQ ID NO: 126749 - DNA, 20 bp, synthetic construct
  source 1..20: mol_type = other DNA
cacacctgtaatcccagcac

SEQ ID NO: 126750 - DNA, 20 bp, synthetic construct
  source 1..20: mol_type = other DNA
tcacacctgtaatcccagca

SEQ ID NO: 126751 - DNA, 20 bp, synthetic construct
  source 1..20: mol_type = other DNA
ctcacacctgtaatcccagc

SEQ ID NO: 126752 - DNA, 20 bp, synthetic construct
  source 1..20: mol_type = other DNA
gctcacacctgtaatcccag

SEQ ID NO: 126753 - DNA, 20 bp, synthetic construct
  source 1..20: mol_type = other DNA
ggctcacacctgtaatccca

SEQ ID NO: 126754 - DNA, 20 bp, synthetic construct
  source 1..20: mol_type = other DNA
tggctcacacctgtaatccc

SEQ ID NO: 126755 - DNA, 20 bp, synthetic construct
  source 1..20: mol_type = other DNA
atggctcacacctgtaatcc

SEQ ID NO: 126756 - DNA, 20 bp, synthetic construct
  source 1..20: mol_type = other DNA
gatggctcacacctgtaatc

SEQ ID NO: 126757 - DNA, 20 bp, synthetic construct
  source 1..20: mol_type = other DNA
cgatggctcacacctgtaat

SEQ ID NO: 126758 - DNA, 20 bp, synthetic construct
  source 1..20: mol_type = other DNA
gcgatggctcacacctgtaa

SEQ ID NO: 126759 - DNA, 20 bp, synthetic construct
  source 1..20: mol_type = other DNA
agcgatggctcacacctgta

SEQ ID NO: 126760 - DNA, 20 bp, synthetic construct
  source 1..20: mol_type = other DNA
gagcgatggctcacacctgt

SEQ ID NO: 126761 - DNA, 20 bp, synthetic construct
  source 1..20: mol_type = other DNA
agagcgatggctcacacctg

SEQ ID NO: 126762 - DNA, 20 bp, synthetic construct
  source 1..20: mol_type = other DNA
gagagcgatggctcacacct

SEQ ID NO: 126763 - DNA, 20 bp, synthetic construct
  source 1..20: mol_type = other DNA
tgagagcgatggctcacacc

SEQ ID NO: 126764 - DNA, 20 bp, synthetic construct
  source 1..20: mol_type = other DNA
ctgagagcgatggctcacac

SEQ ID NO: 126765 - DNA, 20 bp, synthetic construct
  source 1..20: mol_type = other DNA
gctgagagcgatggctcaca

SEQ ID NO: 126766 - DNA, 20 bp, synthetic construct
  source 1..20: mol_type = other DNA
ggctgagagcgatggctcac

SEQ ID NO: 126767 - DNA, 20 bp, synthetic construct
  source 1..20: mol_type = other DNA
aggctgagagcgatggctca

SEQ ID NO: 126768 - DNA, 20 bp, synthetic construct
  source 1..20: mol_type = other DNA
aaggctgagagcgatggctc

SEQ ID NO: 126769 - DNA, 20 bp, synthetic construct
  source 1..20: mol_type = other DNA
caaggctgagagcgatggct

SEQ ID NO: 126770 - DNA, 20 bp, synthetic construct
  source 1..20: mol_type = other DNA
gcaaggctgagagcgatggc

SEQ ID NO: 126771 - DNA, 20 bp, synthetic construct
  source 1..20: mol_type = other DNA
cgcaaggctgagagcgatgg

SEQ ID NO: 126772 - DNA, 20 bp, synthetic construct
  source 1..20: mol_type = other DNA
ccgcaaggctgagagcgatg

SEQ ID NO: 126773 - DNA, 20 bp, synthetic construct
  source 1..20: mol_type = other DNA
accgcaaggctgagagcgat

SEQ ID NO: 126774 - DNA, 20 bp, synthetic construct
  source 1..20: mol_type = other DNA
taccgcaaggctgagagcga

SEQ ID NO: 126775 - DNA, 20 bp, synthetic construct
  source 1..20: mol_type = other DNA
ttaccgcaaggctgagagcg

SEQ ID NO: 126776 - DNA, 20 bp, synthetic construct
  source 1..20: mol_type = other DNA
gttaccgcaaggctgagagc

SEQ ID NO: 126777 - DNA, 20 bp, synthetic construct
  source 1..20: mol_type = other DNA
agttaccgcaaggctgagag

SEQ ID NO: 126778 - DNA, 20 bp, synthetic construct
  source 1..20: mol_type = other DNA
aagttaccgcaaggctgaga

SEQ ID NO: 126779 - DNA, 20 bp, synthetic construct
  source 1..20: mol_type = other DNA
aaagttaccgcaaggctgag

SEQ ID NO: 126780 - DNA, 20 bp, synthetic construct
  source 1..20: mol_type = other DNA
aaaagttaccgcaaggctga

SEQ ID NO: 126781 - DNA, 20 bp, synthetic construct
  source 1..20: mol_type = other DNA
aaaaagttaccgcaaggctg

SEQ ID NO: 126782 - DNA, 20 bp, synthetic construct
  source 1..20: mol_type = other DNA
taaaaagttaccgcaaggct

SEQ ID NO: 126783 - DNA, 20 bp, synthetic construct
  source 1..20: mol_type = other DNA
ataaaaagttaccgcaaggc

SEQ ID NO: 126784 - DNA, 20 bp, synthetic construct
  source 1..20: mol_type = other DNA
aataaaaagttaccgcaagg

SEQ ID NO: 126785 - DNA, 20 bp, synthetic construct
  source 1..20: mol_type = other DNA
taataaaaagttaccgcaag

SEQ ID NO: 126786 - DNA, 20 bp, synthetic construct
  source 1..20: mol_type = other DNA
gtaataaaaagttaccgcaa

SEQ ID NO: 126787 - DNA, 20 bp, synthetic construct
  source 1..20: mol_type = other DNA
cgtaataaaaagttaccgca

SEQ ID NO: 126788 - DNA, 20 bp, synthetic construct
  source 1..20: mol_type = other DNA
tcgtaataaaaagttaccgc

SEQ ID NO: 126789 - DNA, 20 bp, synthetic construct
  source 1..20: mol_type = other DNA
ttcgtaataaaaagttaccg

SEQ ID NO: 126790 - DNA, 20 bp, synthetic construct
  source 1..20: mol_type = other DNA
attcgtaataaaaagttacc

SEQ ID NO: 126791 - DNA, 20 bp, synthetic construct
  source 1..20: mol_type = other DNA
cattcgtaataaaaagttac

SEQ ID NO: 126792 - DNA, 20 bp, synthetic construct
  source 1..20: mol_type = other DNA
acattcgtaataaaaagtta

SEQ ID NO: 126793 - DNA, 20 bp, synthetic construct
  source 1..20: mol_type = other DNA
tacattcgtaataaaaagtt

SEQ ID NO: 126794 - DNA, 20 bp, synthetic construct
  source 1..20: mol_type = other DNA
atacattcgtaataaaaagt

SEQ ID NO: 126795 - DNA, 20 bp, synthetic construct
  source 1..20: mol_type = other DNA
aatacattcgtaataaaaag

SEQ ID NO: 126796 - DNA, 20 bp, synthetic construct
  source 1..20: mol_type = other DNA
caatacattcgtaataaaaa

SEQ ID NO: 126797 - DNA, 20 bp, synthetic construct
  source 1..20: mol_type = other DNA
tcaatacattcgtaataaaa

SEQ ID NO: 126798 - DNA, 20 bp, synthetic construct
  source 1..20: mol_type = other DNA
ctcaatacattcgtaataaa

SEQ ID NO: 126799 - DNA, 20 bp, synthetic construct
  source 1..20: mol_type = other DNA
tctcaatacattcgtaataa

SEQ ID NO: 126800 - DNA, 20 bp, synthetic construct
  source 1..20: mol_type = other DNA
gtctcaatacattcgtaata

SEQ ID NO: 126801 - DNA, 20 bp, synthetic construct
  source 1..20: mol_type = other DNA
tgtctcaatacattcgtaat

SEQ ID NO: 126802 - DNA, 20 bp, synthetic construct
  source 1..20: mol_type = other DNA
atgtctcaatacattcgtaa

SEQ ID NO: 126803 - DNA, 20 bp, synthetic construct
  source 1..20: mol_type = other DNA
aatgtctcaatacattcgta

SEQ ID NO: 126804 - DNA, 20 bp, synthetic construct
  source 1..20: mol_type = other DNA
taatgtctcaatacattcgt

SEQ ID NO: 126805 - DNA, 20 bp, synthetic construct
  source 1..20: mol_type = other DNA
ttaatgtctcaatacattcg

SEQ ID NO: 126806 - DNA, 20 bp, synthetic construct
  source 1..20: mol_type = other DNA
attaatgtctcaatacattc

SEQ ID NO: 126807 - DNA, 20 bp, synthetic construct
  source 1..20: mol_type = other DNA
tattaatgtctcaatacatt

SEQ ID NO: 126808 - DNA, 20 bp, synthetic construct
  source 1..20: mol_type = other DNA
ttattaatgtctcaatacat

SEQ ID NO: 126809 - DNA, 20 bp, synthetic construct
  source 1..20: mol_type = other DNA
gttattaatgtctcaataca

SEQ ID NO: 126810 - DNA, 20 bp, synthetic construct
  source 1..20: mol_type = other DNA
ggttattaatgtctcaatac

SEQ ID NO: 126811 - DNA, 20 bp, synthetic construct
  source 1..20: mol_type = other DNA
aggttattaatgtctcaata

SEQ ID NO: 126812 - DNA, 20 bp, synthetic construct
  source 1..20: mol_type = other DNA
taggttattaatgtctcaat

SEQ ID NO: 126813 - DNA, 20 bp, synthetic construct
  source 1..20: mol_type = other DNA
ctaggttattaatgtctcaa

SEQ ID NO: 126814 - DNA, 20 bp, synthetic construct
  source 1..20: mol_type = other DNA
cctaggttattaatgtctca

SEQ ID NO: 126815 - DNA, 20 bp, synthetic construct
  source 1..20: mol_type = other DNA
gcctaggttattaatgtctc

SEQ ID NO: 126816 - DNA, 20 bp, synthetic construct
  source 1..20: mol_type = other DNA
ggcctaggttattaatgtct

SEQ ID NO: 126817 - DNA, 20 bp, synthetic construct
  source 1..20: mol_type = other DNA
tggcctaggttattaatgtc

SEQ ID NO: 126818 - DNA, 20 bp, synthetic construct
  source 1..20: mol_type = other DNA
ctggcctaggttattaatgt

SEQ ID NO: 126819 - DNA, 20 bp, synthetic construct
  source 1..20: mol_type = other DNA
actggcctaggttattaatg

SEQ ID NO: 126820 - DNA, 20 bp, synthetic construct
  source 1..20: mol_type = other DNA
gactggcctaggttattaat

SEQ ID NO: 126821 - DNA, 20 bp, synthetic construct
  source 1..20: mol_type = other DNA
tgactggcctaggttattaa

SEQ ID NO: 126822 - DNA, 20 bp, synthetic construct
  source 1..20: mol_type = other DNA
atgactggcctaggttatta

SEQ ID NO: 126823 - DNA, 20 bp, synthetic construct
  source 1..20: mol_type = other DNA
catgactggcctaggttatt

SEQ ID NO: 126824 - DNA, 20 bp, synthetic construct
  source 1..20: mol_type = other DNA
acatgactggcctaggttat

SEQ ID NO: 126825 - DNA, 20 bp, synthetic construct
  source 1..20: mol_type = other DNA
aacatgactggcctaggtta

SEQ ID NO: 126826 - DNA, 20 bp, synthetic construct
  source 1..20: mol_type = other DNA
aaacatgactggcctaggtt

SEQ ID NO: 126827 - DNA, 20 bp, synthetic construct
  source 1..20: mol_type = other DNA
gaaacatgactggcctaggt

SEQ ID NO: 126828 - DNA, 20 bp, synthetic construct
  source 1..20: mol_type = other DNA
tgaaacatgactggcctagg

SEQ ID NO: 126829 - DNA, 20 bp, synthetic construct
  source 1..20: mol_type = other DNA
atgaaacatgactggcctag

SEQ ID NO: 126830 - DNA, 20 bp, synthetic construct
  source 1..20: mol_type = other DNA
gatgaaacatgactggccta

SEQ ID NO: 126831 - DNA, 20 bp, synthetic construct
  source 1..20: mol_type = other DNA
ggatgaaacatgactggcct

SEQ ID NO: 126832 - DNA, 20 bp, synthetic construct
  source 1..20: mol_type = other DNA
gggatgaaacatgactggcc

SEQ ID NO: 126833 - DNA, 20 bp, synthetic construct
  source 1..20: mol_type = other DNA
agggatgaaacatgactggc

SEQ ID NO: 126834 - DNA, 20 bp, synthetic construct
  source 1..20: mol_type = other DNA
tagggatgaaacatgactgg

SEQ ID NO: 126835 - DNA, 20 bp, synthetic construct
  source 1..20: mol_type = other DNA
gtagggatgaaacatgactg

SEQ ID NO: 126836 - DNA, 20 bp, synthetic construct
  source 1..20: mol_type = other DNA
ggtagggatgaaacatgact

SEQ ID NO: 126837 - DNA, 20 bp, synthetic construct
  source 1..20: mol_type = other DNA
gggtagggatgaaacatgac

SEQ ID NO: 126838 - DNA, 20 bp, synthetic construct
  source 1..20: mol_type = other DNA
tgggtagggatgaaacatga

SEQ ID NO: 126839 - DNA, 20 bp, synthetic construct
  source 1..20: mol_type = other DNA
atgggtagggatgaaacatg

SEQ ID NO: 126840 - DNA, 20 bp, synthetic construct
  source 1..20: mol_type = other DNA
aatgggtagggatgaaacat

SEQ ID NO: 126841 - DNA, 20 bp, synthetic construct
  source 1..20: mol_type = other DNA
caatgggtagggatgaaaca

SEQ ID NO: 126842 - DNA, 20 bp, synthetic construct
  source 1..20: mol_type = other DNA
acaatgggtagggatgaaac

SEQ ID NO: 126843 - DNA, 20 bp, synthetic construct
  source 1..20: mol_type = other DNA
gacaatgggtagggatgaaa

SEQ ID NO: 126844 - DNA, 20 bp, synthetic construct
  source 1..20: mol_type = other DNA
agacaatgggtagggatgaa

SEQ ID NO: 126845 - DNA, 20 bp, synthetic construct
  source 1..20: mol_type = other DNA
gagacaatgggtagggatga

SEQ ID NO: 126846 - DNA, 20 bp, synthetic construct
  source 1..20: mol_type = other DNA
agagacaatgggtagggatg

SEQ ID NO: 126847 - DNA, 20 bp, synthetic construct
  source 1..20: mol_type = other DNA
aagagacaatgggtagggat

SEQ ID NO: 126848 - DNA, 20 bp, synthetic construct
  source 1..20: mol_type = other DNA
taagagacaatgggtaggga

SEQ ID NO: 126849 - DNA, 20 bp, synthetic construct
  source 1..20: mol_type = other DNA
ttaagagacaatgggtaggg

SEQ ID NO: 126850 - DNA, 20 bp, synthetic construct
  source 1..20: mol_type = other DNA
tttaagagacaatgggtagg

SEQ ID NO: 126851 - DNA, 20 bp, synthetic construct
  source 1..20: mol_type = other DNA
ttttaagagacaatgggtag

SEQ ID NO: 126852 - DNA, 20 bp, synthetic construct
  source 1..20: mol_type = other DNA
cttttaagagacaatgggta

SEQ ID NO: 126853 - DNA, 20 bp, synthetic construct
  source 1..20: mol_type = other DNA
gcttttaagagacaatgggt

SEQ ID NO: 126854 - DNA, 20 bp, synthetic construct
  source 1..20: mol_type = other DNA
agcttttaagagacaatggg

SEQ ID NO: 126855 - DNA, 20 bp, synthetic construct
  source 1..20: mol_type = other DNA
aagcttttaagagacaatgg

SEQ ID NO: 126856 - DNA, 20 bp, synthetic construct
  source 1..20: mol_type = other DNA
aaagcttttaagagacaatg

SEQ ID NO: 126857 - DNA, 20 bp, synthetic construct
  source 1..20: mol_type = other DNA
caaagcttttaagagacaat

SEQ ID NO: 126858 - DNA, 20 bp, synthetic construct
  source 1..20: mol_type = other DNA
tcaaagcttttaagagacaa

SEQ ID NO: 126859 - DNA, 20 bp, synthetic construct
  source 1..20: mol_type = other DNA
ctcaaagcttttaagagaca

SEQ ID NO: 126860 - DNA, 20 bp, synthetic construct
  source 1..20: mol_type = other DNA
actcaaagcttttaagagac

SEQ ID NO: 126861 - DNA, 20 bp, synthetic construct
  source 1..20: mol_type = other DNA
gactcaaagcttttaagaga

SEQ ID NO: 126862 - DNA, 20 bp, synthetic construct
  source 1..20: mol_type = other DNA
ggactcaaagcttttaagag

SEQ ID NO: 126863 - DNA, 20 bp, synthetic construct
  source 1..20: mol_type = other DNA
tggactcaaagcttttaaga

SEQ ID NO: 126864 - DNA, 20 bp, synthetic construct
  source 1..20: mol_type = other DNA
gtggactcaaagcttttaag

SEQ ID NO: 126865 - DNA, 20 bp, synthetic construct
  source 1..20: mol_type = other DNA
agtggactcaaagcttttaa

SEQ ID NO: 126866 - DNA, 20 bp, synthetic construct
  source 1..20: mol_type = other DNA
cagtggactcaaagctttta

SEQ ID NO: 126867 - DNA, 20 bp, synthetic construct
  source 1..20: mol_type = other DNA
ccagtggactcaaagctttt

SEQ ID NO: 126868 - DNA, 20 bp, synthetic construct
  source 1..20: mol_type = other DNA
tccagtggactcaaagcttt

SEQ ID NO: 126869 - DNA, 20 bp, synthetic construct
  source 1..20: mol_type = other DNA
atccagtggactcaaagctt

SEQ ID NO: 126870 - DNA, 20 bp, synthetic construct
  source 1..20: mol_type = other DNA
aatccagtggactcaaagct

SEQ ID NO: 126871 - DNA, 20 bp, synthetic construct
  source 1..20: mol_type = other DNA
taatccagtggactcaaagc

SEQ ID NO: 126872 - DNA, 20 bp, synthetic construct
  source 1..20: mol_type = other DNA
ataatccagtggactcaaag

SEQ ID NO: 126873 - DNA, 20 bp, synthetic construct
  source 1..20: mol_type = other DNA
aataatccagtggactcaaa

SEQ ID NO: 126874 - DNA, 20 bp, synthetic construct
  source 1..20: mol_type = other DNA
gaataatccagtggactcaa

SEQ ID NO: 126875 - DNA, 20 bp, synthetic construct
  source 1..20: mol_type = other DNA
agaataatccagtggactca

SEQ ID NO: 126876 - DNA, 20 bp, synthetic construct
  source 1..20: mol_type = other DNA
cagaataatccagtggactc

SEQ ID NO: 126877 - DNA, 20 bp, synthetic construct
  source 1..20: mol_type = other DNA
tcagaataatccagtggact

SEQ ID NO: 126878 - DNA, 20 bp, synthetic construct
  source 1..20: mol_type = other DNA
ttcagaataatccagtggac

SEQ ID NO: 126879 - DNA, 20 bp, synthetic construct
  source 1..20: mol_type = other DNA
cttcagaataatccagtgga

SEQ ID NO: 126880 - DNA, 20 bp, synthetic construct
  source 1..20: mol_type = other DNA
gcttcagaataatccagtgg

SEQ ID NO: 126881 - DNA, 20 bp, synthetic construct
  source 1..20: mol_type = other DNA
tgcttcagaataatccagtg

SEQ ID NO: 126882 - DNA, 20 bp, synthetic construct
  source 1..20: mol_type = other DNA
ttgcttcagaataatccagt

SEQ ID NO: 126883 - DNA, 20 bp, synthetic construct
  source 1..20: mol_type = other DNA
tttgcttcagaataatccag

SEQ ID NO: 126884 - DNA, 20 bp, synthetic construct
  source 1..20: mol_type = other DNA
atttgcttcagaataatcca

SEQ ID NO: 126885 - DNA, 20 bp, synthetic construct
  source 1..20: mol_type = other DNA
aatttgcttcagaataatcc

SEQ ID NO: 126886 - DNA, 20 bp, synthetic construct
  source 1..20: mol_type = other DNA
gaatttgcttcagaataatc

SEQ ID NO: 126887 - DNA, 20 bp, synthetic construct
  source 1..20: mol_type = other DNA
agaatttgcttcagaataat

SEQ ID NO: 126888 - DNA, 20 bp, synthetic construct
  source 1..20: mol_type = other DNA
tagaatttgcttcagaataa

SEQ ID NO: 126889 - DNA, 20 bp, synthetic construct
  source 1..20: mol_type = other DNA
ctagaatttgcttcagaata

SEQ ID NO: 126890 - DNA, 20 bp, synthetic construct
  source 1..20: mol_type = other DNA
tctagaatttgcttcagaat

SEQ ID NO: 126891 - DNA, 20 bp, synthetic construct
  source 1..20: mol_type = other DNA
gtctagaatttgcttcagaa

SEQ ID NO: 126892 - DNA, 20 bp, synthetic construct
  source 1..20: mol_type = other DNA
tgtctagaatttgcttcaga

SEQ ID NO: 126893 - DNA, 20 bp, synthetic construct
  source 1..20: mol_type = other DNA
atgtctagaatttgcttcag

SEQ ID NO: 126894 - DNA, 20 bp, synthetic construct
  source 1..20: mol_type = other DNA
aatgtctagaatttgcttca

SEQ ID NO: 126895 - DNA, 20 bp, synthetic construct
  source 1..20: mol_type = other DNA
caatgtctagaatttgcttc

SEQ ID NO: 126896 - DNA, 20 bp, synthetic construct
  source 1..20: mol_type = other DNA
gcaatgtctagaatttgctt

SEQ ID NO: 126897 - DNA, 20 bp, synthetic construct
  source 1..20: mol_type = other DNA
tgcaatgtctagaatttgct

SEQ ID NO: 126898 - DNA, 20 bp, synthetic construct
  source 1..20: mol_type = other DNA
atgcaatgtctagaatttgc

SEQ ID NO: 126899 - DNA, 20 bp, synthetic construct
  source 1..20: mol_type = other DNA
gatgcaatgtctagaatttg

SEQ ID NO: 126900 - DNA, 20 bp, synthetic construct
  source 1..20: mol_type = other DNA
tgatgcaatgtctagaattt

SEQ ID NO: 126901 - DNA, 20 bp, synthetic construct
  source 1..20: mol_type = other DNA
ctgatgcaatgtctagaatt

SEQ ID NO: 126902 - DNA, 20 bp, synthetic construct
  source 1..20: mol_type = other DNA
actgatgcaatgtctagaat

SEQ ID NO: 126903 - DNA, 20 bp, synthetic construct
  source 1..20: mol_type = other DNA
aactgatgcaatgtctagaa

SEQ ID NO: 126904 - DNA, 20 bp, synthetic construct
  source 1..20: mol_type = other DNA
aaactgatgcaatgtctaga

SEQ ID NO: 126905 - DNA, 20 bp, synthetic construct
  source 1..20: mol_type = other DNA
taaactgatgcaatgtctag

SEQ ID NO: 126906 - DNA, 20 bp, synthetic construct
  source 1..20: mol_type = other DNA
ataaactgatgcaatgtcta

SEQ ID NO: 126907 - DNA, 20 bp, synthetic construct
  source 1..20: mol_type = other DNA
gataaactgatgcaatgtct

SEQ ID NO: 126908 - DNA, 20 bp, synthetic construct
  source 1..20: mol_type = other DNA
ggataaactgatgcaatgtc

SEQ ID NO: 126909 - DNA, 20 bp, synthetic construct
  source 1..20: mol_type = other DNA
tggataaactgatgcaatgt

SEQ ID NO: 126910 - DNA, 20 bp, synthetic construct
  source 1..20: mol_type = other DNA
gtggataaactgatgcaatg

SEQ ID NO: 126911 - DNA, 20 bp, synthetic construct
  source 1..20: mol_type = other DNA
ggtggataaactgatgcaat

SEQ ID NO: 126912 - DNA, 20 bp, synthetic construct
  source 1..20: mol_type = other DNA
tggtggataaactgatgcaa

SEQ ID NO: 126913 - DNA, 20 bp, synthetic construct
  source 1..20: mol_type = other DNA
ttggtggataaactgatgca

SEQ ID NO: 126914 - DNA, 20 bp, synthetic construct
  source 1..20: mol_type = other DNA
gttggtggataaactgatgc

SEQ ID NO: 126915 - DNA, 20 bp, synthetic construct
  source 1..20: mol_type = other DNA
tgttggtggataaactgatg

SEQ ID NO: 126916 - DNA, 20 bp, synthetic construct
  source 1..20: mol_type = other DNA
atgttggtggataaactgat

SEQ ID NO: 126917 - DNA, 20 bp, synthetic construct
  source 1..20: mol_type = other DNA
aatgttggtggataaactga

SEQ ID NO: 126918 - DNA, 20 bp, synthetic construct
  source 1..20: mol_type = other DNA
aaatgttggtggataaactg

SEQ ID NO: 126919 - DNA, 20 bp, synthetic construct
  source 1..20: mol_type = other DNA
aaaatgttggtggataaact

SEQ ID NO: 126920 - DNA, 20 bp, synthetic construct
  source 1..20: mol_type = other DNA
taaaatgttggtggataaac

SEQ ID NO: 126921 - DNA, 20 bp, synthetic construct
  source 1..20: mol_type = other DNA
ctaaaatgttggtggataaa

SEQ ID NO: 126922 - DNA, 20 bp, synthetic construct
  source 1..20: mol_type = other DNA
actaaaatgttggtggataa

SEQ ID NO: 126923 - DNA, 20 bp, synthetic construct
  source 1..20: mol_type = other DNA
cactaaaatgttggtggata

SEQ ID NO: 126924 - DNA, 20 bp, synthetic construct
  source 1..20: mol_type = other DNA
acactaaaatgttggtggat

SEQ ID NO: 126925 - DNA, 20 bp, synthetic construct
  source 1..20: mol_type = other DNA
cacactaaaatgttggtgga

SEQ ID NO: 126926 - DNA, 20 bp, synthetic construct
  source 1..20: mol_type = other DNA
acacactaaaatgttggtgg

SEQ ID NO: 126927 - DNA, 20 bp, synthetic construct
  source 1..20: mol_type = other DNA
tacacactaaaatgttggtg

SEQ ID NO: 126928 - DNA, 20 bp, synthetic construct
  source 1..20: mol_type = other DNA
atacacactaaaatgttggt

SEQ ID NO: 126929 - DNA, 20 bp, synthetic construct
  source 1..20: mol_type = other DNA
gatacacactaaaatgttgg

SEQ ID NO: 126930 - DNA, 20 bp, synthetic construct
  source 1..20: mol_type = other DNA
agatacacactaaaatgttg

SEQ ID NO: 126931 - DNA, 20 bp, synthetic construct
  source 1..20: mol_type = other DNA
aagatacacactaaaatgtt

SEQ ID NO: 126932 - DNA, 20 bp, synthetic construct
  source 1..20: mol_type = other DNA
aaagatacacactaaaatgt

SEQ ID NO: 126933 - DNA, 20 bp, synthetic construct
  source 1..20: mol_type = other DNA
taaagatacacactaaaatg

SEQ ID NO: 126934 - DNA, 20 bp, synthetic construct
  source 1..20: mol_type = other DNA
ttaaagatacacactaaaat

SEQ ID NO: 126935 - DNA, 20 bp, synthetic construct
  source 1..20: mol_type = other DNA
cttaaagatacacactaaaa

SEQ ID NO: 126936 - DNA, 20 bp, synthetic construct
  source 1..20: mol_type = other DNA
acttaaagatacacactaaa

SEQ ID NO: 126937 - DNA, 20 bp, synthetic construct
  source 1..20: mol_type = other DNA
aacttaaagatacacactaa

SEQ ID NO: 126938 - DNA, 20 bp, synthetic construct
  source 1..20: mol_type = other DNA
caacttaaagatacacacta

SEQ ID NO: 126939 - DNA, 20 bp, synthetic construct
  source 1..20: mol_type = other DNA
ccaacttaaagatacacact

SEQ ID NO: 126940 - DNA, 20 bp, synthetic construct
  source 1..20: mol_type = other DNA
accaacttaaagatacacac

SEQ ID NO: 126941 - DNA, 20 bp, synthetic construct
  source 1..20: mol_type = other DNA
aaccaacttaaagatacaca

SEQ ID NO: 126942 - DNA, 20 bp, synthetic construct
  source 1..20: mol_type = other DNA
aaaccaacttaaagatacac

SEQ ID NO: 126943 - DNA, 20 bp, synthetic construct
  source 1..20: mol_type = other DNA
aaaaccaacttaaagataca

SEQ ID NO: 126944 - DNA, 20 bp, synthetic construct
  source 1..20: mol_type = other DNA
caaaaccaacttaaagatac

SEQ ID NO: 126945 - DNA, 20 bp, synthetic construct
  source 1..20: mol_type = other DNA
ccaaaaccaacttaaagata

SEQ ID NO: 126946 - DNA, 20 bp, synthetic construct
  source 1..20: mol_type = other DNA
accaaaaccaacttaaagat

SEQ ID NO: 126947 - DNA, 20 bp, synthetic construct
  source 1..20: mol_type = other DNA
aaccaaaaccaacttaaaga

SEQ ID NO: 126948 - DNA, 20 bp, synthetic construct
  source 1..20: mol_type = other DNA
aaaccaaaaccaacttaaag

SEQ ID NO: 126949 - DNA, 20 bp, synthetic construct
  source 1..20: mol_type = other DNA
aaaaccaaaaccaacttaaa

SEQ ID NO: 126950 - DNA, 20 bp, synthetic construct
  source 1..20: mol_type = other DNA
caaaaccaaaaccaacttaa

SEQ ID NO: 126951 - DNA, 20 bp, synthetic construct
  source 1..20: mol_type = other DNA
acaaaaccaaaaccaactta

SEQ ID NO: 126952 - DNA, 20 bp, synthetic construct
  source 1..20: mol_type = other DNA
aacaaaaccaaaaccaactt

SEQ ID NO: 126953 - DNA, 20 bp, synthetic construct
  source 1..20: mol_type = other DNA
aaacaaaaccaaaaccaact

SEQ ID NO: 126954 - DNA, 20 bp, synthetic construct
  source 1..20: mol_type = other DNA
aaaacaaaaccaaaaccaac

SEQ ID NO: 126955 - DNA, 20 bp, synthetic construct
  source 1..20: mol_type = other DNA
aaaaacaaaaccaaaaccaa

SEQ ID NO: 126956 - DNA, 20 bp, synthetic construct
  source 1..20: mol_type = other DNA
aaaaaacaaaaccaaaacca

SEQ ID NO: 126957 - DNA, 20 bp, synthetic construct
  source 1..20: mol_type = other DNA
caaaaaacaaaaccaaaacc

SEQ ID NO: 126958 - DNA, 20 bp, synthetic construct
  source 1..20: mol_type = other DNA
acaaaaaacaaaaccaaaac

SEQ ID NO: 126959 - DNA, 20 bp, synthetic construct
  source 1..20: mol_type = other DNA
aacaaaaaacaaaaccaaaa

SEQ ID NO: 126960 - DNA, 20 bp, synthetic construct
  source 1..20: mol_type = other DNA
aaacaaaaaacaaaaccaaa

SEQ ID NO: 126961 - DNA, 20 bp, synthetic construct
  source 1..20: mol_type = other DNA
aaaacaaaaaacaaaaccaa

SEQ ID NO: 126962 - DNA, 20 bp, synthetic construct
  source 1..20: mol_type = other DNA
aaaaacaaaaaacaaaacca

SEQ ID NO: 126963 - DNA, 20 bp, synthetic construct
  source 1..20: mol_type = other DNA
caaaaacaaaaaacaaaacc

SEQ ID NO: 126964 - DNA, 20 bp, synthetic construct
  source 1..20: mol_type = other DNA
tcaaaaacaaaaaacaaaac

SEQ ID NO: 126965 - DNA, 20 bp, synthetic construct
  source 1..20: mol_type = other DNA
ctcaaaaacaaaaaacaaaa

SEQ ID NO: 126966 - DNA, 20 bp, synthetic construct
  source 1..20: mol_type = other DNA
tctcaaaaacaaaaaacaaa

SEQ ID NO: 126967 - DNA, 20 bp, synthetic construct
  source 1..20: mol_type = other DNA
atctcaaaaacaaaaaacaa

SEQ ID NO: 126968 - DNA, 20 bp, synthetic construct
  source 1..20: mol_type = other DNA
catctcaaaaacaaaaaaca

SEQ ID NO: 126969 - DNA, 20 bp, synthetic construct
  source 1..20: mol_type = other DNA
ccatctcaaaaacaaaaaac

SEQ ID NO: 126970 - DNA, 20 bp, synthetic construct
  source 1..20: mol_type = other DNA
cccatctcaaaaacaaaaaa

SEQ ID NO: 126971 - DNA, 20 bp, synthetic construct
  source 1..20: mol_type = other DNA
ccccatctcaaaaacaaaaa

SEQ ID NO: 126972 - DNA, 20 bp, synthetic construct
  source 1..20: mol_type = other DNA
accccatctcaaaaacaaaa

SEQ ID NO: 126973 - DNA, 20 bp, synthetic construct
  source 1..20: mol_type = other DNA
gaccccatctcaaaaacaaa

SEQ ID NO: 126974 - DNA, 20 bp, synthetic construct
  source 1..20: mol_type = other DNA
agaccccatctcaaaaacaa

SEQ ID NO: 126975 - DNA, 20 bp, synthetic construct
  source 1..20: mol_type = other DNA
cagaccccatctcaaaaaca

SEQ ID NO: 126976 - DNA, 20 bp, synthetic construct
  source 1..20: mol_type = other DNA
ccagaccccatctcaaaaac

SEQ ID NO: 126977 - DNA, 20 bp, synthetic construct
  source 1..20: mol_type = other DNA
gccagaccccatctcaaaaa

SEQ ID NO: 126978 - DNA, 20 bp, synthetic construct
  source 1..20: mol_type = other DNA
agccagaccccatctcaaaa

SEQ ID NO: 126979 - DNA, 20 bp, synthetic construct
  source 1..20: mol_type = other DNA
aagccagaccccatctcaaa

SEQ ID NO: 126980 - DNA, 20 bp, synthetic construct
  source 1..20: mol_type = other DNA
aaagccagaccccatctcaa

SEQ ID NO: 126981 - DNA, 20 bp, synthetic construct
  source 1..20: mol_type = other DNA
caaagccagaccccatctca

SEQ ID NO: 126982 - DNA, 20 bp, synthetic construct
  source 1..20: mol_type = other DNA
acaaagccagaccccatctc

SEQ ID NO: 126983 - DNA, 20 bp, synthetic construct
  source 1..20: mol_type = other DNA
aacaaagccagaccccatct

SEQ ID NO: 126984 - DNA, 20 bp, synthetic construct
  source 1..20: mol_type = other DNA
caacaaagccagaccccatc

SEQ ID NO: 126985 - DNA, 20 bp, synthetic construct
  source 1..20: mol_type = other DNA
gcaacaaagccagaccccat

SEQ ID NO: 126986 - DNA, 20 bp, synthetic construct
  source 1..20: mol_type = other DNA
ggcaacaaagccagacccca

SEQ ID NO: 126987 - DNA, 20 bp, synthetic construct
  source 1..20: mol_type = other DNA
gggcaacaaagccagacccc

SEQ ID NO: 126988 - DNA, 20 bp, synthetic construct
  source 1..20: mol_type = other DNA
tgggcaacaaagccagaccc

SEQ ID NO: 126989 - DNA, 20 bp, synthetic construct
  source 1..20: mol_type = other DNA
ctgggcaacaaagccagacc

SEQ ID NO: 126990 - DNA, 20 bp, synthetic construct
  source 1..20: mol_type = other DNA
cctgggcaacaaagccagac

SEQ ID NO: 126991 - DNA, 20 bp, synthetic construct
  source 1..20: mol_type = other DNA
gcctgggcaacaaagccaga

SEQ ID NO: 126992 - DNA, 20 bp, synthetic construct
  source 1..20: mol_type = other DNA
agcctgggcaacaaagccag

SEQ ID NO: 126993 - DNA, 20 bp, synthetic construct
  source 1..20: mol_type = other DNA
aagcctgggcaacaaagcca

SEQ ID NO: 126994 - DNA, 20 bp, synthetic construct
  source 1..20: mol_type = other DNA
caagcctgggcaacaaagcc

SEQ ID NO: 126995 - DNA, 20 bp, synthetic construct
  source 1..20: mol_type = other DNA
ccaagcctgggcaacaaagc

SEQ ID NO: 126996 - DNA, 20 bp, synthetic construct
  source 1..20: mol_type = other DNA
tccaagcctgggcaacaaag

SEQ ID NO: 126997 - DNA, 20 bp, synthetic construct
  source 1..20: mol_type = other DNA
ctccaagcctgggcaacaaa

SEQ ID NO: 126998 - DNA, 20 bp, synthetic construct
  source 1..20: mol_type = other DNA
actccaagcctgggcaacaa

SEQ ID NO: 126999 - DNA, 20 bp, synthetic construct
  source 1..20: mol_type = other DNA
cactccaagcctgggcaaca

SEQ ID NO: 127000 - DNA, 20 bp, synthetic construct
  source 1..20: mol_type = other DNA
gcactccaagcctgggcaac

SEQ ID NO: 127001 - DNA, 20 bp, synthetic construct
  source 1..20: mol_type = other DNA
tgcactccaagcctgggcaa

SEQ ID NO: 127002 - DNA, 20 bp, synthetic construct
  source 1..20: mol_type = other DNA
ctgcactccaagcctgggca

SEQ ID NO: 127003 - DNA, 20 bp, synthetic construct
  source 1..20: mol_type = other DNA
actgcactccaagcctgggc

SEQ ID NO: 127004 - DNA, 20 bp, synthetic construct
  source 1..20: mol_type = other DNA
tactgcactccaagcctggg

SEQ ID NO: 127005 - DNA, 20 bp, synthetic construct
  source 1..20: mol_type = other DNA
ctactgcactccaagcctgg

SEQ ID NO: 127006 - DNA, 20 bp, synthetic construct
  source 1..20: mol_type = other DNA
actactgcactccaagcctg

SEQ ID NO: 127007 - DNA, 20 bp, synthetic construct
  source 1..20: mol_type = other DNA
cactactgcactccaagcct

SEQ ID NO: 127008 - DNA, 20 bp, synthetic construct
  source 1..20: mol_type = other DNA
gcactactgcactccaagcc

SEQ ID NO: 127009 - DNA, 20 bp, synthetic construct
  source 1..20: mol_type = other DNA
tgcactactgcactccaagc

SEQ ID NO: 127010 - DNA, 20 bp, synthetic construct
  source 1..20: mol_type = other DNA
ttgcactactgcactccaag

SEQ ID NO: 127011 - DNA, 20 bp, synthetic construct
  source 1..20: mol_type = other DNA
attgcactactgcactccaa

SEQ ID NO: 127012 - DNA, 20 bp, synthetic construct
  source 1..20: mol_type = other DNA
gattgcactactgcactcca

SEQ ID NO: 127013 - DNA, 20 bp, synthetic construct
  source 1..20: mol_type = other DNA
tgattgcactactgcactcc

SEQ ID NO: 127014 - DNA, 20 bp, synthetic construct
  source 1..20: mol_type = other DNA
atgattgcactactgcactc

SEQ ID NO: 127015 - DNA, 20 bp, synthetic construct
  source 1..20: mol_type = other DNA
tatgattgcactactgcact

SEQ ID NO: 127016 - DNA, 20 bp, synthetic construct
  source 1..20: mol_type = other DNA
ctatgattgcactactgcac

SEQ ID NO: 127017 - DNA, 20 bp, synthetic construct
  source 1..20: mol_type = other DNA
gctatgattgcactactgca

SEQ ID NO: 127018 - DNA, 20 bp, synthetic construct
  source 1..20: mol_type = other DNA
agctatgattgcactactgc

SEQ ID NO: 127019 - DNA, 20 bp, synthetic construct
  source 1..20: mol_type = other DNA
gagctatgattgcactactg

SEQ ID NO: 127020 - DNA, 20 bp, synthetic construct
  source 1..20: mol_type = other DNA
tgagctatgattgcactact

SEQ ID NO: 127021 - DNA, 20 bp, synthetic construct
  source 1..20: mol_type = other DNA
gtgagctatgattgcactac

SEQ ID NO: 127022 - DNA, 20 bp, synthetic construct
  source 1..20: mol_type = other DNA
agtgagctatgattgcacta

SEQ ID NO: 127023 - DNA, 20 bp, synthetic construct
  source 1..20: mol_type = other DNA
cagtgagctatgattgcact

SEQ ID NO: 127024 - DNA, 20 bp, synthetic construct
  source 1..20: mol_type = other DNA
gcagtgagctatgattgcac

SEQ ID NO: 127025 - DNA, 20 bp, synthetic construct
  source 1..20: mol_type = other DNA
agcagtgagctatgattgca

SEQ ID NO: 127026 - DNA, 20 bp, synthetic construct
  source 1..20: mol_type = other DNA
cagcagtgagctatgattgc

SEQ ID NO: 127027 - DNA, 20 bp, synthetic construct
  source 1..20: mol_type = other DNA
gcagcagtgagctatgattg

SEQ ID NO: 127028 - DNA, 20 bp, synthetic construct
  source 1..20: mol_type = other DNA
agcagcagtgagctatgatt

SEQ ID NO: 127029 - DNA, 20 bp, synthetic construct
  source 1..20: mol_type = other DNA
cagcagcagtgagctatgat

SEQ ID NO: 127030 - DNA, 20 bp, synthetic construct
  source 1..20: mol_type = other DNA
gcagcagcagtgagctatga

SEQ ID NO: 127031 - DNA, 20 bp, synthetic construct
  source 1..20: mol_type = other DNA
cgcagcagcagtgagctatg

SEQ ID NO: 127032 - DNA, 20 bp, synthetic construct
  source 1..20: mol_type = other DNA
tcgcagcagcagtgagctat

SEQ ID NO: 127033 - DNA, 20 bp, synthetic construct
  source 1..20: mol_type = other DNA
ttcgcagcagcagtgagcta

SEQ ID NO: 127034 - DNA, 20 bp, synthetic construct
  source 1..20: mol_type = other DNA
attcgcagcagcagtgagct

SEQ ID NO: 127035 - DNA, 20 bp, synthetic construct
  source 1..20: mol_type = other DNA
aattcgcagcagcagtgagc

SEQ ID NO: 127036 - DNA, 20 bp, synthetic construct
  source 1..20: mol_type = other DNA
gaattcgcagcagcagtgag

SEQ ID NO: 127037 - DNA, 20 bp, synthetic construct
  source 1..20: mol_type = other DNA
ggaattcgcagcagcagtga

SEQ ID NO: 127038 - DNA, 20 bp, synthetic construct
  source 1..20: mol_type = other DNA
aggaattcgcagcagcagtg

SEQ ID NO: 127039 - DNA, 20 bp, synthetic construct
  source 1..20: mol_type = other DNA
caggaattcgcagcagcagt

SEQ ID NO: 127040 - DNA, 20 bp, synthetic construct
  source 1..20: mol_type = other DNA
ccaggaattcgcagcagcag

SEQ ID NO: 127041 - DNA, 20 bp, synthetic construct
  source 1..20: mol_type = other DNA
accaggaattcgcagcagca

SEQ ID NO: 127042 - DNA, 20 bp, synthetic construct
  source 1..20: mol_type = other DNA
gaccaggaattcgcagcagc

SEQ ID NO: 127043 - DNA, 20 bp, synthetic construct
  source 1..20: mol_type = other DNA
agaccaggaattcgcagcag

SEQ ID NO: 127044 - DNA, 20 bp, synthetic construct
  source 1..20: mol_type = other DNA
gagaccaggaattcgcagca

SEQ ID NO: 127045 - DNA, 20 bp, synthetic construct
  source 1..20: mol_type = other DNA
tgagaccaggaattcgcagc

SEQ ID NO: 127046 - DNA, 20 bp, synthetic construct
  source 1..20: mol_type = other DNA
ttgagaccaggaattcgcag

SEQ ID NO: 127047 - DNA, 20 bp, synthetic construct
  source 1..20: mol_type = other DNA
tttgagaccaggaattcgca

SEQ ID NO: 127048 - DNA, 20 bp, synthetic construct
  source 1..20: mol_type = other DNA
ctttgagaccaggaattcgc

SEQ ID NO: 127049 - DNA, 20 bp, synthetic construct
  source 1..20: mol_type = other DNA
cctttgagaccaggaattcg

SEQ ID NO: 127050 - DNA, 20 bp, synthetic construct
  source 1..20: mol_type = other DNA
tcctttgagaccaggaattc

SEQ ID NO: 127051 - DNA, 20 bp, synthetic construct
  source 1..20: mol_type = other DNA
atcctttgagaccaggaatt

SEQ ID NO: 127052 - DNA, 20 bp, synthetic construct
  source 1..20: mol_type = other DNA
gatcctttgagaccaggaat

SEQ ID NO: 127053 - DNA, 20 bp, synthetic construct
  source 1..20: mol_type = other DNA
ggatcctttgagaccaggaa

SEQ ID NO: 127054 - DNA, 20 bp, synthetic construct
  source 1..20: mol_type = other DNA
aggatcctttgagaccagga

SEQ ID NO: 127055 - DNA, 20 bp, synthetic construct
  source 1..20: mol_type = other DNA
gaggatcctttgagaccagg

SEQ ID NO: 127056 - DNA, 20 bp, synthetic construct
  source 1..20: mol_type = other DNA
ggaggatcctttgagaccag

SEQ ID NO: 127057 - DNA, 20 bp, synthetic construct
  source 1..20: mol_type = other DNA
gggaggatcctttgagacca

SEQ ID NO: 127058 - DNA, 20 bp, synthetic construct
  source 1..20: mol_type = other DNA
agggaggatcctttgagacc

SEQ ID NO: 127059 - DNA, 20 bp, synthetic construct
  source 1..20: mol_type = other DNA
gagggaggatcctttgagac

SEQ ID NO: 127060 - DNA, 20 bp, synthetic construct
  source 1..20: mol_type = other DNA
ggagggaggatcctttgaga

SEQ ID NO: 127061 - DNA, 20 bp, synthetic construct
  source 1..20: mol_type = other DNA
aggagggaggatcctttgag

SEQ ID NO: 127062 - DNA, 20 bp, synthetic construct
  source 1..20: mol_type = other DNA
gaggagggaggatcctttga

SEQ ID NO: 127063 - DNA, 20 bp, synthetic construct
  source 1..20: mol_type = other DNA
tgaggagggaggatcctttg

SEQ ID NO: 127064 - DNA, 20 bp, synthetic construct
  source 1..20: mol_type = other DNA
ctgaggagggaggatccttt

SEQ ID NO: 127065 - DNA, 20 bp, synthetic construct
  source 1..20: mol_type = other DNA
gctgaggagggaggatcctt

SEQ ID NO: 127066 - DNA, 20 bp, synthetic construct
  source 1..20: mol_type = other DNA
ggctgaggagggaggatcct

SEQ ID NO: 127067 - DNA, 20 bp, synthetic construct
  source 1..20: mol_type = other DNA
aggctgaggagggaggatcc

SEQ ID NO: 127068 - DNA, 20 bp, synthetic construct
  source 1..20: mol_type = other DNA
gaggctgaggagggaggatc

SEQ ID NO: 127069 - DNA, 20 bp, synthetic construct
  source 1..20: mol_type = other DNA
agaggctgaggagggaggat

SEQ ID NO: 127070 - DNA, 20 bp, synthetic construct
  source 1..20: mol_type = other DNA
gagaggctgaggagggagga

SEQ ID NO: 127071 - DNA, 20 bp, synthetic construct
  source 1..20: mol_type = other DNA
tgagaggctgaggagggagg

SEQ ID NO: 127072 - DNA, 20 bp, synthetic construct
  source 1..20: mol_type = other DNA
ttgagaggctgaggagggag

SEQ ID NO: 127073 - DNA, 20 bp, synthetic construct
  source 1..20: mol_type = other DNA
cttgagaggctgaggaggga

SEQ ID NO: 127074 - DNA, 20 bp, synthetic construct
  source 1..20: mol_type = other DNA
acttgagaggctgaggaggg

SEQ ID NO: 127075 - DNA, 20 bp, synthetic construct
  source 1..20: mol_type = other DNA
tacttgagaggctgaggagg

SEQ ID NO: 127076 - DNA, 20 bp, synthetic construct
  source 1..20: mol_type = other DNA
ttacttgagaggctgaggag

SEQ ID NO: 127077 - DNA, 20 bp, synthetic construct
  source 1..20: mol_type = other DNA
gttacttgagaggctgagga

SEQ ID NO: 127078 - DNA, 20 bp, synthetic construct
  source 1..20: mol_type = other DNA
agttacttgagaggctgagg

SEQ ID NO: 127079 - DNA, 20 bp, synthetic construct
  source 1..20: mol_type = other DNA
cagttacttgagaggctgag

SEQ ID NO: 127080 - DNA, 20 bp, synthetic construct
  source 1..20: mol_type = other DNA
acagttacttgagaggctga

SEQ ID NO: 127081 - DNA, 20 bp, synthetic construct
  source 1..20: mol_type = other DNA
cacagttacttgagaggctg

SEQ ID NO: 127082 - DNA, 20 bp, synthetic construct
  source 1..20: mol_type = other DNA
tcacagttacttgagaggct

SEQ ID NO: 127083 - DNA, 20 bp, synthetic construct
  source 1..20: mol_type = other DNA
gtcacagttacttgagaggc

SEQ ID NO: 127084 - DNA, 20 bp, synthetic construct
  source 1..20: mol_type = other DNA
agtcacagttacttgagagg

SEQ ID NO: 127085 - DNA, 20 bp, synthetic construct
  source 1..20: mol_type = other DNA
tagtcacagttacttgagag

SEQ ID NO: 127086 - DNA, 20 bp, synthetic construct
  source 1..20: mol_type = other DNA
gtagtcacagttacttgaga

SEQ ID NO: 127087 - DNA, 20 bp, synthetic construct
  source 1..20: mol_type = other DNA
tgtagtcacagttacttgag

SEQ ID NO: 127088 - DNA, 20 bp, synthetic construct
  source 1..20: mol_type = other DNA
ctgtagtcacagttacttga

SEQ ID NO: 127089 - DNA, 20 bp, synthetic construct
  source 1..20: mol_type = other DNA
cctgtagtcacagttacttg

SEQ ID NO: 127090 - DNA, 20 bp, synthetic construct
  source 1..20: mol_type = other DNA
gcctgtagtcacagttactt

SEQ ID NO: 127091 - DNA, 20 bp, synthetic construct
  source 1..20: mol_type = other DNA
tgcctgtagtcacagttact

SEQ ID NO: 127092 - DNA, 20 bp, synthetic construct
  source 1..20: mol_type = other DNA
gtgcctgtagtcacagttac

SEQ ID NO: 127093 - DNA, 20 bp, synthetic construct
  source 1..20: mol_type = other DNA
tgtgcctgtagtcacagtta

SEQ ID NO: 127094 - DNA, 20 bp, synthetic construct
  source 1..20: mol_type = other DNA
atgtgcctgtagtcacagtt

SEQ ID NO: 127095 - DNA, 20 bp, synthetic construct
  source 1..20: mol_type = other DNA
catgtgcctgtagtcacagt

SEQ ID NO: 127096 - DNA, 20 bp, synthetic construct
  source 1..20: mol_type = other DNA
gcatgtgcctgtagtcacag

SEQ ID NO: 127097 - DNA, 20 bp, synthetic construct
  source 1..20: mol_type = other DNA
ggcatgtgcctgtagtcaca

SEQ ID NO: 127098 - DNA, 20 bp, synthetic construct
  source 1..20: mol_type = other DNA
tggcatgtgcctgtagtcac

SEQ ID NO: 127099 - DNA, 20 bp, synthetic construct
  source 1..20: mol_type = other DNA
gtggcatgtgcctgtagtca

SEQ ID NO: 127100 - DNA, 20 bp, synthetic construct
  source 1..20: mol_type = other DNA
ggtggcatgtgcctgtagtc

SEQ ID NO: 127101 - DNA, 20 bp, synthetic construct
  source 1..20: mol_type = other DNA
aggtggcatgtgcctgtagt

SEQ ID NO: 127102 - DNA, 20 bp, synthetic construct
  source 1..20: mol_type = other DNA
aaggtggcatgtgcctgtag

SEQ ID NO: 127103 - DNA, 20 bp, synthetic construct
  source 1..20: mol_type = other DNA
caaggtggcatgtgcctgta

SEQ ID NO: 127104 - DNA, 20 bp, synthetic construct
  source 1..20: mol_type = other DNA
gcaaggtggcatgtgcctgt

SEQ ID NO: 127105 - DNA, 20 bp, synthetic construct
  source 1..20: mol_type = other DNA
ggcaaggtggcatgtgcctg

SEQ ID NO: 127106 - DNA, 20 bp, synthetic construct
  source 1..20: mol_type = other DNA
tggcaaggtggcatgtgcct

SEQ ID NO: 127107 - DNA, 20 bp, synthetic construct
  source 1..20: mol_type = other DNA
ctggcaaggtggcatgtgcc

SEQ ID NO: 127108 - DNA, 20 bp, synthetic construct
  source 1..20: mol_type = other DNA
gctggcaaggtggcatgtgc

SEQ ID NO: 127109 - DNA, 20 bp, synthetic construct
  source 1..20: mol_type = other DNA
agctggcaaggtggcatgtg

SEQ ID NO: 127110 - DNA, 20 bp, synthetic construct
  source 1..20: mol_type = other DNA
aagctggcaaggtggcatgt

SEQ ID NO: 127111 - DNA, 20 bp, synthetic construct
  source 1..20: mol_type = other DNA
aaagctggcaaggtggcatg

SEQ ID NO: 127112 - DNA, 20 bp, synthetic construct
  source 1..20: mol_type = other DNA
aaaagctggcaaggtggcat

SEQ ID NO: 127113 - DNA, 20 bp, synthetic construct
  source 1..20: mol_type = other DNA
gaaaagctggcaaggtggca

SEQ ID NO: 127114 - DNA, 20 bp, synthetic construct
  source 1..20: mol_type = other DNA
agaaaagctggcaaggtggc

SEQ ID NO: 127115 - DNA, 20 bp, synthetic construct
  source 1..20: mol_type = other DNA
aagaaaagctggcaaggtgg

SEQ ID NO: 127116 - DNA, 20 bp, synthetic construct
  source 1..20: mol_type = other DNA
aaagaaaagctggcaaggtg

SEQ ID NO: 127117 - DNA, 20 bp, synthetic construct
  source 1..20: mol_type = other DNA
aaaagaaaagctggcaaggt

SEQ ID NO: 127118 - DNA, 20 bp, synthetic construct
  source 1..20: mol_type = other DNA
gaaaagaaaagctggcaagg

SEQ ID NO: 127119 - DNA, 20 bp, synthetic construct
  source 1..20: mol_type = other DNA
agaaaagaaaagctggcaag

SEQ ID NO: 127120 - DNA, 20 bp, synthetic construct
  source 1..20: mol_type = other DNA
aagaaaagaaaagctggcaa

SEQ ID NO: 127121 - DNA, 20 bp, synthetic construct
  source 1..20: mol_type = other DNA
caagaaaagaaaagctggca

SEQ ID NO: 127122 - DNA, 20 bp, synthetic construct
  source 1..20: mol_type = other DNA
acaagaaaagaaaagctggc

SEQ ID NO: 127123 - DNA, 20 bp, synthetic construct
  source 1..20: mol_type = other DNA
gacaagaaaagaaaagctgg

SEQ ID NO: 127124 - DNA, 20 bp, synthetic construct
  source 1..20: mol_type = other DNA
agacaagaaaagaaaagctg

SEQ ID NO: 127125 - DNA, 20 bp, synthetic construct
  source 1..20: mol_type = other DNA
aagacaagaaaagaaaagct

SEQ ID NO: 127126 - DNA, 20 bp, synthetic construct
  source 1..20: mol_type = other DNA
caagacaagaaaagaaaagc

SEQ ID NO: 127127 - DNA, 20 bp, synthetic construct
  source 1..20: mol_type = other DNA
acaagacaagaaaagaaaag

SEQ ID NO: 127128 - DNA, 20 bp, synthetic construct
  source 1..20: mol_type = other DNA
gacaagacaagaaaagaaaa

SEQ ID NO: 127129 - DNA, 20 bp, synthetic construct
  source 1..20: mol_type = other DNA
agacaagacaagaaaagaaa

SEQ ID NO: 127130 - DNA, 20 bp, synthetic construct
  source 1..20: mol_type = other DNA
aagacaagacaagaaaagaa

SEQ ID NO: 127131 - DNA, 20 bp, synthetic construct
  source 1..20: mol_type = other DNA
aaagacaagacaagaaaaga

SEQ ID NO: 127132 - DNA, 20 bp, synthetic construct
  source 1..20: mol_type = other DNA
gaaagacaagacaagaaaag

SEQ ID NO: 127133 - DNA, 20 bp, synthetic construct
  source 1..20: mol_type = other DNA
agaaagacaagacaagaaaa

SEQ ID NO: 127134 - DNA, 20 bp, synthetic construct
  source 1..20: mol_type = other DNA
aagaaagacaagacaagaaa

SEQ ID NO: 127135 - DNA, 20 bp, synthetic construct
  source 1..20: mol_type = other DNA
gaagaaagacaagacaagaa

SEQ ID NO: 127136 - DNA, 20 bp, synthetic construct
  source 1..20: mol_type = other DNA
agaagaaagacaagacaaga

SEQ ID NO: 127137 - DNA, 20 bp, synthetic construct
  source 1..20: mol_type = other DNA
aagaagaaagacaagacaag

SEQ ID NO: 127138 - DNA, 20 bp, synthetic construct
  source 1..20: mol_type = other DNA
gaagaagaaagacaagacaa

SEQ ID NO: 127139 - DNA, 20 bp, synthetic construct
  source 1..20: mol_type = other DNA
agaagaagaaagacaagaca

SEQ ID NO: 127140 - DNA, 20 bp, synthetic construct
  source 1..20: mol_type = other DNA
aagaagaagaaagacaagac

SEQ ID NO: 127141 - DNA, 20 bp, synthetic construct
  source 1..20: mol_type = other DNA
aaagaagaagaaagacaaga

SEQ ID NO: 127142 - DNA, 20 bp, synthetic construct
  source 1..20: mol_type = other DNA
caaagaagaagaaagacaag

SEQ ID NO: 127143 - DNA, 20 bp, synthetic construct
  source 1..20: mol_type = other DNA
acaaagaagaagaaagacaa

SEQ ID NO: 127144 - DNA, 20 bp, synthetic construct
  source 1..20: mol_type = other DNA
aacaaagaagaagaaagaca

SEQ ID NO: 127145 - DNA, 20 bp, synthetic construct
  source 1..20: mol_type = other DNA
aaacaaagaagaagaaagac

SEQ ID NO: 127146 - DNA, 20 bp, synthetic construct
  source 1..20: mol_type = other DNA
aaaacaaagaagaagaaaga

SEQ ID NO: 127147 - DNA, 20 bp, synthetic construct
  source 1..20: mol_type = other DNA
aaaaacaaagaagaagaaag

SEQ ID NO: 127148 - DNA, 20 bp, synthetic construct
  source 1..20: mol_type = other DNA
aaaaaacaaagaagaagaaa

SEQ ID NO: 127149 - DNA, 20 bp, synthetic construct
  source 1..20: mol_type = other DNA
aaaaaaacaaagaagaagaa

SEQ ID NO: 127150 - DNA, 20 bp, synthetic construct
  source 1..20: mol_type = other DNA
caaaaaaacaaagaagaaga

SEQ ID NO: 127151 - DNA, 20 bp, synthetic construct
  source 1..20: mol_type = other DNA
acaaaaaaacaaagaagaag

SEQ ID NO: 127152 - DNA, 20 bp, synthetic construct
  source 1..20: mol_type = other DNA
aacaaaaaaacaaagaagaa

SEQ ID NO: 127153 - DNA, 20 bp, synthetic construct
  source 1..20: mol_type = other DNA
aaacaaaaaaacaaagaaga

SEQ ID NO: 127154 - DNA, 20 bp, synthetic construct
  source 1..20: mol_type = other DNA
caaacaaaaaaacaaagaag

SEQ ID NO: 127155 - DNA, 20 bp, synthetic construct
  source 1..20: mol_type = other DNA
acaaacaaaaaaacaaagaa

SEQ ID NO: 127156 - DNA, 20 bp, synthetic construct
  source 1..20: mol_type = other DNA
aacaaacaaaaaaacaaaga

SEQ ID NO: 127157 - DNA, 20 bp, synthetic construct
  source 1..20: mol_type = other DNA
aaacaaacaaaaaaacaaag

SEQ ID NO: 127158 - DNA, 20 bp, synthetic construct
  source 1..20: mol_type = other DNA
aaaacaaacaaaaaaacaaa

SEQ ID NO: 127159 - DNA, 20 bp, synthetic construct
  source 1..20: mol_type = other DNA
aaaaacaaacaaaaaaacaa

SEQ ID NO: 127160 - DNA, 20 bp, synthetic construct
  source 1..20: mol_type = other DNA
aaaaaacaaacaaaaaaaca

SEQ ID NO: 127161 - DNA, 20 bp, synthetic construct
  source 1..20: mol_type = other DNA
caaaaaacaaacaaaaaaac

SEQ ID NO: 127162 - DNA, 20 bp, synthetic construct
  source 1..20: mol_type = other DNA
acaaaaaacaaacaaaaaaa

SEQ ID NO: 127163 - DNA, 20 bp, synthetic construct
  source 1..20: mol_type = other DNA
aacaaaaaacaaacaaaaaa

SEQ ID NO: 127164 - DNA, 20 bp, synthetic construct
  source 1..20: mol_type = other DNA
aaacaaaaaacaaacaaaaa

SEQ ID NO: 127165 - DNA, 20 bp, synthetic construct
  source 1..20: mol_type = other DNA
aaaacaaaaaacaaacaaaa

SEQ ID NO: 127166 - DNA, 20 bp, synthetic construct
  source 1..20: mol_type = other DNA
aaaaacaaaaaacaaacaaa

SEQ ID NO: 127167 - DNA, 20 bp, synthetic construct
  source 1..20: mol_type = other DNA
aaaaaacaaaaaacaaacaa

SEQ ID NO: 127168 - DNA, 20 bp, synthetic construct
  source 1..20: mol_type = other DNA
aaaaaaacaaaaaacaaaca

SEQ ID NO: 127169 - DNA, 20 bp, synthetic construct
  source 1..20: mol_type = other DNA
aaaaaaaacaaaaaacaaac

SEQ ID NO: 127170 - DNA, 20 bp, synthetic construct
  source 1..20: mol_type = other DNA
aaaaaaaaacaaaaaacaaa

SEQ ID NO: 127171 - DNA, 20 bp, synthetic construct
  source 1..20: mol_type = other DNA
caaaaaaaaacaaaaaacaa

SEQ ID NO: 127172 - DNA, 20 bp, synthetic construct
  source 1..20: mol_type = other DNA
tcaaaaaaaaacaaaaaaca

SEQ ID NO: 127173 - DNA, 20 bp, synthetic construct
  source 1..20: mol_type = other DNA
ctcaaaaaaaaacaaaaaac

SEQ ID NO: 127174 - DNA, 20 bp, synthetic construct
  source 1..20: mol_type = other DNA
tctcaaaaaaaaacaaaaaa

SEQ ID NO: 127175 - DNA, 20 bp, synthetic construct
  source 1..20: mol_type = other DNA
gtctcaaaaaaaaacaaaaa

SEQ ID NO: 127176 - DNA, 20 bp, synthetic construct
  source 1..20: mol_type = other DNA
tgtctcaaaaaaaaacaaaa

SEQ ID NO: 127177 - DNA, 20 bp, synthetic construct
  source 1..20: mol_type = other DNA
ctgtctcaaaaaaaaacaaa

SEQ ID NO: 127178 - DNA, 20 bp, synthetic construct
  source 1..20: mol_type = other DNA
tctgtctcaaaaaaaaacaa

SEQ ID NO: 127179 - DNA, 20 bp, synthetic construct
  source 1..20: mol_type = other DNA
ctctgtctcaaaaaaaaaca

SEQ ID NO: 127180 - DNA, 20 bp, synthetic construct
  source 1..20: mol_type = other DNA
actctgtctcaaaaaaaaac

SEQ ID NO: 127181 - DNA, 20 bp, synthetic construct
  source 1..20: mol_type = other DNA
gactctgtctcaaaaaaaaa

SEQ ID NO: 127182 - DNA, 20 bp, synthetic construct
  source 1..20: mol_type = other DNA
agactctgtctcaaaaaaaa

SEQ ID NO: 127183 - DNA, 20 bp, synthetic construct
  source 1..20: mol_type = other DNA
gagactctgtctcaaaaaaa

SEQ ID NO: 127184 - DNA, 20 bp, synthetic construct
  source 1..20: mol_type = other DNA
tgagactctgtctcaaaaaa

SEQ ID NO: 127185 - DNA, 20 bp, synthetic construct
  source 1..20: mol_type = other DNA
gtgagactctgtctcaaaaa

SEQ ID NO: 127186 - DNA, 20 bp, synthetic construct
  source 1..20: mol_type = other DNA
ggtgagactctgtctcaaaa

SEQ ID NO: 127187 - DNA, 20 bp, synthetic construct
  source 1..20: mol_type = other DNA
tggtgagactctgtctcaaa

SEQ ID NO: 127188 - DNA, 20 bp, synthetic construct
  source 1..20: mol_type = other DNA
atggtgagactctgtctcaa

SEQ ID NO: 127189 - DNA, 20 bp, synthetic construct
  source 1..20: mol_type = other DNA
gatggtgagactctgtctca

SEQ ID NO: 127190 - DNA, 20 bp, synthetic construct
  source 1..20: mol_type = other DNA
agatggtgagactctgtctc

SEQ ID NO: 127191 - DNA, 20 bp, synthetic construct
  source 1..20: mol_type = other DNA
aagatggtgagactctgtct

SEQ ID NO: 127192 - DNA, 20 bp, synthetic construct
  source 1..20: mol_type = other DNA
aaagatggtgagactctgtc

SEQ ID NO: 127193 - DNA, 20 bp, synthetic construct
  source 1..20: mol_type = other DNA
gaaagatggtgagactctgt

SEQ ID NO: 127194 - DNA, 20 bp, synthetic construct
  source 1..20: mol_type = other DNA
agaaagatggtgagactctg

SEQ ID NO: 127195 - DNA, 20 bp, synthetic construct
  source 1..20: mol_type = other DNA
tagaaagatggtgagactct

SEQ ID NO: 127196 - DNA, 20 bp, synthetic construct
  source 1..20: mol_type = other DNA
atagaaagatggtgagactc

SEQ ID NO: 127197 - DNA, 20 bp, synthetic construct
  source 1..20: mol_type = other DNA
gatagaaagatggtgagact

SEQ ID NO: 127198 - DNA, 20 bp, synthetic construct
  source 1..20: mol_type = other DNA
agatagaaagatggtgagac

SEQ ID NO: 127199 - DNA, 20 bp, synthetic construct
  source 1..20: mol_type = other DNA
aagatagaaagatggtgaga

SEQ ID NO: 127200 - DNA, 20 bp, synthetic construct
  source 1..20: mol_type = other DNA
caagatagaaagatggtgag

SEQ ID NO: 127201 - DNA, 20 bp, synthetic construct
  source 1..20: mol_type = other DNA
gcaagatagaaagatggtga

SEQ ID NO: 127202 - DNA, 20 bp, synthetic construct
  source 1..20: mol_type = other DNA
ggcaagatagaaagatggtg

SEQ ID NO: 127203 - DNA, 20 bp, synthetic construct
  source 1..20: mol_type = other DNA
gggcaagatagaaagatggt

SEQ ID NO: 127204 - DNA, 20 bp, synthetic construct
  source 1..20: mol_type = other DNA
tgggcaagatagaaagatgg

SEQ ID NO: 127205 - DNA, 20 bp, synthetic construct
  source 1..20: mol_type = other DNA
ctgggcaagatagaaagatg

SEQ ID NO: 127206 - DNA, 20 bp, synthetic construct
  source 1..20: mol_type = other DNA
cctgggcaagatagaaagat

SEQ ID NO: 127207 - DNA, 20 bp, synthetic construct
  source 1..20: mol_type = other DNA
gcctgggcaagatagaaaga

SEQ ID NO: 127208 - DNA, 20 bp, synthetic construct
  source 1..20: mol_type = other DNA
agcctgggcaagatagaaag

SEQ ID NO: 127209 - DNA, 20 bp, synthetic construct
  source 1..20: mol_type = other DNA
tagcctgggcaagatagaaa

SEQ ID NO: 127210 - DNA, 20 bp, synthetic construct
  source 1..20: mol_type = other DNA
ctagcctgggcaagatagaa

SEQ ID NO: 127211 - DNA, 20 bp, synthetic construct
  source 1..20: mol_type = other DNA
actagcctgggcaagataga

SEQ ID NO: 127212 - DNA, 20 bp, synthetic construct
  source 1..20: mol_type = other DNA
gactagcctgggcaagatag

SEQ ID NO: 127213 - DNA, 20 bp, synthetic construct
  source 1..20: mol_type = other DNA
ggactagcctgggcaagata

SEQ ID NO: 127214 - DNA, 20 bp, synthetic construct
  source 1..20: mol_type = other DNA
aggactagcctgggcaagat

SEQ ID NO: 127215 - DNA, 20 bp, synthetic construct
  source 1..20: mol_type = other DNA
taggactagcctgggcaaga

SEQ ID NO: 127216 - DNA, 20 bp, synthetic construct
  source 1..20: mol_type = other DNA
ttaggactagcctgggcaag

SEQ ID NO: 127217 - DNA, 20 bp, synthetic construct
  source 1..20: mol_type = other DNA
tttaggactagcctgggcaa

SEQ ID NO: 127218 - DNA, 20 bp, synthetic construct
  source 1..20: mol_type = other DNA
atttaggactagcctgggca

SEQ ID NO: 127219 - DNA, 20 bp, synthetic construct
  source 1..20: mol_type = other DNA
aatttaggactagcctgggc

SEQ ID NO: 127220 - DNA, 20 bp, synthetic construct
  source 1..20: mol_type = other DNA
gaatttaggactagcctggg

SEQ ID NO: 127221 - DNA, 20 bp, synthetic construct
  source 1..20: mol_type = other DNA
ggaatttaggactagcctgg

SEQ ID NO: 127222 - DNA, 20 bp, synthetic construct
  source 1..20: mol_type = other DNA
tggaatttaggactagcctg

SEQ ID NO: 127223 - DNA, 20 bp, synthetic construct
  source 1..20: mol_type = other DNA
ctggaatttaggactagcct

SEQ ID NO: 127224 - DNA, 20 bp, synthetic construct
  source 1..20: mol_type = other DNA
cctggaatttaggactagcc

SEQ ID NO: 127225 - DNA, 20 bp, synthetic construct
  source 1..20: mol_type = other DNA
ccctggaatttaggactagc

SEQ ID NO: 127226 - DNA, 20 bp, synthetic construct
  source 1..20: mol_type = other DNA
gccctggaatttaggactag

SEQ ID NO: 127227 - DNA, 20 bp, synthetic construct
  source 1..20: mol_type = other DNA
agccctggaatttaggacta

SEQ ID NO: 127228 - DNA, 20 bp, synthetic construct
  source 1..20: mol_type = other DNA
aagccctggaatttaggact

SEQ ID NO: 127229 - DNA, 20 bp, synthetic construct
  source 1..20: mol_type = other DNA
taagccctggaatttaggac

SEQ ID NO: 127230 - DNA, 20 bp, synthetic construct
  source 1..20: mol_type = other DNA
ttaagccctggaatttagga

SEQ ID NO: 127231 - DNA, 20 bp, synthetic construct
  source 1..20: mol_type = other DNA
cttaagccctggaatttagg

SEQ ID NO: 127232 - DNA, 20 bp, synthetic construct
  source 1..20: mol_type = other DNA
acttaagccctggaatttag

SEQ ID NO: 127233 - DNA, 20 bp, synthetic construct
  source 1..20: mol_type = other DNA
aacttaagccctggaattta

SEQ ID NO: 127234 - DNA, 20 bp, synthetic construct
  source 1..20: mol_type = other DNA
taacttaagccctggaattt

SEQ ID NO: 127235 - DNA, 20 bp, synthetic construct
  source 1..20: mol_type = other DNA
ataacttaagccctggaatt

SEQ ID NO: 127236 - DNA, 20 bp, synthetic construct
  source 1..20: mol_type = other DNA
gataacttaagccctggaat

SEQ ID NO: 127237 - DNA, 20 bp, synthetic construct
  source 1..20: mol_type = other DNA
agataacttaagccctggaa

SEQ ID NO: 127238 - DNA, 20 bp, synthetic construct
  source 1..20: mol_type = other DNA
aagataacttaagccctgga

SEQ ID NO: 127239 - DNA, 20 bp, synthetic construct
  source 1..20: mol_type = other DNA
aaagataacttaagccctgg

SEQ ID NO: 127240 - DNA, 20 bp, synthetic construct
  source 1..20: mol_type = other DNA
gaaagataacttaagccctg

SEQ ID NO: 127241 - DNA, 20 bp, synthetic construct
  source 1..20: mol_type = other DNA
agaaagataacttaagccct

SEQ ID NO: 127242 - DNA, 20 bp, synthetic construct
  source 1..20: mol_type = other DNA
tagaaagataacttaagccc

SEQ ID NO: 127243 - DNA, 20 bp, synthetic construct
  source 1..20: mol_type = other DNA
gtagaaagataacttaagcc

SEQ ID NO: 127244 - DNA, 20 bp, synthetic construct
  source 1..20: mol_type = other DNA
ggtagaaagataacttaagc

SEQ ID NO: 127245 - DNA, 20 bp, synthetic construct
  source 1..20: mol_type = other DNA
aggtagaaagataacttaag

SEQ ID NO: 127246 - DNA, 20 bp, synthetic construct
  source 1..20: mol_type = other DNA
gaggtagaaagataacttaa

SEQ ID NO: 127247 - DNA, 20 bp, synthetic construct
  source 1..20: mol_type = other DNA
tgaggtagaaagataactta

SEQ ID NO: 127248 - DNA, 20 bp, synthetic construct
  source 1..20: mol_type = other DNA
ctgaggtagaaagataactt

SEQ ID NO: 127249 - DNA, 20 bp, synthetic construct
  source 1..20: mol_type = other DNA
gctgaggtagaaagataact

SEQ ID NO: 127250 - DNA, 20 bp, synthetic construct
  source 1..20: mol_type = other DNA
ggctgaggtagaaagataac

SEQ ID NO: 127251 - DNA, 20 bp, synthetic construct
  source 1..20: mol_type = other DNA
aggctgaggtagaaagataa

SEQ ID NO: 127252 - DNA, 20 bp, synthetic construct
  source 1..20: mol_type = other DNA
gaggctgaggtagaaagata

SEQ ID NO: 127253 - DNA, 20 bp, synthetic construct
  source 1..20: mol_type = other DNA
ggaggctgaggtagaaagat

SEQ ID NO: 127254 - DNA, 20 bp, synthetic construct
  source 1..20: mol_type = other DNA
aggaggctgaggtagaaaga

SEQ ID NO: 127255 - DNA, 20 bp, synthetic construct
  source 1..20: mol_type = other DNA
taggaggctgaggtagaaag

SEQ ID NO: 127256 - DNA, 20 bp, synthetic construct
  source 1..20: mol_type = other DNA
ttaggaggctgaggtagaaa

SEQ ID NO: 127257 - DNA, 20 bp, synthetic construct
  source 1..20: mol_type = other DNA
tttaggaggctgaggtagaa

SEQ ID NO: 127258 - DNA, 20 bp, synthetic construct
  source 1..20: mol_type = other DNA
ctttaggaggctgaggtaga

SEQ ID NO: 127259 - DNA, 20 bp, synthetic construct
  source 1..20: mol_type = other DNA
actttaggaggctgaggtag

SEQ ID NO: 127260 - DNA, 20 bp, synthetic construct
  source 1..20: mol_type = other DNA
cactttaggaggctgaggta

SEQ ID NO: 127261 - DNA, 20 bp, synthetic construct
  source 1..20: mol_type = other DNA
gcactttaggaggctgaggt

SEQ ID NO: 127262 - DNA, 20 bp, synthetic construct
  source 1..20: mol_type = other DNA
agcactttaggaggctgagg

SEQ ID NO: 127263 - DNA, 20 bp, synthetic construct
  source 1..20: mol_type = other DNA
tagcactttaggaggctgag

SEQ ID NO: 127264 - DNA, 20 bp, synthetic construct
  source 1..20: mol_type = other DNA
ctagcactttaggaggctga

SEQ ID NO: 127265 - DNA, 20 bp, synthetic construct
  source 1..20: mol_type = other DNA
cctagcactttaggaggctg

SEQ ID NO: 127266 - DNA, 20 bp, synthetic construct
  source 1..20: mol_type = other DNA
tcctagcactttaggaggct

SEQ ID NO: 127267 - DNA, 20 bp, synthetic construct
  source 1..20: mol_type = other DNA
atcctagcactttaggaggc

SEQ ID NO: 127268 - DNA, 20 bp, synthetic construct
  source 1..20: mol_type = other DNA
aatcctagcactttaggagg

SEQ ID NO: 127269 - DNA, 20 bp, synthetic construct
  source 1..20: mol_type = other DNA
taatcctagcactttaggag

SEQ ID NO: 127270 - DNA, 20 bp, synthetic construct
  source 1..20: mol_type = other DNA
gtaatcctagcactttagga

SEQ ID NO: 127271 - DNA, 20 bp, synthetic construct
  source 1..20: mol_type = other DNA
tgtaatcctagcactttagg

SEQ ID NO: 127272 - DNA, 20 bp, synthetic construct
  source 1..20: mol_type = other DNA
ctgtaatcctagcactttag

SEQ ID NO: 127273 - DNA, 20 bp, synthetic construct
  source 1..20: mol_type = other DNA
cctgtaatcctagcacttta

SEQ ID NO: 127274 - DNA, 20 bp, synthetic construct
  source 1..20: mol_type = other DNA
gcctgtaatcctagcacttt

SEQ ID NO: 127275 - DNA, 20 bp, synthetic construct
  source 1..20: mol_type = other DNA
ggcctgtaatcctagcactt

SEQ ID NO: 127276 - DNA, 20 bp, synthetic construct
  source 1..20: mol_type = other DNA
tggcctgtaatcctagcact

SEQ ID NO: 127277 - DNA, 20 bp, synthetic construct
  source 1..20: mol_type = other DNA
ctggcctgtaatcctagcac

SEQ ID NO: 127278 - DNA, 20 bp, synthetic construct
  source 1..20: mol_type = other DNA
gctggcctgtaatcctagca

SEQ ID NO: 127279 - DNA, 20 bp, synthetic construct
  source 1..20: mol_type = other DNA
tgctggcctgtaatcctagc

SEQ ID NO: 127280 - DNA, 20 bp, synthetic construct
  source 1..20: mol_type = other DNA
gtgctggcctgtaatcctag

SEQ ID NO: 127281 - DNA, 20 bp, synthetic construct
  source 1..20: mol_type = other DNA
agtgctggcctgtaatccta

SEQ ID NO: 127282 - DNA, 20 bp, synthetic construct
  source 1..20: mol_type = other DNA
aagtgctggcctgtaatcct

SEQ ID NO: 127283 - DNA, 20 bp, synthetic construct
  source 1..20: mol_type = other DNA
aaagtgctggcctgtaatcc

SEQ ID NO: 127284 - DNA, 20 bp, synthetic construct
  source 1..20: mol_type = other DNA
taaagtgctggcctgtaatc

SEQ ID NO: 127285 - DNA, 20 bp, synthetic construct
  source 1..20: mol_type = other DNA
ctaaagtgctggcctgtaat

SEQ ID NO: 127286 - DNA, 20 bp, synthetic construct
  source 1..20: mol_type = other DNA
cctaaagtgctggcctgtaa

SEQ ID NO: 127287 - DNA, 20 bp, synthetic construct
  source 1..20: mol_type = other DNA
tcctaaagtgctggcctgta

SEQ ID NO: 127288 - DNA, 20 bp, synthetic construct
  source 1..20: mol_type = other DNA
ctcctaaagtgctggcctgt

SEQ ID NO: 127289 - DNA, 20 bp, synthetic construct
  source 1..20: mol_type = other DNA
cctcctaaagtgctggcctg

SEQ ID NO: 127290 - DNA, 20 bp, synthetic construct
  source 1..20: mol_type = other DNA
acctcctaaagtgctggcct

SEQ ID NO: 127291 - DNA, 20 bp, synthetic construct
  source 1..20: mol_type = other DNA
cacctcctaaagtgctggcc

SEQ ID NO: 127292 - DNA, 20 bp, synthetic construct
  source 1..20: mol_type = other DNA
gcacctcctaaagtgctggc

SEQ ID NO: 127293 - DNA, 20 bp, synthetic construct
  source 1..20: mol_type = other DNA
agcacctcctaaagtgctgg

SEQ ID NO: 127294 - DNA, 20 bp, synthetic construct
  source 1..20: mol_type = other DNA
cagcacctcctaaagtgctg

SEQ ID NO: 127295 - DNA, 20 bp, synthetic construct
  source 1..20: mol_type = other DNA
ccagcacctcctaaagtgct

SEQ ID NO: 127296 - DNA, 20 bp, synthetic construct
  source 1..20: mol_type = other DNA
tccagcacctcctaaagtgc

SEQ ID NO: 127297 - DNA, 20 bp, synthetic construct
  source 1..20: mol_type = other DNA
atccagcacctcctaaagtg

SEQ ID NO: 127298 - DNA, 20 bp, synthetic construct
  source 1..20: mol_type = other DNA
catccagcacctcctaaagt

SEQ ID NO: 127299 - DNA, 20 bp, synthetic construct
  source 1..20: mol_type = other DNA
tcatccagcacctcctaaag

SEQ ID NO: 127300 - DNA, 20 bp, synthetic construct
  source 1..20: mol_type = other DNA
ctcatccagcacctcctaaa

SEQ ID NO: 127301 - DNA, 20 bp, synthetic construct
  source 1..20: mol_type = other DNA
gctcatccagcacctcctaa

SEQ ID NO: 127302 - DNA, 20 bp, synthetic construct
  source 1..20: mol_type = other DNA
ggctcatccagcacctccta

SEQ ID NO: 127303 - DNA, 20 bp, synthetic construct
  source 1..20: mol_type = other DNA
tggctcatccagcacctcct

SEQ ID NO: 127304 - DNA, 20 bp, synthetic construct
  source 1..20: mol_type = other DNA
atggctcatccagcacctcc

SEQ ID NO: 127305 - DNA, 20 bp, synthetic construct
  source 1..20: mol_type = other DNA
gatggctcatccagcacctc

SEQ ID NO: 127306 - DNA, 20 bp, synthetic construct
  source 1..20: mol_type = other DNA
tgatggctcatccagcacct

SEQ ID NO: 127307 - DNA, 20 bp, synthetic construct
  source 1..20: mol_type = other DNA
gtgatggctcatccagcacc

SEQ ID NO: 127308 - DNA, 20 bp, synthetic construct
  source 1..20: mol_type = other DNA
tgtgatggctcatccagcac

SEQ ID NO: 127309 - DNA, 20 bp, synthetic construct
  source 1..20: mol_type = other DNA
gtgtgatggctcatccagca

SEQ ID NO: 127310 - DNA, 20 bp, synthetic construct
  source 1..20: mol_type = other DNA
ggtgtgatggctcatccagc

SEQ ID NO: 127311 - DNA, 20 bp, synthetic construct
  source 1..20: mol_type = other DNA
gggtgtgatggctcatccag

SEQ ID NO: 127312 - DNA, 20 bp, synthetic construct
  source 1..20: mol_type = other DNA
tgggtgtgatggctcatcca

SEQ ID NO: 127313 - DNA, 20 bp, synthetic construct
  source 1..20: mol_type = other DNA
ctgggtgtgatggctcatcc

SEQ ID NO: 127314 - DNA, 20 bp, synthetic construct
  source 1..20: mol_type = other DNA
gctgggtgtgatggctcatc

SEQ ID NO: 127315 - DNA, 20 bp, synthetic construct
  source 1..20: mol_type = other DNA
ggctgggtgtgatggctcat

SEQ ID NO: 127316 - DNA, 20 bp, synthetic construct
  source 1..20: mol_type = other DNA
tggctgggtgtgatggctca

SEQ ID NO: 127317 - DNA, 20 bp, synthetic construct
  source 1..20: mol_type = other DNA
ttggctgggtgtgatggctc

SEQ ID NO: 127318 - DNA, 20 bp, synthetic construct
  source 1..20: mol_type = other DNA
cttggctgggtgtgatggct

SEQ ID NO: 127319 - DNA, 20 bp, synthetic construct
  source 1..20: mol_type = other DNA
acttggctgggtgtgatggc

SEQ ID NO: 127320 - DNA, 20 bp, synthetic construct
  source 1..20: mol_type = other DNA
gacttggctgggtgtgatgg

SEQ ID NO: 127321 - DNA, 20 bp, synthetic construct
  source 1..20: mol_type = other DNA
tgacttggctgggtgtgatg

SEQ ID NO: 127322 - DNA, 20 bp, synthetic construct
  source 1..20: mol_type = other DNA
atgacttggctgggtgtgat

SEQ ID NO: 127323 - DNA, 20 bp, synthetic construct
  source 1..20: mol_type = other DNA
tatgacttggctgggtgtga

SEQ ID NO: 127324 - DNA, 20 bp, synthetic construct
  source 1..20: mol_type = other DNA
ctatgacttggctgggtgtg

SEQ ID NO: 127325 - DNA, 20 bp, synthetic construct
  source 1..20: mol_type = other DNA
cctatgacttggctgggtgt

SEQ ID NO: 127326 - DNA, 20 bp, synthetic construct
  source 1..20: mol_type = other DNA
acctatgacttggctgggtg

SEQ ID NO: 127327 - DNA, 20 bp, synthetic construct
  source 1..20: mol_type = other DNA
aacctatgacttggctgggt

SEQ ID NO: 127328 - DNA, 20 bp, synthetic construct
  source 1..20: mol_type = other DNA
aaacctatgacttggctggg

SEQ ID NO: 127329 - DNA, 20 bp, synthetic construct
  source 1..20: mol_type = other DNA
aaaacctatgacttggctgg

SEQ ID NO: 127330 - DNA, 20 bp, synthetic construct
  source 1..20: mol_type = other DNA
aaaaacctatgacttggctg

SEQ ID NO: 127331 - DNA, 20 bp, synthetic construct
  source 1..20: mol_type = other DNA
aaaaaacctatgacttggct

SEQ ID NO: 127332 - DNA, 20 bp, synthetic construct
  source 1..20: mol_type = other DNA
aaaaaaacctatgacttggc

SEQ ID NO: 127333 - DNA, 20 bp, synthetic construct
  source 1..20: mol_type = other DNA
caaaaaaacctatgacttgg

SEQ ID NO: 127334 - DNA, 20 bp, synthetic construct
  source 1..20: mol_type = other DNA
acaaaaaaacctatgacttg

SEQ ID NO: 127335 - DNA, 20 bp, synthetic construct
  source 1..20: mol_type = other DNA
aacaaaaaaacctatgactt

SEQ ID NO: 127336 - DNA, 20 bp, synthetic construct
  source 1..20: mol_type = other DNA
aaacaaaaaaacctatgact

SEQ ID NO: 127337 - DNA, 20 bp, synthetic construct
  source 1..20: mol_type = other DNA
caaacaaaaaaacctatgac

SEQ ID NO: 127338 - DNA, 20 bp, synthetic construct
  source 1..20: mol_type = other DNA
acaaacaaaaaaacctatga

SEQ ID NO: 127339 - DNA, 20 bp, synthetic construct
  source 1..20: mol_type = other DNA
aacaaacaaaaaaacctatg

SEQ ID NO: 127340 - DNA, 20 bp, synthetic construct
  source 1..20: mol_type = other DNA
aaacaaacaaaaaaacctat

SEQ ID NO: 127341 - DNA, 20 bp, synthetic construct
  source 1..20: mol_type = other DNA
caaacaaacaaaaaaaccta

SEQ ID NO: 127342 - DNA, 20 bp, synthetic construct
  source 1..20: mol_type = other DNA
acaaacaaacaaaaaaacct

SEQ ID NO: 127343 - DNA, 20 bp, synthetic construct
  source 1..20: mol_type = other DNA
aacaaacaaacaaaaaaacc

SEQ ID NO: 127344 - DNA, 20 bp, synthetic construct
  source 1..20: mol_type = other DNA
aaacaaacaaacaaaaaaac

SEQ ID NO: 127345 - DNA, 20 bp, synthetic construct
  source 1..20: mol_type = other DNA
aaaacaaacaaacaaaaaaa

SEQ ID NO: 127346 - DNA, 20 bp, synthetic construct
  source 1..20: mol_type = other DNA
aaaaacaaacaaacaaaaaa

SEQ ID NO: 127347 - DNA, 20 bp, synthetic construct
  source 1..20: mol_type = other DNA
aaaaaacaaacaaacaaaaa

SEQ ID NO: 127348 - DNA, 20 bp, synthetic construct
  source 1..20: mol_type = other DNA
caaaaaacaaacaaacaaaa

SEQ ID NO: 127349 - DNA, 20 bp, synthetic construct
  source 1..20: mol_type = other DNA
tcaaaaaacaaacaaacaaa

SEQ ID NO: 127350 - DNA, 20 bp, synthetic construct
  source 1..20: mol_type = other DNA
ctcaaaaaacaaacaaacaa

SEQ ID NO: 127351 - DNA, 20 bp, synthetic construct
  source 1..20: mol_type = other DNA
tctcaaaaaacaaacaaaca

SEQ ID NO: 127352 - DNA, 20 bp, synthetic construct
  source 1..20: mol_type = other DNA
gtctcaaaaaacaaacaaac

SEQ ID NO: 127353 - DNA, 20 bp, synthetic construct
  source 1..20: mol_type = other DNA
tgtctcaaaaaacaaacaaa

SEQ ID NO: 127354 - DNA, 20 bp, synthetic construct
  source 1..20: mol_type = other DNA
ctgtctcaaaaaacaaacaa

SEQ ID NO: 127355 - DNA, 20 bp, synthetic construct
  source 1..20: mol_type = other DNA
actgtctcaaaaaacaaaca

SEQ ID NO: 127356 - DNA, 20 bp, synthetic construct
  source 1..20: mol_type = other DNA
cactgtctcaaaaaacaaac

SEQ ID NO: 127357 - DNA, 20 bp, synthetic construct
  source 1..20: mol_type = other DNA
acactgtctcaaaaaacaaa

SEQ ID NO: 127358 - DNA, 20 bp, synthetic construct
  source 1..20: mol_type = other DNA
gacactgtctcaaaaaacaa

SEQ ID NO: 127359 - DNA, 20 bp, synthetic construct
  source 1..20: mol_type = other DNA
agacactgtctcaaaaaaca

SEQ ID NO: 127360 - DNA, 20 bp, synthetic construct
  source 1..20: mol_type = other DNA
tagacactgtctcaaaaaac

SEQ ID NO: 127361 - DNA, 20 bp, synthetic construct
  source 1..20: mol_type = other DNA
ttagacactgtctcaaaaaa

SEQ ID NO: 127362 - DNA, 20 bp, synthetic construct
  source 1..20: mol_type = other DNA
gttagacactgtctcaaaaa

SEQ ID NO: 127363 - DNA, 20 bp, synthetic construct
  source 1..20: mol_type = other DNA
agttagacactgtctcaaaa

SEQ ID NO: 127364 - DNA, 20 bp, synthetic construct
  source 1..20: mol_type = other DNA
gagttagacactgtctcaaa

SEQ ID NO: 127365 - DNA, 20 bp, synthetic construct
  source 1..20: mol_type = other DNA
agagttagacactgtctcaa

SEQ ID NO: 127366 - DNA, 20 bp, synthetic construct
  source 1..20: mol_type = other DNA
cagagttagacactgtctca

SEQ ID NO: 127367 - DNA, 20 bp, synthetic construct
  source 1..20: mol_type = other DNA
acagagttagacactgtctc

SEQ ID NO: 127368 - DNA, 20 bp, synthetic construct
  source 1..20: mol_type = other DNA
gacagagttagacactgtct

SEQ ID NO: 127369 - DNA, 20 bp, synthetic construct
  source 1..20: mol_type = other DNA
tgacagagttagacactgtc

SEQ ID NO: 127370 - DNA, 20 bp, synthetic construct
  source 1..20: mol_type = other DNA
gtgacagagttagacactgt

SEQ ID NO: 127371 - DNA, 20 bp, synthetic construct
  source 1..20: mol_type = other DNA
ggtgacagagttagacactg

SEQ ID NO: 127372 - DNA, 20 bp, synthetic construct
  source 1..20: mol_type = other DNA
gggtgacagagttagacact

SEQ ID NO: 127373 - DNA, 20 bp, synthetic construct
  source 1..20: mol_type = other DNA
tgggtgacagagttagacac

SEQ ID NO: 127374 - DNA, 20 bp, synthetic construct
  source 1..20: mol_type = other DNA
ttgggtgacagagttagaca

SEQ ID NO: 127375 - DNA, 20 bp, synthetic construct
  source 1..20: mol_type = other DNA
cttgggtgacagagttagac

SEQ ID NO: 127376 - DNA, 20 bp, synthetic construct
  source 1..20: mol_type = other DNA
gcttgggtgacagagttaga

SEQ ID NO: 127377 - DNA, 20 bp, synthetic construct
  source 1..20: mol_type = other DNA
agcttgggtgacagagttag

SEQ ID NO: 127378 - DNA, 20 bp, synthetic construct
  source 1..20: mol_type = other DNA
cagcttgggtgacagagtta

SEQ ID NO: 127379 - DNA, 20 bp, synthetic construct
  source 1..20: mol_type = other DNA
ccagcttgggtgacagagtt

SEQ ID NO: 127380 - DNA, 20 bp, synthetic construct
  source 1..20: mol_type = other DNA
tccagcttgggtgacagagt

SEQ ID NO: 127381 - DNA, 20 bp, synthetic construct
  source 1..20: mol_type = other DNA
ctccagcttgggtgacagag

SEQ ID NO: 127382 - DNA, 20 bp, synthetic construct
  source 1..20: mol_type = other DNA
actccagcttgggtgacaga

SEQ ID NO: 127383 - DNA, 20 bp, synthetic construct
  source 1..20: mol_type = other DNA
cactccagcttgggtgacag

SEQ ID NO: 127384 - DNA, 20 bp, synthetic construct
  source 1..20: mol_type = other DNA
gcactccagcttgggtgaca

SEQ ID NO: 127385 - DNA, 20 bp, synthetic construct
  source 1..20: mol_type = other DNA
tgcactccagcttgggtgac

SEQ ID NO: 127386 - DNA, 20 bp, synthetic construct
  source 1..20: mol_type = other DNA
ctgcactccagcttgggtga

SEQ ID NO: 127387 - DNA, 20 bp, synthetic construct
  source 1..20: mol_type = other DNA
actgcactccagcttgggtg

SEQ ID NO: 127388 - DNA, 20 bp, synthetic construct
  source 1..20: mol_type = other DNA
cactgcactccagcttgggt

SEQ ID NO: 127389 - DNA, 20 bp, synthetic construct
  source 1..20: mol_type = other DNA
ccactgcactccagcttggg

SEQ ID NO: 127390 - DNA, 20 bp, synthetic construct
  source 1..20: mol_type = other DNA
gccactgcactccagcttgg

SEQ ID NO: 127391 - DNA, 20 bp, synthetic construct
  source 1..20: mol_type = other DNA
tgccactgcactccagcttg

SEQ ID NO: 127392 - DNA, 20 bp, synthetic construct
  source 1..20: mol_type = other DNA
atgccactgcactccagctt

SEQ ID NO: 127393 - DNA, 20 bp, synthetic construct
  source 1..20: mol_type = other DNA
catgccactgcactccagct

SEQ ID NO: 127394 - DNA, 20 bp, synthetic construct
  source 1..20: mol_type = other DNA
tcatgccactgcactccagc

SEQ ID NO: 127395 - DNA, 20 bp, synthetic construct
  source 1..20: mol_type = other DNA
atcatgccactgcactccag

SEQ ID NO: 127396 - DNA, 20 bp, synthetic construct
  source 1..20: mol_type = other DNA
aatcatgccactgcactcca

SEQ ID NO: 127397 - DNA, 20 bp, synthetic construct
  source 1..20: mol_type = other DNA
aaatcatgccactgcactcc

SEQ ID NO: 127398 - DNA, 20 bp, synthetic construct
  source 1..20: mol_type = other DNA
gaaatcatgccactgcactc

SEQ ID NO: 127399 - DNA, 20 bp, synthetic construct
  source 1..20: mol_type = other DNA
tgaaatcatgccactgcact

SEQ ID NO: 127400 - DNA, 20 bp, synthetic construct
  source 1..20: mol_type = other DNA
ctgaaatcatgccactgcac

SEQ ID NO: 127401 - DNA, 20 bp, synthetic construct
  source 1..20: mol_type = other DNA
gctgaaatcatgccactgca

SEQ ID NO: 127402 - DNA, 20 bp, synthetic construct
  source 1..20: mol_type = other DNA
agctgaaatcatgccactgc

SEQ ID NO: 127403 - DNA, 20 bp, synthetic construct
  source 1..20: mol_type = other DNA
gagctgaaatcatgccactg

SEQ ID NO: 127404 - DNA, 20 bp, synthetic construct
  source 1..20: mol_type = other DNA
tgagctgaaatcatgccact

SEQ ID NO: 127405 - DNA, 20 bp, synthetic construct
  source 1..20: mol_type = other DNA
ctgagctgaaatcatgccac

SEQ ID NO: 127406 - DNA, 20 bp, synthetic construct
  source 1..20: mol_type = other DNA
actgagctgaaatcatgcca

SEQ ID NO: 127407 - DNA, 20 bp, synthetic construct
  source 1..20: mol_type = other DNA
cactgagctgaaatcatgcc

SEQ ID NO: 127408 - DNA, 20 bp, synthetic construct
  source 1..20: mol_type = other DNA
gcactgagctgaaatcatgc

SEQ ID NO: 127409 - DNA, 20 bp, synthetic construct
  source 1..20: mol_type = other DNA
tgcactgagctgaaatcatg

SEQ ID NO: 127410 - DNA, 20 bp, synthetic construct
  source 1..20: mol_type = other DNA
ctgcactgagctgaaatcat

SEQ ID NO: 127411 - DNA, 20 bp, synthetic construct
  source 1..20: mol_type = other DNA
actgcactgagctgaaatca

SEQ ID NO: 127412 - DNA, 20 bp, synthetic construct
  source 1..20: mol_type = other DNA
gactgcactgagctgaaatc

SEQ ID NO: 127413 - DNA, 20 bp, synthetic construct
  source 1..20: mol_type = other DNA
agactgcactgagctgaaat

SEQ ID NO: 127414 - DNA, 20 bp, synthetic construct
  source 1..20: mol_type = other DNA
gagactgcactgagctgaaa

SEQ ID NO: 127415 - DNA, 20 bp, synthetic construct
  source 1..20: mol_type = other DNA
agagactgcactgagctgaa

SEQ ID NO: 127416 - DNA, 20 bp, synthetic construct
  source 1..20: mol_type = other DNA
tagagactgcactgagctga

SEQ ID NO: 127417 - DNA, 20 bp, synthetic construct
  source 1..20: mol_type = other DNA
gtagagactgcactgagctg

SEQ ID NO: 127418 - DNA, 20 bp, synthetic construct
  source 1..20: mol_type = other DNA
ggtagagactgcactgagct

SEQ ID NO: 127419 - DNA, 20 bp, synthetic construct
  source 1..20: mol_type = other DNA
tggtagagactgcactgagc

SEQ ID NO: 127420 - DNA, 20 bp, synthetic construct
  source 1..20: mol_type = other DNA
ttggtagagactgcactgag

SEQ ID NO: 127421 - DNA, 20 bp, synthetic construct
  source 1..20: mol_type = other DNA
attggtagagactgcactga

SEQ ID NO: 127422 - DNA, 20 bp, synthetic construct
  source 1..20: mol_type = other DNA
aattggtagagactgcactg

SEQ ID NO: 127423 - DNA, 20 bp, synthetic construct
  source 1..20: mol_type = other DNA
caattggtagagactgcact

SEQ ID NO: 127424 - DNA, 20 bp, synthetic construct
  source 1..20: mol_type = other DNA
ccaattggtagagactgcac

SEQ ID NO: 127425 - DNA, 20 bp, synthetic construct
  source 1..20: mol_type = other DNA
cccaattggtagagactgca

SEQ ID NO: 127426 - DNA, 20 bp, synthetic construct
  source 1..20: mol_type = other DNA
gcccaattggtagagactgc

SEQ ID NO: 127427 - DNA, 20 bp, synthetic construct
  source 1..20: mol_type = other DNA
agcccaattggtagagactg

SEQ ID NO: 127428 - DNA, 20 bp, synthetic construct
  source 1..20: mol_type = other DNA
aagcccaattggtagagact

SEQ ID NO: 127429 - DNA, 20 bp, synthetic construct
  source 1..20: mol_type = other DNA
taagcccaattggtagagac

SEQ ID NO: 127430 - DNA, 20 bp, synthetic construct
  source 1..20: mol_type = other DNA
ctaagcccaattggtagaga

SEQ ID NO: 127431 - DNA, 20 bp, synthetic construct
  source 1..20: mol_type = other DNA
cctaagcccaattggtagag

SEQ ID NO: 127432 - DNA, 20 bp, synthetic construct
  source 1..20: mol_type = other DNA
acctaagcccaattggtaga

SEQ ID NO: 127433 - DNA, 20 bp, synthetic construct
  source 1..20: mol_type = other DNA
cacctaagcccaattggtag

SEQ ID NO: 127434 - DNA, 20 bp, synthetic construct
  source 1..20: mol_type = other DNA
ccacctaagcccaattggta

SEQ ID NO: 127435 - DNA, 20 bp, synthetic construct
  source 1..20: mol_type = other DNA
accacctaagcccaattggt

SEQ ID NO: 127436 - DNA, 20 bp, synthetic construct
  source 1..20: mol_type = other DNA
gaccacctaagcccaattgg

SEQ ID NO: 127437 - DNA, 20 bp, synthetic construct
  source 1..20: mol_type = other DNA
ggaccacctaagcccaattg

SEQ ID NO: 127438 - DNA, 20 bp, synthetic construct
  source 1..20: mol_type = other DNA
aggaccacctaagcccaatt

SEQ ID NO: 127439 - DNA, 20 bp, synthetic construct
  source 1..20: mol_type = other DNA
gaggaccacctaagcccaat

SEQ ID NO: 127440 - DNA, 20 bp, synthetic construct
  source 1..20: mol_type = other DNA
ggaggaccacctaagcccaa

SEQ ID NO: 127441 - DNA, 20 bp, synthetic construct
  source 1..20: mol_type = other DNA
gggaggaccacctaagccca

SEQ ID NO: 127442 - DNA, 20 bp, synthetic construct
  source 1..20: mol_type = other DNA
tgggaggaccacctaagccc

SEQ ID NO: 127443 - DNA, 20 bp, synthetic construct
  source 1..20: mol_type = other DNA
gtgggaggaccacctaagcc

SEQ ID NO: 127444 - DNA, 20 bp, synthetic construct
  source 1..20: mol_type = other DNA
ggtgggaggaccacctaagc

SEQ ID NO: 127445 - DNA, 20 bp, synthetic construct
  source 1..20: mol_type = other DNA
aggtgggaggaccacctaag

SEQ ID NO: 127446 - DNA, 20 bp, synthetic construct
  source 1..20: mol_type = other DNA
gaggtgggaggaccacctaa

SEQ ID NO: 127447 - DNA, 20 bp, synthetic construct
  source 1..20: mol_type = other DNA
tgaggtgggaggaccaccta

SEQ ID NO: 127448 - DNA, 20 bp, synthetic construct
  source 1..20: mol_type = other DNA
ttgaggtgggaggaccacct

SEQ ID NO: 127449 - DNA, 20 bp, synthetic construct
  source 1..20: mol_type = other DNA
gttgaggtgggaggaccacc

SEQ ID NO: 127450 - DNA, 20 bp, synthetic construct
  source 1..20: mol_type = other DNA
ggttgaggtgggaggaccac

SEQ ID NO: 127451 - DNA, 20 bp, synthetic construct
  source 1..20: mol_type = other DNA
aggttgaggtgggaggacca

SEQ ID NO: 127452 - DNA, 20 bp, synthetic construct
  source 1..20: mol_type = other DNA
gaggttgaggtgggaggacc

SEQ ID NO: 127453 - DNA, 20 bp, synthetic construct
  source 1..20: mol_type = other DNA
ggaggttgaggtgggaggac

SEQ ID NO: 127454 - DNA, 20 bp, synthetic construct
  source 1..20: mol_type = other DNA
gggaggttgaggtgggagga

SEQ ID NO: 127455 - DNA, 20 bp, synthetic construct
  source 1..20: mol_type = other DNA
tgggaggttgaggtgggagg

SEQ ID NO: 127456 - DNA, 20 bp, synthetic construct
  source 1..20: mol_type = other DNA
ttgggaggttgaggtgggag

SEQ ID NO: 127457 - DNA, 20 bp, synthetic construct
  source 1..20: mol_type = other DNA
cttgggaggttgaggtggga

SEQ ID NO: 127458 - DNA, 20 bp, synthetic construct
  source 1..20: mol_type = other DNA
acttgggaggttgaggtggg

SEQ ID NO: 127459 - DNA, 20 bp, synthetic construct
  source 1..20: mol_type = other DNA
tacttgggaggttgaggtgg

SEQ ID NO: 127460 - DNA, 20 bp, synthetic construct
  source 1..20: mol_type = other DNA
ctacttgggaggttgaggtg

SEQ ID NO: 127461 - DNA, 20 bp, synthetic construct
  source 1..20: mol_type = other DNA
gctacttgggaggttgaggt

SEQ ID NO: 127462 - DNA, 20 bp, synthetic construct
  source 1..20: mol_type = other DNA
agctacttgggaggttgagg

SEQ ID NO: 127463 - DNA, 20 bp, synthetic construct
  source 1..20: mol_type = other DNA
cagctacttgggaggttgag

SEQ ID NO: 127464 - DNA, 20 bp, synthetic construct
  source 1..20: mol_type = other DNA
ccagctacttgggaggttga

SEQ ID NO: 127465 - DNA, 20 bp, synthetic construct
  source 1..20: mol_type = other DNA
cccagctacttgggaggttg

SEQ ID NO: 127466 - DNA, 20 bp, synthetic construct
  source 1..20: mol_type = other DNA
tcccagctacttgggaggtt

SEQ ID NO: 127467 - DNA, 20 bp, synthetic construct
  source 1..20: mol_type = other DNA
gtcccagctacttgggaggt

SEQ ID NO: 127468 - DNA, 20 bp, synthetic construct
  source 1..20: mol_type = other DNA
agtcccagctacttgggagg

SEQ ID NO: 127469 - DNA, 20 bp, synthetic construct
  source 1..20: mol_type = other DNA
tagtcccagctacttgggag

SEQ ID NO: 127470 - DNA, 20 bp, synthetic construct
  source 1..20: mol_type = other DNA
ttagtcccagctacttggga

SEQ ID NO: 127471 - DNA, 20 bp, synthetic construct
  source 1..20: mol_type = other DNA
tttagtcccagctacttggg

SEQ ID NO: 127472 - DNA, 20 bp, synthetic construct
  source 1..20: mol_type = other DNA
ctttagtcccagctacttgg

SEQ ID NO: 127473 - DNA, 20 bp, synthetic construct
  source 1..20: mol_type = other DNA
cctttagtcccagctacttg

SEQ ID NO: 127474 - DNA, 20 bp, synthetic construct
  source 1..20: mol_type = other DNA
acctttagtcccagctactt

SEQ ID NO: 127475 - DNA, 20 bp, synthetic construct
  source 1..20: mol_type = other DNA
cacctttagtcccagctact

SEQ ID NO: 127476 - DNA, 20 bp, synthetic construct
  source 1..20: mol_type = other DNA
gcacctttagtcccagctac

SEQ ID NO: 127477 - DNA, 20 bp, synthetic construct
  source 1..20: mol_type = other DNA
cgcacctttagtcccagcta

SEQ ID NO: 127478 - DNA, 20 bp, synthetic construct
  source 1..20: mol_type = other DNA
gcgcacctttagtcccagct

SEQ ID NO: 127479 - DNA, 20 bp, synthetic construct
  source 1..20: mol_type = other DNA
cgcgcacctttagtcccagc

SEQ ID NO: 127480 - DNA, 20 bp, synthetic construct
  source 1..20: mol_type = other DNA
gcgcgcacctttagtcccag

SEQ ID NO: 127481 - DNA, 20 bp, synthetic construct
  source 1..20: mol_type = other DNA
ggcgcgcacctttagtccca

SEQ ID NO: 127482 - DNA, 20 bp, synthetic construct
  source 1..20: mol_type = other DNA
tggcgcgcacctttagtccc

SEQ ID NO: 127483 - DNA, 20 bp, synthetic construct
  source 1..20: mol_type = other DNA
gtggcgcgcacctttagtcc

SEQ ID NO: 127484 - DNA, 20 bp, synthetic construct
  source 1..20: mol_type = other DNA
ggtggcgcgcacctttagtc

SEQ ID NO: 127485 - DNA, 20 bp, synthetic construct
  source 1..20: mol_type = other DNA
tggtggcgcgcacctttagt

SEQ ID NO: 127486 - DNA, 20 bp, synthetic construct
  source 1..20: mol_type = other DNA
atggtggcgcgcacctttag

SEQ ID NO: 127487 - DNA, 20 bp, synthetic construct
  source 1..20: mol_type = other DNA
tatggtggcgcgcaccttta

SEQ ID NO: 127488 - DNA, 20 bp, synthetic construct
  source 1..20: mol_type = other DNA
gtatggtggcgcgcaccttt

SEQ ID NO: 127489 - DNA, 20 bp, synthetic construct
  source 1..20: mol_type = other DNA
ggtatggtggcgcgcacctt

SEQ ID NO: 127490 - DNA, 20 bp, synthetic construct
  source 1..20: mol_type = other DNA
aggtatggtggcgcgcacct

SEQ ID NO: 127491 - DNA, 20 bp, synthetic construct
  source 1..20: mol_type = other DNA
caggtatggtggcgcgcacc

SEQ ID NO: 127492 - DNA, 20 bp, synthetic construct
  source 1..20: mol_type = other DNA
ccaggtatggtggcgcgcac

SEQ ID NO: 127493 - DNA, 20 bp, synthetic construct
  source 1..20: mol_type = other DNA
gccaggtatggtggcgcgca

SEQ ID NO: 127494 - DNA, 20 bp, synthetic construct
  source 1..20: mol_type = other DNA
agccaggtatggtggcgcgc

SEQ ID NO: 127495 - DNA, 20 bp, synthetic construct
  source 1..20: mol_type = other DNA
tagccaggtatggtggcgcg

SEQ ID NO: 127496 - DNA, 20 bp, synthetic construct
  source 1..20: mol_type = other DNA
ttagccaggtatggtggcgc

SEQ ID NO: 127497 - DNA, 20 bp, synthetic construct
  source 1..20: mol_type = other DNA
attagccaggtatggtggcg

SEQ ID NO: 127498 - DNA, 20 bp, synthetic construct
  source 1..20: mol_type = other DNA
aattagccaggtatggtggc

SEQ ID NO: 127499 - DNA, 20 bp, synthetic construct
  source 1..20: mol_type = other DNA
aaattagccaggtatggtgg

SEQ ID NO: 127500 - DNA, 20 bp, synthetic construct
  source 1..20: mol_type = other DNA
aaaattagccaggtatggtg

SEQ ID NO: 127501 - DNA, 20 bp, synthetic construct
  source 1..20: mol_type = other DNA
aaaaattagccaggtatggt

SEQ ID NO: 127502 - DNA, 20 bp, synthetic construct
  source 1..20: mol_type = other DNA
caaaaattagccaggtatgg

SEQ ID NO: 127503 - DNA, 20 bp, synthetic construct
  source 1..20: mol_type = other DNA
acaaaaattagccaggtatg

SEQ ID NO: 127504 - DNA, 20 bp, synthetic construct
  source 1..20: mol_type = other DNA
tacaaaaattagccaggtat

SEQ ID NO: 127505 - DNA, 20 bp, synthetic construct
  source 1..20: mol_type = other DNA
atacaaaaattagccaggta

SEQ ID NO: 127506 - DNA, 20 bp, synthetic construct
  source 1..20: mol_type = other DNA
aatacaaaaattagccaggt

SEQ ID NO: 127507 - DNA, 20 bp, synthetic construct
  source 1..20: mol_type = other DNA
aaatacaaaaattagccagg

SEQ ID NO: 127508 - DNA, 20 bp, synthetic construct
  source 1..20: mol_type = other DNA
aaaatacaaaaattagccag

SEQ ID NO: 127509 - DNA, 20 bp, synthetic construct
  source 1..20: mol_type = other DNA
aaaaatacaaaaattagcca

SEQ ID NO: 127510 - DNA, 20 bp, synthetic construct
  source 1..20: mol_type = other DNA
aaaaaatacaaaaattagcc

SEQ ID NO: 127511 - DNA, 20 bp, synthetic construct
  source 1..20: mol_type = other DNA
caaaaaatacaaaaattagc

SEQ ID NO: 127512 - DNA, 20 bp, synthetic construct
  source 1..20: mol_type = other DNA
acaaaaaatacaaaaattag

SEQ ID NO: 127513 - DNA, 20 bp, synthetic construct
  source 1..20: mol_type = other DNA
tacaaaaaatacaaaaatta

SEQ ID NO: 127514 - DNA, 20 bp, synthetic construct
  source 1..20: mol_type = other DNA
ctacaaaaaatacaaaaatt

SEQ ID NO: 127515 - DNA, 20 bp, synthetic construct
  source 1..20: mol_type = other DNA
tctacaaaaaatacaaaaat

SEQ ID NO: 127516 - DNA, 20 bp, synthetic construct
  source 1..20: mol_type = other DNA
ctctacaaaaaatacaaaaa

SEQ ID NO: 127517 - DNA, 20 bp, synthetic construct
  source 1..20: mol_type = other DNA
tctctacaaaaaatacaaaa

SEQ ID NO: 127518 - DNA, 20 bp, synthetic construct
  source 1..20: mol_type = other DNA
gtctctacaaaaaatacaaa

SEQ ID NO: 127519 - DNA, 20 bp, synthetic construct
  source 1..20: mol_type = other DNA
tgtctctacaaaaaatacaa

SEQ ID NO: 127520 - DNA, 20 bp, synthetic construct
  source 1..20: mol_type = other DNA
ctgtctctacaaaaaataca

SEQ ID NO: 127521 - DNA, 20 bp, synthetic construct
  source 1..20: mol_type = other DNA
cctgtctctacaaaaaatac

SEQ ID NO: 127522 - DNA, 20 bp, synthetic construct
  source 1..20: mol_type = other DNA
ccctgtctctacaaaaaata

SEQ ID NO: 127523 - DNA, 20 bp, synthetic construct
  source 1..20: mol_type = other DNA
accctgtctctacaaaaaat

SEQ ID NO: 127524 - DNA, 20 bp, synthetic construct
  source 1..20: mol_type = other DNA
aaccctgtctctacaaaaaa

SEQ ID NO: 127525 - DNA, 20 bp, synthetic construct
  source 1..20: mol_type = other DNA
aaaccctgtctctacaaaaa

SEQ ID NO: 127526 - DNA, 20 bp, synthetic construct
  source 1..20: mol_type = other DNA
gaaaccctgtctctacaaaa

SEQ ID NO: 127527 - DNA, 20 bp, synthetic construct
  source 1..20: mol_type = other DNA
cgaaaccctgtctctacaaa

SEQ ID NO: 127528 - DNA, 20 bp, synthetic construct
  source 1..20: mol_type = other DNA
tcgaaaccctgtctctacaa

SEQ ID NO: 127529 - DNA, 20 bp, synthetic construct
  source 1..20: mol_type = other DNA
ttcgaaaccctgtctctaca

SEQ ID NO: 127530 - DNA, 20 bp, synthetic construct
  source 1..20: mol_type = other DNA
attcgaaaccctgtctctac

SEQ ID NO: 127531 - DNA, 20 bp, synthetic construct
  source 1..20: mol_type = other DNA
aattcgaaaccctgtctcta

SEQ ID NO: 127532 - DNA, 20 bp, synthetic construct
  source 1..20: mol_type = other DNA
gaattcgaaaccctgtctct

SEQ ID NO: 127533 - DNA, 20 bp, synthetic construct
  source 1..20: mol_type = other DNA
ggaattcgaaaccctgtctc

SEQ ID NO: 127534 - DNA, 20 bp, synthetic construct
  source 1..20: mol_type = other DNA
aggaattcgaaaccctgtct

SEQ ID NO: 127535 - DNA, 20 bp, synthetic construct
  source 1..20: mol_type = other DNA
caggaattcgaaaccctgtc

SEQ ID NO: 127536 - DNA, 20 bp, synthetic construct
  source 1..20: mol_type = other DNA
tcaggaattcgaaaccctgt

SEQ ID NO: 127537 - DNA, 20 bp, synthetic construct
  source 1..20: mol_type = other DNA
ctcaggaattcgaaaccctg

SEQ ID NO: 127538 - DNA, 20 bp, synthetic construct
  source 1..20: mol_type = other DNA
gctcaggaattcgaaaccct

SEQ ID NO: 127539 - DNA, 20 bp, synthetic construct
  source 1..20: mol_type = other DNA
agctcaggaattcgaaaccc

SEQ ID NO: 127540 - DNA, 20 bp, synthetic construct
  source 1..20: mol_type = other DNA
gagctcaggaattcgaaacc

SEQ ID NO: 127541 - DNA, 20 bp, synthetic construct
  source 1..20: mol_type = other DNA
tgagctcaggaattcgaaac

SEQ ID NO: 127542 - DNA, 20 bp, synthetic construct
  source 1..20: mol_type = other DNA
ttgagctcaggaattcgaaa

SEQ ID NO: 127543 - DNA, 20 bp, synthetic construct
  source 1..20: mol_type = other DNA
cttgagctcaggaattcgaa

SEQ ID NO: 127544 - DNA, 20 bp, synthetic construct
  source 1..20: mol_type = other DNA
gcttgagctcaggaattcga

SEQ ID NO: 127545 - DNA, 20 bp, synthetic construct
  source 1..20: mol_type = other DNA
tgcttgagctcaggaattcg

SEQ ID NO: 127546 - DNA, 20 bp, synthetic construct
  source 1..20: mol_type = other DNA
ctgcttgagctcaggaattc

SEQ ID NO: 127547 - DNA, 20 bp, synthetic construct
  source 1..20: mol_type = other DNA
actgcttgagctcaggaatt

SEQ ID NO: 127548 - DNA, 20 bp, synthetic construct
  source 1..20: mol_type = other DNA
gactgcttgagctcaggaat

SEQ ID NO: 127549 - DNA, 20 bp, synthetic construct
  source 1..20: mol_type = other DNA
agactgcttgagctcaggaa

SEQ ID NO: 127550 - DNA, 20 bp, synthetic construct
  source 1..20: mol_type = other DNA
cagactgcttgagctcagga

SEQ ID NO: 127551 - DNA, 20 bp, synthetic construct
  source 1..20: mol_type = other DNA
gcagactgcttgagctcagg

SEQ ID NO: 127552 - DNA, 20 bp, synthetic construct
  source 1..20: mol_type = other DNA
ggcagactgcttgagctcag

SEQ ID NO: 127553 - DNA, 20 bp, synthetic construct
  source 1..20: mol_type = other DNA
aggcagactgcttgagctca

SEQ ID NO: 127554 - DNA, 20 bp, synthetic construct
  source 1..20: mol_type = other DNA
caggcagactgcttgagctc

SEQ ID NO: 127555 - DNA, 20 bp, synthetic construct
  source 1..20: mol_type = other DNA
gcaggcagactgcttgagct

SEQ ID NO: 127556 - DNA, 20 bp, synthetic construct
  source 1..20: mol_type = other DNA
ggcaggcagactgcttgagc

SEQ ID NO: 127557 - DNA, 20 bp, synthetic construct
  source 1..20: mol_type = other DNA
aggcaggcagactgcttgag

SEQ ID NO: 127558 - DNA, 20 bp, synthetic construct
  source 1..20: mol_type = other DNA
aaggcaggcagactgcttga

SEQ ID NO: 127559 - DNA, 20 bp, synthetic construct
  source 1..20: mol_type = other DNA
caaggcaggcagactgcttg

SEQ ID NO: 127560 - DNA, 20 bp, synthetic construct
  source 1..20: mol_type = other DNA
tcaaggcaggcagactgctt

SEQ ID NO: 127561 - DNA, 20 bp, synthetic construct
  source 1..20: mol_type = other DNA
gtcaaggcaggcagactgct

SEQ ID NO: 127562 - DNA, 20 bp, synthetic construct
  source 1..20: mol_type = other DNA
agtcaaggcaggcagactgc

SEQ ID NO: 127563 - DNA, 20 bp, synthetic construct
  source 1..20: mol_type = other DNA
gagtcaaggcaggcagactg

SEQ ID NO: 127564 - DNA, 20 bp, synthetic construct
  source 1..20: mol_type = other DNA
ggagtcaaggcaggcagact

SEQ ID NO: 127565 - DNA, 20 bp, synthetic construct
  source 1..20: mol_type = other DNA
gggagtcaaggcaggcagac

SEQ ID NO: 127566 - DNA, 20 bp, synthetic construct
  source 1..20: mol_type = other DNA
tgggagtcaaggcaggcaga

SEQ ID NO: 127567 - DNA, 20 bp, synthetic construct
  source 1..20: mol_type = other DNA
ttgggagtcaaggcaggcag

SEQ ID NO: 127568 - DNA, 20 bp, synthetic construct
  source 1..20: mol_type = other DNA
cttgggagtcaaggcaggca

SEQ ID NO: 127569 - DNA, 20 bp, synthetic construct
  source 1..20: mol_type = other DNA
ccttgggagtcaaggcaggc

SEQ ID NO: 127570 - DNA, 20 bp, synthetic construct
  source 1..20: mol_type = other DNA
accttgggagtcaaggcagg

SEQ ID NO: 127571 - DNA, 20 bp, synthetic construct
  source 1..20: mol_type = other DNA
caccttgggagtcaaggcag

SEQ ID NO: 127572 - DNA, 20 bp, synthetic construct
  source 1..20: mol_type = other DNA
gcaccttgggagtcaaggca

SEQ ID NO: 127573 - DNA, 20 bp, synthetic construct
  source 1..20: mol_type = other DNA
ggcaccttgggagtcaaggc

SEQ ID NO: 127574 - DNA, 20 bp, synthetic construct
  source 1..20: mol_type = other DNA
tggcaccttgggagtcaagg

SEQ ID NO: 127575 - DNA, 20 bp, synthetic construct
  source 1..20: mol_type = other DNA
ctggcaccttgggagtcaag

SEQ ID NO: 127576 - DNA, 20 bp, synthetic construct
  source 1..20: mol_type = other DNA
cctggcaccttgggagtcaa

SEQ ID NO: 127577 - DNA, 20 bp, synthetic construct
  source 1..20: mol_type = other DNA
tcctggcaccttgggagtca

SEQ ID NO: 127578 - DNA, 20 bp, synthetic construct
  source 1..20: mol_type = other DNA
atcctggcaccttgggagtc

SEQ ID NO: 127579 - DNA, 20 bp, synthetic construct
  source 1..20: mol_type = other DNA
aatcctggcaccttgggagt

SEQ ID NO: 127580 - DNA, 20 bp, synthetic construct
  source 1..20: mol_type = other DNA
taatcctggcaccttgggag

SEQ ID NO: 127581 - DNA, 20 bp, synthetic construct
  source 1..20: mol_type = other DNA
gtaatcctggcaccttggga

SEQ ID NO: 127582 - DNA, 20 bp, synthetic construct
  source 1..20: mol_type = other DNA
tgtaatcctggcaccttggg

SEQ ID NO: 127583 - DNA, 20 bp, synthetic construct
  source 1..20: mol_type = other DNA
ctgtaatcctggcaccttgg

SEQ ID NO: 127584 - DNA, 20 bp, synthetic construct
  source 1..20: mol_type = other DNA
cctgtaatcctggcaccttg

SEQ ID NO: 127585 - DNA, 20 bp, synthetic construct
  source 1..20: mol_type = other DNA
gcctgtaatcctggcacctt

SEQ ID NO: 127586 - DNA, 20 bp, synthetic construct
  source 1..20: mol_type = other DNA
tgcctgtaatcctggcacct

SEQ ID NO: 127587 - DNA, 20 bp, synthetic construct
  source 1..20: mol_type = other DNA
atgcctgtaatcctggcacc

SEQ ID NO: 127588 - DNA, 20 bp, synthetic construct
  source 1..20: mol_type = other DNA
catgcctgtaatcctggcac

SEQ ID NO: 127589 - DNA, 20 bp, synthetic construct
  source 1..20: mol_type = other DNA
tcatgcctgtaatcctggca

SEQ ID NO: 127590 - DNA, 20 bp, synthetic construct
  source 1..20: mol_type = other DNA
ctcatgcctgtaatcctggc

SEQ ID NO: 127591 - DNA, 20 bp, synthetic construct
  source 1..20: mol_type = other DNA
gctcatgcctgtaatcctgg

SEQ ID NO: 127592 - DNA, 20 bp, synthetic construct
  source 1..20: mol_type = other DNA
ggctcatgcctgtaatcctg

SEQ ID NO: 127593 - DNA, 20 bp, synthetic construct
  source 1..20: mol_type = other DNA
tggctcatgcctgtaatcct

SEQ ID NO: 127594 - DNA, 20 bp, synthetic construct
  source 1..20: mol_type = other DNA
gtggctcatgcctgtaatcc

SEQ ID NO: 127595 - DNA, 20 bp, synthetic construct
  source 1..20: mol_type = other DNA
agtggctcatgcctgtaatc

SEQ ID NO: 127596 - DNA, 20 bp, synthetic construct
  source 1..20: mol_type = other DNA
cagtggctcatgcctgtaat

SEQ ID NO: 127597 - DNA, 20 bp, synthetic construct
  source 1..20: mol_type = other DNA
gcagtggctcatgcctgtaa

SEQ ID NO: 127598 - DNA, 20 bp, synthetic construct
  source 1..20: mol_type = other DNA
tgcagtggctcatgcctgta

SEQ ID NO: 127599 - DNA, 20 bp, synthetic construct
  source 1..20: mol_type = other DNA
gtgcagtggctcatgcctgt

SEQ ID NO: 127600 - DNA, 20 bp, synthetic construct
  source 1..20: mol_type = other DNA
agtgcagtggctcatgcctg

SEQ ID NO: 127601 - DNA, 20 bp, synthetic construct
  source 1..20: mol_type = other DNA
gagtgcagtggctcatgcct

SEQ ID NO: 127602 - DNA, 20 bp, synthetic construct
  source 1..20: mol_type = other DNA
tgagtgcagtggctcatgcc

SEQ ID NO: 127603 - DNA, 20 bp, synthetic construct
  source 1..20: mol_type = other DNA
ctgagtgcagtggctcatgc

SEQ ID NO: 127604 - DNA, 20 bp, synthetic construct
  source 1..20: mol_type = other DNA
gctgagtgcagtggctcatg

SEQ ID NO: 127605 - DNA, 20 bp, synthetic construct
  source 1..20: mol_type = other DNA
ggctgagtgcagtggctcat

SEQ ID NO: 127606 - DNA, 20 bp, synthetic construct
  source 1..20: mol_type = other DNA
gggctgagtgcagtggctca

SEQ ID NO: 127607 - DNA, 20 bp, synthetic construct
  source 1..20: mol_type = other DNA
agggctgagtgcagtggctc

SEQ ID NO: 127608 - DNA, 20 bp, synthetic construct
  source 1..20: mol_type = other DNA
gagggctgagtgcagtggct

SEQ ID NO: 127609 - DNA, 20 bp, synthetic construct
  source 1..20: mol_type = other DNA
tgagggctgagtgcagtggc

SEQ ID NO: 127610 - DNA, 20 bp, synthetic construct
  source 1..20: mol_type = other DNA
gtgagggctgagtgcagtgg

SEQ ID NO: 127611 - DNA, 20 bp, synthetic construct
  source 1..20: mol_type = other DNA
tgtgagggctgagtgcagtg

SEQ ID NO: 127612 - DNA, 20 bp, synthetic construct
  source 1..20: mol_type = other DNA
ctgtgagggctgagtgcagt

SEQ ID NO: 127613 - DNA, 20 bp, synthetic construct
  source 1..20: mol_type = other DNA
actgtgagggctgagtgcag

SEQ ID NO: 127614 - DNA, 20 bp, synthetic construct
  source 1..20: mol_type = other DNA
aactgtgagggctgagtgca

SEQ ID NO: 127615 - DNA, 20 bp, synthetic construct
  source 1..20: mol_type = other DNA
aaactgtgagggctgagtgc

SEQ ID NO: 127616 - DNA, 20 bp, synthetic construct
  source 1..20: mol_type = other DNA
aaaactgtgagggctgagtg

SEQ ID NO: 127617 - DNA, 20 bp, synthetic construct
  source 1..20: mol_type = other DNA
taaaactgtgagggctgagt

SEQ ID NO: 127618 - DNA, 20 bp, synthetic construct
  source 1..20: mol_type = other DNA
ttaaaactgtgagggctgag

SEQ ID NO: 127619 - DNA, 20 bp, synthetic construct
  source 1..20: mol_type = other DNA
attaaaactgtgagggctga

SEQ ID NO: 127620 - DNA, 20 bp, synthetic construct
  source 1..20: mol_type = other DNA
aattaaaactgtgagggctg

SEQ ID NO: 127621 - DNA, 20 bp, synthetic construct
  source 1..20: mol_type = other DNA
taattaaaactgtgagggct

SEQ ID NO: 127622 - DNA, 20 bp, synthetic construct
  source 1..20: mol_type = other DNA
gtaattaaaactgtgagggc

SEQ ID NO: 127623 - DNA, 20 bp, synthetic construct
  source 1..20: mol_type = other DNA
tgtaattaaaactgtgaggg

SEQ ID NO: 127624 - DNA, 20 bp, synthetic construct
  source 1..20: mol_type = other DNA
ctgtaattaaaactgtgagg

SEQ ID NO: 127625 - DNA, 20 bp, synthetic construct
  source 1..20: mol_type = other DNA
actgtaattaaaactgtgag

SEQ ID NO: 127626 - DNA, 20 bp, synthetic construct
  source 1..20: mol_type = other DNA
aactgtaattaaaactgtga

SEQ ID NO: 127627 - DNA, 20 bp, synthetic construct
  source 1..20: mol_type = other DNA
aaactgtaattaaaactgtg

SEQ ID NO: 127628 - DNA, 20 bp, synthetic construct
  source 1..20: mol_type = other DNA
aaaactgtaattaaaactgt

SEQ ID NO: 127629 - DNA, 20 bp, synthetic construct
  source 1..20: mol_type = other DNA
aaaaactgtaattaaaactg

SEQ ID NO: 127630 - DNA, 20 bp, synthetic construct
  source 1..20: mol_type = other DNA
gaaaaactgtaattaaaact

SEQ ID NO: 127631 - DNA, 20 bp, synthetic construct
  source 1..20: mol_type = other DNA
ggaaaaactgtaattaaaac

SEQ ID NO: 127632 - DNA, 20 bp, synthetic construct
  source 1..20: mol_type = other DNA
gggaaaaactgtaattaaaa

SEQ ID NO: 127633 - DNA, 20 bp, synthetic construct
  source 1..20: mol_type = other DNA
agggaaaaactgtaattaaa

SEQ ID NO: 127634 - DNA, 20 bp, synthetic construct
  source 1..20: mol_type = other DNA
aagggaaaaactgtaattaa

SEQ ID NO: 127635 - DNA, 20 bp, synthetic construct
  source 1..20: mol_type = other DNA
taagggaaaaactgtaatta

SEQ ID NO: 127636 - DNA, 20 bp, synthetic construct
  source 1..20: mol_type = other DNA
ctaagggaaaaactgtaatt

SEQ ID NO: 127637 - DNA, 20 bp, synthetic construct
  source 1..20: mol_type = other DNA
actaagggaaaaactgtaat

SEQ ID NO: 127638 - DNA, 20 bp, synthetic construct
  source 1..20: mol_type = other DNA
aactaagggaaaaactgtaa

SEQ ID NO: 127639 - DNA, 20 bp, synthetic construct
  source 1..20: mol_type = other DNA
aaactaagggaaaaactgta

SEQ ID NO: 127640 - DNA, 20 bp, synthetic construct
  source 1..20: mol_type = other DNA
aaaactaagggaaaaactgt

SEQ ID NO: 127641 - DNA, 20 bp, synthetic construct
  source 1..20: mol_type = other DNA
aaaaactaagggaaaaactg

SEQ ID NO: 127642 - DNA, 20 bp, synthetic construct
  source 1..20: mol_type = other DNA
caaaaactaagggaaaaact

SEQ ID NO: 127643 - DNA, 20 bp, synthetic construct
  source 1..20: mol_type = other DNA
acaaaaactaagggaaaaac

SEQ ID NO: 127644 - DNA, 20 bp, synthetic construct
  source 1..20: mol_type = other DNA
gacaaaaactaagggaaaaa

SEQ ID NO: 127645 - DNA, 20 bp, synthetic construct
  source 1..20: mol_type = other DNA
agacaaaaactaagggaaaa

SEQ ID NO: 127646 - DNA, 20 bp, synthetic construct
  source 1..20: mol_type = other DNA
aagacaaaaactaagggaaa

SEQ ID NO: 127647 - DNA, 20 bp, synthetic construct
  source 1..20: mol_type = other DNA
caagacaaaaactaagggaa

SEQ ID NO: 127648 - DNA, 20 bp, synthetic construct
  source 1..20: mol_type = other DNA
acaagacaaaaactaaggga

SEQ ID NO: 127649 - DNA, 20 bp, synthetic construct
  source 1..20: mol_type = other DNA
aacaagacaaaaactaaggg

SEQ ID NO: 127650 - DNA, 20 bp, synthetic construct
  source 1..20: mol_type = other DNA
gaacaagacaaaaactaagg

SEQ ID NO: 127651 - DNA, 20 bp, synthetic construct
  source 1..20: mol_type = other DNA
tgaacaagacaaaaactaag

SEQ ID NO: 127652 - DNA, 20 bp, synthetic construct
  source 1..20: mol_type = other DNA
atgaacaagacaaaaactaa

SEQ ID NO: 127653 - DNA, 20 bp, synthetic construct
  source 1..20: mol_type = other DNA
tatgaacaagacaaaaacta

SEQ ID NO: 127654 - DNA, 20 bp, synthetic construct
  source 1..20: mol_type = other DNA
atatgaacaagacaaaaact

SEQ ID NO: 127655 - DNA, 20 bp, synthetic construct
  source 1..20: mol_type = other DNA
gatatgaacaagacaaaaac

SEQ ID NO: 127656 - DNA, 20 bp, synthetic construct
  source 1..20: mol_type = other DNA
ggatatgaacaagacaaaaa

SEQ ID NO: 127657 - DNA, 20 bp, synthetic construct
  source 1..20: mol_type = other DNA
tggatatgaacaagacaaaa

SEQ ID NO: 127658 - DNA, 20 bp, synthetic construct
  source 1..20: mol_type = other DNA
ctggatatgaacaagacaaa

SEQ ID NO: 127659 - DNA, 20 bp, synthetic construct
  source 1..20: mol_type = other DNA
gctggatatgaacaagacaa

SEQ ID NO: 127660 - DNA, 20 bp, synthetic construct
  source 1..20: mol_type = other DNA
agctggatatgaacaagaca

SEQ ID NO: 127661 - DNA, 20 bp, synthetic construct
  source 1..20: mol_type = other DNA
aagctggatatgaacaagac

SEQ ID NO: 127662 - DNA, 20 bp, synthetic construct
  source 1..20: mol_type = other DNA
caagctggatatgaacaaga

SEQ ID NO: 127663 - DNA, 20 bp, synthetic construct
  source 1..20: mol_type = other DNA
acaagctggatatgaacaag

SEQ ID NO: 127664 - DNA, 20 bp, synthetic construct
  source 1..20: mol_type = other DNA
gacaagctggatatgaacaa

SEQ ID NO: 127665 - DNA, 20 bp, synthetic construct
  source 1..20: mol_type = other DNA
agacaagctggatatgaaca

SEQ ID NO: 127666 - DNA, 20 bp, synthetic construct
  source 1..20: mol_type = other DNA
aagacaagctggatatgaac

SEQ ID NO: 127667 - DNA, 20 bp, synthetic construct
  source 1..20: mol_type = other DNA
caagacaagctggatatgaa

SEQ ID NO: 127668 - DNA, 20 bp, synthetic construct
  source 1..20: mol_type = other DNA
acaagacaagctggatatga

SEQ ID NO: 127669 - DNA, 20 bp, synthetic construct
  source 1..20: mol_type = other DNA
tacaagacaagctggatatg

SEQ ID NO: 127670 - DNA, 20 bp, synthetic construct
  source 1..20: mol_type = other DNA
atacaagacaagctggatat

SEQ ID NO: 127671 - DNA, 20 bp, synthetic construct
  source 1..20: mol_type = other DNA
aatacaagacaagctggata

SEQ ID NO: 127672 - DNA, 20 bp, synthetic construct
  source 1..20: mol_type = other DNA
aaatacaagacaagctggat

SEQ ID NO: 127673 - DNA, 20 bp, synthetic construct
  source 1..20: mol_type = other DNA
aaaatacaagacaagctgga

SEQ ID NO: 127674 - DNA, 20 bp, synthetic construct
  source 1..20: mol_type = other DNA
aaaaatacaagacaagctgg

SEQ ID NO: 127675 - DNA, 20 bp, synthetic construct
  source 1..20: mol_type = other DNA
aaaaaatacaagacaagctg

SEQ ID NO: 127676 - DNA, 20 bp, synthetic construct
  source 1..20: mol_type = other DNA
aaaaaaatacaagacaagct

SEQ ID NO: 127677 - DNA, 20 bp, synthetic construct
  source 1..20: mol_type = other DNA
gaaaaaaatacaagacaagc

SEQ ID NO: 127678 - DNA, 20 bp, synthetic construct
  source 1..20: mol_type = other DNA
ggaaaaaaatacaagacaag

SEQ ID NO: 127679 - DNA, 20 bp, synthetic construct
  source 1..20: mol_type = other DNA
gggaaaaaaatacaagacaa

SEQ ID NO: 127680 - DNA, 20 bp, synthetic construct
  source 1..20: mol_type = other DNA
tgggaaaaaaatacaagaca

SEQ ID NO: 127681 - DNA, 20 bp, synthetic construct
  source 1..20: mol_type = other DNA
gtgggaaaaaaatacaagac

SEQ ID NO: 127682 - DNA, 20 bp, synthetic construct
  source 1..20: mol_type = other DNA
cgtgggaaaaaaatacaaga

SEQ ID NO: 127683 - DNA, 20 bp, synthetic construct
  source 1..20: mol_type = other DNA
tcgtgggaaaaaaatacaag

SEQ ID NO: 127684 - DNA, 20 bp, synthetic construct
  source 1..20: mol_type = other DNA
atcgtgggaaaaaaatacaa

SEQ ID NO: 127685 - DNA, 20 bp, synthetic construct
  source 1..20: mol_type = other DNA
gatcgtgggaaaaaaataca

SEQ ID NO: 127686 - DNA, 20 bp, synthetic construct
  source 1..20: mol_type = other DNA
agatcgtgggaaaaaaatac

SEQ ID NO: 127687 - DNA, 20 bp, synthetic construct
  source 1..20: mol_type = other DNA
cagatcgtgggaaaaaaata

SEQ ID NO: 127688 - DNA, 20 bp, synthetic construct
  source 1..20: mol_type = other DNA
tcagatcgtgggaaaaaaat

SEQ ID NO: 127689 - DNA, 20 bp, synthetic construct
  source 1..20: mol_type = other DNA
ttcagatcgtgggaaaaaaa

SEQ ID NO: 127690 - DNA, 20 bp, synthetic construct
  source 1..20: mol_type = other DNA
attcagatcgtgggaaaaaa

SEQ ID NO: 127691 - DNA, 20 bp, synthetic construct
  source 1..20: mol_type = other DNA
aattcagatcgtgggaaaaa

SEQ ID NO: 127692 - DNA, 20 bp, synthetic construct
  source 1..20: mol_type = other DNA
aaattcagatcgtgggaaaa

SEQ ID NO: 127693 - DNA, 20 bp, synthetic construct
  source 1..20: mol_type = other DNA
aaaattcagatcgtgggaaa

SEQ ID NO: 127694 - DNA, 20 bp, synthetic construct
  source 1..20: mol_type = other DNA
caaaattcagatcgtgggaa

SEQ ID NO: 127695 - DNA, 20 bp, synthetic construct
  source 1..20: mol_type = other DNA
gcaaaattcagatcgtggga

SEQ ID NO: 127696 - DNA, 20 bp, synthetic construct
  source 1..20: mol_type = other DNA
agcaaaattcagatcgtggg

SEQ ID NO: 127697 - DNA, 20 bp, synthetic construct
  source 1..20: mol_type = other DNA
cagcaaaattcagatcgtgg

SEQ ID NO: 127698 - DNA, 20 bp, synthetic construct
  source 1..20: mol_type = other DNA
tcagcaaaattcagatcgtg

SEQ ID NO: 127699 - DNA, 20 bp, synthetic construct
  source 1..20: mol_type = other DNA
gtcagcaaaattcagatcgt

SEQ ID NO: 127700 - DNA, 20 bp, synthetic construct
  source 1..20: mol_type = other DNA
agtcagcaaaattcagatcg

SEQ ID NO: 127701 - DNA, 20 bp, synthetic construct
  source 1..20: mol_type = other DNA
cagtcagcaaaattcagatc

SEQ ID NO: 127702 - DNA, 20 bp, synthetic construct
  source 1..20: mol_type = other DNA
acagtcagcaaaattcagat

SEQ ID NO: 127703 - DNA, 20 bp, synthetic construct
  source 1..20: mol_type = other DNA
tacagtcagcaaaattcaga

SEQ ID NO: 127704 - DNA, 20 bp, synthetic construct
  source 1..20: mol_type = other DNA
atacagtcagcaaaattcag

SEQ ID NO: 127705 - DNA, 20 bp, synthetic construct
  source 1..20: mol_type = other DNA
gatacagtcagcaaaattca

SEQ ID NO: 127706 - DNA, 20 bp, synthetic construct
  source 1..20: mol_type = other DNA
ggatacagtcagcaaaattc

SEQ ID NO: 127707 - DNA, 20 bp, synthetic construct
  source 1..20: mol_type = other DNA
gggatacagtcagcaaaatt

SEQ ID NO: 127708 - DNA, 20 bp, synthetic construct
  source 1..20: mol_type = other DNA
agggatacagtcagcaaaat

SEQ ID NO: 127709 - DNA, 20 bp, synthetic construct
  source 1..20: mol_type = other DNA
cagggatacagtcagcaaaa

SEQ ID NO: 127710 - DNA, 20 bp, synthetic construct
  source 1..20: mol_type = other DNA
acagggatacagtcagcaaa

SEQ ID NO: 127711 - DNA, 20 bp, synthetic construct
  source 1..20: mol_type = other DNA
cacagggatacagtcagcaa

SEQ ID NO: 127712 - DNA, 20 bp, synthetic construct
  source 1..20: mol_type = other DNA
acacagggatacagtcagca

SEQ ID NO: 127713 - DNA, 20 bp, synthetic construct
  source 1..20: mol_type = other DNA
aacacagggatacagtcagc

SEQ ID NO: 127714 - DNA, 20 bp, synthetic construct
  source 1..20: mol_type = other DNA
caacacagggatacagtcag

SEQ ID NO: 127715 - DNA, 20 bp, synthetic construct
  source 1..20: mol_type = other DNA
tcaacacagggatacagtca

SEQ ID NO: 127716 - DNA, 20 bp, synthetic construct
  source 1..20: mol_type = other DNA
atcaacacagggatacagtc

SEQ ID NO: 127717 - DNA, 20 bp, synthetic construct
  source 1..20: mol_type = other DNA
tatcaacacagggatacagt

SEQ ID NO: 127718 - DNA, 20 bp, synthetic construct
  source 1..20: mol_type = other DNA
atatcaacacagggatacag

SEQ ID NO: 127719 - DNA, 20 bp, synthetic construct
  source 1..20: mol_type = other DNA
aatatcaacacagggataca

SEQ ID NO: 127720 - DNA, 20 bp, synthetic construct
  source 1..20: mol_type = other DNA
aaatatcaacacagggatac

SEQ ID NO: 127721 - DNA, 20 bp, synthetic construct
  source 1..20: mol_type = other DNA
taaatatcaacacagggata

SEQ ID NO: 127722 - DNA, 20 bp, synthetic construct
  source 1..20: mol_type = other DNA
ttaaatatcaacacagggat

SEQ ID NO: 127723 - DNA, 20 bp, synthetic construct
  source 1..20: mol_type = other DNA
tttaaatatcaacacaggga

SEQ ID NO: 127724 - DNA, 20 bp, synthetic construct
  source 1..20: mol_type = other DNA
ctttaaatatcaacacaggg

SEQ ID NO: 127725 - DNA, 20 bp, synthetic construct
  source 1..20: mol_type = other DNA
actttaaatatcaacacagg

SEQ ID NO: 127726 - DNA, 20 bp, synthetic construct
  source 1..20: mol_type = other DNA
tactttaaatatcaacacag

SEQ ID NO: 127727 - DNA, 20 bp, synthetic construct
  source 1..20: mol_type = other DNA
ctactttaaatatcaacaca

SEQ ID NO: 127728 - DNA, 20 bp, synthetic construct
  source 1..20: mol_type = other DNA
tctactttaaatatcaacac

SEQ ID NO: 127729 - DNA, 20 bp, synthetic construct
  source 1..20: mol_type = other DNA
gtctactttaaatatcaaca

SEQ ID NO: 127730 - DNA, 20 bp, synthetic construct
  source 1..20: mol_type = other DNA
agtctactttaaatatcaac

SEQ ID NO: 127731 - DNA, 20 bp, synthetic construct
  source 1..20: mol_type = other DNA
aagtctactttaaatatcaa

SEQ ID NO: 127732 - DNA, 20 bp, synthetic construct
  source 1..20: mol_type = other DNA
gaagtctactttaaatatca

SEQ ID NO: 127733 - DNA, 20 bp, synthetic construct
  source 1..20: mol_type = other DNA
agaagtctactttaaatatc

SEQ ID NO: 127734 - DNA, 20 bp, synthetic construct
  source 1..20: mol_type = other DNA
cagaagtctactttaaatat

SEQ ID NO: 127735 - DNA, 20 bp, synthetic construct
  source 1..20: mol_type = other DNA
acagaagtctactttaaata

SEQ ID NO: 127736 - DNA, 20 bp, synthetic construct
  source 1..20: mol_type = other DNA
gacagaagtctactttaaat

SEQ ID NO: 127737 - DNA, 20 bp, synthetic construct
  source 1..20: mol_type = other DNA
ggacagaagtctactttaaa

SEQ ID NO: 127738 - DNA, 20 bp, synthetic construct
  source 1..20: mol_type = other DNA
gggacagaagtctactttaa

SEQ ID NO: 127739 - DNA, 20 bp, synthetic construct
  source 1..20: mol_type = other DNA
ggggacagaagtctacttta

SEQ ID NO: 127740 - DNA, 20 bp, synthetic construct
  source 1..20: mol_type = other DNA
aggggacagaagtctacttt

SEQ ID NO: 127741 - DNA, 20 bp, synthetic construct
  source 1..20: mol_type = other DNA
caggggacagaagtctactt

SEQ ID NO: 127742 - DNA, 20 bp, synthetic construct
  source 1..20: mol_type = other DNA
acaggggacagaagtctact

SEQ ID NO: 127743 - DNA, 20 bp, synthetic construct
  source 1..20: mol_type = other DNA
tacaggggacagaagtctac

SEQ ID NO: 127744 - DNA, 20 bp, synthetic construct
  source 1..20: mol_type = other DNA
ttacaggggacagaagtcta

SEQ ID NO: 127745 - DNA, 20 bp, synthetic construct
  source 1..20: mol_type = other DNA
attacaggggacagaagtct

SEQ ID NO: 127746 - DNA, 20 bp, synthetic construct
  source 1..20: mol_type = other DNA
gattacaggggacagaagtc

SEQ ID NO: 127747 - DNA, 20 bp, synthetic construct
  source 1..20: mol_type = other DNA
agattacaggggacagaagt

SEQ ID NO: 127748 - DNA, 20 bp, synthetic construct
  source 1..20: mol_type = other DNA
aagattacaggggacagaag

SEQ ID NO: 127749 - DNA, 20 bp, synthetic construct
  source 1..20: mol_type = other DNA
aaagattacaggggacagaa

SEQ ID NO: 127750 - DNA, 20 bp, synthetic construct
  source 1..20: mol_type = other DNA
caaagattacaggggacaga

SEQ ID NO: 127751 - DNA, 20 bp, synthetic construct
  source 1..20: mol_type = other DNA
acaaagattacaggggacag

SEQ ID NO: 127752 - DNA, 20 bp, synthetic construct
  source 1..20: mol_type = other DNA
tacaaagattacaggggaca

SEQ ID NO: 127753 - DNA, 20 bp, synthetic construct
  source 1..20: mol_type = other DNA
ttacaaagattacaggggac

SEQ ID NO: 127754 - DNA, 20 bp, synthetic construct
  source 1..20: mol_type = other DNA
tttacaaagattacagggga

SEQ ID NO: 127755 - DNA, 20 bp, synthetic construct
  source 1..20: mol_type = other DNA
gtttacaaagattacagggg

SEQ ID NO: 127756 - DNA, 20 bp, synthetic construct
  source 1..20: mol_type = other DNA
agtttacaaagattacaggg

SEQ ID NO: 127757 - DNA, 20 bp, synthetic construct
  source 1..20: mol_type = other DNA
cagtttacaaagattacagg

SEQ ID NO: 127758 - DNA, 20 bp, synthetic construct
  source 1..20: mol_type = other DNA
tcagtttacaaagattacag

SEQ ID NO: 127759 - DNA, 20 bp, synthetic construct
  source 1..20: mol_type = other DNA
atcagtttacaaagattaca

SEQ ID NO: 127760 - DNA, 20 bp, synthetic construct
  source 1..20: mol_type = other DNA
tatcagtttacaaagattac

SEQ ID NO: 127761 - DNA, 20 bp, synthetic construct
  source 1..20: mol_type = other DNA
ctatcagtttacaaagatta

SEQ ID NO: 127762 - DNA, 20 bp, synthetic construct
  source 1..20: mol_type = other DNA
actatcagtttacaaagatt

SEQ ID NO: 127763 - DNA, 20 bp, synthetic construct
  source 1..20: mol_type = other DNA
tactatcagtttacaaagat

SEQ ID NO: 127764 - DNA, 20 bp, synthetic construct
  source 1..20: mol_type = other DNA
ttactatcagtttacaaaga

SEQ ID NO: 127765 - DNA, 20 bp, synthetic construct
  source 1..20: mol_type = other DNA
tttactatcagtttacaaag

SEQ ID NO: 127766 - DNA, 20 bp, synthetic construct
  source 1..20: mol_type = other DNA
atttactatcagtttacaaa

SEQ ID NO: 127767 - DNA, 20 bp, synthetic construct
  source 1..20: mol_type = other DNA
tatttactatcagtttacaa

SEQ ID NO: 127768 - DNA, 20 bp, synthetic construct
  source 1..20: mol_type = other DNA
ttatttactatcagtttaca

SEQ ID NO: 127769 - DNA, 20 bp, synthetic construct
  source 1..20: mol_type = other DNA
attatttactatcagtttac

SEQ ID NO: 127770 - DNA, 20 bp, synthetic construct
  source 1..20: mol_type = other DNA
cattatttactatcagttta

SEQ ID NO: 127771 - DNA, 20 bp, synthetic construct
  source 1..20: mol_type = other DNA
tcattatttactatcagttt

SEQ ID NO: 127772 - DNA, 20 bp, synthetic construct
  source 1..20: mol_type = other DNA
ttcattatttactatcagtt

SEQ ID NO: 127773 - DNA, 20 bp, synthetic construct
  source 1..20: mol_type = other DNA
cttcattatttactatcagt

SEQ ID NO: 127774 - DNA, 20 bp, synthetic construct
  source 1..20: mol_type = other DNA
ccttcattatttactatcag

SEQ ID NO: 127775 - DNA, 20 bp, synthetic construct
  source 1..20: mol_type = other DNA
gccttcattatttactatca

SEQ ID NO: 127776 - DNA, 20 bp, synthetic construct
  source 1..20: mol_type = other DNA
agccttcattatttactatc

SEQ ID NO: 127777 - DNA, 20 bp, synthetic construct
  source 1..20: mol_type = other DNA
aagccttcattatttactat

SEQ ID NO: 127778 - DNA, 20 bp, synthetic construct
  source 1..20: mol_type = other DNA
caagccttcattatttacta

SEQ ID NO: 127779 - DNA, 20 bp, synthetic construct
  source 1..20: mol_type = other DNA
tcaagccttcattatttact

SEQ ID NO: 127780 - DNA, 20 bp, synthetic construct
  source 1..20: mol_type = other DNA
atcaagccttcattatttac

SEQ ID NO: 127781 - DNA, 20 bp, synthetic construct
  source 1..20: mol_type = other DNA
gatcaagccttcattattta

SEQ ID NO: 127782 - DNA, 20 bp, synthetic construct
  source 1..20: mol_type = other DNA
tgatcaagccttcattattt

SEQ ID NO: 127783 - DNA, 20 bp, synthetic construct
  source 1..20: mol_type = other DNA
ctgatcaagccttcattatt

SEQ ID NO: 127784 - DNA, 20 bp, synthetic construct
  source 1..20: mol_type = other DNA
tctgatcaagccttcattat

SEQ ID NO: 127785 - DNA, 20 bp, synthetic construct
  source 1..20: mol_type = other DNA
atctgatcaagccttcatta

SEQ ID NO: 127786 - DNA, 20 bp, synthetic construct
  source 1..20: mol_type = other DNA
aatctgatcaagccttcatt

SEQ ID NO: 127787 - DNA, 20 bp, synthetic construct
  source 1..20: mol_type = other DNA
caatctgatcaagccttcat

SEQ ID NO: 127788 - DNA, 20 bp, synthetic construct
  source 1..20: mol_type = other DNA
ccaatctgatcaagccttca

SEQ ID NO: 127789 - DNA, 20 bp, synthetic construct
  source 1..20: mol_type = other DNA
cccaatctgatcaagccttc

SEQ ID NO: 127790 - DNA, 20 bp, synthetic construct
  source 1..20: mol_type = other DNA
acccaatctgatcaagcctt

SEQ ID NO: 127791 - DNA, 20 bp, synthetic construct
  source 1..20: mol_type = other DNA
aacccaatctgatcaagcct

SEQ ID NO: 127792 - DNA, 20 bp, synthetic construct
  source 1..20: mol_type = other DNA
aaacccaatctgatcaagcc

SEQ ID NO: 127793 - DNA, 20 bp, synthetic construct
  source 1..20: mol_type = other DNA
aaaacccaatctgatcaagc

SEQ ID NO: 127794 - DNA, 20 bp, synthetic construct
  source 1..20: mol_type = other DNA
aaaaacccaatctgatcaag

SEQ ID NO: 127795 - DNA, 20 bp, synthetic construct
  source 1..20: mol_type = other DNA
aaaaaacccaatctgatcaa

SEQ ID NO: 127796 - DNA, 20 bp, synthetic construct
  source 1..20: mol_type = other DNA
aaaaaaacccaatctgatca

SEQ ID NO: 127797 - DNA, 20 bp, synthetic construct
  source 1..20: mol_type = other DNA
aaaaaaaacccaatctgatc

SEQ ID NO: 127798 - DNA, 20 bp, synthetic construct
  source 1..20: mol_type = other DNA
aaaaaaaaacccaatctgat

SEQ ID NO: 127799 - DNA, 20 bp, synthetic construct
  source 1..20: mol_type = other DNA
aaaaaaaaaacccaatctga

SEQ ID NO: 127800 - DNA, 20 bp, synthetic construct
  source 1..20: mol_type = other DNA
aaaaaaaaaaacccaatctg

SEQ ID NO: 127801 - DNA, 20 bp, synthetic construct
  source 1..20: mol_type = other DNA
aaaaaaaaaaaacccaatct

SEQ ID NO: 127802 - DNA, 20 bp, synthetic construct
  source 1..20: mol_type = other DNA
aaaaaaaaaaaaacccaatc

SEQ ID NO: 127803 - DNA, 20 bp, synthetic construct
  source 1..20: mol_type = other DNA
aaaaaaaaaaaaaacccaat

SEQ ID NO: 127804 - DNA, 20 bp, synthetic construct
  source 1..20: mol_type = other DNA
gaaaaaaaaaaaaaacccaa

SEQ ID NO: 127805 - DNA, 20 bp, synthetic construct
  source 1..20: mol_type = other DNA
ggaaaaaaaaaaaaaaccca

SEQ ID NO: 127806 - DNA, 20 bp, synthetic construct
  source 1..20: mol_type = other DNA
gggaaaaaaaaaaaaaaccc

SEQ ID NO: 127807 - DNA, 20 bp, synthetic construct
  source 1..20: mol_type = other DNA
ggggaaaaaaaaaaaaaacc

SEQ ID NO: 127808 - DNA, 20 bp, synthetic construct
  source 1..20: mol_type = other DNA
tggggaaaaaaaaaaaaaac

SEQ ID NO: 127809 - DNA, 20 bp, synthetic construct
  source 1..20: mol_type = other DNA
ttggggaaaaaaaaaaaaaa

SEQ ID NO: 127810 - DNA, 20 bp, synthetic construct
  source 1..20: mol_type = other DNA
attggggaaaaaaaaaaaaa

SEQ ID NO: 127811 - DNA, 20 bp, synthetic construct
  source 1..20: mol_type = other DNA
cattggggaaaaaaaaaaaa

SEQ ID NO: 127812 - DNA, 20 bp, synthetic construct
  source 1..20: mol_type = other DNA
acattggggaaaaaaaaaaa

SEQ ID NO: 127813 - DNA, 20 bp, synthetic construct
  source 1..20: mol_type = other DNA
aacattggggaaaaaaaaaa

SEQ ID NO: 127814 - DNA, 20 bp, synthetic construct
  source 1..20: mol_type = other DNA
aaacattggggaaaaaaaaa

SEQ ID NO: 127815 - DNA, 20 bp, synthetic construct
  source 1..20: mol_type = other DNA
gaaacattggggaaaaaaaa

SEQ ID NO: 127816 - DNA, 20 bp, synthetic construct
  source 1..20: mol_type = other DNA
tgaaacattggggaaaaaaa

SEQ ID NO: 127817 - DNA, 20 bp, synthetic construct
  source 1..20: mol_type = other DNA
gtgaaacattggggaaaaaa

SEQ ID NO: 127818 - DNA, 20 bp, synthetic construct
  source 1..20: mol_type = other DNA
tgtgaaacattggggaaaaa

SEQ ID NO: 127819 - DNA, 20 bp, synthetic construct
  source 1..20: mol_type = other DNA
ctgtgaaacattggggaaaa

SEQ ID NO: 127820 - DNA, 20 bp, synthetic construct
  source 1..20: mol_type = other DNA
tctgtgaaacattggggaaa

SEQ ID NO: 127821 - DNA, 20 bp, synthetic construct
  source 1..20: mol_type = other DNA
atctgtgaaacattggggaa

SEQ ID NO: 127822 - DNA, 20 bp, synthetic construct
  source 1..20: mol_type = other DNA
catctgtgaaacattgggga

SEQ ID NO: 127823 - DNA, 20 bp, synthetic construct
  source 1..20: mol_type = other DNA
acatctgtgaaacattgggg

SEQ ID NO: 127824 - DNA, 20 bp, synthetic construct
  source 1..20: mol_type = other DNA
cacatctgtgaaacattggg

SEQ ID NO: 127825 - DNA, 20 bp, synthetic construct
  source 1..20: mol_type = other DNA
acacatctgtgaaacattgg

SEQ ID NO: 127826 - DNA, 20 bp, synthetic construct
  source 1..20: mol_type = other DNA
cacacatctgtgaaacattg

SEQ ID NO: 127827 - DNA, 20 bp, synthetic construct
  source 1..20: mol_type = other DNA
acacacatctgtgaaacatt

SEQ ID NO: 127828 - DNA, 20 bp, synthetic construct
  source 1..20: mol_type = other DNA
tacacacatctgtgaaacat

SEQ ID NO: 127829 - DNA, 20 bp, synthetic construct
  source 1..20: mol_type = other DNA
gtacacacatctgtgaaaca

SEQ ID NO: 127830 - DNA, 20 bp, synthetic construct
  source 1..20: mol_type = other DNA
agtacacacatctgtgaaac

SEQ ID NO: 127831 - DNA, 20 bp, synthetic construct
  source 1..20: mol_type = other DNA
aagtacacacatctgtgaaa

SEQ ID NO: 127832 - DNA, 20 bp, synthetic construct
  source 1..20: mol_type = other DNA
aaagtacacacatctgtgaa

SEQ ID NO: 127833 - DNA, 20 bp, synthetic construct
  source 1..20: mol_type = other DNA
gaaagtacacacatctgtga

SEQ ID NO: 127834 - DNA, 20 bp, synthetic construct
  source 1..20: mol_type = other DNA
tgaaagtacacacatctgtg

SEQ ID NO: 127835 - DNA, 20 bp, synthetic construct
  source 1..20: mol_type = other DNA
ctgaaagtacacacatctgt

SEQ ID NO: 127836 - DNA, 20 bp, synthetic construct
  source 1..20: mol_type = other DNA
actgaaagtacacacatctg

SEQ ID NO: 127837 - DNA, 20 bp, synthetic construct
  source 1..20: mol_type = other DNA
cactgaaagtacacacatct

SEQ ID NO: 127838 - DNA, 20 bp, synthetic construct
  source 1..20: mol_type = other DNA
tcactgaaagtacacacatc

SEQ ID NO: 127839 - DNA, 20 bp, synthetic construct
  source 1..20: mol_type = other DNA
ctcactgaaagtacacacat

SEQ ID NO: 127840 - DNA, 20 bp, synthetic construct
  source 1..20: mol_type = other DNA
cctcactgaaagtacacaca

SEQ ID NO: 127841 - DNA, 20 bp, synthetic construct
  source 1..20: mol_type = other DNA
tcctcactgaaagtacacac

SEQ ID NO: 127842 - DNA, 20 bp, synthetic construct
  source 1..20: mol_type = other DNA
ctcctcactgaaagtacaca

SEQ ID NO: 127843 - DNA, 20 bp, synthetic construct
  source 1..20: mol_type = other DNA
actcctcactgaaagtacac

SEQ ID NO: 127844 - DNA, 20 bp, synthetic construct
  source 1..20: mol_type = other DNA
gactcctcactgaaagtaca

SEQ ID NO: 127845 - DNA, 20 bp, synthetic construct
  source 1..20: mol_type = other DNA
tgactcctcactgaaagtac

SEQ ID NO: 127846 - DNA, 20 bp, synthetic construct
  source 1..20: mol_type = other DNA
atgactcctcactgaaagta

SEQ ID NO: 127847 - DNA, 20 bp, synthetic construct
  source 1..20: mol_type = other DNA
catgactcctcactgaaagt

SEQ ID NO: 127848 - DNA, 20 bp, synthetic construct
  source 1..20: mol_type = other DNA
acatgactcctcactgaaag

SEQ ID NO: 127849 - DNA, 20 bp, synthetic construct
  source 1..20: mol_type = other DNA
tacatgactcctcactgaaa

SEQ ID NO: 127850 - DNA, 20 bp, synthetic construct
  source 1..20: mol_type = other DNA
ttacatgactcctcactgaa

SEQ ID NO: 127851 - DNA, 20 bp, synthetic construct
  source 1..20: mol_type = other DNA
attacatgactcctcactga

SEQ ID NO: 127852 - DNA, 20 bp, synthetic construct
  source 1..20: mol_type = other DNA
gattacatgactcctcactg

SEQ ID NO: 127853 - DNA, 20 bp, synthetic construct
  source 1..20: mol_type = other DNA
tgattacatgactcctcact

SEQ ID NO: 127854 - DNA, 20 bp, synthetic construct
  source 1..20: mol_type = other DNA
ctgattacatgactcctcac

SEQ ID NO: 127855 - DNA, 20 bp, synthetic construct
  source 1..20: mol_type = other DNA
actgattacatgactcctca

SEQ ID NO: 127856 - DNA, 20 bp, synthetic construct
  source 1..20: mol_type = other DNA
gactgattacatgactcctc

SEQ ID NO: 127857 - DNA, 20 bp, synthetic construct
  source 1..20: mol_type = other DNA
agactgattacatgactcct

SEQ ID NO: 127858 - DNA, 20 bp, synthetic construct
  source 1..20: mol_type = other DNA
aagactgattacatgactcc

SEQ ID NO: 127859 - DNA, 20 bp, synthetic construct
  source 1..20: mol_type = other DNA
aaagactgattacatgactc

SEQ ID NO: 127860 - DNA, 20 bp, synthetic construct
  source 1..20: mol_type = other DNA
aaaagactgattacatgact

SEQ ID NO: 127861 - DNA, 20 bp, synthetic construct
  source 1..20: mol_type = other DNA
aaaaagactgattacatgac

SEQ ID NO: 127862 - DNA, 20 bp, synthetic construct
  source 1..20: mol_type = other DNA
gaaaaagactgattacatga

SEQ ID NO: 127863 - DNA, 20 bp, synthetic construct
  source 1..20: mol_type = other DNA
ggaaaaagactgattacatg

SEQ ID NO: 127864 - DNA, 20 bp, synthetic construct
  source 1..20: mol_type = other DNA
aggaaaaagactgattacat

SEQ ID NO: 127865 - DNA, 20 bp, synthetic construct
  source 1..20: mol_type = other DNA
caggaaaaagactgattaca

SEQ ID NO: 127866 - DNA, 20 bp, synthetic construct
  source 1..20: mol_type = other DNA
tcaggaaaaagactgattac

SEQ ID NO: 127867 - DNA, 20 bp, synthetic construct
  source 1..20: mol_type = other DNA
atcaggaaaaagactgatta

SEQ ID NO: 127868 - DNA, 20 bp, synthetic construct
  source 1..20: mol_type = other DNA
tatcaggaaaaagactgatt

SEQ ID NO: 127869 - DNA, 20 bp, synthetic construct
  source 1..20: mol_type = other DNA
ctatcaggaaaaagactgat

SEQ ID NO: 127870 - DNA, 20 bp, synthetic construct
  source 1..20: mol_type = other DNA
cctatcaggaaaaagactga

SEQ ID NO: 127871 - DNA, 20 bp, synthetic construct
  source 1..20: mol_type = other DNA
tcctatcaggaaaaagactg

SEQ ID NO: 127872 - DNA, 20 bp, synthetic construct
  source 1..20: mol_type = other DNA
ctcctatcaggaaaaagact

SEQ ID NO: 127873 - DNA, 20 bp, synthetic construct
  source 1..20: mol_type = other DNA
actcctatcaggaaaaagac

SEQ ID NO: 127874 - DNA, 20 bp, synthetic construct
  source 1..20: mol_type = other DNA
tactcctatcaggaaaaaga

SEQ ID NO: 127875 - DNA, 20 bp, synthetic construct
  source 1..20: mol_type = other DNA
ctactcctatcaggaaaaag

SEQ ID NO: 127876 - DNA, 20 bp, synthetic construct
  source 1..20: mol_type = other DNA
actactcctatcaggaaaaa

SEQ ID NO: 127877 - DNA, 20 bp, synthetic construct
  source 1..20: mol_type = other DNA
gactactcctatcaggaaaa

SEQ ID NO: 127878 - DNA, 20 bp, synthetic construct
  source 1..20: mol_type = other DNA
tgactactcctatcaggaaa

SEQ ID NO: 127879 - DNA, 20 bp, synthetic construct
  source 1..20: mol_type = other DNA
ctgactactcctatcaggaa

SEQ ID NO: 127880 - DNA, 20 bp, synthetic construct
  source 1..20: mol_type = other DNA
actgactactcctatcagga

SEQ ID NO: 127881 - DNA, 20 bp, synthetic construct
  source 1..20: mol_type = other DNA
cactgactactcctatcagg

SEQ ID NO: 127882 - DNA, 20 bp, synthetic construct
  source 1..20: mol_type = other DNA
tcactgactactcctatcag

SEQ ID NO: 127883 - DNA, 20 bp, synthetic construct
  source 1..20: mol_type = other DNA
ctcactgactactcctatca

SEQ ID NO: 127884 - DNA, 20 bp, synthetic construct
  source 1..20: mol_type = other DNA
actcactgactactcctatc

SEQ ID NO: 127885 - DNA, 20 bp, synthetic construct
  source 1..20: mol_type = other DNA
aactcactgactactcctat

SEQ ID NO: 127886 - DNA, 20 bp, synthetic construct
  source 1..20: mol_type = other DNA
gaactcactgactactccta

SEQ ID NO: 127887 - DNA, 20 bp, synthetic construct
  source 1..20: mol_type = other DNA
ggaactcactgactactcct

SEQ ID NO: 127888 - DNA, 20 bp, synthetic construct
  source 1..20: mol_type = other DNA
aggaactcactgactactcc

SEQ ID NO: 127889 - DNA, 20 bp, synthetic construct
  source 1..20: mol_type = other DNA
taggaactcactgactactc

SEQ ID NO: 127890 - DNA, 20 bp, synthetic construct
  source 1..20: mol_type = other DNA
ctaggaactcactgactact

SEQ ID NO: 127891 - DNA, 20 bp, synthetic construct
  source 1..20: mol_type = other DNA
tctaggaactcactgactac

SEQ ID NO: 127892 - DNA, 20 bp, synthetic construct
  source 1..20: mol_type = other DNA
atctaggaactcactgacta

SEQ ID NO: 127893 - DNA, 20 bp, synthetic construct
  source 1..20: mol_type = other DNA
catctaggaactcactgact

SEQ ID NO: 127894 - DNA, 20 bp, synthetic construct
  source 1..20: mol_type = other DNA
acatctaggaactcactgac

SEQ ID NO: 127895 - DNA, 20 bp, synthetic construct
  source 1..20: mol_type = other DNA
aacatctaggaactcactga

SEQ ID NO: 127896 - DNA, 20 bp, synthetic construct
  source 1..20: mol_type = other DNA
aaacatctaggaactcactg

SEQ ID NO: 127897 - DNA, 20 bp, synthetic construct
  source 1..20: mol_type = other DNA
aaaacatctaggaactcact

SEQ ID NO: 127898 - DNA, 20 bp, synthetic construct
  source 1..20: mol_type = other DNA
taaaacatctaggaactcac

SEQ ID NO: 127899 - DNA, 20 bp, synthetic construct
  source 1..20: mol_type = other DNA
ataaaacatctaggaactca

SEQ ID NO: 127900 - DNA, 20 bp, synthetic construct
  source 1..20: mol_type = other DNA
gataaaacatctaggaactc

SEQ ID NO: 127901 - DNA, 20 bp, synthetic construct
  source 1..20: mol_type = other DNA
agataaaacatctaggaact

SEQ ID NO: 127902 - DNA, 20 bp, synthetic construct
  source 1..20: mol_type = other DNA
tagataaaacatctaggaac

SEQ ID NO: 127903 - DNA, 20 bp, synthetic construct
  source 1..20: mol_type = other DNA
atagataaaacatctaggaa

SEQ ID NO: 127904 - DNA, 20 bp, synthetic construct
  source 1..20: mol_type = other DNA
gatagataaaacatctagga

SEQ ID NO: 127905 - DNA, 20 bp, synthetic construct
  source 1..20: mol_type = other DNA
ggatagataaaacatctagg

SEQ ID NO: 127906 - DNA, 20 bp, synthetic construct
  source 1..20: mol_type = other DNA
tggatagataaaacatctag

SEQ ID NO: 127907 - DNA, 20 bp, synthetic construct
  source 1..20: mol_type = other DNA
ctggatagataaaacatcta

SEQ ID NO: 127908 - DNA, 20 bp, synthetic construct
  source 1..20: mol_type = other DNA
cctggatagataaaacatct

SEQ ID NO: 127909 - DNA, 20 bp, synthetic construct
  source 1..20: mol_type = other DNA
tcctggatagataaaacatc

SEQ ID NO: 127910 - DNA, 20 bp, synthetic construct
  source 1..20: mol_type = other DNA
ctcctggatagataaaacat

SEQ ID NO: 127911 - DNA, 20 bp, synthetic construct
  source 1..20: mol_type = other DNA
tctcctggatagataaaaca

SEQ ID NO: 127912 - DNA, 20 bp, synthetic construct
  source 1..20: mol_type = other DNA
atctcctggatagataaaac

SEQ ID NO: 127913 - DNA, 20 bp, synthetic construct
  source 1..20: mol_type = other DNA
tatctcctggatagataaaa

SEQ ID NO: 127914 - DNA, 20 bp, synthetic construct
  source 1..20: mol_type = other DNA
ttatctcctggatagataaa

SEQ ID NO: 127915 - DNA, 20 bp, synthetic construct
  source 1..20: mol_type = other DNA
attatctcctggatagataa

SEQ ID NO: 127916 - DNA, 20 bp, synthetic construct
  source 1..20: mol_type = other DNA
tattatctcctggatagata

SEQ ID NO: 127917 - DNA, 20 bp, synthetic construct
  source 1..20: mol_type = other DNA
atattatctcctggatagat

SEQ ID NO: 127918 - DNA, 20 bp, synthetic construct
  source 1..20: mol_type = other DNA
catattatctcctggataga

SEQ ID NO: 127919 - DNA, 20 bp, synthetic construct
  source 1..20: mol_type = other DNA
acatattatctcctggatag

SEQ ID NO: 127920 - DNA, 20 bp, synthetic construct
  source 1..20: mol_type = other DNA
gacatattatctcctggata

SEQ ID NO: 127921 - DNA, 20 bp, synthetic construct
  source 1..20: mol_type = other DNA
ggacatattatctcctggat

SEQ ID NO: 127922 - DNA, 20 bp, synthetic construct
  source 1..20: mol_type = other DNA
gggacatattatctcctgga

SEQ ID NO: 127923 - DNA, 20 bp, synthetic construct
  source 1..20: mol_type = other DNA
agggacatattatctcctgg

SEQ ID NO: 127924 - DNA, 20 bp, synthetic construct
  source 1..20: mol_type = other DNA
aagggacatattatctcctg

SEQ ID NO: 127925 - DNA, 20 bp, synthetic construct
  source 1..20: mol_type = other DNA
aaagggacatattatctcct

SEQ ID NO: 127926 - DNA, 20 bp, synthetic construct
  source 1..20: mol_type = other DNA
taaagggacatattatctcc

SEQ ID NO: 127927 - DNA, 20 bp, synthetic construct
  source 1..20: mol_type = other DNA
ctaaagggacatattatctc

SEQ ID NO: 127928 - DNA, 20 bp, synthetic construct
  source 1..20: mol_type = other DNA
gctaaagggacatattatct

SEQ ID NO: 127929 - DNA, 20 bp, synthetic construct
  source 1..20: mol_type = other DNA
cgctaaagggacatattatc

SEQ ID NO: 127930 - DNA, 20 bp, synthetic construct
  source 1..20: mol_type = other DNA
gcgctaaagggacatattat

SEQ ID NO: 127931 - DNA, 20 bp, synthetic construct
  source 1..20: mol_type = other DNA
ggcgctaaagggacatatta

SEQ ID NO: 127932 - DNA, 20 bp, synthetic construct
  source 1..20: mol_type = other DNA
aggcgctaaagggacatatt

SEQ ID NO: 127933 - DNA, 20 bp, synthetic construct
  source 1..20: mol_type = other DNA
aaggcgctaaagggacatat

SEQ ID NO: 127934 - DNA, 20 bp, synthetic construct
  source 1..20: mol_type = other DNA
taaggcgctaaagggacata

SEQ ID NO: 127935 - DNA, 20 bp, synthetic construct
  source 1..20: mol_type = other DNA
ttaaggcgctaaagggacat

SEQ ID NO: 127936 - DNA, 20 bp, synthetic construct
  source 1..20: mol_type = other DNA
attaaggcgctaaagggaca

SEQ ID NO: 127937 - DNA, 20 bp, synthetic construct
  source 1..20: mol_type = other DNA
aattaaggcgctaaagggac

SEQ ID NO: 127938 - DNA, 20 bp, synthetic construct
  source 1..20: mol_type = other DNA
aaattaaggcgctaaaggga

SEQ ID NO: 127939 - DNA, 20 bp, synthetic construct
  source 1..20: mol_type = other DNA
aaaattaaggcgctaaaggg

SEQ ID NO: 127940 - DNA, 20 bp, synthetic construct
  source 1..20: mol_type = other DNA
aaaaattaaggcgctaaagg

SEQ ID NO: 127941 - DNA, 20 bp, synthetic construct
  source 1..20: mol_type = other DNA
aaaaaattaaggcgctaaag

SEQ ID NO: 127942 - DNA, 20 bp, synthetic construct
  source 1..20: mol_type = other DNA
aaaaaaattaaggcgctaaa

SEQ ID NO: 127943 - DNA, 20 bp, synthetic construct
  source 1..20: mol_type = other DNA
caaaaaaattaaggcgctaa

SEQ ID NO: 127944 - DNA, 20 bp, synthetic construct
  source 1..20: mol_type = other DNA
ccaaaaaaattaaggcgcta

SEQ ID NO: 127945 - DNA, 20 bp, synthetic construct
  source 1..20: mol_type = other DNA
accaaaaaaattaaggcgct

SEQ ID NO: 127946 - DNA, 20 bp, synthetic construct
  source 1..20: mol_type = other DNA
caccaaaaaaattaaggcgc

SEQ ID NO: 127947 - DNA, 20 bp, synthetic construct
  source 1..20: mol_type = other DNA
acaccaaaaaaattaaggcg

SEQ ID NO: 127948 - DNA, 20 bp, synthetic construct
  source 1..20: mol_type = other DNA
cacaccaaaaaaattaaggc

SEQ ID NO: 127949 - DNA, 20 bp, synthetic construct
  source 1..20: mol_type = other DNA
acacaccaaaaaaattaagg

SEQ ID NO: 127950 - DNA, 20 bp, synthetic construct
  source 1..20: mol_type = other DNA
aacacaccaaaaaaattaag

SEQ ID NO: 127951 - DNA, 20 bp, synthetic construct
  source 1..20: mol_type = other DNA
aaacacaccaaaaaaattaa

SEQ ID NO: 127952 - DNA, 20 bp, synthetic construct
  source 1..20: mol_type = other DNA
aaaacacaccaaaaaaatta

SEQ ID NO: 127953 - DNA, 20 bp, synthetic construct
  source 1..20: mol_type = other DNA
aaaaacacaccaaaaaaatt

SEQ ID NO: 127954 - DNA, 20 bp, synthetic construct
  source 1..20: mol_type = other DNA
aaaaaacacaccaaaaaaat

SEQ ID NO: 127955 - DNA, 20 bp, synthetic construct
  source 1..20: mol_type = other DNA
taaaaaacacaccaaaaaaa

SEQ ID NO: 127956 - DNA, 20 bp, synthetic construct
  source 1..20: mol_type = other DNA
ctaaaaaacacaccaaaaaa

SEQ ID NO: 127957 - DNA, 20 bp, synthetic construct
  source 1..20: mol_type = other DNA
gctaaaaaacacaccaaaaa

SEQ ID NO: 127958 - DNA, 20 bp, synthetic construct
  source 1..20: mol_type = other DNA
tgctaaaaaacacaccaaaa

SEQ ID NO: 127959 - DNA, 20 bp, synthetic construct
  source 1..20: mol_type = other DNA
ctgctaaaaaacacaccaaa

SEQ ID NO: 127960 - DNA, 20 bp, synthetic construct
  source 1..20: mol_type = other DNA
gctgctaaaaaacacaccaa

SEQ ID NO: 127961 - DNA, 20 bp, synthetic construct
  source 1..20: mol_type = other DNA
ggctgctaaaaaacacacca

SEQ ID NO: 127962 - DNA, 20 bp, synthetic construct
  source 1..20: mol_type = other DNA
tggctgctaaaaaacacacc

SEQ ID NO: 127963 - DNA, 20 bp, synthetic construct
  source 1..20: mol_type = other DNA
atggctgctaaaaaacacac

SEQ ID NO: 127964 - DNA, 20 bp, synthetic construct
  source 1..20: mol_type = other DNA
aatggctgctaaaaaacaca

SEQ ID NO: 127965 - DNA, 20 bp, synthetic construct
  source 1..20: mol_type = other DNA
caatggctgctaaaaaacac

SEQ ID NO: 127966 - DNA, 20 bp, synthetic construct
  source 1..20: mol_type = other DNA
tcaatggctgctaaaaaaca

SEQ ID NO: 127967 - DNA, 20 bp, synthetic construct
  source 1..20: mol_type = other DNA
atcaatggctgctaaaaaac

SEQ ID NO: 127968 - DNA, 20 bp, synthetic construct
  source 1..20: mol_type = other DNA
catcaatggctgctaaaaaa

SEQ ID NO: 127969 - DNA, 20 bp, synthetic construct
  source 1..20: mol_type = other DNA
tcatcaatggctgctaaaaa

SEQ ID NO: 127970 - DNA, 20 bp, synthetic construct
  source 1..20: mol_type = other DNA
atcatcaatggctgctaaaa

SEQ ID NO: 127971 - DNA, 20 bp, synthetic construct
  source 1..20: mol_type = other DNA
tatcatcaatggctgctaaa

SEQ ID NO: 127972 - DNA, 20 bp, synthetic construct
  source 1..20: mol_type = other DNA
ttatcatcaatggctgctaa

SEQ ID NO: 127973 - DNA, 20 bp, synthetic construct
  source 1..20: mol_type = other DNA
attatcatcaatggctgcta

SEQ ID NO: 127974 - DNA, 20 bp, synthetic construct
  source 1..20: mol_type = other DNA
aattatcatcaatggctgct

SEQ ID NO: 127975 - DNA, 20 bp, synthetic construct
  source 1..20: mol_type = other DNA
caattatcatcaatggctgc

SEQ ID NO: 127976 - DNA, 20 bp, synthetic construct
  source 1..20: mol_type = other DNA
acaattatcatcaatggctg

SEQ ID NO: 127977 - DNA, 20 bp, synthetic construct
  source 1..20: mol_type = other DNA
gacaattatcatcaatggct

SEQ ID NO: 127978 - DNA, 20 bp, synthetic construct
  source 1..20: mol_type = other DNA
agacaattatcatcaatggc

SEQ ID NO: 127979 - DNA, 20 bp, synthetic construct
  source 1..20: mol_type = other DNA
tagacaattatcatcaatgg

SEQ ID NO: 127980 - DNA, 20 bp, synthetic construct
  source 1..20: mol_type = other DNA
ctagacaattatcatcaatg

SEQ ID NO: 127981 - DNA, 20 bp, synthetic construct
  source 1..20: mol_type = other DNA
gctagacaattatcatcaat

SEQ ID NO: 127982 - DNA, 20 bp, synthetic construct
  source 1..20: mol_type = other DNA
ggctagacaattatcatcaa

SEQ ID NO: 127983 - DNA, 20 bp, synthetic construct
  source 1..20: mol_type = other DNA
gggctagacaattatcatca

SEQ ID NO: 127984 - DNA, 20 bp, synthetic construct
  source 1..20: mol_type = other DNA
tgggctagacaattatcatc

SEQ ID NO: 127985 - DNA, 20 bp, synthetic construct
  source 1..20: mol_type = other DNA
ttgggctagacaattatcat

SEQ ID NO: 127986 - DNA, 20 bp, synthetic construct
  source 1..20: mol_type = other DNA
cttgggctagacaattatca

SEQ ID NO: 127987 - DNA, 20 bp, synthetic construct
  source 1..20: mol_type = other DNA
tcttgggctagacaattatc

SEQ ID NO: 127988 - DNA, 20 bp, synthetic construct
  source 1..20: mol_type = other DNA
atcttgggctagacaattat

SEQ ID NO: 127989 - DNA, 20 bp, synthetic construct
  source 1..20: mol_type = other DNA
gatcttgggctagacaatta

SEQ ID NO: 127990 - DNA, 20 bp, synthetic construct
  source 1..20: mol_type = other DNA
tgatcttgggctagacaatt

SEQ ID NO: 127991 - DNA, 20 bp, synthetic construct
  source 1..20: mol_type = other DNA
ctgatcttgggctagacaat

SEQ ID NO: 127992 - DNA, 20 bp, synthetic construct
  source 1..20: mol_type = other DNA
actgatcttgggctagacaa

SEQ ID NO: 127993 - DNA, 20 bp, synthetic construct
  source 1..20: mol_type = other DNA
aactgatcttgggctagaca

SEQ ID NO: 127994 - DNA, 20 bp, synthetic construct
  source 1..20: mol_type = other DNA
taactgatcttgggctagac

SEQ ID NO: 127995 - DNA, 20 bp, synthetic construct
  source 1..20: mol_type = other DNA
ataactgatcttgggctaga

SEQ ID NO: 127996 - DNA, 20 bp, synthetic construct
  source 1..20: mol_type = other DNA
aataactgatcttgggctag

SEQ ID NO: 127997 - DNA, 20 bp, synthetic construct
  source 1..20: mol_type = other DNA
aaataactgatcttgggcta

SEQ ID NO: 127998 - DNA, 20 bp, synthetic construct
  source 1..20: mol_type = other DNA
gaaataactgatcttgggct

SEQ ID NO: 127999 - DNA, 20 bp, synthetic construct
  source 1..20: mol_type = other DNA
ggaaataactgatcttgggc

SEQ ID NO: 128000 - DNA, 20 bp, synthetic construct
  source 1..20: mol_type = other DNA
aggaaataactgatcttggg

SEQ ID NO: 128001 - DNA, 20 bp, synthetic construct
  source 1..20: mol_type = other DNA
aaggaaataactgatcttgg

SEQ ID NO: 128002 - DNA, 20 bp, synthetic construct
  source 1..20: mol_type = other DNA
taaggaaataactgatcttg

SEQ ID NO: 128003 - DNA, 20 bp, synthetic construct
  source 1..20: mol_type = other DNA
ctaaggaaataactgatctt

SEQ ID NO: 128004 - DNA, 20 bp, synthetic construct
  source 1..20: mol_type = other DNA
cctaaggaaataactgatct

SEQ ID NO: 128005 - DNA, 20 bp, synthetic construct
  source 1..20: mol_type = other DNA
ccctaaggaaataactgatc

SEQ ID NO: 128006 - DNA, 20 bp, synthetic construct
  source 1..20: mol_type = other DNA
cccctaaggaaataactgat

SEQ ID NO: 128007 - DNA, 20 bp, synthetic construct
  source 1..20: mol_type = other DNA
acccctaaggaaataactga

SEQ ID NO: 128008 - DNA, 20 bp, synthetic construct
  source 1..20: mol_type = other DNA
aacccctaaggaaataactg

SEQ ID NO: 128009 - DNA, 20 bp, synthetic construct
  source 1..20: mol_type = other DNA
caacccctaaggaaataact

SEQ ID NO: 128010 - DNA, 20 bp, synthetic construct
  source 1..20: mol_type = other DNA
acaacccctaaggaaataac

SEQ ID NO: 128011 - DNA, 20 bp, synthetic construct
  source 1..20: mol_type = other DNA
tacaacccctaaggaaataa

SEQ ID NO: 128012 - DNA, 20 bp, synthetic construct
  source 1..20: mol_type = other DNA
ttacaacccctaaggaaata

SEQ ID NO: 128013 - DNA, 20 bp, synthetic construct
  source 1..20: mol_type = other DNA
tttacaacccctaaggaaat

SEQ ID NO: 128014 - DNA, 20 bp, synthetic construct
  source 1..20: mol_type = other DNA
ttttacaacccctaaggaaa

SEQ ID NO: 128015 - DNA, 20 bp, synthetic construct
  source 1..20: mol_type = other DNA
attttacaacccctaaggaa

SEQ ID NO: 128016 - DNA, 20 bp, synthetic construct
  source 1..20: mol_type = other DNA
cattttacaacccctaagga

SEQ ID NO: 128017 - DNA, 20 bp, synthetic construct
  source 1..20: mol_type = other DNA
ccattttacaacccctaagg

SEQ ID NO: 128018 - DNA, 20 bp, synthetic construct
  source 1..20: mol_type = other DNA
accattttacaacccctaag

SEQ ID NO: 128019 - DNA, 20 bp, synthetic construct
  source 1..20: mol_type = other DNA
caccattttacaacccctaa

SEQ ID NO: 128020 - DNA, 20 bp, synthetic construct
  source 1..20: mol_type = other DNA
tcaccattttacaaccccta

SEQ ID NO: 128021 - DNA, 20 bp, synthetic construct
  source 1..20: mol_type = other DNA
gtcaccattttacaacccct

SEQ ID NO: 128022 - DNA, 20 bp, synthetic construct
  source 1..20: mol_type = other DNA
tgtcaccattttacaacccc

SEQ ID NO: 128023 - DNA, 20 bp, synthetic construct
  source 1..20: mol_type = other DNA
atgtcaccattttacaaccc

SEQ ID NO: 128024 - DNA, 20 bp, synthetic construct
  source 1..20: mol_type = other DNA
aatgtcaccattttacaacc

SEQ ID NO: 128025 - DNA, 20 bp, synthetic construct
  source 1..20: mol_type = other DNA
gaatgtcaccattttacaac

SEQ ID NO: 128026 - DNA, 20 bp, synthetic construct
  source 1..20: mol_type = other DNA
agaatgtcaccattttacaa

SEQ ID NO: 128027 - DNA, 20 bp, synthetic construct
  source 1..20: mol_type = other DNA
aagaatgtcaccattttaca

SEQ ID NO: 128028 - DNA, 20 bp, synthetic construct
  source 1..20: mol_type = other DNA
aaagaatgtcaccattttac

SEQ ID NO: 128029 - DNA, 20 bp, synthetic construct
  source 1..20: mol_type = other DNA
aaaagaatgtcaccatttta

SEQ ID NO: 128030 - DNA, 20 bp, synthetic construct
  source 1..20: mol_type = other DNA
gaaaagaatgtcaccatttt

SEQ ID NO: 128031 - DNA, 20 bp, synthetic construct
  source 1..20: mol_type = other DNA
ggaaaagaatgtcaccattt

SEQ ID NO: 128032 - DNA, 20 bp, synthetic construct
  source 1..20: mol_type = other DNA
aggaaaagaatgtcaccatt

SEQ ID NO: 128033 - DNA, 20 bp, synthetic construct
  source 1..20: mol_type = other DNA
aaggaaaagaatgtcaccat

SEQ ID NO: 128034 - DNA, 20 bp, synthetic construct
  source 1..20: mol_type = other DNA
aaaggaaaagaatgtcacca

SEQ ID NO: 128035 - DNA, 20 bp, synthetic construct
  source 1..20: mol_type = other DNA
gaaaggaaaagaatgtcacc

SEQ ID NO: 128036 - DNA, 20 bp, synthetic construct
  source 1..20: mol_type = other DNA
tgaaaggaaaagaatgtcac

SEQ ID NO: 128037 - DNA, 20 bp, synthetic construct
  source 1..20: mol_type = other DNA
atgaaaggaaaagaatgtca

SEQ ID NO: 128038 - DNA, 20 bp, synthetic construct
  source 1..20: mol_type = other DNA
gatgaaaggaaaagaatgtc

SEQ ID NO: 128039 - DNA, 20 bp, synthetic construct
  source 1..20: mol_type = other DNA
ggatgaaaggaaaagaatgt

SEQ ID NO: 128040 - DNA, 20 bp, synthetic construct
  source 1..20: mol_type = other DNA
gggatgaaaggaaaagaatg

SEQ ID NO: 128041 - DNA, 20 bp, synthetic construct
  source 1..20: mol_type = other DNA
agggatgaaaggaaaagaat

SEQ ID NO: 128042 - DNA, 20 bp, synthetic construct
  source 1..20: mol_type = other DNA
aagggatgaaaggaaaagaa

SEQ ID NO: 128043 - DNA, 20 bp, synthetic construct
  source 1..20: mol_type = other DNA
gaagggatgaaaggaaaaga

SEQ ID NO: 128044 - DNA, 20 bp, synthetic construct
  source 1..20: mol_type = other DNA
agaagggatgaaaggaaaag

SEQ ID NO: 128045 - DNA, 20 bp, synthetic construct
  source 1..20: mol_type = other DNA
aagaagggatgaaaggaaaa

SEQ ID NO: 128046 - DNA, 20 bp, synthetic construct
  source 1..20: mol_type = other DNA
gaagaagggatgaaaggaaa

SEQ ID NO: 128047 - DNA, 20 bp, synthetic construct
  source 1..20: mol_type = other DNA
tgaagaagggatgaaaggaa

SEQ ID NO: 128048 - DNA, 20 bp, synthetic construct
  source 1..20: mol_type = other DNA
ttgaagaagggatgaaagga

SEQ ID NO: 128049 - DNA, 20 bp, synthetic construct
  source 1..20: mol_type = other DNA
attgaagaagggatgaaagg

SEQ ID NO: 128050 - DNA, 20 bp, synthetic construct
  source 1..20: mol_type = other DNA
aattgaagaagggatgaaag

SEQ ID NO: 128051 - DNA, 20 bp, synthetic construct
  source 1..20: mol_type = other DNA
taattgaagaagggatgaaa

SEQ ID NO: 128052 - DNA, 20 bp, synthetic construct
  source 1..20: mol_type = other DNA
ataattgaagaagggatgaa

SEQ ID NO: 128053 - DNA, 20 bp, synthetic construct
  source 1..20: mol_type = other DNA
aataattgaagaagggatga

SEQ ID NO: 128054 - DNA, 20 bp, synthetic construct
  source 1..20: mol_type = other DNA
caataattgaagaagggatg

SEQ ID NO: 128055 - DNA, 20 bp, synthetic construct
  source 1..20: mol_type = other DNA
gcaataattgaagaagggat

SEQ ID NO: 128056 - DNA, 20 bp, synthetic construct
  source 1..20: mol_type = other DNA
ggcaataattgaagaaggga

SEQ ID NO: 128057 - DNA, 20 bp, synthetic construct
  source 1..20: mol_type = other DNA
aggcaataattgaagaaggg

SEQ ID NO: 128058 - DNA, 20 bp, synthetic construct
  source 1..20: mol_type = other DNA
caggcaataattgaagaagg

SEQ ID NO: 128059 - DNA, 20 bp, synthetic construct
  source 1..20: mol_type = other DNA
ccaggcaataattgaagaag

SEQ ID NO: 128060 - DNA, 20 bp, synthetic construct
  source 1..20: mol_type = other DNA
tccaggcaataattgaagaa

SEQ ID NO: 128061 - DNA, 20 bp, synthetic construct
  source 1..20: mol_type = other DNA
ttccaggcaataattgaaga

SEQ ID NO: 128062 - DNA, 20 bp, synthetic construct
  source 1..20: mol_type = other DNA
attccaggcaataattgaag

SEQ ID NO: 128063 - DNA, 20 bp, synthetic construct
  source 1..20: mol_type = other DNA
tattccaggcaataattgaa

SEQ ID NO: 128064 - DNA, 20 bp, synthetic construct
  source 1..20: mol_type = other DNA
atattccaggcaataattga

SEQ ID NO: 128065 - DNA, 20 bp, synthetic construct
  source 1..20: mol_type = other DNA
aatattccaggcaataattg

SEQ ID NO: 128066 - DNA, 20 bp, synthetic construct
  source 1..20: mol_type = other DNA
aaatattccaggcaataatt

SEQ ID NO: 128067 - DNA, 20 bp, synthetic construct
  source 1..20: mol_type = other DNA
gaaatattccaggcaataat

SEQ ID NO: 128068 - DNA, 20 bp, synthetic construct
  source 1..20: mol_type = other DNA
agaaatattccaggcaataa

SEQ ID NO: 128069 - DNA, 20 bp, synthetic construct
  source 1..20: mol_type = other DNA
tagaaatattccaggcaata

SEQ ID NO: 128070 - DNA, 20 bp, synthetic construct
  source 1..20: mol_type = other DNA
atagaaatattccaggcaat

SEQ ID NO: 128071 - DNA, 20 bp, synthetic construct
  source 1..20: mol_type = other DNA
tatagaaatattccaggcaa

SEQ ID NO: 128072 - DNA, 20 bp, synthetic construct
  source 1..20: mol_type = other DNA
ttatagaaatattccaggca

SEQ ID NO: 128073 - DNA, 20 bp, synthetic construct
  source 1..20: mol_type = other DNA
tttatagaaatattccaggc

SEQ ID NO: 128074 - DNA, 20 bp, synthetic construct
  source 1..20: mol_type = other DNA
ctttatagaaatattccagg

SEQ ID NO: 128075 - DNA, 20 bp, synthetic construct
  source 1..20: mol_type = other DNA
tctttatagaaatattccag

SEQ ID NO: 128076 - DNA, 20 bp, synthetic construct
  source 1..20: mol_type = other DNA
ttctttatagaaatattcca

SEQ ID NO: 128077 - DNA, 20 bp, synthetic construct
  source 1..20: mol_type = other DNA
tttctttatagaaatattcc

SEQ ID NO: 128078 - DNA, 20 bp, synthetic construct
  source 1..20: mol_type = other DNA
ttttctttatagaaatattc

SEQ ID NO: 128079 - DNA, 20 bp, synthetic construct
  source 1..20: mol_type = other DNA
tttttctttatagaaatatt

SEQ ID NO: 128080 - DNA, 20 bp, synthetic construct
  source 1..20: mol_type = other DNA
gtttttctttatagaaatat

SEQ ID NO: 128081 - DNA, 20 bp, synthetic construct
  source 1..20: mol_type = other DNA
agtttttctttatagaaata

SEQ ID NO: 128082 - DNA, 20 bp, synthetic construct
  source 1..20: mol_type = other DNA
aagtttttctttatagaaat

SEQ ID NO: 128083 - DNA, 20 bp, synthetic construct
  source 1..20: mol_type = other DNA
aaagtttttctttatagaaa

SEQ ID NO: 128084 - DNA, 20 bp, synthetic construct
  source 1..20: mol_type = other DNA
gaaagtttttctttatagaa

SEQ ID NO: 128085 - DNA, 20 bp, synthetic construct
  source 1..20: mol_type = other DNA
ggaaagtttttctttataga

SEQ ID NO: 128086 - DNA, 20 bp, synthetic construct
  source 1..20: mol_type = other DNA
gggaaagtttttctttatag

SEQ ID NO: 128087 - DNA, 20 bp, synthetic construct
  source 1..20: mol_type = other DNA
tgggaaagtttttctttata

SEQ ID NO: 128088 - DNA, 20 bp, synthetic construct
  source 1..20: mol_type = other DNA
atgggaaagtttttctttat

SEQ ID NO: 128089 - DNA, 20 bp, synthetic construct
  source 1..20: mol_type = other DNA
tatgggaaagtttttcttta

SEQ ID NO: 128090 - DNA, 20 bp, synthetic construct
  source 1..20: mol_type = other DNA
atatgggaaagtttttcttt

SEQ ID NO: 128091 - DNA, 20 bp, synthetic construct
  source 1..20: mol_type = other DNA
gatatgggaaagtttttctt

SEQ ID NO: 128092 - DNA, 20 bp, synthetic construct
  source 1..20: mol_type = other DNA
ggatatgggaaagtttttct

SEQ ID NO: 128093 - DNA, 20 bp, synthetic construct
  source 1..20: mol_type = other DNA
tggatatgggaaagtttttc

SEQ ID NO: 128094 - DNA, 20 bp, synthetic construct
  source 1..20: mol_type = other DNA
ctggatatgggaaagttttt

SEQ ID NO: 128095 - DNA, 20 bp, synthetic construct
  source 1..20: mol_type = other DNA
gctggatatgggaaagtttt

SEQ ID NO: 128096 - DNA, 20 bp, synthetic construct
  source 1..20: mol_type = other DNA
agctggatatgggaaagttt

SEQ ID NO: 128097 - DNA, 20 bp, synthetic construct
  source 1..20: mol_type = other DNA
cagctggatatgggaaagtt

SEQ ID NO: 128098 - DNA, 20 bp, synthetic construct
  source 1..20: mol_type = other DNA
acagctggatatgggaaagt

SEQ ID NO: 128099 - DNA, 20 bp, synthetic construct
  source 1..20: mol_type = other DNA
aacagctggatatgggaaag

SEQ ID NO: 128100 - DNA, 20 bp, synthetic construct
  source 1..20: mol_type = other DNA
aaacagctggatatgggaaa

SEQ ID NO: 128101 - DNA, 20 bp, synthetic construct
  source 1..20: mol_type = other DNA
caaacagctggatatgggaa

SEQ ID NO: 128102 - DNA, 20 bp, synthetic construct
  source 1..20: mol_type = other DNA
ccaaacagctggatatggga

SEQ ID NO: 128103 - DNA, 20 bp, synthetic construct
  source 1..20: mol_type = other DNA
accaaacagctggatatggg

SEQ ID NO: 128104 - DNA, 20 bp, synthetic construct
  source 1..20: mol_type = other DNA
aaccaaacagctggatatgg

SEQ ID NO: 128105 - DNA, 20 bp, synthetic construct
  source 1..20: mol_type = other DNA
taaccaaacagctggatatg

SEQ ID NO: 128106 - DNA, 20 bp, synthetic construct
  source 1..20: mol_type = other DNA
gtaaccaaacagctggatat

SEQ ID NO: 128107 - DNA, 20 bp, synthetic construct
  source 1..20: mol_type = other DNA
ggtaaccaaacagctggata

SEQ ID NO: 128108 - DNA, 20 bp, synthetic construct
  source 1..20: mol_type = other DNA
gggtaaccaaacagctggat

SEQ ID NO: 128109 - DNA, 20 bp, synthetic construct
  source 1..20: mol_type = other DNA
agggtaaccaaacagctgga

SEQ ID NO: 128110 - DNA, 20 bp, synthetic construct
  source 1..20: mol_type = other DNA
cagggtaaccaaacagctgg

SEQ ID NO: 128111 - DNA, 20 bp, synthetic construct
  source 1..20: mol_type = other DNA
tcagggtaaccaaacagctg

SEQ ID NO: 128112 - DNA, 20 bp, synthetic construct
  source 1..20: mol_type = other DNA
ctcagggtaaccaaacagct

SEQ ID NO: 128113 - DNA, 20 bp, synthetic construct
  source 1..20: mol_type = other DNA
cctcagggtaaccaaacagc

SEQ ID NO: 128114 - DNA, 20 bp, synthetic construct
  source 1..20: mol_type = other DNA
acctcagggtaaccaaacag

SEQ ID NO: 128115 - DNA, 20 bp, synthetic construct
  source 1..20: mol_type = other DNA
tacctcagggtaaccaaaca

SEQ ID NO: 128116 - DNA, 20 bp, synthetic construct
  source 1..20: mol_type = other DNA
atacctcagggtaaccaaac

SEQ ID NO: 128117 - DNA, 20 bp, synthetic construct
  source 1..20: mol_type = other DNA
tatacctcagggtaaccaaa

SEQ ID NO: 128118 - DNA, 20 bp, synthetic construct
  source 1..20: mol_type = other DNA
ctatacctcagggtaaccaa

SEQ ID NO: 128119 - DNA, 20 bp, synthetic construct
  source 1..20: mol_type = other DNA
gctatacctcagggtaacca

SEQ ID NO: 128120 - DNA, 20 bp, synthetic construct
  source 1..20: mol_type = other DNA
agctatacctcagggtaacc

SEQ ID NO: 128121 - DNA, 20 bp, synthetic construct
  source 1..20: mol_type = other DNA
aagctatacctcagggtaac

SEQ ID NO: 128122 - DNA, 20 bp, synthetic construct
  source 1..20: mol_type = other DNA
aaagctatacctcagggtaa

SEQ ID NO: 128123 - DNA, 20 bp, synthetic construct
  source 1..20: mol_type = other DNA
gaaagctatacctcagggta

SEQ ID NO: 128124 - DNA, 20 bp, synthetic construct
  source 1..20: mol_type = other DNA
agaaagctatacctcagggt

SEQ ID NO: 128125 - DNA, 20 bp, synthetic construct
  source 1..20: mol_type = other DNA
aagaaagctatacctcaggg

SEQ ID NO: 128126 - DNA, 20 bp, synthetic construct
  source 1..20: mol_type = other DNA
taagaaagctatacctcagg

SEQ ID NO: 128127 - DNA, 20 bp, synthetic construct
  source 1..20: mol_type = other DNA
ctaagaaagctatacctcag

SEQ ID NO: 128128 - DNA, 20 bp, synthetic construct
  source 1..20: mol_type = other DNA
cctaagaaagctatacctca

SEQ ID NO: 128129 - DNA, 20 bp, synthetic construct
  source 1..20: mol_type = other DNA
tcctaagaaagctatacctc

SEQ ID NO: 128130 - DNA, 20 bp, synthetic construct
  source 1..20: mol_type = other DNA
ttcctaagaaagctatacct

SEQ ID NO: 128131 - DNA, 20 bp, synthetic construct
  source 1..20: mol_type = other DNA
tttcctaagaaagctatacc

SEQ ID NO: 128132 - DNA, 20 bp, synthetic construct
  source 1..20: mol_type = other DNA
ttttcctaagaaagctatac

SEQ ID NO: 128133 - DNA, 20 bp, synthetic construct
  source 1..20: mol_type = other DNA
cttttcctaagaaagctata

SEQ ID NO: 128134 - DNA, 20 bp, synthetic construct
  source 1..20: mol_type = other DNA
acttttcctaagaaagctat

SEQ ID NO: 128135 - DNA, 20 bp, synthetic construct
  source 1..20: mol_type = other DNA
tacttttcctaagaaagcta

SEQ ID NO: 128136 - DNA, 20 bp, synthetic construct
  source 1..20: mol_type = other DNA
ttacttttcctaagaaagct

SEQ ID NO: 128137 - DNA, 20 bp, synthetic construct
  source 1..20: mol_type = other DNA
attacttttcctaagaaagc

SEQ ID NO: 128138 - DNA, 20 bp, synthetic construct
  source 1..20: mol_type = other DNA
aattacttttcctaagaaag

SEQ ID NO: 128139 - DNA, 20 bp, synthetic construct
  source 1..20: mol_type = other DNA
aaattacttttcctaagaaa

SEQ ID NO: 128140 - DNA, 20 bp, synthetic construct
  source 1..20: mol_type = other DNA
taaattacttttcctaagaa

SEQ ID NO: 128141 - DNA, 20 bp, synthetic construct
  source 1..20: mol_type = other DNA
ttaaattacttttcctaaga

SEQ ID NO: 128142 - DNA, 20 bp, synthetic construct
  source 1..20: mol_type = other DNA
tttaaattacttttcctaag

SEQ ID NO: 128143 - DNA, 20 bp, synthetic construct
  source 1..20: mol_type = other DNA
ttttaaattacttttcctaa

SEQ ID NO: 128144 - DNA, 20 bp, synthetic construct
  source 1..20: mol_type = other DNA
attttaaattacttttccta

SEQ ID NO: 128145 - DNA, 20 bp, synthetic construct
  source 1..20: mol_type = other DNA
cattttaaattacttttcct

SEQ ID NO: 128146 - DNA, 20 bp, synthetic construct
  source 1..20: mol_type = other DNA
acattttaaattacttttcc

SEQ ID NO: 128147 - DNA, 20 bp, synthetic construct
  source 1..20: mol_type = other DNA
aacattttaaattacttttc

SEQ ID NO: 128148 - DNA, 20 bp, synthetic construct
  source 1..20: mol_type = other DNA
taacattttaaattactttt

SEQ ID NO: 128149 - DNA, 20 bp, synthetic construct
  source 1..20: mol_type = other DNA
ttaacattttaaattacttt

SEQ ID NO: 128150 - DNA, 20 bp, synthetic construct
  source 1..20: mol_type = other DNA
attaacattttaaattactt

SEQ ID NO: 128151 - DNA, 20 bp, synthetic construct
  source 1..20: mol_type = other DNA
gattaacattttaaattact

SEQ ID NO: 128152 - DNA, 20 bp, synthetic construct
  source 1..20: mol_type = other DNA
tgattaacattttaaattac

SEQ ID NO: 128153 - DNA, 20 bp, synthetic construct
  source 1..20: mol_type = other DNA
atgattaacattttaaatta

SEQ ID NO: 128154 - DNA, 20 bp, synthetic construct
  source 1..20: mol_type = other DNA
aatgattaacattttaaatt

SEQ ID NO: 128155 - DNA, 20 bp, synthetic construct
  source 1..20: mol_type = other DNA
aaatgattaacattttaaat

SEQ ID NO: 128156 - DNA, 20 bp, synthetic construct
  source 1..20: mol_type = other DNA
gaaatgattaacattttaaa

SEQ ID NO: 128157 - DNA, 20 bp, synthetic construct
  source 1..20: mol_type = other DNA
ggaaatgattaacattttaa

SEQ ID NO: 128158 - DNA, 20 bp, synthetic construct
  source 1..20: mol_type = other DNA
gggaaatgattaacatttta

SEQ ID NO: 128159 - DNA, 20 bp, synthetic construct
  source 1..20: mol_type = other DNA
agggaaatgattaacatttt

SEQ ID NO: 128160 - DNA, 20 bp, synthetic construct
  source 1..20: mol_type = other DNA
aagggaaatgattaacattt

SEQ ID NO: 128161 - DNA, 20 bp, synthetic construct
  source 1..20: mol_type = other DNA
aaagggaaatgattaacatt

SEQ ID NO: 128162 - DNA, 20 bp, synthetic construct
  source 1..20: mol_type = other DNA
aaaagggaaatgattaacat

SEQ ID NO: 128163 - DNA, 20 bp, synthetic construct
  source 1..20: mol_type = other DNA
aaaaagggaaatgattaaca

SEQ ID NO: 128164 - DNA, 20 bp, synthetic construct
  source 1..20: mol_type = other DNA
taaaaagggaaatgattaac

SEQ ID NO: 128165 - DNA, 20 bp, synthetic construct
  source 1..20: mol_type = other DNA
ttaaaaagggaaatgattaa

SEQ ID NO: 128166 - DNA, 20 bp, synthetic construct
  source 1..20: mol_type = other DNA
cttaaaaagggaaatgatta

SEQ ID NO: 128167 - DNA, 20 bp, synthetic construct
  source 1..20: mol_type = other DNA
ccttaaaaagggaaatgatt

SEQ ID NO: 128168 - DNA, 20 bp, synthetic construct
  source 1..20: mol_type = other DNA
gccttaaaaagggaaatgat

SEQ ID NO: 128169 - DNA, 20 bp, synthetic construct
  source 1..20: mol_type = other DNA
tgccttaaaaagggaaatga

SEQ ID NO: 128170 - DNA, 20 bp, synthetic construct
  source 1..20: mol_type = other DNA
ctgccttaaaaagggaaatg

SEQ ID NO: 128171 - DNA, 20 bp, synthetic construct
  source 1..20: mol_type = other DNA
actgccttaaaaagggaaat

SEQ ID NO: 128172 - DNA, 20 bp, synthetic construct
  source 1..20: mol_type = other DNA
gactgccttaaaaagggaaa

SEQ ID NO: 128173 - DNA, 20 bp, synthetic construct
  source 1..20: mol_type = other DNA
agactgccttaaaaagggaa

SEQ ID NO: 128174 - DNA, 20 bp, synthetic construct
  source 1..20: mol_type = other DNA
aagactgccttaaaaaggga

SEQ ID NO: 128175 - DNA, 20 bp, synthetic construct
  source 1..20: mol_type = other DNA
gaagactgccttaaaaaggg

SEQ ID NO: 128176 - DNA, 20 bp, synthetic construct
  source 1..20: mol_type = other DNA
tgaagactgccttaaaaagg

SEQ ID NO: 128177 - DNA, 20 bp, synthetic construct
  source 1..20: mol_type = other DNA
ttgaagactgccttaaaaag

SEQ ID NO: 128178 - DNA, 20 bp, synthetic construct
  source 1..20: mol_type = other DNA
tttgaagactgccttaaaaa

SEQ ID NO: 128179 - DNA, 20 bp, synthetic construct
  source 1..20: mol_type = other DNA
ttttgaagactgccttaaaa

SEQ ID NO: 128180 - DNA, 20 bp, synthetic construct
  source 1..20: mol_type = other DNA
attttgaagactgccttaaa

SEQ ID NO: 128181 - DNA, 20 bp, synthetic construct
  source 1..20: mol_type = other DNA
tattttgaagactgccttaa

SEQ ID NO: 128182 - DNA, 20 bp, synthetic construct
  source 1..20: mol_type = other DNA
ttattttgaagactgcctta

SEQ ID NO: 128183 - DNA, 20 bp, synthetic construct
  source 1..20: mol_type = other DNA
attattttgaagactgcctt

SEQ ID NO: 128184 - DNA, 20 bp, synthetic construct
  source 1..20: mol_type = other DNA
cattattttgaagactgcct

SEQ ID NO: 128185 - DNA, 20 bp, synthetic construct
  source 1..20: mol_type = other DNA
tcattattttgaagactgcc

SEQ ID NO: 128186 - DNA, 20 bp, synthetic construct
  source 1..20: mol_type = other DNA
ctcattattttgaagactgc

SEQ ID NO: 128187 - DNA, 20 bp, synthetic construct
  source 1..20: mol_type = other DNA
actcattattttgaagactg

SEQ ID NO: 128188 - DNA, 20 bp, synthetic construct
  source 1..20: mol_type = other DNA
aactcattattttgaagact

SEQ ID NO: 128189 - DNA, 20 bp, synthetic construct
  source 1..20: mol_type = other DNA
caactcattattttgaagac

SEQ ID NO: 128190 - DNA, 20 bp, synthetic construct
  source 1..20: mol_type = other DNA
ccaactcattattttgaaga

SEQ ID NO: 128191 - DNA, 20 bp, synthetic construct
  source 1..20: mol_type = other DNA
accaactcattattttgaag

SEQ ID NO: 128192 - DNA, 20 bp, synthetic construct
  source 1..20: mol_type = other DNA
aaccaactcattattttgaa

SEQ ID NO: 128193 - DNA, 20 bp, synthetic construct
  source 1..20: mol_type = other DNA
aaaccaactcattattttga

SEQ ID NO: 128194 - DNA, 20 bp, synthetic construct
  source 1..20: mol_type = other DNA
aaaaccaactcattattttg

SEQ ID NO: 128195 - DNA, 20 bp, synthetic construct
  source 1..20: mol_type = other DNA
gaaaaccaactcattatttt

SEQ ID NO: 128196 - DNA, 20 bp, synthetic construct
  source 1..20: mol_type = other DNA
agaaaaccaactcattattt

SEQ ID NO: 128197 - DNA, 20 bp, synthetic construct
  source 1..20: mol_type = other DNA
cagaaaaccaactcattatt

SEQ ID NO: 128198 - DNA, 20 bp, synthetic construct
  source 1..20: mol_type = other DNA
acagaaaaccaactcattat

SEQ ID NO: 128199 - DNA, 20 bp, synthetic construct
  source 1..20: mol_type = other DNA
aacagaaaaccaactcatta

SEQ ID NO: 128200 - DNA, 20 bp, synthetic construct
  source 1..20: mol_type = other DNA
taacagaaaaccaactcatt

SEQ ID NO: 128201 - DNA, 20 bp, synthetic construct
  source 1..20: mol_type = other DNA
ataacagaaaaccaactcat

SEQ ID NO: 128202 - DNA, 20 bp, synthetic construct
  source 1..20: mol_type = other DNA
gataacagaaaaccaactca

SEQ ID NO: 128203 - DNA, 20 bp, synthetic construct
  source 1..20: mol_type = other DNA
ggataacagaaaaccaactc

SEQ ID NO: 128204 - DNA, 20 bp, synthetic construct
  source 1..20: mol_type = other DNA
aggataacagaaaaccaact

SEQ ID NO: 128205 - DNA, 20 bp, synthetic construct
  source 1..20: mol_type = other DNA
gaggataacagaaaaccaac

SEQ ID NO: 128206 - DNA, 20 bp, synthetic construct
  source 1..20: mol_type = other DNA
ggaggataacagaaaaccaa

SEQ ID NO: 128207 - DNA, 20 bp, synthetic construct
  source 1..20: mol_type = other DNA
tggaggataacagaaaacca

SEQ ID NO: 128208 - DNA, 20 bp, synthetic construct
  source 1..20: mol_type = other DNA
ttggaggataacagaaaacc

SEQ ID NO: 128209 - DNA, 20 bp, synthetic construct
  source 1..20: mol_type = other DNA
tttggaggataacagaaaac

SEQ ID NO: 128210 - DNA, 20 bp, synthetic construct
  source 1..20: mol_type = other DNA
ctttggaggataacagaaaa

SEQ ID NO: 128211 - DNA, 20 bp, synthetic construct
  source 1..20: mol_type = other DNA
cctttggaggataacagaaa

SEQ ID NO: 128212 - DNA, 20 bp, synthetic construct
  source 1..20: mol_type = other DNA
acctttggaggataacagaa

SEQ ID NO: 128213 - DNA, 20 bp, synthetic construct
  source 1..20: mol_type = other DNA
tacctttggaggataacaga

SEQ ID NO: 128214 - DNA, 20 bp, synthetic construct
  source 1..20: mol_type = other DNA
ttacctttggaggataacag

SEQ ID NO: 128215 - DNA, 20 bp, synthetic construct
  source 1..20: mol_type = other DNA
gttacctttggaggataaca

SEQ ID NO: 128216 - DNA, 20 bp, synthetic construct
  source 1..20: mol_type = other DNA
ggttacctttggaggataac

SEQ ID NO: 128217 - DNA, 20 bp, synthetic construct
  source 1..20: mol_type = other DNA
tggttacctttggaggataa

SEQ ID NO: 128218 - DNA, 20 bp, synthetic construct
  source 1..20: mol_type = other DNA
ctggttacctttggaggata

SEQ ID NO: 128219 - DNA, 20 bp, synthetic construct
  source 1..20: mol_type = other DNA
actggttacctttggaggat

SEQ ID NO: 128220 - DNA, 20 bp, synthetic construct
  source 1..20: mol_type = other DNA
cactggttacctttggagga

SEQ ID NO: 128221 - DNA, 20 bp, synthetic construct
  source 1..20: mol_type = other DNA
tcactggttacctttggagg

SEQ ID NO: 128222 - DNA, 20 bp, synthetic construct
  source 1..20: mol_type = other DNA
ctcactggttacctttggag

SEQ ID NO: 128223 - DNA, 20 bp, synthetic construct
  source 1..20: mol_type = other DNA
cctcactggttacctttgga

SEQ ID NO: 128224 - DNA, 20 bp, synthetic construct
  source 1..20: mol_type = other DNA
acctcactggttacctttgg

SEQ ID NO: 128225 - DNA, 20 bp, synthetic construct
  source 1..20: mol_type = other DNA
cacctcactggttacctttg

SEQ ID NO: 128226 - DNA, 20 bp, synthetic construct
  source 1..20: mol_type = other DNA
ccacctcactggttaccttt

SEQ ID NO: 128227 - DNA, 20 bp, synthetic construct
  source 1..20: mol_type = other DNA
accacctcactggttacctt

SEQ ID NO: 128228 - DNA, 20 bp, synthetic construct
  source 1..20: mol_type = other DNA
aaccacctcactggttacct

SEQ ID NO: 128229 - DNA, 20 bp, synthetic construct
  source 1..20: mol_type = other DNA
aaaccacctcactggttacc

SEQ ID NO: 128230 - DNA, 20 bp, synthetic construct
  source 1..20: mol_type = other DNA
aaaaccacctcactggttac

SEQ ID NO: 128231 - DNA, 20 bp, synthetic construct
  source 1..20: mol_type = other DNA
aaaaaccacctcactggtta

SEQ ID NO: 128232 - DNA, 20 bp, synthetic construct
  source 1..20: mol_type = other DNA
aaaaaaccacctcactggtt

SEQ ID NO: 128233 - DNA, 20 bp, synthetic construct
  source 1..20: mol_type = other DNA
aaaaaaaccacctcactggt

SEQ ID NO: 128234 - DNA, 20 bp, synthetic construct
  source 1..20: mol_type = other DNA
caaaaaaaccacctcactgg

SEQ ID NO: 128235 - DNA, 20 bp, synthetic construct
  source 1..20: mol_type = other DNA
acaaaaaaaccacctcactg

SEQ ID NO: 128236 - DNA, 20 bp, synthetic construct
  source 1..20: mol_type = other DNA
gacaaaaaaaccacctcact

SEQ ID NO: 128237 - DNA, 20 bp, synthetic construct
  source 1..20: mol_type = other DNA
cgacaaaaaaaccacctcac

SEQ ID NO: 128238 - DNA, 20 bp, synthetic construct
  source 1..20: mol_type = other DNA
acgacaaaaaaaccacctca

SEQ ID NO: 128239 - DNA, 20 bp, synthetic construct
  source 1..20: mol_type = other DNA
aacgacaaaaaaaccacctc

SEQ ID NO: 128240 - DNA, 20 bp, synthetic construct
  source 1..20: mol_type = other DNA
caacgacaaaaaaaccacct

SEQ ID NO: 128241 - DNA, 20 bp, synthetic construct
  source 1..20: mol_type = other DNA
ccaacgacaaaaaaaccacc

SEQ ID NO: 128242 - DNA, 20 bp, synthetic construct
  source 1..20: mol_type = other DNA
accaacgacaaaaaaaccac

SEQ ID NO: 128243 - DNA, 20 bp, synthetic construct
  source 1..20: mol_type = other DNA
aaccaacgacaaaaaaacca

SEQ ID NO: 128244 - DNA, 20 bp, synthetic construct
  source 1..20: mol_type = other DNA
gaaccaacgacaaaaaaacc

SEQ ID NO: 128245 - DNA, 20 bp, synthetic construct
  source 1..20: mol_type = other DNA
agaaccaacgacaaaaaaac

SEQ ID NO: 128246 - DNA, 20 bp, synthetic construct
  source 1..20: mol_type = other DNA
aagaaccaacgacaaaaaaa

SEQ ID NO: 128247 - DNA, 20 bp, synthetic construct
  source 1..20: mol_type = other DNA
taagaaccaacgacaaaaaa

SEQ ID NO: 128248 - DNA, 20 bp, synthetic construct
  source 1..20: mol_type = other DNA
gtaagaaccaacgacaaaaa

SEQ ID NO: 128249 - DNA, 20 bp, synthetic construct
  source 1..20: mol_type = other DNA
agtaagaaccaacgacaaaa

SEQ ID NO: 128250 - DNA, 20 bp, synthetic construct
  source 1..20: mol_type = other DNA
tagtaagaaccaacgacaaa

SEQ ID NO: 128251 - DNA, 20 bp, synthetic construct
  source 1..20: mol_type = other DNA
atagtaagaaccaacgacaa

SEQ ID NO: 128252 - DNA, 20 bp, synthetic construct
  source 1..20: mol_type = other DNA
gatagtaagaaccaacgaca

SEQ ID NO: 128253 - DNA, 20 bp, synthetic construct
  source 1..20: mol_type = other DNA
tgatagtaagaaccaacgac

SEQ ID NO: 128254 - DNA, 20 bp, synthetic construct
  source 1..20: mol_type = other DNA
ctgatagtaagaaccaacga

SEQ ID NO: 128255 - DNA, 20 bp, synthetic construct
  source 1..20: mol_type = other DNA
actgatagtaagaaccaacg

SEQ ID NO: 128256 - DNA, 20 bp, synthetic construct
  source 1..20: mol_type = other DNA
tactgatagtaagaaccaac

SEQ ID NO: 128257 - DNA, 20 bp, synthetic construct
  source 1..20: mol_type = other DNA
atactgatagtaagaaccaa

SEQ ID NO: 128258 - DNA, 20 bp, synthetic construct
  source 1..20: mol_type = other DNA
tatactgatagtaagaacca

SEQ ID NO: 128259 - DNA, 20 bp, synthetic construct
  source 1..20: mol_type = other DNA
ttatactgatagtaagaacc

SEQ ID NO: 128260 - DNA, 20 bp, synthetic construct
  source 1..20: mol_type = other DNA
tttatactgatagtaagaac

SEQ ID NO: 128261 - DNA, 20 bp, synthetic construct
  source 1..20: mol_type = other DNA
gtttatactgatagtaagaa

SEQ ID NO: 128262 - DNA, 20 bp, synthetic construct
  source 1..20: mol_type = other DNA
agtttatactgatagtaaga

SEQ ID NO: 128263 - DNA, 20 bp, synthetic construct
  source 1..20: mol_type = other DNA
aagtttatactgatagtaag

SEQ ID NO: 128264 - DNA, 20 bp, synthetic construct
  source 1..20: mol_type = other DNA
gaagtttatactgatagtaa

SEQ ID NO: 128265 - DNA, 20 bp, synthetic construct
  source 1..20: mol_type = other DNA
agaagtttatactgatagta

SEQ ID NO: 128266 - DNA, 20 bp, synthetic construct
  source 1..20: mol_type = other DNA
cagaagtttatactgatagt

SEQ ID NO: 128267 - DNA, 20 bp, synthetic construct
  source 1..20: mol_type = other DNA
ccagaagtttatactgatag

SEQ ID NO: 128268 - DNA, 20 bp, synthetic construct
  source 1..20: mol_type = other DNA
tccagaagtttatactgata

SEQ ID NO: 128269 - DNA, 20 bp, synthetic construct
  source 1..20: mol_type = other DNA
ttccagaagtttatactgat

SEQ ID NO: 128270 - DNA, 20 bp, synthetic construct
  source 1..20: mol_type = other DNA
attccagaagtttatactga

SEQ ID NO: 128271 - DNA, 20 bp, synthetic construct
  source 1..20: mol_type = other DNA
aattccagaagtttatactg

SEQ ID NO: 128272 - DNA, 20 bp, synthetic construct
  source 1..20: mol_type = other DNA
aaattccagaagtttatact

SEQ ID NO: 128273 - DNA, 20 bp, synthetic construct
  source 1..20: mol_type = other DNA
aaaattccagaagtttatac

SEQ ID NO: 128274 - DNA, 20 bp, synthetic construct
  source 1..20: mol_type = other DNA
aaaaattccagaagtttata

SEQ ID NO: 128275 - DNA, 20 bp, synthetic construct
  source 1..20: mol_type = other DNA
aaaaaattccagaagtttat

SEQ ID NO: 128276 - DNA, 20 bp, synthetic construct
  source 1..20: mol_type = other DNA
aaaaaaattccagaagttta

SEQ ID NO: 128277 - DNA, 20 bp, synthetic construct
  source 1..20: mol_type = other DNA
aaaaaaaattccagaagttt

SEQ ID NO: 128278 - DNA, 20 bp, synthetic construct
  source 1..20: mol_type = other DNA
aaaaaaaaattccagaagtt

SEQ ID NO: 128279 - DNA, 20 bp, synthetic construct
  source 1..20: mol_type = other DNA
aaaaaaaaaattccagaagt

SEQ ID NO: 128280 - DNA, 20 bp, synthetic construct
  source 1..20: mol_type = other DNA
aaaaaaaaaaattccagaag

SEQ ID NO: 128281 - DNA, 20 bp, synthetic construct
  source 1..20: mol_type = other DNA
aaaaaaaaaaaattccagaa

SEQ ID NO: 128282 - DNA, 20 bp, synthetic construct
  source 1..20: mol_type = other DNA
aaaaaaaaaaaaattccaga

SEQ ID NO: 128283 - DNA, 20 bp, synthetic construct
  source 1..20: mol_type = other DNA
aaaaaaaaaaaaaattccag

SEQ ID NO: 128284 - DNA, 20 bp, synthetic construct
  source 1..20: mol_type = other DNA
aaaaaaaaaaaaaaattcca

SEQ ID NO: 128285 - DNA, 20 bp, synthetic construct
  source 1..20: mol_type = other DNA
aaaaaaaaaaaaaaaattcc

SEQ ID NO: 128286 - DNA, 20 bp, synthetic construct
  source 1..20: mol_type = other DNA
taaaaaaaaaaaaaaaattc

SEQ ID NO: 128287 - DNA, 20 bp, synthetic construct
  source 1..20: mol_type = other DNA
ttaaaaaaaaaaaaaaaatt

SEQ ID NO: 128288 - DNA, 20 bp, synthetic construct
  source 1..20: mol_type = other DNA
attaaaaaaaaaaaaaaaat

SEQ ID NO: 128289 - DNA, 20 bp, synthetic construct
  source 1..20: mol_type = other DNA
aattaaaaaaaaaaaaaaaa

SEQ ID NO: 128290 - DNA, 20 bp, synthetic construct
  source 1..20: mol_type = other DNA
aaattaaaaaaaaaaaaaaa

SEQ ID NO: 128291 - DNA, 20 bp, synthetic construct
  source 1..20: mol_type = other DNA
aaaattaaaaaaaaaaaaaa

SEQ ID NO: 128292 - DNA, 20 bp, synthetic construct
  source 1..20: mol_type = other DNA
aaaaattaaaaaaaaaaaaa

SEQ ID NO: 128293 - DNA, 20 bp, synthetic construct
  source 1..20: mol_type = other DNA
aaaaaattaaaaaaaaaaaa

SEQ ID NO: 128294 - DNA, 20 bp, synthetic construct
  source 1..20: mol_type = other DNA
caaaaaattaaaaaaaaaaa

SEQ ID NO: 128295 - DNA, 20 bp, synthetic construct
  source 1..20: mol_type = other DNA
ccaaaaaattaaaaaaaaaa

SEQ ID NO: 128296 - DNA, 20 bp, synthetic construct
  source 1..20: mol_type = other DNA
tccaaaaaattaaaaaaaaa

SEQ ID NO: 128297 - DNA, 20 bp, synthetic construct
  source 1..20: mol_type = other DNA
ctccaaaaaattaaaaaaaa

SEQ ID NO: 128298 - DNA, 20 bp, synthetic construct
  source 1..20: mol_type = other DNA
tctccaaaaaattaaaaaaa

SEQ ID NO: 128299 - DNA, 20 bp, synthetic construct
  source 1..20: mol_type = other DNA
gtctccaaaaaattaaaaaa

SEQ ID NO: 128300 - DNA, 20 bp, synthetic construct
  source 1..20: mol_type = other DNA
tgtctccaaaaaattaaaaa

SEQ ID NO: 128301 - DNA, 20 bp, synthetic construct
  source 1..20: mol_type = other DNA
ttgtctccaaaaaattaaaa

SEQ ID NO: 128302 - DNA, 20 bp, synthetic construct
  source 1..20: mol_type = other DNA
cttgtctccaaaaaattaaa

SEQ ID NO: 128303 - DNA, 20 bp, synthetic construct
  source 1..20: mol_type = other DNA
ccttgtctccaaaaaattaa

SEQ ID NO: 128304 - DNA, 20 bp, synthetic construct
  source 1..20: mol_type = other DNA
accttgtctccaaaaaatta

SEQ ID NO: 128305 - DNA, 20 bp, synthetic construct
  source 1..20: mol_type = other DNA
gaccttgtctccaaaaaatt

SEQ ID NO: 128306 - DNA, 20 bp, synthetic construct
  source 1..20: mol_type = other DNA
agaccttgtctccaaaaaat

SEQ ID NO: 128307 - DNA, 20 bp, synthetic construct
  source 1..20: mol_type = other DNA
cagaccttgtctccaaaaaa

SEQ ID NO: 128308 - DNA, 20 bp, synthetic construct
  source 1..20: mol_type = other DNA
ccagaccttgtctccaaaaa

SEQ ID NO: 128309 - DNA, 20 bp, synthetic construct
  source 1..20: mol_type = other DNA
gccagaccttgtctccaaaa

SEQ ID NO: 128310 - DNA, 20 bp, synthetic construct
  source 1..20: mol_type = other DNA
agccagaccttgtctccaaa

SEQ ID NO: 128311 - DNA, 20 bp, synthetic construct
  source 1..20: mol_type = other DNA
gagccagaccttgtctccaa

SEQ ID NO: 128312 - DNA, 20 bp, synthetic construct
  source 1..20: mol_type = other DNA
agagccagaccttgtctcca

SEQ ID NO: 128313 - DNA, 20 bp, synthetic construct
  source 1..20: mol_type = other DNA
cagagccagaccttgtctcc

SEQ ID NO: 128314 - DNA, 20 bp, synthetic construct
  source 1..20: mol_type = other DNA
acagagccagaccttgtctc

SEQ ID NO: 128315 - DNA, 20 bp, synthetic construct
  source 1..20: mol_type = other DNA
aacagagccagaccttgtct

SEQ ID NO: 128316 - DNA, 20 bp, synthetic construct
  source 1..20: mol_type = other DNA
taacagagccagaccttgtc

SEQ ID NO: 128317 - DNA, 20 bp, synthetic construct
  source 1..20: mol_type = other DNA
gtaacagagccagaccttgt

SEQ ID NO: 128318 - DNA, 20 bp, synthetic construct
  source 1..20: mol_type = other DNA
ggtaacagagccagaccttg

SEQ ID NO: 128319 - DNA, 20 bp, synthetic construct
  source 1..20: mol_type = other DNA
aggtaacagagccagacctt

SEQ ID NO: 128320 - DNA, 20 bp, synthetic construct
  source 1..20: mol_type = other DNA
taggtaacagagccagacct

SEQ ID NO: 128321 - DNA, 20 bp, synthetic construct
  source 1..20: mol_type = other DNA
ctaggtaacagagccagacc

SEQ ID NO: 128322 - DNA, 20 bp, synthetic construct
  source 1..20: mol_type = other DNA
cctaggtaacagagccagac

SEQ ID NO: 128323 - DNA, 20 bp, synthetic construct
  source 1..20: mol_type = other DNA
gcctaggtaacagagccaga

SEQ ID NO: 128324 - DNA, 20 bp, synthetic construct
  source 1..20: mol_type = other DNA
agcctaggtaacagagccag

SEQ ID NO: 128325 - DNA, 20 bp, synthetic construct
  source 1..20: mol_type = other DNA
cagcctaggtaacagagcca

SEQ ID NO: 128326 - DNA, 20 bp, synthetic construct
  source 1..20: mol_type = other DNA
ccagcctaggtaacagagcc

SEQ ID NO: 128327 - DNA, 20 bp, synthetic construct
  source 1..20: mol_type = other DNA
tccagcctaggtaacagagc

SEQ ID NO: 128328 - DNA, 20 bp, synthetic construct
  source 1..20: mol_type = other DNA
ctccagcctaggtaacagag

SEQ ID NO: 128329 - DNA, 20 bp, synthetic construct
  source 1..20: mol_type = other DNA
actccagcctaggtaacaga

SEQ ID NO: 128330 - DNA, 20 bp, synthetic construct
  source 1..20: mol_type = other DNA
cactccagcctaggtaacag

SEQ ID NO: 128331 - DNA, 20 bp, synthetic construct
  source 1..20: mol_type = other DNA
gcactccagcctaggtaaca

SEQ ID NO: 128332 - DNA, 20 bp, synthetic construct
  source 1..20: mol_type = other DNA
tgcactccagcctaggtaac

SEQ ID NO: 128333 - DNA, 20 bp, synthetic construct
  source 1..20: mol_type = other DNA
ctgcactccagcctaggtaa

SEQ ID NO: 128334 - DNA, 20 bp, synthetic construct
  source 1..20: mol_type = other DNA
actgcactccagcctaggta

SEQ ID NO: 128335 - DNA, 20 bp, synthetic construct
  source 1..20: mol_type = other DNA
cactgcactccagcctaggt

SEQ ID NO: 128336 - DNA, 20 bp, synthetic construct
  source 1..20: mol_type = other DNA
ccactgcactccagcctagg

SEQ ID NO: 128337 - DNA, 20 bp, synthetic construct
  source 1..20: mol_type = other DNA
cccactgcactccagcctag

SEQ ID NO: 128338 - DNA, 20 bp, synthetic construct
  source 1..20: mol_type = other DNA
tcccactgcactccagccta

SEQ ID NO: 128339 - DNA, 20 bp, synthetic construct
  source 1..20: mol_type = other DNA
atcccactgcactccagcct

SEQ ID NO: 128340 - DNA, 20 bp, synthetic construct
  source 1..20: mol_type = other DNA
catcccactgcactccagcc

SEQ ID NO: 128341 - DNA, 20 bp, synthetic construct
  source 1..20: mol_type = other DNA
tcatcccactgcactccagc

SEQ ID NO: 128342 - DNA, 20 bp, synthetic construct
  source 1..20: mol_type = other DNA
atcatcccactgcactccag

SEQ ID NO: 128343 - DNA, 20 bp, synthetic construct
  source 1..20: mol_type = other DNA
gatcatcccactgcactcca

SEQ ID NO: 128344 - DNA, 20 bp, synthetic construct
  source 1..20: mol_type = other DNA
agatcatcccactgcactcc

SEQ ID NO: 128345 - DNA, 20 bp, synthetic construct
  source 1..20: mol_type = other DNA
cagatcatcccactgcactc

SEQ ID NO: 128346 - DNA, 20 bp, synthetic construct
  source 1..20: mol_type = other DNA
ccagatcatcccactgcact

SEQ ID NO: 128347 - DNA, 20 bp, synthetic construct
  source 1..20: mol_type = other DNA
cccagatcatcccactgcac

SEQ ID NO: 128348 - DNA, 20 bp, synthetic construct
  source 1..20: mol_type = other DNA
gcccagatcatcccactgca

SEQ ID NO: 128349 - DNA, 20 bp, synthetic construct
  source 1..20: mol_type = other DNA
tgcccagatcatcccactgc

SEQ ID NO: 128350 - DNA, 20 bp, synthetic construct
  source 1..20: mol_type = other DNA
atgcccagatcatcccactg

SEQ ID NO: 128351 - DNA, 20 bp, synthetic construct
  source 1..20: mol_type = other DNA
tatgcccagatcatcccact

SEQ ID NO: 128352 - DNA, 20 bp, synthetic construct
  source 1..20: mol_type = other DNA
gtatgcccagatcatcccac

SEQ ID NO: 128353 - DNA, 20 bp, synthetic construct
  source 1..20: mol_type = other DNA
agtatgcccagatcatccca

SEQ ID NO: 128354 - DNA, 20 bp, synthetic construct
  source 1..20: mol_type = other DNA
cagtatgcccagatcatccc

SEQ ID NO: 128355 - DNA, 20 bp, synthetic construct
  source 1..20: mol_type = other DNA
gcagtatgcccagatcatcc

SEQ ID NO: 128356 - DNA, 20 bp, synthetic construct
  source 1..20: mol_type = other DNA
tgcagtatgcccagatcatc

SEQ ID NO: 128357 - DNA, 20 bp, synthetic construct
  source 1..20: mol_type = other DNA
ctgcagtatgcccagatcat

SEQ ID NO: 128358 - DNA, 20 bp, synthetic construct
  source 1..20: mol_type = other DNA
gctgcagtatgcccagatca

SEQ ID NO: 128359 - DNA, 20 bp, synthetic construct
  source 1..20: mol_type = other DNA
ggctgcagtatgcccagatc

SEQ ID NO: 128360 - DNA, 20 bp, synthetic construct
  source 1..20: mol_type = other DNA
aggctgcagtatgcccagat

SEQ ID NO: 128361 - DNA, 20 bp, synthetic construct
  source 1..20: mol_type = other DNA
gaggctgcagtatgcccaga

SEQ ID NO: 128362 - DNA, 20 bp, synthetic construct
  source 1..20: mol_type = other DNA
tgaggctgcagtatgcccag

SEQ ID NO: 128363 - DNA, 20 bp, synthetic construct
  source 1..20: mol_type = other DNA
ttgaggctgcagtatgccca

SEQ ID NO: 128364 - DNA, 20 bp, synthetic construct
  source 1..20: mol_type = other DNA
gttgaggctgcagtatgccc

SEQ ID NO: 128365 - DNA, 20 bp, synthetic construct
  source 1..20: mol_type = other DNA
agttgaggctgcagtatgcc

SEQ ID NO: 128366 - DNA, 20 bp, synthetic construct
  source 1..20: mol_type = other DNA
aagttgaggctgcagtatgc

SEQ ID NO: 128367 - DNA, 20 bp, synthetic construct
  source 1..20: mol_type = other DNA
gaagttgaggctgcagtatg

SEQ ID NO: 128368 - DNA, 20 bp, synthetic construct
  source 1..20: mol_type = other DNA
ggaagttgaggctgcagtat

SEQ ID NO: 128369 - DNA, 20 bp, synthetic construct
  source 1..20: mol_type = other DNA
gggaagttgaggctgcagta

SEQ ID NO: 128370 - DNA, 20 bp, synthetic construct
  source 1..20: mol_type = other DNA
cgggaagttgaggctgcagt

SEQ ID NO: 128371 - DNA, 20 bp, synthetic construct
  source 1..20: mol_type = other DNA
tcgggaagttgaggctgcag

SEQ ID NO: 128372 - DNA, 20 bp, synthetic construct
  source 1..20: mol_type = other DNA
ctcgggaagttgaggctgca

SEQ ID NO: 128373 - DNA, 20 bp, synthetic construct
  source 1..20: mol_type = other DNA
gctcgggaagttgaggctgc

SEQ ID NO: 128374 - DNA, 20 bp, synthetic construct
  source 1..20: mol_type = other DNA
agctcgggaagttgaggctg

SEQ ID NO: 128375 - DNA, 20 bp, synthetic construct
  source 1..20: mol_type = other DNA
tagctcgggaagttgaggct

SEQ ID NO: 128376 - DNA, 20 bp, synthetic construct
  source 1..20: mol_type = other DNA
ttagctcgggaagttgaggc

SEQ ID NO: 128377 - DNA, 20 bp, synthetic construct
  source 1..20: mol_type = other DNA
cttagctcgggaagttgagg

SEQ ID NO: 128378 - DNA, 20 bp, synthetic construct
  source 1..20: mol_type = other DNA
ccttagctcgggaagttgag

SEQ ID NO: 128379 - DNA, 20 bp, synthetic construct
  source 1..20: mol_type = other DNA
gccttagctcgggaagttga

SEQ ID NO: 128380 - DNA, 20 bp, synthetic construct
  source 1..20: mol_type = other DNA
tgccttagctcgggaagttg

SEQ ID NO: 128381 - DNA, 20 bp, synthetic construct
  source 1..20: mol_type = other DNA
ttgccttagctcgggaagtt

SEQ ID NO: 128382 - DNA, 20 bp, synthetic construct
  source 1..20: mol_type = other DNA
attgccttagctcgggaagt

SEQ ID NO: 128383 - DNA, 20 bp, synthetic construct
  source 1..20: mol_type = other DNA
gattgccttagctcgggaag

SEQ ID NO: 128384 - DNA, 20 bp, synthetic construct
  source 1..20: mol_type = other DNA
ggattgccttagctcgggaa

SEQ ID NO: 128385 - DNA, 20 bp, synthetic construct
  source 1..20: mol_type = other DNA
gggattgccttagctcggga

SEQ ID NO: 128386 - DNA, 20 bp, synthetic construct
  source 1..20: mol_type = other DNA
ggggattgccttagctcggg

SEQ ID NO: 128387 - DNA, 20 bp, synthetic construct
  source 1..20: mol_type = other DNA
gggggattgccttagctcgg

SEQ ID NO: 128388 - DNA, 20 bp, synthetic construct
  source 1..20: mol_type = other DNA
ggggggattgccttagctcg

SEQ ID NO: 128389 - DNA, 20 bp, synthetic construct
  source 1..20: mol_type = other DNA
tggggggattgccttagctc

SEQ ID NO: 128390 - DNA, 20 bp, synthetic construct
  source 1..20: mol_type = other DNA
gtggggggattgccttagct

SEQ ID NO: 128391 - DNA, 20 bp, synthetic construct
  source 1..20: mol_type = other DNA
ggtggggggattgccttagc

SEQ ID NO: 128392 - DNA, 20 bp, synthetic construct
  source 1..20: mol_type = other DNA
aggtggggggattgccttag

SEQ ID NO: 128393 - DNA, 20 bp, synthetic construct
  source 1..20: mol_type = other DNA
gaggtggggggattgcctta

SEQ ID NO: 128394 - DNA, 20 bp, synthetic construct
  source 1..20: mol_type = other DNA
tgaggtggggggattgcctt

SEQ ID NO: 128395 - DNA, 20 bp, synthetic construct
  source 1..20: mol_type = other DNA
ctgaggtggggggattgcct

SEQ ID NO: 128396 - DNA, 20 bp, synthetic construct
  source 1..20: mol_type = other DNA
gctgaggtggggggattgcc

SEQ ID NO: 128397 - DNA, 20 bp, synthetic construct
  source 1..20: mol_type = other DNA
ggctgaggtggggggattgc

SEQ ID NO: 128398 - DNA, 20 bp, synthetic construct
  source 1..20: mol_type = other DNA
aggctgaggtggggggattg

SEQ ID NO: 128399 - DNA, 20 bp, synthetic construct
  source 1..20: mol_type = other DNA
gaggctgaggtggggggatt

SEQ ID NO: 128400 - DNA, 20 bp, synthetic construct
  source 1..20: mol_type = other DNA
ggaggctgaggtggggggat

SEQ ID NO: 128401 - DNA, 20 bp, synthetic construct
  source 1..20: mol_type = other DNA
gggaggctgaggtgggggga

SEQ ID NO: 128402 - DNA, 20 bp, synthetic construct
  source 1..20: mol_type = other DNA
tgggaggctgaggtgggggg

SEQ ID NO: 128403 - DNA, 20 bp, synthetic construct
  source 1..20: mol_type = other DNA
ttgggaggctgaggtggggg

SEQ ID NO: 128404 - DNA, 20 bp, synthetic construct
  source 1..20: mol_type = other DNA
cttgggaggctgaggtgggg

SEQ ID NO: 128405 - DNA, 20 bp, synthetic construct
  source 1..20: mol_type = other DNA
acttgggaggctgaggtggg

SEQ ID NO: 128406 - DNA, 20 bp, synthetic construct
  source 1..20: mol_type = other DNA
tacttgggaggctgaggtgg

SEQ ID NO: 128407 - DNA, 20 bp, synthetic construct
  source 1..20: mol_type = other DNA
ctacttgggaggctgaggtg

SEQ ID NO: 128408 - DNA, 20 bp, synthetic construct
  source 1..20: mol_type = other DNA
gctacttgggaggctgaggt

SEQ ID NO: 128409 - DNA, 20 bp, synthetic construct
  source 1..20: mol_type = other DNA
agctacttgggaggctgagg

SEQ ID NO: 128410 - DNA, 20 bp, synthetic construct
  source 1..20: mol_type = other DNA
cagctacttgggaggctgag

SEQ ID NO: 128411 - DNA, 20 bp, synthetic construct
  source 1..20: mol_type = other DNA
ccagctacttgggaggctga

SEQ ID NO: 128412 - DNA, 20 bp, synthetic construct
  source 1..20: mol_type = other DNA
cccagctacttgggaggctg

SEQ ID NO: 128413 - DNA, 20 bp, synthetic construct
  source 1..20: mol_type = other DNA
tcccagctacttgggaggct

SEQ ID NO: 128414 - DNA, 20 bp, synthetic construct
  source 1..20: mol_type = other DNA
gtcccagctacttgggaggc

SEQ ID NO: 128415 - DNA, 20 bp, synthetic construct
  source 1..20: mol_type = other DNA
agtcccagctacttgggagg

SEQ ID NO: 128416 - DNA, 20 bp, synthetic construct
  source 1..20: mol_type = other DNA
tagtcccagctacttgggag

SEQ ID NO: 128417 - DNA, 20 bp, synthetic construct
  source 1..20: mol_type = other DNA
gtagtcccagctacttggga

SEQ ID NO: 128418 - DNA, 20 bp, synthetic construct
  source 1..20: mol_type = other DNA
tgtagtcccagctacttggg

SEQ ID NO: 128419 - DNA, 20 bp, synthetic construct
  source 1..20: mol_type = other DNA
ctgtagtcccagctacttgg

SEQ ID NO: 128420 - DNA, 20 bp, synthetic construct
  source 1..20: mol_type = other DNA
cctgtagtcccagctacttg

SEQ ID NO: 128421 - DNA, 20 bp, synthetic construct
  source 1..20: mol_type = other DNA
gcctgtagtcccagctactt

SEQ ID NO: 128422 - DNA, 20 bp, synthetic construct
  source 1..20: mol_type = other DNA
tgcctgtagtcccagctact

SEQ ID NO: 128423 - DNA, 20 bp, synthetic construct
  source 1..20: mol_type = other DNA
ttgcctgtagtcccagctac

SEQ ID NO: 128424 - DNA, 20 bp, synthetic construct
  source 1..20: mol_type = other DNA
cttgcctgtagtcccagcta

SEQ ID NO: 128425 - DNA, 20 bp, synthetic construct
  source 1..20: mol_type = other DNA
gcttgcctgtagtcccagct

SEQ ID NO: 128426 - DNA, 20 bp, synthetic construct
  source 1..20: mol_type = other DNA
tgcttgcctgtagtcccagc

SEQ ID NO: 128427 - DNA, 20 bp, synthetic construct
  source 1..20: mol_type = other DNA
gtgcttgcctgtagtcccag

SEQ ID NO: 128428 - DNA, 20 bp, synthetic construct
  source 1..20: mol_type = other DNA
ggtgcttgcctgtagtccca

SEQ ID NO: 128429 - DNA, 20 bp, synthetic construct
  source 1..20: mol_type = other DNA
tggtgcttgcctgtagtccc

SEQ ID NO: 128430 - DNA, 20 bp, synthetic construct
  source 1..20: mol_type = other DNA
gtggtgcttgcctgtagtcc

SEQ ID NO: 128431 - DNA, 20 bp, synthetic construct
  source 1..20: mol_type = other DNA
ggtggtgcttgcctgtagtc

SEQ ID NO: 128432 - DNA, 20 bp, synthetic construct
  source 1..20: mol_type = other DNA
cggtggtgcttgcctgtagt

SEQ ID NO: 128433 - DNA, 20 bp, synthetic construct
  source 1..20: mol_type = other DNA
acggtggtgcttgcctgtag

SEQ ID NO: 128434 - DNA, 20 bp, synthetic construct
  source 1..20: mol_type = other DNA
cacggtggtgcttgcctgta

SEQ ID NO: 128435 - DNA, 20 bp, synthetic construct
  source 1..20: mol_type = other DNA
gcacggtggtgcttgcctgt

SEQ ID NO: 128436 - DNA, 20 bp, synthetic construct
  source 1..20: mol_type = other DNA
ggcacggtggtgcttgcctg

SEQ ID NO: 128437 - DNA, 20 bp, synthetic construct
  source 1..20: mol_type = other DNA
aggcacggtggtgcttgcct

SEQ ID NO: 128438 - DNA, 20 bp, synthetic construct
  source 1..20: mol_type = other DNA
caggcacggtggtgcttgcc

SEQ ID NO: 128439 - DNA, 20 bp, synthetic construct
  source 1..20: mol_type = other DNA
ccaggcacggtggtgcttgc

SEQ ID NO: 128440 - DNA, 20 bp, synthetic construct
  source 1..20: mol_type = other DNA
gccaggcacggtggtgcttg

SEQ ID NO: 128441 - DNA, 20 bp, synthetic construct
  source 1..20: mol_type = other DNA
agccaggcacggtggtgctt

SEQ ID NO: 128442 - DNA, 20 bp, synthetic construct
  source 1..20: mol_type = other DNA
aagccaggcacggtggtgct

SEQ ID NO: 128443 - DNA, 20 bp, synthetic construct
  source 1..20: mol_type = other DNA
taagccaggcacggtggtgc

SEQ ID NO: 128444 - DNA, 20 bp, synthetic construct
  source 1..20: mol_type = other DNA
ttaagccaggcacggtggtg

SEQ ID NO: 128445 - DNA, 20 bp, synthetic construct
  source 1..20: mol_type = other DNA
attaagccaggcacggtggt

SEQ ID NO: 128446 - DNA, 20 bp, synthetic construct
  source 1..20: mol_type = other DNA
aattaagccaggcacggtgg

SEQ ID NO: 128447 - DNA, 20 bp, synthetic construct
  source 1..20: mol_type = other DNA
aaattaagccaggcacggtg

SEQ ID NO: 128448 - DNA, 20 bp, synthetic construct
  source 1..20: mol_type = other DNA
aaaattaagccaggcacggt

SEQ ID NO: 128449 - DNA, 20 bp, synthetic construct
  source 1..20: mol_type = other DNA
aaaaattaagccaggcacgg

SEQ ID NO: 128450 - DNA, 20 bp, synthetic construct
  source 1..20: mol_type = other DNA
caaaaattaagccaggcacg

SEQ ID NO: 128451 - DNA, 20 bp, synthetic construct
  source 1..20: mol_type = other DNA
acaaaaattaagccaggcac

SEQ ID NO: 128452 - DNA, 20 bp, synthetic construct
  source 1..20: mol_type = other DNA
tacaaaaattaagccaggca

SEQ ID NO: 128453 - DNA, 20 bp, synthetic construct
  source 1..20: mol_type = other DNA
atacaaaaattaagccaggc

SEQ ID NO: 128454 - DNA, 20 bp, synthetic construct
  source 1..20: mol_type = other DNA
tatacaaaaattaagccagg

SEQ ID NO: 128455 - DNA, 20 bp, synthetic construct
  source 1..20: mol_type = other DNA
atatacaaaaattaagccag

SEQ ID NO: 128456 - DNA, 20 bp, synthetic construct
  source 1..20: mol_type = other DNA
aatatacaaaaattaagcca

SEQ ID NO: 128457 - DNA, 20 bp, synthetic construct
  source 1..20: mol_type = other DNA
aaatatacaaaaattaagcc

SEQ ID NO: 128458 - DNA, 20 bp, synthetic construct
  source 1..20: mol_type = other DNA
aaaatatacaaaaattaagc

SEQ ID NO: 128459 - DNA, 20 bp, synthetic construct
  source 1..20: mol_type = other DNA
caaaatatacaaaaattaag

SEQ ID NO: 128460 - DNA, 20 bp, synthetic construct
  source 1..20: mol_type = other DNA
gcaaaatatacaaaaattaa

SEQ ID NO: 128461 - DNA, 20 bp, synthetic construct
  source 1..20: mol_type = other DNA
tgcaaaatatacaaaaatta

SEQ ID NO: 128462 - DNA, 20 bp, synthetic construct
  source 1..20: mol_type = other DNA
ctgcaaaatatacaaaaatt

SEQ ID NO: 128463 - DNA, 20 bp, synthetic construct
  source 1..20: mol_type = other DNA
tctgcaaaatatacaaaaat

SEQ ID NO: 128464 - DNA, 20 bp, synthetic construct
  source 1..20: mol_type = other DNA
ctctgcaaaatatacaaaaa

SEQ ID NO: 128465 - DNA, 20 bp, synthetic construct
  source 1..20: mol_type = other DNA
tctctgcaaaatatacaaaa

SEQ ID NO: 128466 - DNA, 20 bp, synthetic construct
  source 1..20: mol_type = other DNA
gtctctgcaaaatatacaaa

SEQ ID NO: 128467 - DNA, 20 bp, synthetic construct
  source 1..20: mol_type = other DNA
tgtctctgcaaaatatacaa

SEQ ID NO: 128468 - DNA, 20 bp, synthetic construct
  source 1..20: mol_type = other DNA
ctgtctctgcaaaatataca

SEQ ID NO: 128469 - DNA, 20 bp, synthetic construct
  source 1..20: mol_type = other DNA
cctgtctctgcaaaatatac

SEQ ID NO: 128470 - DNA, 20 bp, synthetic construct
  source 1..20: mol_type = other DNA
ccctgtctctgcaaaatata

SEQ ID NO: 128471 - DNA, 20 bp, synthetic construct
  source 1..20: mol_type = other DNA
accctgtctctgcaaaatat

SEQ ID NO: 128472 - DNA, 20 bp, synthetic construct
  source 1..20: mol_type = other DNA
aaccctgtctctgcaaaata

SEQ ID NO: 128473 - DNA, 20 bp, synthetic construct
  source 1..20: mol_type = other DNA
aaaccctgtctctgcaaaat

SEQ ID NO: 128474 - DNA, 20 bp, synthetic construct
  source 1..20: mol_type = other DNA
gaaaccctgtctctgcaaaa

SEQ ID NO: 128475 - DNA, 20 bp, synthetic construct
  source 1..20: mol_type = other DNA
tgaaaccctgtctctgcaaa

SEQ ID NO: 128476 - DNA, 20 bp, synthetic construct
  source 1..20: mol_type = other DNA
gtgaaaccctgtctctgcaa

SEQ ID NO: 128477 - DNA, 20 bp, synthetic construct
  source 1..20: mol_type = other DNA
ggtgaaaccctgtctctgca

SEQ ID NO: 128478 - DNA, 20 bp, synthetic construct
  source 1..20: mol_type = other DNA
tggtgaaaccctgtctctgc

SEQ ID NO: 128479 - DNA, 20 bp, synthetic construct
  source 1..20: mol_type = other DNA
atggtgaaaccctgtctctg

SEQ ID NO: 128480 - DNA, 20 bp, synthetic construct
  source 1..20: mol_type = other DNA
catggtgaaaccctgtctct

SEQ ID NO: 128481 - DNA, 20 bp, synthetic construct
  source 1..20: mol_type = other DNA
acatggtgaaaccctgtctc

SEQ ID NO: 128482 - DNA, 20 bp, synthetic construct
  source 1..20: mol_type = other DNA
aacatggtgaaaccctgtct

SEQ ID NO: 128483 - DNA, 20 bp, synthetic construct
  source 1..20: mol_type = other DNA
caacatggtgaaaccctgtc

SEQ ID NO: 128484 - DNA, 20 bp, synthetic construct
  source 1..20: mol_type = other DNA
gcaacatggtgaaaccctgt

SEQ ID NO: 128485 - DNA, 20 bp, synthetic construct
  source 1..20: mol_type = other DNA
ggcaacatggtgaaaccctg

SEQ ID NO: 128486 - DNA, 20 bp, synthetic construct
  source 1..20: mol_type = other DNA
gggcaacatggtgaaaccct

SEQ ID NO: 128487 - DNA, 20 bp, synthetic construct
  source 1..20: mol_type = other DNA
tgggcaacatggtgaaaccc

SEQ ID NO: 128488 - DNA, 20 bp, synthetic construct
  source 1..20: mol_type = other DNA
ctgggcaacatggtgaaacc

SEQ ID NO: 128489 - DNA, 20 bp, synthetic construct
  source 1..20: mol_type = other DNA
cctgggcaacatggtgaaac

SEQ ID NO: 128490 - DNA, 20 bp, synthetic construct
  source 1..20: mol_type = other DNA
gcctgggcaacatggtgaaa

SEQ ID NO: 128491 - DNA, 20 bp, synthetic construct
  source 1..20: mol_type = other DNA
agcctgggcaacatggtgaa

SEQ ID NO: 128492 - DNA, 20 bp, synthetic construct
  source 1..20: mol_type = other DNA
cagcctgggcaacatggtga

SEQ ID NO: 128493 - DNA, 20 bp, synthetic construct
  source 1..20: mol_type = other DNA
ccagcctgggcaacatggtg

SEQ ID NO: 128494 - DNA, 20 bp, synthetic construct
  source 1..20: mol_type = other DNA
accagcctgggcaacatggt

SEQ ID NO: 128495 - DNA, 20 bp, synthetic construct
  source 1..20: mol_type = other DNA
caccagcctgggcaacatgg

SEQ ID NO: 128496 - DNA, 20 bp, synthetic construct
  source 1..20: mol_type = other DNA
acaccagcctgggcaacatg

SEQ ID NO: 128497 - DNA, 20 bp, synthetic construct
  source 1..20: mol_type = other DNA
gacaccagcctgggcaacat

SEQ ID NO: 128498 - DNA, 20 bp, synthetic construct
  source 1..20: mol_type = other DNA
cgacaccagcctgggcaaca

SEQ ID NO: 128499 - DNA, 20 bp, synthetic construct
  source 1..20: mol_type = other DNA
tcgacaccagcctgggcaac

SEQ ID NO: 128500 - DNA, 20 bp, synthetic construct
  source 1..20: mol_type = other DNA
ttcgacaccagcctgggcaa

SEQ ID NO: 128501 - DNA, 20 bp, synthetic construct
  source 1..20: mol_type = other DNA
gttcgacaccagcctgggca

SEQ ID NO: 128502 - DNA, 20 bp, synthetic construct
  source 1..20: mol_type = other DNA
agttcgacaccagcctgggc

SEQ ID NO: 128503 - DNA, 20 bp, synthetic construct
  source 1..20: mol_type = other DNA
gagttcgacaccagcctggg

SEQ ID NO: 128504 - DNA, 20 bp, synthetic construct
  source 1..20: mol_type = other DNA
ggagttcgacaccagcctgg

SEQ ID NO: 128505 - DNA, 20 bp, synthetic construct
  source 1..20: mol_type = other DNA
aggagttcgacaccagcctg

SEQ ID NO: 128506 - DNA, 20 bp, synthetic construct
  source 1..20: mol_type = other DNA
caggagttcgacaccagcct

SEQ ID NO: 128507 - DNA, 20 bp, synthetic construct
  source 1..20: mol_type = other DNA
tcaggagttcgacaccagcc

SEQ ID NO: 128508 - DNA, 20 bp, synthetic construct
  source 1..20: mol_type = other DNA
ctcaggagttcgacaccagc

SEQ ID NO: 128509 - DNA, 20 bp, synthetic construct
  source 1..20: mol_type = other DNA
gctcaggagttcgacaccag

SEQ ID NO: 128510 - DNA, 20 bp, synthetic construct
  source 1..20: mol_type = other DNA
agctcaggagttcgacacca

SEQ ID NO: 128511 - DNA, 20 bp, synthetic construct
  source 1..20: mol_type = other DNA
gagctcaggagttcgacacc

SEQ ID NO: 128512 - DNA, 20 bp, synthetic construct
  source 1..20: mol_type = other DNA
tgagctcaggagttcgacac

SEQ ID NO: 128513 - DNA, 20 bp, synthetic construct
  source 1..20: mol_type = other DNA
ttgagctcaggagttcgaca

SEQ ID NO: 128514 - DNA, 20 bp, synthetic construct
  source 1..20: mol_type = other DNA
cttgagctcaggagttcgac

SEQ ID NO: 128515 - DNA, 20 bp, synthetic construct
  source 1..20: mol_type = other DNA
gcttgagctcaggagttcga

SEQ ID NO: 128516 - DNA, 20 bp, synthetic construct
  source 1..20: mol_type = other DNA
tgcttgagctcaggagttcg

SEQ ID NO: 128517 - DNA, 20 bp, synthetic construct
  source 1..20: mol_type = other DNA
ctgcttgagctcaggagttc

SEQ ID NO: 128518 - DNA, 20 bp, synthetic construct
  source 1..20: mol_type = other DNA
actgcttgagctcaggagtt

SEQ ID NO: 128519 - DNA, 20 bp, synthetic construct
  source 1..20: mol_type = other DNA
gactgcttgagctcaggagt

SEQ ID NO: 128520 - DNA, 20 bp, synthetic construct
  source 1..20: mol_type = other DNA
agactgcttgagctcaggag

SEQ ID NO: 128521 - DNA, 20 bp, synthetic construct
  source 1..20: mol_type = other DNA
cagactgcttgagctcagga

SEQ ID NO: 128522 - DNA, 20 bp, synthetic construct
  source 1..20: mol_type = other DNA
gcagactgcttgagctcagg

SEQ ID NO: 128523 - DNA, 20 bp, synthetic construct
  source 1..20: mol_type = other DNA
ggcagactgcttgagctcag

SEQ ID NO: 128524 - DNA, 20 bp, synthetic construct
  source 1..20: mol_type = other DNA
aggcagactgcttgagctca

SEQ ID NO: 128525 - DNA, 20 bp, synthetic construct
  source 1..20: mol_type = other DNA
caggcagactgcttgagctc

SEQ ID NO: 128526 - DNA, 20 bp, synthetic construct
  source 1..20: mol_type = other DNA
acaggcagactgcttgagct

SEQ ID NO: 128527 - DNA, 20 bp, synthetic construct
  source 1..20: mol_type = other DNA
cacaggcagactgcttgagc

SEQ ID NO: 128528 - DNA, 20 bp, synthetic construct
  source 1..20: mol_type = other DNA
acacaggcagactgcttgag

SEQ ID NO: 128529 - DNA, 20 bp, synthetic construct
  source 1..20: mol_type = other DNA
gacacaggcagactgcttga

SEQ ID NO: 128530 - DNA, 20 bp, synthetic construct
  source 1..20: mol_type = other DNA
tgacacaggcagactgcttg

SEQ ID NO: 128531 - DNA, 20 bp, synthetic construct
  source 1..20: mol_type = other DNA
ctgacacaggcagactgctt

SEQ ID NO: 128532 - DNA, 20 bp, synthetic construct
  source 1..20: mol_type = other DNA
gctgacacaggcagactgct

SEQ ID NO: 128533 - DNA, 20 bp, synthetic construct
  source 1..20: mol_type = other DNA
ggctgacacaggcagactgc

SEQ ID NO: 128534 - DNA, 20 bp, synthetic construct
  source 1..20: mol_type = other DNA
aggctgacacaggcagactg

SEQ ID NO: 128535 - DNA, 20 bp, synthetic construct
  source 1..20: mol_type = other DNA
gaggctgacacaggcagact

SEQ ID NO: 128536 - DNA, 20 bp, synthetic construct
  source 1..20: mol_type = other DNA
tgaggctgacacaggcagac

SEQ ID NO: 128537 - DNA, 20 bp, synthetic construct
  source 1..20: mol_type = other DNA
gtgaggctgacacaggcaga

SEQ ID NO: 128538 - DNA, 20 bp, synthetic construct
  source 1..20: mol_type = other DNA
tgtgaggctgacacaggcag

SEQ ID NO: 128539 - DNA, 20 bp, synthetic construct
  source 1..20: mol_type = other DNA
ttgtgaggctgacacaggca

SEQ ID NO: 128540 - DNA, 20 bp, synthetic construct
  source 1..20: mol_type = other DNA
tttgtgaggctgacacaggc

SEQ ID NO: 128541 - DNA, 20 bp, synthetic construct
  source 1..20: mol_type = other DNA
ctttgtgaggctgacacagg

SEQ ID NO: 128542 - DNA, 20 bp, synthetic construct
  source 1..20: mol_type = other DNA
actttgtgaggctgacacag

SEQ ID NO: 128543 - DNA, 20 bp, synthetic construct
  source 1..20: mol_type = other DNA
cactttgtgaggctgacaca

SEQ ID NO: 128544 - DNA, 20 bp, synthetic construct
  source 1..20: mol_type = other DNA
ccactttgtgaggctgacac

SEQ ID NO: 128545 - DNA, 20 bp, synthetic construct
  source 1..20: mol_type = other DNA
accactttgtgaggctgaca

SEQ ID NO: 128546 - DNA, 20 bp, synthetic construct
  source 1..20: mol_type = other DNA
caccactttgtgaggctgac

SEQ ID NO: 128547 - DNA, 20 bp, synthetic construct
  source 1..20: mol_type = other DNA
ccaccactttgtgaggctga

SEQ ID NO: 128548 - DNA, 20 bp, synthetic construct
  source 1..20: mol_type = other DNA
cccaccactttgtgaggctg

SEQ ID NO: 128549 - DNA, 20 bp, synthetic construct
  source 1..20: mol_type = other DNA
tcccaccactttgtgaggct

SEQ ID NO: 128550 - DNA, 20 bp, synthetic construct
  source 1..20: mol_type = other DNA
gtcccaccactttgtgaggc

SEQ ID NO: 128551 - DNA, 20 bp, synthetic construct
  source 1..20: mol_type = other DNA
agtcccaccactttgtgagg

SEQ ID NO: 128552 - DNA, 20 bp, synthetic construct
  source 1..20: mol_type = other DNA
tagtcccaccactttgtgag

SEQ ID NO: 128553 - DNA, 20 bp, synthetic construct
  source 1..20: mol_type = other DNA
gtagtcccaccactttgtga

SEQ ID NO: 128554 - DNA, 20 bp, synthetic construct
  source 1..20: mol_type = other DNA
tgtagtcccaccactttgtg

SEQ ID NO: 128555 - DNA, 20 bp, synthetic construct
  source 1..20: mol_type = other DNA
ctgtagtcccaccactttgt

SEQ ID NO: 128556 - DNA, 20 bp, synthetic construct
  source 1..20: mol_type = other DNA
cctgtagtcccaccactttg

SEQ ID NO: 128557 - DNA, 20 bp, synthetic construct
  source 1..20: mol_type = other DNA
gcctgtagtcccaccacttt

SEQ ID NO: 128558 - DNA, 20 bp, synthetic construct
  source 1..20: mol_type = other DNA
tgcctgtagtcccaccactt

SEQ ID NO: 128559 - DNA, 20 bp, synthetic construct
  source 1..20: mol_type = other DNA
atgcctgtagtcccaccact

SEQ ID NO: 128560 - DNA, 20 bp, synthetic construct
  source 1..20: mol_type = other DNA
catgcctgtagtcccaccac

SEQ ID NO: 128561 - DNA, 20 bp, synthetic construct
  source 1..20: mol_type = other DNA
tcatgcctgtagtcccacca

SEQ ID NO: 128562 - DNA, 20 bp, synthetic construct
  source 1..20: mol_type = other DNA
ctcatgcctgtagtcccacc

SEQ ID NO: 128563 - DNA, 20 bp, synthetic construct
  source 1..20: mol_type = other DNA
gctcatgcctgtagtcccac

SEQ ID NO: 128564 - DNA, 20 bp, synthetic construct
  source 1..20: mol_type = other DNA
ggctcatgcctgtagtccca

SEQ ID NO: 128565 - DNA, 20 bp, synthetic construct
  source 1..20: mol_type = other DNA
tggctcatgcctgtagtccc

SEQ ID NO: 128566 - DNA, 20 bp, synthetic construct
  source 1..20: mol_type = other DNA
gtggctcatgcctgtagtcc

SEQ ID NO: 128567 - DNA, 20 bp, synthetic construct
  source 1..20: mol_type = other DNA
ggtggctcatgcctgtagtc

SEQ ID NO: 128568 - DNA, 20 bp, synthetic construct
  source 1..20: mol_type = other DNA
tggtggctcatgcctgtagt

SEQ ID NO: 128569 - DNA, 20 bp, synthetic construct
  source 1..20: mol_type = other DNA
atggtggctcatgcctgtag

SEQ ID NO: 128570 - DNA, 20 bp, synthetic construct
  source 1..20: mol_type = other DNA
catggtggctcatgcctgta

SEQ ID NO: 128571 - DNA, 20 bp, synthetic construct
  source 1..20: mol_type = other DNA
ccatggtggctcatgcctgt

SEQ ID NO: 128572 - DNA, 20 bp, synthetic construct
  source 1..20: mol_type = other DNA
gccatggtggctcatgcctg

SEQ ID NO: 128573 - DNA, 20 bp, synthetic construct
  source 1..20: mol_type = other DNA
tgccatggtggctcatgcct

SEQ ID NO: 128574 - DNA, 20 bp, synthetic construct
  source 1..20: mol_type = other DNA
ctgccatggtggctcatgcc

SEQ ID NO: 128575 - DNA, 20 bp, synthetic construct
  source 1..20: mol_type = other DNA
cctgccatggtggctcatgc

SEQ ID NO: 128576 - DNA, 20 bp, synthetic construct
  source 1..20: mol_type = other DNA
gcctgccatggtggctcatg

SEQ ID NO: 128577 - DNA, 20 bp, synthetic construct
  source 1..20: mol_type = other DNA
ggcctgccatggtggctcat

SEQ ID NO: 128578 - DNA, 20 bp, synthetic construct
  source 1..20: mol_type = other DNA
tggcctgccatggtggctca

SEQ ID NO: 128579 - DNA, 20 bp, synthetic construct
  source 1..20: mol_type = other DNA
ctggcctgccatggtggctc

SEQ ID NO: 128580 - DNA, 20 bp, synthetic construct
  source 1..20: mol_type = other DNA
tctggcctgccatggtggct

SEQ ID NO: 128581 - DNA, 20 bp, synthetic construct
  source 1..20: mol_type = other DNA
ttctggcctgccatggtggc

SEQ ID NO: 128582 - DNA, 20 bp, synthetic construct
  source 1..20: mol_type = other DNA
attctggcctgccatggtgg

SEQ ID NO: 128583 - DNA, 20 bp, synthetic construct
  source 1..20: mol_type = other DNA
gattctggcctgccatggtg

SEQ ID NO: 128584 - DNA, 20 bp, synthetic construct
  source 1..20: mol_type = other DNA
tgattctggcctgccatggt

SEQ ID NO: 128585 - DNA, 20 bp, synthetic construct
  source 1..20: mol_type = other DNA
gtgattctggcctgccatgg

SEQ ID NO: 128586 - DNA, 20 bp, synthetic construct
  source 1..20: mol_type = other DNA
tgtgattctggcctgccatg

SEQ ID NO: 128587 - DNA, 20 bp, synthetic construct
  source 1..20: mol_type = other DNA
ttgtgattctggcctgccat

SEQ ID NO: 128588 - DNA, 20 bp, synthetic construct
  source 1..20: mol_type = other DNA
attgtgattctggcctgcca

SEQ ID NO: 128589 - DNA, 20 bp, synthetic construct
  source 1..20: mol_type = other DNA
tattgtgattctggcctgcc

SEQ ID NO: 128590 - DNA, 20 bp, synthetic construct
  source 1..20: mol_type = other DNA
ttattgtgattctggcctgc

SEQ ID NO: 128591 - DNA, 20 bp, synthetic construct
  source 1..20: mol_type = other DNA
tttattgtgattctggcctg

SEQ ID NO: 128592 - DNA, 20 bp, synthetic construct
  source 1..20: mol_type = other DNA
gtttattgtgattctggcct

SEQ ID NO: 128593 - DNA, 20 bp, synthetic construct
  source 1..20: mol_type = other DNA
agtttattgtgattctggcc

SEQ ID NO: 128594 - DNA, 20 bp, synthetic construct
  source 1..20: mol_type = other DNA
aagtttattgtgattctggc

SEQ ID NO: 128595 - DNA, 20 bp, synthetic construct
  source 1..20: mol_type = other DNA
taagtttattgtgattctgg

SEQ ID NO: 128596 - DNA, 20 bp, synthetic construct
  source 1..20: mol_type = other DNA
ataagtttattgtgattctg

SEQ ID NO: 128597 - DNA, 20 bp, synthetic construct
  source 1..20: mol_type = other DNA
tataagtttattgtgattct

SEQ ID NO: 128598 - DNA, 20 bp, synthetic construct
  source 1..20: mol_type = other DNA
ttataagtttattgtgattc

SEQ ID NO: 128599 - DNA, 20 bp, synthetic construct
  source 1..20: mol_type = other DNA
tttataagtttattgtgatt

SEQ ID NO: 128600 - DNA, 20 bp, synthetic construct
  source 1..20: mol_type = other DNA
atttataagtttattgtgat

SEQ ID NO: 128601 - DNA, 20 bp, synthetic construct
  source 1..20: mol_type = other DNA
aatttataagtttattgtga

SEQ ID NO: 128602 - DNA, 20 bp, synthetic construct
  source 1..20: mol_type = other DNA
taatttataagtttattgtg

SEQ ID NO: 128603 - DNA, 20 bp, synthetic construct
  source 1..20: mol_type = other DNA
ttaatttataagtttattgt

SEQ ID NO: 128604 - DNA, 20 bp, synthetic construct
  source 1..20: mol_type = other DNA
gttaatttataagtttattg

SEQ ID NO: 128605 - DNA, 20 bp, synthetic construct
  source 1..20: mol_type = other DNA
agttaatttataagtttatt

SEQ ID NO: 128606 - DNA, 20 bp, synthetic construct
  source 1..20: mol_type = other DNA
aagttaatttataagtttat

SEQ ID NO: 128607 - DNA, 20 bp, synthetic construct
  source 1..20: mol_type = other DNA
caagttaatttataagttta

SEQ ID NO: 128608 - DNA, 20 bp, synthetic construct
  source 1..20: mol_type = other DNA
tcaagttaatttataagttt

SEQ ID NO: 128609 - DNA, 20 bp, synthetic construct
  source 1..20: mol_type = other DNA
ctcaagttaatttataagtt

SEQ ID NO: 128610 - DNA, 20 bp, synthetic construct
  source 1..20: mol_type = other DNA
tctcaagttaatttataagt

SEQ ID NO: 128611 - DNA, 20 bp, synthetic construct
  source 1..20: mol_type = other DNA
ttctcaagttaatttataag

SEQ ID NO: 128612 - DNA, 20 bp, synthetic construct
  source 1..20: mol_type = other DNA
cttctcaagttaatttataa

SEQ ID NO: 128613 - DNA, 20 bp, synthetic construct
  source 1..20: mol_type = other DNA
tcttctcaagttaatttata

SEQ ID NO: 128614 - DNA, 20 bp, synthetic construct
  source 1..20: mol_type = other DNA
ttcttctcaagttaatttat

SEQ ID NO: 128615 - DNA, 20 bp, synthetic construct
  source 1..20: mol_type = other DNA
tttcttctcaagttaattta

SEQ ID NO: 128616 - DNA, 20 bp, synthetic construct
  source 1..20: mol_type = other DNA
atttcttctcaagttaattt

SEQ ID NO: 128617 - DNA, 20 bp, synthetic construct
  source 1..20: mol_type = other DNA
catttcttctcaagttaatt

SEQ ID NO: 128618 - DNA, 20 bp, synthetic construct
  source 1..20: mol_type = other DNA
tcatttcttctcaagttaat

SEQ ID NO: 128619 - DNA, 20 bp, synthetic construct
  source 1..20: mol_type = other DNA
atcatttcttctcaagttaa

SEQ ID NO: 128620 - DNA, 20 bp, synthetic construct
  source 1..20: mol_type = other DNA
aatcatttcttctcaagtta

SEQ ID NO: 128621 - DNA, 20 bp, synthetic construct
  source 1..20: mol_type = other DNA
caatcatttcttctcaagtt

SEQ ID NO: 128622 - DNA, 20 bp, synthetic construct
  source 1..20: mol_type = other DNA
tcaatcatttcttctcaagt

SEQ ID NO: 128623 - DNA, 20 bp, synthetic construct
  source 1..20: mol_type = other DNA
atcaatcatttcttctcaag

SEQ ID NO: 128624 - DNA, 20 bp, synthetic construct
  source 1..20: mol_type = other DNA
catcaatcatttcttctcaa

SEQ ID NO: 128625 - DNA, 20 bp, synthetic construct
  source 1..20: mol_type = other DNA
acatcaatcatttcttctca

SEQ ID NO: 128626 - DNA, 20 bp, synthetic construct
  source 1..20: mol_type = other DNA
gacatcaatcatttcttctc

SEQ ID NO: 128627 - DNA, 20 bp, synthetic construct
  source 1..20: mol_type = other DNA
agacatcaatcatttcttct

SEQ ID NO: 128628 - DNA, 20 bp, synthetic construct
  source 1..20: mol_type = other DNA
aagacatcaatcatttcttc

SEQ ID NO: 128629 - DNA, 20 bp, synthetic construct
  source 1..20: mol_type = other DNA
gaagacatcaatcatttctt

SEQ ID NO: 128630 - DNA, 20 bp, synthetic construct
  source 1..20: mol_type = other DNA
tgaagacatcaatcatttct

SEQ ID NO: 128631 - DNA, 20 bp, synthetic construct
  source 1..20: mol_type = other DNA
atgaagacatcaatcatttc

SEQ ID NO: 128632 - DNA, 20 bp, synthetic construct
  source 1..20: mol_type = other DNA
catgaagacatcaatcattt

SEQ ID NO: 128633 - DNA, 20 bp, synthetic construct
  source 1..20: mol_type = other DNA
tcatgaagacatcaatcatt

SEQ ID NO: 128634 - DNA, 20 bp, synthetic construct
  source 1..20: mol_type = other DNA
atcatgaagacatcaatcat

SEQ ID NO: 128635 - DNA, 20 bp, synthetic construct
  source 1..20: mol_type = other DNA
catcatgaagacatcaatca

SEQ ID NO: 128636 - DNA, 20 bp, synthetic construct
  source 1..20: mol_type = other DNA
acatcatgaagacatcaatc

SEQ ID NO: 128637 - DNA, 20 bp, synthetic construct
  source 1..20: mol_type = other DNA
aacatcatgaagacatcaat

SEQ ID NO: 128638 - DNA, 20 bp, synthetic construct
  source 1..20: mol_type = other DNA
caacatcatgaagacatcaa

SEQ ID NO: 128639 - DNA, 20 bp, synthetic construct
  source 1..20: mol_type = other DNA
tcaacatcatgaagacatca

SEQ ID NO: 128640 - DNA, 20 bp, synthetic construct
  source 1..20: mol_type = other DNA
ctcaacatcatgaagacatc

SEQ ID NO: 128641 - DNA, 20 bp, synthetic construct
  source 1..20: mol_type = other DNA
actcaacatcatgaagacat

SEQ ID NO: 128642 - DNA, 20 bp, synthetic construct
  source 1..20: mol_type = other DNA
gactcaacatcatgaagaca

SEQ ID NO: 128643 - DNA, 20 bp, synthetic construct
  source 1..20: mol_type = other DNA
agactcaacatcatgaagac

SEQ ID NO: 128644 - DNA, 20 bp, synthetic construct
  source 1..20: mol_type = other DNA
aagactcaacatcatgaaga

SEQ ID NO: 128645 - DNA, 20 bp, synthetic construct
  source 1..20: mol_type = other DNA
gaagactcaacatcatgaag

SEQ ID NO: 128646 - DNA, 20 bp, synthetic construct
  source 1..20: mol_type = other DNA
ggaagactcaacatcatgaa

SEQ ID NO: 128647 - DNA, 20 bp, synthetic construct
  source 1..20: mol_type = other DNA
aggaagactcaacatcatga

SEQ ID NO: 128648 - DNA, 20 bp, synthetic construct
  source 1..20: mol_type = other DNA
caggaagactcaacatcatg

SEQ ID NO: 128649 - DNA, 20 bp, synthetic construct
  source 1..20: mol_type = other DNA
acaggaagactcaacatcat

SEQ ID NO: 128650 - DNA, 20 bp, synthetic construct
  source 1..20: mol_type = other DNA
aacaggaagactcaacatca

SEQ ID NO: 128651 - DNA, 20 bp, synthetic construct
  source 1..20: mol_type = other DNA
gaacaggaagactcaacatc

SEQ ID NO: 128652 - DNA, 20 bp, synthetic construct
  source 1..20: mol_type = other DNA
tgaacaggaagactcaacat

SEQ ID NO: 128653 - DNA, 20 bp, synthetic construct
  source 1..20: mol_type = other DNA
ttgaacaggaagactcaaca

SEQ ID NO: 128654 - DNA, 20 bp, synthetic construct
  source 1..20: mol_type = other DNA
cttgaacaggaagactcaac

SEQ ID NO: 128655 - DNA, 20 bp, synthetic construct
  source 1..20: mol_type = other DNA
tcttgaacaggaagactcaa

SEQ ID NO: 128656 - DNA, 20 bp, synthetic construct
  source 1..20: mol_type = other DNA
ttcttgaacaggaagactca

SEQ ID NO: 128657 - DNA, 20 bp, synthetic construct
  source 1..20: mol_type = other DNA
gttcttgaacaggaagactc

SEQ ID NO: 128658 - DNA, 20 bp, synthetic construct
  source 1..20: mol_type = other DNA
tgttcttgaacaggaagact

SEQ ID NO: 128659 - DNA, 20 bp, synthetic construct
  source 1..20: mol_type = other DNA
ttgttcttgaacaggaagac

SEQ ID NO: 128660 - DNA, 20 bp, synthetic construct
  source 1..20: mol_type = other DNA
tttgttcttgaacaggaaga

SEQ ID NO: 128661 - DNA, 20 bp, synthetic construct
  source 1..20: mol_type = other DNA
ctttgttcttgaacaggaag

SEQ ID NO: 128662 - DNA, 20 bp, synthetic construct
  source 1..20: mol_type = other DNA
actttgttcttgaacaggaa

SEQ ID NO: 128663 - DNA, 20 bp, synthetic construct
  source 1..20: mol_type = other DNA
tactttgttcttgaacagga

SEQ ID NO: 128664 - DNA, 20 bp, synthetic construct
  source 1..20: mol_type = other DNA
atactttgttcttgaacagg

SEQ ID NO: 128665 - DNA, 20 bp, synthetic construct
  source 1..20: mol_type = other DNA
tatactttgttcttgaacag

SEQ ID NO: 128666 - DNA, 20 bp, synthetic construct
  source 1..20: mol_type = other DNA
gtatactttgttcttgaaca

SEQ ID NO: 128667 - DNA, 20 bp, synthetic construct
  source 1..20: mol_type = other DNA
ggtatactttgttcttgaac

SEQ ID NO: 128668 - DNA, 20 bp, synthetic construct
  source 1..20: mol_type = other DNA
aggtatactttgttcttgaa

SEQ ID NO: 128669 - DNA, 20 bp, synthetic construct
  source 1..20: mol_type = other DNA
aaggtatactttgttcttga

SEQ ID NO: 128670 - DNA, 20 bp, synthetic construct
  source 1..20: mol_type = other DNA
gaaggtatactttgttcttg

SEQ ID NO: 128671 - DNA, 20 bp, synthetic construct
  source 1..20: mol_type = other DNA
tgaaggtatactttgttctt

SEQ ID NO: 128672 - DNA, 20 bp, synthetic construct
  source 1..20: mol_type = other DNA
ttgaaggtatactttgttct

SEQ ID NO: 128673 - DNA, 20 bp, synthetic construct
  source 1..20: mol_type = other DNA
attgaaggtatactttgttc

SEQ ID NO: 128674 - DNA, 20 bp, synthetic construct
  source 1..20: mol_type = other DNA
tattgaaggtatactttgtt

SEQ ID NO: 128675 - DNA, 20 bp, synthetic construct
  source 1..20: mol_type = other DNA
ctattgaaggtatactttgt

SEQ ID NO: 128676 - DNA, 20 bp, synthetic construct
  source 1..20: mol_type = other DNA
gctattgaaggtatactttg

SEQ ID NO: 128677 - DNA, 20 bp, synthetic construct
  source 1..20: mol_type = other DNA
tgctattgaaggtatacttt

SEQ ID NO: 128678 - DNA, 20 bp, synthetic construct
  source 1..20: mol_type = other DNA
atgctattgaaggtatactt

SEQ ID NO: 128679 - DNA, 20 bp, synthetic construct
  source 1..20: mol_type = other DNA
tatgctattgaaggtatact

SEQ ID NO: 128680 - DNA, 20 bp, synthetic construct
  source 1..20: mol_type = other DNA
atatgctattgaaggtatac

SEQ ID NO: 128681 - DNA, 20 bp, synthetic construct
  source 1..20: mol_type = other DNA
aatatgctattgaaggtata

SEQ ID NO: 128682 - DNA, 20 bp, synthetic construct
  source 1..20: mol_type = other DNA
taatatgctattgaaggtat

SEQ ID NO: 128683 - DNA, 20 bp, synthetic construct
  source 1..20: mol_type = other DNA
ttaatatgctattgaaggta

SEQ ID NO: 128684 - DNA, 20 bp, synthetic construct
  source 1..20: mol_type = other DNA
tttaatatgctattgaaggt

SEQ ID NO: 128685 - DNA, 20 bp, synthetic construct
  source 1..20: mol_type = other DNA
ctttaatatgctattgaagg

SEQ ID NO: 128686 - DNA, 20 bp, synthetic construct
  source 1..20: mol_type = other DNA
actttaatatgctattgaag

SEQ ID NO: 128687 - DNA, 20 bp, synthetic construct
  source 1..20: mol_type = other DNA
aactttaatatgctattgaa

SEQ ID NO: 128688 - DNA, 20 bp, synthetic construct
  source 1..20: mol_type = other DNA
aaactttaatatgctattga

SEQ ID NO: 128689 - DNA, 20 bp, synthetic construct
  source 1..20: mol_type = other DNA
taaactttaatatgctattg

SEQ ID NO: 128690 - DNA, 20 bp, synthetic construct
  source 1..20: mol_type = other DNA
ataaactttaatatgctatt

SEQ ID NO: 128691 - DNA, 20 bp, synthetic construct
  source 1..20: mol_type = other DNA
gataaactttaatatgctat

SEQ ID NO: 128692 - DNA, 20 bp, synthetic construct
  source 1..20: mol_type = other DNA
ggataaactttaatatgcta

SEQ ID NO: 128693 - DNA, 20 bp, synthetic construct
  source 1..20: mol_type = other DNA
aggataaactttaatatgct

SEQ ID NO: 128694 - DNA, 20 bp, synthetic construct
  source 1..20: mol_type = other DNA
aaggataaactttaatatgc

SEQ ID NO: 128695 - DNA, 20 bp, synthetic construct
  source 1..20: mol_type = other DNA
caaggataaactttaatatg

SEQ ID NO: 128696 - DNA, 20 bp, synthetic construct
  source 1..20: mol_type = other DNA
ccaaggataaactttaatat

SEQ ID NO: 128697 - DNA, 20 bp, synthetic construct
  source 1..20: mol_type = other DNA
gccaaggataaactttaata

SEQ ID NO: 128698 - DNA, 20 bp, synthetic construct
  source 1..20: mol_type = other DNA
agccaaggataaactttaat

SEQ ID NO: 128699 - DNA, 20 bp, synthetic construct
  source 1..20: mol_type = other DNA
cagccaaggataaactttaa

SEQ ID NO: 128700 - DNA, 20 bp, synthetic construct
  source 1..20: mol_type = other DNA
ccagccaaggataaacttta

SEQ ID NO: 128701 - DNA, 20 bp, synthetic construct
  source 1..20: mol_type = other DNA
tccagccaaggataaacttt

SEQ ID NO: 128702 - DNA, 20 bp, synthetic construct
  source 1..20: mol_type = other DNA
atccagccaaggataaactt

SEQ ID NO: 128703 - DNA, 20 bp, synthetic construct
  source 1..20: mol_type = other DNA
catccagccaaggataaact

SEQ ID NO: 128704 - DNA, 20 bp, synthetic construct
  source 1..20: mol_type = other DNA
gcatccagccaaggataaac

SEQ ID NO: 128705 - DNA, 20 bp, synthetic construct
  source 1..20: mol_type = other DNA
tgcatccagccaaggataaa

SEQ ID NO: 128706 - DNA, 20 bp, synthetic construct
  source 1..20: mol_type = other DNA
ctgcatccagccaaggataa

SEQ ID NO: 128707 - DNA, 20 bp, synthetic construct
  source 1..20: mol_type = other DNA
actgcatccagccaaggata

SEQ ID NO: 128708 - DNA, 20 bp, synthetic construct
  source 1..20: mol_type = other DNA
cactgcatccagccaaggat

SEQ ID NO: 128709 - DNA, 20 bp, synthetic construct
  source 1..20: mol_type = other DNA
ccactgcatccagccaagga

SEQ ID NO: 128710 - DNA, 20 bp, synthetic construct
  source 1..20: mol_type = other DNA
gccactgcatccagccaagg

SEQ ID NO: 128711 - DNA, 20 bp, synthetic construct
  source 1..20: mol_type = other DNA
agccactgcatccagccaag

SEQ ID NO: 128712 - DNA, 20 bp, synthetic construct
  source 1..20: mol_type = other DNA
cagccactgcatccagccaa

SEQ ID NO: 128713 - DNA, 20 bp, synthetic construct
  source 1..20: mol_type = other DNA
tcagccactgcatccagcca

SEQ ID NO: 128714 - DNA, 20 bp, synthetic construct
  source 1..20: mol_type = other DNA
gtcagccactgcatccagcc

SEQ ID NO: 128715 - DNA, 20 bp, synthetic construct
  source 1..20: mol_type = other DNA
cgtcagccactgcatccagc

SEQ ID NO: 128716 - DNA, 20 bp, synthetic construct
  source 1..20: mol_type = other DNA
gcgtcagccactgcatccag

SEQ ID NO: 128717 - DNA, 20 bp, synthetic construct
  source 1..20: mol_type = other DNA
ggcgtcagccactgcatcca

SEQ ID NO: 128718 - DNA, 20 bp, synthetic construct
  source 1..20: mol_type = other DNA
aggcgtcagccactgcatcc

SEQ ID NO: 128719 - DNA, 20 bp, synthetic construct
  source 1..20: mol_type = other DNA
caggcgtcagccactgcatc

SEQ ID NO: 128720 - DNA, 20 bp, synthetic construct
  source 1..20: mol_type = other DNA
acaggcgtcagccactgcat

SEQ ID NO: 128721 - DNA, 20 bp, synthetic construct
  source 1..20: mol_type = other DNA
tacaggcgtcagccactgca

SEQ ID NO: 128722 - DNA, 20 bp, synthetic construct
  source 1..20: mol_type = other DNA
ttacaggcgtcagccactgc

SEQ ID NO: 128723 - DNA, 20 bp, synthetic construct
  source 1..20: mol_type = other DNA
attacaggcgtcagccactg

SEQ ID NO: 128724 - DNA, 20 bp, synthetic construct
  source 1..20: mol_type = other DNA
gattacaggcgtcagccact

SEQ ID NO: 128725 - DNA, 20 bp, synthetic construct
  source 1..20: mol_type = other DNA
ggattacaggcgtcagccac

SEQ ID NO: 128726 - DNA, 20 bp, synthetic construct
  source 1..20: mol_type = other DNA
gggattacaggcgtcagcca

SEQ ID NO: 128727 - DNA, 20 bp, synthetic construct
  source 1..20: mol_type = other DNA
tgggattacaggcgtcagcc

SEQ ID NO: 128728 - DNA, 20 bp, synthetic construct
  source 1..20: mol_type = other DNA
gtgggattacaggcgtcagc

SEQ ID NO: 128729 - DNA, 20 bp, synthetic construct
  source 1..20: mol_type = other DNA
ggtgggattacaggcgtcag

SEQ ID NO: 128730 - DNA, 20 bp, synthetic construct
  source 1..20: mol_type = other DNA
aggtgggattacaggcgtca

SEQ ID NO: 128731 - DNA, 20 bp, synthetic construct
  source 1..20: mol_type = other DNA
gaggtgggattacaggcgtc

SEQ ID NO: 128732 - DNA, 20 bp, synthetic construct
  source 1..20: mol_type = other DNA
agaggtgggattacaggcgt

SEQ ID NO: 128733 - DNA, 20 bp, synthetic construct
  source 1..20: mol_type = other DNA
aagaggtgggattacaggcg

SEQ ID NO: 128734 - DNA, 20 bp, synthetic construct
  source 1..20: mol_type = other DNA
aaagaggtgggattacaggc

SEQ ID NO: 128735 - DNA, 20 bp, synthetic construct
  source 1..20: mol_type = other DNA
caaagaggtgggattacagg

SEQ ID NO: 128736 - DNA, 20 bp, synthetic construct
  source 1..20: mol_type = other DNA
ccaaagaggtgggattacag

SEQ ID NO: 128737 - DNA, 20 bp, synthetic construct
  source 1..20: mol_type = other DNA
cccaaagaggtgggattaca

SEQ ID NO: 128738 - DNA, 20 bp, synthetic construct
  source 1..20: mol_type = other DNA
tcccaaagaggtgggattac

SEQ ID NO: 128739 - DNA, 20 bp, synthetic construct
  source 1..20: mol_type = other DNA
ctcccaaagaggtgggatta

SEQ ID NO: 128740 - DNA, 20 bp, synthetic construct
  source 1..20: mol_type = other DNA
cctcccaaagaggtgggatt

SEQ ID NO: 128741 - DNA, 20 bp, synthetic construct
  source 1..20: mol_type = other DNA
gcctcccaaagaggtgggat

SEQ ID NO: 128742 - DNA, 20 bp, synthetic construct
  source 1..20: mol_type = other DNA
tgcctcccaaagaggtggga

SEQ ID NO: 128743 - DNA, 20 bp, synthetic construct
  source 1..20: mol_type = other DNA
ctgcctcccaaagaggtggg

SEQ ID NO: 128744 - DNA, 20 bp, synthetic construct
  source 1..20: mol_type = other DNA
tctgcctcccaaagaggtgg

SEQ ID NO: 128745 - DNA, 20 bp, synthetic construct
  source 1..20: mol_type = other DNA
ctctgcctcccaaagaggtg

SEQ ID NO: 128746 - DNA, 20 bp, synthetic construct
  source 1..20: mol_type = other DNA
cctctgcctcccaaagaggt

SEQ ID NO: 128747 - DNA, 20 bp, synthetic construct
  source 1..20: mol_type = other DNA
acctctgcctcccaaagagg

SEQ ID NO: 128748 - DNA, 20 bp, synthetic construct
  source 1..20: mol_type = other DNA
cacctctgcctcccaaagag

SEQ ID NO: 128749 - DNA, 20 bp, synthetic construct
  source 1..20: mol_type = other DNA
ccacctctgcctcccaaaga

SEQ ID NO: 128750 - DNA, 20 bp, synthetic construct
  source 1..20: mol_type = other DNA
cccacctctgcctcccaaag

SEQ ID NO: 128751 - DNA, 20 bp, synthetic construct
  source 1..20: mol_type = other DNA
gcccacctctgcctcccaaa

SEQ ID NO: 128752 - DNA, 20 bp, synthetic construct
  source 1..20: mol_type = other DNA
tgcccacctctgcctcccaa

SEQ ID NO: 128753 - DNA, 20 bp, synthetic construct
  source 1..20: mol_type = other DNA
ctgcccacctctgcctccca

SEQ ID NO: 128754 - DNA, 20 bp, synthetic construct
  source 1..20: mol_type = other DNA
tctgcccacctctgcctccc

SEQ ID NO: 128755 - DNA, 20 bp, synthetic construct
  source 1..20: mol_type = other DNA
atctgcccacctctgcctcc

SEQ ID NO: 128756 - DNA, 20 bp, synthetic construct
  source 1..20: mol_type = other DNA
gatctgcccacctctgcctc

SEQ ID NO: 128757 - DNA, 20 bp, synthetic construct
  source 1..20: mol_type = other DNA
tgatctgcccacctctgcct

SEQ ID NO: 128758 - DNA, 20 bp, synthetic construct
  source 1..20: mol_type = other DNA
gtgatctgcccacctctgcc

SEQ ID NO: 128759 - DNA, 20 bp, synthetic construct
  source 1..20: mol_type = other DNA
ggtgatctgcccacctctgc

SEQ ID NO: 128760 - DNA, 20 bp, synthetic construct
  source 1..20: mol_type = other DNA
aggtgatctgcccacctctg

SEQ ID NO: 128761 - DNA, 20 bp, synthetic construct
  source 1..20: mol_type = other DNA
caggtgatctgcccacctct

SEQ ID NO: 128762 - DNA, 20 bp, synthetic construct
  source 1..20: mol_type = other DNA
tcaggtgatctgcccacctc

SEQ ID NO: 128763 - DNA, 20 bp, synthetic construct
  source 1..20: mol_type = other DNA
ctcaggtgatctgcccacct

SEQ ID NO: 128764 - DNA, 20 bp, synthetic construct
  source 1..20: mol_type = other DNA
cctcaggtgatctgcccacc

SEQ ID NO: 128765 - DNA, 20 bp, synthetic construct
  source 1..20: mol_type = other DNA
acctcaggtgatctgcccac

SEQ ID NO: 128766 - DNA, 20 bp, synthetic construct
  source 1..20: mol_type = other DNA
gacctcaggtgatctgccca

SEQ ID NO: 128767 - DNA, 20 bp, synthetic construct
  source 1..20: mol_type = other DNA
agacctcaggtgatctgccc

SEQ ID NO: 128768 - DNA, 20 bp, synthetic construct
  source 1..20: mol_type = other DNA
cagacctcaggtgatctgcc

SEQ ID NO: 128769 - DNA, 20 bp, synthetic construct
  source 1..20: mol_type = other DNA
ccagacctcaggtgatctgc

SEQ ID NO: 128770 - DNA, 20 bp, synthetic construct
  source 1..20: mol_type = other DNA
tccagacctcaggtgatctg

SEQ ID NO: 128771 - DNA, 20 bp, synthetic construct
  source 1..20: mol_type = other DNA
ctccagacctcaggtgatct

SEQ ID NO: 128772 - DNA, 20 bp, synthetic construct
  source 1..20: mol_type = other DNA
actccagacctcaggtgatc

SEQ ID NO: 128773 - DNA, 20 bp, synthetic construct
  source 1..20: mol_type = other DNA
aactccagacctcaggtgat

SEQ ID NO: 128774 - DNA, 20 bp, synthetic construct
  source 1..20: mol_type = other DNA
gaactccagacctcaggtga

SEQ ID NO: 128775 - DNA, 20 bp, synthetic construct
  source 1..20: mol_type = other DNA
cgaactccagacctcaggtg

SEQ ID NO: 128776 - DNA, 20 bp, synthetic construct
  source 1..20: mol_type = other DNA
tcgaactccagacctcaggt

SEQ ID NO: 128777 - DNA, 20 bp, synthetic construct
  source 1..20: mol_type = other DNA
ctcgaactccagacctcagg

SEQ ID NO: 128778 - DNA, 20 bp, synthetic construct
  source 1..20: mol_type = other DNA
tctcgaactccagacctcag

SEQ ID NO: 128779 - DNA, 20 bp, synthetic construct
  source 1..20: mol_type = other DNA
gtctcgaactccagacctca

SEQ ID NO: 128780 - DNA, 20 bp, synthetic construct
  source 1..20: mol_type = other DNA
ggtctcgaactccagacctc

SEQ ID NO: 128781 - DNA, 20 bp, synthetic construct
  source 1..20: mol_type = other DNA
tggtctcgaactccagacct

SEQ ID NO: 128782 - DNA, 20 bp, synthetic construct
  source 1..20: mol_type = other DNA
ctggtctcgaactccagacc

SEQ ID NO: 128783 - DNA, 20 bp, synthetic construct
  source 1..20: mol_type = other DNA
gctggtctcgaactccagac

SEQ ID NO: 128784 - DNA, 20 bp, synthetic construct
  source 1..20: mol_type = other DNA
ggctggtctcgaactccaga

SEQ ID NO: 128785 - DNA, 20 bp, synthetic construct
  source 1..20: mol_type = other DNA
aggctggtctcgaactccag

SEQ ID NO: 128786 - DNA, 20 bp, synthetic construct
  source 1..20: mol_type = other DNA
caggctggtctcgaactcca

SEQ ID NO: 128787 - DNA, 20 bp, synthetic construct
  source 1..20: mol_type = other DNA
ccaggctggtctcgaactcc

SEQ ID NO: 128788 - DNA, 20 bp, synthetic construct
  source 1..20: mol_type = other DNA
gccaggctggtctcgaactc

SEQ ID NO: 128789 - DNA, 20 bp, synthetic construct
  source 1..20: mol_type = other DNA
ggccaggctggtctcgaact

SEQ ID NO: 128790 - DNA, 20 bp, synthetic construct
  source 1..20: mol_type = other DNA
tggccaggctggtctcgaac

SEQ ID NO: 128791 - DNA, 20 bp, synthetic construct
  source 1..20: mol_type = other DNA
ttggccaggctggtctcgaa

SEQ ID NO: 128792 - DNA, 20 bp, synthetic construct
  source 1..20: mol_type = other DNA
gttggccaggctggtctcga

SEQ ID NO: 128793 - DNA, 20 bp, synthetic construct
  source 1..20: mol_type = other DNA
tgttggccaggctggtctcg

SEQ ID NO: 128794 - DNA, 20 bp, synthetic construct
  source 1..20: mol_type = other DNA
atgttggccaggctggtctc

SEQ ID NO: 128795 - DNA, 20 bp, synthetic construct
  source 1..20: mol_type = other DNA
catgttggccaggctggtct

SEQ ID NO: 128796 - DNA, 20 bp, synthetic construct
  source 1..20: mol_type = other DNA
ccatgttggccaggctggtc

SEQ ID NO: 128797 - DNA, 20 bp, synthetic construct
  source 1..20: mol_type = other DNA
accatgttggccaggctggt

SEQ ID NO: 128798 - DNA, 20 bp, synthetic construct
  source 1..20: mol_type = other DNA
caccatgttggccaggctgg

SEQ ID NO: 128799 - DNA, 20 bp, synthetic construct
  source 1..20: mol_type = other DNA
tcaccatgttggccaggctg

SEQ ID NO: 128800 - DNA, 20 bp, synthetic construct
  source 1..20: mol_type = other DNA
ttcaccatgttggccaggct

SEQ ID NO: 128801 - DNA, 20 bp, synthetic construct
  source 1..20: mol_type = other DNA
tttcaccatgttggccaggc

SEQ ID NO: 128802 - DNA, 20 bp, synthetic construct
  source 1..20: mol_type = other DNA
gtttcaccatgttggccagg

SEQ ID NO: 128803 - DNA, 20 bp, synthetic construct
  source 1..20: mol_type = other DNA
ggtttcaccatgttggccag

SEQ ID NO: 128804 - DNA, 20 bp, synthetic construct
  source 1..20: mol_type = other DNA
gggtttcaccatgttggcca

SEQ ID NO: 128805 - DNA, 20 bp, synthetic construct
  source 1..20: mol_type = other DNA
ggggtttcaccatgttggcc

SEQ ID NO: 128806 - DNA, 20 bp, synthetic construct
  source 1..20: mol_type = other DNA
cggggtttcaccatgttggc

SEQ ID NO: 128807 - DNA, 20 bp, synthetic construct
  source 1..20: mol_type = other DNA
acggggtttcaccatgttgg

SEQ ID NO: 128808 - DNA, 20 bp, synthetic construct
  source 1..20: mol_type = other DNA
gacggggtttcaccatgttg

SEQ ID NO: 128809 - DNA, 20 bp, synthetic construct
  source 1..20: mol_type = other DNA
agacggggtttcaccatgtt

SEQ ID NO: 128810 - DNA, 20 bp, synthetic construct
  source 1..20: mol_type = other DNA
gagacggggtttcaccatgt

SEQ ID NO: 128811 - DNA, 20 bp, synthetic construct
  source 1..20: mol_type = other DNA
agagacggggtttcaccatg

SEQ ID NO: 128812 - DNA, 20 bp, synthetic construct
  source 1..20: mol_type = other DNA
tagagacggggtttcaccat

SEQ ID NO: 128813 - DNA, 20 bp, synthetic construct
  source 1..20: mol_type = other DNA
gtagagacggggtttcacca

SEQ ID NO: 128814 - DNA, 20 bp, synthetic construct
  source 1..20: mol_type = other DNA
agtagagacggggtttcacc

SEQ ID NO: 128815 - DNA, 20 bp, synthetic construct
  source 1..20: mol_type = other DNA
tagtagagacggggtttcac

SEQ ID NO: 128816 - DNA, 20 bp, synthetic construct
  source 1..20: mol_type = other DNA
ttagtagagacggggtttca

SEQ ID NO: 128817 - DNA, 20 bp, synthetic construct
  source 1..20: mol_type = other DNA
tttagtagagacggggtttc

SEQ ID NO: 128818 - DNA, 20 bp, synthetic construct
  source 1..20: mol_type = other DNA
ttttagtagagacggggttt

SEQ ID NO: 128819 - DNA, 20 bp, synthetic construct
  source 1..20: mol_type = other DNA
tttttagtagagacggggtt

SEQ ID NO: 128820 - DNA, 20 bp, synthetic construct
  source 1..20: mol_type = other DNA
atttttagtagagacggggt

SEQ ID NO: 128821 - DNA, 20 bp, synthetic construct
  source 1..20: mol_type = other DNA
tatttttagtagagacgggg

SEQ ID NO: 128822 - DNA, 20 bp, synthetic construct
  source 1..20: mol_type = other DNA
atatttttagtagagacggg

SEQ ID NO: 128823 - DNA, 20 bp, synthetic construct
  source 1..20: mol_type = other DNA
aatatttttagtagagacgg

SEQ ID NO: 128824 - DNA, 20 bp, synthetic construct
  source 1..20: mol_type = other DNA
aaatatttttagtagagacg

SEQ ID NO: 128825 - DNA, 20 bp, synthetic construct
  source 1..20: mol_type = other DNA
aaaatatttttagtagagac

SEQ ID NO: 128826 - DNA, 20 bp, synthetic construct
  source 1..20: mol_type = other DNA
taaaatatttttagtagaga

SEQ ID NO: 128827 - DNA, 20 bp, synthetic construct
  source 1..20: mol_type = other DNA
ttaaaatatttttagtagag

SEQ ID NO: 128828 - DNA, 20 bp, synthetic construct
  source 1..20: mol_type = other DNA
tttaaaatatttttagtaga

SEQ ID NO: 128829 - DNA, 20 bp, synthetic construct
  source 1..20: mol_type = other DNA
ttttaaaatatttttagtag

SEQ ID NO: 128830 - DNA, 20 bp, synthetic construct
  source 1..20: mol_type = other DNA
tttttaaaatatttttagta

SEQ ID NO: 128831 - DNA, 20 bp, synthetic construct
  source 1..20: mol_type = other DNA
ttttttaaaatatttttagt

SEQ ID NO: 128832 - DNA, 20 bp, synthetic construct
  source 1..20: mol_type = other DNA
tttttttaaaatatttttag

SEQ ID NO: 128833 - DNA, 20 bp, synthetic construct
  source 1..20: mol_type = other DNA
ctttttttaaaatattttta

SEQ ID NO: 128834 - DNA, 20 bp, synthetic construct
  source 1..20: mol_type = other DNA
actttttttaaaatattttt

SEQ ID NO: 128835 - DNA, 20 bp, synthetic construct
  source 1..20: mol_type = other DNA
tactttttttaaaatatttt

SEQ ID NO: 128836 - DNA, 20 bp, synthetic construct
  source 1..20: mol_type = other DNA
atactttttttaaaatattt

SEQ ID NO: 128837 - DNA, 20 bp, synthetic construct
  source 1..20: mol_type = other DNA
aatactttttttaaaatatt

SEQ ID NO: 128838 - DNA, 20 bp, synthetic construct
  source 1..20: mol_type = other DNA
taatactttttttaaaatat

SEQ ID NO: 128839 - DNA, 20 bp, synthetic construct
  source 1..20: mol_type = other DNA
ctaatactttttttaaaata

SEQ ID NO: 128840 - DNA, 20 bp, synthetic construct
  source 1..20: mol_type = other DNA
gctaatactttttttaaaat

SEQ ID NO: 128841 - DNA, 20 bp, synthetic construct
  source 1..20: mol_type = other DNA
agctaatactttttttaaaa

SEQ ID NO: 128842 - DNA, 20 bp, synthetic construct
  source 1..20: mol_type = other DNA
cagctaatactttttttaaa

SEQ ID NO: 128843 - DNA, 20 bp, synthetic construct
  source 1..20: mol_type = other DNA
ccagctaatactttttttaa

SEQ ID NO: 128844 - DNA, 20 bp, synthetic construct
  source 1..20: mol_type = other DNA
cccagctaatacttttttta

SEQ ID NO: 128845 - DNA, 20 bp, synthetic construct
  source 1..20: mol_type = other DNA
acccagctaatacttttttt

SEQ ID NO: 128846 - DNA, 20 bp, synthetic construct
  source 1..20: mol_type = other DNA
cacccagctaatactttttt

SEQ ID NO: 128847 - DNA, 20 bp, synthetic construct
  source 1..20: mol_type = other DNA
acacccagctaatacttttt

SEQ ID NO: 128848 - DNA, 20 bp, synthetic construct
  source 1..20: mol_type = other DNA
cacacccagctaatactttt

SEQ ID NO: 128849 - DNA, 20 bp, synthetic construct
  source 1..20: mol_type = other DNA
ccacacccagctaatacttt

SEQ ID NO: 128850 - DNA, 20 bp, synthetic construct
  source 1..20: mol_type = other DNA
accacacccagctaatactt

SEQ ID NO: 128851 - DNA, 20 bp, synthetic construct
  source 1..20: mol_type = other DNA
caccacacccagctaatact

SEQ ID NO: 128852 - DNA, 20 bp, synthetic construct
  source 1..20: mol_type = other DNA
acaccacacccagctaatac

SEQ ID NO: 128853 - DNA, 20 bp, synthetic construct
  source 1..20: mol_type = other DNA
cacaccacacccagctaata

SEQ ID NO: 128854 - DNA, 20 bp, synthetic construct
  source 1..20: mol_type = other DNA
gcacaccacacccagctaat

SEQ ID NO: 128855 - DNA, 20 bp, synthetic construct
  source 1..20: mol_type = other DNA
tgcacaccacacccagctaa

SEQ ID NO: 128856 - DNA, 20 bp, synthetic construct
  source 1..20: mol_type = other DNA
gtgcacaccacacccagcta

SEQ ID NO: 128857 - DNA, 20 bp, synthetic construct
  source 1..20: mol_type = other DNA
ggtgcacaccacacccagct

SEQ ID NO: 128858 - DNA, 20 bp, synthetic construct
  source 1..20: mol_type = other DNA
aggtgcacaccacacccagc

SEQ ID NO: 128859 - DNA, 20 bp, synthetic construct
  source 1..20: mol_type = other DNA
caggtgcacaccacacccag

SEQ ID NO: 128860 - DNA, 20 bp, synthetic construct
  source 1..20: mol_type = other DNA
acaggtgcacaccacaccca

SEQ ID NO: 128861 - DNA, 20 bp, synthetic construct
  source 1..20: mol_type = other DNA
tacaggtgcacaccacaccc

SEQ ID NO: 128862 - DNA, 20 bp, synthetic construct
  source 1..20: mol_type = other DNA
ctacaggtgcacaccacacc

SEQ ID NO: 128863 - DNA, 20 bp, synthetic construct
  source 1..20: mol_type = other DNA
actacaggtgcacaccacac

SEQ ID NO: 128864 - DNA, 20 bp, synthetic construct
  source 1..20: mol_type = other DNA
gactacaggtgcacaccaca

SEQ ID NO: 128865 - DNA, 20 bp, synthetic construct
  source 1..20: mol_type = other DNA
ggactacaggtgcacaccac

SEQ ID NO: 128866 - DNA, 20 bp, synthetic construct
  source 1..20: mol_type = other DNA
gggactacaggtgcacacca

SEQ ID NO: 128867 - DNA, 20 bp, synthetic construct
  source 1..20: mol_type = other DNA
tgggactacaggtgcacacc

SEQ ID NO: 128868 - DNA, 20 bp, synthetic construct
  source 1..20: mol_type = other DNA
ctgggactacaggtgcacac

SEQ ID NO: 128869 - DNA, 20 bp, synthetic construct
  source 1..20: mol_type = other DNA
gctgggactacaggtgcaca

SEQ ID NO: 128870 - DNA, 20 bp, synthetic construct
  source 1..20: mol_type = other DNA
agctgggactacaggtgcac

SEQ ID NO: 128871 - DNA, 20 bp, synthetic construct
  source 1..20: mol_type = other DNA
tagctgggactacaggtgca

SEQ ID NO: 128872 - DNA, 20 bp, synthetic construct
  source 1..20: mol_type = other DNA
gtagctgggactacaggtgc

SEQ ID NO: 128873 - DNA, 20 bp, synthetic construct
  source 1..20: mol_type = other DNA
agtagctgggactacaggtg

SEQ ID NO: 128874 - DNA, 20 bp, synthetic construct
  source 1..20: mol_type = other DNA
gagtagctgggactacaggt

SEQ ID NO: 128875 - DNA, 20 bp, synthetic construct
  source 1..20: mol_type = other DNA
agagtagctgggactacagg

SEQ ID NO: 128876 - DNA, 20 bp, synthetic construct
  source 1..20: mol_type = other DNA
cagagtagctgggactacag

SEQ ID NO: 128877 - DNA, 20 bp, synthetic construct
  source 1..20: mol_type = other DNA
ccagagtagctgggactaca

SEQ ID NO: 128878 - DNA, 20 bp, synthetic construct
  source 1..20: mol_type = other DNA
tccagagtagctgggactac

SEQ ID NO: 128879 - DNA, 20 bp, synthetic construct
  source 1..20: mol_type = other DNA
ctccagagtagctgggacta

SEQ ID NO: 128880 - DNA, 20 bp, synthetic construct
  source 1..20: mol_type = other DNA
cctccagagtagctgggact

SEQ ID NO: 128881 - DNA, 20 bp, synthetic construct
  source 1..20: mol_type = other DNA
gcctccagagtagctgggac

SEQ ID NO: 128882 - DNA, 20 bp, synthetic construct
  source 1..20: mol_type = other DNA
agcctccagagtagctggga

SEQ ID NO: 128883 - DNA, 20 bp, synthetic construct
  source 1..20: mol_type = other DNA
cagcctccagagtagctggg

SEQ ID NO: 128884 - DNA, 20 bp, synthetic construct
  source 1..20: mol_type = other DNA
tcagcctccagagtagctgg

SEQ ID NO: 128885 - DNA, 20 bp, synthetic construct
  source 1..20: mol_type = other DNA
ctcagcctccagagtagctg

SEQ ID NO: 128886 - DNA, 20 bp, synthetic construct
  source 1..20: mol_type = other DNA
cctcagcctccagagtagct

SEQ ID NO: 128887 - DNA, 20 bp, synthetic construct
  source 1..20: mol_type = other DNA
acctcagcctccagagtagc

SEQ ID NO: 128888 - DNA, 20 bp, synthetic construct
  source 1..20: mol_type = other DNA
tacctcagcctccagagtag

SEQ ID NO: 128889 - DNA, 20 bp, synthetic construct
  source 1..20: mol_type = other DNA
ctacctcagcctccagagta

SEQ ID NO: 128890 - DNA, 20 bp, synthetic construct
  source 1..20: mol_type = other DNA
cctacctcagcctccagagt

SEQ ID NO: 128891 - DNA, 20 bp, synthetic construct
  source 1..20: mol_type = other DNA
tcctacctcagcctccagag

SEQ ID NO: 128892 - DNA, 20 bp, synthetic construct
  source 1..20: mol_type = other DNA
ctcctacctcagcctccaga

SEQ ID NO: 128893 - DNA, 20 bp, synthetic construct
  source 1..20: mol_type = other DNA
tctcctacctcagcctccag

SEQ ID NO: 128894 - DNA, 20 bp, synthetic construct
  source 1..20: mol_type = other DNA
ttctcctacctcagcctcca

SEQ ID NO: 128895 - DNA, 20 bp, synthetic construct
  source 1..20: mol_type = other DNA
attctcctacctcagcctcc

SEQ ID NO: 128896 - DNA, 20 bp, synthetic construct
  source 1..20: mol_type = other DNA
gattctcctacctcagcctc

SEQ ID NO: 128897 - DNA, 20 bp, synthetic construct
  source 1..20: mol_type = other DNA
cgattctcctacctcagcct

SEQ ID NO: 128898 - DNA, 20 bp, synthetic construct
  source 1..20: mol_type = other DNA
gcgattctcctacctcagcc

SEQ ID NO: 128899 - DNA, 20 bp, synthetic construct
  source 1..20: mol_type = other DNA
agcgattctcctacctcagc

SEQ ID NO: 128900 - DNA, 20 bp, synthetic construct
  source 1..20: mol_type = other DNA
aagcgattctcctacctcag

SEQ ID NO: 128901 - DNA, 20 bp, synthetic construct
  source 1..20: mol_type = other DNA
caagcgattctcctacctca

SEQ ID NO: 128902 - DNA, 20 bp, synthetic construct
  source 1..20: mol_type = other DNA
tcaagcgattctcctacctc

SEQ ID NO: 128903 - DNA, 20 bp, synthetic construct
  source 1..20: mol_type = other DNA
ttcaagcgattctcctacct

SEQ ID NO: 128904 - DNA, 20 bp, synthetic construct
  source 1..20: mol_type = other DNA
gttcaagcgattctcctacc

SEQ ID NO: 128905 - DNA, 20 bp, synthetic construct
  source 1..20: mol_type = other DNA
ggttcaagcgattctcctac

SEQ ID NO: 128906 - DNA, 20 bp, synthetic construct
  source 1..20: mol_type = other DNA
gggttcaagcgattctccta

SEQ ID NO: 128907 - DNA, 20 bp, synthetic construct
  source 1..20: mol_type = other DNA
tgggttcaagcgattctcct

SEQ ID NO: 128908 - DNA, 20 bp, synthetic construct
  source 1..20: mol_type = other DNA
ctgggttcaagcgattctcc

SEQ ID NO: 128909 - DNA, 20 bp, synthetic construct
  source 1..20: mol_type = other DNA
cctgggttcaagcgattctc

SEQ ID NO: 128910 - DNA, 20 bp, synthetic construct
  source 1..20: mol_type = other DNA
tcctgggttcaagcgattct

SEQ ID NO: 128911 - DNA, 20 bp, synthetic construct
  source 1..20: mol_type = other DNA
ctcctgggttcaagcgattc

SEQ ID NO: 128912 - DNA, 20 bp, synthetic construct
  source 1..20: mol_type = other DNA
cctcctgggttcaagcgatt

SEQ ID NO: 128913 - DNA, 20 bp, synthetic construct
  source 1..20: mol_type = other DNA
gcctcctgggttcaagcgat

SEQ ID NO: 128914 - DNA, 20 bp, synthetic construct
  source 1..20: mol_type = other DNA
tgcctcctgggttcaagcga

SEQ ID NO: 128915 - DNA, 20 bp, synthetic construct
  source 1..20: mol_type = other DNA
ctgcctcctgggttcaagcg

SEQ ID NO: 128916 - DNA, 20 bp, synthetic construct
  source 1..20: mol_type = other DNA
tctgcctcctgggttcaagc

SEQ ID NO: 128917 - DNA, 20 bp, synthetic construct
  source 1..20: mol_type = other DNA
ctctgcctcctgggttcaag

SEQ ID NO: 128918 - DNA, 20 bp, synthetic construct
  source 1..20: mol_type = other DNA
tctctgcctcctgggttcaa

SEQ ID NO: 128919 - DNA, 20 bp, synthetic construct
  source 1..20: mol_type = other DNA
ctctctgcctcctgggttca

SEQ ID NO: 128920 - DNA, 20 bp, synthetic construct
  source 1..20: mol_type = other DNA
actctctgcctcctgggttc

SEQ ID NO: 128921 - DNA, 20 bp, synthetic construct
  source 1..20: mol_type = other DNA
cactctctgcctcctgggtt

SEQ ID NO: 128922 - DNA, 20 bp, synthetic construct
  source 1..20: mol_type = other DNA
gcactctctgcctcctgggt

SEQ ID NO: 128923 - DNA, 20 bp, synthetic construct
  source 1..20: mol_type = other DNA
tgcactctctgcctcctggg

SEQ ID NO: 128924 - DNA, 20 bp, synthetic construct
  source 1..20: mol_type = other DNA
ctgcactctctgcctcctgg

SEQ ID NO: 128925 - DNA, 20 bp, synthetic construct
  source 1..20: mol_type = other DNA
actgcactctctgcctcctg

SEQ ID NO: 128926 - DNA, 20 bp, synthetic construct
  source 1..20: mol_type = other DNA
cactgcactctctgcctcct

SEQ ID NO: 128927 - DNA, 20 bp, synthetic construct
  source 1..20: mol_type = other DNA
tcactgcactctctgcctcc

SEQ ID NO: 128928 - DNA, 20 bp, synthetic construct
  source 1..20: mol_type = other DNA
ctcactgcactctctgcctc

SEQ ID NO: 128929 - DNA, 20 bp, synthetic construct
  source 1..20: mol_type = other DNA
actcactgcactctctgcct

SEQ ID NO: 128930 - DNA, 20 bp, synthetic construct
  source 1..20: mol_type = other DNA
gactcactgcactctctgcc

SEQ ID NO: 128931 - DNA, 20 bp, synthetic construct
  source 1..20: mol_type = other DNA
tgactcactgcactctctgc

SEQ ID NO: 128932 - DNA, 20 bp, synthetic construct
  source 1..20: mol_type = other DNA
ttgactcactgcactctctg

SEQ ID NO: 128933 - DNA, 20 bp, synthetic construct
  source 1..20: mol_type = other DNA
cttgactcactgcactctct

SEQ ID NO: 128934 - DNA, 20 bp, synthetic construct
  source 1..20: mol_type = other DNA
tcttgactcactgcactctc

SEQ ID NO: 128935 - DNA, 20 bp, synthetic construct
  source 1..20: mol_type = other DNA
atcttgactcactgcactct

SEQ ID NO: 128936 - DNA, 20 bp, synthetic construct
  source 1..20: mol_type = other DNA
aatcttgactcactgcactc

SEQ ID NO: 128937 - DNA, 20 bp, synthetic construct
  source 1..20: mol_type = other DNA
caatcttgactcactgcact

SEQ ID NO: 128938 - DNA, 20 bp, synthetic construct
  source 1..20: mol_type = other DNA
gcaatcttgactcactgcac

SEQ ID NO: 128939 - DNA, 20 bp, synthetic construct
  source 1..20: mol_type = other DNA
tgcaatcttgactcactgca

SEQ ID NO: 128940 - DNA, 20 bp, synthetic construct
  source 1..20: mol_type = other DNA
gtgcaatcttgactcactgc

SEQ ID NO: 128941 - DNA, 20 bp, synthetic construct
  source 1..20: mol_type = other DNA
ggtgcaatcttgactcactg

SEQ ID NO: 128942 - DNA, 20 bp, synthetic construct
  source 1..20: mol_type = other DNA
tggtgcaatcttgactcact

SEQ ID NO: 128943 - DNA, 20 bp, synthetic construct
  source 1..20: mol_type = other DNA
gtggtgcaatcttgactcac

SEQ ID NO: 128944 - DNA, 20 bp, synthetic construct
  source 1..20: mol_type = other DNA
agtggtgcaatcttgactca

SEQ ID NO: 128945 - DNA, 20 bp, synthetic construct
  source 1..20: mol_type = other DNA
cagtggtgcaatcttgactc

SEQ ID NO: 128946 - DNA, 20 bp, synthetic construct
  source 1..20: mol_type = other DNA
gcagtggtgcaatcttgact

SEQ ID NO: 128947 - DNA, 20 bp, synthetic construct
  source 1..20: mol_type = other DNA
tgcagtggtgcaatcttgac

SEQ ID NO: 128948 - DNA, 20 bp, synthetic construct
  source 1..20: mol_type = other DNA
gtgcagtggtgcaatcttga

SEQ ID NO: 128949 - DNA, 20 bp, synthetic construct
  source 1..20: mol_type = other DNA
agtgcagtggtgcaatcttg

SEQ ID NO: 128950 - DNA, 20 bp, synthetic construct
  source 1..20: mol_type = other DNA
gagtgcagtggtgcaatctt

SEQ ID NO: 128951 - DNA, 20 bp, synthetic construct
  source 1..20: mol_type = other DNA
ggagtgcagtggtgcaatct

SEQ ID NO: 128952 - DNA, 20 bp, synthetic construct
  source 1..20: mol_type = other DNA
tggagtgcagtggtgcaatc

SEQ ID NO: 128953 - DNA, 20 bp, synthetic construct
  source 1..20: mol_type = other DNA
ctggagtgcagtggtgcaat

SEQ ID NO: 128954 - DNA, 20 bp, synthetic construct
  source 1..20: mol_type = other DNA
gctggagtgcagtggtgcaa

SEQ ID NO: 128955 - DNA, 20 bp, synthetic construct
  source 1..20: mol_type = other DNA
agctggagtgcagtggtgca

SEQ ID NO: 128956 - DNA, 20 bp, synthetic construct
  source 1..20: mol_type = other DNA
aagctggagtgcagtggtgc

SEQ ID NO: 128957 - DNA, 20 bp, synthetic construct
  source 1..20: mol_type = other DNA
caagctggagtgcagtggtg

SEQ ID NO: 128958 - DNA, 20 bp, synthetic construct
  source 1..20: mol_type = other DNA
ccaagctggagtgcagtggt

SEQ ID NO: 128959 - DNA, 20 bp, synthetic construct
  source 1..20: mol_type = other DNA
cccaagctggagtgcagtgg

SEQ ID NO: 128960 - DNA, 20 bp, synthetic construct
  source 1..20: mol_type = other DNA
gcccaagctggagtgcagtg

SEQ ID NO: 128961 - DNA, 20 bp, synthetic construct
  source 1..20: mol_type = other DNA
tgcccaagctggagtgcagt

SEQ ID NO: 128962 - DNA, 20 bp, synthetic construct
  source 1..20: mol_type = other DNA
ttgcccaagctggagtgcag

SEQ ID NO: 128963 - DNA, 20 bp, synthetic construct
  source 1..20: mol_type = other DNA
gttgcccaagctggagtgca

SEQ ID NO: 128964 - DNA, 20 bp, synthetic construct
  source 1..20: mol_type = other DNA
ggttgcccaagctggagtgc

SEQ ID NO: 128965 - DNA, 20 bp, synthetic construct
  source 1..20: mol_type = other DNA
cggttgcccaagctggagtg

SEQ ID NO: 128966 - DNA, 20 bp, synthetic construct
  source 1..20: mol_type = other DNA
tcggttgcccaagctggagt

SEQ ID NO: 128967 - DNA, 20 bp, synthetic construct
  source 1..20: mol_type = other DNA
ctcggttgcccaagctggag

SEQ ID NO: 128968 - DNA, 20 bp, synthetic construct
  source 1..20: mol_type = other DNA
gctcggttgcccaagctgga

SEQ ID NO: 128969 - DNA, 20 bp, synthetic construct
  source 1..20: mol_type = other DNA
cgctcggttgcccaagctgg

SEQ ID NO: 128970 - DNA, 20 bp, synthetic construct
  source 1..20: mol_type = other DNA
tcgctcggttgcccaagctg

SEQ ID NO: 128971 - DNA, 20 bp, synthetic construct
  source 1..20: mol_type = other DNA
gtcgctcggttgcccaagct

SEQ ID NO: 128972 - DNA, 20 bp, synthetic construct
  source 1..20: mol_type = other DNA
tgtcgctcggttgcccaagc

SEQ ID NO: 128973 - DNA, 20 bp, synthetic construct
  source 1..20: mol_type = other DNA
gtgtcgctcggttgcccaag

SEQ ID NO: 128974 - DNA, 20 bp, synthetic construct
  source 1..20: mol_type = other DNA
agtgtcgctcggttgcccaa

SEQ ID NO: 128975 - DNA, 20 bp, synthetic construct
  source 1..20: mol_type = other DNA
gagtgtcgctcggttgccca

SEQ ID NO: 128976 - DNA, 20 bp, synthetic construct
  source 1..20: mol_type = other DNA
agagtgtcgctcggttgccc

SEQ ID NO: 128977 - DNA, 20 bp, synthetic construct
  source 1..20: mol_type = other DNA
cagagtgtcgctcggttgcc

SEQ ID NO: 128978 - DNA, 20 bp, synthetic construct
  source 1..20: mol_type = other DNA
acagagtgtcgctcggttgc

SEQ ID NO: 128979 - DNA, 20 bp, synthetic construct
  source 1..20: mol_type = other DNA
gacagagtgtcgctcggttg

SEQ ID NO: 128980 - DNA, 20 bp, synthetic construct
  source 1..20: mol_type = other DNA
agacagagtgtcgctcggtt

SEQ ID NO: 128981 - DNA, 20 bp, synthetic construct
  source 1..20: mol_type = other DNA
gagacagagtgtcgctcggt

SEQ ID NO: 128982 - DNA, 20 bp, synthetic construct
  source 1..20: mol_type = other DNA
tgagacagagtgtcgctcgg

SEQ ID NO: 128983 - DNA, 20 bp, synthetic construct
  source 1..20: mol_type = other DNA
ttgagacagagtgtcgctcg

SEQ ID NO: 128984 - DNA, 20 bp, synthetic construct
  source 1..20: mol_type = other DNA
tttgagacagagtgtcgctc

SEQ ID NO: 128985 - DNA, 20 bp, synthetic construct
  source 1..20: mol_type = other DNA
ctttgagacagagtgtcgct

SEQ ID NO: 128986 - DNA, 20 bp, synthetic construct
  source 1..20: mol_type = other DNA
tctttgagacagagtgtcgc

SEQ ID NO: 128987 - DNA, 20 bp, synthetic construct
  source 1..20: mol_type = other DNA
ttctttgagacagagtgtcg

SEQ ID NO: 128988 - DNA, 20 bp, synthetic construct
  source 1..20: mol_type = other DNA
tttctttgagacagagtgtc

SEQ ID NO: 128989 - DNA, 20 bp, synthetic construct
  source 1..20: mol_type = other DNA
ttttctttgagacagagtgt

SEQ ID NO: 128990 - DNA, 20 bp, synthetic construct
  source 1..20: mol_type = other DNA
attttctttgagacagagtg

SEQ ID NO: 128991 - DNA, 20 bp, synthetic construct
  source 1..20: mol_type = other DNA
tattttctttgagacagagt

SEQ ID NO: 128992 - DNA, 20 bp, synthetic construct
  source 1..20: mol_type = other DNA
ttattttctttgagacagag

SEQ ID NO: 128993 - DNA, 20 bp, synthetic construct
  source 1..20: mol_type = other DNA
tttattttctttgagacaga

SEQ ID NO: 128994 - DNA, 20 bp, synthetic construct
  source 1..20: mol_type = other DNA
atttattttctttgagacag

SEQ ID NO: 128995 - DNA, 20 bp, synthetic construct
  source 1..20: mol_type = other DNA
tatttattttctttgagaca

SEQ ID NO: 128996 - DNA, 20 bp, synthetic construct
  source 1..20: mol_type = other DNA
ttatttattttctttgagac

SEQ ID NO: 128997 - DNA, 20 bp, synthetic construct
  source 1..20: mol_type = other DNA
tttatttattttctttgaga

SEQ ID NO: 128998 - DNA, 20 bp, synthetic construct
  source 1..20: mol_type = other DNA
atttatttattttctttgag

SEQ ID NO: 128999 - DNA, 20 bp, synthetic construct
  source 1..20: mol_type = other DNA
tatttatttattttctttga

SEQ ID NO: 129000 - DNA, 20 bp, synthetic construct
  source 1..20: mol_type = other DNA
ttatttatttattttctttg

SEQ ID NO: 129001 - DNA, 20 bp, synthetic construct
  source 1..20: mol_type = other DNA
tttatttatttattttcttt

SEQ ID NO: 129002 - DNA, 20 bp, synthetic construct
  source 1..20: mol_type = other DNA
ttttatttatttattttctt

SEQ ID NO: 129003 - DNA, 20 bp, synthetic construct
  source 1..20: mol_type = other DNA
tttttatttatttattttct

SEQ ID NO: 129004 - DNA, 20 bp, synthetic construct
  source 1..20: mol_type = other DNA
atttttatttatttattttc

SEQ ID NO: 129005 - DNA, 20 bp, synthetic construct
  source 1..20: mol_type = other DNA
tatttttatttatttatttt

SEQ ID NO: 129006 - DNA, 20 bp, synthetic construct
  source 1..20: mol_type = other DNA
ttatttttatttatttattt

SEQ ID NO: 129007 - DNA, 20 bp, synthetic construct
  source 1..20: mol_type = other DNA
tttatttttatttatttatt

SEQ ID NO: 129008 - DNA, 20 bp, synthetic construct
  source 1..20: mol_type = other DNA
ctttatttttatttatttat

SEQ ID NO: 129009 - DNA, 20 bp, synthetic construct
  source 1..20: mol_type = other DNA
actttatttttatttattta

SEQ ID NO: 129010 - DNA, 20 bp, synthetic construct
  source 1..20: mol_type = other DNA
aactttatttttatttattt

SEQ ID NO: 129011 - DNA, 20 bp, synthetic construct
  source 1..20: mol_type = other DNA
aaactttatttttatttatt

SEQ ID NO: 129012 - DNA, 20 bp, synthetic construct
  source 1..20: mol_type = other DNA
taaactttatttttatttat

SEQ ID NO: 129013 - DNA, 20 bp, synthetic construct
  source 1..20: mol_type = other DNA
ataaactttatttttattta

SEQ ID NO: 129014 - DNA, 20 bp, synthetic construct
  source 1..20: mol_type = other DNA
gataaactttatttttattt

SEQ ID NO: 129015 - DNA, 20 bp, synthetic construct
  source 1..20: mol_type = other DNA
agataaactttatttttatt

SEQ ID NO: 129016 - DNA, 20 bp, synthetic construct
  source 1..20: mol_type = other DNA
aagataaactttatttttat

SEQ ID NO: 129017 - DNA, 20 bp, synthetic construct
  source 1..20: mol_type = other DNA
aaagataaactttattttta

SEQ ID NO: 129018 - DNA, 20 bp, synthetic construct
  source 1..20: mol_type = other DNA
taaagataaactttattttt

SEQ ID NO: 129019 - DNA, 20 bp, synthetic construct
  source 1..20: mol_type = other DNA
ttaaagataaactttatttt

SEQ ID NO: 129020 - DNA, 20 bp, synthetic construct
  source 1..20: mol_type = other DNA
cttaaagataaactttattt

SEQ ID NO: 129021 - DNA, 20 bp, synthetic construct
  source 1..20: mol_type = other DNA
ccttaaagataaactttatt

SEQ ID NO: 129022 - DNA, 20 bp, synthetic construct
  source 1..20: mol_type = other DNA
accttaaagataaactttat

SEQ ID NO: 129023 - DNA, 20 bp, synthetic construct
  source 1..20: mol_type = other DNA
aaccttaaagataaacttta

SEQ ID NO: 129024 - DNA, 20 bp, synthetic construct
  source 1..20: mol_type = other DNA
aaaccttaaagataaacttt

SEQ ID NO: 129025 - DNA, 20 bp, synthetic construct
  source 1..20: mol_type = other DNA
aaaaccttaaagataaactt

SEQ ID NO: 129026 - DNA, 20 bp, synthetic construct
  source 1..20: mol_type = other DNA
caaaaccttaaagataaact

SEQ ID NO: 129027 - DNA, 20 bp, synthetic construct
  source 1..20: mol_type = other DNA
acaaaaccttaaagataaac

SEQ ID NO: 129028 - DNA, 20 bp, synthetic construct
  source 1..20: mol_type = other DNA
tacaaaaccttaaagataaa

SEQ ID NO: 129029 - DNA, 20 bp, synthetic construct
  source 1..20: mol_type = other DNA
gtacaaaaccttaaagataa

SEQ ID NO: 129030 - DNA, 20 bp, synthetic construct
  source 1..20: mol_type = other DNA
tgtacaaaaccttaaagata

SEQ ID NO: 129031 - DNA, 20 bp, synthetic construct
  source 1..20: mol_type = other DNA
atgtacaaaaccttaaagat

SEQ ID NO: 129032 - DNA, 20 bp, synthetic construct
  source 1..20: mol_type = other DNA
aatgtacaaaaccttaaaga

SEQ ID NO: 129033 - DNA, 20 bp, synthetic construct
  source 1..20: mol_type = other DNA
aaatgtacaaaaccttaaag

SEQ ID NO: 129034 - DNA, 20 bp, synthetic construct
  source 1..20: mol_type = other DNA
aaaatgtacaaaaccttaaa

SEQ ID NO: 129035 - DNA, 20 bp, synthetic construct
  source 1..20: mol_type = other DNA
aaaaatgtacaaaaccttaa

SEQ ID NO: 129036 - DNA, 20 bp, synthetic construct
  source 1..20: mol_type = other DNA
aaaaaatgtacaaaacctta

SEQ ID NO: 129037 - DNA, 20 bp, synthetic construct
  source 1..20: mol_type = other DNA
aaaaaaatgtacaaaacctt

SEQ ID NO: 129038 - DNA, 20 bp, synthetic construct
  source 1..20: mol_type = other DNA
gaaaaaaatgtacaaaacct

SEQ ID NO: 129039 - DNA, 20 bp, synthetic construct
  source 1..20: mol_type = other DNA
tgaaaaaaatgtacaaaacc

SEQ ID NO: 129040 - DNA, 20 bp, synthetic construct
  source 1..20: mol_type = other DNA
ctgaaaaaaatgtacaaaac

SEQ ID NO: 129041 - DNA, 20 bp, synthetic construct
  source 1..20: mol_type = other DNA
actgaaaaaaatgtacaaaa

SEQ ID NO: 129042 - DNA, 20 bp, synthetic construct
  source 1..20: mol_type = other DNA
cactgaaaaaaatgtacaaa

SEQ ID NO: 129043 - DNA, 20 bp, synthetic construct
  source 1..20: mol_type = other DNA
acactgaaaaaaatgtacaa

SEQ ID NO: 129044 - DNA, 20 bp, synthetic construct
  source 1..20: mol_type = other DNA
tacactgaaaaaaatgtaca

SEQ ID NO: 129045 - DNA, 20 bp, synthetic construct
  source 1..20: mol_type = other DNA
atacactgaaaaaaatgtac

SEQ ID NO: 129046 - DNA, 20 bp, synthetic construct
  source 1..20: mol_type = other DNA
catacactgaaaaaaatgta

SEQ ID NO: 129047 - DNA, 20 bp, synthetic construct
  source 1..20: mol_type = other DNA
gcatacactgaaaaaaatgt

SEQ ID NO: 129048 - DNA, 20 bp, synthetic construct
  source 1..20: mol_type = other DNA
ggcatacactgaaaaaaatg

SEQ ID NO: 129049 - DNA, 20 bp, synthetic construct
  source 1..20: mol_type = other DNA
aggcatacactgaaaaaaat

SEQ ID NO: 129050 - DNA, 20 bp, synthetic construct
  source 1..20: mol_type = other DNA
aaggcatacactgaaaaaaa

SEQ ID NO: 129051 - DNA, 20 bp, synthetic construct
  source 1..20: mol_type = other DNA
taaggcatacactgaaaaaa

SEQ ID NO: 129052 - DNA, 20 bp, synthetic construct
  source 1..20: mol_type = other DNA
ctaaggcatacactgaaaaa

SEQ ID NO: 129053 - DNA, 20 bp, synthetic construct
  source 1..20: mol_type = other DNA
cctaaggcatacactgaaaa

SEQ ID NO: 129054 - DNA, 20 bp, synthetic construct
  source 1..20: mol_type = other DNA
acctaaggcatacactgaaa

SEQ ID NO: 129055 - DNA, 20 bp, synthetic construct
  source 1..20: mol_type = other DNA
tacctaaggcatacactgaa

SEQ ID NO: 129056 - DNA, 20 bp, synthetic construct
  source 1..20: mol_type = other DNA
ctacctaaggcatacactga

SEQ ID NO: 129057 - DNA, 20 bp, synthetic construct
  source 1..20: mol_type = other DNA
cctacctaaggcatacactg

SEQ ID NO: 129058 - DNA, 20 bp, synthetic construct
  source 1..20: mol_type = other DNA
acctacctaaggcatacact

SEQ ID NO: 129059 - DNA, 20 bp, synthetic construct
  source 1..20: mol_type = other DNA
aacctacctaaggcatacac

SEQ ID NO: 129060 - DNA, 20 bp, synthetic construct
  source 1..20: mol_type = other DNA
gaacctacctaaggcataca

SEQ ID NO: 129061 - DNA, 20 bp, synthetic construct
  source 1..20: mol_type = other DNA
agaacctacctaaggcatac

SEQ ID NO: 129062 - DNA, 20 bp, synthetic construct
  source 1..20: mol_type = other DNA
aagaacctacctaaggcata

SEQ ID NO: 129063 - DNA, 20 bp, synthetic construct
  source 1..20: mol_type = other DNA
aaagaacctacctaaggcat

SEQ ID NO: 129064 - DNA, 20 bp, synthetic construct
  source 1..20: mol_type = other DNA
aaaagaacctacctaaggca

SEQ ID NO: 129065 - DNA, 20 bp, synthetic construct
  source 1..20: mol_type = other DNA
aaaaagaacctacctaaggc

SEQ ID NO: 129066 - DNA, 20 bp, synthetic construct
  source 1..20: mol_type = other DNA
aaaaaagaacctacctaagg

SEQ ID NO: 129067 - DNA, 20 bp, synthetic construct
  source 1..20: mol_type = other DNA
taaaaaagaacctacctaag

SEQ ID NO: 129068 - DNA, 20 bp, synthetic construct
  source 1..20: mol_type = other DNA
ttaaaaaagaacctacctaa

SEQ ID NO: 129069 - DNA, 20 bp, synthetic construct
  source 1..20: mol_type = other DNA
attaaaaaagaacctaccta

SEQ ID NO: 129070 - DNA, 20 bp, synthetic construct
  source 1..20: mol_type = other DNA
cattaaaaaagaacctacct

SEQ ID NO: 129071 - DNA, 20 bp, synthetic construct
  source 1..20: mol_type = other DNA
acattaaaaaagaacctacc

SEQ ID NO: 129072 - DNA, 20 bp, synthetic construct
  source 1..20: mol_type = other DNA
aacattaaaaaagaacctac

SEQ ID NO: 129073 - DNA, 20 bp, synthetic construct
  source 1..20: mol_type = other DNA
taacattaaaaaagaaccta

SEQ ID NO: 129074 - DNA, 20 bp, synthetic construct
  source 1..20: mol_type = other DNA
ctaacattaaaaaagaacct

SEQ ID NO: 129075 - DNA, 20 bp, synthetic construct
  source 1..20: mol_type = other DNA
actaacattaaaaaagaacc

SEQ ID NO: 129076 - DNA, 20 bp, synthetic construct
  source 1..20: mol_type = other DNA
cactaacattaaaaaagaac

SEQ ID NO: 129077 - DNA, 20 bp, synthetic construct
  source 1..20: mol_type = other DNA
acactaacattaaaaaagaa

SEQ ID NO: 129078 - DNA, 20 bp, synthetic construct
  source 1..20: mol_type = other DNA
tacactaacattaaaaaaga

SEQ ID NO: 129079 - DNA, 20 bp, synthetic construct
  source 1..20: mol_type = other DNA
ttacactaacattaaaaaag

SEQ ID NO: 129080 - DNA, 20 bp, synthetic construct
  source 1..20: mol_type = other DNA
gttacactaacattaaaaaa

SEQ ID NO: 129081 - DNA, 20 bp, synthetic construct
  source 1..20: mol_type = other DNA
ggttacactaacattaaaaa

SEQ ID NO: 129082 - DNA, 20 bp, synthetic construct
  source 1..20: mol_type = other DNA
gggttacactaacattaaaa

SEQ ID NO: 129083 - DNA, 20 bp, synthetic construct
  source 1..20: mol_type = other DNA
tgggttacactaacattaaa

SEQ ID NO: 129084 - DNA, 20 bp, synthetic construct
  source 1..20: mol_type = other DNA
ctgggttacactaacattaa

SEQ ID NO: 129085 - DNA, 20 bp, synthetic construct
  source 1..20: mol_type = other DNA
cctgggttacactaacatta

SEQ ID NO: 129086 - DNA, 20 bp, synthetic construct
  source 1..20: mol_type = other DNA
ccctgggttacactaacatt

SEQ ID NO: 129087 - DNA, 20 bp, synthetic construct
  source 1..20: mol_type = other DNA
tccctgggttacactaacat

SEQ ID NO: 129088 - DNA, 20 bp, synthetic construct
  source 1..20: mol_type = other DNA
gtccctgggttacactaaca

SEQ ID NO: 129089 - DNA, 20 bp, synthetic construct
  source 1..20: mol_type = other DNA
agtccctgggttacactaac

SEQ ID NO: 129090 - DNA, 20 bp, synthetic construct
  source 1..20: mol_type = other DNA
aagtccctgggttacactaa

SEQ ID NO: 129091 - DNA, 20 bp, synthetic construct
  source 1..20: mol_type = other DNA
gaagtccctgggttacacta

SEQ ID NO: 129092 - DNA, 20 bp, synthetic construct
  source 1..20: mol_type = other DNA
agaagtccctgggttacact

SEQ ID NO: 129093 - DNA, 20 bp, synthetic construct
  source 1..20: mol_type = other DNA
gagaagtccctgggttacac

SEQ ID NO: 129094 - DNA, 20 bp, synthetic construct
  source 1..20: mol_type = other DNA
agagaagtccctgggttaca

SEQ ID NO: 129095 - DNA, 20 bp, synthetic construct
  source 1..20: mol_type = other DNA
aagagaagtccctgggttac

SEQ ID NO: 129096 - DNA, 20 bp, synthetic construct
  source 1..20: mol_type = other DNA
gaagagaagtccctgggtta

SEQ ID NO: 129097 - DNA, 20 bp, synthetic construct
  source 1..20: mol_type = other DNA
ggaagagaagtccctgggtt

SEQ ID NO: 129098 - DNA, 20 bp, synthetic construct
  source 1..20: mol_type = other DNA
tggaagagaagtccctgggt

SEQ ID NO: 129099 - DNA, 20 bp, synthetic construct
  source 1..20: mol_type = other DNA
atggaagagaagtccctggg

SEQ ID NO: 129100 - DNA, 20 bp, synthetic construct
  source 1..20: mol_type = other DNA
aatggaagagaagtccctgg

SEQ ID NO: 129101 - DNA, 20 bp, synthetic construct
  source 1..20: mol_type = other DNA
caatggaagagaagtccctg

SEQ ID NO: 129102 - DNA, 20 bp, synthetic construct
  source 1..20: mol_type = other DNA
gcaatggaagagaagtccct

SEQ ID NO: 129103 - DNA, 20 bp, synthetic construct
  source 1..20: mol_type = other DNA
tgcaatggaagagaagtccc

SEQ ID NO: 129104 - DNA, 20 bp, synthetic construct
  source 1..20: mol_type = other DNA
atgcaatggaagagaagtcc

SEQ ID NO: 129105 - DNA, 20 bp, synthetic construct
  source 1..20: mol_type = other DNA
gatgcaatggaagagaagtc

SEQ ID NO: 129106 - DNA, 20 bp, synthetic construct
  source 1..20: mol_type = other DNA
agatgcaatggaagagaagt

SEQ ID NO: 129107 - DNA, 20 bp, synthetic construct
  source 1..20: mol_type = other DNA
aagatgcaatggaagagaag

SEQ ID NO: 129108 - DNA, 20 bp, synthetic construct
  source 1..20: mol_type = other DNA
gaagatgcaatggaagagaa

SEQ ID NO: 129109 - DNA, 20 bp, synthetic construct
  source 1..20: mol_type = other DNA
agaagatgcaatggaagaga

SEQ ID NO: 129110 - DNA, 20 bp, synthetic construct
  source 1..20: mol_type = other DNA
tagaagatgcaatggaagag

SEQ ID NO: 129111 - DNA, 20 bp, synthetic construct
  source 1..20: mol_type = other DNA
ttagaagatgcaatggaaga

SEQ ID NO: 129112 - DNA, 20 bp, synthetic construct
  source 1..20: mol_type = other DNA
cttagaagatgcaatggaag

SEQ ID NO: 129113 - DNA, 20 bp, synthetic construct
  source 1..20: mol_type = other DNA
acttagaagatgcaatggaa

SEQ ID NO: 129114 - DNA, 20 bp, synthetic construct
  source 1..20: mol_type = other DNA
tacttagaagatgcaatgga

SEQ ID NO: 129115 - DNA, 20 bp, synthetic construct
  source 1..20: mol_type = other DNA
ttacttagaagatgcaatgg

SEQ ID NO: 129116 - DNA, 20 bp, synthetic construct
  source 1..20: mol_type = other DNA
attacttagaagatgcaatg

SEQ ID NO: 129117 - DNA, 20 bp, synthetic construct
  source 1..20: mol_type = other DNA
aattacttagaagatgcaat

SEQ ID NO: 129118 - DNA, 20 bp, synthetic construct
  source 1..20: mol_type = other DNA
taattacttagaagatgcaa

SEQ ID NO: 129119 - DNA, 20 bp, synthetic construct
  source 1..20: mol_type = other DNA
gtaattacttagaagatgca

SEQ ID NO: 129120 - DNA, 20 bp, synthetic construct
  source 1..20: mol_type = other DNA
agtaattacttagaagatgc

SEQ ID NO: 129121 - DNA, 20 bp, synthetic construct
  source 1..20: mol_type = other DNA
aagtaattacttagaagatg

SEQ ID NO: 129122 - DNA, 20 bp, synthetic construct
  source 1..20: mol_type = other DNA
taagtaattacttagaagat

SEQ ID NO: 129123 - DNA, 20 bp, synthetic construct
  source 1..20: mol_type = other DNA
ataagtaattacttagaaga

SEQ ID NO: 129124 - DNA, 20 bp, synthetic construct
  source 1..20: mol_type = other DNA
cataagtaattacttagaag

SEQ ID NO: 129125 - DNA, 20 bp, synthetic construct
  source 1..20: mol_type = other DNA
tcataagtaattacttagaa

SEQ ID NO: 129126 - DNA, 20 bp, synthetic construct
  source 1..20: mol_type = other DNA
ttcataagtaattacttaga

SEQ ID NO: 129127 - DNA, 20 bp, synthetic construct
  source 1..20: mol_type = other DNA
cttcataagtaattacttag

SEQ ID NO: 129128 - DNA, 20 bp, synthetic construct
  source 1..20: mol_type = other DNA
acttcataagtaattactta

SEQ ID NO: 129129 - DNA, 20 bp, synthetic construct
  source 1..20: mol_type = other DNA
tacttcataagtaattactt

SEQ ID NO: 129130 - DNA, 20 bp, synthetic construct
  source 1..20: mol_type = other DNA
gtacttcataagtaattact

SEQ ID NO: 129131 - DNA, 20 bp, synthetic construct
  source 1..20: mol_type = other DNA
ggtacttcataagtaattac

SEQ ID NO: 129132 - DNA, 20 bp, synthetic construct
  source 1..20: mol_type = other DNA
tggtacttcataagtaatta

SEQ ID NO: 129133 - DNA, 20 bp, synthetic construct
  source 1..20: mol_type = other DNA
atggtacttcataagtaatt

SEQ ID NO: 129134 - DNA, 20 bp, synthetic construct
  source 1..20: mol_type = other DNA
tatggtacttcataagtaat

SEQ ID NO: 129135 - DNA, 20 bp, synthetic construct
  source 1..20: mol_type = other DNA
atatggtacttcataagtaa

SEQ ID NO: 129136 - DNA, 20 bp, synthetic construct
  source 1..20: mol_type = other DNA
tatatggtacttcataagta

SEQ ID NO: 129137 - DNA, 20 bp, synthetic construct
  source 1..20: mol_type = other DNA
atatatggtacttcataagt

SEQ ID NO: 129138 - DNA, 20 bp, synthetic construct
  source 1..20: mol_type = other DNA
catatatggtacttcataag

SEQ ID NO: 129139 - DNA, 20 bp, synthetic construct
  source 1..20: mol_type = other DNA
tcatatatggtacttcataa

SEQ ID NO: 129140 - DNA, 20 bp, synthetic construct
  source 1..20: mol_type = other DNA
ttcatatatggtacttcata

SEQ ID NO: 129141 - DNA, 20 bp, synthetic construct
  source 1..20: mol_type = other DNA
cttcatatatggtacttcat

SEQ ID NO: 129142 - DNA, 20 bp, synthetic construct
  source 1..20: mol_type = other DNA
ccttcatatatggtacttca

SEQ ID NO: 129143 - DNA, 20 bp, synthetic construct
  source 1..20: mol_type = other DNA
gccttcatatatggtacttc

SEQ ID NO: 129144 - DNA, 20 bp, synthetic construct
  source 1..20: mol_type = other DNA
agccttcatatatggtactt

SEQ ID NO: 129145 - DNA, 20 bp, synthetic construct
  source 1..20: mol_type = other DNA
tagccttcatatatggtact

SEQ ID NO: 129146 - DNA, 20 bp, synthetic construct
  source 1..20: mol_type = other DNA
atagccttcatatatggtac

SEQ ID NO: 129147 - DNA, 20 bp, synthetic construct
  source 1..20: mol_type = other DNA
aatagccttcatatatggta

SEQ ID NO: 129148 - DNA, 20 bp, synthetic construct
  source 1..20: mol_type = other DNA
caatagccttcatatatggt

SEQ ID NO: 129149 - DNA, 20 bp, synthetic construct
  source 1..20: mol_type = other DNA
gcaatagccttcatatatgg

SEQ ID NO: 129150 - DNA, 20 bp, synthetic construct
  source 1..20: mol_type = other DNA
agcaatagccttcatatatg

SEQ ID NO: 129151 - DNA, 20 bp, synthetic construct
  source 1..20: mol_type = other DNA
cagcaatagccttcatatat

SEQ ID NO: 129152 - DNA, 20 bp, synthetic construct
  source 1..20: mol_type = other DNA
acagcaatagccttcatata

SEQ ID NO: 129153 - DNA, 20 bp, synthetic construct
  source 1..20: mol_type = other DNA
aacagcaatagccttcatat

SEQ ID NO: 129154 - DNA, 20 bp, synthetic construct
  source 1..20: mol_type = other DNA
aaacagcaatagccttcata

SEQ ID NO: 129155 - DNA, 20 bp, synthetic construct
  source 1..20: mol_type = other DNA
taaacagcaatagccttcat

SEQ ID NO: 129156 - DNA, 20 bp, synthetic construct
  source 1..20: mol_type = other DNA
ataaacagcaatagccttca

SEQ ID NO: 129157 - DNA, 20 bp, synthetic construct
  source 1..20: mol_type = other DNA
tataaacagcaatagccttc

SEQ ID NO: 129158 - DNA, 20 bp, synthetic construct
  source 1..20: mol_type = other DNA
atataaacagcaatagcctt

SEQ ID NO: 129159 - DNA, 20 bp, synthetic construct
  source 1..20: mol_type = other DNA
catataaacagcaatagcct

SEQ ID NO: 129160 - DNA, 20 bp, synthetic construct
  source 1..20: mol_type = other DNA
acatataaacagcaatagcc

SEQ ID NO: 129161 - DNA, 20 bp, synthetic construct
  source 1..20: mol_type = other DNA
aacatataaacagcaatagc

SEQ ID NO: 129162 - DNA, 20 bp, synthetic construct
  source 1..20: mol_type = other DNA
taacatataaacagcaatag

SEQ ID NO: 129163 - DNA, 20 bp, synthetic construct
  source 1..20: mol_type = other DNA
ctaacatataaacagcaata

SEQ ID NO: 129164 - DNA, 20 bp, synthetic construct
  source 1..20: mol_type = other DNA
actaacatataaacagcaat

SEQ ID NO: 129165 - DNA, 20 bp, synthetic construct
  source 1..20: mol_type = other DNA
aactaacatataaacagcaa

SEQ ID NO: 129166 - DNA, 20 bp, synthetic construct
  source 1..20: mol_type = other DNA
aaactaacatataaacagca

SEQ ID NO: 129167 - DNA, 20 bp, synthetic construct
  source 1..20: mol_type = other DNA
aaaactaacatataaacagc

SEQ ID NO: 129168 - DNA, 20 bp, synthetic construct
  source 1..20: mol_type = other DNA
aaaaactaacatataaacag

SEQ ID NO: 129169 - DNA, 20 bp, synthetic construct
  source 1..20: mol_type = other DNA
taaaaactaacatataaaca

SEQ ID NO: 129170 - DNA, 20 bp, synthetic construct
  source 1..20: mol_type = other DNA
gtaaaaactaacatataaac

SEQ ID NO: 129171 - DNA, 20 bp, synthetic construct
  source 1..20: mol_type = other DNA
ggtaaaaactaacatataaa

SEQ ID NO: 129172 - DNA, 20 bp, synthetic construct
  source 1..20: mol_type = other DNA
gggtaaaaactaacatataa

SEQ ID NO: 129173 - DNA, 20 bp, synthetic construct
  source 1..20: mol_type = other DNA
agggtaaaaactaacatata

SEQ ID NO: 129174 - DNA, 20 bp, synthetic construct
  source 1..20: mol_type = other DNA
cagggtaaaaactaacatat

SEQ ID NO: 129175 - DNA, 20 bp, synthetic construct
  source 1..20: mol_type = other DNA
gcagggtaaaaactaacata

SEQ ID NO: 129176 - DNA, 20 bp, synthetic construct
  source 1..20: mol_type = other DNA
agcagggtaaaaactaacat

SEQ ID NO: 129177 - DNA, 20 bp, synthetic construct
  source 1..20: mol_type = other DNA
gagcagggtaaaaactaaca

SEQ ID NO: 129178 - DNA, 20 bp, synthetic construct
  source 1..20: mol_type = other DNA
ggagcagggtaaaaactaac

SEQ ID NO: 129179 - DNA, 20 bp, synthetic construct
  source 1..20: mol_type = other DNA
aggagcagggtaaaaactaa

SEQ ID NO: 129180 - DNA, 20 bp, synthetic construct
  source 1..20: mol_type = other DNA
aaggagcagggtaaaaacta

SEQ ID NO: 129181 - DNA, 20 bp, synthetic construct
  source 1..20: mol_type = other DNA
aaaggagcagggtaaaaact

SEQ ID NO: 129182 - DNA, 20 bp, synthetic construct
  source 1..20: mol_type = other DNA
taaaggagcagggtaaaaac

SEQ ID NO: 129183 - DNA, 20 bp, synthetic construct
  source 1..20: mol_type = other DNA
gtaaaggagcagggtaaaaa

SEQ ID NO: 129184 - DNA, 20 bp, synthetic construct
  source 1..20: mol_type = other DNA
agtaaaggagcagggtaaaa

SEQ ID NO: 129185 - DNA, 20 bp, synthetic construct
  source 1..20: mol_type = other DNA
tagtaaaggagcagggtaaa

SEQ ID NO: 129186 - DNA, 20 bp, synthetic construct
  source 1..20: mol_type = other DNA
ttagtaaaggagcagggtaa

SEQ ID NO: 129187 - DNA, 20 bp, synthetic construct
  source 1..20: mol_type = other DNA
tttagtaaaggagcagggta

SEQ ID NO: 129188 - DNA, 20 bp, synthetic construct
  source 1..20: mol_type = other DNA
atttagtaaaggagcagggt

SEQ ID NO: 129189 - DNA, 20 bp, synthetic construct
  source 1..20: mol_type = other DNA
aatttagtaaaggagcaggg

SEQ ID NO: 129190 - DNA, 20 bp, synthetic construct
  source 1..20: mol_type = other DNA
gaatttagtaaaggagcagg

SEQ ID NO: 129191 - DNA, 20 bp, synthetic construct
  source 1..20: mol_type = other DNA
ggaatttagtaaaggagcag

SEQ ID NO: 129192 - DNA, 20 bp, synthetic construct
  source 1..20: mol_type = other DNA
tggaatttagtaaaggagca

SEQ ID NO: 129193 - DNA, 20 bp, synthetic construct
  source 1..20: mol_type = other DNA
ttggaatttagtaaaggagc

SEQ ID NO: 129194 - DNA, 20 bp, synthetic construct
  source 1..20: mol_type = other DNA
attggaatttagtaaaggag

SEQ ID NO: 129195 - DNA, 20 bp, synthetic construct
  source 1..20: mol_type = other DNA
gattggaatttagtaaagga

SEQ ID NO: 129196 - DNA, 20 bp, synthetic construct
  source 1..20: mol_type = other DNA
ggattggaatttagtaaagg

SEQ ID NO: 129197 - DNA, 20 bp, synthetic construct
  source 1..20: mol_type = other DNA
aggattggaatttagtaaag

SEQ ID NO: 129198 - DNA, 20 bp, synthetic construct
  source 1..20: mol_type = other DNA
aaggattggaatttagtaaa

SEQ ID NO: 129199 - DNA, 20 bp, synthetic construct
  source 1..20: mol_type = other DNA
aaaggattggaatttagtaa

SEQ ID NO: 129200 - DNA, 20 bp, synthetic construct
  source 1..20: mol_type = other DNA
caaaggattggaatttagta

SEQ ID NO: 129201 - DNA, 20 bp, synthetic construct
  source 1..20: mol_type = other DNA
tcaaaggattggaatttagt

SEQ ID NO: 129202 - DNA, 20 bp, synthetic construct
  source 1..20: mol_type = other DNA
ctcaaaggattggaatttag

SEQ ID NO: 129203 - DNA, 20 bp, synthetic construct
  source 1..20: mol_type = other DNA
cctcaaaggattggaattta

SEQ ID NO: 129204 - DNA, 20 bp, synthetic construct
  source 1..20: mol_type = other DNA
acctcaaaggattggaattt

SEQ ID NO: 129205 - DNA, 20 bp, synthetic construct
  source 1..20: mol_type = other DNA
tacctcaaaggattggaatt

SEQ ID NO: 129206 - DNA, 20 bp, synthetic construct
  source 1..20: mol_type = other DNA
atacctcaaaggattggaat

SEQ ID NO: 129207 - DNA, 20 bp, synthetic construct
  source 1..20: mol_type = other DNA
aatacctcaaaggattggaa

SEQ ID NO: 129208 - DNA, 20 bp, synthetic construct
  source 1..20: mol_type = other DNA
caatacctcaaaggattgga

SEQ ID NO: 129209 - DNA, 20 bp, synthetic construct
  source 1..20: mol_type = other DNA
ccaatacctcaaaggattgg

SEQ ID NO: 129210 - DNA, 20 bp, synthetic construct
  source 1..20: mol_type = other DNA
tccaatacctcaaaggattg

SEQ ID NO: 129211 - DNA, 20 bp, synthetic construct
  source 1..20: mol_type = other DNA
atccaatacctcaaaggatt

SEQ ID NO: 129212 - DNA, 20 bp, synthetic construct
  source 1..20: mol_type = other DNA
tatccaatacctcaaaggat

SEQ ID NO: 129213 - DNA, 20 bp, synthetic construct
  source 1..20: mol_type = other DNA
ttatccaatacctcaaagga

SEQ ID NO: 129214 - DNA, 20 bp, synthetic construct
  source 1..20: mol_type = other DNA
tttatccaatacctcaaagg

SEQ ID NO: 129215 - DNA, 20 bp, synthetic construct
  source 1..20: mol_type = other DNA
ttttatccaatacctcaaag

SEQ ID NO: 129216 - DNA, 20 bp, synthetic construct
  source 1..20: mol_type = other DNA
tttttatccaatacctcaaa

SEQ ID NO: 129217 - DNA, 20 bp, synthetic construct
  source 1..20: mol_type = other DNA
atttttatccaatacctcaa

SEQ ID NO: 129218 - DNA, 20 bp, synthetic construct
  source 1..20: mol_type = other DNA
tatttttatccaatacctca

SEQ ID NO: 129219 - DNA, 20 bp, synthetic construct
  source 1..20: mol_type = other DNA
atatttttatccaatacctc

SEQ ID NO: 129220 - DNA, 20 bp, synthetic construct
  source 1..20: mol_type = other DNA
aatatttttatccaatacct

SEQ ID NO: 129221 - DNA, 20 bp, synthetic construct
  source 1..20: mol_type = other DNA
aaatatttttatccaatacc

SEQ ID NO: 129222 - DNA, 20 bp, synthetic construct
  source 1..20: mol_type = other DNA
aaaatatttttatccaatac

SEQ ID NO: 129223 - DNA, 20 bp, synthetic construct
  source 1..20: mol_type = other DNA
aaaaatatttttatccaata

SEQ ID NO: 129224 - DNA, 20 bp, synthetic construct
  source 1..20: mol_type = other DNA
taaaaatatttttatccaat

SEQ ID NO: 129225 - DNA, 20 bp, synthetic construct
  source 1..20: mol_type = other DNA
ctaaaaatatttttatccaa

SEQ ID NO: 129226 - DNA, 20 bp, synthetic construct
  source 1..20: mol_type = other DNA
gctaaaaatatttttatcca

SEQ ID NO: 129227 - DNA, 20 bp, synthetic construct
  source 1..20: mol_type = other DNA
tgctaaaaatatttttatcc

SEQ ID NO: 129228 - DNA, 20 bp, synthetic construct
  source 1..20: mol_type = other DNA
atgctaaaaatatttttatc

SEQ ID NO: 129229 - DNA, 20 bp, synthetic construct
  source 1..20: mol_type = other DNA
aatgctaaaaatatttttat

SEQ ID NO: 129230 - DNA, 20 bp, synthetic construct
  source 1..20: mol_type = other DNA
aaatgctaaaaatattttta

SEQ ID NO: 129231 - DNA, 20 bp, synthetic construct
  source 1..20: mol_type = other DNA
aaaatgctaaaaatattttt

SEQ ID NO: 129232 - DNA, 20 bp, synthetic construct
  source 1..20: mol_type = other DNA
aaaaatgctaaaaatatttt

SEQ ID NO: 129233 - DNA, 20 bp, synthetic construct
  source 1..20: mol_type = other DNA
gaaaaatgctaaaaatattt

SEQ ID NO: 129234 - DNA, 20 bp, synthetic construct
  source 1..20: mol_type = other DNA
tgaaaaatgctaaaaatatt

SEQ ID NO: 129235 - DNA, 20 bp, synthetic construct
  source 1..20: mol_type = other DNA
ttgaaaaatgctaaaaatat

SEQ ID NO: 129236 - DNA, 20 bp, synthetic construct
  source 1..20: mol_type = other DNA
tttgaaaaatgctaaaaata

SEQ ID NO: 129237 - DNA, 20 bp, synthetic construct
  source 1..20: mol_type = other DNA
atttgaaaaatgctaaaaat

SEQ ID NO: 129238 - DNA, 20 bp, synthetic construct
  source 1..20: mol_type = other DNA
tatttgaaaaatgctaaaaa

SEQ ID NO: 129239 - DNA, 20 bp, synthetic construct
  source 1..20: mol_type = other DNA
ttatttgaaaaatgctaaaa

SEQ ID NO: 129240 - DNA, 20 bp, synthetic construct
  source 1..20: mol_type = other DNA
gttatttgaaaaatgctaaa

SEQ ID NO: 129241 - DNA, 20 bp, synthetic construct
  source 1..20: mol_type = other DNA
tgttatttgaaaaatgctaa

SEQ ID NO: 129242 - DNA, 20 bp, synthetic construct
  source 1..20: mol_type = other DNA
ctgttatttgaaaaatgcta

SEQ ID NO: 129243 - DNA, 20 bp, synthetic construct
  source 1..20: mol_type = other DNA
cctgttatttgaaaaatgct

SEQ ID NO: 129244 - DNA, 20 bp, synthetic construct
  source 1..20: mol_type = other DNA
gcctgttatttgaaaaatgc

SEQ ID NO: 129245 - DNA, 20 bp, synthetic construct
  source 1..20: mol_type = other DNA
tgcctgttatttgaaaaatg

SEQ ID NO: 129246 - DNA, 20 bp, synthetic construct
  source 1..20: mol_type = other DNA
ctgcctgttatttgaaaaat

SEQ ID NO: 129247 - DNA, 20 bp, synthetic construct
  source 1..20: mol_type = other DNA
tctgcctgttatttgaaaaa

SEQ ID NO: 129248 - DNA, 20 bp, synthetic construct
  source 1..20: mol_type = other DNA
ctctgcctgttatttgaaaa

SEQ ID NO: 129249 - DNA, 20 bp, synthetic construct
  source 1..20: mol_type = other DNA
actctgcctgttatttgaaa

SEQ ID NO: 129250 - DNA, 20 bp, synthetic construct
  source 1..20: mol_type = other DNA
gactctgcctgttatttgaa

SEQ ID NO: 129251 - DNA, 20 bp, synthetic construct
  source 1..20: mol_type = other DNA
tgactctgcctgttatttga

SEQ ID NO: 129252 - DNA, 20 bp, synthetic construct
  source 1..20: mol_type = other DNA
ttgactctgcctgttatttg

SEQ ID NO: 129253 - DNA, 20 bp, synthetic construct
  source 1..20: mol_type = other DNA
cttgactctgcctgttattt

SEQ ID NO: 129254 - DNA, 20 bp, synthetic construct
  source 1..20: mol_type = other DNA
ccttgactctgcctgttatt

SEQ ID NO: 129255 - DNA, 20 bp, synthetic construct
  source 1..20: mol_type = other DNA
cccttgactctgcctgttat

SEQ ID NO: 129256 - DNA, 20 bp, synthetic construct
  source 1..20: mol_type = other DNA
gcccttgactctgcctgtta

SEQ ID NO: 129257 - DNA, 20 bp, synthetic construct
  source 1..20: mol_type = other DNA
agcccttgactctgcctgtt

SEQ ID NO: 129258 - DNA, 20 bp, synthetic construct
  source 1..20: mol_type = other DNA
aagcccttgactctgcctgt

SEQ ID NO: 129259 - DNA, 20 bp, synthetic construct
  source 1..20: mol_type = other DNA
caagcccttgactctgcctg

SEQ ID NO: 129260 - DNA, 20 bp, synthetic construct
  source 1..20: mol_type = other DNA
ccaagcccttgactctgcct

SEQ ID NO: 129261 - DNA, 20 bp, synthetic construct
  source 1..20: mol_type = other DNA
accaagcccttgactctgcc

SEQ ID NO: 129262 - DNA, 20 bp, synthetic construct
  source 1..20: mol_type = other DNA
aaccaagcccttgactctgc

SEQ ID NO: 129263 - DNA, 20 bp, synthetic construct
  source 1..20: mol_type = other DNA
aaaccaagcccttgactctg

SEQ ID NO: 129264 - DNA, 20 bp, synthetic construct
  source 1..20: mol_type = other DNA
gaaaccaagcccttgactct

SEQ ID NO: 129265 - DNA, 20 bp, synthetic construct
  source 1..20: mol_type = other DNA
agaaaccaagcccttgactc

SEQ ID NO: 129266 - DNA, 20 bp, synthetic construct
  source 1..20: mol_type = other DNA
aagaaaccaagcccttgact

SEQ ID NO: 129267 - DNA, 20 bp, synthetic construct
  source 1..20: mol_type = other DNA
aaagaaaccaagcccttgac

SEQ ID NO: 129268 - DNA, 20 bp, synthetic construct
  source 1..20: mol_type = other DNA
aaaagaaaccaagcccttga

SEQ ID NO: 129269 - DNA, 20 bp, synthetic construct
  source 1..20: mol_type = other DNA
gaaaagaaaccaagcccttg

SEQ ID NO: 129270 - DNA, 20 bp, synthetic construct
  source 1..20: mol_type = other DNA
agaaaagaaaccaagccctt

SEQ ID NO: 129271 - DNA, 20 bp, synthetic construct
  source 1..20: mol_type = other DNA
aagaaaagaaaccaagccct

SEQ ID NO: 129272 - DNA, 20 bp, synthetic construct
  source 1..20: mol_type = other DNA
gaagaaaagaaaccaagccc

SEQ ID NO: 129273 - DNA, 20 bp, synthetic construct
  source 1..20: mol_type = other DNA
ggaagaaaagaaaccaagcc

SEQ ID NO: 129274 - DNA, 20 bp, synthetic construct
  source 1..20: mol_type = other DNA
gggaagaaaagaaaccaagc

SEQ ID NO: 129275 - DNA, 20 bp, synthetic construct
  source 1..20: mol_type = other DNA
ggggaagaaaagaaaccaag

SEQ ID NO: 129276 - DNA, 20 bp, synthetic construct
  source 1..20: mol_type = other DNA
aggggaagaaaagaaaccaa

SEQ ID NO: 129277 - DNA, 20 bp, synthetic construct
  source 1..20: mol_type = other DNA
gaggggaagaaaagaaacca

SEQ ID NO: 129278 - DNA, 20 bp, synthetic construct
  source 1..20: mol_type = other DNA
ggaggggaagaaaagaaacc

SEQ ID NO: 129279 - DNA, 20 bp, synthetic construct
  source 1..20: mol_type = other DNA
aggaggggaagaaaagaaac

SEQ ID NO: 129280 - DNA, 20 bp, synthetic construct
  source 1..20: mol_type = other DNA
caggaggggaagaaaagaaa

SEQ ID NO: 129281 - DNA, 20 bp, synthetic construct
  source 1..20: mol_type = other DNA
acaggaggggaagaaaagaa

SEQ ID NO: 129282 - DNA, 20 bp, synthetic construct
  source 1..20: mol_type = other DNA
gacaggaggggaagaaaaga

SEQ ID NO: 129283 - DNA, 20 bp, synthetic construct
  source 1..20: mol_type = other DNA
ggacaggaggggaagaaaag

SEQ ID NO: 129284 - DNA, 20 bp, synthetic construct
  source 1..20: mol_type = other DNA
gggacaggaggggaagaaaa

SEQ ID NO: 129285 - DNA, 20 bp, synthetic construct
  source 1..20: mol_type = other DNA
ggggacaggaggggaagaaa

SEQ ID NO: 129286 - DNA, 20 bp, synthetic construct
  source 1..20: mol_type = other DNA
aggggacaggaggggaagaa

SEQ ID NO: 129287 - DNA, 20 bp, synthetic construct
  source 1..20: mol_type = other DNA
taggggacaggaggggaaga

SEQ ID NO: 129288 - DNA, 20 bp, synthetic construct
  source 1..20: mol_type = other DNA
gtaggggacaggaggggaag

SEQ ID NO: 129289 - DNA, 20 bp, synthetic construct
  source 1..20: mol_type = other DNA
ggtaggggacaggaggggaa

SEQ ID NO: 129290 - DNA, 20 bp, synthetic construct
  source 1..20: mol_type = other DNA
gggtaggggacaggagggga

SEQ ID NO: 129291 - DNA, 20 bp, synthetic construct
  source 1..20: mol_type = other DNA
agggtaggggacaggagggg

SEQ ID NO: 129292 - DNA, 20 bp, synthetic construct
  source 1..20: mol_type = other DNA
gagggtaggggacaggaggg

SEQ ID NO: 129293 - DNA, 20 bp, synthetic construct
  source 1..20: mol_type = other DNA
ggagggtaggggacaggagg

SEQ ID NO: 129294 - DNA, 20 bp, synthetic construct
  source 1..20: mol_type = other DNA
gggagggtaggggacaggag

SEQ ID NO: 129295 - DNA, 20 bp, synthetic construct
  source 1..20: mol_type = other DNA
ggggagggtaggggacagga

SEQ ID NO: 129296 - DNA, 20 bp, synthetic construct
  source 1..20: mol_type = other DNA
aggggagggtaggggacagg

SEQ ID NO: 129297 - DNA, 20 bp, synthetic construct
  source 1..20: mol_type = other DNA
aaggggagggtaggggacag

SEQ ID NO: 129298 - DNA, 20 bp, synthetic construct
  source 1..20: mol_type = other DNA
aaaggggagggtaggggaca

SEQ ID NO: 129299 - DNA, 20 bp, synthetic construct
  source 1..20: mol_type = other DNA
aaaaggggagggtaggggac

SEQ ID NO: 129300 - DNA, 20 bp, synthetic construct
  source 1..20: mol_type = other DNA
aaaaaggggagggtagggga

SEQ ID NO: 129301 - DNA, 20 bp, synthetic construct
  source 1..20: mol_type = other DNA
aaaaaaggggagggtagggg

SEQ ID NO: 129302 - DNA, 20 bp, synthetic construct
  source 1..20: mol_type = other DNA
caaaaaaggggagggtaggg

SEQ ID NO: 129303 - DNA, 20 bp, synthetic construct
  source 1..20: mol_type = other DNA
tcaaaaaaggggagggtagg

SEQ ID NO: 129304 - DNA, 20 bp, synthetic construct
  source 1..20: mol_type = other DNA
ctcaaaaaaggggagggtag

SEQ ID NO: 129305 - DNA, 20 bp, synthetic construct
  source 1..20: mol_type = other DNA
tctcaaaaaaggggagggta

SEQ ID NO: 129306 - DNA, 20 bp, synthetic construct
  source 1..20: mol_type = other DNA
gtctcaaaaaaggggagggt

SEQ ID NO: 129307 - DNA, 20 bp, synthetic construct
  source 1..20: mol_type = other DNA
tgtctcaaaaaaggggaggg

SEQ ID NO: 129308 - DNA, 20 bp, synthetic construct
  source 1..20: mol_type = other DNA
ctgtctcaaaaaaggggagg

SEQ ID NO: 129309 - DNA, 20 bp, synthetic construct
  source 1..20: mol_type = other DNA
cctgtctcaaaaaaggggag

SEQ ID NO: 129310 - DNA, 20 bp, synthetic construct
  source 1..20: mol_type = other DNA
ccctgtctcaaaaaagggga

SEQ ID NO: 129311 - DNA, 20 bp, synthetic construct
  source 1..20: mol_type = other DNA
accctgtctcaaaaaagggg

SEQ ID NO: 129312 - DNA, 20 bp, synthetic construct
  source 1..20: mol_type = other DNA
gaccctgtctcaaaaaaggg

SEQ ID NO: 129313 - DNA, 20 bp, synthetic construct
  source 1..20: mol_type = other DNA
agaccctgtctcaaaaaagg

SEQ ID NO: 129314 - DNA, 20 bp, synthetic construct
  source 1..20: mol_type = other DNA
gagaccctgtctcaaaaaag

SEQ ID NO: 129315 - DNA, 20 bp, synthetic construct
  source 1..20: mol_type = other DNA
tgagaccctgtctcaaaaaa

SEQ ID NO: 129316 - DNA, 20 bp, synthetic construct
  source 1..20: mol_type = other DNA
gtgagaccctgtctcaaaaa

SEQ ID NO: 129317 - DNA, 20 bp, synthetic construct
  source 1..20: mol_type = other DNA
agtgagaccctgtctcaaaa

SEQ ID NO: 129318 - DNA, 20 bp, synthetic construct
  source 1..20: mol_type = other DNA
aagtgagaccctgtctcaaa

SEQ ID NO: 129319 - DNA, 20 bp, synthetic construct
  source 1..20: mol_type = other DNA
gaagtgagaccctgtctcaa

SEQ ID NO: 129320 - DNA, 20 bp, synthetic construct
  source 1..20: mol_type = other DNA
agaagtgagaccctgtctca

SEQ ID NO: 129321 - DNA, 20 bp, synthetic construct
  source 1..20: mol_type = other DNA
aagaagtgagaccctgtctc

SEQ ID NO: 129322 - DNA, 20 bp, synthetic construct
  source 1..20: mol_type = other DNA
gaagaagtgagaccctgtct

SEQ ID NO: 129323 - DNA, 20 bp, synthetic construct
  source 1..20: mol_type = other DNA
cgaagaagtgagaccctgtc

SEQ ID NO: 129324 - DNA, 20 bp, synthetic construct
  source 1..20: mol_type = other DNA
gcgaagaagtgagaccctgt

SEQ ID NO: 129325 - DNA, 20 bp, synthetic construct
  source 1..20: mol_type = other DNA
ggcgaagaagtgagaccctg

SEQ ID NO: 129326 - DNA, 20 bp, synthetic construct
  source 1..20: mol_type = other DNA
cggcgaagaagtgagaccct

SEQ ID NO: 129327 - DNA, 20 bp, synthetic construct
  source 1..20: mol_type = other DNA
tcggcgaagaagtgagaccc

SEQ ID NO: 129328 - DNA, 20 bp, synthetic construct
  source 1..20: mol_type = other DNA
ctcggcgaagaagtgagacc

SEQ ID NO: 129329 - DNA, 20 bp, synthetic construct
  source 1..20: mol_type = other DNA
cctcggcgaagaagtgagac

SEQ ID NO: 129330 - DNA, 20 bp, synthetic construct
  source 1..20: mol_type = other DNA
gcctcggcgaagaagtgaga

SEQ ID NO: 129331 - DNA, 20 bp, synthetic construct
  source 1..20: mol_type = other DNA
agcctcggcgaagaagtgag

SEQ ID NO: 129332 - DNA, 20 bp, synthetic construct
  source 1..20: mol_type = other DNA
cagcctcggcgaagaagtga

SEQ ID NO: 129333 - DNA, 20 bp, synthetic construct
  source 1..20: mol_type = other DNA
ccagcctcggcgaagaagtg

SEQ ID NO: 129334 - DNA, 20 bp, synthetic construct
  source 1..20: mol_type = other DNA
tccagcctcggcgaagaagt

SEQ ID NO: 129335 - DNA, 20 bp, synthetic construct
  source 1..20: mol_type = other DNA
ctccagcctcggcgaagaag

SEQ ID NO: 129336 - DNA, 20 bp, synthetic construct
  source 1..20: mol_type = other DNA
actccagcctcggcgaagaa

SEQ ID NO: 129337 - DNA, 20 bp, synthetic construct
  source 1..20: mol_type = other DNA
cactccagcctcggcgaaga

SEQ ID NO: 129338 - DNA, 20 bp, synthetic construct
  source 1..20: mol_type = other DNA
gcactccagcctcggcgaag

SEQ ID NO: 129339 - DNA, 20 bp, synthetic construct
  source 1..20: mol_type = other DNA
tgcactccagcctcggcgaa

SEQ ID NO: 129340 - DNA, 20 bp, synthetic construct
  source 1..20: mol_type = other DNA
ctgcactccagcctcggcga

SEQ ID NO: 129341 - DNA, 20 bp, synthetic construct
  source 1..20: mol_type = other DNA
actgcactccagcctcggcg

SEQ ID NO: 129342 - DNA, 20 bp, synthetic construct
  source 1..20: mol_type = other DNA
cactgcactccagcctcggc

SEQ ID NO: 129343 - DNA, 20 bp, synthetic construct
  source 1..20: mol_type = other DNA
ccactgcactccagcctcgg

SEQ ID NO: 129344 - DNA, 20 bp, synthetic construct
  source 1..20: mol_type = other DNA
accactgcactccagcctcg

SEQ ID NO: 129345 - DNA, 20 bp, synthetic construct
  source 1..20: mol_type = other DNA
caccactgcactccagcctc

SEQ ID NO: 129346 - DNA, 20 bp, synthetic construct
  source 1..20: mol_type = other DNA
gcaccactgcactccagcct

SEQ ID NO: 129347 - DNA, 20 bp, synthetic construct
  source 1..20: mol_type = other DNA
tgcaccactgcactccagcc

SEQ ID NO: 129348 - DNA, 20 bp, synthetic construct
  source 1..20: mol_type = other DNA
ctgcaccactgcactccagc

SEQ ID NO: 129349 - DNA, 20 bp, synthetic construct
  source 1..20: mol_type = other DNA
actgcaccactgcactccag

SEQ ID NO: 129350 - DNA, 20 bp, synthetic construct
  source 1..20: mol_type = other DNA
aactgcaccactgcactcca

SEQ ID NO: 129351 - DNA, 20 bp, synthetic construct
  source 1..20: mol_type = other DNA
taactgcaccactgcactcc

SEQ ID NO: 129352 - DNA, 20 bp, synthetic construct
  source 1..20: mol_type = other DNA
gtaactgcaccactgcactc

SEQ ID NO: 129353 - DNA, 20 bp, synthetic construct
  source 1..20: mol_type = other DNA
cgtaactgcaccactgcact

SEQ ID NO: 129354 - DNA, 20 bp, synthetic construct
  source 1..20: mol_type = other DNA
ccgtaactgcaccactgcac

SEQ ID NO: 129355 - DNA, 20 bp, synthetic construct
  source 1..20: mol_type = other DNA
gccgtaactgcaccactgca

SEQ ID NO: 129356 - DNA, 20 bp, synthetic construct
  source 1..20: mol_type = other DNA
agccgtaactgcaccactgc

SEQ ID NO: 129357 - DNA, 20 bp, synthetic construct
  source 1..20: mol_type = other DNA
aagccgtaactgcaccactg

SEQ ID NO: 129358 - DNA, 20 bp, synthetic construct
  source 1..20: mol_type = other DNA
taagccgtaactgcaccact

SEQ ID NO: 129359 - DNA, 20 bp, synthetic construct
  source 1..20: mol_type = other DNA
gtaagccgtaactgcaccac

SEQ ID NO: 129360 - DNA, 20 bp, synthetic construct
  source 1..20: mol_type = other DNA
ggtaagccgtaactgcacca

SEQ ID NO: 129361 - DNA, 20 bp, synthetic construct
  source 1..20: mol_type = other DNA
cggtaagccgtaactgcacc

SEQ ID NO: 129362 - DNA, 20 bp, synthetic construct
  source 1..20: mol_type = other DNA
gcggtaagccgtaactgcac

SEQ ID NO: 129363 - DNA, 20 bp, synthetic construct
  source 1..20: mol_type = other DNA
cgcggtaagccgtaactgca

SEQ ID NO: 129364 - DNA, 20 bp, synthetic construct
  source 1..20: mol_type = other DNA
ccgcggtaagccgtaactgc

SEQ ID NO: 129365 - DNA, 20 bp, synthetic construct
  source 1..20: mol_type = other DNA
gccgcggtaagccgtaactg

SEQ ID NO: 129366 - DNA, 20 bp, synthetic construct
  source 1..20: mol_type = other DNA
tgccgcggtaagccgtaact

SEQ ID NO: 129367 - DNA, 20 bp, synthetic construct
  source 1..20: mol_type = other DNA
atgccgcggtaagccgtaac

SEQ ID NO: 129368 - DNA, 20 bp, synthetic construct
  source 1..20: mol_type = other DNA
gatgccgcggtaagccgtaa

SEQ ID NO: 129369 - DNA, 20 bp, synthetic construct
  source 1..20: mol_type = other DNA
agatgccgcggtaagccgta

SEQ ID NO: 129370 - DNA, 20 bp, synthetic construct
  source 1..20: mol_type = other DNA
cagatgccgcggtaagccgt

SEQ ID NO: 129371 - DNA, 20 bp, synthetic construct
  source 1..20: mol_type = other DNA
gcagatgccgcggtaagccg

SEQ ID NO: 129372 - DNA, 20 bp, synthetic construct
  source 1..20: mol_type = other DNA
ggcagatgccgcggtaagcc

SEQ ID NO: 129373 - DNA, 20 bp, synthetic construct
  source 1..20: mol_type = other DNA
aggcagatgccgcggtaagc

SEQ ID NO: 129374 - DNA, 20 bp, synthetic construct
  source 1..20: mol_type = other DNA
gaggcagatgccgcggtaag

SEQ ID NO: 129375 - DNA, 20 bp, synthetic construct
  source 1..20: mol_type = other DNA
ggaggcagatgccgcggtaa

SEQ ID NO: 129376 - DNA, 20 bp, synthetic construct
  source 1..20: mol_type = other DNA
gggaggcagatgccgcggta

SEQ ID NO: 129377 - DNA, 20 bp, synthetic construct
  source 1..20: mol_type = other DNA
agggaggcagatgccgcggt

SEQ ID NO: 129378 - DNA, 20 bp, synthetic construct
  source 1..20: mol_type = other DNA
cagggaggcagatgccgcgg

SEQ ID NO: 129379 - DNA, 20 bp, synthetic construct
  source 1..20: mol_type = other DNA
ccagggaggcagatgccgcg

SEQ ID NO: 129380 - DNA, 20 bp, synthetic construct
  source 1..20: mol_type = other DNA
gccagggaggcagatgccgc

SEQ ID NO: 129381 - DNA, 20 bp, synthetic construct
  source 1..20: mol_type = other DNA
agccagggaggcagatgccg

SEQ ID NO: 129382 - DNA, 20 bp, synthetic construct
  source 1..20: mol_type = other DNA
cagccagggaggcagatgcc

SEQ ID NO: 129383 - DNA, 20 bp, synthetic construct
  source 1..20: mol_type = other DNA
tcagccagggaggcagatgc

SEQ ID NO: 129384 - DNA, 20 bp, synthetic construct
  source 1..20: mol_type = other DNA
ttcagccagggaggcagatg

SEQ ID NO: 129385 - DNA, 20 bp, synthetic construct
  source 1..20: mol_type = other DNA
tttcagccagggaggcagat

SEQ ID NO: 129386 - DNA, 20 bp, synthetic construct
  source 1..20: mol_type = other DNA
ttttcagccagggaggcaga

SEQ ID NO: 129387 - DNA, 20 bp, synthetic construct
  source 1..20: mol_type = other DNA
cttttcagccagggaggcag

SEQ ID NO: 129388 - DNA, 20 bp, synthetic construct
  source 1..20: mol_type = other DNA
acttttcagccagggaggca

SEQ ID NO: 129389 - DNA, 20 bp, synthetic construct
  source 1..20: mol_type = other DNA
aacttttcagccagggaggc

SEQ ID NO: 129390 - DNA, 20 bp, synthetic construct
  source 1..20: mol_type = other DNA
gaacttttcagccagggagg

SEQ ID NO: 129391 - DNA, 20 bp, synthetic construct
  source 1..20: mol_type = other DNA
ggaacttttcagccagggag

SEQ ID NO: 129392 - DNA, 20 bp, synthetic construct
  source 1..20: mol_type = other DNA
aggaacttttcagccaggga

SEQ ID NO: 129393 - DNA, 20 bp, synthetic construct
  source 1..20: mol_type = other DNA
gaggaacttttcagccaggg

SEQ ID NO: 129394 - DNA, 20 bp, synthetic construct
  source 1..20: mol_type = other DNA
ggaggaacttttcagccagg

SEQ ID NO: 129395 - DNA, 20 bp, synthetic construct
  source 1..20: mol_type = other DNA
gggaggaacttttcagccag

SEQ ID NO: 129396 - DNA, 20 bp, synthetic construct
  source 1..20: mol_type = other DNA
tgggaggaacttttcagcca

SEQ ID NO: 129397 - DNA, 20 bp, synthetic construct
  source 1..20: mol_type = other DNA
gtgggaggaacttttcagcc

SEQ ID NO: 129398 - DNA, 20 bp, synthetic construct
  source 1..20: mol_type = other DNA
ggtgggaggaacttttcagc

SEQ ID NO: 129399 - DNA, 20 bp, synthetic construct
  source 1..20: mol_type = other DNA
aggtgggaggaacttttcag

SEQ ID NO: 129400 - DNA, 20 bp, synthetic construct
  source 1..20: mol_type = other DNA
gaggtgggaggaacttttca

SEQ ID NO: 129401 - DNA, 20 bp, synthetic construct
  source 1..20: mol_type = other DNA
tgaggtgggaggaacttttc

SEQ ID NO: 129402 - DNA, 20 bp, synthetic construct
  source 1..20: mol_type = other DNA
ctgaggtgggaggaactttt

SEQ ID NO: 129403 - DNA, 20 bp, synthetic construct
  source 1..20: mol_type = other DNA
gctgaggtgggaggaacttt

SEQ ID NO: 129404 - DNA, 20 bp, synthetic construct
  source 1..20: mol_type = other DNA
ggctgaggtgggaggaactt

SEQ ID NO: 129405 - DNA, 20 bp, synthetic construct
  source 1..20: mol_type = other DNA
aggctgaggtgggaggaact

SEQ ID NO: 129406 - DNA, 20 bp, synthetic construct
  source 1..20: mol_type = other DNA
gaggctgaggtgggaggaac

SEQ ID NO: 129407 - DNA, 20 bp, synthetic construct
  source 1..20: mol_type = other DNA
ggaggctgaggtgggaggaa

SEQ ID NO: 129408 - DNA, 20 bp, synthetic construct
  source 1..20: mol_type = other DNA
aggaggctgaggtgggagga

SEQ ID NO: 129409 - DNA, 20 bp, synthetic construct
  source 1..20: mol_type = other DNA
caggaggctgaggtgggagg

SEQ ID NO: 129410 - DNA, 20 bp, synthetic construct
  source 1..20: mol_type = other DNA
tcaggaggctgaggtgggag

SEQ ID NO: 129411 - DNA, 20 bp, synthetic construct
  source 1..20: mol_type = other DNA
ctcaggaggctgaggtggga

SEQ ID NO: 129412 - DNA, 20 bp, synthetic construct
  source 1..20: mol_type = other DNA
actcaggaggctgaggtggg

SEQ ID NO: 129413 - DNA, 20 bp, synthetic construct
  source 1..20: mol_type = other DNA
tactcaggaggctgaggtgg

SEQ ID NO: 129414 - DNA, 20 bp, synthetic construct
  source 1..20: mol_type = other DNA
ctactcaggaggctgaggtg

SEQ ID NO: 129415 - DNA, 20 bp, synthetic construct
  source 1..20: mol_type = other DNA
gctactcaggaggctgaggt

SEQ ID NO: 129416 - DNA, 20 bp, synthetic construct
  source 1..20: mol_type = other DNA
agctactcaggaggctgagg

SEQ ID NO: 129417 - DNA, 20 bp, synthetic construct
  source 1..20: mol_type = other DNA
cagctactcaggaggctgag

SEQ ID NO: 129418 - DNA, 20 bp, synthetic construct
  source 1..20: mol_type = other DNA
ccagctactcaggaggctga

SEQ ID NO: 129419 - DNA, 20 bp, synthetic construct
  source 1..20: mol_type = other DNA
cccagctactcaggaggctg

SEQ ID NO: 129420 - DNA, 20 bp, synthetic construct
  source 1..20: mol_type = other DNA
tcccagctactcaggaggct

SEQ ID NO: 129421 - DNA, 20 bp, synthetic construct
  source 1..20: mol_type = other DNA
gtcccagctactcaggaggc

SEQ ID NO: 129422 - DNA, 20 bp, synthetic construct
  source 1..20: mol_type = other DNA
ggtcccagctactcaggagg

SEQ ID NO: 129423 - DNA, 20 bp, synthetic construct
  source 1..20: mol_type = other DNA
tggtcccagctactcaggag

SEQ ID NO: 129424 - DNA, 20 bp, synthetic construct
  source 1..20: mol_type = other DNA
atggtcccagctactcagga

SEQ ID NO: 129425 - DNA, 20 bp, synthetic construct
  source 1..20: mol_type = other DNA
tatggtcccagctactcagg

SEQ ID NO: 129426 - DNA, 20 bp, synthetic construct
  source 1..20: mol_type = other DNA
ctatggtcccagctactcag

SEQ ID NO: 129427 - DNA, 20 bp, synthetic construct
  source 1..20: mol_type = other DNA
tctatggtcccagctactca

SEQ ID NO: 129428 - DNA, 20 bp, synthetic construct
  source 1..20: mol_type = other DNA
atctatggtcccagctactc

SEQ ID NO: 129429 - DNA, 20 bp, synthetic construct
  source 1..20: mol_type = other DNA
catctatggtcccagctact

SEQ ID NO: 129430 - DNA, 20 bp, synthetic construct
  source 1..20: mol_type = other DNA
gcatctatggtcccagctac

SEQ ID NO: 129431 - DNA, 20 bp, synthetic construct
  source 1..20: mol_type = other DNA
tgcatctatggtcccagcta

SEQ ID NO: 129432 - DNA, 20 bp, synthetic construct
  source 1..20: mol_type = other DNA
gtgcatctatggtcccagct

SEQ ID NO: 129433 - DNA, 20 bp, synthetic construct
  source 1..20: mol_type = other DNA
tgtgcatctatggtcccagc

SEQ ID NO: 129434 - DNA, 20 bp, synthetic construct
  source 1..20: mol_type = other DNA
ctgtgcatctatggtcccag

SEQ ID NO: 129435 - DNA, 20 bp, synthetic construct
  source 1..20: mol_type = other DNA
gctgtgcatctatggtccca

SEQ ID NO: 129436 - DNA, 20 bp, synthetic construct
  source 1..20: mol_type = other DNA
tgctgtgcatctatggtccc

SEQ ID NO: 129437 - DNA, 20 bp, synthetic construct
  source 1..20: mol_type = other DNA
gtgctgtgcatctatggtcc

SEQ ID NO: 129438 - DNA, 20 bp, synthetic construct
  source 1..20: mol_type = other DNA
ggtgctgtgcatctatggtc

SEQ ID NO: 129439 - DNA, 20 bp, synthetic construct
  source 1..20: mol_type = other DNA
cggtgctgtgcatctatggt

SEQ ID NO: 129440 - DNA, 20 bp, synthetic construct
  source 1..20: mol_type = other DNA
gcggtgctgtgcatctatgg

SEQ ID NO: 129441 - DNA, 20 bp, synthetic construct
  source 1..20: mol_type = other DNA
tgcggtgctgtgcatctatg

SEQ ID NO: 129442 - DNA, 20 bp, synthetic construct
  source 1..20: mol_type = other DNA
ctgcggtgctgtgcatctat

SEQ ID NO: 129443 - DNA, 20 bp, synthetic construct
  source 1..20: mol_type = other DNA
gctgcggtgctgtgcatcta

SEQ ID NO: 129444 - DNA, 20 bp, synthetic construct
  source 1..20: mol_type = other DNA
agctgcggtgctgtgcatct

SEQ ID NO: 129445 - DNA, 20 bp, synthetic construct
  source 1..20: mol_type = other DNA
cagctgcggtgctgtgcatc

SEQ ID NO: 129446 - DNA, 20 bp, synthetic construct
  source 1..20: mol_type = other DNA
ccagctgcggtgctgtgcat

SEQ ID NO: 129447 - DNA, 20 bp, synthetic construct
  source 1..20: mol_type = other DNA
gccagctgcggtgctgtgca

SEQ ID NO: 129448 - DNA, 20 bp, synthetic construct
  source 1..20: mol_type = other DNA
agccagctgcggtgctgtgc

SEQ ID NO: 129449 - DNA, 20 bp, synthetic construct
  source 1..20: mol_type = other DNA
tagccagctgcggtgctgtg

SEQ ID NO: 129450 - DNA, 20 bp, synthetic construct
  source 1..20: mol_type = other DNA
ttagccagctgcggtgctgt

SEQ ID NO: 129451 - DNA, 20 bp, synthetic construct
  source 1..20: mol_type = other DNA
attagccagctgcggtgctg

SEQ ID NO: 129452 - DNA, 20 bp, synthetic construct
  source 1..20: mol_type = other DNA
tattagccagctgcggtgct

SEQ ID NO: 129453 - DNA, 20 bp, synthetic construct
  source 1..20: mol_type = other DNA
atattagccagctgcggtgc

SEQ ID NO: 129454 - DNA, 20 bp, synthetic construct
  source 1..20: mol_type = other DNA
aatattagccagctgcggtg

SEQ ID NO: 129455 - DNA, 20 bp, synthetic construct
  source 1..20: mol_type = other DNA
aaatattagccagctgcggt

SEQ ID NO: 129456 - DNA, 20 bp, synthetic construct
  source 1..20: mol_type = other DNA
aaaatattagccagctgcgg

SEQ ID NO: 129457 - DNA, 20 bp, synthetic construct
  source 1..20: mol_type = other DNA
aaaaatattagccagctgcg

SEQ ID NO: 129458 - DNA, 20 bp, synthetic construct
  source 1..20: mol_type = other DNA
caaaaatattagccagctgc

SEQ ID NO: 129459 - DNA, 20 bp, synthetic construct
  source 1..20: mol_type = other DNA
acaaaaatattagccagctg

SEQ ID NO: 129460 - DNA, 20 bp, synthetic construct
  source 1..20: mol_type = other DNA
tacaaaaatattagccagct

SEQ ID NO: 129461 - DNA, 20 bp, synthetic construct
  source 1..20: mol_type = other DNA
atacaaaaatattagccagc

SEQ ID NO: 129462 - DNA, 20 bp, synthetic construct
  source 1..20: mol_type = other DNA
aatacaaaaatattagccag

SEQ ID NO: 129463 - DNA, 20 bp, synthetic construct
  source 1..20: mol_type = other DNA
aaatacaaaaatattagcca

SEQ ID NO: 129464 - DNA, 20 bp, synthetic construct
  source 1..20: mol_type = other DNA
aaaatacaaaaatattagcc

SEQ ID NO: 129465 - DNA, 20 bp, synthetic construct
  source 1..20: mol_type = other DNA
aaaaatacaaaaatattagc

SEQ ID NO: 129466 - DNA, 20 bp, synthetic construct
  source 1..20: mol_type = other DNA
aaaaaatacaaaaatattag

SEQ ID NO: 129467 - DNA, 20 bp, synthetic construct
  source 1..20: mol_type = other DNA
caaaaaatacaaaaatatta

SEQ ID NO: 129468 - DNA, 20 bp, synthetic construct
  source 1..20: mol_type = other DNA
acaaaaaatacaaaaatatt

SEQ ID NO: 129469 - DNA, 20 bp, synthetic construct
  source 1..20: mol_type = other DNA
cacaaaaaatacaaaaatat

SEQ ID NO: 129470 - DNA, 20 bp, synthetic construct
  source 1..20: mol_type = other DNA
ccacaaaaaatacaaaaata

SEQ ID NO: 129471 - DNA, 20 bp, synthetic construct
  source 1..20: mol_type = other DNA
tccacaaaaaatacaaaaat

SEQ ID NO: 129472 - DNA, 20 bp, synthetic construct
  source 1..20: mol_type = other DNA
ctccacaaaaaatacaaaaa

SEQ ID NO: 129473 - DNA, 20 bp, synthetic construct
  source 1..20: mol_type = other DNA
cctccacaaaaaatacaaaa

SEQ ID NO: 129474 - DNA, 20 bp, synthetic construct
  source 1..20: mol_type = other DNA
gcctccacaaaaaatacaaa

SEQ ID NO: 129475 - DNA, 20 bp, synthetic construct
  source 1..20: mol_type = other DNA
tgcctccacaaaaaatacaa

SEQ ID NO: 129476 - DNA, 20 bp, synthetic construct
  source 1..20: mol_type = other DNA
ctgcctccacaaaaaataca

SEQ ID NO: 129477 - DNA, 20 bp, synthetic construct
  source 1..20: mol_type = other DNA
actgcctccacaaaaaatac

SEQ ID NO: 129478 - DNA, 20 bp, synthetic construct
  source 1..20: mol_type = other DNA
cactgcctccacaaaaaata

SEQ ID NO: 129479 - DNA, 20 bp, synthetic construct
  source 1..20: mol_type = other DNA
acactgcctccacaaaaaat

SEQ ID NO: 129480 - DNA, 20 bp, synthetic construct
  source 1..20: mol_type = other DNA
gacactgcctccacaaaaaa

SEQ ID NO: 129481 - DNA, 20 bp, synthetic construct
  source 1..20: mol_type = other DNA
agacactgcctccacaaaaa

SEQ ID NO: 129482 - DNA, 20 bp, synthetic construct
  source 1..20: mol_type = other DNA
gagacactgcctccacaaaa

SEQ ID NO: 129483 - DNA, 20 bp, synthetic construct
  source 1..20: mol_type = other DNA
ggagacactgcctccacaaa

SEQ ID NO: 129484 - DNA, 20 bp, synthetic construct
  source 1..20: mol_type = other DNA
gggagacactgcctccacaa

SEQ ID NO: 129485 - DNA, 20 bp, synthetic construct
  source 1..20: mol_type = other DNA
ggggagacactgcctccaca

SEQ ID NO: 129486 - DNA, 20 bp, synthetic construct
  source 1..20: mol_type = other DNA
tggggagacactgcctccac

SEQ ID NO: 129487 - DNA, 20 bp, synthetic construct
  source 1..20: mol_type = other DNA
atggggagacactgcctcca

SEQ ID NO: 129488 - DNA, 20 bp, synthetic construct
  source 1..20: mol_type = other DNA
catggggagacactgcctcc

SEQ ID NO: 129489 - DNA, 20 bp, synthetic construct
  source 1..20: mol_type = other DNA
acatggggagacactgcctc

SEQ ID NO: 129490 - DNA, 20 bp, synthetic construct
  source 1..20: mol_type = other DNA
aacatggggagacactgcct

SEQ ID NO: 129491 - DNA, 20 bp, synthetic construct
  source 1..20: mol_type = other DNA
caacatggggagacactgcc

SEQ ID NO: 129492 - DNA, 20 bp, synthetic construct
  source 1..20: mol_type = other DNA
gcaacatggggagacactgc

SEQ ID NO: 129493 - DNA, 20 bp, synthetic construct
  source 1..20: mol_type = other DNA
ggcaacatggggagacactg

SEQ ID NO: 129494 - DNA, 20 bp, synthetic construct
  source 1..20: mol_type = other DNA
gggcaacatggggagacact

SEQ ID NO: 129495 - DNA, 20 bp, synthetic construct
  source 1..20: mol_type = other DNA
tgggcaacatggggagacac

SEQ ID NO: 129496 - DNA, 20 bp, synthetic construct
  source 1..20: mol_type = other DNA
ctgggcaacatggggagaca

SEQ ID NO: 129497 - DNA, 20 bp, synthetic construct
  source 1..20: mol_type = other DNA
cctgggcaacatggggagac

SEQ ID NO: 129498 - DNA, 20 bp, synthetic construct
  source 1..20: mol_type = other DNA
ccctgggcaacatggggaga

SEQ ID NO: 129499 - DNA, 20 bp, synthetic construct
  source 1..20: mol_type = other DNA
accctgggcaacatggggag

SEQ ID NO: 129500 - DNA, 20 bp, synthetic construct
  source 1..20: mol_type = other DNA
caccctgggcaacatgggga

SEQ ID NO: 129501 - DNA, 20 bp, synthetic construct
  source 1..20: mol_type = other DNA
ccaccctgggcaacatgggg

SEQ ID NO: 129502 - DNA, 20 bp, synthetic construct
  source 1..20: mol_type = other DNA
accaccctgggcaacatggg

SEQ ID NO: 129503 - DNA, 20 bp, synthetic construct
  source 1..20: mol_type = other DNA
gaccaccctgggcaacatgg

SEQ ID NO: 129504 - DNA, 20 bp, synthetic construct
  source 1..20: mol_type = other DNA
ggaccaccctgggcaacatg

SEQ ID NO: 129505 - DNA, 20 bp, synthetic construct
  source 1..20: mol_type = other DNA
gggaccaccctgggcaacat

SEQ ID NO: 129506 - DNA, 20 bp, synthetic construct
  source 1..20: mol_type = other DNA
tgggaccaccctgggcaaca

SEQ ID NO: 129507 - DNA, 20 bp, synthetic construct
  source 1..20: mol_type = other DNA
ttgggaccaccctgggcaac

SEQ ID NO: 129508 - DNA, 20 bp, synthetic construct
  source 1..20: mol_type = other DNA
tttgggaccaccctgggcaa

SEQ ID NO: 129509 - DNA, 20 bp, synthetic construct
  source 1..20: mol_type = other DNA
gtttgggaccaccctgggca

SEQ ID NO: 129510 - DNA, 20 bp, synthetic construct
  source 1..20: mol_type = other DNA
agtttgggaccaccctgggc

SEQ ID NO: 129511 - DNA, 20 bp, synthetic construct
  source 1..20: mol_type = other DNA
gagtttgggaccaccctggg

SEQ ID NO: 129512 - DNA, 20 bp, synthetic construct
  source 1..20: mol_type = other DNA
tgagtttgggaccaccctgg

SEQ ID NO: 129513 - DNA, 20 bp, synthetic construct
  source 1..20: mol_type = other DNA
atgagtttgggaccaccctg

SEQ ID NO: 129514 - DNA, 20 bp, synthetic construct
  source 1..20: mol_type = other DNA
catgagtttgggaccaccct

SEQ ID NO: 129515 - DNA, 20 bp, synthetic construct
  source 1..20: mol_type = other DNA
tcatgagtttgggaccaccc

SEQ ID NO: 129516 - DNA, 20 bp, synthetic construct
  source 1..20: mol_type = other DNA
ctcatgagtttgggaccacc

SEQ ID NO: 129517 - DNA, 20 bp, synthetic construct
  source 1..20: mol_type = other DNA
gctcatgagtttgggaccac

SEQ ID NO: 129518 - DNA, 20 bp, synthetic construct
  source 1..20: mol_type = other DNA
agctcatgagtttgggacca

SEQ ID NO: 129519 - DNA, 20 bp, synthetic construct
  source 1..20: mol_type = other DNA
gagctcatgagtttgggacc

SEQ ID NO: 129520 - DNA, 20 bp, synthetic construct
  source 1..20: mol_type = other DNA
tgagctcatgagtttgggac

SEQ ID NO: 129521 - DNA, 20 bp, synthetic construct
  source 1..20: mol_type = other DNA
ttgagctcatgagtttggga

SEQ ID NO: 129522 - DNA, 20 bp, synthetic construct
  source 1..20: mol_type = other DNA
cttgagctcatgagtttggg

SEQ ID NO: 129523 - DNA, 20 bp, synthetic construct
  source 1..20: mol_type = other DNA
gcttgagctcatgagtttgg

SEQ ID NO: 129524 - DNA, 20 bp, synthetic construct
  source 1..20: mol_type = other DNA
tgcttgagctcatgagtttg

SEQ ID NO: 129525 - DNA, 20 bp, synthetic construct
  source 1..20: mol_type = other DNA
ctgcttgagctcatgagttt

SEQ ID NO: 129526 - DNA, 20 bp, synthetic construct
  source 1..20: mol_type = other DNA
actgcttgagctcatgagtt

SEQ ID NO: 129527 - DNA, 20 bp, synthetic construct
  source 1..20: mol_type = other DNA
gactgcttgagctcatgagt

SEQ ID NO: 129528 - DNA, 20 bp, synthetic construct
  source 1..20: mol_type = other DNA
ggactgcttgagctcatgag

SEQ ID NO: 129529 - DNA, 20 bp, synthetic construct
  source 1..20: mol_type = other DNA
cggactgcttgagctcatga

SEQ ID NO: 129530 - DNA, 20 bp, synthetic construct
  source 1..20: mol_type = other DNA
gcggactgcttgagctcatg

SEQ ID NO: 129531 - DNA, 20 bp, synthetic construct
  source 1..20: mol_type = other DNA
agcggactgcttgagctcat

SEQ ID NO: 129532 - DNA, 20 bp, synthetic construct
  source 1..20: mol_type = other DNA
gagcggactgcttgagctca

SEQ ID NO: 129533 - DNA, 20 bp, synthetic construct
  source 1..20: mol_type = other DNA
cgagcggactgcttgagctc

SEQ ID NO: 129534 - DNA, 20 bp, synthetic construct
  source 1..20: mol_type = other DNA
gcgagcggactgcttgagct

SEQ ID NO: 129535 - DNA, 20 bp, synthetic construct
  source 1..20: mol_type = other DNA
ggcgagcggactgcttgagc

SEQ ID NO: 129536 - DNA, 20 bp, synthetic construct
  source 1..20: mol_type = other DNA
gggcgagcggactgcttgag

SEQ ID NO: 129537 - DNA, 20 bp, synthetic construct
  source 1..20: mol_type = other DNA
agggcgagcggactgcttga

SEQ ID NO: 129538 - DNA, 20 bp, synthetic construct
  source 1..20: mol_type = other DNA
cagggcgagcggactgcttg

SEQ ID NO: 129539 - DNA, 20 bp, synthetic construct
  source 1..20: mol_type = other DNA
ccagggcgagcggactgctt

SEQ ID NO: 129540 - DNA, 20 bp, synthetic construct
  source 1..20: mol_type = other DNA
gccagggcgagcggactgct

SEQ ID NO: 129541 - DNA, 20 bp, synthetic construct
  source 1..20: mol_type = other DNA
ggccagggcgagcggactgc

SEQ ID NO: 129542 - DNA, 20 bp, synthetic construct
  source 1..20: mol_type = other DNA
aggccagggcgagcggactg

SEQ ID NO: 129543 - DNA, 20 bp, synthetic construct
  source 1..20: mol_type = other DNA
gaggccagggcgagcggact

SEQ ID NO: 129544 - DNA, 20 bp, synthetic construct
  source 1..20: mol_type = other DNA
ggaggccagggcgagcggac

SEQ ID NO: 129545 - DNA, 20 bp, synthetic construct
  source 1..20: mol_type = other DNA
aggaggccagggcgagcgga

SEQ ID NO: 129546 - DNA, 20 bp, synthetic construct
  source 1..20: mol_type = other DNA
taggaggccagggcgagcgg

SEQ ID NO: 129547 - DNA, 20 bp, synthetic construct
  source 1..20: mol_type = other DNA
ttaggaggccagggcgagcg

SEQ ID NO: 129548 - DNA, 20 bp, synthetic construct
  source 1..20: mol_type = other DNA
tttaggaggccagggcgagc

SEQ ID NO: 129549 - DNA, 20 bp, synthetic construct
  source 1..20: mol_type = other DNA
ctttaggaggccagggcgag

SEQ ID NO: 129550 - DNA, 20 bp, synthetic construct
  source 1..20: mol_type = other DNA
actttaggaggccagggcga

SEQ ID NO: 129551 - DNA, 20 bp, synthetic construct
  source 1..20: mol_type = other DNA
cactttaggaggccagggcg

SEQ ID NO: 129552 - DNA, 20 bp, synthetic construct
  source 1..20: mol_type = other DNA
acactttaggaggccagggc

SEQ ID NO: 129553 - DNA, 20 bp, synthetic construct
  source 1..20: mol_type = other DNA
tacactttaggaggccaggg

SEQ ID NO: 129554 - DNA, 20 bp, synthetic construct
  source 1..20: mol_type = other DNA
ctacactttaggaggccagg

SEQ ID NO: 129555 - DNA, 20 bp, synthetic construct
  source 1..20: mol_type = other DNA
cctacactttaggaggccag

SEQ ID NO: 129556 - DNA, 20 bp, synthetic construct
  source 1..20: mol_type = other DNA
ccctacactttaggaggcca

SEQ ID NO: 129557 - DNA, 20 bp, synthetic construct
  source 1..20: mol_type = other DNA
tccctacactttaggaggcc

SEQ ID NO: 129558 - DNA, 20 bp, synthetic construct
  source 1..20: mol_type = other DNA
atccctacactttaggaggc

SEQ ID NO: 129559 - DNA, 20 bp, synthetic construct
  source 1..20: mol_type = other DNA
aatccctacactttaggagg

SEQ ID NO: 129560 - DNA, 20 bp, synthetic construct
  source 1..20: mol_type = other DNA
taatccctacactttaggag

SEQ ID NO: 129561 - DNA, 20 bp, synthetic construct
  source 1..20: mol_type = other DNA
ataatccctacactttagga

SEQ ID NO: 129562 - DNA, 20 bp, synthetic construct
  source 1..20: mol_type = other DNA
tataatccctacactttagg

SEQ ID NO: 129563 - DNA, 20 bp, synthetic construct
  source 1..20: mol_type = other DNA
ttataatccctacactttag

SEQ ID NO: 129564 - DNA, 20 bp, synthetic construct
  source 1..20: mol_type = other DNA
cttataatccctacacttta

SEQ ID NO: 129565 - DNA, 20 bp, synthetic construct
  source 1..20: mol_type = other DNA
gcttataatccctacacttt

SEQ ID NO: 129566 - DNA, 20 bp, synthetic construct
  source 1..20: mol_type = other DNA
cgcttataatccctacactt

SEQ ID NO: 129567 - DNA, 20 bp, synthetic construct
  source 1..20: mol_type = other DNA
acgcttataatccctacact

SEQ ID NO: 129568 - DNA, 20 bp, synthetic construct
  source 1..20: mol_type = other DNA
cacgcttataatccctacac

SEQ ID NO: 129569 - DNA, 20 bp, synthetic construct
  source 1..20: mol_type = other DNA
tcacgcttataatccctaca

SEQ ID NO: 129570 - DNA, 20 bp, synthetic construct
  source 1..20: mol_type = other DNA
ctcacgcttataatccctac

SEQ ID NO: 129571 - DNA, 20 bp, synthetic construct
  source 1..20: mol_type = other DNA
gctcacgcttataatcccta

SEQ ID NO: 129572 - DNA, 20 bp, synthetic construct
  source 1..20: mol_type = other DNA
ggctcacgcttataatccct

SEQ ID NO: 129573 - DNA, 20 bp, synthetic construct
  source 1..20: mol_type = other DNA
tggctcacgcttataatccc

SEQ ID NO: 129574 - DNA, 20 bp, synthetic construct
  source 1..20: mol_type = other DNA
gtggctcacgcttataatcc

SEQ ID NO: 129575 - DNA, 20 bp, synthetic construct
  source 1..20: mol_type = other DNA
agtggctcacgcttataatc

SEQ ID NO: 129576 - DNA, 20 bp, synthetic construct
  source 1..20: mol_type = other DNA
cagtggctcacgcttataat

SEQ ID NO: 129577 - DNA, 20 bp, synthetic construct
  source 1..20: mol_type = other DNA
gcagtggctcacgcttataa

SEQ ID NO: 129578 - DNA, 20 bp, synthetic construct
  source 1..20: mol_type = other DNA
cgcagtggctcacgcttata

SEQ ID NO: 129579 - DNA, 20 bp, synthetic construct
  source 1..20: mol_type = other DNA
gcgcagtggctcacgcttat

SEQ ID NO: 129580 - DNA, 20 bp, synthetic construct
  source 1..20: mol_type = other DNA
ggcgcagtggctcacgctta

SEQ ID NO: 129581 - DNA, 20 bp, synthetic construct
  source 1..20: mol_type = other DNA
aggcgcagtggctcacgctt

SEQ ID NO: 129582 - DNA, 20 bp, synthetic construct
  source 1..20: mol_type = other DNA
caggcgcagtggctcacgct

SEQ ID NO: 129583 - DNA, 20 bp, synthetic construct
  source 1..20: mol_type = other DNA
ccaggcgcagtggctcacgc

SEQ ID NO: 129584 - DNA, 20 bp, synthetic construct
  source 1..20: mol_type = other DNA
gccaggcgcagtggctcacg

SEQ ID NO: 129585 - DNA, 20 bp, synthetic construct
  source 1..20: mol_type = other DNA
ggccaggcgcagtggctcac

SEQ ID NO: 129586 - DNA, 20 bp, synthetic construct
  source 1..20: mol_type = other DNA
aggccaggcgcagtggctca

SEQ ID NO: 129587 - DNA, 20 bp, synthetic construct
  source 1..20: mol_type = other DNA
caggccaggcgcagtggctc

SEQ ID NO: 129588 - DNA, 20 bp, synthetic construct
  source 1..20: mol_type = other DNA
ccaggccaggcgcagtggct

SEQ ID NO: 129589 - DNA, 20 bp, synthetic construct
  source 1..20: mol_type = other DNA
cccaggccaggcgcagtggc

SEQ ID NO: 129590 - DNA, 20 bp, synthetic construct
  source 1..20: mol_type = other DNA
ccccaggccaggcgcagtgg

SEQ ID NO: 129591 - DNA, 20 bp, synthetic construct
  source 1..20: mol_type = other DNA
tccccaggccaggcgcagtg

SEQ ID NO: 129592 - DNA, 20 bp, synthetic construct
  source 1..20: mol_type = other DNA
atccccaggccaggcgcagt

SEQ ID NO: 129593 - DNA, 20 bp, synthetic construct
  source 1..20: mol_type = other DNA
gatccccaggccaggcgcag

SEQ ID NO: 129594 - DNA, 20 bp, synthetic construct
  source 1..20: mol_type = other DNA
tgatccccaggccaggcgca

SEQ ID NO: 129595 - DNA, 20 bp, synthetic construct
  source 1..20: mol_type = other DNA
atgatccccaggccaggcgc

SEQ ID NO: 129596 - DNA, 20 bp, synthetic construct
  source 1..20: mol_type = other DNA
catgatccccaggccaggcg

SEQ ID NO: 129597 - DNA, 20 bp, synthetic construct
  source 1..20: mol_type = other DNA
acatgatccccaggccaggc

SEQ ID NO: 129598 - DNA, 20 bp, synthetic construct
  source 1..20: mol_type = other DNA
aacatgatccccaggccagg

SEQ ID NO: 129599 - DNA, 20 bp, synthetic construct
  source 1..20: mol_type = other DNA
aaacatgatccccaggccag

SEQ ID NO: 129600 - DNA, 20 bp, synthetic construct
  source 1..20: mol_type = other DNA
aaaacatgatccccaggcca

SEQ ID NO: 129601 - DNA, 20 bp, synthetic construct
  source 1..20: mol_type = other DNA
taaaacatgatccccaggcc

SEQ ID NO: 129602 - DNA, 20 bp, synthetic construct
  source 1..20: mol_type = other DNA
ttaaaacatgatccccaggc

SEQ ID NO: 129603 - DNA, 20 bp, synthetic construct
  source 1..20: mol_type = other DNA
gttaaaacatgatccccagg

SEQ ID NO: 129604 - DNA, 20 bp, synthetic construct
  source 1..20: mol_type = other DNA
tgttaaaacatgatccccag

SEQ ID NO: 129605 - DNA, 20 bp, synthetic construct
  source 1..20: mol_type = other DNA
atgttaaaacatgatcccca

SEQ ID NO: 129606 - DNA, 20 bp, synthetic construct
  source 1..20: mol_type = other DNA
catgttaaaacatgatcccc

SEQ ID NO: 129607 - DNA, 20 bp, synthetic construct
  source 1..20: mol_type = other DNA
tcatgttaaaacatgatccc

SEQ ID NO: 129608 - DNA, 20 bp, synthetic construct
  source 1..20: mol_type = other DNA
ctcatgttaaaacatgatcc

SEQ ID NO: 129609 - DNA, 20 bp, synthetic construct
  source 1..20: mol_type = other DNA
tctcatgttaaaacatgatc

SEQ ID NO: 129610 - DNA, 20 bp, synthetic construct
  source 1..20: mol_type = other DNA
ttctcatgttaaaacatgat

SEQ ID NO: 129611 - DNA, 20 bp, synthetic construct
  source 1..20: mol_type = other DNA
attctcatgttaaaacatga

SEQ ID NO: 129612 - DNA, 20 bp, synthetic construct
  source 1..20: mol_type = other DNA
aattctcatgttaaaacatg

SEQ ID NO: 129613 - DNA, 20 bp, synthetic construct
  source 1..20: mol_type = other DNA
taattctcatgttaaaacat

SEQ ID NO: 129614 - DNA, 20 bp, synthetic construct
  source 1..20: mol_type = other DNA
ctaattctcatgttaaaaca

SEQ ID NO: 129615 - DNA, 20 bp, synthetic construct
  source 1..20: mol_type = other DNA
actaattctcatgttaaaac

SEQ ID NO: 129616 - DNA, 20 bp, synthetic construct
  source 1..20: mol_type = other DNA
cactaattctcatgttaaaa

SEQ ID NO: 129617 - DNA, 20 bp, synthetic construct
  source 1..20: mol_type = other DNA
ccactaattctcatgttaaa

SEQ ID NO: 129618 - DNA, 20 bp, synthetic construct
  source 1..20: mol_type = other DNA
tccactaattctcatgttaa

SEQ ID NO: 129619 - DNA, 20 bp, synthetic construct
  source 1..20: mol_type = other DNA
ctccactaattctcatgtta

SEQ ID NO: 129620 - DNA, 20 bp, synthetic construct
  source 1..20: mol_type = other DNA
tctccactaattctcatgtt

SEQ ID NO: 129621 - DNA, 20 bp, synthetic construct
  source 1..20: mol_type = other DNA
gtctccactaattctcatgt

SEQ ID NO: 129622 - DNA, 20 bp, synthetic construct
  source 1..20: mol_type = other DNA
tgtctccactaattctcatg

SEQ ID NO: 129623 - DNA, 20 bp, synthetic construct
  source 1..20: mol_type = other DNA
ttgtctccactaattctcat

SEQ ID NO: 129624 - DNA, 20 bp, synthetic construct
  source 1..20: mol_type = other DNA
tttgtctccactaattctca

SEQ ID NO: 129625 - DNA, 20 bp, synthetic construct
  source 1..20: mol_type = other DNA
gtttgtctccactaattctc

SEQ ID NO: 129626 - DNA, 20 bp, synthetic construct
  source 1..20: mol_type = other DNA
tgtttgtctccactaattct

SEQ ID NO: 129627 - DNA, 20 bp, synthetic construct
  source 1..20: mol_type = other DNA
gtgtttgtctccactaattc

SEQ ID NO: 129628 - DNA, 20 bp, synthetic construct
  source 1..20: mol_type = other DNA
tgtgtttgtctccactaatt

SEQ ID NO: 129629 - DNA, 20 bp, synthetic construct
  source 1..20: mol_type = other DNA
atgtgtttgtctccactaat

SEQ ID NO: 129630 - DNA, 20 bp, synthetic construct
  source 1..20: mol_type = other DNA
catgtgtttgtctccactaa

SEQ ID NO: 129631 - DNA, 20 bp, synthetic construct
  source 1..20: mol_type = other DNA
tcatgtgtttgtctccacta

SEQ ID NO: 129632 - DNA, 20 bp, synthetic construct
  source 1..20: mol_type = other DNA
atcatgtgtttgtctccact

SEQ ID NO: 129633 - DNA, 20 bp, synthetic construct
  source 1..20: mol_type = other DNA
tatcatgtgtttgtctccac

SEQ ID NO: 129634 - DNA, 20 bp, synthetic construct
  source 1..20: mol_type = other DNA
atatcatgtgtttgtctcca

SEQ ID NO: 129635 - DNA, 20 bp, synthetic construct
  source 1..20: mol_type = other DNA
gatatcatgtgtttgtctcc

SEQ ID NO: 129636 - DNA, 20 bp, synthetic construct
  source 1..20: mol_type = other DNA
agatatcatgtgtttgtctc

SEQ ID NO: 129637 - DNA, 20 bp, synthetic construct
  source 1..20: mol_type = other DNA
tagatatcatgtgtttgtct

SEQ ID NO: 129638 - DNA, 20 bp, synthetic construct
  source 1..20: mol_type = other DNA
ttagatatcatgtgtttgtc

SEQ ID NO: 129639 - DNA, 20 bp, synthetic construct
  source 1..20: mol_type = other DNA
tttagatatcatgtgtttgt

SEQ ID NO: 129640 - DNA, 20 bp, synthetic construct
  source 1..20: mol_type = other DNA
atttagatatcatgtgtttg

SEQ ID NO: 129641 - DNA, 20 bp, synthetic construct
  source 1..20: mol_type = other DNA
tatttagatatcatgtgttt

SEQ ID NO: 129642 - DNA, 20 bp, synthetic construct
  source 1..20: mol_type = other DNA
ttatttagatatcatgtgtt

SEQ ID NO: 129643 - DNA, 20 bp, synthetic construct
  source 1..20: mol_type = other DNA
attatttagatatcatgtgt

SEQ ID NO: 129644 - DNA, 20 bp, synthetic construct
  source 1..20: mol_type = other DNA
tattatttagatatcatgtg

SEQ ID NO: 129645 - DNA, 20 bp, synthetic construct
  source 1..20: mol_type = other DNA
ctattatttagatatcatgt

SEQ ID NO: 129646 - DNA, 20 bp, synthetic construct
  source 1..20: mol_type = other DNA
gctattatttagatatcatg

SEQ ID NO: 129647 - DNA, 20 bp, synthetic construct
  source 1..20: mol_type = other DNA
tgctattatttagatatcat

SEQ ID NO: 129648 - DNA, 20 bp, synthetic construct
  source 1..20: mol_type = other DNA
gtgctattatttagatatca

SEQ ID NO: 129649 - DNA, 20 bp, synthetic construct
  source 1..20: mol_type = other DNA
ggtgctattatttagatatc

SEQ ID NO: 129650 - DNA, 20 bp, synthetic construct
  source 1..20: mol_type = other DNA
tggtgctattatttagatat

SEQ ID NO: 129651 - DNA, 20 bp, synthetic construct
  source 1..20: mol_type = other DNA
atggtgctattatttagata

SEQ ID NO: 129652 - DNA, 20 bp, synthetic construct
  source 1..20: mol_type = other DNA
tatggtgctattatttagat

SEQ ID NO: 129653 - DNA, 20 bp, synthetic construct
  source 1..20: mol_type = other DNA
ctatggtgctattatttaga

SEQ ID NO: 129654 - DNA, 20 bp, synthetic construct
  source 1..20: mol_type = other DNA
actatggtgctattatttag

SEQ ID NO: 129655 - DNA, 20 bp, synthetic construct
  source 1..20: mol_type = other DNA
tactatggtgctattattta

SEQ ID NO: 129656 - DNA, 20 bp, synthetic construct
  source 1..20: mol_type = other DNA
atactatggtgctattattt

SEQ ID NO: 129657 - DNA, 20 bp, synthetic construct
  source 1..20: mol_type = other DNA
tatactatggtgctattatt

SEQ ID NO: 129658 - DNA, 20 bp, synthetic construct
  source 1..20: mol_type = other DNA
gtatactatggtgctattat

SEQ ID NO: 129659 - DNA, 20 bp, synthetic construct
  source 1..20: mol_type = other DNA
agtatactatggtgctatta

SEQ ID NO: 129660 - DNA, 20 bp, synthetic construct
  source 1..20: mol_type = other DNA
aagtatactatggtgctatt

SEQ ID NO: 129661 - DNA, 20 bp, synthetic construct
  source 1..20: mol_type = other DNA
caagtatactatggtgctat

SEQ ID NO: 129662 - DNA, 20 bp, synthetic construct
  source 1..20: mol_type = other DNA
tcaagtatactatggtgcta

SEQ ID NO: 129663 - DNA, 20 bp, synthetic construct
  source 1..20: mol_type = other DNA
gtcaagtatactatggtgct

SEQ ID NO: 129664 - DNA, 20 bp, synthetic construct
  source 1..20: mol_type = other DNA
agtcaagtatactatggtgc

SEQ ID NO: 129665 - DNA, 20 bp, synthetic construct
  source 1..20: mol_type = other DNA
tagtcaagtatactatggtg

SEQ ID NO: 129666 - DNA, 20 bp, synthetic construct
  source 1..20: mol_type = other DNA
ctagtcaagtatactatggt

SEQ ID NO: 129667 - DNA, 20 bp, synthetic construct
  source 1..20: mol_type = other DNA
gctagtcaagtatactatgg

SEQ ID NO: 129668 - DNA, 20 bp, synthetic construct
  source 1..20: mol_type = other DNA
agctagtcaagtatactatg

SEQ ID NO: 129669 - DNA, 20 bp, synthetic construct
  source 1..20: mol_type = other DNA
aagctagtcaagtatactat

SEQ ID NO: 129670 - DNA, 20 bp, synthetic construct
  source 1..20: mol_type = other DNA
aaagctagtcaagtatacta

SEQ ID NO: 129671 - DNA, 20 bp, synthetic construct
  source 1..20: mol_type = other DNA
aaaagctagtcaagtatact

SEQ ID NO: 129672 - DNA, 20 bp, synthetic construct
  source 1..20: mol_type = other DNA
aaaaagctagtcaagtatac

SEQ ID NO: 129673 - DNA, 20 bp, synthetic construct
  source 1..20: mol_type = other DNA
taaaaagctagtcaagtata

SEQ ID NO: 129674 - DNA, 20 bp, synthetic construct
  source 1..20: mol_type = other DNA
ttaaaaagctagtcaagtat

SEQ ID NO: 129675 - DNA, 20 bp, synthetic construct
  source 1..20: mol_type = other DNA
attaaaaagctagtcaagta

SEQ ID NO: 129676 - DNA, 20 bp, synthetic construct
  source 1..20: mol_type = other DNA
aattaaaaagctagtcaagt

SEQ ID NO: 129677 - DNA, 20 bp, synthetic construct
  source 1..20: mol_type = other DNA
taattaaaaagctagtcaag

SEQ ID NO: 129678 - DNA, 20 bp, synthetic construct
  source 1..20: mol_type = other DNA
ataattaaaaagctagtcaa

SEQ ID NO: 129679 - DNA, 20 bp, synthetic construct
  source 1..20: mol_type = other DNA
aataattaaaaagctagtca

SEQ ID NO: 129680 - DNA, 20 bp, synthetic construct
  source 1..20: mol_type = other DNA
aaataattaaaaagctagtc

SEQ ID NO: 129681 - DNA, 20 bp, synthetic construct
  source 1..20: mol_type = other DNA
aaaataattaaaaagctagt

SEQ ID NO: 129682 - DNA, 20 bp, synthetic construct
  source 1..20: mol_type = other DNA
aaaaataattaaaaagctag

SEQ ID NO: 129683 - DNA, 20 bp, synthetic construct
  source 1..20: mol_type = other DNA
aaaaaataattaaaaagcta

SEQ ID NO: 129684 - DNA, 20 bp, synthetic construct
  source 1..20: mol_type = other DNA
taaaaaataattaaaaagct

SEQ ID NO: 129685 - DNA, 20 bp, synthetic construct
  source 1..20: mol_type = other DNA
ttaaaaaataattaaaaagc

SEQ ID NO: 129686 - DNA, 20 bp, synthetic construct
  source 1..20: mol_type = other DNA
tttaaaaaataattaaaaag

SEQ ID NO: 129687 - DNA, 20 bp, synthetic construct
  source 1..20: mol_type = other DNA
atttaaaaaataattaaaaa

SEQ ID NO: 129688 - DNA, 20 bp, synthetic construct
  source 1..20: mol_type = other DNA
tatttaaaaaataattaaaa

SEQ ID NO: 129689 - DNA, 20 bp, synthetic construct
  source 1..20: mol_type = other DNA
atatttaaaaaataattaaa

SEQ ID NO: 129690 - DNA, 20 bp, synthetic construct
  source 1..20: mol_type = other DNA
tatatttaaaaaataattaa

SEQ ID NO: 129691 - DNA, 20 bp, synthetic construct
  source 1..20: mol_type = other DNA
gtatatttaaaaaataatta

SEQ ID NO: 129692 - DNA, 20 bp, synthetic construct
  source 1..20: mol_type = other DNA
tgtatatttaaaaaataatt

SEQ ID NO: 129693 - DNA, 20 bp, synthetic construct
  source 1..20: mol_type = other DNA
ctgtatatttaaaaaataat

SEQ ID NO: 129694 - DNA, 20 bp, synthetic construct
  source 1..20: mol_type = other DNA
cctgtatatttaaaaaataa

SEQ ID NO: 129695 - DNA, 20 bp, synthetic construct
  source 1..20: mol_type = other DNA
tcctgtatatttaaaaaata

SEQ ID NO: 129696 - DNA, 20 bp, synthetic construct
  source 1..20: mol_type = other DNA
ttcctgtatatttaaaaaat

SEQ ID NO: 129697 - DNA, 20 bp, synthetic construct
  source 1..20: mol_type = other DNA
cttcctgtatatttaaaaaa

SEQ ID NO: 129698 - DNA, 20 bp, synthetic construct
  source 1..20: mol_type = other DNA
ccttcctgtatatttaaaaa

SEQ ID NO: 129699 - DNA, 20 bp, synthetic construct
  source 1..20: mol_type = other DNA
accttcctgtatatttaaaa

SEQ ID NO: 129700 - DNA, 20 bp, synthetic construct
  source 1..20: mol_type = other DNA
taccttcctgtatatttaaa

SEQ ID NO: 129701 - DNA, 20 bp, synthetic construct
  source 1..20: mol_type = other DNA
ttaccttcctgtatatttaa

SEQ ID NO: 129702 - DNA, 20 bp, synthetic construct
  source 1..20: mol_type = other DNA
attaccttcctgtatattta

SEQ ID NO: 129703 - DNA, 20 bp, synthetic construct
  source 1..20: mol_type = other DNA
tattaccttcctgtatattt

SEQ ID NO: 129704 - DNA, 20 bp, synthetic construct
  source 1..20: mol_type = other DNA
ttattaccttcctgtatatt

SEQ ID NO: 129705 - DNA, 20 bp, synthetic construct
  source 1..20: mol_type = other DNA
cttattaccttcctgtatat

SEQ ID NO: 129706 - DNA, 20 bp, synthetic construct
  source 1..20: mol_type = other DNA
acttattaccttcctgtata

SEQ ID NO: 129707 - DNA, 20 bp, synthetic construct
  source 1..20: mol_type = other DNA
tacttattaccttcctgtat

SEQ ID NO: 129708 - DNA, 20 bp, synthetic construct
  source 1..20: mol_type = other DNA
ttacttattaccttcctgta

SEQ ID NO: 129709 - DNA, 20 bp, synthetic construct
  source 1..20: mol_type = other DNA
gttacttattaccttcctgt

SEQ ID NO: 129710 - DNA, 20 bp, synthetic construct
  source 1..20: mol_type = other DNA
tgttacttattaccttcctg

SEQ ID NO: 129711 - DNA, 20 bp, synthetic construct
  source 1..20: mol_type = other DNA
ttgttacttattaccttcct

SEQ ID NO: 129712 - DNA, 20 bp, synthetic construct
  source 1..20: mol_type = other DNA
tttgttacttattaccttcc

SEQ ID NO: 129713 - DNA, 20 bp, synthetic construct
  source 1..20: mol_type = other DNA
ctttgttacttattaccttc

SEQ ID NO: 129714 - DNA, 20 bp, synthetic construct
  source 1..20: mol_type = other DNA
actttgttacttattacctt

SEQ ID NO: 129715 - DNA, 20 bp, synthetic construct
  source 1..20: mol_type = other DNA
tactttgttacttattacct

SEQ ID NO: 129716 - DNA, 20 bp, synthetic construct
  source 1..20: mol_type = other DNA
ttactttgttacttattacc

SEQ ID NO: 129717 - DNA, 20 bp, synthetic construct
  source 1..20: mol_type = other DNA
attactttgttacttattac

SEQ ID NO: 129718 - DNA, 20 bp, synthetic construct
  source 1..20: mol_type = other DNA
tattactttgttacttatta

SEQ ID NO: 129719 - DNA, 20 bp, synthetic construct
  source 1..20: mol_type = other DNA
ttattactttgttacttatt

SEQ ID NO: 129720 - DNA, 20 bp, synthetic construct
  source 1..20: mol_type = other DNA
attattactttgttacttat

SEQ ID NO: 129721 - DNA, 20 bp, synthetic construct
  source 1..20: mol_type = other DNA
tattattactttgttactta

SEQ ID NO: 129722 - DNA, 20 bp, synthetic construct
  source 1..20: mol_type = other DNA
ctattattactttgttactt

SEQ ID NO: 129723 - DNA, 20 bp, synthetic construct
  source 1..20: mol_type = other DNA
actattattactttgttact

SEQ ID NO: 129724 - DNA, 20 bp, synthetic construct
  source 1..20: mol_type = other DNA
cactattattactttgttac

SEQ ID NO: 129725 - DNA, 20 bp, synthetic construct
  source 1..20: mol_type = other DNA
tcactattattactttgtta

SEQ ID NO: 129726 - DNA, 20 bp, synthetic construct
  source 1..20: mol_type = other DNA
ttcactattattactttgtt

SEQ ID NO: 129727 - DNA, 20 bp, synthetic construct
  source 1..20: mol_type = other DNA
attcactattattactttgt

SEQ ID NO: 129728 - DNA, 20 bp, synthetic construct
  source 1..20: mol_type = other DNA
tattcactattattactttg

SEQ ID NO: 129729 - DNA, 20 bp, synthetic construct
  source 1..20: mol_type = other DNA
ctattcactattattacttt

SEQ ID NO: 129730 - DNA, 20 bp, synthetic construct
  source 1..20: mol_type = other DNA
actattcactattattactt

SEQ ID NO: 129731 - DNA, 20 bp, synthetic construct
  source 1..20: mol_type = other DNA
aactattcactattattact

SEQ ID NO: 129732 - DNA, 20 bp, synthetic construct
  source 1..20: mol_type = other DNA
aaactattcactattattac

SEQ ID NO: 129733 - DNA, 20 bp, synthetic construct
  source 1..20: mol_type = other DNA
taaactattcactattatta

SEQ ID NO: 129734 - DNA, 20 bp, synthetic construct
  source 1..20: mol_type = other DNA
ttaaactattcactattatt

SEQ ID NO: 129735 - DNA, 20 bp, synthetic construct
  source 1..20: mol_type = other DNA
cttaaactattcactattat

SEQ ID NO: 129736 - DNA, 20 bp, synthetic construct
  source 1..20: mol_type = other DNA
gcttaaactattcactatta

SEQ ID NO: 129737 - DNA, 20 bp, synthetic construct
  source 1..20: mol_type = other DNA
agcttaaactattcactatt

SEQ ID NO: 129738 - DNA, 20 bp, synthetic construct
  source 1..20: mol_type = other DNA
gagcttaaactattcactat

SEQ ID NO: 129739 - DNA, 20 bp, synthetic construct
  source 1..20: mol_type = other DNA
tgagcttaaactattcacta

SEQ ID NO: 129740 - DNA, 20 bp, synthetic construct
  source 1..20: mol_type = other DNA
ctgagcttaaactattcact

SEQ ID NO: 129741 - DNA, 20 bp, synthetic construct
  source 1..20: mol_type = other DNA
actgagcttaaactattcac

SEQ ID NO: 129742 - DNA, 20 bp, synthetic construct
  source 1..20: mol_type = other DNA
aactgagcttaaactattca

SEQ ID NO: 129743 - DNA, 20 bp, synthetic construct
  source 1..20: mol_type = other DNA
taactgagcttaaactattc

SEQ ID NO: 129744 - DNA, 20 bp, synthetic construct
  source 1..20: mol_type = other DNA
ctaactgagcttaaactatt

SEQ ID NO: 129745 - DNA, 20 bp, synthetic construct
  source 1..20: mol_type = other DNA
gctaactgagcttaaactat

SEQ ID NO: 129746 - DNA, 20 bp, synthetic construct
  source 1..20: mol_type = other DNA
tgctaactgagcttaaacta

SEQ ID NO: 129747 - DNA, 20 bp, synthetic construct
  source 1..20: mol_type = other DNA
atgctaactgagcttaaact

SEQ ID NO: 129748 - DNA, 20 bp, synthetic construct
  source 1..20: mol_type = other DNA
tatgctaactgagcttaaac

SEQ ID NO: 129749 - DNA, 20 bp, synthetic construct
  source 1..20: mol_type = other DNA
ttatgctaactgagcttaaa

SEQ ID NO: 129750 - DNA, 20 bp, synthetic construct
  source 1..20: mol_type = other DNA
attatgctaactgagcttaa

SEQ ID NO: 129751 - DNA, 20 bp, synthetic construct
  source 1..20: mol_type = other DNA
gattatgctaactgagctta

SEQ ID NO: 129752 - DNA, 20 bp, synthetic construct
  source 1..20: mol_type = other DNA
cgattatgctaactgagctt

SEQ ID NO: 129753 - DNA, 20 bp, synthetic construct
  source 1..20: mol_type = other DNA
ccgattatgctaactgagct

SEQ ID NO: 129754 - DNA, 20 bp, synthetic construct
  source 1..20: mol_type = other DNA
cccgattatgctaactgagc

SEQ ID NO: 129755 - DNA, 20 bp, synthetic construct
  source 1..20: mol_type = other DNA
gcccgattatgctaactgag

SEQ ID NO: 129756 - DNA, 20 bp, synthetic construct
  source 1..20: mol_type = other DNA
tgcccgattatgctaactga

SEQ ID NO: 129757 - DNA, 20 bp, synthetic construct
  source 1..20: mol_type = other DNA
ttgcccgattatgctaactg

SEQ ID NO: 129758 - DNA, 20 bp, synthetic construct
  source 1..20: mol_type = other DNA
tttgcccgattatgctaact

SEQ ID NO: 129759 - DNA, 20 bp, synthetic construct
  source 1..20: mol_type = other DNA
gtttgcccgattatgctaac

SEQ ID NO: 129760 - DNA, 20 bp, synthetic construct
  source 1..20: mol_type = other DNA
agtttgcccgattatgctaa

SEQ ID NO: 129761 - DNA, 20 bp, synthetic construct
  source 1..20: mol_type = other DNA
aagtttgcccgattatgcta

SEQ ID NO: 129762 - DNA, 20 bp, synthetic construct
  source 1..20: mol_type = other DNA
aaagtttgcccgattatgct

SEQ ID NO: 129763 - DNA, 20 bp, synthetic construct
  source 1..20: mol_type = other DNA
gaaagtttgcccgattatgc

SEQ ID NO: 129764 - DNA, 20 bp, synthetic construct
  source 1..20: mol_type = other DNA
tgaaagtttgcccgattatg

SEQ ID NO: 129765 - DNA, 20 bp, synthetic construct
  source 1..20: mol_type = other DNA
atgaaagtttgcccgattat

SEQ ID NO: 129766 - DNA, 20 bp, synthetic construct
  source 1..20: mol_type = other DNA
aatgaaagtttgcccgatta

SEQ ID NO: 129767 - DNA, 20 bp, synthetic construct
  source 1..20: mol_type = other DNA
aaatgaaagtttgcccgatt

SEQ ID NO: 129768 - DNA, 20 bp, synthetic construct
  source 1..20: mol_type = other DNA
caaatgaaagtttgcccgat

SEQ ID NO: 129769 - DNA, 20 bp, synthetic construct
  source 1..20: mol_type = other DNA
tcaaatgaaagtttgcccga

SEQ ID NO: 129770 - DNA, 20 bp, synthetic construct
  source 1..20: mol_type = other DNA
atcaaatgaaagtttgcccg

SEQ ID NO: 129771 - DNA, 20 bp, synthetic construct
  source 1..20: mol_type = other DNA
tatcaaatgaaagtttgccc

SEQ ID NO: 129772 - DNA, 20 bp, synthetic construct
  source 1..20: mol_type = other DNA
ttatcaaatgaaagtttgcc

SEQ ID NO: 129773 - DNA, 20 bp, synthetic construct
  source 1..20: mol_type = other DNA
tttatcaaatgaaagtttgc

SEQ ID NO: 129774 - DNA, 20 bp, synthetic construct
  source 1..20: mol_type = other DNA
ttttatcaaatgaaagtttg

SEQ ID NO: 129775 - DNA, 20 bp, synthetic construct
  source 1..20: mol_type = other DNA
cttttatcaaatgaaagttt

SEQ ID NO: 129776 - DNA, 20 bp, synthetic construct
  source 1..20: mol_type = other DNA
acttttatcaaatgaaagtt

SEQ ID NO: 129777 - DNA, 20 bp, synthetic construct
  source 1..20: mol_type = other DNA
cacttttatcaaatgaaagt

SEQ ID NO: 129778 - DNA, 20 bp, synthetic construct
  source 1..20: mol_type = other DNA
tcacttttatcaaatgaaag

SEQ ID NO: 129779 - DNA, 20 bp, synthetic construct
  source 1..20: mol_type = other DNA
atcacttttatcaaatgaaa

SEQ ID NO: 129780 - DNA, 20 bp, synthetic construct
  source 1..20: mol_type = other DNA
tatcacttttatcaaatgaa

SEQ ID NO: 129781 - DNA, 20 bp, synthetic construct
  source 1..20: mol_type = other DNA
ttatcacttttatcaaatga

SEQ ID NO: 129782 - DNA, 20 bp, synthetic construct
  source 1..20: mol_type = other DNA
cttatcacttttatcaaatg

SEQ ID NO: 129783 - DNA, 20 bp, synthetic construct
  source 1..20: mol_type = other DNA
acttatcacttttatcaaat

SEQ ID NO: 129784 - DNA, 20 bp, synthetic construct
  source 1..20: mol_type = other DNA
tacttatcacttttatcaaa

SEQ ID NO: 129785 - DNA, 20 bp, synthetic construct
  source 1..20: mol_type = other DNA
ctacttatcacttttatcaa

SEQ ID NO: 129786 - DNA, 20 bp, synthetic construct
  source 1..20: mol_type = other DNA
actacttatcacttttatca

SEQ ID NO: 129787 - DNA, 20 bp, synthetic construct
  source 1..20: mol_type = other DNA
aactacttatcacttttatc

SEQ ID NO: 129788 - DNA, 20 bp, synthetic construct
  source 1..20: mol_type = other DNA
aaactacttatcacttttat

SEQ ID NO: 129789 - DNA, 20 bp, synthetic construct
  source 1..20: mol_type = other DNA
aaaactacttatcactttta

SEQ ID NO: 129790 - DNA, 20 bp, synthetic construct
  source 1..20: mol_type = other DNA
gaaaactacttatcactttt

SEQ ID NO: 129791 - DNA, 20 bp, synthetic construct
  source 1..20: mol_type = other DNA
tgaaaactacttatcacttt

SEQ ID NO: 129792 - DNA, 20 bp, synthetic construct
  source 1..20: mol_type = other DNA
ctgaaaactacttatcactt

SEQ ID NO: 129793 - DNA, 20 bp, synthetic construct
  source 1..20: mol_type = other DNA
actgaaaactacttatcact

SEQ ID NO: 129794 - DNA, 20 bp, synthetic construct
  source 1..20: mol_type = other DNA
cactgaaaactacttatcac

SEQ ID NO: 129795 - DNA, 20 bp, synthetic construct
  source 1..20: mol_type = other DNA
ccactgaaaactacttatca

SEQ ID NO: 129796 - DNA, 20 bp, synthetic construct
  source 1..20: mol_type = other DNA
gccactgaaaactacttatc

SEQ ID NO: 129797 - DNA, 20 bp, synthetic construct
  source 1..20: mol_type = other DNA
agccactgaaaactacttat

SEQ ID NO: 129798 - DNA, 20 bp, synthetic construct
  source 1..20: mol_type = other DNA
aagccactgaaaactactta

SEQ ID NO: 129799 - DNA, 20 bp, synthetic construct
  source 1..20: mol_type = other DNA
aaagccactgaaaactactt

SEQ ID NO: 129800 - DNA, 20 bp, synthetic construct
  source 1..20: mol_type = other DNA
aaaagccactgaaaactact

SEQ ID NO: 129801 - DNA, 20 bp, synthetic construct
  source 1..20: mol_type = other DNA
aaaaagccactgaaaactac

SEQ ID NO: 129802 - DNA, 20 bp, synthetic construct
  source 1..20: mol_type = other DNA
aaaaaagccactgaaaacta

SEQ ID NO: 129803 - DNA, 20 bp, synthetic construct
  source 1..20: mol_type = other DNA
caaaaaagccactgaaaact

SEQ ID NO: 129804 - DNA, 20 bp, synthetic construct
  source 1..20: mol_type = other DNA
acaaaaaagccactgaaaac

SEQ ID NO: 129805 - DNA, 20 bp, synthetic construct
  source 1..20: mol_type = other DNA
aacaaaaaagccactgaaaa

SEQ ID NO: 129806 - DNA, 20 bp, synthetic construct
  source 1..20: mol_type = other DNA
aaacaaaaaagccactgaaa

SEQ ID NO: 129807 - DNA, 20 bp, synthetic construct
  source 1..20: mol_type = other DNA
taaacaaaaaagccactgaa

SEQ ID NO: 129808 - DNA, 20 bp, synthetic construct
  source 1..20: mol_type = other DNA
gtaaacaaaaaagccactga

SEQ ID NO: 129809 - DNA, 20 bp, synthetic construct
  source 1..20: mol_type = other DNA
ggtaaacaaaaaagccactg

SEQ ID NO: 129810 - DNA, 20 bp, synthetic construct
  source 1..20: mol_type = other DNA
tggtaaacaaaaaagccact

SEQ ID NO: 129811 - DNA, 20 bp, synthetic construct
  source 1..20: mol_type = other DNA
ctggtaaacaaaaaagccac

SEQ ID NO: 129812 - DNA, 20 bp, synthetic construct
  source 1..20: mol_type = other DNA
tctggtaaacaaaaaagcca

SEQ ID NO: 129813 - DNA, 20 bp, synthetic construct
  source 1..20: mol_type = other DNA
ttctggtaaacaaaaaagcc

SEQ ID NO: 129814 - DNA, 20 bp, synthetic construct
  source 1..20: mol_type = other DNA
cttctggtaaacaaaaaagc

SEQ ID NO: 129815 - DNA, 20 bp, synthetic construct
  source 1..20: mol_type = other DNA
ccttctggtaaacaaaaaag

SEQ ID NO: 129816 - DNA, 20 bp, synthetic construct
  source 1..20: mol_type = other DNA
tccttctggtaaacaaaaaa

SEQ ID NO: 129817 - DNA, 20 bp, synthetic construct
  source 1..20: mol_type = other DNA
ctccttctggtaaacaaaaa

SEQ ID NO: 129818 - DNA, 20 bp, synthetic construct
  source 1..20: mol_type = other DNA
cctccttctggtaaacaaaa

SEQ ID NO: 129819 - DNA, 20 bp, synthetic construct
  source 1..20: mol_type = other DNA
acctccttctggtaaacaaa

SEQ ID NO: 129820 - DNA, 20 bp, synthetic construct
  source 1..20: mol_type = other DNA
cacctccttctggtaaacaa

SEQ ID NO: 129821 - DNA, 20 bp, synthetic construct
  source 1..20: mol_type = other DNA
ccacctccttctggtaaaca

SEQ ID NO: 129822 - DNA, 20 bp, synthetic construct
  source 1..20: mol_type = other DNA
accacctccttctggtaaac

SEQ ID NO: 129823 - DNA, 20 bp, synthetic construct
  source 1..20: mol_type = other DNA
aaccacctccttctggtaaa

SEQ ID NO: 129824 - DNA, 20 bp, synthetic construct
  source 1..20: mol_type = other DNA
aaaccacctccttctggtaa

SEQ ID NO: 129825 - DNA, 20 bp, synthetic construct
  source 1..20: mol_type = other DNA
aaaaccacctccttctggta

SEQ ID NO: 129826 - DNA, 20 bp, synthetic construct
  source 1..20: mol_type = other DNA
aaaaaccacctccttctggt

SEQ ID NO: 129827 - DNA, 20 bp, synthetic construct
  source 1..20: mol_type = other DNA
taaaaaccacctccttctgg

SEQ ID NO: 129828 - DNA, 20 bp, synthetic construct
  source 1..20: mol_type = other DNA
ttaaaaaccacctccttctg

SEQ ID NO: 129829 - DNA, 20 bp, synthetic construct
  source 1..20: mol_type = other DNA
tttaaaaaccacctccttct

SEQ ID NO: 129830 - DNA, 20 bp, synthetic construct
  source 1..20: mol_type = other DNA
atttaaaaaccacctccttc

SEQ ID NO: 129831 - DNA, 20 bp, synthetic construct
  source 1..20: mol_type = other DNA
tatttaaaaaccacctcctt

SEQ ID NO: 129832 - DNA, 20 bp, synthetic construct
  source 1..20: mol_type = other DNA
gtatttaaaaaccacctcct

SEQ ID NO: 129833 - DNA, 20 bp, synthetic construct
  source 1..20: mol_type = other DNA
cgtatttaaaaaccacctcc

SEQ ID NO: 129834 - DNA, 20 bp, synthetic construct
  source 1..20: mol_type = other DNA
acgtatttaaaaaccacctc

SEQ ID NO: 129835 - DNA, 20 bp, synthetic construct
  source 1..20: mol_type = other DNA
cacgtatttaaaaaccacct

SEQ ID NO: 129836 - DNA, 20 bp, synthetic construct
  source 1..20: mol_type = other DNA
gcacgtatttaaaaaccacc

SEQ ID NO: 129837 - DNA, 20 bp, synthetic construct
  source 1..20: mol_type = other DNA
tgcacgtatttaaaaaccac

SEQ ID NO: 129838 - DNA, 20 bp, synthetic construct
  source 1..20: mol_type = other DNA
atgcacgtatttaaaaacca

SEQ ID NO: 129839 - DNA, 20 bp, synthetic construct
  source 1..20: mol_type = other DNA
gatgcacgtatttaaaaacc

SEQ ID NO: 129840 - DNA, 20 bp, synthetic construct
  source 1..20: mol_type = other DNA
ggatgcacgtatttaaaaac

SEQ ID NO: 129841 - DNA, 20 bp, synthetic construct
  source 1..20: mol_type = other DNA
tggatgcacgtatttaaaaa

SEQ ID NO: 129842 - DNA, 20 bp, synthetic construct
  source 1..20: mol_type = other DNA
ttggatgcacgtatttaaaa

SEQ ID NO: 129843 - DNA, 20 bp, synthetic construct
  source 1..20: mol_type = other DNA
cttggatgcacgtatttaaa

SEQ ID NO: 129844 - DNA, 20 bp, synthetic construct
  source 1..20: mol_type = other DNA
tcttggatgcacgtatttaa

SEQ ID NO: 129845 - DNA, 20 bp, synthetic construct
  source 1..20: mol_type = other DNA
atcttggatgcacgtattta

SEQ ID NO: 129846 - DNA, 20 bp, synthetic construct
  source 1..20: mol_type = other DNA
tatcttggatgcacgtattt

SEQ ID NO: 129847 - DNA, 20 bp, synthetic construct
  source 1..20: mol_type = other DNA
ttatcttggatgcacgtatt

SEQ ID NO: 129848 - DNA, 20 bp, synthetic construct
  source 1..20: mol_type = other DNA
tttatcttggatgcacgtat

SEQ ID NO: 129849 - DNA, 20 bp, synthetic construct
  source 1..20: mol_type = other DNA
ttttatcttggatgcacgta

SEQ ID NO: 129850 - DNA, 20 bp, synthetic construct
  source 1..20: mol_type = other DNA
attttatcttggatgcacgt

SEQ ID NO: 129851 - DNA, 20 bp, synthetic construct
  source 1..20: mol_type = other DNA
tattttatcttggatgcacg

SEQ ID NO: 129852 - DNA, 20 bp, synthetic construct
  source 1..20: mol_type = other DNA
atattttatcttggatgcac

SEQ ID NO: 129853 - DNA, 20 bp, synthetic construct
  source 1..20: mol_type = other DNA
tatattttatcttggatgca

SEQ ID NO: 129854 - DNA, 20 bp, synthetic construct
  source 1..20: mol_type = other DNA
ttatattttatcttggatgc

SEQ ID NO: 129855 - DNA, 20 bp, synthetic construct
  source 1..20: mol_type = other DNA
tttatattttatcttggatg

SEQ ID NO: 129856 - DNA, 20 bp, synthetic construct
  source 1..20: mol_type = other DNA
ttttatattttatcttggat

SEQ ID NO: 129857 - DNA, 20 bp, synthetic construct
  source 1..20: mol_type = other DNA
tttttatattttatcttgga

SEQ ID NO: 129858 - DNA, 20 bp, synthetic construct
  source 1..20: mol_type = other DNA
ttttttatattttatcttgg

SEQ ID NO: 129859 - DNA, 20 bp, synthetic construct
  source 1..20: mol_type = other DNA
tttttttatattttatcttg

SEQ ID NO: 129860 - DNA, 20 bp, synthetic construct
  source 1..20: mol_type = other DNA
atttttttatattttatctt

SEQ ID NO: 129861 - DNA, 20 bp, synthetic construct
  source 1..20: mol_type = other DNA
catttttttatattttatct

SEQ ID NO: 129862 - DNA, 20 bp, synthetic construct
  source 1..20: mol_type = other DNA
acatttttttatattttatc

SEQ ID NO: 129863 - DNA, 20 bp, synthetic construct
  source 1..20: mol_type = other DNA
aacatttttttatattttat

SEQ ID NO: 129864 - DNA, 20 bp, synthetic construct
  source 1..20: mol_type = other DNA
gaacatttttttatatttta

SEQ ID NO: 129865 - DNA, 20 bp, synthetic construct
  source 1..20: mol_type = other DNA
tgaacatttttttatatttt

SEQ ID NO: 129866 - DNA, 20 bp, synthetic construct
  source 1..20: mol_type = other DNA
ctgaacatttttttatattt

SEQ ID NO: 129867 - DNA, 20 bp, synthetic construct
  source 1..20: mol_type = other DNA
cctgaacatttttttatatt

SEQ ID NO: 129868 - DNA, 20 bp, synthetic construct
  source 1..20: mol_type = other DNA
acctgaacatttttttatat

SEQ ID NO: 129869 - DNA, 20 bp, synthetic construct
  source 1..20: mol_type = other DNA
aacctgaacatttttttata

SEQ ID NO: 129870 - DNA, 20 bp, synthetic construct
  source 1..20: mol_type = other DNA
aaacctgaacatttttttat

SEQ ID NO: 129871 - DNA, 20 bp, synthetic construct
  source 1..20: mol_type = other DNA
caaacctgaacattttttta

SEQ ID NO: 129872 - DNA, 20 bp, synthetic construct
  source 1..20: mol_type = other DNA
gcaaacctgaacattttttt

SEQ ID NO: 129873 - DNA, 20 bp, synthetic construct
  source 1..20: mol_type = other DNA
agcaaacctgaacatttttt

SEQ ID NO: 129874 - DNA, 20 bp, synthetic construct
  source 1..20: mol_type = other DNA
aagcaaacctgaacattttt

SEQ ID NO: 129875 - DNA, 20 bp, synthetic construct
  source 1..20: mol_type = other DNA
aaagcaaacctgaacatttt

SEQ ID NO: 129876 - DNA, 20 bp, synthetic construct
  source 1..20: mol_type = other DNA
gaaagcaaacctgaacattt

SEQ ID NO: 129877 - DNA, 20 bp, synthetic construct
  source 1..20: mol_type = other DNA
ggaaagcaaacctgaacatt

SEQ ID NO: 129878 - DNA, 20 bp, synthetic construct
  source 1..20: mol_type = other DNA
aggaaagcaaacctgaacat

SEQ ID NO: 129879 - DNA, 20 bp, synthetic construct
  source 1..20: mol_type = other DNA
taggaaagcaaacctgaaca

SEQ ID NO: 129880 - DNA, 20 bp, synthetic construct
  source 1..20: mol_type = other DNA
gtaggaaagcaaacctgaac

SEQ ID NO: 129881 - DNA, 20 bp, synthetic construct
  source 1..20: mol_type = other DNA
tgtaggaaagcaaacctgaa

SEQ ID NO: 129882 - DNA, 20 bp, synthetic construct
  source 1..20: mol_type = other DNA
atgtaggaaagcaaacctga

SEQ ID NO: 129883 - DNA, 20 bp, synthetic construct
  source 1..20: mol_type = other DNA
tatgtaggaaagcaaacctg

SEQ ID NO: 129884 - DNA, 20 bp, synthetic construct
  source 1..20: mol_type = other DNA
ctatgtaggaaagcaaacct

SEQ ID NO: 129885 - DNA, 20 bp, synthetic construct
  source 1..20: mol_type = other DNA
tctatgtaggaaagcaaacc

SEQ ID NO: 129886 - DNA, 20 bp, synthetic construct
  source 1..20: mol_type = other DNA
atctatgtaggaaagcaaac

SEQ ID NO: 129887 - DNA, 20 bp, synthetic construct
  source 1..20: mol_type = other DNA
tatctatgtaggaaagcaaa

SEQ ID NO: 129888 - DNA, 20 bp, synthetic construct
  source 1..20: mol_type = other DNA
ttatctatgtaggaaagcaa

SEQ ID NO: 129889 - DNA, 20 bp, synthetic construct
  source 1..20: mol_type = other DNA
tttatctatgtaggaaagca

SEQ ID NO: 129890 - DNA, 20 bp, synthetic construct
  source 1..20: mol_type = other DNA
ttttatctatgtaggaaagc

SEQ ID NO: 129891 - DNA, 20 bp, synthetic construct
  source 1..20: mol_type = other DNA
attttatctatgtaggaaag

SEQ ID NO: 129892 - DNA, 20 bp, synthetic construct
  source 1..20: mol_type = other DNA
tattttatctatgtaggaaa

SEQ ID NO: 129893 - DNA, 20 bp, synthetic construct
  source 1..20: mol_type = other DNA
ttattttatctatgtaggaa

SEQ ID NO: 129894 - DNA, 20 bp, synthetic construct
  source 1..20: mol_type = other DNA
attattttatctatgtagga

SEQ ID NO: 129895 - DNA, 20 bp, synthetic construct
  source 1..20: mol_type = other DNA
tattattttatctatgtagg

SEQ ID NO: 129896 - DNA, 20 bp, synthetic construct
  source 1..20: mol_type = other DNA
atattattttatctatgtag

SEQ ID NO: 129897 - DNA, 20 bp, synthetic construct
  source 1..20: mol_type = other DNA
catattattttatctatgta

SEQ ID NO: 129898 - DNA, 20 bp, synthetic construct
  source 1..20: mol_type = other DNA
acatattattttatctatgt

SEQ ID NO: 129899 - DNA, 20 bp, synthetic construct
  source 1..20: mol_type = other DNA
tacatattattttatctatg

SEQ ID NO: 129900 - DNA, 20 bp, synthetic construct
  source 1..20: mol_type = other DNA
ttacatattattttatctat

SEQ ID NO: 129901 - DNA, 20 bp, synthetic construct
  source 1..20: mol_type = other DNA
gttacatattattttatcta

SEQ ID NO: 129902 - DNA, 20 bp, synthetic construct
  source 1..20: mol_type = other DNA
agttacatattattttatct

SEQ ID NO: 129903 - DNA, 20 bp, synthetic construct
  source 1..20: mol_type = other DNA
tagttacatattattttatc

SEQ ID NO: 129904 - DNA, 20 bp, synthetic construct
  source 1..20: mol_type = other DNA
ctagttacatattattttat

SEQ ID NO: 129905 - DNA, 20 bp, synthetic construct
  source 1..20: mol_type = other DNA
gctagttacatattatttta

SEQ ID NO: 129906 - DNA, 20 bp, synthetic construct
  source 1..20: mol_type = other DNA
agctagttacatattatttt

SEQ ID NO: 129907 - DNA, 20 bp, synthetic construct
  source 1..20: mol_type = other DNA
gagctagttacatattattt

SEQ ID NO: 129908 - DNA, 20 bp, synthetic construct
  source 1..20: mol_type = other DNA
agagctagttacatattatt

SEQ ID NO: 129909 - DNA, 20 bp, synthetic construct
  source 1..20: mol_type = other DNA
gagagctagttacatattat

SEQ ID NO: 129910 - DNA, 20 bp, synthetic construct
  source 1..20: mol_type = other DNA
ggagagctagttacatatta

SEQ ID NO: 129911 - DNA, 20 bp, synthetic construct
  source 1..20: mol_type = other DNA
gggagagctagttacatatt

SEQ ID NO: 129912 - DNA, 20 bp, synthetic construct
  source 1..20: mol_type = other DNA
tgggagagctagttacatat

SEQ ID NO: 129913 - DNA, 20 bp, synthetic construct
  source 1..20: mol_type = other DNA
ttgggagagctagttacata

SEQ ID NO: 129914 - DNA, 20 bp, synthetic construct
  source 1..20: mol_type = other DNA
tttgggagagctagttacat

SEQ ID NO: 129915 - DNA, 20 bp, synthetic construct
  source 1..20: mol_type = other DNA
atttgggagagctagttaca

SEQ ID NO: 129916 - DNA, 20 bp, synthetic construct
  source 1..20: mol_type = other DNA
aatttgggagagctagttac

SEQ ID NO: 129917 - DNA, 20 bp, synthetic construct
  source 1..20: mol_type = other DNA
aaatttgggagagctagtta

SEQ ID NO: 129918 - DNA, 20 bp, synthetic construct
  source 1..20: mol_type = other DNA
gaaatttgggagagctagtt

SEQ ID NO: 129919 - DNA, 20 bp, synthetic construct
  source 1..20: mol_type = other DNA
tgaaatttgggagagctagt

SEQ ID NO: 129920 - DNA, 20 bp, synthetic construct
  source 1..20: mol_type = other DNA
ctgaaatttgggagagctag

SEQ ID NO: 129921 - DNA, 20 bp, synthetic construct
  source 1..20: mol_type = other DNA
gctgaaatttgggagagcta

SEQ ID NO: 129922 - DNA, 20 bp, synthetic construct
  source 1..20: mol_type = other DNA
tgctgaaatttgggagagct

SEQ ID NO: 129923 - DNA, 20 bp, synthetic construct
  source 1..20: mol_type = other DNA
ttgctgaaatttgggagagc

SEQ ID NO: 129924 - DNA, 20 bp, synthetic construct
  source 1..20: mol_type = other DNA
gttgctgaaatttgggagag

SEQ ID NO: 129925 - DNA, 20 bp, synthetic construct
  source 1..20: mol_type = other DNA
tgttgctgaaatttgggaga

SEQ ID NO: 129926 - DNA, 20 bp, synthetic construct
  source 1..20: mol_type = other DNA
ctgttgctgaaatttgggag

SEQ ID NO: 129927 - DNA, 20 bp, synthetic construct
  source 1..20: mol_type = other DNA
actgttgctgaaatttggga

SEQ ID NO: 129928 - DNA, 20 bp, synthetic construct
  source 1..20: mol_type = other DNA
aactgttgctgaaatttggg

SEQ ID NO: 129929 - DNA, 20 bp, synthetic construct
  source 1..20: mol_type = other DNA
taactgttgctgaaatttgg

SEQ ID NO: 129930 - DNA, 20 bp, synthetic construct
  source 1..20: mol_type = other DNA
ctaactgttgctgaaatttg

SEQ ID NO: 129931 - DNA, 20 bp, synthetic construct
  source 1..20: mol_type = other DNA
actaactgttgctgaaattt

SEQ ID NO: 129932 - DNA, 20 bp, synthetic construct
  source 1..20: mol_type = other DNA
cactaactgttgctgaaatt

SEQ ID NO: 129933 - DNA, 20 bp, synthetic construct
  source 1..20: mol_type = other DNA
tcactaactgttgctgaaat

SEQ ID NO: 129934 - DNA, 20 bp, synthetic construct
  source 1..20: mol_type = other DNA
ttcactaactgttgctgaaa

SEQ ID NO: 129935 - DNA, 20 bp, synthetic construct
  source 1..20: mol_type = other DNA
attcactaactgttgctgaa

SEQ ID NO: 129936 - DNA, 20 bp, synthetic construct
  source 1..20: mol_type = other DNA
cattcactaactgttgctga

SEQ ID NO: 129937 - DNA, 20 bp, synthetic construct
  source 1..20: mol_type = other DNA
acattcactaactgttgctg

SEQ ID NO: 129938 - DNA, 20 bp, synthetic construct
  source 1..20: mol_type = other DNA
aacattcactaactgttgct

SEQ ID NO: 129939 - DNA, 20 bp, synthetic construct
  source 1..20: mol_type = other DNA
aaacattcactaactgttgc

SEQ ID NO: 129940 - DNA, 20 bp, synthetic construct
  source 1..20: mol_type = other DNA
taaacattcactaactgttg

SEQ ID NO: 129941 - DNA, 20 bp, synthetic construct
  source 1..20: mol_type = other DNA
ctaaacattcactaactgtt

SEQ ID NO: 129942 - DNA, 20 bp, synthetic construct
  source 1..20: mol_type = other DNA
gctaaacattcactaactgt

SEQ ID NO: 129943 - DNA, 20 bp, synthetic construct
  source 1..20: mol_type = other DNA
ggctaaacattcactaactg

SEQ ID NO: 129944 - DNA, 20 bp, synthetic construct
  source 1..20: mol_type = other DNA
tggctaaacattcactaact

SEQ ID NO: 129945 - DNA, 20 bp, synthetic construct
  source 1..20: mol_type = other DNA
gtggctaaacattcactaac

SEQ ID NO: 129946 - DNA, 20 bp, synthetic construct
  source 1..20: mol_type = other DNA
tgtggctaaacattcactaa

SEQ ID NO: 129947 - DNA, 20 bp, synthetic construct
  source 1..20: mol_type = other DNA
ttgtggctaaacattcacta

SEQ ID NO: 129948 - DNA, 20 bp, synthetic construct
  source 1..20: mol_type = other DNA
tttgtggctaaacattcact

SEQ ID NO: 129949 - DNA, 20 bp, synthetic construct
  source 1..20: mol_type = other DNA
atttgtggctaaacattcac

SEQ ID NO: 129950 - DNA, 20 bp, synthetic construct
  source 1..20: mol_type = other DNA
aatttgtggctaaacattca

SEQ ID NO: 129951 - DNA, 20 bp, synthetic construct
  source 1..20: mol_type = other DNA
aaatttgtggctaaacattc

SEQ ID NO: 129952 - DNA, 20 bp, synthetic construct
  source 1..20: mol_type = other DNA
caaatttgtggctaaacatt

SEQ ID NO: 129953 - DNA, 20 bp, synthetic construct
  source 1..20: mol_type = other DNA
gcaaatttgtggctaaacat

SEQ ID NO: 129954 - DNA, 20 bp, synthetic construct
  source 1..20: mol_type = other DNA
tgcaaatttgtggctaaaca

SEQ ID NO: 129955 - DNA, 20 bp, synthetic construct
  source 1..20: mol_type = other DNA
ctgcaaatttgtggctaaac

SEQ ID NO: 129956 - DNA, 20 bp, synthetic construct
  source 1..20: mol_type = other DNA
actgcaaatttgtggctaaa

SEQ ID NO: 129957 - DNA, 20 bp, synthetic construct
  source 1..20: mol_type = other DNA
aactgcaaatttgtggctaa

SEQ ID NO: 129958 - DNA, 20 bp, synthetic construct
  source 1..20: mol_type = other DNA
taactgcaaatttgtggcta

SEQ ID NO: 129959 - DNA, 20 bp, synthetic construct
  source 1..20: mol_type = other DNA
ttaactgcaaatttgtggct

SEQ ID NO: 129960 - DNA, 20 bp, synthetic construct
  source 1..20: mol_type = other DNA
attaactgcaaatttgtggc

SEQ ID NO: 129961 - DNA, 20 bp, synthetic construct
  source 1..20: mol_type = other DNA
aattaactgcaaatttgtgg

SEQ ID NO: 129962 - DNA, 20 bp, synthetic construct
  source 1..20: mol_type = other DNA
taattaactgcaaatttgtg

SEQ ID NO: 129963 - DNA, 20 bp, synthetic construct
  source 1..20: mol_type = other DNA
ataattaactgcaaatttgt

SEQ ID NO: 129964 - DNA, 20 bp, synthetic construct
  source 1..20: mol_type = other DNA
tataattaactgcaaatttg

SEQ ID NO: 129965 - DNA, 20 bp, synthetic construct
  source 1..20: mol_type = other DNA
atataattaactgcaaattt

SEQ ID NO: 129966 - DNA, 20 bp, synthetic construct
  source 1..20: mol_type = other DNA
tatataattaactgcaaatt

SEQ ID NO: 129967 - DNA, 20 bp, synthetic construct
  source 1..20: mol_type = other DNA
ttatataattaactgcaaat

SEQ ID NO: 129968 - DNA, 20 bp, synthetic construct
  source 1..20: mol_type = other DNA
attatataattaactgcaaa

SEQ ID NO: 129969 - DNA, 20 bp, synthetic construct
  source 1..20: mol_type = other DNA
gattatataattaactgcaa

SEQ ID NO: 129970 - DNA, 20 bp, synthetic construct
  source 1..20: mol_type = other DNA
tgattatataattaactgca

SEQ ID NO: 129971 - DNA, 20 bp, synthetic construct
  source 1..20: mol_type = other DNA
ctgattatataattaactgc

SEQ ID NO: 129972 - DNA, 20 bp, synthetic construct
  source 1..20: mol_type = other DNA
actgattatataattaactg

SEQ ID NO: 129973 - DNA, 20 bp, synthetic construct
  source 1..20: mol_type = other DNA
aactgattatataattaact

SEQ ID NO: 129974 - DNA, 20 bp, synthetic construct
  source 1..20: mol_type = other DNA
gaactgattatataattaac

SEQ ID NO: 129975 - DNA, 20 bp, synthetic construct
  source 1..20: mol_type = other DNA
agaactgattatataattaa

SEQ ID NO: 129976 - DNA, 20 bp, synthetic construct
  source 1..20: mol_type = other DNA
aagaactgattatataatta

SEQ ID NO: 129977 - DNA, 20 bp, synthetic construct
  source 1..20: mol_type = other DNA
taagaactgattatataatt

SEQ ID NO: 129978 - DNA, 20 bp, synthetic construct
  source 1..20: mol_type = other DNA
ctaagaactgattatataat

SEQ ID NO: 129979 - DNA, 20 bp, synthetic construct
  source 1..20: mol_type = other DNA
cctaagaactgattatataa

SEQ ID NO: 129980 - DNA, 20 bp, synthetic construct
  source 1..20: mol_type = other DNA
tcctaagaactgattatata

SEQ ID NO: 129981 - DNA, 20 bp, synthetic construct
  source 1..20: mol_type = other DNA
atcctaagaactgattatat

SEQ ID NO: 129982 - DNA, 20 bp, synthetic construct
  source 1..20: mol_type = other DNA
aatcctaagaactgattata

SEQ ID NO: 129983 - DNA, 20 bp, synthetic construct
  source 1..20: mol_type = other DNA
aaatcctaagaactgattat

SEQ ID NO: 129984 - DNA, 20 bp, synthetic construct
  source 1..20: mol_type = other DNA
aaaatcctaagaactgatta

SEQ ID NO: 129985 - DNA, 20 bp, synthetic construct
  source 1..20: mol_type = other DNA
taaaatcctaagaactgatt

SEQ ID NO: 129986 - DNA, 20 bp, synthetic construct
  source 1..20: mol_type = other DNA
ataaaatcctaagaactgat

SEQ ID NO: 129987 - DNA, 20 bp, synthetic construct
  source 1..20: mol_type = other DNA
cataaaatcctaagaactga

SEQ ID NO: 129988 - DNA, 20 bp, synthetic construct
  source 1..20: mol_type = other DNA
tcataaaatcctaagaactg

SEQ ID NO: 129989 - DNA, 20 bp, synthetic construct
  source 1..20: mol_type = other DNA
ttcataaaatcctaagaact

SEQ ID NO: 129990 - DNA, 20 bp, synthetic construct
  source 1..20: mol_type = other DNA
gttcataaaatcctaagaac

SEQ ID NO: 129991 - DNA, 20 bp, synthetic construct
  source 1..20: mol_type = other DNA
tgttcataaaatcctaagaa

SEQ ID NO: 129992 - DNA, 20 bp, synthetic construct
  source 1..20: mol_type = other DNA
ttgttcataaaatcctaaga

SEQ ID NO: 129993 - DNA, 20 bp, synthetic construct
  source 1..20: mol_type = other DNA
cttgttcataaaatcctaag

SEQ ID NO: 129994 - DNA, 20 bp, synthetic construct
  source 1..20: mol_type = other DNA
acttgttcataaaatcctaa

SEQ ID NO: 129995 - DNA, 20 bp, synthetic construct
  source 1..20: mol_type = other DNA
aacttgttcataaaatccta

SEQ ID NO: 129996 - DNA, 20 bp, synthetic construct
  source 1..20: mol_type = other DNA
gaacttgttcataaaatcct

SEQ ID NO: 129997 - DNA, 20 bp, synthetic construct
  source 1..20: mol_type = other DNA
agaacttgttcataaaatcc

SEQ ID NO: 129998 - DNA, 20 bp, synthetic construct
  source 1..20: mol_type = other DNA
tagaacttgttcataaaatc

SEQ ID NO: 129999 - DNA, 20 bp, synthetic construct
  source 1..20: mol_type = other DNA
atagaacttgttcataaaat

SEQ ID NO: 130000 - DNA, 20 bp, synthetic construct
  source 1..20: mol_type = other DNA
tatagaacttgttcataaaa

SEQ ID NO: 130001 - DNA, 20 bp, synthetic construct
  source 1..20: mol_type = other DNA
atatagaacttgttcataaa

SEQ ID NO: 130002 - DNA, 20 bp, synthetic construct
  source 1..20: mol_type = other DNA
aatatagaacttgttcataa

SEQ ID NO: 130003 - DNA, 20 bp, synthetic construct
  source 1..20: mol_type = other DNA
gaatatagaacttgttcata

SEQ ID NO: 130004 - DNA, 20 bp, synthetic construct
  source 1..20: mol_type = other DNA
agaatatagaacttgttcat

SEQ ID NO: 130005 - DNA, 20 bp, synthetic construct
  source 1..20: mol_type = other DNA
aagaatatagaacttgttca

SEQ ID NO: 130006 - DNA, 20 bp, synthetic construct
  source 1..20: mol_type = other DNA
aaagaatatagaacttgttc

SEQ ID NO: 130007 - DNA, 20 bp, synthetic construct
  source 1..20: mol_type = other DNA
caaagaatatagaacttgtt

SEQ ID NO: 130008 - DNA, 20 bp, synthetic construct
  source 1..20: mol_type = other DNA
acaaagaatatagaacttgt

SEQ ID NO: 130009 - DNA, 20 bp, synthetic construct
  source 1..20: mol_type = other DNA
cacaaagaatatagaacttg

SEQ ID NO: 130010 - DNA, 20 bp, synthetic construct
  source 1..20: mol_type = other DNA
gcacaaagaatatagaactt

SEQ ID NO: 130011 - DNA, 20 bp, synthetic construct
  source 1..20: mol_type = other DNA
ggcacaaagaatatagaact

SEQ ID NO: 130012 - DNA, 20 bp, synthetic construct
  source 1..20: mol_type = other DNA
aggcacaaagaatatagaac

SEQ ID NO: 130013 - DNA, 20 bp, synthetic construct
  source 1..20: mol_type = other DNA
aaggcacaaagaatatagaa

SEQ ID NO: 130014 - DNA, 20 bp, synthetic construct
  source 1..20: mol_type = other DNA
taaggcacaaagaatataga

SEQ ID NO: 130015 - DNA, 20 bp, synthetic construct
  source 1..20: mol_type = other DNA
ataaggcacaaagaatatag

SEQ ID NO: 130016 - DNA, 20 bp, synthetic construct
  source 1..20: mol_type = other DNA
tataaggcacaaagaatata

SEQ ID NO: 130017 - DNA, 20 bp, synthetic construct
  source 1..20: mol_type = other DNA
gtataaggcacaaagaatat

SEQ ID NO: 130018 - DNA, 20 bp, synthetic construct
  source 1..20: mol_type = other DNA
ggtataaggcacaaagaata

SEQ ID NO: 130019 - DNA, 20 bp, synthetic construct
  source 1..20: mol_type = other DNA
aggtataaggcacaaagaat

SEQ ID NO: 130020 - DNA, 20 bp, synthetic construct
  source 1..20: mol_type = other DNA
taggtataaggcacaaagaa

SEQ ID NO: 130021 - DNA, 20 bp, synthetic construct
  source 1..20: mol_type = other DNA
ctaggtataaggcacaaaga

SEQ ID NO: 130022 - DNA, 20 bp, synthetic construct
  source 1..20: mol_type = other DNA
actaggtataaggcacaaag

SEQ ID NO: 130023 - DNA, 20 bp, synthetic construct
  source 1..20: mol_type = other DNA
aactaggtataaggcacaaa

SEQ ID NO: 130024 - DNA, 20 bp, synthetic construct
  source 1..20: mol_type = other DNA
caactaggtataaggcacaa

SEQ ID NO: 130025 - DNA, 20 bp, synthetic construct
  source 1..20: mol_type = other DNA
acaactaggtataaggcaca

SEQ ID NO: 130026 - DNA, 20 bp, synthetic construct
  source 1..20: mol_type = other DNA
tacaactaggtataaggcac

SEQ ID NO: 130027 - DNA, 20 bp, synthetic construct
  source 1..20: mol_type = other DNA
ttacaactaggtataaggca

SEQ ID NO: 130028 - DNA, 20 bp, synthetic construct
  source 1..20: mol_type = other DNA
cttacaactaggtataaggc

SEQ ID NO: 130029 - DNA, 20 bp, synthetic construct
  source 1..20: mol_type = other DNA
gcttacaactaggtataagg

SEQ ID NO: 130030 - DNA, 20 bp, synthetic construct
  source 1..20: mol_type = other DNA
tgcttacaactaggtataag

SEQ ID NO: 130031 - DNA, 20 bp, synthetic construct
  source 1..20: mol_type = other DNA
ctgcttacaactaggtataa

SEQ ID NO: 130032 - DNA, 20 bp, synthetic construct
  source 1..20: mol_type = other DNA
actgcttacaactaggtata

SEQ ID NO: 130033 - DNA, 20 bp, synthetic construct
  source 1..20: mol_type = other DNA
gactgcttacaactaggtat

SEQ ID NO: 130034 - DNA, 20 bp, synthetic construct
  source 1..20: mol_type = other DNA
tgactgcttacaactaggta

SEQ ID NO: 130035 - DNA, 20 bp, synthetic construct
  source 1..20: mol_type = other DNA
atgactgcttacaactaggt

SEQ ID NO: 130036 - DNA, 20 bp, synthetic construct
  source 1..20: mol_type = other DNA
aatgactgcttacaactagg

SEQ ID NO: 130037 - DNA, 20 bp, synthetic construct
  source 1..20: mol_type = other DNA
gaatgactgcttacaactag

SEQ ID NO: 130038 - DNA, 20 bp, synthetic construct
  source 1..20: mol_type = other DNA
ggaatgactgcttacaacta

SEQ ID NO: 130039 - DNA, 20 bp, synthetic construct
  source 1..20: mol_type = other DNA
tggaatgactgcttacaact

SEQ ID NO: 130040 - DNA, 20 bp, synthetic construct
  source 1..20: mol_type = other DNA
gtggaatgactgcttacaac

SEQ ID NO: 130041 - DNA, 20 bp, synthetic construct
  source 1..20: mol_type = other DNA
tgtggaatgactgcttacaa

SEQ ID NO: 130042 - DNA, 20 bp, synthetic construct
  source 1..20: mol_type = other DNA
ttgtggaatgactgcttaca

SEQ ID NO: 130043 - DNA, 20 bp, synthetic construct
  source 1..20: mol_type = other DNA
attgtggaatgactgcttac

SEQ ID NO: 130044 - DNA, 20 bp, synthetic construct
  source 1..20: mol_type = other DNA
aattgtggaatgactgctta

SEQ ID NO: 130045 - DNA, 20 bp, synthetic construct
  source 1..20: mol_type = other DNA
taattgtggaatgactgctt

SEQ ID NO: 130046 - DNA, 20 bp, synthetic construct
  source 1..20: mol_type = other DNA
ataattgtggaatgactgct

SEQ ID NO: 130047 - DNA, 20 bp, synthetic construct
  source 1..20: mol_type = other DNA
aataattgtggaatgactgc

SEQ ID NO: 130048 - DNA, 20 bp, synthetic construct
  source 1..20: mol_type = other DNA
aaataattgtggaatgactg

SEQ ID NO: 130049 - DNA, 20 bp, synthetic construct
  source 1..20: mol_type = other DNA
aaaataattgtggaatgact

SEQ ID NO: 130050 - DNA, 20 bp, synthetic construct
  source 1..20: mol_type = other DNA
gaaaataattgtggaatgac

SEQ ID NO: 130051 - DNA, 20 bp, synthetic construct
  source 1..20: mol_type = other DNA
ggaaaataattgtggaatga

SEQ ID NO: 130052 - DNA, 20 bp, synthetic construct
  source 1..20: mol_type = other DNA
aggaaaataattgtggaatg

SEQ ID NO: 130053 - DNA, 20 bp, synthetic construct
  source 1..20: mol_type = other DNA
caggaaaataattgtggaat

SEQ ID NO: 130054 - DNA, 20 bp, synthetic construct
  source 1..20: mol_type = other DNA
tcaggaaaataattgtggaa

SEQ ID NO: 130055 - DNA, 20 bp, synthetic construct
  source 1..20: mol_type = other DNA
ttcaggaaaataattgtgga

SEQ ID NO: 130056 - DNA, 20 bp, synthetic construct
  source 1..20: mol_type = other DNA
cttcaggaaaataattgtgg

SEQ ID NO: 130057 - DNA, 20 bp, synthetic construct
  source 1..20: mol_type = other DNA
acttcaggaaaataattgtg

SEQ ID NO: 130058 - DNA, 20 bp, synthetic construct
  source 1..20: mol_type = other DNA
cacttcaggaaaataattgt

SEQ ID NO: 130059 - DNA, 20 bp, synthetic construct
  source 1..20: mol_type = other DNA
ccacttcaggaaaataattg

SEQ ID NO: 130060 - DNA, 20 bp, synthetic construct
  source 1..20: mol_type = other DNA
gccacttcaggaaaataatt

SEQ ID NO: 130061 - DNA, 20 bp, synthetic construct
  source 1..20: mol_type = other DNA
agccacttcaggaaaataat

SEQ ID NO: 130062 - DNA, 20 bp, synthetic construct
  source 1..20: mol_type = other DNA
aagccacttcaggaaaataa

SEQ ID NO: 130063 - DNA, 20 bp, synthetic construct
  source 1..20: mol_type = other DNA
caagccacttcaggaaaata

SEQ ID NO: 130064 - DNA, 20 bp, synthetic construct
  source 1..20: mol_type = other DNA
ccaagccacttcaggaaaat

SEQ ID NO: 130065 - DNA, 20 bp, synthetic construct
  source 1..20: mol_type = other DNA
accaagccacttcaggaaaa

SEQ ID NO: 130066 - DNA, 20 bp, synthetic construct
  source 1..20: mol_type = other DNA
aaccaagccacttcaggaaa

SEQ ID NO: 130067 - DNA, 20 bp, synthetic construct
  source 1..20: mol_type = other DNA
taaccaagccacttcaggaa

SEQ ID NO: 130068 - DNA, 20 bp, synthetic construct
  source 1..20: mol_type = other DNA
ttaaccaagccacttcagga

SEQ ID NO: 130069 - DNA, 20 bp, synthetic construct
  source 1..20: mol_type = other DNA
attaaccaagccacttcagg

SEQ ID NO: 130070 - DNA, 20 bp, synthetic construct
  source 1..20: mol_type = other DNA
cattaaccaagccacttcag

SEQ ID NO: 130071 - DNA, 20 bp, synthetic construct
  source 1..20: mol_type = other DNA
gcattaaccaagccacttca

SEQ ID NO: 130072 - DNA, 20 bp, synthetic construct
  source 1..20: mol_type = other DNA
ggcattaaccaagccacttc

SEQ ID NO: 130073 - DNA, 20 bp, synthetic construct
  source 1..20: mol_type = other DNA
tggcattaaccaagccactt

SEQ ID NO: 130074 - DNA, 20 bp, synthetic construct
  source 1..20: mol_type = other DNA
gtggcattaaccaagccact

SEQ ID NO: 130075 - DNA, 20 bp, synthetic construct
  source 1..20: mol_type = other DNA
tgtggcattaaccaagccac

SEQ ID NO: 130076 - DNA, 20 bp, synthetic construct
  source 1..20: mol_type = other DNA
gtgtggcattaaccaagcca

SEQ ID NO: 130077 - DNA, 20 bp, synthetic construct
  source 1..20: mol_type = other DNA
ggtgtggcattaaccaagcc

SEQ ID NO: 130078 - DNA, 20 bp, synthetic construct
  source 1..20: mol_type = other DNA
tggtgtggcattaaccaagc

SEQ ID NO: 130079 - DNA, 20 bp, synthetic construct
  source 1..20: mol_type = other DNA
ctggtgtggcattaaccaag

SEQ ID NO: 130080 - DNA, 20 bp, synthetic construct
  source 1..20: mol_type = other DNA
tctggtgtggcattaaccaa

SEQ ID NO: 130081 - DNA, 20 bp, synthetic construct
  source 1..20: mol_type = other DNA
ttctggtgtggcattaacca

SEQ ID NO: 130082 - DNA, 20 bp, synthetic construct
  source 1..20: mol_type = other DNA
tttctggtgtggcattaacc

SEQ ID NO: 130083 - DNA, 20 bp, synthetic construct
  source 1..20: mol_type = other DNA
gtttctggtgtggcattaac

SEQ ID NO: 130084 - DNA, 20 bp, synthetic construct
  source 1..20: mol_type = other DNA
tgtttctggtgtggcattaa

SEQ ID NO: 130085 - DNA, 20 bp, synthetic construct
  source 1..20: mol_type = other DNA
ctgtttctggtgtggcatta

SEQ ID NO: 130086 - DNA, 20 bp, synthetic construct
  source 1..20: mol_type = other DNA
cctgtttctggtgtggcatt

SEQ ID NO: 130087 - DNA, 20 bp, synthetic construct
  source 1..20: mol_type = other DNA
acctgtttctggtgtggcat

SEQ ID NO: 130088 - DNA, 20 bp, synthetic construct
  source 1..20: mol_type = other DNA
gacctgtttctggtgtggca

SEQ ID NO: 130089 - DNA, 20 bp, synthetic construct
  source 1..20: mol_type = other DNA
tgacctgtttctggtgtggc

SEQ ID NO: 130090 - DNA, 20 bp, synthetic construct
  source 1..20: mol_type = other DNA
gtgacctgtttctggtgtgg

SEQ ID NO: 130091 - DNA, 20 bp, synthetic construct
  source 1..20: mol_type = other DNA
tgtgacctgtttctggtgtg

SEQ ID NO: 130092 - DNA, 20 bp, synthetic construct
  source 1..20: mol_type = other DNA
ctgtgacctgtttctggtgt

SEQ ID NO: 130093 - DNA, 20 bp, synthetic construct
  source 1..20: mol_type = other DNA
tctgtgacctgtttctggtg

SEQ ID NO: 130094 - DNA, 20 bp, synthetic construct
  source 1..20: mol_type = other DNA
gtctgtgacctgtttctggt

SEQ ID NO: 130095 - DNA, 20 bp, synthetic construct
  source 1..20: mol_type = other DNA
tgtctgtgacctgtttctgg

SEQ ID NO: 130096 - DNA, 20 bp, synthetic construct
  source 1..20: mol_type = other DNA
ttgtctgtgacctgtttctg

SEQ ID NO: 130097 - DNA, 20 bp, synthetic construct
  source 1..20: mol_type = other DNA
attgtctgtgacctgtttct

SEQ ID NO: 130098 - DNA, 20 bp, synthetic construct
  source 1..20: mol_type = other DNA
tattgtctgtgacctgtttc

SEQ ID NO: 130099 - DNA, 20 bp, synthetic construct
  source 1..20: mol_type = other DNA
ctattgtctgtgacctgttt

SEQ ID NO: 130100 - DNA, 20 bp, synthetic construct
  source 1..20: mol_type = other DNA
actattgtctgtgacctgtt

SEQ ID NO: 130101 - DNA, 20 bp, synthetic construct
  source 1..20: mol_type = other DNA
cactattgtctgtgacctgt

SEQ ID NO: 130102 - DNA, 20 bp, synthetic construct
  source 1..20: mol_type = other DNA
gcactattgtctgtgacctg

SEQ ID NO: 130103 - DNA, 20 bp, synthetic construct
  source 1..20: mol_type = other DNA
agcactattgtctgtgacct

SEQ ID NO: 130104 - DNA, 20 bp, synthetic construct
  source 1..20: mol_type = other DNA
cagcactattgtctgtgacc

SEQ ID NO: 130105 - DNA, 20 bp, synthetic construct
  source 1..20: mol_type = other DNA
acagcactattgtctgtgac

SEQ ID NO: 130106 - DNA, 20 bp, synthetic construct
  source 1..20: mol_type = other DNA
tacagcactattgtctgtga

SEQ ID NO: 130107 - DNA, 20 bp, synthetic construct
  source 1..20: mol_type = other DNA
ttacagcactattgtctgtg

SEQ ID NO: 130108 - DNA, 20 bp, synthetic construct
  source 1..20: mol_type = other DNA
cttacagcactattgtctgt

SEQ ID NO: 130109 - DNA, 20 bp, synthetic construct
  source 1..20: mol_type = other DNA
tcttacagcactattgtctg

SEQ ID NO: 130110 - DNA, 20 bp, synthetic construct
  source 1..20: mol_type = other DNA
ttcttacagcactattgtct

SEQ ID NO: 130111 - DNA, 20 bp, synthetic construct
  source 1..20: mol_type = other DNA
tttcttacagcactattgtc

SEQ ID NO: 130112 - DNA, 20 bp, synthetic construct
  source 1..20: mol_type = other DNA
atttcttacagcactattgt

SEQ ID NO: 130113 - DNA, 20 bp, synthetic construct
  source 1..20: mol_type = other DNA
catttcttacagcactattg

SEQ ID NO: 130114 - DNA, 20 bp, synthetic construct
  source 1..20: mol_type = other DNA
acatttcttacagcactatt

SEQ ID NO: 130115 - DNA, 20 bp, synthetic construct
  source 1..20: mol_type = other DNA
cacatttcttacagcactat

SEQ ID NO: 130116 - DNA, 20 bp, synthetic construct
  source 1..20: mol_type = other DNA
acacatttcttacagcacta

SEQ ID NO: 130117 - DNA, 20 bp, synthetic construct
  source 1..20: mol_type = other DNA
cacacatttcttacagcact

SEQ ID NO: 130118 - DNA, 20 bp, synthetic construct
  source 1..20: mol_type = other DNA
tcacacatttcttacagcac

SEQ ID NO: 130119 - DNA, 20 bp, synthetic construct
  source 1..20: mol_type = other DNA
ctcacacatttcttacagca

SEQ ID NO: 130120 - DNA, 20 bp, synthetic construct
  source 1..20: mol_type = other DNA
cctcacacatttcttacagc

SEQ ID NO: 130121 - DNA, 20 bp, synthetic construct
  source 1..20: mol_type = other DNA
tcctcacacatttcttacag

SEQ ID NO: 130122 - DNA, 20 bp, synthetic construct
  source 1..20: mol_type = other DNA
ttcctcacacatttcttaca

SEQ ID NO: 130123 - DNA, 20 bp, synthetic construct
  source 1..20: mol_type = other DNA
tttcctcacacatttcttac

SEQ ID NO: 130124 - DNA, 20 bp, synthetic construct
  source 1..20: mol_type = other DNA
ctttcctcacacatttctta

SEQ ID NO: 130125 - DNA, 20 bp, synthetic construct
  source 1..20: mol_type = other DNA
tctttcctcacacatttctt

SEQ ID NO: 130126 - DNA, 20 bp, synthetic construct
  source 1..20: mol_type = other DNA
ctctttcctcacacatttct

SEQ ID NO: 130127 - DNA, 20 bp, synthetic construct
  source 1..20: mol_type = other DNA
cctctttcctcacacatttc

SEQ ID NO: 130128 - DNA, 20 bp, synthetic construct
  source 1..20: mol_type = other DNA
gcctctttcctcacacattt

SEQ ID NO: 130129 - DNA, 20 bp, synthetic construct
  source 1..20: mol_type = other DNA
tgcctctttcctcacacatt

SEQ ID NO: 130130 - DNA, 20 bp, synthetic construct
  source 1..20: mol_type = other DNA
gtgcctctttcctcacacat

SEQ ID NO: 130131 - DNA, 20 bp, synthetic construct
  source 1..20: mol_type = other DNA
tgtgcctctttcctcacaca

SEQ ID NO: 130132 - DNA, 20 bp, synthetic construct
  source 1..20: mol_type = other DNA
atgtgcctctttcctcacac

SEQ ID NO: 130133 - DNA, 20 bp, synthetic construct
  source 1..20: mol_type = other DNA
catgtgcctctttcctcaca

SEQ ID NO: 130134 - DNA, 20 bp, synthetic construct
  source 1..20: mol_type = other DNA
ccatgtgcctctttcctcac

SEQ ID NO: 130135 - DNA, 20 bp, synthetic construct
  source 1..20: mol_type = other DNA
cccatgtgcctctttcctca

SEQ ID NO: 130136 - DNA, 20 bp, synthetic construct
  source 1..20: mol_type = other DNA
tcccatgtgcctctttcctc

SEQ ID NO: 130137 - DNA, 20 bp, synthetic construct
  source 1..20: mol_type = other DNA
ttcccatgtgcctctttcct

SEQ ID NO: 130138 - DNA, 20 bp, synthetic construct
  source 1..20: mol_type = other DNA
cttcccatgtgcctctttcc

SEQ ID NO: 130139 - DNA, 20 bp, synthetic construct
  source 1..20: mol_type = other DNA
acttcccatgtgcctctttc

SEQ ID NO: 130140 - DNA, 20 bp, synthetic construct
  source 1..20: mol_type = other DNA
tacttcccatgtgcctcttt

SEQ ID NO: 130141 - DNA, 20 bp, synthetic construct
  source 1..20: mol_type = other DNA
ctacttcccatgtgcctctt

SEQ ID NO: 130142 - DNA, 20 bp, synthetic construct
  source 1..20: mol_type = other DNA
gctacttcccatgtgcctct

SEQ ID NO: 130143 - DNA, 20 bp, synthetic construct
  source 1..20: mol_type = other DNA
agctacttcccatgtgcctc

SEQ ID NO: 130144 - DNA, 20 bp, synthetic construct
  source 1..20: mol_type = other DNA
tagctacttcccatgtgcct

SEQ ID NO: 130145 - DNA, 20 bp, synthetic construct
  source 1..20: mol_type = other DNA
ctagctacttcccatgtgcc

SEQ ID NO: 130146 - DNA, 20 bp, synthetic construct
  source 1..20: mol_type = other DNA
gctagctacttcccatgtgc

SEQ ID NO: 130147 - DNA, 20 bp, synthetic construct
  source 1..20: mol_type = other DNA
agctagctacttcccatgtg

SEQ ID NO: 130148 - DNA, 20 bp, synthetic construct
  source 1..20: mol_type = other DNA
gagctagctacttcccatgt

SEQ ID NO: 130149 - DNA, 20 bp, synthetic construct
  source 1..20: mol_type = other DNA
cgagctagctacttcccatg

SEQ ID NO: 130150 - DNA, 20 bp, synthetic construct
  source 1..20: mol_type = other DNA
acgagctagctacttcccat

SEQ ID NO: 130151 - DNA, 20 bp, synthetic construct
  source 1..20: mol_type = other DNA
cacgagctagctacttccca

SEQ ID NO: 130152 - DNA, 20 bp, synthetic construct
  source 1..20: mol_type = other DNA
gcacgagctagctacttccc

SEQ ID NO: 130153 - DNA, 20 bp, synthetic construct
  source 1..20: mol_type = other DNA
agcacgagctagctacttcc

SEQ ID NO: 130154 - DNA, 20 bp, synthetic construct
  source 1..20: mol_type = other DNA
cagcacgagctagctacttc

SEQ ID NO: 130155 - DNA, 20 bp, synthetic construct
  source 1..20: mol_type = other DNA
ccagcacgagctagctactt

SEQ ID NO: 130156 - DNA, 20 bp, synthetic construct
  source 1..20: mol_type = other DNA
tccagcacgagctagctact

SEQ ID NO: 130157 - DNA, 20 bp, synthetic construct
  source 1..20: mol_type = other DNA
ctccagcacgagctagctac

SEQ ID NO: 130158 - DNA, 20 bp, synthetic construct
  source 1..20: mol_type = other DNA
cctccagcacgagctagcta

SEQ ID NO: 130159 - DNA, 20 bp, synthetic construct
  source 1..20: mol_type = other DNA
tcctccagcacgagctagct

SEQ ID NO: 130160 - DNA, 20 bp, synthetic construct
  source 1..20: mol_type = other DNA
ttcctccagcacgagctagc

SEQ ID NO: 130161 - DNA, 20 bp, synthetic construct
  source 1..20: mol_type = other DNA
gttcctccagcacgagctag

SEQ ID NO: 130162 - DNA, 20 bp, synthetic construct
  source 1..20: mol_type = other DNA
agttcctccagcacgagcta

SEQ ID NO: 130163 - DNA, 20 bp, synthetic construct
  source 1..20: mol_type = other DNA
cagttcctccagcacgagct

SEQ ID NO: 130164 - DNA, 20 bp, synthetic construct
  source 1..20: mol_type = other DNA
ccagttcctccagcacgagc

SEQ ID NO: 130165 - DNA, 20 bp, synthetic construct
  source 1..20: mol_type = other DNA
tccagttcctccagcacgag

SEQ ID NO: 130166 - DNA, 20 bp, synthetic construct
  source 1..20: mol_type = other DNA
ttccagttcctccagcacga

SEQ ID NO: 130167 - DNA, 20 bp, synthetic construct
  source 1..20: mol_type = other DNA
tttccagttcctccagcacg

SEQ ID NO: 130168 - DNA, 20 bp, synthetic construct
  source 1..20: mol_type = other DNA
ttttccagttcctccagcac

SEQ ID NO: 130169 - DNA, 20 bp, synthetic construct
  source 1..20: mol_type = other DNA
tttttccagttcctccagca

SEQ ID NO: 130170 - DNA, 20 bp, synthetic construct
  source 1..20: mol_type = other DNA
ttttttccagttcctccagc

SEQ ID NO: 130171 - DNA, 20 bp, synthetic construct
  source 1..20: mol_type = other DNA
tttttttccagttcctccag

SEQ ID NO: 130172 - DNA, 20 bp, synthetic construct
  source 1..20: mol_type = other DNA
gtttttttccagttcctcca

SEQ ID NO: 130173 - DNA, 20 bp, synthetic construct
  source 1..20: mol_type = other DNA
ggtttttttccagttcctcc

SEQ ID NO: 130174 - DNA, 20 bp, synthetic construct
  source 1..20: mol_type = other DNA
aggtttttttccagttcctc

SEQ ID NO: 130175 - DNA, 20 bp, synthetic construct
  source 1..20: mol_type = other DNA
gaggtttttttccagttcct

SEQ ID NO: 130176 - DNA, 20 bp, synthetic construct
  source 1..20: mol_type = other DNA
tgaggtttttttccagttcc

SEQ ID NO: 130177 - DNA, 20 bp, synthetic construct
  source 1..20: mol_type = other DNA
gtgaggtttttttccagttc

SEQ ID NO: 130178 - DNA, 20 bp, synthetic construct
  source 1..20: mol_type = other DNA
tgtgaggtttttttccagtt

SEQ ID NO: 130179 - DNA, 20 bp, synthetic construct
  source 1..20: mol_type = other DNA
atgtgaggtttttttccagt

SEQ ID NO: 130180 - DNA, 20 bp, synthetic construct
  source 1..20: mol_type = other DNA
catgtgaggtttttttccag

SEQ ID NO: 130181 - DNA, 20 bp, synthetic construct
  source 1..20: mol_type = other DNA
ccatgtgaggtttttttcca

SEQ ID NO: 130182 - DNA, 20 bp, synthetic construct
  source 1..20: mol_type = other DNA
cccatgtgaggtttttttcc

SEQ ID NO: 130183 - DNA, 20 bp, synthetic construct
  source 1..20: mol_type = other DNA
tcccatgtgaggtttttttc

SEQ ID NO: 130184 - DNA, 20 bp, synthetic construct
  source 1..20: mol_type = other DNA
ctcccatgtgaggttttttt

SEQ ID NO: 130185 - DNA, 20 bp, synthetic construct
  source 1..20: mol_type = other DNA
tctcccatgtgaggtttttt

SEQ ID NO: 130186 - DNA, 20 bp, synthetic construct
  source 1..20: mol_type = other DNA
atctcccatgtgaggttttt

SEQ ID NO: 130187 - DNA, 20 bp, synthetic construct
  source 1..20: mol_type = other DNA
catctcccatgtgaggtttt

SEQ ID NO: 130188 - DNA, 20 bp, synthetic construct
  source 1..20: mol_type = other DNA
tcatctcccatgtgaggttt

SEQ ID NO: 130189 - DNA, 20 bp, synthetic construct
  source 1..20: mol_type = other DNA
gtcatctcccatgtgaggtt

SEQ ID NO: 130190 - DNA, 20 bp, synthetic construct
  source 1..20: mol_type = other DNA
tgtcatctcccatgtgaggt

SEQ ID NO: 130191 - DNA, 20 bp, synthetic construct
  source 1..20: mol_type = other DNA
ctgtcatctcccatgtgagg

SEQ ID NO: 130192 - DNA, 20 bp, synthetic construct
  source 1..20: mol_type = other DNA
actgtcatctcccatgtgag

SEQ ID NO: 130193 - DNA, 20 bp, synthetic construct
  source 1..20: mol_type = other DNA
aactgtcatctcccatgtga

SEQ ID NO: 130194 - DNA, 20 bp, synthetic construct
  source 1..20: mol_type = other DNA
caactgtcatctcccatgtg

SEQ ID NO: 130195 - DNA, 20 bp, synthetic construct
  source 1..20: mol_type = other DNA
tcaactgtcatctcccatgt

SEQ ID NO: 130196 - DNA, 20 bp, synthetic construct
  source 1..20: mol_type = other DNA
ctcaactgtcatctcccatg

SEQ ID NO: 130197 - DNA, 20 bp, synthetic construct
  source 1..20: mol_type = other DNA
gctcaactgtcatctcccat

SEQ ID NO: 130198 - DNA, 20 bp, synthetic construct
  source 1..20: mol_type = other DNA
agctcaactgtcatctccca

SEQ ID NO: 130199 - DNA, 20 bp, synthetic construct
  source 1..20: mol_type = other DNA
cagctcaactgtcatctccc

SEQ ID NO: 130200 - DNA, 20 bp, synthetic construct
  source 1..20: mol_type = other DNA
tcagctcaactgtcatctcc

SEQ ID NO: 130201 - DNA, 20 bp, synthetic construct
  source 1..20: mol_type = other DNA
ttcagctcaactgtcatctc

SEQ ID NO: 130202 - DNA, 20 bp, synthetic construct
  source 1..20: mol_type = other DNA
attcagctcaactgtcatct

SEQ ID NO: 130203 - DNA, 20 bp, synthetic construct
  source 1..20: mol_type = other DNA
aattcagctcaactgtcatc

SEQ ID NO: 130204 - DNA, 20 bp, synthetic construct
  source 1..20: mol_type = other DNA
gaattcagctcaactgtcat

SEQ ID NO: 130205 - DNA, 20 bp, synthetic construct
  source 1..20: mol_type = other DNA
agaattcagctcaactgtca

SEQ ID NO: 130206 - DNA, 20 bp, synthetic construct
  source 1..20: mol_type = other DNA
aagaattcagctcaactgtc

SEQ ID NO: 130207 - DNA, 20 bp, synthetic construct
  source 1..20: mol_type = other DNA
taagaattcagctcaactgt

SEQ ID NO: 130208 - DNA, 20 bp, synthetic construct
  source 1..20: mol_type = other DNA
ttaagaattcagctcaactg

SEQ ID NO: 130209 - DNA, 20 bp, synthetic construct
  source 1..20: mol_type = other DNA
gttaagaattcagctcaact

SEQ ID NO: 130210 - DNA, 20 bp, synthetic construct
  source 1..20: mol_type = other DNA
agttaagaattcagctcaac

SEQ ID NO: 130211 - DNA, 20 bp, synthetic construct
  source 1..20: mol_type = other DNA
tagttaagaattcagctcaa

SEQ ID NO: 130212 - DNA, 20 bp, synthetic construct
  source 1..20: mol_type = other DNA
ctagttaagaattcagctca

SEQ ID NO: 130213 - DNA, 20 bp, synthetic construct
  source 1..20: mol_type = other DNA
tctagttaagaattcagctc

SEQ ID NO: 130214 - DNA, 20 bp, synthetic construct
  source 1..20: mol_type = other DNA
ctctagttaagaattcagct

SEQ ID NO: 130215 - DNA, 20 bp, synthetic construct
  source 1..20: mol_type = other DNA
actctagttaagaattcagc

SEQ ID NO: 130216 - DNA, 20 bp, synthetic construct
  source 1..20: mol_type = other DNA
aactctagttaagaattcag

SEQ ID NO: 130217 - DNA, 20 bp, synthetic construct
  source 1..20: mol_type = other DNA
caactctagttaagaattca

SEQ ID NO: 130218 - DNA, 20 bp, synthetic construct
  source 1..20: mol_type = other DNA
acaactctagttaagaattc

SEQ ID NO: 130219 - DNA, 20 bp, synthetic construct
  source 1..20: mol_type = other DNA
tacaactctagttaagaatt

SEQ ID NO: 130220 - DNA, 20 bp, synthetic construct
  source 1..20: mol_type = other DNA
ttacaactctagttaagaat

SEQ ID NO: 130221 - DNA, 20 bp, synthetic construct
  source 1..20: mol_type = other DNA
gttacaactctagttaagaa

SEQ ID NO: 130222 - DNA, 20 bp, synthetic construct
  source 1..20: mol_type = other DNA
tgttacaactctagttaaga

SEQ ID NO: 130223 - DNA, 20 bp, synthetic construct
  source 1..20: mol_type = other DNA
ctgttacaactctagttaag

SEQ ID NO: 130224 - DNA, 20 bp, synthetic construct
  source 1..20: mol_type = other DNA
cctgttacaactctagttaa

SEQ ID NO: 130225 - DNA, 20 bp, synthetic construct
  source 1..20: mol_type = other DNA
ccctgttacaactctagtta

SEQ ID NO: 130226 - DNA, 20 bp, synthetic construct
  source 1..20: mol_type = other DNA
gccctgttacaactctagtt

SEQ ID NO: 130227 - DNA, 20 bp, synthetic construct
  source 1..20: mol_type = other DNA
cgccctgttacaactctagt

SEQ ID NO: 130228 - DNA, 20 bp, synthetic construct
  source 1..20: mol_type = other DNA
tcgccctgttacaactctag

SEQ ID NO: 130229 - DNA, 20 bp, synthetic construct
  source 1..20: mol_type = other DNA
ctcgccctgttacaactcta

SEQ ID NO: 130230 - DNA, 20 bp, synthetic construct
  source 1..20: mol_type = other DNA
cctcgccctgttacaactct

SEQ ID NO: 130231 - DNA, 20 bp, synthetic construct
  source 1..20: mol_type = other DNA
gcctcgccctgttacaactc

SEQ ID NO: 130232 - DNA, 20 bp, synthetic construct
  source 1..20: mol_type = other DNA
ggcctcgccctgttacaact

SEQ ID NO: 130233 - DNA, 20 bp, synthetic construct
  source 1..20: mol_type = other DNA
gggcctcgccctgttacaac

SEQ ID NO: 130234 - DNA, 20 bp, synthetic construct
  source 1..20: mol_type = other DNA
agggcctcgccctgttacaa

SEQ ID NO: 130235 - DNA, 20 bp, synthetic construct
  source 1..20: mol_type = other DNA
aagggcctcgccctgttaca

SEQ ID NO: 130236 - DNA, 20 bp, synthetic construct
  source 1..20: mol_type = other DNA
taagggcctcgccctgttac

SEQ ID NO: 130237 - DNA, 20 bp, synthetic construct
  source 1..20: mol_type = other DNA
gtaagggcctcgccctgtta

SEQ ID NO: 130238 - DNA, 20 bp, synthetic construct
  source 1..20: mol_type = other DNA
tgtaagggcctcgccctgtt

SEQ ID NO: 130239 - DNA, 20 bp, synthetic construct
  source 1..20: mol_type = other DNA
atgtaagggcctcgccctgt

SEQ ID NO: 130240 - DNA, 20 bp, synthetic construct
  source 1..20: mol_type = other DNA
catgtaagggcctcgccctg

SEQ ID NO: 130241 - DNA, 20 bp, synthetic construct
  source 1..20: mol_type = other DNA
gcatgtaagggcctcgccct

SEQ ID NO: 130242 - DNA, 20 bp, synthetic construct
  source 1..20: mol_type = other DNA
tgcatgtaagggcctcgccc

SEQ ID NO: 130243 - DNA, 20 bp, synthetic construct
  source 1..20: mol_type = other DNA
ctgcatgtaagggcctcgcc

SEQ ID NO: 130244 - DNA, 20 bp, synthetic construct
  source 1..20: mol_type = other DNA
tctgcatgtaagggcctcgc

SEQ ID NO: 130245 - DNA, 20 bp, synthetic construct
  source 1..20: mol_type = other DNA
gtctgcatgtaagggcctcg

SEQ ID NO: 130246 - DNA, 20 bp, synthetic construct
  source 1..20: mol_type = other DNA
ggtctgcatgtaagggcctc

SEQ ID NO: 130247 - DNA, 20 bp, synthetic construct
  source 1..20: mol_type = other DNA
tggtctgcatgtaagggcct

SEQ ID NO: 130248 - DNA, 20 bp, synthetic construct
  source 1..20: mol_type = other DNA
gtggtctgcatgtaagggcc

SEQ ID NO: 130249 - DNA, 20 bp, synthetic construct
  source 1..20: mol_type = other DNA
ggtggtctgcatgtaagggc

SEQ ID NO: 130250 - DNA, 20 bp, synthetic construct
  source 1..20: mol_type = other DNA
aggtggtctgcatgtaaggg

SEQ ID NO: 130251 - DNA, 20 bp, synthetic construct
  source 1..20: mol_type = other DNA
caggtggtctgcatgtaagg

SEQ ID NO: 130252 - DNA, 20 bp, synthetic construct
  source 1..20: mol_type = other DNA
acaggtggtctgcatgtaag

SEQ ID NO: 130253 - DNA, 20 bp, synthetic construct
  source 1..20: mol_type = other DNA
cacaggtggtctgcatgtaa

SEQ ID NO: 130254 - DNA, 20 bp, synthetic construct
  source 1..20: mol_type = other DNA
acacaggtggtctgcatgta

SEQ ID NO: 130255 - DNA, 20 bp, synthetic construct
  source 1..20: mol_type = other DNA
cacacaggtggtctgcatgt

SEQ ID NO: 130256 - DNA, 20 bp, synthetic construct
  source 1..20: mol_type = other DNA
ccacacaggtggtctgcatg

SEQ ID NO: 130257 - DNA, 20 bp, synthetic construct
  source 1..20: mol_type = other DNA
tccacacaggtggtctgcat

SEQ ID NO: 130258 - DNA, 20 bp, synthetic construct
  source 1..20: mol_type = other DNA
atccacacaggtggtctgca

SEQ ID NO: 130259 - DNA, 20 bp, synthetic construct
  source 1..20: mol_type = other DNA
aatccacacaggtggtctgc

SEQ ID NO: 130260 - DNA, 20 bp, synthetic construct
  source 1..20: mol_type = other DNA
taatccacacaggtggtctg

SEQ ID NO: 130261 - DNA, 20 bp, synthetic construct
  source 1..20: mol_type = other DNA
ttaatccacacaggtggtct

SEQ ID NO: 130262 - DNA, 20 bp, synthetic construct
  source 1..20: mol_type = other DNA
cttaatccacacaggtggtc

SEQ ID NO: 130263 - DNA, 20 bp, synthetic construct
  source 1..20: mol_type = other DNA
tcttaatccacacaggtggt

SEQ ID NO: 130264 - DNA, 20 bp, synthetic construct
  source 1..20: mol_type = other DNA
atcttaatccacacaggtgg

SEQ ID NO: 130265 - DNA, 20 bp, synthetic construct
  source 1..20: mol_type = other DNA
tatcttaatccacacaggtg

SEQ ID NO: 130266 - DNA, 20 bp, synthetic construct
  source 1..20: mol_type = other DNA
ttatcttaatccacacaggt

SEQ ID NO: 130267 - DNA, 20 bp, synthetic construct
  source 1..20: mol_type = other DNA
cttatcttaatccacacagg

SEQ ID NO: 130268 - DNA, 20 bp, synthetic construct
  source 1..20: mol_type = other DNA
tcttatcttaatccacacag

SEQ ID NO: 130269 - DNA, 20 bp, synthetic construct
  source 1..20: mol_type = other DNA
gtcttatcttaatccacaca

SEQ ID NO: 130270 - DNA, 20 bp, synthetic construct
  source 1..20: mol_type = other DNA
tgtcttatcttaatccacac

SEQ ID NO: 130271 - DNA, 20 bp, synthetic construct
  source 1..20: mol_type = other DNA
atgtcttatcttaatccaca

SEQ ID NO: 130272 - DNA, 20 bp, synthetic construct
  source 1..20: mol_type = other DNA
tatgtcttatcttaatccac

SEQ ID NO: 130273 - DNA, 20 bp, synthetic construct
  source 1..20: mol_type = other DNA
ttatgtcttatcttaatcca

SEQ ID NO: 130274 - DNA, 20 bp, synthetic construct
  source 1..20: mol_type = other DNA
tttatgtcttatcttaatcc

SEQ ID NO: 130275 - DNA, 20 bp, synthetic construct
  source 1..20: mol_type = other DNA
ctttatgtcttatcttaatc

SEQ ID NO: 130276 - DNA, 20 bp, synthetic construct
  source 1..20: mol_type = other DNA
actttatgtcttatcttaat

SEQ ID NO: 130277 - DNA, 20 bp, synthetic construct
  source 1..20: mol_type = other DNA
tactttatgtcttatcttaa

SEQ ID NO: 130278 - DNA, 20 bp, synthetic construct
  source 1..20: mol_type = other DNA
ttactttatgtcttatctta

SEQ ID NO: 130279 - DNA, 20 bp, synthetic construct
  source 1..20: mol_type = other DNA
attactttatgtcttatctt

SEQ ID NO: 130280 - DNA, 20 bp, synthetic construct
  source 1..20: mol_type = other DNA
gattactttatgtcttatct

SEQ ID NO: 130281 - DNA, 20 bp, synthetic construct
  source 1..20: mol_type = other DNA
agattactttatgtcttatc

SEQ ID NO: 130282 - DNA, 20 bp, synthetic construct
  source 1..20: mol_type = other DNA
aagattactttatgtcttat

SEQ ID NO: 130283 - DNA, 20 bp, synthetic construct
  source 1..20: mol_type = other DNA
aaagattactttatgtctta

SEQ ID NO: 130284 - DNA, 20 bp, synthetic construct
  source 1..20: mol_type = other DNA
aaaagattactttatgtctt

SEQ ID NO: 130285 - DNA, 20 bp, synthetic construct
  source 1..20: mol_type = other DNA
taaaagattactttatgtct

SEQ ID NO: 130286 - DNA, 20 bp, synthetic construct
  source 1..20: mol_type = other DNA
ttaaaagattactttatgtc

SEQ ID NO: 130287 - DNA, 20 bp, synthetic construct
  source 1..20: mol_type = other DNA
tttaaaagattactttatgt

SEQ ID NO: 130288 - DNA, 20 bp, synthetic construct
  source 1..20: mol_type = other DNA
ttttaaaagattactttatg

SEQ ID NO: 130289 - DNA, 20 bp, synthetic construct
  source 1..20: mol_type = other DNA
cttttaaaagattactttat

SEQ ID NO: 130290 - DNA, 20 bp, synthetic construct
  source 1..20: mol_type = other DNA
tcttttaaaagattacttta

SEQ ID NO: 130291 - DNA, 20 bp, synthetic construct
  source 1..20: mol_type = other DNA
ttcttttaaaagattacttt

SEQ ID NO: 130292 - DNA, 20 bp, synthetic construct
  source 1..20: mol_type = other DNA
gttcttttaaaagattactt

SEQ ID NO: 130293 - DNA, 20 bp, synthetic construct
  source 1..20: mol_type = other DNA
agttcttttaaaagattact

SEQ ID NO: 130294 - DNA, 20 bp, synthetic construct
  source 1..20: mol_type = other DNA
tagttcttttaaaagattac

SEQ ID NO: 130295 - DNA, 20 bp, synthetic construct
  source 1..20: mol_type = other DNA
atagttcttttaaaagatta

SEQ ID NO: 130296 - DNA, 20 bp, synthetic construct
  source 1..20: mol_type = other DNA
aatagttcttttaaaagatt

SEQ ID NO: 130297 - DNA, 20 bp, synthetic construct
  source 1..20: mol_type = other DNA
taatagttcttttaaaagat

SEQ ID NO: 130298 - DNA, 20 bp, synthetic construct
  source 1..20: mol_type = other DNA
ataatagttcttttaaaaga

SEQ ID NO: 130299 - DNA, 20 bp, synthetic construct
  source 1..20: mol_type = other DNA
aataatagttcttttaaaag

SEQ ID NO: 130300 - DNA, 20 bp, synthetic construct
  source 1..20: mol_type = other DNA
aaataatagttcttttaaaa

SEQ ID NO: 130301 - DNA, 20 bp, synthetic construct
  source 1..20: mol_type = other DNA
taaataatagttcttttaaa

SEQ ID NO: 130302 - DNA, 20 bp, synthetic construct
  source 1..20: mol_type = other DNA
ctaaataatagttcttttaa

SEQ ID NO: 130303 - DNA, 20 bp, synthetic construct
  source 1..20: mol_type = other DNA
tctaaataatagttctttta

SEQ ID NO: 130304 - DNA, 20 bp, synthetic construct
  source 1..20: mol_type = other DNA
ttctaaataatagttctttt

SEQ ID NO: 130305 - DNA, 20 bp, synthetic construct
  source 1..20: mol_type = other DNA
tttctaaataatagttcttt

SEQ ID NO: 130306 - DNA, 20 bp, synthetic construct
  source 1..20: mol_type = other DNA
gtttctaaataatagttctt

SEQ ID NO: 130307 - DNA, 20 bp, synthetic construct
  source 1..20: mol_type = other DNA
ggtttctaaataatagttct

SEQ ID NO: 130308 - DNA, 20 bp, synthetic construct
  source 1..20: mol_type = other DNA
aggtttctaaataatagttc

SEQ ID NO: 130309 - DNA, 20 bp, synthetic construct
  source 1..20: mol_type = other DNA
caggtttctaaataatagtt

SEQ ID NO: 130310 - DNA, 20 bp, synthetic construct
  source 1..20: mol_type = other DNA
ccaggtttctaaataatagt

SEQ ID NO: 130311 - DNA, 20 bp, synthetic construct
  source 1..20: mol_type = other DNA
accaggtttctaaataatag

SEQ ID NO: 130312 - DNA, 20 bp, synthetic construct
  source 1..20: mol_type = other DNA
taccaggtttctaaataata

SEQ ID NO: 130313 - DNA, 20 bp, synthetic construct
  source 1..20: mol_type = other DNA
ataccaggtttctaaataat

SEQ ID NO: 130314 - DNA, 20 bp, synthetic construct
  source 1..20: mol_type = other DNA
tataccaggtttctaaataa

SEQ ID NO: 130315 - DNA, 20 bp, synthetic construct
  source 1..20: mol_type = other DNA
atataccaggtttctaaata

SEQ ID NO: 130316 - DNA, 20 bp, synthetic construct
  source 1..20: mol_type = other DNA
catataccaggtttctaaat

SEQ ID NO: 130317 - DNA, 20 bp, synthetic construct
  source 1..20: mol_type = other DNA
gcatataccaggtttctaaa

SEQ ID NO: 130318 - DNA, 20 bp, synthetic construct
  source 1..20: mol_type = other DNA
agcatataccaggtttctaa

SEQ ID NO: 130319 - DNA, 20 bp, synthetic construct
  source 1..20: mol_type = other DNA
tagcatataccaggtttcta

SEQ ID NO: 130320 - DNA, 20 bp, synthetic construct
  source 1..20: mol_type = other DNA
gtagcatataccaggtttct

SEQ ID NO: 130321 - DNA, 20 bp, synthetic construct
  source 1..20: mol_type = other DNA
tgtagcatataccaggtttc

SEQ ID NO: 130322 - DNA, 20 bp, synthetic construct
  source 1..20: mol_type = other DNA
atgtagcatataccaggttt

SEQ ID NO: 130323 - DNA, 20 bp, synthetic construct
  source 1..20: mol_type = other DNA
catgtagcatataccaggtt

SEQ ID NO: 130324 - DNA, 20 bp, synthetic construct
  source 1..20: mol_type = other DNA
ccatgtagcatataccaggt

SEQ ID NO: 130325 - DNA, 20 bp, synthetic construct
  source 1..20: mol_type = other DNA
accatgtagcatataccagg

SEQ ID NO: 130326 - DNA, 20 bp, synthetic construct
  source 1..20: mol_type = other DNA
caccatgtagcatataccag

SEQ ID NO: 130327 - DNA, 20 bp, synthetic construct
  source 1..20: mol_type = other DNA
gcaccatgtagcatatacca

SEQ ID NO: 130328 - DNA, 20 bp, synthetic construct
  source 1..20: mol_type = other DNA
agcaccatgtagcatatacc

SEQ ID NO: 130329 - DNA, 20 bp, synthetic construct
  source 1..20: mol_type = other DNA
cagcaccatgtagcatatac

SEQ ID NO: 130330 - DNA, 20 bp, synthetic construct
  source 1..20: mol_type = other DNA
acagcaccatgtagcatata

SEQ ID NO: 130331 - DNA, 20 bp, synthetic construct
  source 1..20: mol_type = other DNA
cacagcaccatgtagcatat

SEQ ID NO: 130332 - DNA, 20 bp, synthetic construct
  source 1..20: mol_type = other DNA
acacagcaccatgtagcata

SEQ ID NO: 130333 - DNA, 20 bp, synthetic construct
  source 1..20: mol_type = other DNA
aacacagcaccatgtagcat

SEQ ID NO: 130334 - DNA, 20 bp, synthetic construct
  source 1..20: mol_type = other DNA
taacacagcaccatgtagca

SEQ ID NO: 130335 - DNA, 20 bp, synthetic construct
  source 1..20: mol_type = other DNA
ataacacagcaccatgtagc

SEQ ID NO: 130336 - DNA, 20 bp, synthetic construct
  source 1..20: mol_type = other DNA
tataacacagcaccatgtag

SEQ ID NO: 130337 - DNA, 20 bp, synthetic construct
  source 1..20: mol_type = other DNA
gtataacacagcaccatgta

SEQ ID NO: 130338 - DNA, 20 bp, synthetic construct
  source 1..20: mol_type = other DNA
agtataacacagcaccatgt

SEQ ID NO: 130339 - DNA, 20 bp, synthetic construct
  source 1..20: mol_type = other DNA
cagtataacacagcaccatg

SEQ ID NO: 130340 - DNA, 20 bp, synthetic construct
  source 1..20: mol_type = other DNA
ccagtataacacagcaccat

SEQ ID NO: 130341 - DNA, 20 bp, synthetic construct
  source 1..20: mol_type = other DNA
cccagtataacacagcacca

SEQ ID NO: 130342 - DNA, 20 bp, synthetic construct
  source 1..20: mol_type = other DNA
acccagtataacacagcacc

SEQ ID NO: 130343 - DNA, 20 bp, synthetic construct
  source 1..20: mol_type = other DNA
aacccagtataacacagcac

SEQ ID NO: 130344 - DNA, 20 bp, synthetic construct
  source 1..20: mol_type = other DNA
aaacccagtataacacagca

SEQ ID NO: 130345 - DNA, 20 bp, synthetic construct
  source 1..20: mol_type = other DNA
caaacccagtataacacagc

SEQ ID NO: 130346 - DNA, 20 bp, synthetic construct
  source 1..20: mol_type = other DNA
tcaaacccagtataacacag

SEQ ID NO: 130347 - DNA, 20 bp, synthetic construct
  source 1..20: mol_type = other DNA
ctcaaacccagtataacaca

SEQ ID NO: 130348 - DNA, 20 bp, synthetic construct
  source 1..20: mol_type = other DNA
tctcaaacccagtataacac

SEQ ID NO: 130349 - DNA, 20 bp, synthetic construct
  source 1..20: mol_type = other DNA
ttctcaaacccagtataaca

SEQ ID NO: 130350 - DNA, 20 bp, synthetic construct
  source 1..20: mol_type = other DNA
tttctcaaacccagtataac

SEQ ID NO: 130351 - DNA, 20 bp, synthetic construct
  source 1..20: mol_type = other DNA
ctttctcaaacccagtataa

SEQ ID NO: 130352 - DNA, 20 bp, synthetic construct
  source 1..20: mol_type = other DNA
tctttctcaaacccagtata

SEQ ID NO: 130353 - DNA, 20 bp, synthetic construct
  source 1..20: mol_type = other DNA
ttctttctcaaacccagtat

SEQ ID NO: 130354 - DNA, 20 bp, synthetic construct
  source 1..20: mol_type = other DNA
attctttctcaaacccagta

SEQ ID NO: 130355 - DNA, 20 bp, synthetic construct
  source 1..20: mol_type = other DNA
cattctttctcaaacccagt

SEQ ID NO: 130356 - DNA, 20 bp, synthetic construct
  source 1..20: mol_type = other DNA
ccattctttctcaaacccag

SEQ ID NO: 130357 - DNA, 20 bp, synthetic construct
  source 1..20: mol_type = other DNA
cccattctttctcaaaccca

SEQ ID NO: 130358 - DNA, 20 bp, synthetic construct
  source 1..20: mol_type = other DNA
tcccattctttctcaaaccc

SEQ ID NO: 130359 - DNA, 20 bp, synthetic construct
  source 1..20: mol_type = other DNA
ttcccattctttctcaaacc

SEQ ID NO: 130360 - DNA, 20 bp, synthetic construct
  source 1..20: mol_type = other DNA
cttcccattctttctcaaac

SEQ ID NO: 130361 - DNA, 20 bp, synthetic construct
  source 1..20: mol_type = other DNA
acttcccattctttctcaaa

SEQ ID NO: 130362 - DNA, 20 bp, synthetic construct
  source 1..20: mol_type = other DNA
cacttcccattctttctcaa

SEQ ID NO: 130363 - DNA, 20 bp, synthetic construct
  source 1..20: mol_type = other DNA
acacttcccattctttctca

SEQ ID NO: 130364 - DNA, 20 bp, synthetic construct
  source 1..20: mol_type = other DNA
aacacttcccattctttctc

SEQ ID NO: 130365 - DNA, 20 bp, synthetic construct
  source 1..20: mol_type = other DNA
taacacttcccattctttct

SEQ ID NO: 130366 - DNA, 20 bp, synthetic construct
  source 1..20: mol_type = other DNA
gtaacacttcccattctttc

SEQ ID NO: 130367 - DNA, 20 bp, synthetic construct
  source 1..20: mol_type = other DNA
tgtaacacttcccattcttt

SEQ ID NO: 130368 - DNA, 20 bp, synthetic construct
  source 1..20: mol_type = other DNA
ttgtaacacttcccattctt

SEQ ID NO: 130369 - DNA, 20 bp, synthetic construct
  source 1..20: mol_type = other DNA
cttgtaacacttcccattct

SEQ ID NO: 130370 - DNA, 20 bp, synthetic construct
  source 1..20: mol_type = other DNA
ccttgtaacacttcccattc

SEQ ID NO: 130371 - DNA, 20 bp, synthetic construct
  source 1..20: mol_type = other DNA
tccttgtaacacttcccatt

SEQ ID NO: 130372 - DNA, 20 bp, synthetic construct
  source 1..20: mol_type = other DNA
atccttgtaacacttcccat

SEQ ID NO: 130373 - DNA, 20 bp, synthetic construct
  source 1..20: mol_type = other DNA
aatccttgtaacacttccca

SEQ ID NO: 130374 - DNA, 20 bp, synthetic construct
  source 1..20: mol_type = other DNA
gaatccttgtaacacttccc

SEQ ID NO: 130375 - DNA, 20 bp, synthetic construct
  source 1..20: mol_type = other DNA
tgaatccttgtaacacttcc

SEQ ID NO: 130376 - DNA, 20 bp, synthetic construct
  source 1..20: mol_type = other DNA
ctgaatccttgtaacacttc

SEQ ID NO: 130377 - DNA, 20 bp, synthetic construct
  source 1..20: mol_type = other DNA
actgaatccttgtaacactt

SEQ ID NO: 130378 - DNA, 20 bp, synthetic construct
  source 1..20: mol_type = other DNA
cactgaatccttgtaacact

SEQ ID NO: 130379 - DNA, 20 bp, synthetic construct
  source 1..20: mol_type = other DNA
ccactgaatccttgtaacac

SEQ ID NO: 130380 - DNA, 20 bp, synthetic construct
  source 1..20: mol_type = other DNA
accactgaatccttgtaaca

SEQ ID NO: 130381 - DNA, 20 bp, synthetic construct
  source 1..20: mol_type = other DNA
aaccactgaatccttgtaac

SEQ ID NO: 130382 - DNA, 20 bp, synthetic construct
  source 1..20: mol_type = other DNA
caaccactgaatccttgtaa

SEQ ID NO: 130383 - DNA, 20 bp, synthetic construct
  source 1..20: mol_type = other DNA
ccaaccactgaatccttgta

SEQ ID NO: 130384 - DNA, 20 bp, synthetic construct
  source 1..20: mol_type = other DNA
tccaaccactgaatccttgt

SEQ ID NO: 130385 - DNA, 20 bp, synthetic construct
  source 1..20: mol_type = other DNA
ttccaaccactgaatccttg

SEQ ID NO: 130386 - DNA, 20 bp, synthetic construct
  source 1..20: mol_type = other DNA
tttccaaccactgaatcctt

SEQ ID NO: 130387 - DNA, 20 bp, synthetic construct
  source 1..20: mol_type = other DNA
atttccaaccactgaatcct

SEQ ID NO: 130388 - DNA, 20 bp, synthetic construct
  source 1..20: mol_type = other DNA
aatttccaaccactgaatcc

SEQ ID NO: 130389 - DNA, 20 bp, synthetic construct
  source 1..20: mol_type = other DNA
taatttccaaccactgaatc

SEQ ID NO: 130390 - DNA, 20 bp, synthetic construct
  source 1..20: mol_type = other DNA
ttaatttccaaccactgaat

SEQ ID NO: 130391 - DNA, 20 bp, synthetic construct
  source 1..20: mol_type = other DNA
cttaatttccaaccactgaa

SEQ ID NO: 130392 - DNA, 20 bp, synthetic construct
  source 1..20: mol_type = other DNA
ccttaatttccaaccactga

SEQ ID NO: 130393 - DNA, 20 bp, synthetic construct
  source 1..20: mol_type = other DNA
tccttaatttccaaccactg

SEQ ID NO: 130394 - DNA, 20 bp, synthetic construct
  source 1..20: mol_type = other DNA
ttccttaatttccaaccact

SEQ ID NO: 130395 - DNA, 20 bp, synthetic construct
  source 1..20: mol_type = other DNA
cttccttaatttccaaccac

SEQ ID NO: 130396 - DNA, 20 bp, synthetic construct
  source 1..20: mol_type = other DNA
tcttccttaatttccaacca

SEQ ID NO: 130397 - DNA, 20 bp, synthetic construct
  source 1..20: mol_type = other DNA
atcttccttaatttccaacc

SEQ ID NO: 130398 - DNA, 20 bp, synthetic construct
  source 1..20: mol_type = other DNA
tatcttccttaatttccaac

SEQ ID NO: 130399 - DNA, 20 bp, synthetic construct
  source 1..20: mol_type = other DNA
ctatcttccttaatttccaa

SEQ ID NO: 130400 - DNA, 20 bp, synthetic construct
  source 1..20: mol_type = other DNA
tctatcttccttaatttcca

SEQ ID NO: 130401 - DNA, 20 bp, synthetic construct
  source 1..20: mol_type = other DNA
ttctatcttccttaatttcc

SEQ ID NO: 130402 - DNA, 20 bp, synthetic construct
  source 1..20: mol_type = other DNA
tttctatcttccttaatttc

SEQ ID NO: 130403 - DNA, 20 bp, synthetic construct
  source 1..20: mol_type = other DNA
ctttctatcttccttaattt

SEQ ID NO: 130404 - DNA, 20 bp, synthetic construct
  source 1..20: mol_type = other DNA
actttctatcttccttaatt

SEQ ID NO: 130405 - DNA, 20 bp, synthetic construct
  source 1..20: mol_type = other DNA
aactttctatcttccttaat

SEQ ID NO: 130406 - DNA, 20 bp, synthetic construct
  source 1..20: mol_type = other DNA
taactttctatcttccttaa

SEQ ID NO: 130407 - DNA, 20 bp, synthetic construct
  source 1..20: mol_type = other DNA
ctaactttctatcttcctta

SEQ ID NO: 130408 - DNA, 20 bp, synthetic construct
  source 1..20: mol_type = other DNA
actaactttctatcttcctt

SEQ ID NO: 130409 - DNA, 20 bp, synthetic construct
  source 1..20: mol_type = other DNA
cactaactttctatcttcct

SEQ ID NO: 130410 - DNA, 20 bp, synthetic construct
  source 1..20: mol_type = other DNA
acactaactttctatcttcc

SEQ ID NO: 130411 - DNA, 20 bp, synthetic construct
  source 1..20: mol_type = other DNA
aacactaactttctatcttc

SEQ ID NO: 130412 - DNA, 20 bp, synthetic construct
  source 1..20: mol_type = other DNA
caacactaactttctatctt

SEQ ID NO: 130413 - DNA, 20 bp, synthetic construct
  source 1..20: mol_type = other DNA
ccaacactaactttctatct

SEQ ID NO: 130414 - DNA, 20 bp, synthetic construct
  source 1..20: mol_type = other DNA
tccaacactaactttctatc

SEQ ID NO: 130415 - DNA, 20 bp, synthetic construct
  source 1..20: mol_type = other DNA
atccaacactaactttctat

SEQ ID NO: 130416 - DNA, 20 bp, synthetic construct
  source 1..20: mol_type = other DNA
gatccaacactaactttcta

SEQ ID NO: 130417 - DNA, 20 bp, synthetic construct
  source 1..20: mol_type = other DNA
agatccaacactaactttct

SEQ ID NO: 130418 - DNA, 20 bp, synthetic construct
  source 1..20: mol_type = other DNA
cagatccaacactaactttc

SEQ ID NO: 130419 - DNA, 20 bp, synthetic construct
  source 1..20: mol_type = other DNA
acagatccaacactaacttt

SEQ ID NO: 130420 - DNA, 20 bp, synthetic construct
  source 1..20: mol_type = other DNA
aacagatccaacactaactt

SEQ ID NO: 130421 - DNA, 20 bp, synthetic construct
  source 1..20: mol_type = other DNA
aaacagatccaacactaact

SEQ ID NO: 130422 - DNA, 20 bp, synthetic construct
  source 1..20: mol_type = other DNA
aaaacagatccaacactaac

SEQ ID NO: 130423 - DNA, 20 bp, synthetic construct
  source 1..20: mol_type = other DNA
caaaacagatccaacactaa

SEQ ID NO: 130424 - DNA, 20 bp, synthetic construct
  source 1..20: mol_type = other DNA
ccaaaacagatccaacacta

SEQ ID NO: 130425 - DNA, 20 bp, synthetic construct
  source 1..20: mol_type = other DNA
gccaaaacagatccaacact

SEQ ID NO: 130426 - DNA, 20 bp, synthetic construct
  source 1..20: mol_type = other DNA
agccaaaacagatccaacac

SEQ ID NO: 130427 - DNA, 20 bp, synthetic construct
  source 1..20: mol_type = other DNA
gagccaaaacagatccaaca

SEQ ID NO: 130428 - DNA, 20 bp, synthetic construct
  source 1..20: mol_type = other DNA
agagccaaaacagatccaac

SEQ ID NO: 130429 - DNA, 20 bp, synthetic construct
  source 1..20: mol_type = other DNA
aagagccaaaacagatccaa

SEQ ID NO: 130430 - DNA, 20 bp, synthetic construct
  source 1..20: mol_type = other DNA
aaagagccaaaacagatcca

SEQ ID NO: 130431 - DNA, 20 bp, synthetic construct
  source 1..20: mol_type = other DNA
caaagagccaaaacagatcc

SEQ ID NO: 130432 - DNA, 20 bp, synthetic construct
  source 1..20: mol_type = other DNA
ccaaagagccaaaacagatc

SEQ ID NO: 130433 - DNA, 20 bp, synthetic construct
  source 1..20: mol_type = other DNA
accaaagagccaaaacagat

SEQ ID NO: 130434 - DNA, 20 bp, synthetic construct
  source 1..20: mol_type = other DNA
gaccaaagagccaaaacaga

SEQ ID NO: 130435 - DNA, 20 bp, synthetic construct
  source 1..20: mol_type = other DNA
tgaccaaagagccaaaacag

SEQ ID NO: 130436 - DNA, 20 bp, synthetic construct
  source 1..20: mol_type = other DNA
atgaccaaagagccaaaaca

SEQ ID NO: 130437 - DNA, 20 bp, synthetic construct
  source 1..20: mol_type = other DNA
catgaccaaagagccaaaac

SEQ ID NO: 130438 - DNA, 20 bp, synthetic construct
  source 1..20: mol_type = other DNA
gcatgaccaaagagccaaaa

SEQ ID NO: 130439 - DNA, 20 bp, synthetic construct
  source 1..20: mol_type = other DNA
ggcatgaccaaagagccaaa

SEQ ID NO: 130440 - DNA, 20 bp, synthetic construct
  source 1..20: mol_type = other DNA
aggcatgaccaaagagccaa

SEQ ID NO: 130441 - DNA, 20 bp, synthetic construct
  source 1..20: mol_type = other DNA
aaggcatgaccaaagagcca

SEQ ID NO: 130442 - DNA, 20 bp, synthetic construct
  source 1..20: mol_type = other DNA
aaaggcatgaccaaagagcc

SEQ ID NO: 130443 - DNA, 20 bp, synthetic construct
  source 1..20: mol_type = other DNA
caaaggcatgaccaaagagc

SEQ ID NO: 130444 - DNA, 20 bp, synthetic construct
  source 1..20: mol_type = other DNA
acaaaggcatgaccaaagag

SEQ ID NO: 130445 - DNA, 20 bp, synthetic construct
  source 1..20: mol_type = other DNA
aacaaaggcatgaccaaaga

SEQ ID NO: 130446 - DNA, 20 bp, synthetic construct
  source 1..20: mol_type = other DNA
aaacaaaggcatgaccaaag

SEQ ID NO: 130447 - DNA, 20 bp, synthetic construct
  source 1..20: mol_type = other DNA
aaaacaaaggcatgaccaaa

SEQ ID NO: 130448 - DNA, 20 bp, synthetic construct
  source 1..20: mol_type = other DNA
aaaaacaaaggcatgaccaa

SEQ ID NO: 130449 - DNA, 20 bp, synthetic construct
  source 1..20: mol_type = other DNA
gaaaaacaaaggcatgacca

SEQ ID NO: 130450 - DNA, 20 bp, synthetic construct
  source 1..20: mol_type = other DNA
agaaaaacaaaggcatgacc

SEQ ID NO: 130451 - DNA, 20 bp, synthetic construct
  source 1..20: mol_type = other DNA
gagaaaaacaaaggcatgac

SEQ ID NO: 130452 - DNA, 20 bp, synthetic construct
  source 1..20: mol_type = other DNA
tgagaaaaacaaaggcatga

SEQ ID NO: 130453 - DNA, 20 bp, synthetic construct
  source 1..20: mol_type = other DNA
ttgagaaaaacaaaggcatg

SEQ ID NO: 130454 - DNA, 20 bp, synthetic construct
  source 1..20: mol_type = other DNA
tttgagaaaaacaaaggcat

SEQ ID NO: 130455 - DNA, 20 bp, synthetic construct
  source 1..20: mol_type = other DNA
ttttgagaaaaacaaaggca

SEQ ID NO: 130456 - DNA, 20 bp, synthetic construct
  source 1..20: mol_type = other DNA
attttgagaaaaacaaaggc

SEQ ID NO: 130457 - DNA, 20 bp, synthetic construct
  source 1..20: mol_type = other DNA
cattttgagaaaaacaaagg

SEQ ID NO: 130458 - DNA, 20 bp, synthetic construct
  source 1..20: mol_type = other DNA
tcattttgagaaaaacaaag

SEQ ID NO: 130459 - DNA, 20 bp, synthetic construct
  source 1..20: mol_type = other DNA
ttcattttgagaaaaacaaa

SEQ ID NO: 130460 - DNA, 20 bp, synthetic construct
  source 1..20: mol_type = other DNA
attcattttgagaaaaacaa

SEQ ID NO: 130461 - DNA, 20 bp, synthetic construct
  source 1..20: mol_type = other DNA
cattcattttgagaaaaaca

SEQ ID NO: 130462 - DNA, 20 bp, synthetic construct
  source 1..20: mol_type = other DNA
gcattcattttgagaaaaac

SEQ ID NO: 130463 - DNA, 20 bp, synthetic construct
  source 1..20: mol_type = other DNA
tgcattcattttgagaaaaa

SEQ ID NO: 130464 - DNA, 20 bp, synthetic construct
  source 1..20: mol_type = other DNA
ctgcattcattttgagaaaa

SEQ ID NO: 130465 - DNA, 20 bp, synthetic construct
  source 1..20: mol_type = other DNA
actgcattcattttgagaaa

SEQ ID NO: 130466 - DNA, 20 bp, synthetic construct
  source 1..20: mol_type = other DNA
cactgcattcattttgagaa

SEQ ID NO: 130467 - DNA, 20 bp, synthetic construct
  source 1..20: mol_type = other DNA
gcactgcattcattttgaga

SEQ ID NO: 130468 - DNA, 20 bp, synthetic construct
  source 1..20: mol_type = other DNA
ggcactgcattcattttgag

SEQ ID NO: 130469 - DNA, 20 bp, synthetic construct
  source 1..20: mol_type = other DNA
gggcactgcattcattttga

SEQ ID NO: 130470 - DNA, 20 bp, synthetic construct
  source 1..20: mol_type = other DNA
cgggcactgcattcattttg

SEQ ID NO: 130471 - DNA, 20 bp, synthetic construct
  source 1..20: mol_type = other DNA
acgggcactgcattcatttt

SEQ ID NO: 130472 - DNA, 20 bp, synthetic construct
  source 1..20: mol_type = other DNA
gacgggcactgcattcattt

SEQ ID NO: 130473 - DNA, 20 bp, synthetic construct
  source 1..20: mol_type = other DNA
ggacgggcactgcattcatt

SEQ ID NO: 130474 - DNA, 20 bp, synthetic construct
  source 1..20: mol_type = other DNA
gggacgggcactgcattcat

SEQ ID NO: 130475 - DNA, 20 bp, synthetic construct
  source 1..20: mol_type = other DNA
tgggacgggcactgcattca

SEQ ID NO: 130476 - DNA, 20 bp, synthetic construct
  source 1..20: mol_type = other DNA
ctgggacgggcactgcattc

SEQ ID NO: 130477 - DNA, 20 bp, synthetic construct
  source 1..20: mol_type = other DNA
tctgggacgggcactgcatt

SEQ ID NO: 130478 - DNA, 20 bp, synthetic construct
  source 1..20: mol_type = other DNA
ttctgggacgggcactgcat

SEQ ID NO: 130479 - DNA, 20 bp, synthetic construct
  source 1..20: mol_type = other DNA
tttctgggacgggcactgca

SEQ ID NO: 130480 - DNA, 20 bp, synthetic construct
  source 1..20: mol_type = other DNA
ttttctgggacgggcactgc

SEQ ID NO: 130481 - DNA, 20 bp, synthetic construct
  source 1..20: mol_type = other DNA
attttctgggacgggcactg

SEQ ID NO: 130482 - DNA, 20 bp, synthetic construct
  source 1..20: mol_type = other DNA
tattttctgggacgggcact

SEQ ID NO: 130483 - DNA, 20 bp, synthetic construct
  source 1..20: mol_type = other DNA
gtattttctgggacgggcac

SEQ ID NO: 130484 - DNA, 20 bp, synthetic construct
  source 1..20: mol_type = other DNA
ggtattttctgggacgggca

SEQ ID NO: 130485 - DNA, 20 bp, synthetic construct
  source 1..20: mol_type = other DNA
tggtattttctgggacgggc

SEQ ID NO: 130486 - DNA, 20 bp, synthetic construct
  source 1..20: mol_type = other DNA
atggtattttctgggacggg

SEQ ID NO: 130487 - DNA, 20 bp, synthetic construct
  source 1..20: mol_type = other DNA
tatggtattttctgggacgg

SEQ ID NO: 130488 - DNA, 20 bp, synthetic construct
  source 1..20: mol_type = other DNA
atatggtattttctgggacg

SEQ ID NO: 130489 - DNA, 20 bp, synthetic construct
  source 1..20: mol_type = other DNA
catatggtattttctgggac

SEQ ID NO: 130490 - DNA, 20 bp, synthetic construct
  source 1..20: mol_type = other DNA
tcatatggtattttctggga

SEQ ID NO: 130491 - DNA, 20 bp, synthetic construct
  source 1..20: mol_type = other DNA
ctcatatggtattttctggg

SEQ ID NO: 130492 - DNA, 20 bp, synthetic construct
  source 1..20: mol_type = other DNA
tctcatatggtattttctgg

SEQ ID NO: 130493 - DNA, 20 bp, synthetic construct
  source 1..20: mol_type = other DNA
ttctcatatggtattttctg

SEQ ID NO: 130494 - DNA, 20 bp, synthetic construct
  source 1..20: mol_type = other DNA
cttctcatatggtattttct

SEQ ID NO: 130495 - DNA, 20 bp, synthetic construct
  source 1..20: mol_type = other DNA
gcttctcatatggtattttc

SEQ ID NO: 130496 - DNA, 20 bp, synthetic construct
  source 1..20: mol_type = other DNA
cgcttctcatatggtatttt

SEQ ID NO: 130497 - DNA, 20 bp, synthetic construct
  source 1..20: mol_type = other DNA
tcgcttctcatatggtattt

SEQ ID NO: 130498 - DNA, 20 bp, synthetic construct
  source 1..20: mol_type = other DNA
atcgcttctcatatggtatt

SEQ ID NO: 130499 - DNA, 20 bp, synthetic construct
  source 1..20: mol_type = other DNA
aatcgcttctcatatggtat

SEQ ID NO: 130500 - DNA, 20 bp, synthetic construct
  source 1..20: mol_type = other DNA
aaatcgcttctcatatggta

SEQ ID NO: 130501 - DNA, 20 bp, synthetic construct
  source 1..20: mol_type = other DNA
gaaatcgcttctcatatggt

SEQ ID NO: 130502 - DNA, 20 bp, synthetic construct
  source 1..20: mol_type = other DNA
tgaaatcgcttctcatatgg

SEQ ID NO: 130503 - DNA, 20 bp, synthetic construct
  source 1..20: mol_type = other DNA
atgaaatcgcttctcatatg

SEQ ID NO: 130504 - DNA, 20 bp, synthetic construct
  source 1..20: mol_type = other DNA
tatgaaatcgcttctcatat

SEQ ID NO: 130505 - DNA, 20 bp, synthetic construct
  source 1..20: mol_type = other DNA
ttatgaaatcgcttctcata

SEQ ID NO: 130506 - DNA, 20 bp, synthetic construct
  source 1..20: mol_type = other DNA
attatgaaatcgcttctcat

SEQ ID NO: 130507 - DNA, 20 bp, synthetic construct
  source 1..20: mol_type = other DNA
cattatgaaatcgcttctca

SEQ ID NO: 130508 - DNA, 20 bp, synthetic construct
  source 1..20: mol_type = other DNA
gcattatgaaatcgcttctc

SEQ ID NO: 130509 - DNA, 20 bp, synthetic construct
  source 1..20: mol_type = other DNA
agcattatgaaatcgcttct

SEQ ID NO: 130510 - DNA, 20 bp, synthetic construct
  source 1..20: mol_type = other DNA
cagcattatgaaatcgcttc

SEQ ID NO: 130511 - DNA, 20 bp, synthetic construct
  source 1..20: mol_type = other DNA
acagcattatgaaatcgctt

SEQ ID NO: 130512 - DNA, 20 bp, synthetic construct
  source 1..20: mol_type = other DNA
cacagcattatgaaatcgct

SEQ ID NO: 130513 - DNA, 20 bp, synthetic construct
  source 1..20: mol_type = other DNA
tcacagcattatgaaatcgc

SEQ ID NO: 130514 - DNA, 20 bp, synthetic construct
  source 1..20: mol_type = other DNA
ctcacagcattatgaaatcg

SEQ ID NO: 130515 - DNA, 20 bp, synthetic construct
  source 1..20: mol_type = other DNA
tctcacagcattatgaaatc

SEQ ID NO: 130516 - DNA, 20 bp, synthetic construct
  source 1..20: mol_type = other DNA
ctctcacagcattatgaaat

SEQ ID NO: 130517 - DNA, 20 bp, synthetic construct
  source 1..20: mol_type = other DNA
actctcacagcattatgaaa

SEQ ID NO: 130518 - DNA, 20 bp, synthetic construct
  source 1..20: mol_type = other DNA
gactctcacagcattatgaa

SEQ ID NO: 130519 - DNA, 20 bp, synthetic construct
  source 1..20: mol_type = other DNA
agactctcacagcattatga

SEQ ID NO: 130520 - DNA, 20 bp, synthetic construct
  source 1..20: mol_type = other DNA
cagactctcacagcattatg

SEQ ID NO: 130521 - DNA, 20 bp, synthetic construct
  source 1..20: mol_type = other DNA
acagactctcacagcattat

SEQ ID NO: 130522 - DNA, 20 bp, synthetic construct
  source 1..20: mol_type = other DNA
aacagactctcacagcatta

SEQ ID NO: 130523 - DNA, 20 bp, synthetic construct
  source 1..20: mol_type = other DNA
taacagactctcacagcatt

SEQ ID NO: 130524 - DNA, 20 bp, synthetic construct
  source 1..20: mol_type = other DNA
gtaacagactctcacagcat

SEQ ID NO: 130525 - DNA, 20 bp, synthetic construct
  source 1..20: mol_type = other DNA
tgtaacagactctcacagca

SEQ ID NO: 130526 - DNA, 20 bp, synthetic construct
  source 1..20: mol_type = other DNA
ctgtaacagactctcacagc

SEQ ID NO: 130527 - DNA, 20 bp, synthetic construct
  source 1..20: mol_type = other DNA
cctgtaacagactctcacag

SEQ ID NO: 130528 - DNA, 20 bp, synthetic construct
  source 1..20: mol_type = other DNA
ccctgtaacagactctcaca

SEQ ID NO: 130529 - DNA, 20 bp, synthetic construct
  source 1..20: mol_type = other DNA
tccctgtaacagactctcac

SEQ ID NO: 130530 - DNA, 20 bp, synthetic construct
  source 1..20: mol_type = other DNA
gtccctgtaacagactctca

SEQ ID NO: 130531 - DNA, 20 bp, synthetic construct
  source 1..20: mol_type = other DNA
agtccctgtaacagactctc

SEQ ID NO: 130532 - DNA, 20 bp, synthetic construct
  source 1..20: mol_type = other DNA
aagtccctgtaacagactct

SEQ ID NO: 130533 - DNA, 20 bp, synthetic construct
  source 1..20: mol_type = other DNA
caagtccctgtaacagactc

SEQ ID NO: 130534 - DNA, 20 bp, synthetic construct
  source 1..20: mol_type = other DNA
tcaagtccctgtaacagact

SEQ ID NO: 130535 - DNA, 20 bp, synthetic construct
  source 1..20: mol_type = other DNA
atcaagtccctgtaacagac

SEQ ID NO: 130536 - DNA, 20 bp, synthetic construct
  source 1..20: mol_type = other DNA
gatcaagtccctgtaacaga

SEQ ID NO: 130537 - DNA, 20 bp, synthetic construct
  source 1..20: mol_type = other DNA
tgatcaagtccctgtaacag

SEQ ID NO: 130538 - DNA, 20 bp, synthetic construct
  source 1..20: mol_type = other DNA
ttgatcaagtccctgtaaca

SEQ ID NO: 130539 - DNA, 20 bp, synthetic construct
  source 1..20: mol_type = other DNA
cttgatcaagtccctgtaac

SEQ ID NO: 130540 - DNA, 20 bp, synthetic construct
  source 1..20: mol_type = other DNA
acttgatcaagtccctgtaa

SEQ ID NO: 130541 - DNA, 20 bp, synthetic construct
  source 1..20: mol_type = other DNA
gacttgatcaagtccctgta

SEQ ID NO: 130542 - DNA, 20 bp, synthetic construct
  source 1..20: mol_type = other DNA
agacttgatcaagtccctgt

SEQ ID NO: 130543 - DNA, 20 bp, synthetic construct
  source 1..20: mol_type = other DNA
cagacttgatcaagtccctg

SEQ ID NO: 130544 - DNA, 20 bp, synthetic construct
  source 1..20: mol_type = other DNA
tcagacttgatcaagtccct

SEQ ID NO: 130545 - DNA, 20 bp, synthetic construct
  source 1..20: mol_type = other DNA
ctcagacttgatcaagtccc

SEQ ID NO: 130546 - DNA, 20 bp, synthetic construct
  source 1..20: mol_type = other DNA
cctcagacttgatcaagtcc

SEQ ID NO: 130547 - DNA, 20 bp, synthetic construct
  source 1..20: mol_type = other DNA
ccctcagacttgatcaagtc

SEQ ID NO: 130548 - DNA, 20 bp, synthetic construct
  source 1..20: mol_type = other DNA
gccctcagacttgatcaagt

SEQ ID NO: 130549 - DNA, 20 bp, synthetic construct
  source 1..20: mol_type = other DNA
ggccctcagacttgatcaag

SEQ ID NO: 130550 - DNA, 20 bp, synthetic construct
  source 1..20: mol_type = other DNA
tggccctcagacttgatcaa

SEQ ID NO: 130551 - DNA, 20 bp, synthetic construct
  source 1..20: mol_type = other DNA
atggccctcagacttgatca

SEQ ID NO: 130552 - DNA, 20 bp, synthetic construct
  source 1..20: mol_type = other DNA
catggccctcagacttgatc

SEQ ID NO: 130553 - DNA, 20 bp, synthetic construct
  source 1..20: mol_type = other DNA
tcatggccctcagacttgat

SEQ ID NO: 130554 - DNA, 20 bp, synthetic construct
  source 1..20: mol_type = other DNA
ctcatggccctcagacttga

SEQ ID NO: 130555 - DNA, 20 bp, synthetic construct
  source 1..20: mol_type = other DNA
tctcatggccctcagacttg

SEQ ID NO: 130556 - DNA, 20 bp, synthetic construct
  source 1..20: mol_type = other DNA
ctctcatggccctcagactt

SEQ ID NO: 130557 - DNA, 20 bp, synthetic construct
  source 1..20: mol_type = other DNA
tctctcatggccctcagact

SEQ ID NO: 130558 - DNA, 20 bp, synthetic construct
  source 1..20: mol_type = other DNA
ttctctcatggccctcagac

SEQ ID NO: 130559 - DNA, 20 bp, synthetic construct
  source 1..20: mol_type = other DNA
tttctctcatggccctcaga

SEQ ID NO: 130560 - DNA, 20 bp, synthetic construct
  source 1..20: mol_type = other DNA
ctttctctcatggccctcag

SEQ ID NO: 130561 - DNA, 20 bp, synthetic construct
  source 1..20: mol_type = other DNA
actttctctcatggccctca

SEQ ID NO: 130562 - DNA, 20 bp, synthetic construct
  source 1..20: mol_type = other DNA
gactttctctcatggccctc

SEQ ID NO: 130563 - DNA, 20 bp, synthetic construct
  source 1..20: mol_type = other DNA
ggactttctctcatggccct

SEQ ID NO: 130564 - DNA, 20 bp, synthetic construct
  source 1..20: mol_type = other DNA
gggactttctctcatggccc

SEQ ID NO: 130565 - DNA, 20 bp, synthetic construct
  source 1..20: mol_type = other DNA
agggactttctctcatggcc

SEQ ID NO: 130566 - DNA, 20 bp, synthetic construct
  source 1..20: mol_type = other DNA
gagggactttctctcatggc

SEQ ID NO: 130567 - DNA, 20 bp, synthetic construct
  source 1..20: mol_type = other DNA
agagggactttctctcatgg

SEQ ID NO: 130568 - DNA, 20 bp, synthetic construct
  source 1..20: mol_type = other DNA
cagagggactttctctcatg

SEQ ID NO: 130569 - DNA, 20 bp, synthetic construct
  source 1..20: mol_type = other DNA
tcagagggactttctctcat

SEQ ID NO: 130570 - DNA, 20 bp, synthetic construct
  source 1..20: mol_type = other DNA
ctcagagggactttctctca

SEQ ID NO: 130571 - DNA, 20 bp, synthetic construct
  source 1..20: mol_type = other DNA
cctcagagggactttctctc

SEQ ID NO: 130572 - DNA, 20 bp, synthetic construct
  source 1..20: mol_type = other DNA
tcctcagagggactttctct

SEQ ID NO: 130573 - DNA, 20 bp, synthetic construct
  source 1..20: mol_type = other DNA
ttcctcagagggactttctc

SEQ ID NO: 130574 - DNA, 20 bp, synthetic construct
  source 1..20: mol_type = other DNA
cttcctcagagggactttct

SEQ ID NO: 130575 - DNA, 20 bp, synthetic construct
  source 1..20: mol_type = other DNA
acttcctcagagggactttc

SEQ ID NO: 130576 - DNA, 20 bp, synthetic construct
  source 1..20: mol_type = other DNA
aacttcctcagagggacttt

SEQ ID NO: 130577 - DNA, 20 bp, synthetic construct
  source 1..20: mol_type = other DNA
caacttcctcagagggactt

SEQ ID NO: 130578 - DNA, 20 bp, synthetic construct
  source 1..20: mol_type = other DNA
gcaacttcctcagagggact

SEQ ID NO: 130579 - DNA, 20 bp, synthetic construct
  source 1..20: mol_type = other DNA
agcaacttcctcagagggac

SEQ ID NO: 130580 - DNA, 20 bp, synthetic construct
  source 1..20: mol_type = other DNA
aagcaacttcctcagaggga

SEQ ID NO: 130581 - DNA, 20 bp, synthetic construct
  source 1..20: mol_type = other DNA
aaagcaacttcctcagaggg

SEQ ID NO: 130582 - DNA, 20 bp, synthetic construct
  source 1..20: mol_type = other DNA
gaaagcaacttcctcagagg

SEQ ID NO: 130583 - DNA, 20 bp, synthetic construct
  source 1..20: mol_type = other DNA
tgaaagcaacttcctcagag

SEQ ID NO: 130584 - DNA, 20 bp, synthetic construct
  source 1..20: mol_type = other DNA
ttgaaagcaacttcctcaga

SEQ ID NO: 130585 - DNA, 20 bp, synthetic construct
  source 1..20: mol_type = other DNA
cttgaaagcaacttcctcag

SEQ ID NO: 130586 - DNA, 20 bp, synthetic construct
  source 1..20: mol_type = other DNA
gcttgaaagcaacttcctca

SEQ ID NO: 130587 - DNA, 20 bp, synthetic construct
  source 1..20: mol_type = other DNA
agcttgaaagcaacttcctc

SEQ ID NO: 130588 - DNA, 20 bp, synthetic construct
  source 1..20: mol_type = other DNA
cagcttgaaagcaacttcct

SEQ ID NO: 130589 - DNA, 20 bp, synthetic construct
  source 1..20: mol_type = other DNA
tcagcttgaaagcaacttcc

SEQ ID NO: 130590 - DNA, 20 bp, synthetic construct
  source 1..20: mol_type = other DNA
gtcagcttgaaagcaacttc

SEQ ID NO: 130591 - DNA, 20 bp, synthetic construct
  source 1..20: mol_type = other DNA
tgtcagcttgaaagcaactt

SEQ ID NO: 130592 - DNA, 20 bp, synthetic construct
  source 1..20: mol_type = other DNA
gtgtcagcttgaaagcaact

SEQ ID NO: 130593 - DNA, 20 bp, synthetic construct
  source 1..20: mol_type = other DNA
ggtgtcagcttgaaagcaac

SEQ ID NO: 130594 - DNA, 20 bp, synthetic construct
  source 1..20: mol_type = other DNA
aggtgtcagcttgaaagcaa

SEQ ID NO: 130595 - DNA, 20 bp, synthetic construct
  source 1..20: mol_type = other DNA
caggtgtcagcttgaaagca

SEQ ID NO: 130596 - DNA, 20 bp, synthetic construct
  source 1..20: mol_type = other DNA
tcaggtgtcagcttgaaagc

SEQ ID NO: 130597 - DNA, 20 bp, synthetic construct
  source 1..20: mol_type = other DNA
ttcaggtgtcagcttgaaag

SEQ ID NO: 130598 - DNA, 20 bp, synthetic construct
  source 1..20: mol_type = other DNA
cttcaggtgtcagcttgaaa

SEQ ID NO: 130599 - DNA, 20 bp, synthetic construct
  source 1..20: mol_type = other DNA
ccttcaggtgtcagcttgaa

SEQ ID NO: 130600 - DNA, 20 bp, synthetic construct
  source 1..20: mol_type = other DNA
tccttcaggtgtcagcttga

SEQ ID NO: 130601 - DNA, 20 bp, synthetic construct
  source 1..20: mol_type = other DNA
atccttcaggtgtcagcttg

SEQ ID NO: 130602 - DNA, 20 bp, synthetic construct
  source 1..20: mol_type = other DNA
catccttcaggtgtcagctt

SEQ ID NO: 130603 - DNA, 20 bp, synthetic construct
  source 1..20: mol_type = other DNA
tcatccttcaggtgtcagct

SEQ ID NO: 130604 - DNA, 20 bp, synthetic construct
  source 1..20: mol_type = other DNA
ttcatccttcaggtgtcagc

SEQ ID NO: 130605 - DNA, 20 bp, synthetic construct
  source 1..20: mol_type = other DNA
cttcatccttcaggtgtcag

SEQ ID NO: 130606 - DNA, 20 bp, synthetic construct
  source 1..20: mol_type = other DNA
gcttcatccttcaggtgtca

SEQ ID NO: 130607 - DNA, 20 bp, synthetic construct
  source 1..20: mol_type = other DNA
tgcttcatccttcaggtgtc

SEQ ID NO: 130608 - DNA, 20 bp, synthetic construct
  source 1..20: mol_type = other DNA
ctgcttcatccttcaggtgt

SEQ ID NO: 130609 - DNA, 20 bp, synthetic construct
  source 1..20: mol_type = other DNA
tctgcttcatccttcaggtg

SEQ ID NO: 130610 - DNA, 20 bp, synthetic construct
  source 1..20: mol_type = other DNA
ttctgcttcatccttcaggt

SEQ ID NO: 130611 - DNA, 20 bp, synthetic construct
  source 1..20: mol_type = other DNA
attctgcttcatccttcagg

SEQ ID NO: 130612 - DNA, 20 bp, synthetic construct
  source 1..20: mol_type = other DNA
aattctgcttcatccttcag

SEQ ID NO: 130613 - DNA, 20 bp, synthetic construct
  source 1..20: mol_type = other DNA
taattctgcttcatccttca

SEQ ID NO: 130614 - DNA, 20 bp, synthetic construct
  source 1..20: mol_type = other DNA
ataattctgcttcatccttc

SEQ ID NO: 130615 - DNA, 20 bp, synthetic construct
  source 1..20: mol_type = other DNA
gataattctgcttcatcctt

SEQ ID NO: 130616 - DNA, 20 bp, synthetic construct
  source 1..20: mol_type = other DNA
ggataattctgcttcatcct

SEQ ID NO: 130617 - DNA, 20 bp, synthetic construct
  source 1..20: mol_type = other DNA
gggataattctgcttcatcc

SEQ ID NO: 130618 - DNA, 20 bp, synthetic construct
  source 1..20: mol_type = other DNA
tgggataattctgcttcatc

SEQ ID NO: 130619 - DNA, 20 bp, synthetic construct
  source 1..20: mol_type = other DNA
ctgggataattctgcttcat

SEQ ID NO: 130620 - DNA, 20 bp, synthetic construct
  source 1..20: mol_type = other DNA
gctgggataattctgcttca

SEQ ID NO: 130621 - DNA, 20 bp, synthetic construct
  source 1..20: mol_type = other DNA
agctgggataattctgcttc

SEQ ID NO: 130622 - DNA, 20 bp, synthetic construct
  source 1..20: mol_type = other DNA
cagctgggataattctgctt

SEQ ID NO: 130623 - DNA, 20 bp, synthetic construct
  source 1..20: mol_type = other DNA
ccagctgggataattctgct

SEQ ID NO: 130624 - DNA, 20 bp, synthetic construct
  source 1..20: mol_type = other DNA
cccagctgggataattctgc

SEQ ID NO: 130625 - DNA, 20 bp, synthetic construct
  source 1..20: mol_type = other DNA
tcccagctgggataattctg

SEQ ID NO: 130626 - DNA, 20 bp, synthetic construct
  source 1..20: mol_type = other DNA
atcccagctgggataattct

SEQ ID NO: 130627 - DNA, 20 bp, synthetic construct
  source 1..20: mol_type = other DNA
aatcccagctgggataattc

SEQ ID NO: 130628 - DNA, 20 bp, synthetic construct
  source 1..20: mol_type = other DNA
aaatcccagctgggataatt

SEQ ID NO: 130629 - DNA, 20 bp, synthetic construct
  source 1..20: mol_type = other DNA
caaatcccagctgggataat

SEQ ID NO: 130630 - DNA, 20 bp, synthetic construct
  source 1..20: mol_type = other DNA
ccaaatcccagctgggataa

SEQ ID NO: 130631 - DNA, 20 bp, synthetic construct
  source 1..20: mol_type = other DNA
cccaaatcccagctgggata

SEQ ID NO: 130632 - DNA, 20 bp, synthetic construct
  source 1..20: mol_type = other DNA
tcccaaatcccagctgggat

SEQ ID NO: 130633 - DNA, 20 bp, synthetic construct
  source 1..20: mol_type = other DNA
ttcccaaatcccagctggga

SEQ ID NO: 130634 - DNA, 20 bp, synthetic construct
  source 1..20: mol_type = other DNA
gttcccaaatcccagctggg

SEQ ID NO: 130635 - DNA, 20 bp, synthetic construct
  source 1..20: mol_type = other DNA
agttcccaaatcccagctgg

SEQ ID NO: 130636 - DNA, 20 bp, synthetic construct
  source 1..20: mol_type = other DNA
cagttcccaaatcccagctg

SEQ ID NO: 130637 - DNA, 20 bp, synthetic construct
  source 1..20: mol_type = other DNA
ccagttcccaaatcccagct

SEQ ID NO: 130638 - DNA, 20 bp, synthetic construct
  source 1..20: mol_type = other DNA
accagttcccaaatcccagc

SEQ ID NO: 130639 - DNA, 20 bp, synthetic construct
  source 1..20: mol_type = other DNA
caccagttcccaaatcccag

SEQ ID NO: 130640 - DNA, 20 bp, synthetic construct
  source 1..20: mol_type = other DNA
acaccagttcccaaatccca

SEQ ID NO: 130641 - DNA, 20 bp, synthetic construct
  source 1..20: mol_type = other DNA
aacaccagttcccaaatccc

SEQ ID NO: 130642 - DNA, 20 bp, synthetic construct
  source 1..20: mol_type = other DNA
aaacaccagttcccaaatcc

SEQ ID NO: 130643 - DNA, 20 bp, synthetic construct
  source 1..20: mol_type = other DNA
caaacaccagttcccaaatc

SEQ ID NO: 130644 - DNA, 20 bp, synthetic construct
  source 1..20: mol_type = other DNA
tcaaacaccagttcccaaat

SEQ ID NO: 130645 - DNA, 20 bp, synthetic construct
  source 1..20: mol_type = other DNA
ctcaaacaccagttcccaaa

SEQ ID NO: 130646 - DNA, 20 bp, synthetic construct
  source 1..20: mol_type = other DNA
cctcaaacaccagttcccaa

SEQ ID NO: 130647 - DNA, 20 bp, synthetic construct
  source 1..20: mol_type = other DNA
gcctcaaacaccagttccca

SEQ ID NO: 130648 - DNA, 20 bp, synthetic construct
  source 1..20: mol_type = other DNA
agcctcaaacaccagttccc

SEQ ID NO: 130649 - DNA, 20 bp, synthetic construct
  source 1..20: mol_type = other DNA
cagcctcaaacaccagttcc

SEQ ID NO: 130650 - DNA, 20 bp, synthetic construct
  source 1..20: mol_type = other DNA
tcagcctcaaacaccagttc

SEQ ID NO: 130651 - DNA, 20 bp, synthetic construct
  source 1..20: mol_type = other DNA
ctcagcctcaaacaccagtt

SEQ ID NO: 130652 - DNA, 20 bp, synthetic construct
  source 1..20: mol_type = other DNA
cctcagcctcaaacaccagt

SEQ ID NO: 130653 - DNA, 20 bp, synthetic construct
  source 1..20: mol_type = other DNA
tcctcagcctcaaacaccag

SEQ ID NO: 130654 - DNA, 20 bp, synthetic construct
  source 1..20: mol_type = other DNA
gtcctcagcctcaaacacca

SEQ ID NO: 130655 - DNA, 20 bp, synthetic construct
  source 1..20: mol_type = other DNA
agtcctcagcctcaaacacc

SEQ ID NO: 130656 - DNA, 20 bp, synthetic construct
  source 1..20: mol_type = other DNA
tagtcctcagcctcaaacac

SEQ ID NO: 130657 - DNA, 20 bp, synthetic construct
  source 1..20: mol_type = other DNA
ctagtcctcagcctcaaaca

SEQ ID NO: 130658 - DNA, 20 bp, synthetic construct
  source 1..20: mol_type = other DNA
gctagtcctcagcctcaaac

SEQ ID NO: 130659 - DNA, 20 bp, synthetic construct
  source 1..20: mol_type = other DNA
tgctagtcctcagcctcaaa

SEQ ID NO: 130660 - DNA, 20 bp, synthetic construct
  source 1..20: mol_type = other DNA
atgctagtcctcagcctcaa

SEQ ID NO: 130661 - DNA, 20 bp, synthetic construct
  source 1..20: mol_type = other DNA
catgctagtcctcagcctca

SEQ ID NO: 130662 - DNA, 20 bp, synthetic construct
  source 1..20: mol_type = other DNA
gcatgctagtcctcagcctc

SEQ ID NO: 130663 - DNA, 20 bp, synthetic construct
  source 1..20: mol_type = other DNA
tgcatgctagtcctcagcct

SEQ ID NO: 130664 - DNA, 20 bp, synthetic construct
  source 1..20: mol_type = other DNA
atgcatgctagtcctcagcc

SEQ ID NO: 130665 - DNA, 20 bp, synthetic construct
  source 1..20: mol_type = other DNA
catgcatgctagtcctcagc

SEQ ID NO: 130666 - DNA, 20 bp, synthetic construct
  source 1..20: mol_type = other DNA
tcatgcatgctagtcctcag

SEQ ID NO: 130667 - DNA, 20 bp, synthetic construct
  source 1..20: mol_type = other DNA
atcatgcatgctagtcctca

SEQ ID NO: 130668 - DNA, 20 bp, synthetic construct
  source 1..20: mol_type = other DNA
tatcatgcatgctagtcctc

SEQ ID NO: 130669 - DNA, 20 bp, synthetic construct
  source 1..20: mol_type = other DNA
ctatcatgcatgctagtcct

SEQ ID NO: 130670 - DNA, 20 bp, synthetic construct
  source 1..20: mol_type = other DNA
cctatcatgcatgctagtcc

SEQ ID NO: 130671 - DNA, 20 bp, synthetic construct
  source 1..20: mol_type = other DNA
tcctatcatgcatgctagtc

SEQ ID NO: 130672 - DNA, 20 bp, synthetic construct
  source 1..20: mol_type = other DNA
ttcctatcatgcatgctagt

SEQ ID NO: 130673 - DNA, 20 bp, synthetic construct
  source 1..20: mol_type = other DNA
tttcctatcatgcatgctag

SEQ ID NO: 130674 - DNA, 20 bp, synthetic construct
  source 1..20: mol_type = other DNA
ttttcctatcatgcatgcta

SEQ ID NO: 130675 - DNA, 20 bp, synthetic construct
  source 1..20: mol_type = other DNA
attttcctatcatgcatgct

SEQ ID NO: 130676 - DNA, 20 bp, synthetic construct
  source 1..20: mol_type = other DNA
tattttcctatcatgcatgc

SEQ ID NO: 130677 - DNA, 20 bp, synthetic construct
  source 1..20: mol_type = other DNA
ttattttcctatcatgcatg

SEQ ID NO: 130678 - DNA, 20 bp, synthetic construct
  source 1..20: mol_type = other DNA
gttattttcctatcatgcat

SEQ ID NO: 130679 - DNA, 20 bp, synthetic construct
  source 1..20: mol_type = other DNA
ggttattttcctatcatgca

SEQ ID NO: 130680 - DNA, 20 bp, synthetic construct
  source 1..20: mol_type = other DNA
gggttattttcctatcatgc

SEQ ID NO: 130681 - DNA, 20 bp, synthetic construct
  source 1..20: mol_type = other DNA
tgggttattttcctatcatg

SEQ ID NO: 130682 - DNA, 20 bp, synthetic construct
  source 1..20: mol_type = other DNA
ctgggttattttcctatcat

SEQ ID NO: 130683 - DNA, 20 bp, synthetic construct
  source 1..20: mol_type = other DNA
tctgggttattttcctatca

SEQ ID NO: 130684 - DNA, 20 bp, synthetic construct
  source 1..20: mol_type = other DNA
ctctgggttattttcctatc

SEQ ID NO: 130685 - DNA, 20 bp, synthetic construct
  source 1..20: mol_type = other DNA
actctgggttattttcctat

SEQ ID NO: 130686 - DNA, 20 bp, synthetic construct
  source 1..20: mol_type = other DNA
cactctgggttattttccta

SEQ ID NO: 130687 - DNA, 20 bp, synthetic construct
  source 1..20: mol_type = other DNA
ccactctgggttattttcct

SEQ ID NO: 130688 - DNA, 20 bp, synthetic construct
  source 1..20: mol_type = other DNA
gccactctgggttattttcc

SEQ ID NO: 130689 - DNA, 20 bp, synthetic construct
  source 1..20: mol_type = other DNA
tgccactctgggttattttc

SEQ ID NO: 130690 - DNA, 20 bp, synthetic construct
  source 1..20: mol_type = other DNA
ctgccactctgggttatttt

SEQ ID NO: 130691 - DNA, 20 bp, synthetic construct
  source 1..20: mol_type = other DNA
tctgccactctgggttattt

SEQ ID NO: 130692 - DNA, 20 bp, synthetic construct
  source 1..20: mol_type = other DNA
ttctgccactctgggttatt

SEQ ID NO: 130693 - DNA, 20 bp, synthetic construct
  source 1..20: mol_type = other DNA
cttctgccactctgggttat

SEQ ID NO: 130694 - DNA, 20 bp, synthetic construct
  source 1..20: mol_type = other DNA
acttctgccactctgggtta

SEQ ID NO: 130695 - DNA, 20 bp, synthetic construct
  source 1..20: mol_type = other DNA
cacttctgccactctgggtt

SEQ ID NO: 130696 - DNA, 20 bp, synthetic construct
  source 1..20: mol_type = other DNA
ccacttctgccactctgggt

SEQ ID NO: 130697 - DNA, 20 bp, synthetic construct
  source 1..20: mol_type = other DNA
cccacttctgccactctggg

SEQ ID NO: 130698 - DNA, 20 bp, synthetic construct
  source 1..20: mol_type = other DNA
tcccacttctgccactctgg

SEQ ID NO: 130699 - DNA, 20 bp, synthetic construct
  source 1..20: mol_type = other DNA
ctcccacttctgccactctg

SEQ ID NO: 130700 - DNA, 20 bp, synthetic construct
  source 1..20: mol_type = other DNA
actcccacttctgccactct

SEQ ID NO: 130701 - DNA, 20 bp, synthetic construct
  source 1..20: mol_type = other DNA
cactcccacttctgccactc

SEQ ID NO: 130702 - DNA, 20 bp, synthetic construct
  source 1..20: mol_type = other DNA
ccactcccacttctgccact

SEQ ID NO: 130703 - DNA, 20 bp, synthetic construct
  source 1..20: mol_type = other DNA
accactcccacttctgccac

SEQ ID NO: 130704 - DNA, 20 bp, synthetic construct
  source 1..20: mol_type = other DNA
taccactcccacttctgcca

SEQ ID NO: 130705 - DNA, 20 bp, synthetic construct
  source 1..20: mol_type = other DNA
ataccactcccacttctgcc

SEQ ID NO: 130706 - DNA, 20 bp, synthetic construct
  source 1..20: mol_type = other DNA
cataccactcccacttctgc

SEQ ID NO: 130707 - DNA, 20 bp, synthetic construct
  source 1..20: mol_type = other DNA
tcataccactcccacttctg

SEQ ID NO: 130708 - DNA, 20 bp, synthetic construct
  source 1..20: mol_type = other DNA
ctcataccactcccacttct

SEQ ID NO: 130709 - DNA, 20 bp, synthetic construct
  source 1..20: mol_type = other DNA
tctcataccactcccacttc

SEQ ID NO: 130710 - DNA, 20 bp, synthetic construct
  source 1..20: mol_type = other DNA
atctcataccactcccactt

SEQ ID NO: 130711 - DNA, 20 bp, synthetic construct
  source 1..20: mol_type = other DNA
catctcataccactcccact

SEQ ID NO: 130712 - DNA, 20 bp, synthetic construct
  source 1..20: mol_type = other DNA
ccatctcataccactcccac

SEQ ID NO: 130713 - DNA, 20 bp, synthetic construct
  source 1..20: mol_type = other DNA
gccatctcataccactccca

SEQ ID NO: 130714 - DNA, 20 bp, synthetic construct
  source 1..20: mol_type = other DNA
tgccatctcataccactccc

SEQ ID NO: 130715 - DNA, 20 bp, synthetic construct
  source 1..20: mol_type = other DNA
atgccatctcataccactcc

SEQ ID NO: 130716 - DNA, 20 bp, synthetic construct
  source 1..20: mol_type = other DNA
gatgccatctcataccactc

SEQ ID NO: 130717 - DNA, 20 bp, synthetic construct
  source 1..20: mol_type = other DNA
tgatgccatctcataccact

SEQ ID NO: 130718 - DNA, 20 bp, synthetic construct
  source 1..20: mol_type = other DNA
ctgatgccatctcataccac

SEQ ID NO: 130719 - DNA, 20 bp, synthetic construct
  source 1..20: mol_type = other DNA
tctgatgccatctcatacca

SEQ ID NO: 130720 - DNA, 20 bp, synthetic construct
  source 1..20: mol_type = other DNA
ctctgatgccatctcatacc

SEQ ID NO: 130721 - DNA, 20 bp, synthetic construct
  source 1..20: mol_type = other DNA
tctctgatgccatctcatac

SEQ ID NO: 130722 - DNA, 20 bp, synthetic construct
  source 1..20: mol_type = other DNA
gtctctgatgccatctcata

SEQ ID NO: 130723 - DNA, 20 bp, synthetic construct
  source 1..20: mol_type = other DNA
cgtctctgatgccatctcat

SEQ ID NO: 130724 - DNA, 20 bp, synthetic construct
  source 1..20: mol_type = other DNA
gcgtctctgatgccatctca

SEQ ID NO: 130725 - DNA, 20 bp, synthetic construct
  source 1..20: mol_type = other DNA
tgcgtctctgatgccatctc

SEQ ID NO: 130726 - DNA, 20 bp, synthetic construct
  source 1..20: mol_type = other DNA
ctgcgtctctgatgccatct

SEQ ID NO: 130727 - DNA, 20 bp, synthetic construct
  source 1..20: mol_type = other DNA
tctgcgtctctgatgccatc

SEQ ID NO: 130728 - DNA, 20 bp, synthetic construct
  source 1..20: mol_type = other DNA
atctgcgtctctgatgccat

SEQ ID NO: 130729 - DNA, 20 bp, synthetic construct
  source 1..20: mol_type = other DNA
aatctgcgtctctgatgcca

SEQ ID NO: 130730 - DNA, 20 bp, synthetic construct
  source 1..20: mol_type = other DNA
gaatctgcgtctctgatgcc

SEQ ID NO: 130731 - DNA, 20 bp, synthetic construct
  source 1..20: mol_type = other DNA
tgaatctgcgtctctgatgc

SEQ ID NO: 130732 - DNA, 20 bp, synthetic construct
  source 1..20: mol_type = other DNA
ctgaatctgcgtctctgatg

SEQ ID NO: 130733 - DNA, 20 bp, synthetic construct
  source 1..20: mol_type = other DNA
cctgaatctgcgtctctgat

SEQ ID NO: 130734 - DNA, 20 bp, synthetic construct
  source 1..20: mol_type = other DNA
ccctgaatctgcgtctctga

SEQ ID NO: 130735 - DNA, 20 bp, synthetic construct
  source 1..20: mol_type = other DNA
accctgaatctgcgtctctg

SEQ ID NO: 130736 - DNA, 20 bp, synthetic construct
  source 1..20: mol_type = other DNA
gaccctgaatctgcgtctct

SEQ ID NO: 130737 - DNA, 20 bp, synthetic construct
  source 1..20: mol_type = other DNA
tgaccctgaatctgcgtctc

SEQ ID NO: 130738 - DNA, 20 bp, synthetic construct
  source 1..20: mol_type = other DNA
ttgaccctgaatctgcgtct

SEQ ID NO: 130739 - DNA, 20 bp, synthetic construct
  source 1..20: mol_type = other DNA
tttgaccctgaatctgcgtc

SEQ ID NO: 130740 - DNA, 20 bp, synthetic construct
  source 1..20: mol_type = other DNA
atttgaccctgaatctgcgt

SEQ ID NO: 130741 - DNA, 20 bp, synthetic construct
  source 1..20: mol_type = other DNA
gatttgaccctgaatctgcg

SEQ ID NO: 130742 - DNA, 20 bp, synthetic construct
  source 1..20: mol_type = other DNA
tgatttgaccctgaatctgc

SEQ ID NO: 130743 - DNA, 20 bp, synthetic construct
  source 1..20: mol_type = other DNA
atgatttgaccctgaatctg

SEQ ID NO: 130744 - DNA, 20 bp, synthetic construct
  source 1..20: mol_type = other DNA
aatgatttgaccctgaatct

SEQ ID NO: 130745 - DNA, 20 bp, synthetic construct
  source 1..20: mol_type = other DNA
gaatgatttgaccctgaatc

SEQ ID NO: 130746 - DNA, 20 bp, synthetic construct
  source 1..20: mol_type = other DNA
tgaatgatttgaccctgaat

SEQ ID NO: 130747 - DNA, 20 bp, synthetic construct
  source 1..20: mol_type = other DNA
ctgaatgatttgaccctgaa

SEQ ID NO: 130748 - DNA, 20 bp, synthetic construct
  source 1..20: mol_type = other DNA
tctgaatgatttgaccctga

SEQ ID NO: 130749 - DNA, 20 bp, synthetic construct
  source 1..20: mol_type = other DNA
ctctgaatgatttgaccctg

SEQ ID NO: 130750 - DNA, 20 bp, synthetic construct
  source 1..20: mol_type = other DNA
gctctgaatgatttgaccct

SEQ ID NO: 130751 - DNA, 20 bp, synthetic construct
  source 1..20: mol_type = other DNA
ggctctgaatgatttgaccc

SEQ ID NO: 130752 - DNA, 20 bp, synthetic construct
  source 1..20: mol_type = other DNA
aggctctgaatgatttgacc

SEQ ID NO: 130753 - DNA, 20 bp, synthetic construct
  source 1..20: mol_type = other DNA
gaggctctgaatgatttgac

SEQ ID NO: 130754 - DNA, 20 bp, synthetic construct
  source 1..20: mol_type = other DNA
ggaggctctgaatgatttga

SEQ ID NO: 130755 - DNA, 20 bp, synthetic construct
  source 1..20: mol_type = other DNA
aggaggctctgaatgatttg

SEQ ID NO: 130756 - DNA, 20 bp, synthetic construct
  source 1..20: mol_type = other DNA
taggaggctctgaatgattt

SEQ ID NO: 130757 - DNA, 20 bp, synthetic construct
  source 1..20: mol_type = other DNA
ctaggaggctctgaatgatt

SEQ ID NO: 130758 - DNA, 20 bp, synthetic construct
  source 1..20: mol_type = other DNA
tctaggaggctctgaatgat

SEQ ID NO: 130759 - DNA, 20 bp, synthetic construct
  source 1..20: mol_type = other DNA
gtctaggaggctctgaatga

SEQ ID NO: 130760 - DNA, 20 bp, synthetic construct
  source 1..20: mol_type = other DNA
ggtctaggaggctctgaatg

SEQ ID NO: 130761 - DNA, 20 bp, synthetic construct
  source 1..20: mol_type = other DNA
tggtctaggaggctctgaat

SEQ ID NO: 130762 - DNA, 20 bp, synthetic construct
  source 1..20: mol_type = other DNA
atggtctaggaggctctgaa

SEQ ID NO: 130763 - DNA, 20 bp, synthetic construct
  source 1..20: mol_type = other DNA
catggtctaggaggctctga

SEQ ID NO: 130764 - DNA, 20 bp, synthetic construct
  source 1..20: mol_type = other DNA
acatggtctaggaggctctg

SEQ ID NO: 130765 - DNA, 20 bp, synthetic construct
  source 1..20: mol_type = other DNA
cacatggtctaggaggctct

SEQ ID NO: 130766 - DNA, 20 bp, synthetic construct
  source 1..20: mol_type = other DNA
tcacatggtctaggaggctc

SEQ ID NO: 130767 - DNA, 20 bp, synthetic construct
  source 1..20: mol_type = other DNA
ttcacatggtctaggaggct

SEQ ID NO: 130768 - DNA, 20 bp, synthetic construct
  source 1..20: mol_type = other DNA
gttcacatggtctaggaggc

SEQ ID NO: 130769 - DNA, 20 bp, synthetic construct
  source 1..20: mol_type = other DNA
tgttcacatggtctaggagg

SEQ ID NO: 130770 - DNA, 20 bp, synthetic construct
  source 1..20: mol_type = other DNA
gtgttcacatggtctaggag

SEQ ID NO: 130771 - DNA, 20 bp, synthetic construct
  source 1..20: mol_type = other DNA
tgtgttcacatggtctagga

SEQ ID NO: 130772 - DNA, 20 bp, synthetic construct
  source 1..20: mol_type = other DNA
atgtgttcacatggtctagg

SEQ ID NO: 130773 - DNA, 20 bp, synthetic construct
  source 1..20: mol_type = other DNA
catgtgttcacatggtctag

SEQ ID NO: 130774 - DNA, 20 bp, synthetic construct
  source 1..20: mol_type = other DNA
acatgtgttcacatggtcta

SEQ ID NO: 130775 - DNA, 20 bp, synthetic construct
  source 1..20: mol_type = other DNA
tacatgtgttcacatggtct

SEQ ID NO: 130776 - DNA, 20 bp, synthetic construct
  source 1..20: mol_type = other DNA
atacatgtgttcacatggtc

SEQ ID NO: 130777 - DNA, 20 bp, synthetic construct
  source 1..20: mol_type = other DNA
aatacatgtgttcacatggt

SEQ ID NO: 130778 - DNA, 20 bp, synthetic construct
  source 1..20: mol_type = other DNA
taatacatgtgttcacatgg

SEQ ID NO: 130779 - DNA, 20 bp, synthetic construct
  source 1..20: mol_type = other DNA
ataatacatgtgttcacatg

SEQ ID NO: 130780 - DNA, 20 bp, synthetic construct
  source 1..20: mol_type = other DNA
cataatacatgtgttcacat

SEQ ID NO: 130781 - DNA, 20 bp, synthetic construct
  source 1..20: mol_type = other DNA
gcataatacatgtgttcaca

SEQ ID NO: 130782 - DNA, 20 bp, synthetic construct
  source 1..20: mol_type = other DNA
agcataatacatgtgttcac

SEQ ID NO: 130783 - DNA, 20 bp, synthetic construct
  source 1..20: mol_type = other DNA
cagcataatacatgtgttca

SEQ ID NO: 130784 - DNA, 20 bp, synthetic construct
  source 1..20: mol_type = other DNA
acagcataatacatgtgttc

SEQ ID NO: 130785 - DNA, 20 bp, synthetic construct
  source 1..20: mol_type = other DNA
cacagcataatacatgtgtt

SEQ ID NO: 130786 - DNA, 20 bp, synthetic construct
  source 1..20: mol_type = other DNA
ccacagcataatacatgtgt

SEQ ID NO: 130787 - DNA, 20 bp, synthetic construct
  source 1..20: mol_type = other DNA
tccacagcataatacatgtg

SEQ ID NO: 130788 - DNA, 20 bp, synthetic construct
  source 1..20: mol_type = other DNA
ctccacagcataatacatgt

SEQ ID NO: 130789 - DNA, 20 bp, synthetic construct
  source 1..20: mol_type = other DNA
tctccacagcataatacatg

SEQ ID NO: 130790 - DNA, 20 bp, synthetic construct
  source 1..20: mol_type = other DNA
atctccacagcataatacat

SEQ ID NO: 130791 - DNA, 20 bp, synthetic construct
  source 1..20: mol_type = other DNA
tatctccacagcataataca

SEQ ID NO: 130792 - DNA, 20 bp, synthetic construct
  source 1..20: mol_type = other DNA
gtatctccacagcataatac

SEQ ID NO: 130793 - DNA, 20 bp, synthetic construct
  source 1..20: mol_type = other DNA
agtatctccacagcataata

SEQ ID NO: 130794 - DNA, 20 bp, synthetic construct
  source 1..20: mol_type = other DNA
cagtatctccacagcataat

SEQ ID NO: 130795 - DNA, 20 bp, synthetic construct
  source 1..20: mol_type = other DNA
acagtatctccacagcataa

SEQ ID NO: 130796 - DNA, 20 bp, synthetic construct
  source 1..20: mol_type = other DNA
aacagtatctccacagcata

SEQ ID NO: 130797 - DNA, 20 bp, synthetic construct
  source 1..20: mol_type = other DNA
aaacagtatctccacagcat

SEQ ID NO: 130798 - DNA, 20 bp, synthetic construct
  source 1..20: mol_type = other DNA
taaacagtatctccacagca

SEQ ID NO: 130799 - DNA, 20 bp, synthetic construct
  source 1..20: mol_type = other DNA
ttaaacagtatctccacagc

SEQ ID NO: 130800 - DNA, 20 bp, synthetic construct
  source 1..20: mol_type = other DNA
attaaacagtatctccacag

SEQ ID NO: 130801 - DNA, 20 bp, synthetic construct
  source 1..20: mol_type = other DNA
tattaaacagtatctccaca

SEQ ID NO: 130802 - DNA, 20 bp, synthetic construct
  source 1..20: mol_type = other DNA
ctattaaacagtatctccac

SEQ ID NO: 130803 - DNA, 20 bp, synthetic construct
  source 1..20: mol_type = other DNA
cctattaaacagtatctcca

SEQ ID NO: 130804 - DNA, 20 bp, synthetic construct
  source 1..20: mol_type = other DNA
gcctattaaacagtatctcc

SEQ ID NO: 130805 - DNA, 20 bp, synthetic construct
  source 1..20: mol_type = other DNA
tgcctattaaacagtatctc

SEQ ID NO: 130806 - DNA, 20 bp, synthetic construct
  source 1..20: mol_type = other DNA
ctgcctattaaacagtatct

SEQ ID NO: 130807 - DNA, 20 bp, synthetic construct
  source 1..20: mol_type = other DNA
actgcctattaaacagtatc

SEQ ID NO: 130808 - DNA, 20 bp, synthetic construct
  source 1..20: mol_type = other DNA
gactgcctattaaacagtat

SEQ ID NO: 130809 - DNA, 20 bp, synthetic construct
  source 1..20: mol_type = other DNA
agactgcctattaaacagta

SEQ ID NO: 130810 - DNA, 20 bp, synthetic construct
  source 1..20: mol_type = other DNA
cagactgcctattaaacagt

SEQ ID NO: 130811 - DNA, 20 bp, synthetic construct
  source 1..20: mol_type = other DNA
gcagactgcctattaaacag

SEQ ID NO: 130812 - DNA, 20 bp, synthetic construct
  source 1..20: mol_type = other DNA
agcagactgcctattaaaca

SEQ ID NO: 130813 - DNA, 20 bp, synthetic construct
  source 1..20: mol_type = other DNA
aagcagactgcctattaaac

SEQ ID NO: 130814 - DNA, 20 bp, synthetic construct
  source 1..20: mol_type = other DNA
aaagcagactgcctattaaa

SEQ ID NO: 130815 - DNA, 20 bp, synthetic construct
  source 1..20: mol_type = other DNA
aaaagcagactgcctattaa

SEQ ID NO: 130816 - DNA, 20 bp, synthetic construct
  source 1..20: mol_type = other DNA
aaaaagcagactgcctatta

SEQ ID NO: 130817 - DNA, 20 bp, synthetic construct
  source 1..20: mol_type = other DNA
aaaaaagcagactgcctatt

SEQ ID NO: 130818 - DNA, 20 bp, synthetic construct
  source 1..20: mol_type = other DNA
aaaaaaagcagactgcctat

SEQ ID NO: 130819 - DNA, 20 bp, synthetic construct
  source 1..20: mol_type = other DNA
aaaaaaaagcagactgccta

SEQ ID NO: 130820 - DNA, 20 bp, synthetic construct
  source 1..20: mol_type = other DNA
gaaaaaaaagcagactgcct

SEQ ID NO: 130821 - DNA, 20 bp, synthetic construct
  source 1..20: mol_type = other DNA
agaaaaaaaagcagactgcc

SEQ ID NO: 130822 - DNA, 20 bp, synthetic construct
  source 1..20: mol_type = other DNA
cagaaaaaaaagcagactgc

SEQ ID NO: 130823 - DNA, 20 bp, synthetic construct
  source 1..20: mol_type = other DNA
gcagaaaaaaaagcagactg

SEQ ID NO: 130824 - DNA, 20 bp, synthetic construct
  source 1..20: mol_type = other DNA
tgcagaaaaaaaagcagact

SEQ ID NO: 130825 - DNA, 20 bp, synthetic construct
  source 1..20: mol_type = other DNA
ctgcagaaaaaaaagcagac

SEQ ID NO: 130826 - DNA, 20 bp, synthetic construct
  source 1..20: mol_type = other DNA
actgcagaaaaaaaagcaga

SEQ ID NO: 130827 - DNA, 20 bp, synthetic construct
  source 1..20: mol_type = other DNA
tactgcagaaaaaaaagcag

SEQ ID NO: 130828 - DNA, 20 bp, synthetic construct
  source 1..20: mol_type = other DNA
gtactgcagaaaaaaaagca

SEQ ID NO: 130829 - DNA, 20 bp, synthetic construct
  source 1..20: mol_type = other DNA
ggtactgcagaaaaaaaagc

SEQ ID NO: 130830 - DNA, 20 bp, synthetic construct
  source 1..20: mol_type = other DNA
tggtactgcagaaaaaaaag

SEQ ID NO: 130831 - DNA, 20 bp, synthetic construct
  source 1..20: mol_type = other DNA
ttggtactgcagaaaaaaaa

SEQ ID NO: 130832 - DNA, 20 bp, synthetic construct
  source 1..20: mol_type = other DNA
tttggtactgcagaaaaaaa

SEQ ID NO: 130833 - DNA, 20 bp, synthetic construct
  source 1..20: mol_type = other DNA
atttggtactgcagaaaaaa

SEQ ID NO: 130834 - DNA, 20 bp, synthetic construct
  source 1..20: mol_type = other DNA
tatttggtactgcagaaaaa

SEQ ID NO: 130835 - DNA, 20 bp, synthetic construct
  source 1..20: mol_type = other DNA
atatttggtactgcagaaaa

SEQ ID NO: 130836 - DNA, 20 bp, synthetic construct
  source 1..20: mol_type = other DNA
catatttggtactgcagaaa

SEQ ID NO: 130837 - DNA, 20 bp, synthetic construct
  source 1..20: mol_type = other DNA
gcatatttggtactgcagaa

SEQ ID NO: 130838 - DNA, 20 bp, synthetic construct
  source 1..20: mol_type = other DNA
ggcatatttggtactgcaga

SEQ ID NO: 130839 - DNA, 20 bp, synthetic construct
  source 1..20: mol_type = other DNA
gggcatatttggtactgcag

SEQ ID NO: 130840 - DNA, 20 bp, synthetic construct
  source 1..20: mol_type = other DNA
ggggcatatttggtactgca

SEQ ID NO: 130841 - DNA, 20 bp, synthetic construct
  source 1..20: mol_type = other DNA
tggggcatatttggtactgc

SEQ ID NO: 130842 - DNA, 20 bp, synthetic construct
  source 1..20: mol_type = other DNA
ttggggcatatttggtactg

SEQ ID NO: 130843 - DNA, 20 bp, synthetic construct
  source 1..20: mol_type = other DNA
gttggggcatatttggtact

SEQ ID NO: 130844 - DNA, 20 bp, synthetic construct
  source 1..20: mol_type = other DNA
tgttggggcatatttggtac

SEQ ID NO: 130845 - DNA, 20 bp, synthetic construct
  source 1..20: mol_type = other DNA
ctgttggggcatatttggta

SEQ ID NO: 130846 - DNA, 20 bp, synthetic construct
  source 1..20: mol_type = other DNA
gctgttggggcatatttggt

SEQ ID NO: 130847 - DNA, 20 bp, synthetic construct
  source 1..20: mol_type = other DNA
cgctgttggggcatatttgg

SEQ ID NO: 130848 - DNA, 20 bp, synthetic construct
  source 1..20: mol_type = other DNA
ccgctgttggggcatatttg

SEQ ID NO: 130849 - DNA, 20 bp, synthetic construct
  source 1..20: mol_type = other DNA
gccgctgttggggcatattt

SEQ ID NO: 130850 - DNA, 20 bp, synthetic construct
  source 1..20: mol_type = other DNA
tgccgctgttggggcatatt

SEQ ID NO: 130851 - DNA, 20 bp, synthetic construct
  source 1..20: mol_type = other DNA
ttgccgctgttggggcatat

SEQ ID NO: 130852 - DNA, 20 bp, synthetic construct
  source 1..20: mol_type = other DNA
cttgccgctgttggggcata

SEQ ID NO: 130853 - DNA, 20 bp, synthetic construct
  source 1..20: mol_type = other DNA
tcttgccgctgttggggcat

SEQ ID NO: 130854 - DNA, 20 bp, synthetic construct
  source 1..20: mol_type = other DNA
gtcttgccgctgttggggca

SEQ ID NO: 130855 - DNA, 20 bp, synthetic construct
  source 1..20: mol_type = other DNA
ggtcttgccgctgttggggc

SEQ ID NO: 130856 - DNA, 20 bp, synthetic construct
  source 1..20: mol_type = other DNA
tggtcttgccgctgttgggg

SEQ ID NO: 130857 - DNA, 20 bp, synthetic construct
  source 1..20: mol_type = other DNA
ctggtcttgccgctgttggg

SEQ ID NO: 130858 - DNA, 20 bp, synthetic construct
  source 1..20: mol_type = other DNA
gctggtcttgccgctgttgg

SEQ ID NO: 130859 - DNA, 20 bp, synthetic construct
  source 1..20: mol_type = other DNA
tgctggtcttgccgctgttg

SEQ ID NO: 130860 - DNA, 20 bp, synthetic construct
  source 1..20: mol_type = other DNA
atgctggtcttgccgctgtt

SEQ ID NO: 130861 - DNA, 20 bp, synthetic construct
  source 1..20: mol_type = other DNA
gatgctggtcttgccgctgt

SEQ ID NO: 130862 - DNA, 20 bp, synthetic construct
  source 1..20: mol_type = other DNA
tgatgctggtcttgccgctg

SEQ ID NO: 130863 - DNA, 20 bp, synthetic construct
  source 1..20: mol_type = other DNA
atgatgctggtcttgccgct

SEQ ID NO: 130864 - DNA, 20 bp, synthetic construct
  source 1..20: mol_type = other DNA
gatgatgctggtcttgccgc

SEQ ID NO: 130865 - DNA, 20 bp, synthetic construct
  source 1..20: mol_type = other DNA
tgatgatgctggtcttgccg

SEQ ID NO: 130866 - DNA, 20 bp, synthetic construct
  source 1..20: mol_type = other DNA
ctgatgatgctggtcttgcc

SEQ ID NO: 130867 - DNA, 20 bp, synthetic construct
  source 1..20: mol_type = other DNA
tctgatgatgctggtcttgc

SEQ ID NO: 130868 - DNA, 20 bp, synthetic construct
  source 1..20: mol_type = other DNA
ctctgatgatgctggtcttg

SEQ ID NO: 130869 - DNA, 20 bp, synthetic construct
  source 1..20: mol_type = other DNA
actctgatgatgctggtctt

SEQ ID NO: 130870 - DNA, 20 bp, synthetic construct
  source 1..20: mol_type = other DNA
cactctgatgatgctggtct

SEQ ID NO: 130871 - DNA, 20 bp, synthetic construct
  source 1..20: mol_type = other DNA
gcactctgatgatgctggtc

SEQ ID NO: 130872 - DNA, 20 bp, synthetic construct
  source 1..20: mol_type = other DNA
ggcactctgatgatgctggt

SEQ ID NO: 130873 - DNA, 20 bp, synthetic construct
  source 1..20: mol_type = other DNA
tggcactctgatgatgctgg

SEQ ID NO: 130874 - DNA, 20 bp, synthetic construct
  source 1..20: mol_type = other DNA
atggcactctgatgatgctg

SEQ ID NO: 130875 - DNA, 20 bp, synthetic construct
  source 1..20: mol_type = other DNA
catggcactctgatgatgct

SEQ ID NO: 130876 - DNA, 20 bp, synthetic construct
  source 1..20: mol_type = other DNA
tcatggcactctgatgatgc

SEQ ID NO: 130877 - DNA, 20 bp, synthetic construct
  source 1..20: mol_type = other DNA
atcatggcactctgatgatg

SEQ ID NO: 130878 - DNA, 20 bp, synthetic construct
  source 1..20: mol_type = other DNA
catcatggcactctgatgat

SEQ ID NO: 130879 - DNA, 20 bp, synthetic construct
  source 1..20: mol_type = other DNA
gcatcatggcactctgatga

SEQ ID NO: 130880 - DNA, 20 bp, synthetic construct
  source 1..20: mol_type = other DNA
tgcatcatggcactctgatg

SEQ ID NO: 130881 - DNA, 20 bp, synthetic construct
  source 1..20: mol_type = other DNA
gtgcatcatggcactctgat

SEQ ID NO: 130882 - DNA, 20 bp, synthetic construct
  source 1..20: mol_type = other DNA
ggtgcatcatggcactctga

SEQ ID NO: 130883 - DNA, 20 bp, synthetic construct
  source 1..20: mol_type = other DNA
gggtgcatcatggcactctg

SEQ ID NO: 130884 - DNA, 20 bp, synthetic construct
  source 1..20: mol_type = other DNA
tgggtgcatcatggcactct

SEQ ID NO: 130885 - DNA, 20 bp, synthetic construct
  source 1..20: mol_type = other DNA
ctgggtgcatcatggcactc

SEQ ID NO: 130886 - DNA, 20 bp, synthetic construct
  source 1..20: mol_type = other DNA
gctgggtgcatcatggcact

SEQ ID NO: 130887 - DNA, 20 bp, synthetic construct
  source 1..20: mol_type = other DNA
cgctgggtgcatcatggcac

SEQ ID NO: 130888 - DNA, 20 bp, synthetic construct
  source 1..20: mol_type = other DNA
acgctgggtgcatcatggca

SEQ ID NO: 130889 - DNA, 20 bp, synthetic construct
  source 1..20: mol_type = other DNA
gacgctgggtgcatcatggc

SEQ ID NO: 130890 - DNA, 20 bp, synthetic construct
  source 1..20: mol_type = other DNA
tgacgctgggtgcatcatgg

SEQ ID NO: 130891 - DNA, 20 bp, synthetic construct
  source 1..20: mol_type = other DNA
ctgacgctgggtgcatcatg

SEQ ID NO: 130892 - DNA, 20 bp, synthetic construct
  source 1..20: mol_type = other DNA
gctgacgctgggtgcatcat

SEQ ID NO: 130893 - DNA, 20 bp, synthetic construct
  source 1..20: mol_type = other DNA
tgctgacgctgggtgcatca

SEQ ID NO: 130894 - DNA, 20 bp, synthetic construct
  source 1..20: mol_type = other DNA
ctgctgacgctgggtgcatc

SEQ ID NO: 130895 - DNA, 20 bp, synthetic construct
  source 1..20: mol_type = other DNA
gctgctgacgctgggtgcat

SEQ ID NO: 130896 - DNA, 20 bp, synthetic construct
  source 1..20: mol_type = other DNA
cgctgctgacgctgggtgca

SEQ ID NO: 130897 - DNA, 20 bp, synthetic construct
  source 1..20: mol_type = other DNA
ccgctgctgacgctgggtgc

SEQ ID NO: 130898 - DNA, 20 bp, synthetic construct
  source 1..20: mol_type = other DNA
cccgctgctgacgctgggtg

SEQ ID NO: 130899 - DNA, 20 bp, synthetic construct
  source 1..20: mol_type = other DNA
gcccgctgctgacgctgggt

SEQ ID NO: 130900 - DNA, 20 bp, synthetic construct
  source 1..20: mol_type = other DNA
ggcccgctgctgacgctggg

SEQ ID NO: 130901 - DNA, 20 bp, synthetic construct
  source 1..20: mol_type = other DNA
gggcccgctgctgacgctgg

SEQ ID NO: 130902 - DNA, 20 bp, synthetic construct
  source 1..20: mol_type = other DNA
tgggcccgctgctgacgctg

SEQ ID NO: 130903 - DNA, 20 bp, synthetic construct
  source 1..20: mol_type = other DNA
gtgggcccgctgctgacgct

SEQ ID NO: 130904 - DNA, 20 bp, synthetic construct
  source 1..20: mol_type = other DNA
ggtgggcccgctgctgacgc

SEQ ID NO: 130905 - DNA, 20 bp, synthetic construct
  source 1..20: mol_type = other DNA
cggtgggcccgctgctgacg

SEQ ID NO: 130906 - DNA, 20 bp, synthetic construct
  source 1..20: mol_type = other DNA
tcggtgggcccgctgctgac

SEQ ID NO: 130907 - DNA, 20 bp, synthetic construct
  source 1..20: mol_type = other DNA
atcggtgggcccgctgctga

SEQ ID NO: 130908 - DNA, 20 bp, synthetic construct
  source 1..20: mol_type = other DNA
aatcggtgggcccgctgctg

SEQ ID NO: 130909 - DNA, 20 bp, synthetic construct
  source 1..20: mol_type = other DNA
caatcggtgggcccgctgct

SEQ ID NO: 130910 - DNA, 20 bp, synthetic construct
  source 1..20: mol_type = other DNA
gcaatcggtgggcccgctgc

SEQ ID NO: 130911 - DNA, 20 bp, synthetic construct
  source 1..20: mol_type = other DNA
tgcaatcggtgggcccgctg

SEQ ID NO: 130912 - DNA, 20 bp, synthetic construct
  source 1..20: mol_type = other DNA
ctgcaatcggtgggcccgct

SEQ ID NO: 130913 - DNA, 20 bp, synthetic construct
  source 1..20: mol_type = other DNA
gctgcaatcggtgggcccgc

SEQ ID NO: 130914 - DNA, 20 bp, synthetic construct
  source 1..20: mol_type = other DNA
ggctgcaatcggtgggcccg

SEQ ID NO: 130915 - DNA, 20 bp, synthetic construct
  source 1..20: mol_type = other DNA
tggctgcaatcggtgggccc

SEQ ID NO: 130916 - DNA, 20 bp, synthetic construct
  source 1..20: mol_type = other DNA
gtggctgcaatcggtgggcc

SEQ ID NO: 130917 - DNA, 20 bp, synthetic construct
  source 1..20: mol_type = other DNA
ggtggctgcaatcggtgggc

SEQ ID NO: 130918 - DNA, 20 bp, synthetic construct
  source 1..20: mol_type = other DNA
gggtggctgcaatcggtggg

SEQ ID NO: 130919 - DNA, 20 bp, synthetic construct
  source 1..20: mol_type = other DNA
ggggtggctgcaatcggtgg

SEQ ID NO: 130920 - DNA, 20 bp, synthetic construct
  source 1..20: mol_type = other DNA
tggggtggctgcaatcggtg

SEQ ID NO: 130921 - DNA, 20 bp, synthetic construct
  source 1..20: mol_type = other DNA
gtggggtggctgcaatcggt

SEQ ID NO: 130922 - DNA, 20 bp, synthetic construct
  source 1..20: mol_type = other DNA
ggtggggtggctgcaatcgg

SEQ ID NO: 130923 - DNA, 20 bp, synthetic construct
  source 1..20: mol_type = other DNA
tggtggggtggctgcaatcg

SEQ ID NO: 130924 - DNA, 20 bp, synthetic construct
  source 1..20: mol_type = other DNA
ctggtggggtggctgcaatc

SEQ ID NO: 130925 - DNA, 20 bp, synthetic construct
  source 1..20: mol_type = other DNA
gctggtggggtggctgcaat

SEQ ID NO: 130926 - DNA, 20 bp, synthetic construct
  source 1..20: mol_type = other DNA
agctggtggggtggctgcaa

SEQ ID NO: 130927 - DNA, 20 bp, synthetic construct
  source 1..20: mol_type = other DNA
aagctggtggggtggctgca

SEQ ID NO: 130928 - DNA, 20 bp, synthetic construct
  source 1..20: mol_type = other DNA
taagctggtggggtggctgc

SEQ ID NO: 130929 - DNA, 20 bp, synthetic construct
  source 1..20: mol_type = other DNA
gtaagctggtggggtggctg

SEQ ID NO: 130930 - DNA, 20 bp, synthetic construct
  source 1..20: mol_type = other DNA
agtaagctggtggggtggct

SEQ ID NO: 130931 - DNA, 20 bp, synthetic construct
  source 1..20: mol_type = other DNA
gagtaagctggtggggtggc

SEQ ID NO: 130932 - DNA, 20 bp, synthetic construct
  source 1..20: mol_type = other DNA
ggagtaagctggtggggtgg

SEQ ID NO: 130933 - DNA, 20 bp, synthetic construct
  source 1..20: mol_type = other DNA
tggagtaagctggtggggtg

SEQ ID NO: 130934 - DNA, 20 bp, synthetic construct
  source 1..20: mol_type = other DNA
gtggagtaagctggtggggt

SEQ ID NO: 130935 - DNA, 20 bp, synthetic construct
  source 1..20: mol_type = other DNA
cgtggagtaagctggtgggg

SEQ ID NO: 130936 - DNA, 20 bp, synthetic construct
  source 1..20: mol_type = other DNA
gcgtggagtaagctggtggg

SEQ ID NO: 130937 - DNA, 20 bp, synthetic construct
  source 1..20: mol_type = other DNA
tgcgtggagtaagctggtgg

SEQ ID NO: 130938 - DNA, 20 bp, synthetic construct
  source 1..20: mol_type = other DNA
ttgcgtggagtaagctggtg

SEQ ID NO: 130939 - DNA, 20 bp, synthetic construct
  source 1..20: mol_type = other DNA
attgcgtggagtaagctggt

SEQ ID NO: 130940 - DNA, 20 bp, synthetic construct
  source 1..20: mol_type = other DNA
tattgcgtggagtaagctgg

SEQ ID NO: 130941 - DNA, 20 bp, synthetic construct
  source 1..20: mol_type = other DNA
atattgcgtggagtaagctg

SEQ ID NO: 130942 - DNA, 20 bp, synthetic construct
  source 1..20: mol_type = other DNA
catattgcgtggagtaagct

SEQ ID NO: 130943 - DNA, 20 bp, synthetic construct
  source 1..20: mol_type = other DNA
acatattgcgtggagtaagc

SEQ ID NO: 130944 - DNA, 20 bp, synthetic construct
  source 1..20: mol_type = other DNA
aacatattgcgtggagtaag

SEQ ID NO: 130945 - DNA, 20 bp, synthetic construct
  source 1..20: mol_type = other DNA
caacatattgcgtggagtaa

SEQ ID NO: 130946 - DNA, 20 bp, synthetic construct
  source 1..20: mol_type = other DNA
gcaacatattgcgtggagta

SEQ ID NO: 130947 - DNA, 20 bp, synthetic construct
  source 1..20: mol_type = other DNA
ggcaacatattgcgtggagt

SEQ ID NO: 130948 - DNA, 20 bp, synthetic construct
  source 1..20: mol_type = other DNA
aggcaacatattgcgtggag

SEQ ID NO: 130949 - DNA, 20 bp, synthetic construct
  source 1..20: mol_type = other DNA
taggcaacatattgcgtgga

SEQ ID NO: 130950 - DNA, 20 bp, synthetic construct
  source 1..20: mol_type = other DNA
gtaggcaacatattgcgtgg

SEQ ID NO: 130951 - DNA, 20 bp, synthetic construct
  source 1..20: mol_type = other DNA
tgtaggcaacatattgcgtg

SEQ ID NO: 130952 - DNA, 20 bp, synthetic construct
  source 1..20: mol_type = other DNA
ctgtaggcaacatattgcgt

SEQ ID NO: 130953 - DNA, 20 bp, synthetic construct
  source 1..20: mol_type = other DNA
actgtaggcaacatattgcg

SEQ ID NO: 130954 - DNA, 20 bp, synthetic construct
  source 1..20: mol_type = other DNA
gactgtaggcaacatattgc

SEQ ID NO: 130955 - DNA, 20 bp, synthetic construct
  source 1..20: mol_type = other DNA
ggactgtaggcaacatattg

SEQ ID NO: 130956 - DNA, 20 bp, synthetic construct
  source 1..20: mol_type = other DNA
aggactgtaggcaacatatt

SEQ ID NO: 130957 - DNA, 20 bp, synthetic construct
  source 1..20: mol_type = other DNA
gaggactgtaggcaacatat

SEQ ID NO: 130958 - DNA, 20 bp, synthetic construct
  source 1..20: mol_type = other DNA
tgaggactgtaggcaacata

SEQ ID NO: 130959 - DNA, 20 bp, synthetic construct
  source 1..20: mol_type = other DNA
ctgaggactgtaggcaacat

SEQ ID NO: 130960 - DNA, 20 bp, synthetic construct
  source 1..20: mol_type = other DNA
gctgaggactgtaggcaaca

SEQ ID NO: 130961 - DNA, 20 bp, synthetic construct
  source 1..20: mol_type = other DNA
tgctgaggactgtaggcaac

SEQ ID NO: 130962 - DNA, 20 bp, synthetic construct
  source 1..20: mol_type = other DNA
ctgctgaggactgtaggcaa

SEQ ID NO: 130963 - DNA, 20 bp, synthetic construct
  source 1..20: mol_type = other DNA
actgctgaggactgtaggca

SEQ ID NO: 130964 - DNA, 20 bp, synthetic construct
  source 1..20: mol_type = other DNA
aactgctgaggactgtaggc

SEQ ID NO: 130965 - DNA, 20 bp, synthetic construct
  source 1..20: mol_type = other DNA
gaactgctgaggactgtagg

SEQ ID NO: 130966 - DNA, 20 bp, synthetic construct
  source 1..20: mol_type = other DNA
ggaactgctgaggactgtag

SEQ ID NO: 130967 - DNA, 20 bp, synthetic construct
  source 1..20: mol_type = other DNA
gggaactgctgaggactgta

SEQ ID NO: 130968 - DNA, 20 bp, synthetic construct
  source 1..20: mol_type = other DNA
tgggaactgctgaggactgt

SEQ ID NO: 130969 - DNA, 20 bp, synthetic construct
  source 1..20: mol_type = other DNA
ttgggaactgctgaggactg

SEQ ID NO: 130970 - DNA, 20 bp, synthetic construct
  source 1..20: mol_type = other DNA
tttgggaactgctgaggact

SEQ ID NO: 130971 - DNA, 20 bp, synthetic construct
  source 1..20: mol_type = other DNA
atttgggaactgctgaggac

SEQ ID NO: 130972 - DNA, 20 bp, synthetic construct
  source 1..20: mol_type = other DNA
gatttgggaactgctgagga

SEQ ID NO: 130973 - DNA, 20 bp, synthetic construct
  source 1..20: mol_type = other DNA
tgatttgggaactgctgagg

SEQ ID NO: 130974 - DNA, 20 bp, synthetic construct
  source 1..20: mol_type = other DNA
ctgatttgggaactgctgag

SEQ ID NO: 130975 - DNA, 20 bp, synthetic construct
  source 1..20: mol_type = other DNA
gctgatttgggaactgctga

SEQ ID NO: 130976 - DNA, 20 bp, synthetic construct
  source 1..20: mol_type = other DNA
ggctgatttgggaactgctg

SEQ ID NO: 130977 - DNA, 20 bp, synthetic construct
  source 1..20: mol_type = other DNA
gggctgatttgggaactgct

SEQ ID NO: 130978 - DNA, 20 bp, synthetic construct
  source 1..20: mol_type = other DNA
ggggctgatttgggaactgc

SEQ ID NO: 130979 - DNA, 20 bp, synthetic construct
  source 1..20: mol_type = other DNA
aggggctgatttgggaactg

SEQ ID NO: 130980 - DNA, 20 bp, synthetic construct
  source 1..20: mol_type = other DNA
aaggggctgatttgggaact

SEQ ID NO: 130981 - DNA, 20 bp, synthetic construct
  source 1..20: mol_type = other DNA
caaggggctgatttgggaac

SEQ ID NO: 130982 - DNA, 20 bp, synthetic construct
  source 1..20: mol_type = other DNA
acaaggggctgatttgggaa

SEQ ID NO: 130983 - DNA, 20 bp, synthetic construct
  source 1..20: mol_type = other DNA
aacaaggggctgatttggga

SEQ ID NO: 130984 - DNA, 20 bp, synthetic construct
  source 1..20: mol_type = other DNA
gaacaaggggctgatttggg

SEQ ID NO: 130985 - DNA, 20 bp, synthetic construct
  source 1..20: mol_type = other DNA
tgaacaaggggctgatttgg

SEQ ID NO: 130986 - DNA, 20 bp, synthetic construct
  source 1..20: mol_type = other DNA
ctgaacaaggggctgatttg

SEQ ID NO: 130987 - DNA, 20 bp, synthetic construct
  source 1..20: mol_type = other DNA
gctgaacaaggggctgattt

SEQ ID NO: 130988 - DNA, 20 bp, synthetic construct
  source 1..20: mol_type = other DNA
tgctgaacaaggggctgatt

SEQ ID NO: 130989 - DNA, 20 bp, synthetic construct
  source 1..20: mol_type = other DNA
atgctgaacaaggggctgat

SEQ ID NO: 130990 - DNA, 20 bp, synthetic construct
  source 1..20: mol_type = other DNA
catgctgaacaaggggctga

SEQ ID NO: 130991 - DNA, 20 bp, synthetic construct
  source 1..20: mol_type = other DNA
acatgctgaacaaggggctg

SEQ ID NO: 130992 - DNA, 20 bp, synthetic construct
  source 1..20: mol_type = other DNA
cacatgctgaacaaggggct

SEQ ID NO: 130993 - DNA, 20 bp, synthetic construct
  source 1..20: mol_type = other DNA
gcacatgctgaacaaggggc

SEQ ID NO: 130994 - DNA, 20 bp, synthetic construct
  source 1..20: mol_type = other DNA
ggcacatgctgaacaagggg

SEQ ID NO: 130995 - DNA, 20 bp, synthetic construct
  source 1..20: mol_type = other DNA
tggcacatgctgaacaaggg

SEQ ID NO: 130996 - DNA, 20 bp, synthetic construct
  source 1..20: mol_type = other DNA
gtggcacatgctgaacaagg

SEQ ID NO: 130997 - DNA, 20 bp, synthetic construct
  source 1..20: mol_type = other DNA
tgtggcacatgctgaacaag

SEQ ID NO: 130998 - DNA, 20 bp, synthetic construct
  source 1..20: mol_type = other DNA
atgtggcacatgctgaacaa

SEQ ID NO: 130999 - DNA, 20 bp, synthetic construct
  source 1..20: mol_type = other DNA
aatgtggcacatgctgaaca

SEQ ID NO: 131000 - DNA, 20 bp, synthetic construct
  source 1..20: mol_type = other DNA
taatgtggcacatgctgaac

SEQ ID NO: 131001 - DNA, 20 bp, synthetic construct
  source 1..20: mol_type = other DNA
ataatgtggcacatgctgaa

SEQ ID NO: 131002 - DNA, 20 bp, synthetic construct
  source 1..20: mol_type = other DNA
gataatgtggcacatgctga

SEQ ID NO: 131003 - DNA, 20 bp, synthetic construct
  source 1..20: mol_type = other DNA
tgataatgtggcacatgctg

SEQ ID NO: 131004 - DNA, 20 bp, synthetic construct
  source 1..20: mol_type = other DNA
ctgataatgtggcacatgct

SEQ ID NO: 131005 - DNA, 20 bp, synthetic construct
  source 1..20: mol_type = other DNA
actgataatgtggcacatgc

SEQ ID NO: 131006 - DNA, 20 bp, synthetic construct
  source 1..20: mol_type = other DNA
gactgataatgtggcacatg

SEQ ID NO: 131007 - DNA, 20 bp, synthetic construct
  source 1..20: mol_type = other DNA
agactgataatgtggcacat

SEQ ID NO: 131008 - DNA, 20 bp, synthetic construct
  source 1..20: mol_type = other DNA
gagactgataatgtggcaca

SEQ ID NO: 131009 - DNA, 20 bp, synthetic construct
  source 1..20: mol_type = other DNA
tgagactgataatgtggcac

SEQ ID NO: 131010 - DNA, 20 bp, synthetic construct
  source 1..20: mol_type = other DNA
ctgagactgataatgtggca

SEQ ID NO: 131011 - DNA, 20 bp, synthetic construct
  source 1..20: mol_type = other DNA
cctgagactgataatgtggc

SEQ ID NO: 131012 - DNA, 20 bp, synthetic construct
  source 1..20: mol_type = other DNA
acctgagactgataatgtgg

SEQ ID NO: 131013 - DNA, 20 bp, synthetic construct
  source 1..20: mol_type = other DNA
tacctgagactgataatgtg

SEQ ID NO: 131014 - DNA, 20 bp, synthetic construct
  source 1..20: mol_type = other DNA
ttacctgagactgataatgt

SEQ ID NO: 131015 - DNA, 20 bp, synthetic construct
  source 1..20: mol_type = other DNA
cttacctgagactgataatg

SEQ ID NO: 131016 - DNA, 20 bp, synthetic construct
  source 1..20: mol_type = other DNA
ccttacctgagactgataat

SEQ ID NO: 131017 - DNA, 20 bp, synthetic construct
  source 1..20: mol_type = other DNA
gccttacctgagactgataa

SEQ ID NO: 131018 - DNA, 20 bp, synthetic construct
  source 1..20: mol_type = other DNA
agccttacctgagactgata

SEQ ID NO: 131019 - DNA, 20 bp, synthetic construct
  source 1..20: mol_type = other DNA
cagccttacctgagactgat

SEQ ID NO: 131020 - DNA, 20 bp, synthetic construct
  source 1..20: mol_type = other DNA
ccagccttacctgagactga

SEQ ID NO: 131021 - DNA, 20 bp, synthetic construct
  source 1..20: mol_type = other DNA
accagccttacctgagactg

SEQ ID NO: 131022 - DNA, 20 bp, synthetic construct
  source 1..20: mol_type = other DNA
taccagccttacctgagact

SEQ ID NO: 131023 - DNA, 20 bp, synthetic construct
  source 1..20: mol_type = other DNA
ttaccagccttacctgagac

SEQ ID NO: 131024 - DNA, 20 bp, synthetic construct
  source 1..20: mol_type = other DNA
cttaccagccttacctgaga

SEQ ID NO: 131025 - DNA, 20 bp, synthetic construct
  source 1..20: mol_type = other DNA
ccttaccagccttacctgag

SEQ ID NO: 131026 - DNA, 20 bp, synthetic construct
  source 1..20: mol_type = other DNA
gccttaccagccttacctga

SEQ ID NO: 131027 - DNA, 20 bp, synthetic construct
  source 1..20: mol_type = other DNA
ggccttaccagccttacctg

SEQ ID NO: 131028 - DNA, 20 bp, synthetic construct
  source 1..20: mol_type = other DNA
aggccttaccagccttacct

SEQ ID NO: 131029 - DNA, 20 bp, synthetic construct
  source 1..20: mol_type = other DNA
taggccttaccagccttacc

SEQ ID NO: 131030 - DNA, 20 bp, synthetic construct
  source 1..20: mol_type = other DNA
ttaggccttaccagccttac

SEQ ID NO: 131031 - DNA, 20 bp, synthetic construct
  source 1..20: mol_type = other DNA
gttaggccttaccagcctta

SEQ ID NO: 131032 - DNA, 20 bp, synthetic construct
  source 1..20: mol_type = other DNA
agttaggccttaccagcctt

SEQ ID NO: 131033 - DNA, 20 bp, synthetic construct
  source 1..20: mol_type = other DNA
gagttaggccttaccagcct

SEQ ID NO: 131034 - DNA, 20 bp, synthetic construct
  source 1..20: mol_type = other DNA
agagttaggccttaccagcc

SEQ ID NO: 131035 - DNA, 20 bp, synthetic construct
  source 1..20: mol_type = other DNA
aagagttaggccttaccagc

SEQ ID NO: 131036 - DNA, 20 bp, synthetic construct
  source 1..20: mol_type = other DNA
taagagttaggccttaccag

SEQ ID NO: 131037 - DNA, 20 bp, synthetic construct
  source 1..20: mol_type = other DNA
ttaagagttaggccttacca

SEQ ID NO: 131038 - DNA, 20 bp, synthetic construct
  source 1..20: mol_type = other DNA
attaagagttaggccttacc

SEQ ID NO: 131039 - DNA, 20 bp, synthetic construct
  source 1..20: mol_type = other DNA
aattaagagttaggccttac

SEQ ID NO: 131040 - DNA, 20 bp, synthetic construct
  source 1..20: mol_type = other DNA
aaattaagagttaggcctta

SEQ ID NO: 131041 - DNA, 20 bp, synthetic construct
  source 1..20: mol_type = other DNA
aaaattaagagttaggcctt

SEQ ID NO: 131042 - DNA, 20 bp, synthetic construct
  source 1..20: mol_type = other DNA
aaaaattaagagttaggcct

SEQ ID NO: 131043 - DNA, 20 bp, synthetic construct
  source 1..20: mol_type = other DNA
caaaaattaagagttaggcc

SEQ ID NO: 131044 - DNA, 20 bp, synthetic construct
  source 1..20: mol_type = other DNA
acaaaaattaagagttaggc

SEQ ID NO: 131045 - DNA, 20 bp, synthetic construct
  source 1..20: mol_type = other DNA
tacaaaaattaagagttagg

SEQ ID NO: 131046 - DNA, 20 bp, synthetic construct
  source 1..20: mol_type = other DNA
gtacaaaaattaagagttag

SEQ ID NO: 131047 - DNA, 20 bp, synthetic construct
  source 1..20: mol_type = other DNA
ggtacaaaaattaagagtta

SEQ ID NO: 131048 - DNA, 20 bp, synthetic construct
  source 1..20: mol_type = other DNA
tggtacaaaaattaagagtt

SEQ ID NO: 131049 - DNA, 20 bp, synthetic construct
  source 1..20: mol_type = other DNA
atggtacaaaaattaagagt

SEQ ID NO: 131050 - DNA, 20 bp, synthetic construct
  source 1..20: mol_type = other DNA
tatggtacaaaaattaagag

SEQ ID NO: 131051 - DNA, 20 bp, synthetic construct
  source 1..20: mol_type = other DNA
atatggtacaaaaattaaga

SEQ ID NO: 131052 - DNA, 20 bp, synthetic construct
  source 1..20: mol_type = other DNA
tatatggtacaaaaattaag

SEQ ID NO: 131053 - DNA, 20 bp, synthetic construct
  source 1..20: mol_type = other DNA
ttatatggtacaaaaattaa

SEQ ID NO: 131054 - DNA, 20 bp, synthetic construct
  source 1..20: mol_type = other DNA
tttatatggtacaaaaatta

SEQ ID NO: 131055 - DNA, 20 bp, synthetic construct
  source 1..20: mol_type = other DNA
ttttatatggtacaaaaatt

SEQ ID NO: 131056 - DNA, 20 bp, synthetic construct
  source 1..20: mol_type = other DNA
tttttatatggtacaaaaat

SEQ ID NO: 131057 - DNA, 20 bp, synthetic construct
  source 1..20: mol_type = other DNA
ttttttatatggtacaaaaa

SEQ ID NO: 131058 - DNA, 20 bp, synthetic construct
  source 1..20: mol_type = other DNA
tttttttatatggtacaaaa

SEQ ID NO: 131059 - DNA, 20 bp, synthetic construct
  source 1..20: mol_type = other DNA
gtttttttatatggtacaaa

SEQ ID NO: 131060 - DNA, 20 bp, synthetic construct
  source 1..20: mol_type = other DNA
agtttttttatatggtacaa

SEQ ID NO: 131061 - DNA, 20 bp, synthetic construct
  source 1..20: mol_type = other DNA
aagtttttttatatggtaca

SEQ ID NO: 131062 - DNA, 20 bp, synthetic construct
  source 1..20: mol_type = other DNA
aaagtttttttatatggtac

SEQ ID NO: 131063 - DNA, 20 bp, synthetic construct
  source 1..20: mol_type = other DNA
aaaagtttttttatatggta

SEQ ID NO: 131064 - DNA, 20 bp, synthetic construct
  source 1..20: mol_type = other DNA
taaaagtttttttatatggt

SEQ ID NO: 131065 - DNA, 20 bp, synthetic construct
  source 1..20: mol_type = other DNA
ttaaaagtttttttatatgg

SEQ ID NO: 131066 - DNA, 20 bp, synthetic construct
  source 1..20: mol_type = other DNA
attaaaagtttttttatatg

SEQ ID NO: 131067 - DNA, 20 bp, synthetic construct
  source 1..20: mol_type = other DNA
tattaaaagtttttttatat

SEQ ID NO: 131068 - DNA, 20 bp, synthetic construct
  source 1..20: mol_type = other DNA
atattaaaagtttttttata

SEQ ID NO: 131069 - DNA, 20 bp, synthetic construct
  source 1..20: mol_type = other DNA
catattaaaagtttttttat

SEQ ID NO: 131070 - DNA, 20 bp, synthetic construct
  source 1..20: mol_type = other DNA
ccatattaaaagttttttta

SEQ ID NO: 131071 - DNA, 20 bp, synthetic construct
  source 1..20: mol_type = other DNA
accatattaaaagttttttt

SEQ ID NO: 131072 - DNA, 20 bp, synthetic construct
  source 1..20: mol_type = other DNA
taccatattaaaagtttttt

SEQ ID NO: 131073 - DNA, 20 bp, synthetic construct
  source 1..20: mol_type = other DNA
ttaccatattaaaagttttt

SEQ ID NO: 131074 - DNA, 20 bp, synthetic construct
  source 1..20: mol_type = other DNA
tttaccatattaaaagtttt

SEQ ID NO: 131075 - DNA, 20 bp, synthetic construct
  source 1..20: mol_type = other DNA
ctttaccatattaaaagttt

SEQ ID NO: 131076 - DNA, 20 bp, synthetic construct
  source 1..20: mol_type = other DNA
cctttaccatattaaaagtt

SEQ ID NO: 131077 - DNA, 20 bp, synthetic construct
  source 1..20: mol_type = other DNA
ccctttaccatattaaaagt

SEQ ID NO: 131078 - DNA, 20 bp, synthetic construct
  source 1..20: mol_type = other DNA
tccctttaccatattaaaag

SEQ ID NO: 131079 - DNA, 20 bp, synthetic construct
  source 1..20: mol_type = other DNA
atccctttaccatattaaaa

SEQ ID NO: 131080 - DNA, 20 bp, synthetic construct
  source 1..20: mol_type = other DNA
aatccctttaccatattaaa

SEQ ID NO: 131081 - DNA, 20 bp, synthetic construct
  source 1..20: mol_type = other DNA
aaatccctttaccatattaa

SEQ ID NO: 131082 - DNA, 20 bp, synthetic construct
  source 1..20: mol_type = other DNA
aaaatccctttaccatatta

SEQ ID NO: 131083 - DNA, 20 bp, synthetic construct
  source 1..20: mol_type = other DNA
gaaaatccctttaccatatt

SEQ ID NO: 131084 - DNA, 20 bp, synthetic construct
  source 1..20: mol_type = other DNA
ggaaaatccctttaccatat

SEQ ID NO: 131085 - DNA, 20 bp, synthetic construct
  source 1..20: mol_type = other DNA
aggaaaatccctttaccata

SEQ ID NO: 131086 - DNA, 20 bp, synthetic construct
  source 1..20: mol_type = other DNA
aaggaaaatccctttaccat

SEQ ID NO: 131087 - DNA, 20 bp, synthetic construct
  source 1..20: mol_type = other DNA
aaaggaaaatccctttacca

SEQ ID NO: 131088 - DNA, 20 bp, synthetic construct
  source 1..20: mol_type = other DNA
taaaggaaaatccctttacc

SEQ ID NO: 131089 - DNA, 20 bp, synthetic construct
  source 1..20: mol_type = other DNA
ataaaggaaaatccctttac

SEQ ID NO: 131090 - DNA, 20 bp, synthetic construct
  source 1..20: mol_type = other DNA
tataaaggaaaatcccttta

SEQ ID NO: 131091 - DNA, 20 bp, synthetic construct
  source 1..20: mol_type = other DNA
ttataaaggaaaatcccttt

SEQ ID NO: 131092 - DNA, 20 bp, synthetic construct
  source 1..20: mol_type = other DNA
attataaaggaaaatccctt

SEQ ID NO: 131093 - DNA, 20 bp, synthetic construct
  source 1..20: mol_type = other DNA
aattataaaggaaaatccct

SEQ ID NO: 131094 - DNA, 20 bp, synthetic construct
  source 1..20: mol_type = other DNA
aaattataaaggaaaatccc

SEQ ID NO: 131095 - DNA, 20 bp, synthetic construct
  source 1..20: mol_type = other DNA
aaaattataaaggaaaatcc

SEQ ID NO: 131096 - DNA, 20 bp, synthetic construct
  source 1..20: mol_type = other DNA
aaaaattataaaggaaaatc

SEQ ID NO: 131097 - DNA, 20 bp, synthetic construct
  source 1..20: mol_type = other DNA
caaaaattataaaggaaaat

SEQ ID NO: 131098 - DNA, 20 bp, synthetic construct
  source 1..20: mol_type = other DNA
gcaaaaattataaaggaaaa

SEQ ID NO: 131099 - DNA, 20 bp, synthetic construct
  source 1..20: mol_type = other DNA
agcaaaaattataaaggaaa

SEQ ID NO: 131100 - DNA, 20 bp, synthetic construct
  source 1..20: mol_type = other DNA
aagcaaaaattataaaggaa

SEQ ID NO: 131101 - DNA, 20 bp, synthetic construct
  source 1..20: mol_type = other DNA
aaagcaaaaattataaagga

SEQ ID NO: 131102 - DNA, 20 bp, synthetic construct
  source 1..20: mol_type = other DNA
aaaagcaaaaattataaagg

SEQ ID NO: 131103 - DNA, 20 bp, synthetic construct
  source 1..20: mol_type = other DNA
caaaagcaaaaattataaag

SEQ ID NO: 131104 - DNA, 20 bp, synthetic construct
  source 1..20: mol_type = other DNA
acaaaagcaaaaattataaa

SEQ ID NO: 131105 - DNA, 20 bp, synthetic construct
  source 1..20: mol_type = other DNA
cacaaaagcaaaaattataa

SEQ ID NO: 131106 - DNA, 20 bp, synthetic construct
  source 1..20: mol_type = other DNA
acacaaaagcaaaaattata

SEQ ID NO: 131107 - DNA, 20 bp, synthetic construct
  source 1..20: mol_type = other DNA
cacacaaaagcaaaaattat

SEQ ID NO: 131108 - DNA, 20 bp, synthetic construct
  source 1..20: mol_type = other DNA
tcacacaaaagcaaaaatta

SEQ ID NO: 131109 - DNA, 20 bp, synthetic construct
  source 1..20: mol_type = other DNA
atcacacaaaagcaaaaatt

SEQ ID NO: 131110 - DNA, 20 bp, synthetic construct
  source 1..20: mol_type = other DNA
catcacacaaaagcaaaaat

SEQ ID NO: 131111 - DNA, 20 bp, synthetic construct
  source 1..20: mol_type = other DNA
ccatcacacaaaagcaaaaa

SEQ ID NO: 131112 - DNA, 20 bp, synthetic construct
  source 1..20: mol_type = other DNA
accatcacacaaaagcaaaa

SEQ ID NO: 131113 - DNA, 20 bp, synthetic construct
  source 1..20: mol_type = other DNA
taccatcacacaaaagcaaa

SEQ ID NO: 131114 - DNA, 20 bp, synthetic construct
  source 1..20: mol_type = other DNA
ctaccatcacacaaaagcaa

SEQ ID NO: 131115 - DNA, 20 bp, synthetic construct
  source 1..20: mol_type = other DNA
cctaccatcacacaaaagca

SEQ ID NO: 131116 - DNA, 20 bp, synthetic construct
  source 1..20: mol_type = other DNA
ccctaccatcacacaaaagc

SEQ ID NO: 131117 - DNA, 20 bp, synthetic construct
  source 1..20: mol_type = other DNA
accctaccatcacacaaaag

SEQ ID NO: 131118 - DNA, 20 bp, synthetic construct
  source 1..20: mol_type = other DNA
taccctaccatcacacaaaa

SEQ ID NO: 131119 - DNA, 20 bp, synthetic construct
  source 1..20: mol_type = other DNA
ctaccctaccatcacacaaa

SEQ ID NO: 131120 - DNA, 20 bp, synthetic construct
  source 1..20: mol_type = other DNA
tctaccctaccatcacacaa

SEQ ID NO: 131121 - DNA, 20 bp, synthetic construct
  source 1..20: mol_type = other DNA
atctaccctaccatcacaca

SEQ ID NO: 131122 - DNA, 20 bp, synthetic construct
  source 1..20: mol_type = other DNA
tatctaccctaccatcacac

SEQ ID NO: 131123 - DNA, 20 bp, synthetic construct
  source 1..20: mol_type = other DNA
ctatctaccctaccatcaca

SEQ ID NO: 131124 - DNA, 20 bp, synthetic construct
  source 1..20: mol_type = other DNA
gctatctaccctaccatcac

SEQ ID NO: 131125 - DNA, 20 bp, synthetic construct
  source 1..20: mol_type = other DNA
agctatctaccctaccatca

SEQ ID NO: 131126 - DNA, 20 bp, synthetic construct
  source 1..20: mol_type = other DNA
tagctatctaccctaccatc

SEQ ID NO: 131127 - DNA, 20 bp, synthetic construct
  source 1..20: mol_type = other DNA
ttagctatctaccctaccat

SEQ ID NO: 131128 - DNA, 20 bp, synthetic construct
  source 1..20: mol_type = other DNA
cttagctatctaccctacca

SEQ ID NO: 131129 - DNA, 20 bp, synthetic construct
  source 1..20: mol_type = other DNA
ccttagctatctaccctacc

SEQ ID NO: 131130 - DNA, 20 bp, synthetic construct
  source 1..20: mol_type = other DNA
tccttagctatctaccctac

SEQ ID NO: 131131 - DNA, 20 bp, synthetic construct
  source 1..20: mol_type = other DNA
gtccttagctatctacccta

SEQ ID NO: 131132 - DNA, 20 bp, synthetic construct
  source 1..20: mol_type = other DNA
agtccttagctatctaccct

SEQ ID NO: 131133 - DNA, 20 bp, synthetic construct
  source 1..20: mol_type = other DNA
aagtccttagctatctaccc

SEQ ID NO: 131134 - DNA, 20 bp, synthetic construct
  source 1..20: mol_type = other DNA
caagtccttagctatctacc

SEQ ID NO: 131135 - DNA, 20 bp, synthetic construct
  source 1..20: mol_type = other DNA
ccaagtccttagctatctac

SEQ ID NO: 131136 - DNA, 20 bp, synthetic construct
  source 1..20: mol_type = other DNA
cccaagtccttagctatcta

SEQ ID NO: 131137 - DNA, 20 bp, synthetic construct
  source 1..20: mol_type = other DNA
ccccaagtccttagctatct

SEQ ID NO: 131138 - DNA, 20 bp, synthetic construct
  source 1..20: mol_type = other DNA
tccccaagtccttagctatc

SEQ ID NO: 131139 - DNA, 20 bp, synthetic construct
  source 1..20: mol_type = other DNA
gtccccaagtccttagctat

SEQ ID NO: 131140 - DNA, 20 bp, synthetic construct
  source 1..20: mol_type = other DNA
ggtccccaagtccttagcta

SEQ ID NO: 131141 - DNA, 20 bp, synthetic construct
  source 1..20: mol_type = other DNA
gggtccccaagtccttagct

SEQ ID NO: 131142 - DNA, 20 bp, synthetic construct
  source 1..20: mol_type = other DNA
agggtccccaagtccttagc

SEQ ID NO: 131143 - DNA, 20 bp, synthetic construct
  source 1..20: mol_type = other DNA
aagggtccccaagtccttag

SEQ ID NO: 131144 - DNA, 20 bp, synthetic construct
  source 1..20: mol_type = other DNA
aaagggtccccaagtcctta

SEQ ID NO: 131145 - DNA, 20 bp, synthetic construct
  source 1..20: mol_type = other DNA
aaaagggtccccaagtcctt

SEQ ID NO: 131146 - DNA, 20 bp, synthetic construct
  source 1..20: mol_type = other DNA
gaaaagggtccccaagtcct

SEQ ID NO: 131147 - DNA, 20 bp, synthetic construct
  source 1..20: mol_type = other DNA
tgaaaagggtccccaagtcc

SEQ ID NO: 131148 - DNA, 20 bp, synthetic construct
  source 1..20: mol_type = other DNA
ttgaaaagggtccccaagtc

SEQ ID NO: 131149 - DNA, 20 bp, synthetic construct
  source 1..20: mol_type = other DNA
attgaaaagggtccccaagt

SEQ ID NO: 131150 - DNA, 20 bp, synthetic construct
  source 1..20: mol_type = other DNA
tattgaaaagggtccccaag

SEQ ID NO: 131151 - DNA, 20 bp, synthetic construct
  source 1..20: mol_type = other DNA
atattgaaaagggtccccaa

SEQ ID NO: 131152 - DNA, 20 bp, synthetic construct
  source 1..20: mol_type = other DNA
tatattgaaaagggtcccca

SEQ ID NO: 131153 - DNA, 20 bp, synthetic construct
  source 1..20: mol_type = other DNA
atatattgaaaagggtcccc

SEQ ID NO: 131154 - DNA, 20 bp, synthetic construct
  source 1..20: mol_type = other DNA
tatatattgaaaagggtccc

SEQ ID NO: 131155 - DNA, 20 bp, synthetic construct
  source 1..20: mol_type = other DNA
atatatattgaaaagggtcc

SEQ ID NO: 131156 - DNA, 20 bp, synthetic construct
  source 1..20: mol_type = other DNA
aatatatattgaaaagggtc

SEQ ID NO: 131157 - DNA, 20 bp, synthetic construct
  source 1..20: mol_type = other DNA
gaatatatattgaaaagggt

SEQ ID NO: 131158 - DNA, 20 bp, synthetic construct
  source 1..20: mol_type = other DNA
cgaatatatattgaaaaggg

SEQ ID NO: 131159 - DNA, 20 bp, synthetic construct
  source 1..20: mol_type = other DNA
tcgaatatatattgaaaagg

SEQ ID NO: 131160 - DNA, 20 bp, synthetic construct
  source 1..20: mol_type = other DNA
ttcgaatatatattgaaaag

SEQ ID NO: 131161 - DNA, 20 bp, synthetic construct
  source 1..20: mol_type = other DNA
cttcgaatatatattgaaaa

SEQ ID NO: 131162 - DNA, 20 bp, synthetic construct
  source 1..20: mol_type = other DNA
ccttcgaatatatattgaaa

SEQ ID NO: 131163 - DNA, 20 bp, synthetic construct
  source 1..20: mol_type = other DNA
accttcgaatatatattgaa

SEQ ID NO: 131164 - DNA, 20 bp, synthetic construct
  source 1..20: mol_type = other DNA
aaccttcgaatatatattga

SEQ ID NO: 131165 - DNA, 20 bp, synthetic construct
  source 1..20: mol_type = other DNA
taaccttcgaatatatattg

SEQ ID NO: 131166 - DNA, 20 bp, synthetic construct
  source 1..20: mol_type = other DNA
gtaaccttcgaatatatatt

SEQ ID NO: 131167 - DNA, 20 bp, synthetic construct
  source 1..20: mol_type = other DNA
agtaaccttcgaatatatat

SEQ ID NO: 131168 - DNA, 20 bp, synthetic construct
  source 1..20: mol_type = other DNA
cagtaaccttcgaatatata

SEQ ID NO: 131169 - DNA, 20 bp, synthetic construct
  source 1..20: mol_type = other DNA
tcagtaaccttcgaatatat

SEQ ID NO: 131170 - DNA, 20 bp, synthetic construct
  source 1..20: mol_type = other DNA
atcagtaaccttcgaatata

SEQ ID NO: 131171 - DNA, 20 bp, synthetic construct
  source 1..20: mol_type = other DNA
catcagtaaccttcgaatat

SEQ ID NO: 131172 - DNA, 20 bp, synthetic construct
  source 1..20: mol_type = other DNA
tcatcagtaaccttcgaata

SEQ ID NO: 131173 - DNA, 20 bp, synthetic construct
  source 1..20: mol_type = other DNA
atcatcagtaaccttcgaat

SEQ ID NO: 131174 - DNA, 20 bp, synthetic construct
  source 1..20: mol_type = other DNA
aatcatcagtaaccttcgaa

SEQ ID NO: 131175 - DNA, 20 bp, synthetic construct
  source 1..20: mol_type = other DNA
caatcatcagtaaccttcga

SEQ ID NO: 131176 - DNA, 20 bp, synthetic construct
  source 1..20: mol_type = other DNA
acaatcatcagtaaccttcg

SEQ ID NO: 131177 - DNA, 20 bp, synthetic construct
  source 1..20: mol_type = other DNA
tacaatcatcagtaaccttc

SEQ ID NO: 131178 - DNA, 20 bp, synthetic construct
  source 1..20: mol_type = other DNA
ttacaatcatcagtaacctt

SEQ ID NO: 131179 - DNA, 20 bp, synthetic construct
  source 1..20: mol_type = other DNA
cttacaatcatcagtaacct

SEQ ID NO: 131180 - DNA, 20 bp, synthetic construct
  source 1..20: mol_type = other DNA
tcttacaatcatcagtaacc

SEQ ID NO: 131181 - DNA, 20 bp, synthetic construct
  source 1..20: mol_type = other DNA
ctcttacaatcatcagtaac

SEQ ID NO: 131182 - DNA, 20 bp, synthetic construct
  source 1..20: mol_type = other DNA
cctcttacaatcatcagtaa

SEQ ID NO: 131183 - DNA, 20 bp, synthetic construct
  source 1..20: mol_type = other DNA
acctcttacaatcatcagta

SEQ ID NO: 131184 - DNA, 20 bp, synthetic construct
  source 1..20: mol_type = other DNA
aacctcttacaatcatcagt

SEQ ID NO: 131185 - DNA, 20 bp, synthetic construct
  source 1..20: mol_type = other DNA
gaacctcttacaatcatcag

SEQ ID NO: 131186 - DNA, 20 bp, synthetic construct
  source 1..20: mol_type = other DNA
tgaacctcttacaatcatca

SEQ ID NO: 131187 - DNA, 20 bp, synthetic construct
  source 1..20: mol_type = other DNA
ctgaacctcttacaatcatc

SEQ ID NO: 131188 - DNA, 20 bp, synthetic construct
  source 1..20: mol_type = other DNA
tctgaacctcttacaatcat

SEQ ID NO: 131189 - DNA, 20 bp, synthetic construct
  source 1..20: mol_type = other DNA
ctctgaacctcttacaatca

SEQ ID NO: 131190 - DNA, 20 bp, synthetic construct
  source 1..20: mol_type = other DNA
cctctgaacctcttacaatc

SEQ ID NO: 131191 - DNA, 20 bp, synthetic construct
  source 1..20: mol_type = other DNA
tcctctgaacctcttacaat

SEQ ID NO: 131192 - DNA, 20 bp, synthetic construct
  source 1..20: mol_type = other DNA
ttcctctgaacctcttacaa

SEQ ID NO: 131193 - DNA, 20 bp, synthetic construct
  source 1..20: mol_type = other DNA
tttcctctgaacctcttaca

SEQ ID NO: 131194 - DNA, 20 bp, synthetic construct
  source 1..20: mol_type = other DNA
gtttcctctgaacctcttac

SEQ ID NO: 131195 - DNA, 20 bp, synthetic construct
  source 1..20: mol_type = other DNA
tgtttcctctgaacctctta

SEQ ID NO: 131196 - DNA, 20 bp, synthetic construct
  source 1..20: mol_type = other DNA
ctgtttcctctgaacctctt

SEQ ID NO: 131197 - DNA, 20 bp, synthetic construct
  source 1..20: mol_type = other DNA
gctgtttcctctgaacctct

SEQ ID NO: 131198 - DNA, 20 bp, synthetic construct
  source 1..20: mol_type = other DNA
ggctgtttcctctgaacctc

SEQ ID NO: 131199 - DNA, 20 bp, synthetic construct
  source 1..20: mol_type = other DNA
tggctgtttcctctgaacct

SEQ ID NO: 131200 - DNA, 20 bp, synthetic construct
  source 1..20: mol_type = other DNA
ttggctgtttcctctgaacc

SEQ ID NO: 131201 - DNA, 20 bp, synthetic construct
  source 1..20: mol_type = other DNA
cttggctgtttcctctgaac

SEQ ID NO: 131202 - DNA, 20 bp, synthetic construct
  source 1..20: mol_type = other DNA
tcttggctgtttcctctgaa

SEQ ID NO: 131203 - DNA, 20 bp, synthetic construct
  source 1..20: mol_type = other DNA
ttcttggctgtttcctctga

SEQ ID NO: 131204 - DNA, 20 bp, synthetic construct
  source 1..20: mol_type = other DNA
tttcttggctgtttcctctg

SEQ ID NO: 131205 - DNA, 20 bp, synthetic construct
  source 1..20: mol_type = other DNA
ctttcttggctgtttcctct

SEQ ID NO: 131206 - DNA, 20 bp, synthetic construct
  source 1..20: mol_type = other DNA
tctttcttggctgtttcctc

SEQ ID NO: 131207 - DNA, 20 bp, synthetic construct
  source 1..20: mol_type = other DNA
atctttcttggctgtttcct

SEQ ID NO: 131208 - DNA, 20 bp, synthetic construct
  source 1..20: mol_type = other DNA
aatctttcttggctgtttcc

SEQ ID NO: 131209 - DNA, 20 bp, synthetic construct
  source 1..20: mol_type = other DNA
aaatctttcttggctgtttc

SEQ ID NO: 131210 - DNA, 20 bp, synthetic construct
  source 1..20: mol_type = other DNA
caaatctttcttggctgttt

SEQ ID NO: 131211 - DNA, 20 bp, synthetic construct
  source 1..20: mol_type = other DNA
tcaaatctttcttggctgtt

SEQ ID NO: 131212 - DNA, 20 bp, synthetic construct
  source 1..20: mol_type = other DNA
ctcaaatctttcttggctgt

SEQ ID NO: 131213 - DNA, 20 bp, synthetic construct
  source 1..20: mol_type = other DNA
tctcaaatctttcttggctg

SEQ ID NO: 131214 - DNA, 20 bp, synthetic construct
  source 1..20: mol_type = other DNA
ctctcaaatctttcttggct

SEQ ID NO: 131215 - DNA, 20 bp, synthetic construct
  source 1..20: mol_type = other DNA
actctcaaatctttcttggc

SEQ ID NO: 131216 - DNA, 20 bp, synthetic construct
  source 1..20: mol_type = other DNA
aactctcaaatctttcttgg

SEQ ID NO: 131217 - DNA, 20 bp, synthetic construct
  source 1..20: mol_type = other DNA
aaactctcaaatctttcttg

SEQ ID NO: 131218 - DNA, 20 bp, synthetic construct
  source 1..20: mol_type = other DNA
taaactctcaaatctttctt

SEQ ID NO: 131219 - DNA, 20 bp, synthetic construct
  source 1..20: mol_type = other DNA
gtaaactctcaaatctttct

SEQ ID NO: 131220 - DNA, 20 bp, synthetic construct
  source 1..20: mol_type = other DNA
tgtaaactctcaaatctttc

SEQ ID NO: 131221 - DNA, 20 bp, synthetic construct
  source 1..20: mol_type = other DNA
ctgtaaactctcaaatcttt

SEQ ID NO: 131222 - DNA, 20 bp, synthetic construct
  source 1..20: mol_type = other DNA
gctgtaaactctcaaatctt

SEQ ID NO: 131223 - DNA, 20 bp, synthetic construct
  source 1..20: mol_type = other DNA
agctgtaaactctcaaatct

SEQ ID NO: 131224 - DNA, 20 bp, synthetic construct
  source 1..20: mol_type = other DNA
cagctgtaaactctcaaatc

SEQ ID NO: 131225 - DNA, 20 bp, synthetic construct
  source 1..20: mol_type = other DNA
acagctgtaaactctcaaat

SEQ ID NO: 131226 - DNA, 20 bp, synthetic construct
  source 1..20: mol_type = other DNA
aacagctgtaaactctcaaa

SEQ ID NO: 131227 - DNA, 20 bp, synthetic construct
  source 1..20: mol_type = other DNA
aaacagctgtaaactctcaa

SEQ ID NO: 131228 - DNA, 20 bp, synthetic construct
  source 1..20: mol_type = other DNA
gaaacagctgtaaactctca

SEQ ID NO: 131229 - DNA, 20 bp, synthetic construct
  source 1..20: mol_type = other DNA
agaaacagctgtaaactctc

SEQ ID NO: 131230 - DNA, 20 bp, synthetic construct
  source 1..20: mol_type = other DNA
cagaaacagctgtaaactct

SEQ ID NO: 131231 - DNA, 20 bp, synthetic construct
  source 1..20: mol_type = other DNA
ccagaaacagctgtaaactc

SEQ ID NO: 131232 - DNA, 20 bp, synthetic construct
  source 1..20: mol_type = other DNA
tccagaaacagctgtaaact

SEQ ID NO: 131233 - DNA, 20 bp, synthetic construct
  source 1..20: mol_type = other DNA
ttccagaaacagctgtaaac

SEQ ID NO: 131234 - DNA, 20 bp, synthetic construct
  source 1..20: mol_type = other DNA
tttccagaaacagctgtaaa

SEQ ID NO: 131235 - DNA, 20 bp, synthetic construct
  source 1..20: mol_type = other DNA
atttccagaaacagctgtaa

SEQ ID NO: 131236 - DNA, 20 bp, synthetic construct
  source 1..20: mol_type = other DNA
gatttccagaaacagctgta

SEQ ID NO: 131237 - DNA, 20 bp, synthetic construct
  source 1..20: mol_type = other DNA
agatttccagaaacagctgt

SEQ ID NO: 131238 - DNA, 20 bp, synthetic construct
  source 1..20: mol_type = other DNA
cagatttccagaaacagctg

SEQ ID NO: 131239 - DNA, 20 bp, synthetic construct
  source 1..20: mol_type = other DNA
ccagatttccagaaacagct

SEQ ID NO: 131240 - DNA, 20 bp, synthetic construct
  source 1..20: mol_type = other DNA
tccagatttccagaaacagc

SEQ ID NO: 131241 - DNA, 20 bp, synthetic construct
  source 1..20: mol_type = other DNA
ttccagatttccagaaacag

SEQ ID NO: 131242 - DNA, 20 bp, synthetic construct
  source 1..20: mol_type = other DNA
tttccagatttccagaaaca

SEQ ID NO: 131243 - DNA, 20 bp, synthetic construct
  source 1..20: mol_type = other DNA
gtttccagatttccagaaac

SEQ ID NO: 131244 - DNA, 20 bp, synthetic construct
  source 1..20: mol_type = other DNA
ggtttccagatttccagaaa

SEQ ID NO: 131245 - DNA, 20 bp, synthetic construct
  source 1..20: mol_type = other DNA
tggtttccagatttccagaa

SEQ ID NO: 131246 - DNA, 20 bp, synthetic construct
  source 1..20: mol_type = other DNA
atggtttccagatttccaga

SEQ ID NO: 131247 - DNA, 20 bp, synthetic construct
  source 1..20: mol_type = other DNA
catggtttccagatttccag

SEQ ID NO: 131248 - DNA, 20 bp, synthetic construct
  source 1..20: mol_type = other DNA
ccatggtttccagatttcca

SEQ ID NO: 131249 - DNA, 20 bp, synthetic construct
  source 1..20: mol_type = other DNA
tccatggtttccagatttcc

SEQ ID NO: 131250 - DNA, 20 bp, synthetic construct
  source 1..20: mol_type = other DNA
ctccatggtttccagatttc

SEQ ID NO: 131251 - DNA, 20 bp, synthetic construct
  source 1..20: mol_type = other DNA
actccatggtttccagattt

SEQ ID NO: 131252 - DNA, 20 bp, synthetic construct
  source 1..20: mol_type = other DNA
aactccatggtttccagatt

SEQ ID NO: 131253 - DNA, 20 bp, synthetic construct
  source 1..20: mol_type = other DNA
taactccatggtttccagat

SEQ ID NO: 131254 - DNA, 20 bp, synthetic construct
  source 1..20: mol_type = other DNA
ttaactccatggtttccaga

SEQ ID NO: 131255 - DNA, 20 bp, synthetic construct
  source 1..20: mol_type = other DNA
tttaactccatggtttccag

SEQ ID NO: 131256 - DNA, 20 bp, synthetic construct
  source 1..20: mol_type = other DNA
ttttaactccatggtttcca

SEQ ID NO: 131257 - DNA, 20 bp, synthetic construct
  source 1..20: mol_type = other DNA
tttttaactccatggtttcc

SEQ ID NO: 131258 - DNA, 20 bp, synthetic construct
  source 1..20: mol_type = other DNA
atttttaactccatggtttc

SEQ ID NO: 131259 - DNA, 20 bp, synthetic construct
  source 1..20: mol_type = other DNA
gatttttaactccatggttt

SEQ ID NO: 131260 - DNA, 20 bp, synthetic construct
  source 1..20: mol_type = other DNA
agatttttaactccatggtt

SEQ ID NO: 131261 - DNA, 20 bp, synthetic construct
  source 1..20: mol_type = other DNA
aagatttttaactccatggt

SEQ ID NO: 131262 - DNA, 20 bp, synthetic construct
  source 1..20: mol_type = other DNA
taagatttttaactccatgg

SEQ ID NO: 131263 - DNA, 20 bp, synthetic construct
  source 1..20: mol_type = other DNA
ttaagatttttaactccatg

SEQ ID NO: 131264 - DNA, 20 bp, synthetic construct
  source 1..20: mol_type = other DNA
gttaagatttttaactccat

SEQ ID NO: 131265 - DNA, 20 bp, synthetic construct
  source 1..20: mol_type = other DNA
agttaagatttttaactcca

SEQ ID NO: 131266 - DNA, 20 bp, synthetic construct
  source 1..20: mol_type = other DNA
tagttaagatttttaactcc

SEQ ID NO: 131267 - DNA, 20 bp, synthetic construct
  source 1..20: mol_type = other DNA
ttagttaagatttttaactc

SEQ ID NO: 131268 - DNA, 20 bp, synthetic construct
  source 1..20: mol_type = other DNA
tttagttaagatttttaact

SEQ ID NO: 131269 - DNA, 20 bp, synthetic construct
  source 1..20: mol_type = other DNA
ctttagttaagatttttaac

SEQ ID NO: 131270 - DNA, 20 bp, synthetic construct
  source 1..20: mol_type = other DNA
actttagttaagatttttaa

SEQ ID NO: 131271 - DNA, 20 bp, synthetic construct
  source 1..20: mol_type = other DNA
gactttagttaagattttta

SEQ ID NO: 131272 - DNA, 20 bp, synthetic construct
  source 1..20: mol_type = other DNA
agactttagttaagattttt

SEQ ID NO: 131273 - DNA, 20 bp, synthetic construct
  source 1..20: mol_type = other DNA
cagactttagttaagatttt

SEQ ID NO: 131274 - DNA, 20 bp, synthetic construct
  source 1..20: mol_type = other DNA
gcagactttagttaagattt

SEQ ID NO: 131275 - DNA, 20 bp, synthetic construct
  source 1..20: mol_type = other DNA
agcagactttagttaagatt

SEQ ID NO: 131276 - DNA, 20 bp, synthetic construct
  source 1..20: mol_type = other DNA
aagcagactttagttaagat

SEQ ID NO: 131277 - DNA, 20 bp, synthetic construct
  source 1..20: mol_type = other DNA
caagcagactttagttaaga

SEQ ID NO: 131278 - DNA, 20 bp, synthetic construct
  source 1..20: mol_type = other DNA
ccaagcagactttagttaag

SEQ ID NO: 131279 - DNA, 20 bp, synthetic construct
  source 1..20: mol_type = other DNA
gccaagcagactttagttaa

SEQ ID NO: 131280 - DNA, 20 bp, synthetic construct
  source 1..20: mol_type = other DNA
agccaagcagactttagtta

SEQ ID NO: 131281 - DNA, 20 bp, synthetic construct
  source 1..20: mol_type = other DNA
gagccaagcagactttagtt

SEQ ID NO: 131282 - DNA, 20 bp, synthetic construct
  source 1..20: mol_type = other DNA
agagccaagcagactttagt

SEQ ID NO: 131283 - DNA, 20 bp, synthetic construct
  source 1..20: mol_type = other DNA
tagagccaagcagactttag

SEQ ID NO: 131284 - DNA, 20 bp, synthetic construct
  source 1..20: mol_type = other DNA
atagagccaagcagacttta

SEQ ID NO: 131285 - DNA, 20 bp, synthetic construct
  source 1..20: mol_type = other DNA
aatagagccaagcagacttt

SEQ ID NO: 131286 - DNA, 20 bp, synthetic construct
  source 1..20: mol_type = other DNA
aaatagagccaagcagactt

SEQ ID NO: 131287 - DNA, 20 bp, synthetic construct
  source 1..20: mol_type = other DNA
caaatagagccaagcagact

SEQ ID NO: 131288 - DNA, 20 bp, synthetic construct
  source 1..20: mol_type = other DNA
gcaaatagagccaagcagac

SEQ ID NO: 131289 - DNA, 20 bp, synthetic construct
  source 1..20: mol_type = other DNA
tgcaaatagagccaagcaga

SEQ ID NO: 131290 - DNA, 20 bp, synthetic construct
  source 1..20: mol_type = other DNA
ctgcaaatagagccaagcag

SEQ ID NO: 131291 - DNA, 20 bp, synthetic construct
  source 1..20: mol_type = other DNA
actgcaaatagagccaagca

SEQ ID NO: 131292 - DNA, 20 bp, synthetic construct
  source 1..20: mol_type = other DNA
cactgcaaatagagccaagc

SEQ ID NO: 131293 - DNA, 20 bp, synthetic construct
  source 1..20: mol_type = other DNA
acactgcaaatagagccaag

SEQ ID NO: 131294 - DNA, 20 bp, synthetic construct
  source 1..20: mol_type = other DNA
aacactgcaaatagagccaa

SEQ ID NO: 131295 - DNA, 20 bp, synthetic construct
  source 1..20: mol_type = other DNA
taacactgcaaatagagcca

SEQ ID NO: 131296 - DNA, 20 bp, synthetic construct
  source 1..20: mol_type = other DNA
ttaacactgcaaatagagcc

SEQ ID NO: 131297 - DNA, 20 bp, synthetic construct
  source 1..20: mol_type = other DNA
attaacactgcaaatagagc

SEQ ID NO: 131298 - DNA, 20 bp, synthetic construct
  source 1..20: mol_type = other DNA
cattaacactgcaaatagag

SEQ ID NO: 131299 - DNA, 20 bp, synthetic construct
  source 1..20: mol_type = other DNA
acattaacactgcaaataga

SEQ ID NO: 131300 - DNA, 20 bp, synthetic construct
  source 1..20: mol_type = other DNA
cacattaacactgcaaatag

SEQ ID NO: 131301 - DNA, 20 bp, synthetic construct
  source 1..20: mol_type = other DNA
gcacattaacactgcaaata

SEQ ID NO: 131302 - DNA, 20 bp, synthetic construct
  source 1..20: mol_type = other DNA
agcacattaacactgcaaat

SEQ ID NO: 131303 - DNA, 20 bp, synthetic construct
  source 1..20: mol_type = other DNA
aagcacattaacactgcaaa

SEQ ID NO: 131304 - DNA, 20 bp, synthetic construct
  source 1..20: mol_type = other DNA
aaagcacattaacactgcaa

SEQ ID NO: 131305 - DNA, 20 bp, synthetic construct
  source 1..20: mol_type = other DNA
gaaagcacattaacactgca

SEQ ID NO: 131306 - DNA, 20 bp, synthetic construct
  source 1..20: mol_type = other DNA
agaaagcacattaacactgc

SEQ ID NO: 131307 - DNA, 20 bp, synthetic construct
  source 1..20: mol_type = other DNA
aagaaagcacattaacactg

SEQ ID NO: 131308 - DNA, 20 bp, synthetic construct
  source 1..20: mol_type = other DNA
aaagaaagcacattaacact

SEQ ID NO: 131309 - DNA, 20 bp, synthetic construct
  source 1..20: mol_type = other DNA
taaagaaagcacattaacac

SEQ ID NO: 131310 - DNA, 20 bp, synthetic construct
  source 1..20: mol_type = other DNA
ataaagaaagcacattaaca

SEQ ID NO: 131311 - DNA, 20 bp, synthetic construct
  source 1..20: mol_type = other DNA
aataaagaaagcacattaac

SEQ ID NO: 131312 - DNA, 20 bp, synthetic construct
  source 1..20: mol_type = other DNA
aaataaagaaagcacattaa

SEQ ID NO: 131313 - DNA, 20 bp, synthetic construct
  source 1..20: mol_type = other DNA
aaaataaagaaagcacatta

SEQ ID NO: 131314 - DNA, 20 bp, synthetic construct
  source 1..20: mol_type = other DNA
aaaaataaagaaagcacatt

SEQ ID NO: 131315 - DNA, 20 bp, synthetic construct
  source 1..20: mol_type = other DNA
aaaaaataaagaaagcacat

SEQ ID NO: 131316 - DNA, 20 bp, synthetic construct
  source 1..20: mol_type = other DNA
caaaaaataaagaaagcaca

SEQ ID NO: 131317 - DNA, 20 bp, synthetic construct
  source 1..20: mol_type = other DNA
acaaaaaataaagaaagcac

SEQ ID NO: 131318 - DNA, 20 bp, synthetic construct
  source 1..20: mol_type = other DNA
aacaaaaaataaagaaagca

SEQ ID NO: 131319 - DNA, 20 bp, synthetic construct
  source 1..20: mol_type = other DNA
aaacaaaaaataaagaaagc

SEQ ID NO: 131320 - DNA, 20 bp, synthetic construct
  source 1..20: mol_type = other DNA
caaacaaaaaataaagaaag

SEQ ID NO: 131321 - DNA, 20 bp, synthetic construct
  source 1..20: mol_type = other DNA
tcaaacaaaaaataaagaaa

SEQ ID NO: 131322 - DNA, 20 bp, synthetic construct
  source 1..20: mol_type = other DNA
ttcaaacaaaaaataaagaa

SEQ ID NO: 131323 - DNA, 20 bp, synthetic construct
  source 1..20: mol_type = other DNA
gttcaaacaaaaaataaaga

SEQ ID NO: 131324 - DNA, 20 bp, synthetic construct
  source 1..20: mol_type = other DNA
tgttcaaacaaaaaataaag

SEQ ID NO: 131325 - DNA, 20 bp, synthetic construct
  source 1..20: mol_type = other DNA
gtgttcaaacaaaaaataaa

SEQ ID NO: 131326 - DNA, 20 bp, synthetic construct
  source 1..20: mol_type = other DNA
tgtgttcaaacaaaaaataa

SEQ ID NO: 131327 - DNA, 20 bp, synthetic construct
  source 1..20: mol_type = other DNA
ctgtgttcaaacaaaaaata

SEQ ID NO: 131328 - DNA, 20 bp, synthetic construct
  source 1..20: mol_type = other DNA
gctgtgttcaaacaaaaaat

SEQ ID NO: 131329 - DNA, 20 bp, synthetic construct
  source 1..20: mol_type = other DNA
tgctgtgttcaaacaaaaaa

SEQ ID NO: 131330 - DNA, 20 bp, synthetic construct
  source 1..20: mol_type = other DNA
atgctgtgttcaaacaaaaa

SEQ ID NO: 131331 - DNA, 20 bp, synthetic construct
  source 1..20: mol_type = other DNA
gatgctgtgttcaaacaaaa

SEQ ID NO: 131332 - DNA, 20 bp, synthetic construct
  source 1..20: mol_type = other DNA
ggatgctgtgttcaaacaaa

SEQ ID NO: 131333 - DNA, 20 bp, synthetic construct
  source 1..20: mol_type = other DNA
aggatgctgtgttcaaacaa

SEQ ID NO: 131334 - DNA, 20 bp, synthetic construct
  source 1..20: mol_type = other DNA
gaggatgctgtgttcaaaca

SEQ ID NO: 131335 - DNA, 20 bp, synthetic construct
  source 1..20: mol_type = other DNA
tgaggatgctgtgttcaaac

SEQ ID NO: 131336 - DNA, 20 bp, synthetic construct
  source 1..20: mol_type = other DNA
atgaggatgctgtgttcaaa

SEQ ID NO: 131337 - DNA, 20 bp, synthetic construct
  source 1..20: mol_type = other DNA
catgaggatgctgtgttcaa

SEQ ID NO: 131338 - DNA, 20 bp, synthetic construct
  source 1..20: mol_type = other DNA
acatgaggatgctgtgttca

SEQ ID NO: 131339 - DNA, 20 bp, synthetic construct
  source 1..20: mol_type = other DNA
gacatgaggatgctgtgttc

SEQ ID NO: 131340 - DNA, 20 bp, synthetic construct
  source 1..20: mol_type = other DNA
agacatgaggatgctgtgtt

SEQ ID NO: 131341 - DNA, 20 bp, synthetic construct
  source 1..20: mol_type = other DNA
tagacatgaggatgctgtgt

SEQ ID NO: 131342 - DNA, 20 bp, synthetic construct
  source 1..20: mol_type = other DNA
atagacatgaggatgctgtg

SEQ ID NO: 131343 - DNA, 20 bp, synthetic construct
  source 1..20: mol_type = other DNA
tatagacatgaggatgctgt

SEQ ID NO: 131344 - DNA, 20 bp, synthetic construct
  source 1..20: mol_type = other DNA
ctatagacatgaggatgctg

SEQ ID NO: 131345 - DNA, 20 bp, synthetic construct
  source 1..20: mol_type = other DNA
actatagacatgaggatgct

SEQ ID NO: 131346 - DNA, 20 bp, synthetic construct
  source 1..20: mol_type = other DNA
gactatagacatgaggatgc

SEQ ID NO: 131347 - DNA, 20 bp, synthetic construct
  source 1..20: mol_type = other DNA
ggactatagacatgaggatg

SEQ ID NO: 131348 - DNA, 20 bp, synthetic construct
  source 1..20: mol_type = other DNA
aggactatagacatgaggat

SEQ ID NO: 131349 - DNA, 20 bp, synthetic construct
  source 1..20: mol_type = other DNA
caggactatagacatgagga

SEQ ID NO: 131350 - DNA, 20 bp, synthetic construct
  source 1..20: mol_type = other DNA
acaggactatagacatgagg

SEQ ID NO: 131351 - DNA, 20 bp, synthetic construct
  source 1..20: mol_type = other DNA
tacaggactatagacatgag

SEQ ID NO: 131352 - DNA, 20 bp, synthetic construct
  source 1..20: mol_type = other DNA
ttacaggactatagacatga

SEQ ID NO: 131353 - DNA, 20 bp, synthetic construct
  source 1..20: mol_type = other DNA
attacaggactatagacatg

SEQ ID NO: 131354 - DNA, 20 bp, synthetic construct
  source 1..20: mol_type = other DNA
tattacaggactatagacat

SEQ ID NO: 131355 - DNA, 20 bp, synthetic construct
  source 1..20: mol_type = other DNA
gtattacaggactatagaca

SEQ ID NO: 131356 - DNA, 20 bp, synthetic construct
  source 1..20: mol_type = other DNA
tgtattacaggactatagac

SEQ ID NO: 131357 - DNA, 20 bp, synthetic construct
  source 1..20: mol_type = other DNA
ctgtattacaggactataga

SEQ ID NO: 131358 - DNA, 20 bp, synthetic construct
  source 1..20: mol_type = other DNA
cctgtattacaggactatag

SEQ ID NO: 131359 - DNA, 20 bp, synthetic construct
  source 1..20: mol_type = other DNA
ccctgtattacaggactata

SEQ ID NO: 131360 - DNA, 20 bp, synthetic construct
  source 1..20: mol_type = other DNA
accctgtattacaggactat

SEQ ID NO: 131361 - DNA, 20 bp, synthetic construct
  source 1..20: mol_type = other DNA
taccctgtattacaggacta

SEQ ID NO: 131362 - DNA, 20 bp, synthetic construct
  source 1..20: mol_type = other DNA
ttaccctgtattacaggact

SEQ ID NO: 131363 - DNA, 20 bp, synthetic construct
  source 1..20: mol_type = other DNA
attaccctgtattacaggac

SEQ ID NO: 131364 - DNA, 20 bp, synthetic construct
  source 1..20: mol_type = other DNA
cattaccctgtattacagga

SEQ ID NO: 131365 - DNA, 20 bp, synthetic construct
  source 1..20: mol_type = other DNA
gcattaccctgtattacagg

SEQ ID NO: 131366 - DNA, 20 bp, synthetic construct
  source 1..20: mol_type = other DNA
agcattaccctgtattacag

SEQ ID NO: 131367 - DNA, 20 bp, synthetic construct
  source 1..20: mol_type = other DNA
tagcattaccctgtattaca

SEQ ID NO: 131368 - DNA, 20 bp, synthetic construct
  source 1..20: mol_type = other DNA
ctagcattaccctgtattac

SEQ ID NO: 131369 - DNA, 20 bp, synthetic construct
  source 1..20: mol_type = other DNA
tctagcattaccctgtatta

SEQ ID NO: 131370 - DNA, 20 bp, synthetic construct
  source 1..20: mol_type = other DNA
ttctagcattaccctgtatt

SEQ ID NO: 131371 - DNA, 20 bp, synthetic construct
  source 1..20: mol_type = other DNA
attctagcattaccctgtat

SEQ ID NO: 131372 - DNA, 20 bp, synthetic construct
  source 1..20: mol_type = other DNA
cattctagcattaccctgta

SEQ ID NO: 131373 - DNA, 20 bp, synthetic construct
  source 1..20: mol_type = other DNA
tcattctagcattaccctgt

SEQ ID NO: 131374 - DNA, 20 bp, synthetic construct
  source 1..20: mol_type = other DNA
atcattctagcattaccctg

SEQ ID NO: 131375 - DNA, 20 bp, synthetic construct
  source 1..20: mol_type = other DNA
catcattctagcattaccct

SEQ ID NO: 131376 - DNA, 20 bp, synthetic construct
  source 1..20: mol_type = other DNA
ccatcattctagcattaccc

SEQ ID NO: 131377 - DNA, 20 bp, synthetic construct
  source 1..20: mol_type = other DNA
gccatcattctagcattacc

SEQ ID NO: 131378 - DNA, 20 bp, synthetic construct
  source 1..20: mol_type = other DNA
tgccatcattctagcattac

SEQ ID NO: 131379 - DNA, 20 bp, synthetic construct
  source 1..20: mol_type = other DNA
gtgccatcattctagcatta

SEQ ID NO: 131380 - DNA, 20 bp, synthetic construct
  source 1..20: mol_type = other DNA
ggtgccatcattctagcatt

SEQ ID NO: 131381 - DNA, 20 bp, synthetic construct
  source 1..20: mol_type = other DNA
tggtgccatcattctagcat

SEQ ID NO: 131382 - DNA, 20 bp, synthetic construct
  source 1..20: mol_type = other DNA
gtggtgccatcattctagca

SEQ ID NO: 131383 - DNA, 20 bp, synthetic construct
  source 1..20: mol_type = other DNA
ggtggtgccatcattctagc

SEQ ID NO: 131384 - DNA, 20 bp, synthetic construct
  source 1..20: mol_type = other DNA
tggtggtgccatcattctag

SEQ ID NO: 131385 - DNA, 20 bp, synthetic construct
  source 1..20: mol_type = other DNA
ttggtggtgccatcattcta

SEQ ID NO: 131386 - DNA, 20 bp, synthetic construct
  source 1..20: mol_type = other DNA
gttggtggtgccatcattct

SEQ ID NO: 131387 - DNA, 20 bp, synthetic construct
  source 1..20: mol_type = other DNA
tgttggtggtgccatcattc

SEQ ID NO: 131388 - DNA, 20 bp, synthetic construct
  source 1..20: mol_type = other DNA
gtgttggtggtgccatcatt

SEQ ID NO: 131389 - DNA, 20 bp, synthetic construct
  source 1..20: mol_type = other DNA
tgtgttggtggtgccatcat

SEQ ID NO: 131390 - DNA, 20 bp, synthetic construct
  source 1..20: mol_type = other DNA
gtgtgttggtggtgccatca

SEQ ID NO: 131391 - DNA, 20 bp, synthetic construct
  source 1..20: mol_type = other DNA
cgtgtgttggtggtgccatc

SEQ ID NO: 131392 - DNA, 20 bp, synthetic construct
  source 1..20: mol_type = other DNA
gcgtgtgttggtggtgccat

SEQ ID NO: 131393 - DNA, 20 bp, synthetic construct
  source 1..20: mol_type = other DNA
ggcgtgtgttggtggtgcca

SEQ ID NO: 131394 - DNA, 20 bp, synthetic construct
  source 1..20: mol_type = other DNA
gggcgtgtgttggtggtgcc

SEQ ID NO: 131395 - DNA, 20 bp, synthetic construct
  source 1..20: mol_type = other DNA
tgggcgtgtgttggtggtgc

SEQ ID NO: 131396 - DNA, 20 bp, synthetic construct
  source 1..20: mol_type = other DNA
ctgggcgtgtgttggtggtg

SEQ ID NO: 131397 - DNA, 20 bp, synthetic construct
  source 1..20: mol_type = other DNA
gctgggcgtgtgttggtggt

SEQ ID NO: 131398 - DNA, 20 bp, synthetic construct
  source 1..20: mol_type = other DNA
ggctgggcgtgtgttggtgg

SEQ ID NO: 131399 - DNA, 20 bp, synthetic construct
  source 1..20: mol_type = other DNA
aggctgggcgtgtgttggtg

SEQ ID NO: 131400 - DNA, 20 bp, synthetic construct
  source 1..20: mol_type = other DNA
caggctgggcgtgtgttggt

SEQ ID NO: 131401 - DNA, 20 bp, synthetic construct
  source 1..20: mol_type = other DNA
ccaggctgggcgtgtgttgg

SEQ ID NO: 131402 - DNA, 20 bp, synthetic construct
  source 1..20: mol_type = other DNA
accaggctgggcgtgtgttg

SEQ ID NO: 131403 - DNA, 20 bp, synthetic construct
  source 1..20: mol_type = other DNA
aaccaggctgggcgtgtgtt

SEQ ID NO: 131404 - DNA, 20 bp, synthetic construct
  source 1..20: mol_type = other DNA
aaaccaggctgggcgtgtgt

SEQ ID NO: 131405 - DNA, 20 bp, synthetic construct
  source 1..20: mol_type = other DNA
taaaccaggctgggcgtgtg

SEQ ID NO: 131406 - DNA, 20 bp, synthetic construct
  source 1..20: mol_type = other DNA
ctaaaccaggctgggcgtgt

SEQ ID NO: 131407 - DNA, 20 bp, synthetic construct
  source 1..20: mol_type = other DNA
actaaaccaggctgggcgtg

SEQ ID NO: 131408 - DNA, 20 bp, synthetic construct
  source 1..20: mol_type = other DNA
tactaaaccaggctgggcgt

SEQ ID NO: 131409 - DNA, 20 bp, synthetic construct
  source 1..20: mol_type = other DNA
atactaaaccaggctgggcg

SEQ ID NO: 131410 - DNA, 20 bp, synthetic construct
  source 1..20: mol_type = other DNA
gatactaaaccaggctgggc

SEQ ID NO: 131411 - DNA, 20 bp, synthetic construct
  source 1..20: mol_type = other DNA
agatactaaaccaggctggg

SEQ ID NO: 131412 - DNA, 20 bp, synthetic construct
  source 1..20: mol_type = other DNA
aagatactaaaccaggctgg

SEQ ID NO: 131413 - DNA, 20 bp, synthetic construct
  source 1..20: mol_type = other DNA
gaagatactaaaccaggctg

SEQ ID NO: 131414 - DNA, 20 bp, synthetic construct
  source 1..20: mol_type = other DNA
agaagatactaaaccaggct

SEQ ID NO: 131415 - DNA, 20 bp, synthetic construct
  source 1..20: mol_type = other DNA
aagaagatactaaaccaggc

SEQ ID NO: 131416 - DNA, 20 bp, synthetic construct
  source 1..20: mol_type = other DNA
gaagaagatactaaaccagg

SEQ ID NO: 131417 - DNA, 20 bp, synthetic construct
  source 1..20: mol_type = other DNA
tgaagaagatactaaaccag

SEQ ID NO: 131418 - DNA, 20 bp, synthetic construct
  source 1..20: mol_type = other DNA
ctgaagaagatactaaacca

SEQ ID NO: 131419 - DNA, 20 bp, synthetic construct
  source 1..20: mol_type = other DNA
gctgaagaagatactaaacc

SEQ ID NO: 131420 - DNA, 20 bp, synthetic construct
  source 1..20: mol_type = other DNA
tgctgaagaagatactaaac

SEQ ID NO: 131421 - DNA, 20 bp, synthetic construct
  source 1..20: mol_type = other DNA
ttgctgaagaagatactaaa

SEQ ID NO: 131422 - DNA, 20 bp, synthetic construct
  source 1..20: mol_type = other DNA
gttgctgaagaagatactaa

SEQ ID NO: 131423 - DNA, 20 bp, synthetic construct
  source 1..20: mol_type = other DNA
agttgctgaagaagatacta

SEQ ID NO: 131424 - DNA, 20 bp, synthetic construct
  source 1..20: mol_type = other DNA
gagttgctgaagaagatact

SEQ ID NO: 131425 - DNA, 20 bp, synthetic construct
  source 1..20: mol_type = other DNA
tgagttgctgaagaagatac

SEQ ID NO: 131426 - DNA, 20 bp, synthetic construct
  source 1..20: mol_type = other DNA
ctgagttgctgaagaagata

SEQ ID NO: 131427 - DNA, 20 bp, synthetic construct
  source 1..20: mol_type = other DNA
actgagttgctgaagaagat

SEQ ID NO: 131428 - DNA, 20 bp, synthetic construct
  source 1..20: mol_type = other DNA
tactgagttgctgaagaaga

SEQ ID NO: 131429 - DNA, 20 bp, synthetic construct
  source 1..20: mol_type = other DNA
gtactgagttgctgaagaag

SEQ ID NO: 131430 - DNA, 20 bp, synthetic construct
  source 1..20: mol_type = other DNA
cgtactgagttgctgaagaa

SEQ ID NO: 131431 - DNA, 20 bp, synthetic construct
  source 1..20: mol_type = other DNA
ccgtactgagttgctgaaga

SEQ ID NO: 131432 - DNA, 20 bp, synthetic construct
  source 1..20: mol_type = other DNA
cccgtactgagttgctgaag

SEQ ID NO: 131433 - DNA, 20 bp, synthetic construct
  source 1..20: mol_type = other DNA
ccccgtactgagttgctgaa

SEQ ID NO: 131434 - DNA, 20 bp, synthetic construct
  source 1..20: mol_type = other DNA
gccccgtactgagttgctga

SEQ ID NO: 131435 - DNA, 20 bp, synthetic construct
  source 1..20: mol_type = other DNA
agccccgtactgagttgctg

SEQ ID NO: 131436 - DNA, 20 bp, synthetic construct
  source 1..20: mol_type = other DNA
gagccccgtactgagttgct

SEQ ID NO: 131437 - DNA, 20 bp, synthetic construct
  source 1..20: mol_type = other DNA
tgagccccgtactgagttgc

SEQ ID NO: 131438 - DNA, 20 bp, synthetic construct
  source 1..20: mol_type = other DNA
atgagccccgtactgagttg

SEQ ID NO: 131439 - DNA, 20 bp, synthetic construct
  source 1..20: mol_type = other DNA
catgagccccgtactgagtt

SEQ ID NO: 131440 - DNA, 20 bp, synthetic construct
  source 1..20: mol_type = other DNA
tcatgagccccgtactgagt

SEQ ID NO: 131441 - DNA, 20 bp, synthetic construct
  source 1..20: mol_type = other DNA
ctcatgagccccgtactgag

SEQ ID NO: 131442 - DNA, 20 bp, synthetic construct
  source 1..20: mol_type = other DNA
gctcatgagccccgtactga

SEQ ID NO: 131443 - DNA, 20 bp, synthetic construct
  source 1..20: mol_type = other DNA
tgctcatgagccccgtactg

SEQ ID NO: 131444 - DNA, 20 bp, synthetic construct
  source 1..20: mol_type = other DNA
ctgctcatgagccccgtact

SEQ ID NO: 131445 - DNA, 20 bp, synthetic construct
  source 1..20: mol_type = other DNA
tctgctcatgagccccgtac

SEQ ID NO: 131446 - DNA, 20 bp, synthetic construct
  source 1..20: mol_type = other DNA
gtctgctcatgagccccgta

SEQ ID NO: 131447 - DNA, 20 bp, synthetic construct
  source 1..20: mol_type = other DNA
cgtctgctcatgagccccgt

SEQ ID NO: 131448 - DNA, 20 bp, synthetic construct
  source 1..20: mol_type = other DNA
gcgtctgctcatgagccccg

SEQ ID NO: 131449 - DNA, 20 bp, synthetic construct
  source 1..20: mol_type = other DNA
tgcgtctgctcatgagcccc

SEQ ID NO: 131450 - DNA, 20 bp, synthetic construct
  source 1..20: mol_type = other DNA
atgcgtctgctcatgagccc

SEQ ID NO: 131451 - DNA, 20 bp, synthetic construct
  source 1..20: mol_type = other DNA
catgcgtctgctcatgagcc

SEQ ID NO: 131452 - DNA, 20 bp, synthetic construct
  source 1..20: mol_type = other DNA
gcatgcgtctgctcatgagc

SEQ ID NO: 131453 - DNA, 20 bp, synthetic construct
  source 1..20: mol_type = other DNA
cgcatgcgtctgctcatgag

SEQ ID NO: 131454 - DNA, 20 bp, synthetic construct
  source 1..20: mol_type = other DNA
tcgcatgcgtctgctcatga

SEQ ID NO: 131455 - DNA, 20 bp, synthetic construct
  source 1..20: mol_type = other DNA
atcgcatgcgtctgctcatg

SEQ ID NO: 131456 - DNA, 20 bp, synthetic construct
  source 1..20: mol_type = other DNA
catcgcatgcgtctgctcat

SEQ ID NO: 131457 - DNA, 20 bp, synthetic construct
  source 1..20: mol_type = other DNA
acatcgcatgcgtctgctca

SEQ ID NO: 131458 - DNA, 20 bp, synthetic construct
  source 1..20: mol_type = other DNA
tacatcgcatgcgtctgctc

SEQ ID NO: 131459 - DNA, 20 bp, synthetic construct
  source 1..20: mol_type = other DNA
atacatcgcatgcgtctgct

SEQ ID NO: 131460 - DNA, 20 bp, synthetic construct
  source 1..20: mol_type = other DNA
catacatcgcatgcgtctgc

SEQ ID NO: 131461 - DNA, 20 bp, synthetic construct
  source 1..20: mol_type = other DNA
ccatacatcgcatgcgtctg

SEQ ID NO: 131462 - DNA, 20 bp, synthetic construct
  source 1..20: mol_type = other DNA
accatacatcgcatgcgtct

SEQ ID NO: 131463 - DNA, 20 bp, synthetic construct
  source 1..20: mol_type = other DNA
taccatacatcgcatgcgtc

SEQ ID NO: 131464 - DNA, 20 bp, synthetic construct
  source 1..20: mol_type = other DNA
ctaccatacatcgcatgcgt

SEQ ID NO: 131465 - DNA, 20 bp, synthetic construct
  source 1..20: mol_type = other DNA
cctaccatacatcgcatgcg

SEQ ID NO: 131466 - DNA, 20 bp, synthetic construct
  source 1..20: mol_type = other DNA
tcctaccatacatcgcatgc

SEQ ID NO: 131467 - DNA, 20 bp, synthetic construct
  source 1..20: mol_type = other DNA
ttcctaccatacatcgcatg

SEQ ID NO: 131468 - DNA, 20 bp, synthetic construct
  source 1..20: mol_type = other DNA
cttcctaccatacatcgcat

SEQ ID NO: 131469 - DNA, 20 bp, synthetic construct
  source 1..20: mol_type = other DNA
gcttcctaccatacatcgca

SEQ ID NO: 131470 - DNA, 20 bp, synthetic construct
  source 1..20: mol_type = other DNA
tgcttcctaccatacatcgc

SEQ ID NO: 131471 - DNA, 20 bp, synthetic construct
  source 1..20: mol_type = other DNA
gtgcttcctaccatacatcg

SEQ ID NO: 131472 - DNA, 20 bp, synthetic construct
  source 1..20: mol_type = other DNA
agtgcttcctaccatacatc

SEQ ID NO: 131473 - DNA, 20 bp, synthetic construct
  source 1..20: mol_type = other DNA
aagtgcttcctaccatacat

SEQ ID NO: 131474 - DNA, 20 bp, synthetic construct
  source 1..20: mol_type = other DNA
aaagtgcttcctaccataca

SEQ ID NO: 131475 - DNA, 20 bp, synthetic construct
  source 1..20: mol_type = other DNA
caaagtgcttcctaccatac

SEQ ID NO: 131476 - DNA, 20 bp, synthetic construct
  source 1..20: mol_type = other DNA
acaaagtgcttcctaccata

SEQ ID NO: 131477 - DNA, 20 bp, synthetic construct
  source 1..20: mol_type = other DNA
aacaaagtgcttcctaccat

SEQ ID NO: 131478 - DNA, 20 bp, synthetic construct
  source 1..20: mol_type = other DNA
aaacaaagtgcttcctacca

SEQ ID NO: 131479 - DNA, 20 bp, synthetic construct
  source 1..20: mol_type = other DNA
caaacaaagtgcttcctacc

SEQ ID NO: 131480 - DNA, 20 bp, synthetic construct
  source 1..20: mol_type = other DNA
acaaacaaagtgcttcctac

SEQ ID NO: 131481 - DNA, 20 bp, synthetic construct
  source 1..20: mol_type = other DNA
gacaaacaaagtgcttccta

SEQ ID NO: 131482 - DNA, 20 bp, synthetic construct
  source 1..20: mol_type = other DNA
agacaaacaaagtgcttcct

SEQ ID NO: 131483 - DNA, 20 bp, synthetic construct
  source 1..20: mol_type = other DNA
gagacaaacaaagtgcttcc

SEQ ID NO: 131484 - DNA, 20 bp, synthetic construct
  source 1..20: mol_type = other DNA
agagacaaacaaagtgcttc

SEQ ID NO: 131485 - DNA, 20 bp, synthetic construct
  source 1..20: mol_type = other DNA
aagagacaaacaaagtgctt

SEQ ID NO: 131486 - DNA, 20 bp, synthetic construct
  source 1..20: mol_type = other DNA
gaagagacaaacaaagtgct

SEQ ID NO: 131487 - DNA, 20 bp, synthetic construct
  source 1..20: mol_type = other DNA
ggaagagacaaacaaagtgc

SEQ ID NO: 131488 - DNA, 20 bp, synthetic construct
  source 1..20: mol_type = other DNA
tggaagagacaaacaaagtg

SEQ ID NO: 131489 - DNA, 20 bp, synthetic construct
  source 1..20: mol_type = other DNA
ctggaagagacaaacaaagt

SEQ ID NO: 131490 - DNA, 20 bp, synthetic construct
  source 1..20: mol_type = other DNA
actggaagagacaaacaaag

SEQ ID NO: 131491 - DNA, 20 bp, synthetic construct
  source 1..20: mol_type = other DNA
cactggaagagacaaacaaa

SEQ ID NO: 131492 - DNA, 20 bp, synthetic construct
  source 1..20: mol_type = other DNA
acactggaagagacaaacaa

SEQ ID NO: 131493 - DNA, 20 bp, synthetic construct
  source 1..20: mol_type = other DNA
cacactggaagagacaaaca

SEQ ID NO: 131494 - DNA, 20 bp, synthetic construct
  source 1..20: mol_type = other DNA
acacactggaagagacaaac

SEQ ID NO: 131495 - DNA, 20 bp, synthetic construct
  source 1..20: mol_type = other DNA
cacacactggaagagacaaa

SEQ ID NO: 131496 - DNA, 20 bp, synthetic construct
  source 1..20: mol_type = other DNA
acacacactggaagagacaa

SEQ ID NO: 131497 - DNA, 20 bp, synthetic construct
  source 1..20: mol_type = other DNA
cacacacactggaagagaca

SEQ ID NO: 131498 - DNA, 20 bp, synthetic construct
  source 1..20: mol_type = other DNA
tcacacacactggaagagac

SEQ ID NO: 131499 - DNA, 20 bp, synthetic construct
  source 1..20: mol_type = other DNA
gtcacacacactggaagaga

SEQ ID NO: 131500 - DNA, 20 bp, synthetic construct
  source 1..20: mol_type = other DNA
agtcacacacactggaagag

SEQ ID NO: 131501 - DNA, 20 bp, synthetic construct
  source 1..20: mol_type = other DNA
gagtcacacacactggaaga

SEQ ID NO: 131502 - DNA, 20 bp, synthetic construct
  source 1..20: mol_type = other DNA
agagtcacacacactggaag

SEQ ID NO: 131503 - DNA, 20 bp, synthetic construct
  source 1..20: mol_type = other DNA
aagagtcacacacactggaa

SEQ ID NO: 131504 - DNA, 20 bp, synthetic construct
  source 1..20: mol_type = other DNA
gaagagtcacacacactgga

SEQ ID NO: 131505 - DNA, 20 bp, synthetic construct
  source 1..20: mol_type = other DNA
agaagagtcacacacactgg

SEQ ID NO: 131506 - DNA, 20 bp, synthetic construct
  source 1..20: mol_type = other DNA
aagaagagtcacacacactg

SEQ ID NO: 131507 - DNA, 20 bp, synthetic construct
  source 1..20: mol_type = other DNA
taagaagagtcacacacact

SEQ ID NO: 131508 - DNA, 20 bp, synthetic construct
  source 1..20: mol_type = other DNA
ttaagaagagtcacacacac

SEQ ID NO: 131509 - DNA, 20 bp, synthetic construct
  source 1..20: mol_type = other DNA
attaagaagagtcacacaca

SEQ ID NO: 131510 - DNA, 20 bp, synthetic construct
  source 1..20: mol_type = other DNA
aattaagaagagtcacacac

SEQ ID NO: 131511 - DNA, 20 bp, synthetic construct
  source 1..20: mol_type = other DNA
aaattaagaagagtcacaca

SEQ ID NO: 131512 - DNA, 20 bp, synthetic construct
  source 1..20: mol_type = other DNA
taaattaagaagagtcacac

SEQ ID NO: 131513 - DNA, 20 bp, synthetic construct
  source 1..20: mol_type = other DNA
ttaaattaagaagagtcaca

SEQ ID NO: 131514 - DNA, 20 bp, synthetic construct
  source 1..20: mol_type = other DNA
cttaaattaagaagagtcac

SEQ ID NO: 131515 - DNA, 20 bp, synthetic construct
  source 1..20: mol_type = other DNA
acttaaattaagaagagtca

SEQ ID NO: 131516 - DNA, 20 bp, synthetic construct
  source 1..20: mol_type = other DNA
aacttaaattaagaagagtc

SEQ ID NO: 131517 - DNA, 20 bp, synthetic construct
  source 1..20: mol_type = other DNA
aaacttaaattaagaagagt

SEQ ID NO: 131518 - DNA, 20 bp, synthetic construct
  source 1..20: mol_type = other DNA
gaaacttaaattaagaagag

SEQ ID NO: 131519 - DNA, 20 bp, synthetic construct
  source 1..20: mol_type = other DNA
agaaacttaaattaagaaga

SEQ ID NO: 131520 - DNA, 20 bp, synthetic construct
  source 1..20: mol_type = other DNA
cagaaacttaaattaagaag

SEQ ID NO: 131521 - DNA, 20 bp, synthetic construct
  source 1..20: mol_type = other DNA
tcagaaacttaaattaagaa

SEQ ID NO: 131522 - DNA, 20 bp, synthetic construct
  source 1..20: mol_type = other DNA
ttcagaaacttaaattaaga

SEQ ID NO: 131523 - DNA, 20 bp, synthetic construct
  source 1..20: mol_type = other DNA
tttcagaaacttaaattaag

SEQ ID NO: 131524 - DNA, 20 bp, synthetic construct
  source 1..20: mol_type = other DNA
ttttcagaaacttaaattaa

SEQ ID NO: 131525 - DNA, 20 bp, synthetic construct
  source 1..20: mol_type = other DNA
gttttcagaaacttaaatta

SEQ ID NO: 131526 - DNA, 20 bp, synthetic construct
  source 1..20: mol_type = other DNA
tgttttcagaaacttaaatt

SEQ ID NO: 131527 - DNA, 20 bp, synthetic construct
  source 1..20: mol_type = other DNA
atgttttcagaaacttaaat

SEQ ID NO: 131528 - DNA, 20 bp, synthetic construct
  source 1..20: mol_type = other DNA
tatgttttcagaaacttaaa

SEQ ID NO: 131529 - DNA, 20 bp, synthetic construct
  source 1..20: mol_type = other DNA
gtatgttttcagaaacttaa

SEQ ID NO: 131530 - DNA, 20 bp, synthetic construct
  source 1..20: mol_type = other DNA
agtatgttttcagaaactta

SEQ ID NO: 131531 - DNA, 20 bp, synthetic construct
  source 1..20: mol_type = other DNA
gagtatgttttcagaaactt

SEQ ID NO: 131532 - DNA, 20 bp, synthetic construct
  source 1..20: mol_type = other DNA
agagtatgttttcagaaact

SEQ ID NO: 131533 - DNA, 20 bp, synthetic construct
  source 1..20: mol_type = other DNA
tagagtatgttttcagaaac

SEQ ID NO: 131534 - DNA, 20 bp, synthetic construct
  source 1..20: mol_type = other DNA
atagagtatgttttcagaaa

SEQ ID NO: 131535 - DNA, 20 bp, synthetic construct
  source 1..20: mol_type = other DNA
gatagagtatgttttcagaa

SEQ ID NO: 131536 - DNA, 20 bp, synthetic construct
  source 1..20: mol_type = other DNA
agatagagtatgttttcaga

SEQ ID NO: 131537 - DNA, 20 bp, synthetic construct
  source 1..20: mol_type = other DNA
tagatagagtatgttttcag

SEQ ID NO: 131538 - DNA, 20 bp, synthetic construct
  source 1..20: mol_type = other DNA
ttagatagagtatgttttca

SEQ ID NO: 131539 - DNA, 20 bp, synthetic construct
  source 1..20: mol_type = other DNA
cttagatagagtatgttttc

SEQ ID NO: 131540 - DNA, 20 bp, synthetic construct
  source 1..20: mol_type = other DNA
tcttagatagagtatgtttt

SEQ ID NO: 131541 - DNA, 20 bp, synthetic construct
  source 1..20: mol_type = other DNA
ttcttagatagagtatgttt

SEQ ID NO: 131542 - DNA, 20 bp, synthetic construct
  source 1..20: mol_type = other DNA
attcttagatagagtatgtt

SEQ ID NO: 131543 - DNA, 20 bp, synthetic construct
  source 1..20: mol_type = other DNA
tattcttagatagagtatgt

SEQ ID NO: 131544 - DNA, 20 bp, synthetic construct
  source 1..20: mol_type = other DNA
ttattcttagatagagtatg

SEQ ID NO: 131545 - DNA, 20 bp, synthetic construct
  source 1..20: mol_type = other DNA
gttattcttagatagagtat

SEQ ID NO: 131546 - DNA, 20 bp, synthetic construct
  source 1..20: mol_type = other DNA
ggttattcttagatagagta

SEQ ID NO: 131547 - DNA, 20 bp, synthetic construct
  source 1..20: mol_type = other DNA
aggttattcttagatagagt

SEQ ID NO: 131548 - DNA, 20 bp, synthetic construct
  source 1..20: mol_type = other DNA
caggttattcttagatagag

SEQ ID NO: 131549 - DNA, 20 bp, synthetic construct
  source 1..20: mol_type = other DNA
tcaggttattcttagataga

SEQ ID NO: 131550 - DNA, 20 bp, synthetic construct
  source 1..20: mol_type = other DNA
gtcaggttattcttagatag

SEQ ID NO: 131551 - DNA, 20 bp, synthetic construct
  source 1..20: mol_type = other DNA
ggtcaggttattcttagata

SEQ ID NO: 131552 - DNA, 20 bp, synthetic construct
  source 1..20: mol_type = other DNA
aggtcaggttattcttagat

SEQ ID NO: 131553 - DNA, 20 bp, synthetic construct
  source 1..20: mol_type = other DNA
aaggtcaggttattcttaga

SEQ ID NO: 131554 - DNA, 20 bp, synthetic construct
  source 1..20: mol_type = other DNA
aaaggtcaggttattcttag

SEQ ID NO: 131555 - DNA, 20 bp, synthetic construct
  source 1..20: mol_type = other DNA
aaaaggtcaggttattctta

SEQ ID NO: 131556 - DNA, 20 bp, synthetic construct
  source 1..20: mol_type = other DNA
taaaaggtcaggttattctt

SEQ ID NO: 131557 - DNA, 20 bp, synthetic construct
  source 1..20: mol_type = other DNA
ataaaaggtcaggttattct

SEQ ID NO: 131558 - DNA, 20 bp, synthetic construct
  source 1..20: mol_type = other DNA
cataaaaggtcaggttattc

SEQ ID NO: 131559 - DNA, 20 bp, synthetic construct
  source 1..20: mol_type = other DNA
tcataaaaggtcaggttatt

SEQ ID NO: 131560 - DNA, 20 bp, synthetic construct
  source 1..20: mol_type = other DNA
gtcataaaaggtcaggttat

SEQ ID NO: 131561 - DNA, 20 bp, synthetic construct
  source 1..20: mol_type = other DNA
tgtcataaaaggtcaggtta

SEQ ID NO: 131562 - DNA, 20 bp, synthetic construct
  source 1..20: mol_type = other DNA
atgtcataaaaggtcaggtt

SEQ ID NO: 131563 - DNA, 20 bp, synthetic construct
  source 1..20: mol_type = other DNA
aatgtcataaaaggtcaggt

SEQ ID NO: 131564 - DNA, 20 bp, synthetic construct
  source 1..20: mol_type = other DNA
caatgtcataaaaggtcagg

SEQ ID NO: 131565 - DNA, 20 bp, synthetic construct
  source 1..20: mol_type = other DNA
tcaatgtcataaaaggtcag

SEQ ID NO: 131566 - DNA, 20 bp, synthetic construct
  source 1..20: mol_type = other DNA
ctcaatgtcataaaaggtca

SEQ ID NO: 131567 - DNA, 20 bp, synthetic construct
  source 1..20: mol_type = other DNA
cctcaatgtcataaaaggtc

SEQ ID NO: 131568 - DNA, 20 bp, synthetic construct
  source 1..20: mol_type = other DNA
ccctcaatgtcataaaaggt

SEQ ID NO: 131569 - DNA, 20 bp, synthetic construct
  source 1..20: mol_type = other DNA
accctcaatgtcataaaagg

SEQ ID NO: 131570 - DNA, 20 bp, synthetic construct
  source 1..20: mol_type = other DNA
gaccctcaatgtcataaaag

SEQ ID NO: 131571 - DNA, 20 bp, synthetic construct
  source 1..20: mol_type = other DNA
tgaccctcaatgtcataaaa

SEQ ID NO: 131572 - DNA, 20 bp, synthetic construct
  source 1..20: mol_type = other DNA
ttgaccctcaatgtcataaa

SEQ ID NO: 131573 - DNA, 20 bp, synthetic construct
  source 1..20: mol_type = other DNA
cttgaccctcaatgtcataa

SEQ ID NO: 131574 - DNA, 20 bp, synthetic construct
  source 1..20: mol_type = other DNA
tcttgaccctcaatgtcata

SEQ ID NO: 131575 - DNA, 20 bp, synthetic construct
  source 1..20: mol_type = other DNA
ttcttgaccctcaatgtcat

SEQ ID NO: 131576 - DNA, 20 bp, synthetic construct
  source 1..20: mol_type = other DNA
attcttgaccctcaatgtca

SEQ ID NO: 131577 - DNA, 20 bp, synthetic construct
  source 1..20: mol_type = other DNA
gattcttgaccctcaatgtc

SEQ ID NO: 131578 - DNA, 20 bp, synthetic construct
  source 1..20: mol_type = other DNA
agattcttgaccctcaatgt

SEQ ID NO: 131579 - DNA, 20 bp, synthetic construct
  source 1..20: mol_type = other DNA
cagattcttgaccctcaatg

SEQ ID NO: 131580 - DNA, 20 bp, synthetic construct
  source 1..20: mol_type = other DNA
tcagattcttgaccctcaat

SEQ ID NO: 131581 - DNA, 20 bp, synthetic construct
  source 1..20: mol_type = other DNA
ttcagattcttgaccctcaa

SEQ ID NO: 131582 - DNA, 20 bp, synthetic construct
  source 1..20: mol_type = other DNA
cttcagattcttgaccctca

SEQ ID NO: 131583 - DNA, 20 bp, synthetic construct
  source 1..20: mol_type = other DNA
ccttcagattcttgaccctc

SEQ ID NO: 131584 - DNA, 20 bp, synthetic construct
  source 1..20: mol_type = other DNA
tccttcagattcttgaccct

SEQ ID NO: 131585 - DNA, 20 bp, synthetic construct
  source 1..20: mol_type = other DNA
ttccttcagattcttgaccc

SEQ ID NO: 131586 - DNA, 20 bp, synthetic construct
  source 1..20: mol_type = other DNA
tttccttcagattcttgacc

SEQ ID NO: 131587 - DNA, 20 bp, synthetic construct
  source 1..20: mol_type = other DNA
ttttccttcagattcttgac

SEQ ID NO: 131588 - DNA, 20 bp, synthetic construct
  source 1..20: mol_type = other DNA
cttttccttcagattcttga

SEQ ID NO: 131589 - DNA, 20 bp, synthetic construct
  source 1..20: mol_type = other DNA
tcttttccttcagattcttg

SEQ ID NO: 131590 - DNA, 20 bp, synthetic construct
  source 1..20: mol_type = other DNA
atcttttccttcagattctt

SEQ ID NO: 131591 - DNA, 20 bp, synthetic construct
  source 1..20: mol_type = other DNA
catcttttccttcagattct

SEQ ID NO: 131592 - DNA, 20 bp, synthetic construct
  source 1..20: mol_type = other DNA
tcatcttttccttcagattc

SEQ ID NO: 131593 - DNA, 20 bp, synthetic construct
  source 1..20: mol_type = other DNA
ttcatcttttccttcagatt

SEQ ID NO: 131594 - DNA, 20 bp, synthetic construct
  source 1..20: mol_type = other DNA
gttcatcttttccttcagat

SEQ ID NO: 131595 - DNA, 20 bp, synthetic construct
  source 1..20: mol_type = other DNA
ggttcatcttttccttcaga

SEQ ID NO: 131596 - DNA, 20 bp, synthetic construct
  source 1..20: mol_type = other DNA
gggttcatcttttccttcag

SEQ ID NO: 131597 - DNA, 20 bp, synthetic construct
  source 1..20: mol_type = other DNA
tgggttcatcttttccttca

SEQ ID NO: 131598 - DNA, 20 bp, synthetic construct
  source 1..20: mol_type = other DNA
atgggttcatcttttccttc

SEQ ID NO: 131599 - DNA, 20 bp, synthetic construct
  source 1..20: mol_type = other DNA
aatgggttcatcttttcctt

SEQ ID NO: 131600 - DNA, 20 bp, synthetic construct
  source 1..20: mol_type = other DNA
aaatgggttcatcttttcct

SEQ ID NO: 131601 - DNA, 20 bp, synthetic construct
  source 1..20: mol_type = other DNA
gaaatgggttcatcttttcc

SEQ ID NO: 131602 - DNA, 20 bp, synthetic construct
  source 1..20: mol_type = other DNA
agaaatgggttcatcttttc

SEQ ID NO: 131603 - DNA, 20 bp, synthetic construct
  source 1..20: mol_type = other DNA
aagaaatgggttcatctttt

SEQ ID NO: 131604 - DNA, 20 bp, synthetic construct
  source 1..20: mol_type = other DNA
aaagaaatgggttcatcttt

SEQ ID NO: 131605 - DNA, 20 bp, synthetic construct
  source 1..20: mol_type = other DNA
caaagaaatgggttcatctt

SEQ ID NO: 131606 - DNA, 20 bp, synthetic construct
  source 1..20: mol_type = other DNA
gcaaagaaatgggttcatct

SEQ ID NO: 131607 - DNA, 20 bp, synthetic construct
  source 1..20: mol_type = other DNA
ggcaaagaaatgggttcatc

SEQ ID NO: 131608 - DNA, 20 bp, synthetic construct
  source 1..20: mol_type = other DNA
aggcaaagaaatgggttcat

SEQ ID NO: 131609 - DNA, 20 bp, synthetic construct
  source 1..20: mol_type = other DNA
caggcaaagaaatgggttca

SEQ ID NO: 131610 - DNA, 20 bp, synthetic construct
  source 1..20: mol_type = other DNA
tcaggcaaagaaatgggttc

SEQ ID NO: 131611 - DNA, 20 bp, synthetic construct
  source 1..20: mol_type = other DNA
gtcaggcaaagaaatgggtt

SEQ ID NO: 131612 - DNA, 20 bp, synthetic construct
  source 1..20: mol_type = other DNA
agtcaggcaaagaaatgggt

SEQ ID NO: 131613 - DNA, 20 bp, synthetic construct
  source 1..20: mol_type = other DNA
aagtcaggcaaagaaatggg

SEQ ID NO: 131614 - DNA, 20 bp, synthetic construct
  source 1..20: mol_type = other DNA
caagtcaggcaaagaaatgg

SEQ ID NO: 131615 - DNA, 20 bp, synthetic construct
  source 1..20: mol_type = other DNA
gcaagtcaggcaaagaaatg

SEQ ID NO: 131616 - DNA, 20 bp, synthetic construct
  source 1..20: mol_type = other DNA
agcaagtcaggcaaagaaat

SEQ ID NO: 131617 - DNA, 20 bp, synthetic construct
  source 1..20: mol_type = other DNA
aagcaagtcaggcaaagaaa

SEQ ID NO: 131618 - DNA, 20 bp, synthetic construct
  source 1..20: mol_type = other DNA
aaagcaagtcaggcaaagaa

SEQ ID NO: 131619 - DNA, 20 bp, synthetic construct
  source 1..20: mol_type = other DNA
taaagcaagtcaggcaaaga

SEQ ID NO: 131620 - DNA, 20 bp, synthetic construct
  source 1..20: mol_type = other DNA
ataaagcaagtcaggcaaag

SEQ ID NO: 131621 - DNA, 20 bp, synthetic construct
  source 1..20: mol_type = other DNA
tataaagcaagtcaggcaaa

SEQ ID NO: 131622 - DNA, 20 bp, synthetic construct
  source 1..20: mol_type = other DNA
ttataaagcaagtcaggcaa

SEQ ID NO: 131623 - DNA, 20 bp, synthetic construct
  source 1..20: mol_type = other DNA
gttataaagcaagtcaggca

SEQ ID NO: 131624 - DNA, 20 bp, synthetic construct
  source 1..20: mol_type = other DNA
agttataaagcaagtcaggc

SEQ ID NO: 131625 - DNA, 20 bp, synthetic construct
  source 1..20: mol_type = other DNA
aagttataaagcaagtcagg

SEQ ID NO: 131626 - DNA, 20 bp, synthetic construct
  source 1..20: mol_type = other DNA
aaagttataaagcaagtcag

SEQ ID NO: 131627 - DNA, 20 bp, synthetic construct
  source 1..20: mol_type = other DNA
aaaagttataaagcaagtca

SEQ ID NO: 131628 - DNA, 20 bp, synthetic construct
  source 1..20: mol_type = other DNA
caaaagttataaagcaagtc

SEQ ID NO: 131629 - DNA, 20 bp, synthetic construct
  source 1..20: mol_type = other DNA
ccaaaagttataaagcaagt

SEQ ID NO: 131630 - DNA, 20 bp, synthetic construct
  source 1..20: mol_type = other DNA
gccaaaagttataaagcaag

SEQ ID NO: 131631 - DNA, 20 bp, synthetic construct
  source 1..20: mol_type = other DNA
tgccaaaagttataaagcaa

SEQ ID NO: 131632 - DNA, 20 bp, synthetic construct
  source 1..20: mol_type = other DNA
ttgccaaaagttataaagca

SEQ ID NO: 131633 - DNA, 20 bp, synthetic construct
  source 1..20: mol_type = other DNA
tttgccaaaagttataaagc

SEQ ID NO: 131634 - DNA, 20 bp, synthetic construct
  source 1..20: mol_type = other DNA
atttgccaaaagttataaag

SEQ ID NO: 131635 - DNA, 20 bp, synthetic construct
  source 1..20: mol_type = other DNA
tatttgccaaaagttataaa

SEQ ID NO: 131636 - DNA, 20 bp, synthetic construct
  source 1..20: mol_type = other DNA
ctatttgccaaaagttataa

SEQ ID NO: 131637 - DNA, 20 bp, synthetic construct
  source 1..20: mol_type = other DNA
actatttgccaaaagttata

SEQ ID NO: 131638 - DNA, 20 bp, synthetic construct
  source 1..20: mol_type = other DNA
aactatttgccaaaagttat

SEQ ID NO: 131639 - DNA, 20 bp, synthetic construct
  source 1..20: mol_type = other DNA
aaactatttgccaaaagtta

SEQ ID NO: 131640 - DNA, 20 bp, synthetic construct
  source 1..20: mol_type = other DNA
gaaactatttgccaaaagtt

SEQ ID NO: 131641 - DNA, 20 bp, synthetic construct
  source 1..20: mol_type = other DNA
agaaactatttgccaaaagt

SEQ ID NO: 131642 - DNA, 20 bp, synthetic construct
  source 1..20: mol_type = other DNA
tagaaactatttgccaaaag

SEQ ID NO: 131643 - DNA, 20 bp, synthetic construct
  source 1..20: mol_type = other DNA
gtagaaactatttgccaaaa

SEQ ID NO: 131644 - DNA, 20 bp, synthetic construct
  source 1..20: mol_type = other DNA
agtagaaactatttgccaaa

SEQ ID NO: 131645 - DNA, 20 bp, synthetic construct
  source 1..20: mol_type = other DNA
aagtagaaactatttgccaa

SEQ ID NO: 131646 - DNA, 20 bp, synthetic construct
  source 1..20: mol_type = other DNA
gaagtagaaactatttgcca

SEQ ID NO: 131647 - DNA, 20 bp, synthetic construct
  source 1..20: mol_type = other DNA
agaagtagaaactatttgcc

SEQ ID NO: 131648 - DNA, 20 bp, synthetic construct
  source 1..20: mol_type = other DNA
cagaagtagaaactatttgc

SEQ ID NO: 131649 - DNA, 20 bp, synthetic construct
  source 1..20: mol_type = other DNA
acagaagtagaaactatttg

SEQ ID NO: 131650 - DNA, 20 bp, synthetic construct
  source 1..20: mol_type = other DNA
tacagaagtagaaactattt

SEQ ID NO: 131651 - DNA, 20 bp, synthetic construct
  source 1..20: mol_type = other DNA
gtacagaagtagaaactatt

SEQ ID NO: 131652 - DNA, 20 bp, synthetic construct
  source 1..20: mol_type = other DNA
ggtacagaagtagaaactat

SEQ ID NO: 131653 - DNA, 20 bp, synthetic construct
  source 1..20: mol_type = other DNA
aggtacagaagtagaaacta

SEQ ID NO: 131654 - DNA, 20 bp, synthetic construct
  source 1..20: mol_type = other DNA
caggtacagaagtagaaact

SEQ ID NO: 131655 - DNA, 20 bp, synthetic construct
  source 1..20: mol_type = other DNA
ccaggtacagaagtagaaac

SEQ ID NO: 131656 - DNA, 20 bp, synthetic construct
  source 1..20: mol_type = other DNA
accaggtacagaagtagaaa

SEQ ID NO: 131657 - DNA, 20 bp, synthetic construct
  source 1..20: mol_type = other DNA
gaccaggtacagaagtagaa

SEQ ID NO: 131658 - DNA, 20 bp, synthetic construct
  source 1..20: mol_type = other DNA
agaccaggtacagaagtaga

SEQ ID NO: 131659 - DNA, 20 bp, synthetic construct
  source 1..20: mol_type = other DNA
aagaccaggtacagaagtag

SEQ ID NO: 131660 - DNA, 20 bp, synthetic construct
  source 1..20: mol_type = other DNA
gaagaccaggtacagaagta

SEQ ID NO: 131661 - DNA, 20 bp, synthetic construct
  source 1..20: mol_type = other DNA
tgaagaccaggtacagaagt

SEQ ID NO: 131662 - DNA, 20 bp, synthetic construct
  source 1..20: mol_type = other DNA
ctgaagaccaggtacagaag

SEQ ID NO: 131663 - DNA, 20 bp, synthetic construct
  source 1..20: mol_type = other DNA
tctgaagaccaggtacagaa

SEQ ID NO: 131664 - DNA, 20 bp, synthetic construct
  source 1..20: mol_type = other DNA
atctgaagaccaggtacaga

SEQ ID NO: 131665 - DNA, 20 bp, synthetic construct
  source 1..20: mol_type = other DNA
gatctgaagaccaggtacag

SEQ ID NO: 131666 - DNA, 20 bp, synthetic construct
  source 1..20: mol_type = other DNA
agatctgaagaccaggtaca

SEQ ID NO: 131667 - DNA, 20 bp, synthetic construct
  source 1..20: mol_type = other DNA
gagatctgaagaccaggtac

SEQ ID NO: 131668 - DNA, 20 bp, synthetic construct
  source 1..20: mol_type = other DNA
agagatctgaagaccaggta

SEQ ID NO: 131669 - DNA, 20 bp, synthetic construct
  source 1..20: mol_type = other DNA
aagagatctgaagaccaggt

SEQ ID NO: 131670 - DNA, 20 bp, synthetic construct
  source 1..20: mol_type = other DNA
aaagagatctgaagaccagg

SEQ ID NO: 131671 - DNA, 20 bp, synthetic construct
  source 1..20: mol_type = other DNA
gaaagagatctgaagaccag

SEQ ID NO: 131672 - DNA, 20 bp, synthetic construct
  source 1..20: mol_type = other DNA
ggaaagagatctgaagacca

SEQ ID NO: 131673 - DNA, 20 bp, synthetic construct
  source 1..20: mol_type = other DNA
aggaaagagatctgaagacc

SEQ ID NO: 131674 - DNA, 20 bp, synthetic construct
  source 1..20: mol_type = other DNA
caggaaagagatctgaagac

SEQ ID NO: 131675 - DNA, 20 bp, synthetic construct
  source 1..20: mol_type = other DNA
gcaggaaagagatctgaaga

SEQ ID NO: 131676 - DNA, 20 bp, synthetic construct
  source 1..20: mol_type = other DNA
agcaggaaagagatctgaag

SEQ ID NO: 131677 - DNA, 20 bp, synthetic construct
  source 1..20: mol_type = other DNA
aagcaggaaagagatctgaa

SEQ ID NO: 131678 - DNA, 20 bp, synthetic construct
  source 1..20: mol_type = other DNA
aaagcaggaaagagatctga

SEQ ID NO: 131679 - DNA, 20 bp, synthetic construct
  source 1..20: mol_type = other DNA
taaagcaggaaagagatctg

SEQ ID NO: 131680 - DNA, 20 bp, synthetic construct
  source 1..20: mol_type = other DNA
ttaaagcaggaaagagatct

SEQ ID NO: 131681 - DNA, 20 bp, synthetic construct
  source 1..20: mol_type = other DNA
gttaaagcaggaaagagatc

SEQ ID NO: 131682 - DNA, 20 bp, synthetic construct
  source 1..20: mol_type = other DNA
agttaaagcaggaaagagat

SEQ ID NO: 131683 - DNA, 20 bp, synthetic construct
  source 1..20: mol_type = other DNA
tagttaaagcaggaaagaga

SEQ ID NO: 131684 - DNA, 20 bp, synthetic construct
  source 1..20: mol_type = other DNA
ttagttaaagcaggaaagag

SEQ ID NO: 131685 - DNA, 20 bp, synthetic construct
  source 1..20: mol_type = other DNA
tttagttaaagcaggaaaga

SEQ ID NO: 131686 - DNA, 20 bp, synthetic construct
  source 1..20: mol_type = other DNA
ttttagttaaagcaggaaag

SEQ ID NO: 131687 - DNA, 20 bp, synthetic construct
  source 1..20: mol_type = other DNA
attttagttaaagcaggaaa

SEQ ID NO: 131688 - DNA, 20 bp, synthetic construct
  source 1..20: mol_type = other DNA
cattttagttaaagcaggaa

SEQ ID NO: 131689 - DNA, 20 bp, synthetic construct
  source 1..20: mol_type = other DNA
acattttagttaaagcagga

SEQ ID NO: 131690 - DNA, 20 bp, synthetic construct
  source 1..20: mol_type = other DNA
tacattttagttaaagcagg

SEQ ID NO: 131691 - DNA, 20 bp, synthetic construct
  source 1..20: mol_type = other DNA
ttacattttagttaaagcag

SEQ ID NO: 131692 - DNA, 20 bp, synthetic construct
  source 1..20: mol_type = other DNA
attacattttagttaaagca

SEQ ID NO: 131693 - DNA, 20 bp, synthetic construct
  source 1..20: mol_type = other DNA
cattacattttagttaaagc

SEQ ID NO: 131694 - DNA, 20 bp, synthetic construct
  source 1..20: mol_type = other DNA
tcattacattttagttaaag

SEQ ID NO: 131695 - DNA, 20 bp, synthetic construct
  source 1..20: mol_type = other DNA
atcattacattttagttaaa

SEQ ID NO: 131696 - DNA, 20 bp, synthetic construct
  source 1..20: mol_type = other DNA
catcattacattttagttaa

SEQ ID NO: 131697 - DNA, 20 bp, synthetic construct
  source 1..20: mol_type = other DNA
acatcattacattttagtta

SEQ ID NO: 131698 - DNA, 20 bp, synthetic construct
  source 1..20: mol_type = other DNA
tacatcattacattttagtt

SEQ ID NO: 131699 - DNA, 20 bp, synthetic construct
  source 1..20: mol_type = other DNA
atacatcattacattttagt

SEQ ID NO: 131700 - DNA, 20 bp, synthetic construct
  source 1..20: mol_type = other DNA
tatacatcattacattttag

SEQ ID NO: 131701 - DNA, 20 bp, synthetic construct
  source 1..20: mol_type = other DNA
atatacatcattacatttta

SEQ ID NO: 131702 - DNA, 20 bp, synthetic construct
  source 1..20: mol_type = other DNA
tatatacatcattacatttt

SEQ ID NO: 131703 - DNA, 20 bp, synthetic construct
  source 1..20: mol_type = other DNA
ttatatacatcattacattt

SEQ ID NO: 131704 - DNA, 20 bp, synthetic construct
  source 1..20: mol_type = other DNA
attatatacatcattacatt

SEQ ID NO: 131705 - DNA, 20 bp, synthetic construct
  source 1..20: mol_type = other DNA
cattatatacatcattacat

SEQ ID NO: 131706 - DNA, 20 bp, synthetic construct
  source 1..20: mol_type = other DNA
ccattatatacatcattaca

SEQ ID NO: 131707 - DNA, 20 bp, synthetic construct
  source 1..20: mol_type = other DNA
gccattatatacatcattac

SEQ ID NO: 131708 - DNA, 20 bp, synthetic construct
  source 1..20: mol_type = other DNA
tgccattatatacatcatta

SEQ ID NO: 131709 - DNA, 20 bp, synthetic construct
  source 1..20: mol_type = other DNA
ttgccattatatacatcatt

SEQ ID NO: 131710 - DNA, 20 bp, synthetic construct
  source 1..20: mol_type = other DNA
tttgccattatatacatcat

SEQ ID NO: 131711 - DNA, 20 bp, synthetic construct
  source 1..20: mol_type = other DNA
ctttgccattatatacatca

SEQ ID NO: 131712 - DNA, 20 bp, synthetic construct
  source 1..20: mol_type = other DNA
gctttgccattatatacatc

SEQ ID NO: 131713 - DNA, 20 bp, synthetic construct
  source 1..20: mol_type = other DNA
tgctttgccattatatacat

SEQ ID NO: 131714 - DNA, 20 bp, synthetic construct
  source 1..20: mol_type = other DNA
atgctttgccattatataca

SEQ ID NO: 131715 - DNA, 20 bp, synthetic construct
  source 1..20: mol_type = other DNA
gatgctttgccattatatac

SEQ ID NO: 131716 - DNA, 20 bp, synthetic construct
  source 1..20: mol_type = other DNA
agatgctttgccattatata

SEQ ID NO: 131717 - DNA, 20 bp, synthetic construct
  source 1..20: mol_type = other DNA
aagatgctttgccattatat

SEQ ID NO: 131718 - DNA, 20 bp, synthetic construct
  source 1..20: mol_type = other DNA
aaagatgctttgccattata

SEQ ID NO: 131719 - DNA, 20 bp, synthetic construct
  source 1..20: mol_type = other DNA
caaagatgctttgccattat

SEQ ID NO: 131720 - DNA, 20 bp, synthetic construct
  source 1..20: mol_type = other DNA
acaaagatgctttgccatta

SEQ ID NO: 131721 - DNA, 20 bp, synthetic construct
  source 1..20: mol_type = other DNA
cacaaagatgctttgccatt

SEQ ID NO: 131722 - DNA, 20 bp, synthetic construct
  source 1..20: mol_type = other DNA
ccacaaagatgctttgccat

SEQ ID NO: 131723 - DNA, 20 bp, synthetic construct
  source 1..20: mol_type = other DNA
tccacaaagatgctttgcca

SEQ ID NO: 131724 - DNA, 20 bp, synthetic construct
  source 1..20: mol_type = other DNA
ctccacaaagatgctttgcc

SEQ ID NO: 131725 - DNA, 20 bp, synthetic construct
  source 1..20: mol_type = other DNA
tctccacaaagatgctttgc

SEQ ID NO: 131726 - DNA, 20 bp, synthetic construct
  source 1..20: mol_type = other DNA
ttctccacaaagatgctttg

SEQ ID NO: 131727 - DNA, 20 bp, synthetic construct
  source 1..20: mol_type = other DNA
tttctccacaaagatgcttt

SEQ ID NO: 131728 - DNA, 20 bp, synthetic construct
  source 1..20: mol_type = other DNA
ctttctccacaaagatgctt

SEQ ID NO: 131729 - DNA, 20 bp, synthetic construct
  source 1..20: mol_type = other DNA
cctttctccacaaagatgct

SEQ ID NO: 131730 - DNA, 20 bp, synthetic construct
  source 1..20: mol_type = other DNA
acctttctccacaaagatgc

SEQ ID NO: 131731 - DNA, 20 bp, synthetic construct
  source 1..20: mol_type = other DNA
tacctttctccacaaagatg

SEQ ID NO: 131732 - DNA, 20 bp, synthetic construct
  source 1..20: mol_type = other DNA
gtacctttctccacaaagat

SEQ ID NO: 131733 - DNA, 20 bp, synthetic construct
  source 1..20: mol_type = other DNA
ggtacctttctccacaaaga

SEQ ID NO: 131734 - DNA, 20 bp, synthetic construct
  source 1..20: mol_type = other DNA
aggtacctttctccacaaag

SEQ ID NO: 131735 - DNA, 20 bp, synthetic construct
  source 1..20: mol_type = other DNA
aaggtacctttctccacaaa

SEQ ID NO: 131736 - DNA, 20 bp, synthetic construct
  source 1..20: mol_type = other DNA
aaaggtacctttctccacaa

SEQ ID NO: 131737 - DNA, 20 bp, synthetic construct
  source 1..20: mol_type = other DNA
gaaaggtacctttctccaca

SEQ ID NO: 131738 - DNA, 20 bp, synthetic construct
  source 1..20: mol_type = other DNA
agaaaggtacctttctccac

SEQ ID NO: 131739 - DNA, 20 bp, synthetic construct
  source 1..20: mol_type = other DNA
gagaaaggtacctttctcca

SEQ ID NO: 131740 - DNA, 20 bp, synthetic construct
  source 1..20: mol_type = other DNA
ggagaaaggtacctttctcc

SEQ ID NO: 131741 - DNA, 20 bp, synthetic construct
  source 1..20: mol_type = other DNA
aggagaaaggtacctttctc

SEQ ID NO: 131742 - DNA, 20 bp, synthetic construct
  source 1..20: mol_type = other DNA
gaggagaaaggtacctttct

SEQ ID NO: 131743 - DNA, 20 bp, synthetic construct
  source 1..20: mol_type = other DNA
agaggagaaaggtacctttc

SEQ ID NO: 131744 - DNA, 20 bp, synthetic construct
  source 1..20: mol_type = other DNA
aagaggagaaaggtaccttt

SEQ ID NO: 131745 - DNA, 20 bp, synthetic construct
  source 1..20: mol_type = other DNA
gaagaggagaaaggtacctt

SEQ ID NO: 131746 - DNA, 20 bp, synthetic construct
  source 1..20: mol_type = other DNA
ggaagaggagaaaggtacct

SEQ ID NO: 131747 - DNA, 20 bp, synthetic construct
  source 1..20: mol_type = other DNA
aggaagaggagaaaggtacc

SEQ ID NO: 131748 - DNA, 20 bp, synthetic construct
  source 1..20: mol_type = other DNA
gaggaagaggagaaaggtac

SEQ ID NO: 131749 - DNA, 20 bp, synthetic construct
  source 1..20: mol_type = other DNA
tgaggaagaggagaaaggta

SEQ ID NO: 131750 - DNA, 20 bp, synthetic construct
  source 1..20: mol_type = other DNA
atgaggaagaggagaaaggt

SEQ ID NO: 131751 - DNA, 20 bp, synthetic construct
  source 1..20: mol_type = other DNA
gatgaggaagaggagaaagg

SEQ ID NO: 131752 - DNA, 20 bp, synthetic construct
  source 1..20: mol_type = other DNA
tgatgaggaagaggagaaag

SEQ ID NO: 131753 - DNA, 20 bp, synthetic construct
  source 1..20: mol_type = other DNA
ttgatgaggaagaggagaaa

SEQ ID NO: 131754 - DNA, 20 bp, synthetic construct
  source 1..20: mol_type = other DNA
attgatgaggaagaggagaa

SEQ ID NO: 131755 - DNA, 20 bp, synthetic construct
  source 1..20: mol_type = other DNA
tattgatgaggaagaggaga

SEQ ID NO: 131756 - DNA, 20 bp, synthetic construct
  source 1..20: mol_type = other DNA
atattgatgaggaagaggag

SEQ ID NO: 131757 - DNA, 20 bp, synthetic construct
  source 1..20: mol_type = other DNA
aatattgatgaggaagagga

SEQ ID NO: 131758 - DNA, 20 bp, synthetic construct
  source 1..20: mol_type = other DNA
taatattgatgaggaagagg

SEQ ID NO: 131759 - DNA, 20 bp, synthetic construct
  source 1..20: mol_type = other DNA
ataatattgatgaggaagag

SEQ ID NO: 131760 - DNA, 20 bp, synthetic construct
  source 1..20: mol_type = other DNA
cataatattgatgaggaaga

SEQ ID NO: 131761 - DNA, 20 bp, synthetic construct
  source 1..20: mol_type = other DNA
gcataatattgatgaggaag

SEQ ID NO: 131762 - DNA, 20 bp, synthetic construct
  source 1..20: mol_type = other DNA
agcataatattgatgaggaa

SEQ ID NO: 131763 - DNA, 20 bp, synthetic construct
  source 1..20: mol_type = other DNA
aagcataatattgatgagga

SEQ ID NO: 131764 - DNA, 20 bp, synthetic construct
  source 1..20: mol_type = other DNA
aaagcataatattgatgagg

SEQ ID NO: 131765 - DNA, 20 bp, synthetic construct
  source 1..20: mol_type = other DNA
caaagcataatattgatgag

SEQ ID NO: 131766 - DNA, 20 bp, synthetic construct
  source 1..20: mol_type = other DNA
ccaaagcataatattgatga

SEQ ID NO: 131767 - DNA, 20 bp, synthetic construct
  source 1..20: mol_type = other DNA
accaaagcataatattgatg

SEQ ID NO: 131768 - DNA, 20 bp, synthetic construct
  source 1..20: mol_type = other DNA
taccaaagcataatattgat

SEQ ID NO: 131769 - DNA, 20 bp, synthetic construct
  source 1..20: mol_type = other DNA
ataccaaagcataatattga

SEQ ID NO: 131770 - DNA, 20 bp, synthetic construct
  source 1..20: mol_type = other DNA
tataccaaagcataatattg

SEQ ID NO: 131771 - DNA, 20 bp, synthetic construct
  source 1..20: mol_type = other DNA
atataccaaagcataatatt

SEQ ID NO: 131772 - DNA, 20 bp, synthetic construct
  source 1..20: mol_type = other DNA
gatataccaaagcataatat

SEQ ID NO: 131773 - DNA, 20 bp, synthetic construct
  source 1..20: mol_type = other DNA
ggatataccaaagcataata

SEQ ID NO: 131774 - DNA, 20 bp, synthetic construct
  source 1..20: mol_type = other DNA
aggatataccaaagcataat

SEQ ID NO: 131775 - DNA, 20 bp, synthetic construct
  source 1..20: mol_type = other DNA
caggatataccaaagcataa

SEQ ID NO: 131776 - DNA, 20 bp, synthetic construct
  source 1..20: mol_type = other DNA
gcaggatataccaaagcata

SEQ ID NO: 131777 - DNA, 20 bp, synthetic construct
  source 1..20: mol_type = other DNA
ggcaggatataccaaagcat

SEQ ID NO: 131778 - DNA, 20 bp, synthetic construct
  source 1..20: mol_type = other DNA
aggcaggatataccaaagca

SEQ ID NO: 131779 - DNA, 20 bp, synthetic construct
  source 1..20: mol_type = other DNA
taggcaggatataccaaagc

SEQ ID NO: 131780 - DNA, 20 bp, synthetic construct
  source 1..20: mol_type = other DNA
gtaggcaggatataccaaag

SEQ ID NO: 131781 - DNA, 20 bp, synthetic construct
  source 1..20: mol_type = other DNA
cgtaggcaggatataccaaa

SEQ ID NO: 131782 - DNA, 20 bp, synthetic construct
  source 1..20: mol_type = other DNA
tcgtaggcaggatataccaa

SEQ ID NO: 131783 - DNA, 20 bp, synthetic construct
  source 1..20: mol_type = other DNA
gtcgtaggcaggatatacca

SEQ ID NO: 131784 - DNA, 20 bp, synthetic construct
  source 1..20: mol_type = other DNA
tgtcgtaggcaggatatacc

SEQ ID NO: 131785 - DNA, 20 bp, synthetic construct
  source 1..20: mol_type = other DNA
atgtcgtaggcaggatatac

SEQ ID NO: 131786 - DNA, 20 bp, synthetic construct
  source 1..20: mol_type = other DNA
catgtcgtaggcaggatata

SEQ ID NO: 131787 - DNA, 20 bp, synthetic construct
  source 1..20: mol_type = other DNA
gcatgtcgtaggcaggatat

SEQ ID NO: 131788 - DNA, 20 bp, synthetic construct
  source 1..20: mol_type = other DNA
tgcatgtcgtaggcaggata

SEQ ID NO: 131789 - DNA, 20 bp, synthetic construct
  source 1..20: mol_type = other DNA
ttgcatgtcgtaggcaggat

SEQ ID NO: 131790 - DNA, 20 bp, synthetic construct
  source 1..20: mol_type = other DNA
cttgcatgtcgtaggcagga

SEQ ID NO: 131791 - DNA, 20 bp, synthetic construct
  source 1..20: mol_type = other DNA
tcttgcatgtcgtaggcagg

SEQ ID NO: 131792 - DNA, 20 bp, synthetic construct
  source 1..20: mol_type = other DNA
ctcttgcatgtcgtaggcag

SEQ ID NO: 131793 - DNA, 20 bp, synthetic construct
  source 1..20: mol_type = other DNA
tctcttgcatgtcgtaggca

SEQ ID NO: 131794 - DNA, 20 bp, synthetic construct
  source 1..20: mol_type = other DNA
ttctcttgcatgtcgtaggc

SEQ ID NO: 131795 - DNA, 20 bp, synthetic construct
  source 1..20: mol_type = other DNA
attctcttgcatgtcgtagg

SEQ ID NO: 131796 - DNA, 20 bp, synthetic construct
  source 1..20: mol_type = other DNA
aattctcttgcatgtcgtag

SEQ ID NO: 131797 - DNA, 20 bp, synthetic construct
  source 1..20: mol_type = other DNA
aaattctcttgcatgtcgta

SEQ ID NO: 131798 - DNA, 20 bp, synthetic construct
  source 1..20: mol_type = other DNA
aaaattctcttgcatgtcgt

SEQ ID NO: 131799 - DNA, 20 bp, synthetic construct
  source 1..20: mol_type = other DNA
taaaattctcttgcatgtcg

SEQ ID NO: 131800 - DNA, 20 bp, synthetic construct
  source 1..20: mol_type = other DNA
ataaaattctcttgcatgtc

SEQ ID NO: 131801 - DNA, 20 bp, synthetic construct
  source 1..20: mol_type = other DNA
tataaaattctcttgcatgt

SEQ ID NO: 131802 - DNA, 20 bp, synthetic construct
  source 1..20: mol_type = other DNA
ttataaaattctcttgcatg

SEQ ID NO: 131803 - DNA, 20 bp, synthetic construct
  source 1..20: mol_type = other DNA
attataaaattctcttgcat

SEQ ID NO: 131804 - DNA, 20 bp, synthetic construct
  source 1..20: mol_type = other DNA
tattataaaattctcttgca

SEQ ID NO: 131805 - DNA, 20 bp, synthetic construct
  source 1..20: mol_type = other DNA
ttattataaaattctcttgc

SEQ ID NO: 131806 - DNA, 20 bp, synthetic construct
  source 1..20: mol_type = other DNA
attattataaaattctcttg

SEQ ID NO: 131807 - DNA, 20 bp, synthetic construct
  source 1..20: mol_type = other DNA
tattattataaaattctctt

SEQ ID NO: 131808 - DNA, 20 bp, synthetic construct
  source 1..20: mol_type = other DNA
ttattattataaaattctct

SEQ ID NO: 131809 - DNA, 20 bp, synthetic construct
  source 1..20: mol_type = other DNA
tttattattataaaattctc

SEQ ID NO: 131810 - DNA, 20 bp, synthetic construct
  source 1..20: mol_type = other DNA
ttttattattataaaattct

SEQ ID NO: 131811 - DNA, 20 bp, synthetic construct
  source 1..20: mol_type = other DNA
cttttattattataaaattc

SEQ ID NO: 131812 - DNA, 20 bp, synthetic construct
  source 1..20: mol_type = other DNA
gcttttattattataaaatt

SEQ ID NO: 131813 - DNA, 20 bp, synthetic construct
  source 1..20: mol_type = other DNA
tgcttttattattataaaat

SEQ ID NO: 131814 - DNA, 20 bp, synthetic construct
  source 1..20: mol_type = other DNA
atgcttttattattataaaa

SEQ ID NO: 131815 - DNA, 20 bp, synthetic construct
  source 1..20: mol_type = other DNA
tatgcttttattattataaa

SEQ ID NO: 131816 - DNA, 20 bp, synthetic construct
  source 1..20: mol_type = other DNA
ttatgcttttattattataa

SEQ ID NO: 131817 - DNA, 20 bp, synthetic construct
  source 1..20: mol_type = other DNA
tttatgcttttattattata

SEQ ID NO: 131818 - DNA, 20 bp, synthetic construct
  source 1..20: mol_type = other DNA
ctttatgcttttattattat

SEQ ID NO: 131819 - DNA, 20 bp, synthetic construct
  source 1..20: mol_type = other DNA
cctttatgcttttattatta

SEQ ID NO: 131820 - DNA, 20 bp, synthetic construct
  source 1..20: mol_type = other DNA
acctttatgcttttattatt

SEQ ID NO: 131821 - DNA, 20 bp, synthetic construct
  source 1..20: mol_type = other DNA
cacctttatgcttttattat

SEQ ID NO: 131822 - DNA, 20 bp, synthetic construct
  source 1..20: mol_type = other DNA
acacctttatgcttttatta

SEQ ID NO: 131823 - DNA, 20 bp, synthetic construct
  source 1..20: mol_type = other DNA
aacacctttatgcttttatt

SEQ ID NO: 131824 - DNA, 20 bp, synthetic construct
  source 1..20: mol_type = other DNA
gaacacctttatgcttttat

SEQ ID NO: 131825 - DNA, 20 bp, synthetic construct
  source 1..20: mol_type = other DNA
agaacacctttatgctttta

SEQ ID NO: 131826 - DNA, 20 bp, synthetic construct
  source 1..20: mol_type = other DNA
gagaacacctttatgctttt

SEQ ID NO: 131827 - DNA, 20 bp, synthetic construct
  source 1..20: mol_type = other DNA
ggagaacacctttatgcttt

SEQ ID NO: 131828 - DNA, 20 bp, synthetic construct
  source 1..20: mol_type = other DNA
tggagaacacctttatgctt

SEQ ID NO: 131829 - DNA, 20 bp, synthetic construct
  source 1..20: mol_type = other DNA
ctggagaacacctttatgct

SEQ ID NO: 131830 - DNA, 20 bp, synthetic construct
  source 1..20: mol_type = other DNA
gctggagaacacctttatgc

SEQ ID NO: 131831 - DNA, 20 bp, synthetic construct
  source 1..20: mol_type = other DNA
tgctggagaacacctttatg

SEQ ID NO: 131832 - DNA, 20 bp, synthetic construct
  source 1..20: mol_type = other DNA
atgctggagaacacctttat

SEQ ID NO: 131833 - DNA, 20 bp, synthetic construct
  source 1..20: mol_type = other DNA
catgctggagaacaccttta

SEQ ID NO: 131834 - DNA, 20 bp, synthetic construct
  source 1..20: mol_type = other DNA
tcatgctggagaacaccttt

SEQ ID NO: 131835 - DNA, 20 bp, synthetic construct
  source 1..20: mol_type = other DNA
ttcatgctggagaacacctt

SEQ ID NO: 131836 - DNA, 20 bp, synthetic construct
  source 1..20: mol_type = other DNA
tttcatgctggagaacacct

SEQ ID NO: 131837 - DNA, 20 bp, synthetic construct
  source 1..20: mol_type = other DNA
ttttcatgctggagaacacc

SEQ ID NO: 131838 - DNA, 20 bp, synthetic construct
  source 1..20: mol_type = other DNA
gttttcatgctggagaacac

SEQ ID NO: 131839 - DNA, 20 bp, synthetic construct
  source 1..20: mol_type = other DNA
tgttttcatgctggagaaca

SEQ ID NO: 131840 - DNA, 20 bp, synthetic construct
  source 1..20: mol_type = other DNA
atgttttcatgctggagaac

SEQ ID NO: 131841 - DNA, 20 bp, synthetic construct
  source 1..20: mol_type = other DNA
aatgttttcatgctggagaa

SEQ ID NO: 131842 - DNA, 20 bp, synthetic construct
  source 1..20: mol_type = other DNA
aaatgttttcatgctggaga

SEQ ID NO: 131843 - DNA, 20 bp, synthetic construct
  source 1..20: mol_type = other DNA
aaaatgttttcatgctggag

SEQ ID NO: 131844 - DNA, 20 bp, synthetic construct
  source 1..20: mol_type = other DNA
caaaatgttttcatgctgga

SEQ ID NO: 131845 - DNA, 20 bp, synthetic construct
  source 1..20: mol_type = other DNA
gcaaaatgttttcatgctgg

SEQ ID NO: 131846 - DNA, 20 bp, synthetic construct
  source 1..20: mol_type = other DNA
agcaaaatgttttcatgctg

SEQ ID NO: 131847 - DNA, 20 bp, synthetic construct
  source 1..20: mol_type = other DNA
aagcaaaatgttttcatgct

SEQ ID NO: 131848 - DNA, 20 bp, synthetic construct
  source 1..20: mol_type = other DNA
gaagcaaaatgttttcatgc

SEQ ID NO: 131849 - DNA, 20 bp, synthetic construct
  source 1..20: mol_type = other DNA
tgaagcaaaatgttttcatg

SEQ ID NO: 131850 - DNA, 20 bp, synthetic construct
  source 1..20: mol_type = other DNA
gtgaagcaaaatgttttcat

SEQ ID NO: 131851 - DNA, 20 bp, synthetic construct
  source 1..20: mol_type = other DNA
agtgaagcaaaatgttttca

SEQ ID NO: 131852 - DNA, 20 bp, synthetic construct
  source 1..20: mol_type = other DNA
tagtgaagcaaaatgttttc

SEQ ID NO: 131853 - DNA, 20 bp, synthetic construct
  source 1..20: mol_type = other DNA
gtagtgaagcaaaatgtttt

SEQ ID NO: 131854 - DNA, 20 bp, synthetic construct
  source 1..20: mol_type = other DNA
agtagtgaagcaaaatgttt

SEQ ID NO: 131855 - DNA, 20 bp, synthetic construct
  source 1..20: mol_type = other DNA
aagtagtgaagcaaaatgtt

SEQ ID NO: 131856 - DNA, 20 bp, synthetic construct
  source 1..20: mol_type = other DNA
caagtagtgaagcaaaatgt

SEQ ID NO: 131857 - DNA, 20 bp, synthetic construct
  source 1..20: mol_type = other DNA
tcaagtagtgaagcaaaatg

SEQ ID NO: 131858 - DNA, 20 bp, synthetic construct
  source 1..20: mol_type = other DNA
atcaagtagtgaagcaaaat

SEQ ID NO: 131859 - DNA, 20 bp, synthetic construct
  source 1..20: mol_type = other DNA
gatcaagtagtgaagcaaaa

SEQ ID NO: 131860 - DNA, 20 bp, synthetic construct
  source 1..20: mol_type = other DNA
agatcaagtagtgaagcaaa

SEQ ID NO: 131861 - DNA, 20 bp, synthetic construct
  source 1..20: mol_type = other DNA
cagatcaagtagtgaagcaa

SEQ ID NO: 131862 - DNA, 20 bp, synthetic construct
  source 1..20: mol_type = other DNA
tcagatcaagtagtgaagca

SEQ ID NO: 131863 - DNA, 20 bp, synthetic construct
  source 1..20: mol_type = other DNA
ctcagatcaagtagtgaagc

SEQ ID NO: 131864 - DNA, 20 bp, synthetic construct
  source 1..20: mol_type = other DNA
cctcagatcaagtagtgaag

SEQ ID NO: 131865 - DNA, 20 bp, synthetic construct
  source 1..20: mol_type = other DNA
ccctcagatcaagtagtgaa

SEQ ID NO: 131866 - DNA, 20 bp, synthetic construct
  source 1..20: mol_type = other DNA
accctcagatcaagtagtga

SEQ ID NO: 131867 - DNA, 20 bp, synthetic construct
  source 1..20: mol_type = other DNA
gaccctcagatcaagtagtg

SEQ ID NO: 131868 - DNA, 20 bp, synthetic construct
  source 1..20: mol_type = other DNA
tgaccctcagatcaagtagt

SEQ ID NO: 131869 - DNA, 20 bp, synthetic construct
  source 1..20: mol_type = other DNA
gtgaccctcagatcaagtag

SEQ ID NO: 131870 - DNA, 20 bp, synthetic construct
  source 1..20: mol_type = other DNA
agtgaccctcagatcaagta

SEQ ID NO: 131871 - DNA, 20 bp, synthetic construct
  source 1..20: mol_type = other DNA
cagtgaccctcagatcaagt

SEQ ID NO: 131872 - DNA, 20 bp, synthetic construct
  source 1..20: mol_type = other DNA
ccagtgaccctcagatcaag

SEQ ID NO: 131873 - DNA, 20 bp, synthetic construct
  source 1..20: mol_type = other DNA
gccagtgaccctcagatcaa

SEQ ID NO: 131874 - DNA, 20 bp, synthetic construct
  source 1..20: mol_type = other DNA
tgccagtgaccctcagatca

SEQ ID NO: 131875 - DNA, 20 bp, synthetic construct
  source 1..20: mol_type = other DNA
atgccagtgaccctcagatc

SEQ ID NO: 131876 - DNA, 20 bp, synthetic construct
  source 1..20: mol_type = other DNA
aatgccagtgaccctcagat

SEQ ID NO: 131877 - DNA, 20 bp, synthetic construct
  source 1..20: mol_type = other DNA
taatgccagtgaccctcaga

SEQ ID NO: 131878 - DNA, 20 bp, synthetic construct
  source 1..20: mol_type = other DNA
gtaatgccagtgaccctcag

SEQ ID NO: 131879 - DNA, 20 bp, synthetic construct
  source 1..20: mol_type = other DNA
tgtaatgccagtgaccctca

SEQ ID NO: 131880 - DNA, 20 bp, synthetic construct
  source 1..20: mol_type = other DNA
atgtaatgccagtgaccctc

SEQ ID NO: 131881 - DNA, 20 bp, synthetic construct
  source 1..20: mol_type = other DNA
tatgtaatgccagtgaccct

SEQ ID NO: 131882 - DNA, 20 bp, synthetic construct
  source 1..20: mol_type = other DNA
atatgtaatgccagtgaccc

SEQ ID NO: 131883 - DNA, 20 bp, synthetic construct
  source 1..20: mol_type = other DNA
aatatgtaatgccagtgacc

SEQ ID NO: 131884 - DNA, 20 bp, synthetic construct
  source 1..20: mol_type = other DNA
aaatatgtaatgccagtgac

SEQ ID NO: 131885 - DNA, 20 bp, synthetic construct
  source 1..20: mol_type = other DNA
aaaatatgtaatgccagtga

SEQ ID NO: 131886 - DNA, 20 bp, synthetic construct
  source 1..20: mol_type = other DNA
aaaaatatgtaatgccagtg

SEQ ID NO: 131887 - DNA, 20 bp, synthetic construct
  source 1..20: mol_type = other DNA
aaaaaatatgtaatgccagt

SEQ ID NO: 131888 - DNA, 20 bp, synthetic construct
  source 1..20: mol_type = other DNA
aaaaaaatatgtaatgccag

SEQ ID NO: 131889 - DNA, 20 bp, synthetic construct
  source 1..20: mol_type = other DNA
aaaaaaaatatgtaatgcca

SEQ ID NO: 131890 - DNA, 20 bp, synthetic construct
  source 1..20: mol_type = other DNA
caaaaaaaatatgtaatgcc

SEQ ID NO: 131891 - DNA, 20 bp, synthetic construct
  source 1..20: mol_type = other DNA
gcaaaaaaaatatgtaatgc

SEQ ID NO: 131892 - DNA, 20 bp, synthetic construct
  source 1..20: mol_type = other DNA
agcaaaaaaaatatgtaatg

SEQ ID NO: 131893 - DNA, 20 bp, synthetic construct
  source 1..20: mol_type = other DNA
cagcaaaaaaaatatgtaat

SEQ ID NO: 131894 - DNA, 20 bp, synthetic construct
  source 1..20: mol_type = other DNA
acagcaaaaaaaatatgtaa

SEQ ID NO: 131895 - DNA, 20 bp, synthetic construct
  source 1..20: mol_type = other DNA
aacagcaaaaaaaatatgta

SEQ ID NO: 131896 - DNA, 20 bp, synthetic construct
  source 1..20: mol_type = other DNA
aaacagcaaaaaaaatatgt

SEQ ID NO: 131897 - DNA, 20 bp, synthetic construct
  source 1..20: mol_type = other DNA
caaacagcaaaaaaaatatg

SEQ ID NO: 131898 - DNA, 20 bp, synthetic construct
  source 1..20: mol_type = other DNA
acaaacagcaaaaaaaatat

SEQ ID NO: 131899 - DNA, 20 bp, synthetic construct
  source 1..20: mol_type = other DNA
aacaaacagcaaaaaaaata

SEQ ID NO: 131900 - DNA, 20 bp, synthetic construct
  source 1..20: mol_type = other DNA
taacaaacagcaaaaaaaat

SEQ ID NO: 131901 - DNA, 20 bp, synthetic construct
  source 1..20: mol_type = other DNA
ataacaaacagcaaaaaaaa

SEQ ID NO: 131902 - DNA, 20 bp, synthetic construct
  source 1..20: mol_type = other DNA
tataacaaacagcaaaaaaa

SEQ ID NO: 131903 - DNA, 20 bp, synthetic construct
  source 1..20: mol_type = other DNA
ttataacaaacagcaaaaaa

SEQ ID NO: 131904 - DNA, 20 bp, synthetic construct
  source 1..20: mol_type = other DNA
attataacaaacagcaaaaa

SEQ ID NO: 131905 - DNA, 20 bp, synthetic construct
  source 1..20: mol_type = other DNA
cattataacaaacagcaaaa

SEQ ID NO: 131906 - DNA, 20 bp, synthetic construct
  source 1..20: mol_type = other DNA
tcattataacaaacagcaaa

SEQ ID NO: 131907 - DNA, 20 bp, synthetic construct
  source 1..20: mol_type = other DNA
atcattataacaaacagcaa

SEQ ID NO: 131908 - DNA, 20 bp, synthetic construct
  source 1..20: mol_type = other DNA
tatcattataacaaacagca

SEQ ID NO: 131909 - DNA, 20 bp, synthetic construct
  source 1..20: mol_type = other DNA
ttatcattataacaaacagc

SEQ ID NO: 131910 - DNA, 20 bp, synthetic construct
  source 1..20: mol_type = other DNA
attatcattataacaaacag

SEQ ID NO: 131911 - DNA, 20 bp, synthetic construct
  source 1..20: mol_type = other DNA
tattatcattataacaaaca

SEQ ID NO: 131912 - DNA, 20 bp, synthetic construct
  source 1..20: mol_type = other DNA
gtattatcattataacaaac

SEQ ID NO: 131913 - DNA, 20 bp, synthetic construct
  source 1..20: mol_type = other DNA
agtattatcattataacaaa

SEQ ID NO: 131914 - DNA, 20 bp, synthetic construct
  source 1..20: mol_type = other DNA
tagtattatcattataacaa

SEQ ID NO: 131915 - DNA, 20 bp, synthetic construct
  source 1..20: mol_type = other DNA
atagtattatcattataaca

SEQ ID NO: 131916 - DNA, 20 bp, synthetic construct
  source 1..20: mol_type = other DNA
catagtattatcattataac

SEQ ID NO: 131917 - DNA, 20 bp, synthetic construct
  source 1..20: mol_type = other DNA
acatagtattatcattataa

SEQ ID NO: 131918 - DNA, 20 bp, synthetic construct
  source 1..20: mol_type = other DNA
aacatagtattatcattata

SEQ ID NO: 131919 - DNA, 20 bp, synthetic construct
  source 1..20: mol_type = other DNA
aaacatagtattatcattat

SEQ ID NO: 131920 - DNA, 20 bp, synthetic construct
  source 1..20: mol_type = other DNA
gaaacatagtattatcatta

SEQ ID NO: 131921 - DNA, 20 bp, synthetic construct
  source 1..20: mol_type = other DNA
agaaacatagtattatcatt

SEQ ID NO: 131922 - DNA, 20 bp, synthetic construct
  source 1..20: mol_type = other DNA
tagaaacatagtattatcat

SEQ ID NO: 131923 - DNA, 20 bp, synthetic construct
  source 1..20: mol_type = other DNA
gtagaaacatagtattatca

SEQ ID NO: 131924 - DNA, 20 bp, synthetic construct
  source 1..20: mol_type = other DNA
tgtagaaacatagtattatc

SEQ ID NO: 131925 - DNA, 20 bp, synthetic construct
  source 1..20: mol_type = other DNA
atgtagaaacatagtattat

SEQ ID NO: 131926 - DNA, 20 bp, synthetic construct
  source 1..20: mol_type = other DNA
gatgtagaaacatagtatta

SEQ ID NO: 131927 - DNA, 20 bp, synthetic construct
  source 1..20: mol_type = other DNA
tgatgtagaaacatagtatt

SEQ ID NO: 131928 - DNA, 20 bp, synthetic construct
  source 1..20: mol_type = other DNA
atgatgtagaaacatagtat

SEQ ID NO: 131929 - DNA, 20 bp, synthetic construct
  source 1..20: mol_type = other DNA
catgatgtagaaacatagta

SEQ ID NO: 131930 - DNA, 20 bp, synthetic construct
  source 1..20: mol_type = other DNA
gcatgatgtagaaacatagt

SEQ ID NO: 131931 - DNA, 20 bp, synthetic construct
  source 1..20: mol_type = other DNA
agcatgatgtagaaacatag

SEQ ID NO: 131932 - DNA, 20 bp, synthetic construct
  source 1..20: mol_type = other DNA
cagcatgatgtagaaacata

SEQ ID NO: 131933 - DNA, 20 bp, synthetic construct
  source 1..20: mol_type = other DNA
acagcatgatgtagaaacat

SEQ ID NO: 131934 - DNA, 20 bp, synthetic construct
  source 1..20: mol_type = other DNA
tacagcatgatgtagaaaca

SEQ ID NO: 131935 - DNA, 20 bp, synthetic construct
  source 1..20: mol_type = other DNA
atacagcatgatgtagaaac

SEQ ID NO: 131936 - DNA, 20 bp, synthetic construct
  source 1..20: mol_type = other DNA
aatacagcatgatgtagaaa

SEQ ID NO: 131937 - DNA, 20 bp, synthetic construct
  source 1..20: mol_type = other DNA
aaatacagcatgatgtagaa

SEQ ID NO: 131938 - DNA, 20 bp, synthetic construct
  source 1..20: mol_type = other DNA
aaaatacagcatgatgtaga

SEQ ID NO: 131939 - DNA, 20 bp, synthetic construct
  source 1..20: mol_type = other DNA
taaaatacagcatgatgtag

SEQ ID NO: 131940 - DNA, 20 bp, synthetic construct
  source 1..20: mol_type = other DNA
ttaaaatacagcatgatgta

SEQ ID NO: 131941 - DNA, 20 bp, synthetic construct
  source 1..20: mol_type = other DNA
attaaaatacagcatgatgt

SEQ ID NO: 131942 - DNA, 20 bp, synthetic construct
  source 1..20: mol_type = other DNA
cattaaaatacagcatgatg

SEQ ID NO: 131943 - DNA, 20 bp, synthetic construct
  source 1..20: mol_type = other DNA
ccattaaaatacagcatgat

SEQ ID NO: 131944 - DNA, 20 bp, synthetic construct
  source 1..20: mol_type = other DNA
accattaaaatacagcatga

SEQ ID NO: 131945 - DNA, 20 bp, synthetic construct
  source 1..20: mol_type = other DNA
aaccattaaaatacagcatg

SEQ ID NO: 131946 - DNA, 20 bp, synthetic construct
  source 1..20: mol_type = other DNA
caaccattaaaatacagcat

SEQ ID NO: 131947 - DNA, 20 bp, synthetic construct
  source 1..20: mol_type = other DNA
tcaaccattaaaatacagca

SEQ ID NO: 131948 - DNA, 20 bp, synthetic construct
  source 1..20: mol_type = other DNA
ttcaaccattaaaatacagc

SEQ ID NO: 131949 - DNA, 20 bp, synthetic construct
  source 1..20: mol_type = other DNA
attcaaccattaaaatacag

SEQ ID NO: 131950 - DNA, 20 bp, synthetic construct
  source 1..20: mol_type = other DNA
tattcaaccattaaaataca

SEQ ID NO: 131951 - DNA, 20 bp, synthetic construct
  source 1..20: mol_type = other DNA
atattcaaccattaaaatac

SEQ ID NO: 131952 - DNA, 20 bp, synthetic construct
  source 1..20: mol_type = other DNA
aatattcaaccattaaaata

SEQ ID NO: 131953 - DNA, 20 bp, synthetic construct
  source 1..20: mol_type = other DNA
taatattcaaccattaaaat

SEQ ID NO: 131954 - DNA, 20 bp, synthetic construct
  source 1..20: mol_type = other DNA
ataatattcaaccattaaaa

SEQ ID NO: 131955 - DNA, 20 bp, synthetic construct
  source 1..20: mol_type = other DNA
cataatattcaaccattaaa

SEQ ID NO: 131956 - DNA, 20 bp, synthetic construct
  source 1..20: mol_type = other DNA
acataatattcaaccattaa

SEQ ID NO: 131957 - DNA, 20 bp, synthetic construct
  source 1..20: mol_type = other DNA
gacataatattcaaccatta

SEQ ID NO: 131958 - DNA, 20 bp, synthetic construct
  source 1..20: mol_type = other DNA
tgacataatattcaaccatt

SEQ ID NO: 131959 - DNA, 20 bp, synthetic construct
  source 1..20: mol_type = other DNA
atgacataatattcaaccat

SEQ ID NO: 131960 - DNA, 20 bp, synthetic construct
  source 1..20: mol_type = other DNA
tatgacataatattcaacca

SEQ ID NO: 131961 - DNA, 20 bp, synthetic construct
  source 1..20: mol_type = other DNA
atatgacataatattcaacc

SEQ ID NO: 131962 - DNA, 20 bp, synthetic construct
  source 1..20: mol_type = other DNA
aatatgacataatattcaac

SEQ ID NO: 131963 - DNA, 20 bp, synthetic construct
  source 1..20: mol_type = other DNA
taatatgacataatattcaa

SEQ ID NO: 131964 - DNA, 20 bp, synthetic construct
  source 1..20: mol_type = other DNA
ctaatatgacataatattca

SEQ ID NO: 131965 - DNA, 20 bp, synthetic construct
  source 1..20: mol_type = other DNA
tctaatatgacataatattc

SEQ ID NO: 131966 - DNA, 20 bp, synthetic construct
  source 1..20: mol_type = other DNA
atctaatatgacataatatt

SEQ ID NO: 131967 - DNA, 20 bp, synthetic construct
  source 1..20: mol_type = other DNA
tatctaatatgacataatat

SEQ ID NO: 131968 - DNA, 20 bp, synthetic construct
  source 1..20: mol_type = other DNA
atatctaatatgacataata

SEQ ID NO: 131969 - DNA, 20 bp, synthetic construct
  source 1..20: mol_type = other DNA
tatatctaatatgacataat

SEQ ID NO: 131970 - DNA, 20 bp, synthetic construct
  source 1..20: mol_type = other DNA
atatatctaatatgacataa

SEQ ID NO: 131971 - DNA, 20 bp, synthetic construct
  source 1..20: mol_type = other DNA
aatatatctaatatgacata

SEQ ID NO: 131972 - DNA, 20 bp, synthetic construct
  source 1..20: mol_type = other DNA
aaatatatctaatatgacat

SEQ ID NO: 131973 - DNA, 20 bp, synthetic construct
  source 1..20: mol_type = other DNA
aaaatatatctaatatgaca

SEQ ID NO: 131974 - DNA, 20 bp, synthetic construct
  source 1..20: mol_type = other DNA
taaaatatatctaatatgac

SEQ ID NO: 131975 - DNA, 20 bp, synthetic construct
  source 1..20: mol_type = other DNA
ctaaaatatatctaatatga

SEQ ID NO: 131976 - DNA, 20 bp, synthetic construct
  source 1..20: mol_type = other DNA
tctaaaatatatctaatatg

SEQ ID NO: 131977 - DNA, 20 bp, synthetic construct
  source 1..20: mol_type = other DNA
gtctaaaatatatctaatat

SEQ ID NO: 131978 - DNA, 20 bp, synthetic construct
  source 1..20: mol_type = other DNA
tgtctaaaatatatctaata

SEQ ID NO: 131979 - DNA, 20 bp, synthetic construct
  source 1..20: mol_type = other DNA
atgtctaaaatatatctaat

SEQ ID NO: 131980 - DNA, 20 bp, synthetic construct
  source 1..20: mol_type = other DNA
catgtctaaaatatatctaa

SEQ ID NO: 131981 - DNA, 20 bp, synthetic construct
  source 1..20: mol_type = other DNA
tcatgtctaaaatatatcta

SEQ ID NO: 131982 - DNA, 20 bp, synthetic construct
  source 1..20: mol_type = other DNA
ctcatgtctaaaatatatct

SEQ ID NO: 131983 - DNA, 20 bp, synthetic construct
  source 1..20: mol_type = other DNA
actcatgtctaaaatatatc

SEQ ID NO: 131984 - DNA, 20 bp, synthetic construct
  source 1..20: mol_type = other DNA
gactcatgtctaaaatatat

SEQ ID NO: 131985 - DNA, 20 bp, synthetic construct
  source 1..20: mol_type = other DNA
tgactcatgtctaaaatata

SEQ ID NO: 131986 - DNA, 20 bp, synthetic construct
  source 1..20: mol_type = other DNA
gtgactcatgtctaaaatat

SEQ ID NO: 131987 - DNA, 20 bp, synthetic construct
  source 1..20: mol_type = other DNA
tgtgactcatgtctaaaata

SEQ ID NO: 131988 - DNA, 20 bp, synthetic construct
  source 1..20: mol_type = other DNA
gtgtgactcatgtctaaaat

SEQ ID NO: 131989 - DNA, 20 bp, synthetic construct
  source 1..20: mol_type = other DNA
agtgtgactcatgtctaaaa

SEQ ID NO: 131990 - DNA, 20 bp, synthetic construct
  source 1..20: mol_type = other DNA
aagtgtgactcatgtctaaa

SEQ ID NO: 131991 - DNA, 20 bp, synthetic construct
  source 1..20: mol_type = other DNA
aaagtgtgactcatgtctaa

SEQ ID NO: 131992 - DNA, 20 bp, synthetic construct
  source 1..20: mol_type = other DNA
taaagtgtgactcatgtcta

SEQ ID NO: 131993 - DNA, 20 bp, synthetic construct
  source 1..20: mol_type = other DNA
ttaaagtgtgactcatgtct

SEQ ID NO: 131994 - DNA, 20 bp, synthetic construct
  source 1..20: mol_type = other DNA
tttaaagtgtgactcatgtc

SEQ ID NO: 131995 - DNA, 20 bp, synthetic construct
  source 1..20: mol_type = other DNA
atttaaagtgtgactcatgt

SEQ ID NO: 131996 - DNA, 20 bp, synthetic construct
  source 1..20: mol_type = other DNA
tatttaaagtgtgactcatg

SEQ ID NO: 131997 - DNA, 20 bp, synthetic construct
  source 1..20: mol_type = other DNA
atatttaaagtgtgactcat

SEQ ID NO: 131998 - DNA, 20 bp, synthetic construct
  source 1..20: mol_type = other DNA
tatatttaaagtgtgactca

SEQ ID NO: 131999 - DNA, 20 bp, synthetic construct
  source 1..20: mol_type = other DNA
ttatatttaaagtgtgactc

SEQ ID NO: 132000 - DNA, 20 bp, synthetic construct
  source 1..20: mol_type = other DNA
gttatatttaaagtgtgact

SEQ ID NO: 132001 - DNA, 20 bp, synthetic construct
  source 1..20: mol_type = other DNA
ggttatatttaaagtgtgac

SEQ ID NO: 132002 - DNA, 20 bp, synthetic construct
  source 1..20: mol_type = other DNA
tggttatatttaaagtgtga

SEQ ID NO: 132003 - DNA, 20 bp, synthetic construct
  source 1..20: mol_type = other DNA
ttggttatatttaaagtgtg

SEQ ID NO: 132004 - DNA, 20 bp, synthetic construct
  source 1..20: mol_type = other DNA
attggttatatttaaagtgt

SEQ ID NO: 132005 - DNA, 20 bp, synthetic construct
  source 1..20: mol_type = other DNA
cattggttatatttaaagtg

SEQ ID NO: 132006 - DNA, 20 bp, synthetic construct
  source 1..20: mol_type = other DNA
acattggttatatttaaagt

SEQ ID NO: 132007 - DNA, 20 bp, synthetic construct
  source 1..20: mol_type = other DNA
cacattggttatatttaaag

SEQ ID NO: 132008 - DNA, 20 bp, synthetic construct
  source 1..20: mol_type = other DNA
tcacattggttatatttaaa

SEQ ID NO: 132009 - DNA, 20 bp, synthetic construct
  source 1..20: mol_type = other DNA
ttcacattggttatatttaa

SEQ ID NO: 132010 - DNA, 20 bp, synthetic construct
  source 1..20: mol_type = other DNA
gttcacattggttatattta

SEQ ID NO: 132011 - DNA, 20 bp, synthetic construct
  source 1..20: mol_type = other DNA
tgttcacattggttatattt

SEQ ID NO: 132012 - DNA, 20 bp, synthetic construct
  source 1..20: mol_type = other DNA
ctgttcacattggttatatt

SEQ ID NO: 132013 - DNA, 20 bp, synthetic construct
  source 1..20: mol_type = other DNA
tctgttcacattggttatat

SEQ ID NO: 132014 - DNA, 20 bp, synthetic construct
  source 1..20: mol_type = other DNA
ttctgttcacattggttata

SEQ ID NO: 132015 - DNA, 20 bp, synthetic construct
  source 1..20: mol_type = other DNA
attctgttcacattggttat

SEQ ID NO: 132016 - DNA, 20 bp, synthetic construct
  source 1..20: mol_type = other DNA
cattctgttcacattggtta

SEQ ID NO: 132017 - DNA, 20 bp, synthetic construct
  source 1..20: mol_type = other DNA
gcattctgttcacattggtt

SEQ ID NO: 132018 - DNA, 20 bp, synthetic construct
  source 1..20: mol_type = other DNA
agcattctgttcacattggt

SEQ ID NO: 132019 - DNA, 20 bp, synthetic construct
  source 1..20: mol_type = other DNA
cagcattctgttcacattgg

SEQ ID NO: 132020 - DNA, 20 bp, synthetic construct
  source 1..20: mol_type = other DNA
tcagcattctgttcacattg

SEQ ID NO: 132021 - DNA, 20 bp, synthetic construct
  source 1..20: mol_type = other DNA
ttcagcattctgttcacatt

SEQ ID NO: 132022 - DNA, 20 bp, synthetic construct
  source 1..20: mol_type = other DNA
tttcagcattctgttcacat

SEQ ID NO: 132023 - DNA, 20 bp, synthetic construct
  source 1..20: mol_type = other DNA
atttcagcattctgttcaca

SEQ ID NO: 132024 - DNA, 20 bp, synthetic construct
  source 1..20: mol_type = other DNA
catttcagcattctgttcac

SEQ ID NO: 132025 - DNA, 20 bp, synthetic construct
  source 1..20: mol_type = other DNA
tcatttcagcattctgttca

SEQ ID NO: 132026 - DNA, 20 bp, synthetic construct
  source 1..20: mol_type = other DNA
ttcatttcagcattctgttc

SEQ ID NO: 132027 - DNA, 20 bp, synthetic construct
  source 1..20: mol_type = other DNA
tttcatttcagcattctgtt

SEQ ID NO: 132028 - DNA, 20 bp, synthetic construct
  source 1..20: mol_type = other DNA
ttttcatttcagcattctgt

SEQ ID NO: 132029 - DNA, 20 bp, synthetic construct
  source 1..20: mol_type = other DNA
attttcatttcagcattctg

SEQ ID NO: 132030 - DNA, 20 bp, synthetic construct
  source 1..20: mol_type = other DNA
cattttcatttcagcattct

SEQ ID NO: 132031 - DNA, 20 bp, synthetic construct
  source 1..20: mol_type = other DNA
tcattttcatttcagcattc

SEQ ID NO: 132032 - DNA, 20 bp, synthetic construct
  source 1..20: mol_type = other DNA
ctcattttcatttcagcatt

SEQ ID NO: 132033 - DNA, 20 bp, synthetic construct
  source 1..20: mol_type = other DNA
tctcattttcatttcagcat

SEQ ID NO: 132034 - DNA, 20 bp, synthetic construct
  source 1..20: mol_type = other DNA
ttctcattttcatttcagca

SEQ ID NO: 132035 - DNA, 20 bp, synthetic construct
  source 1..20: mol_type = other DNA
cttctcattttcatttcagc

SEQ ID NO: 132036 - DNA, 20 bp, synthetic construct
  source 1..20: mol_type = other DNA
acttctcattttcatttcag

SEQ ID NO: 132037 - DNA, 20 bp, synthetic construct
  source 1..20: mol_type = other DNA
tacttctcattttcatttca

SEQ ID NO: 132038 - DNA, 20 bp, synthetic construct
  source 1..20: mol_type = other DNA
atacttctcattttcatttc

SEQ ID NO: 132039 - DNA, 20 bp, synthetic construct
  source 1..20: mol_type = other DNA
aatacttctcattttcattt

SEQ ID NO: 132040 - DNA, 20 bp, synthetic construct
  source 1..20: mol_type = other DNA
aaatacttctcattttcatt

SEQ ID NO: 132041 - DNA, 20 bp, synthetic construct
  source 1..20: mol_type = other DNA
aaaatacttctcattttcat

SEQ ID NO: 132042 - DNA, 20 bp, synthetic construct
  source 1..20: mol_type = other DNA
taaaatacttctcattttca

SEQ ID NO: 132043 - DNA, 20 bp, synthetic construct
  source 1..20: mol_type = other DNA
ataaaatacttctcattttc

SEQ ID NO: 132044 - DNA, 20 bp, synthetic construct
  source 1..20: mol_type = other DNA
cataaaatacttctcatttt

SEQ ID NO: 132045 - DNA, 20 bp, synthetic construct
  source 1..20: mol_type = other DNA
acataaaatacttctcattt

SEQ ID NO: 132046 - DNA, 20 bp, synthetic construct
  source 1..20: mol_type = other DNA
tacataaaatacttctcatt

SEQ ID NO: 132047 - DNA, 20 bp, synthetic construct
  source 1..20: mol_type = other DNA
ttacataaaatacttctcat

SEQ ID NO: 132048 - DNA, 20 bp, synthetic construct
  source 1..20: mol_type = other DNA
tttacataaaatacttctca

SEQ ID NO: 132049 - DNA, 20 bp, synthetic construct
  source 1..20: mol_type = other DNA
ttttacataaaatacttctc

SEQ ID NO: 132050 - DNA, 20 bp, synthetic construct
  source 1..20: mol_type = other DNA
gttttacataaaatacttct

SEQ ID NO: 132051 - DNA, 20 bp, synthetic construct
  source 1..20: mol_type = other DNA
agttttacataaaatacttc

SEQ ID NO: 132052 - DNA, 20 bp, synthetic construct
  source 1..20: mol_type = other DNA
tagttttacataaaatactt

SEQ ID NO: 132053 - DNA, 20 bp, synthetic construct
  source 1..20: mol_type = other DNA
ttagttttacataaaatact

SEQ ID NO: 132054 - DNA, 20 bp, synthetic construct
  source 1..20: mol_type = other DNA
cttagttttacataaaatac

SEQ ID NO: 132055 - DNA, 20 bp, synthetic construct
  source 1..20: mol_type = other DNA
gcttagttttacataaaata

SEQ ID NO: 132056 - DNA, 20 bp, synthetic construct
  source 1..20: mol_type = other DNA
tgcttagttttacataaaat

SEQ ID NO: 132057 - DNA, 20 bp, synthetic construct
  source 1..20: mol_type = other DNA
ctgcttagttttacataaaa

SEQ ID NO: 132058 - DNA, 20 bp, synthetic construct
  source 1..20: mol_type = other DNA
actgcttagttttacataaa

SEQ ID NO: 132059 - DNA, 20 bp, synthetic construct
  source 1..20: mol_type = other DNA
tactgcttagttttacataa

SEQ ID NO: 132060 - DNA, 20 bp, synthetic construct
  source 1..20: mol_type = other DNA
atactgcttagttttacata

SEQ ID NO: 132061 - DNA, 20 bp, synthetic construct
  source 1..20: mol_type = other DNA
aatactgcttagttttacat

SEQ ID NO: 132062 - DNA, 20 bp, synthetic construct
  source 1..20: mol_type = other DNA
aaatactgcttagttttaca

SEQ ID NO: 132063 - DNA, 20 bp, synthetic construct
  source 1..20: mol_type = other DNA
taaatactgcttagttttac

SEQ ID NO: 132064 - DNA, 20 bp, synthetic construct
  source 1..20: mol_type = other DNA
ataaatactgcttagtttta

SEQ ID NO: 132065 - DNA, 20 bp, synthetic construct
  source 1..20: mol_type = other DNA
tataaatactgcttagtttt

SEQ ID NO: 132066 - DNA, 20 bp, synthetic construct
  source 1..20: mol_type = other DNA
atataaatactgcttagttt

SEQ ID NO: 132067 - DNA, 20 bp, synthetic construct
  source 1..20: mol_type = other DNA
catataaatactgcttagtt

SEQ ID NO: 132068 - DNA, 20 bp, synthetic construct
  source 1..20: mol_type = other DNA
acatataaatactgcttagt

SEQ ID NO: 132069 - DNA, 20 bp, synthetic construct
  source 1..20: mol_type = other DNA
cacatataaatactgcttag

SEQ ID NO: 132070 - DNA, 20 bp, synthetic construct
  source 1..20: mol_type = other DNA
tcacatataaatactgctta

SEQ ID NO: 132071 - DNA, 20 bp, synthetic construct
  source 1..20: mol_type = other DNA
ctcacatataaatactgctt

SEQ ID NO: 132072 - DNA, 20 bp, synthetic construct
  source 1..20: mol_type = other DNA
tctcacatataaatactgct

SEQ ID NO: 132073 - DNA, 20 bp, synthetic construct
  source 1..20: mol_type = other DNA
ttctcacatataaatactgc

SEQ ID NO: 132074 - DNA, 20 bp, synthetic construct
  source 1..20: mol_type = other DNA
attctcacatataaatactg

SEQ ID NO: 132075 - DNA, 20 bp, synthetic construct
  source 1..20: mol_type = other DNA
tattctcacatataaatact

SEQ ID NO: 132076 - DNA, 20 bp, synthetic construct
  source 1..20: mol_type = other DNA
ttattctcacatataaatac

SEQ ID NO: 132077 - DNA, 20 bp, synthetic construct
  source 1..20: mol_type = other DNA
attattctcacatataaata

SEQ ID NO: 132078 - DNA, 20 bp, synthetic construct
  source 1..20: mol_type = other DNA
tattattctcacatataaat

SEQ ID NO: 132079 - DNA, 20 bp, synthetic construct
  source 1..20: mol_type = other DNA
ttattattctcacatataaa

SEQ ID NO: 132080 - DNA, 20 bp, synthetic construct
  source 1..20: mol_type = other DNA
cttattattctcacatataa

SEQ ID NO: 132081 - DNA, 20 bp, synthetic construct
  source 1..20: mol_type = other DNA
gcttattattctcacatata

SEQ ID NO: 132082 - DNA, 20 bp, synthetic construct
  source 1..20: mol_type = other DNA
tgcttattattctcacatat

SEQ ID NO: 132083 - DNA, 20 bp, synthetic construct
  source 1..20: mol_type = other DNA
ttgcttattattctcacata

SEQ ID NO: 132084 - DNA, 20 bp, synthetic construct
  source 1..20: mol_type = other DNA
tttgcttattattctcacat

SEQ ID NO: 132085 - DNA, 20 bp, synthetic construct
  source 1..20: mol_type = other DNA
ttttgcttattattctcaca

SEQ ID NO: 132086 - DNA, 20 bp, synthetic construct
  source 1..20: mol_type = other DNA
tttttgcttattattctcac

SEQ ID NO: 132087 - DNA, 20 bp, synthetic construct
  source 1..20: mol_type = other DNA
ttttttgcttattattctca

SEQ ID NO: 132088 - DNA, 20 bp, synthetic construct
  source 1..20: mol_type = other DNA
tttttttgcttattattctc

SEQ ID NO: 132089 - DNA, 20 bp, synthetic construct
  source 1..20: mol_type = other DNA
gtttttttgcttattattct

SEQ ID NO: 132090 - DNA, 20 bp, synthetic construct
  source 1..20: mol_type = other DNA
ggtttttttgcttattattc

SEQ ID NO: 132091 - DNA, 20 bp, synthetic construct
  source 1..20: mol_type = other DNA
gggtttttttgcttattatt

SEQ ID NO: 132092 - DNA, 20 bp, synthetic construct
  source 1..20: mol_type = other DNA
tgggtttttttgcttattat

SEQ ID NO: 132093 - DNA, 20 bp, synthetic construct
  source 1..20: mol_type = other DNA
atgggtttttttgcttatta

SEQ ID NO: 132094 - DNA, 20 bp, synthetic construct
  source 1..20: mol_type = other DNA
gatgggtttttttgcttatt

SEQ ID NO: 132095 - DNA, 20 bp, synthetic construct
  source 1..20: mol_type = other DNA
agatgggtttttttgcttat

SEQ ID NO: 132096 - DNA, 20 bp, synthetic construct
  source 1..20: mol_type = other DNA
aagatgggtttttttgctta

SEQ ID NO: 132097 - DNA, 20 bp, synthetic construct
  source 1..20: mol_type = other DNA
gaagatgggtttttttgctt

SEQ ID NO: 132098 - DNA, 20 bp, synthetic construct
  source 1..20: mol_type = other DNA
cgaagatgggtttttttgct

SEQ ID NO: 132099 - DNA, 20 bp, synthetic construct
  source 1..20: mol_type = other DNA
acgaagatgggtttttttgc

SEQ ID NO: 132100 - DNA, 20 bp, synthetic construct
  source 1..20: mol_type = other DNA
aacgaagatgggtttttttg

SEQ ID NO: 132101 - DNA, 20 bp, synthetic construct
  source 1..20: mol_type = other DNA
aaacgaagatgggttttttt

SEQ ID NO: 132102 - DNA, 20 bp, synthetic construct
  source 1..20: mol_type = other DNA
aaaacgaagatgggtttttt

SEQ ID NO: 132103 - DNA, 20 bp, synthetic construct
  source 1..20: mol_type = other DNA
caaaacgaagatgggttttt

SEQ ID NO: 132104 - DNA, 20 bp, synthetic construct
  source 1..20: mol_type = other DNA
acaaaacgaagatgggtttt

SEQ ID NO: 132105 - DNA, 20 bp, synthetic construct
  source 1..20: mol_type = other DNA
cacaaaacgaagatgggttt

SEQ ID NO: 132106 - DNA, 20 bp, synthetic construct
  source 1..20: mol_type = other DNA
tcacaaaacgaagatgggtt

SEQ ID NO: 132107 - DNA, 20 bp, synthetic construct
  source 1..20: mol_type = other DNA
gtcacaaaacgaagatgggt

SEQ ID NO: 132108 - DNA, 20 bp, synthetic construct
  source 1..20: mol_type = other DNA
agtcacaaaacgaagatggg

SEQ ID NO: 132109 - DNA, 20 bp, synthetic construct
  source 1..20: mol_type = other DNA
tagtcacaaaacgaagatgg

SEQ ID NO: 132110 - DNA, 20 bp, synthetic construct
  source 1..20: mol_type = other DNA
ttagtcacaaaacgaagatg

SEQ ID NO: 132111 - DNA, 20 bp, synthetic construct
  source 1..20: mol_type = other DNA
tttagtcacaaaacgaagat

SEQ ID NO: 132112 - DNA, 20 bp, synthetic construct
  source 1..20: mol_type = other DNA
gtttagtcacaaaacgaaga

SEQ ID NO: 132113 - DNA, 20 bp, synthetic construct
  source 1..20: mol_type = other DNA
tgtttagtcacaaaacgaag

SEQ ID NO: 132114 - DNA, 20 bp, synthetic construct
  source 1..20: mol_type = other DNA
ctgtttagtcacaaaacgaa

SEQ ID NO: 132115 - DNA, 20 bp, synthetic construct
  source 1..20: mol_type = other DNA
tctgtttagtcacaaaacga

SEQ ID NO: 132116 - DNA, 20 bp, synthetic construct
  source 1..20: mol_type = other DNA
ctctgtttagtcacaaaacg

SEQ ID NO: 132117 - DNA, 20 bp, synthetic construct
  source 1..20: mol_type = other DNA
tctctgtttagtcacaaaac

SEQ ID NO: 132118 - DNA, 20 bp, synthetic construct
  source 1..20: mol_type = other DNA
ttctctgtttagtcacaaaa

SEQ ID NO: 132119 - DNA, 20 bp, synthetic construct
  source 1..20: mol_type = other DNA
tttctctgtttagtcacaaa

SEQ ID NO: 132120 - DNA, 20 bp, synthetic construct
  source 1..20: mol_type = other DNA
atttctctgtttagtcacaa

SEQ ID NO: 132121 - DNA, 20 bp, synthetic construct
  source 1..20: mol_type = other DNA
aatttctctgtttagtcaca

SEQ ID NO: 132122 - DNA, 20 bp, synthetic construct
  source 1..20: mol_type = other DNA
aaatttctctgtttagtcac

SEQ ID NO: 132123 - DNA, 20 bp, synthetic construct
  source 1..20: mol_type = other DNA
caaatttctctgtttagtca

SEQ ID NO: 132124 - DNA, 20 bp, synthetic construct
  source 1..20: mol_type = other DNA
acaaatttctctgtttagtc

SEQ ID NO: 132125 - DNA, 20 bp, synthetic construct
  source 1..20: mol_type = other DNA
cacaaatttctctgtttagt

SEQ ID NO: 132126 - DNA, 20 bp, synthetic construct
  source 1..20: mol_type = other DNA
acacaaatttctctgtttag

SEQ ID NO: 132127 - DNA, 20 bp, synthetic construct
  source 1..20: mol_type = other DNA
tacacaaatttctctgttta

SEQ ID NO: 132128 - DNA, 20 bp, synthetic construct
  source 1..20: mol_type = other DNA
ctacacaaatttctctgttt

SEQ ID NO: 132129 - DNA, 20 bp, synthetic construct
  source 1..20: mol_type = other DNA
tctacacaaatttctctgtt

SEQ ID NO: 132130 - DNA, 20 bp, synthetic construct
  source 1..20: mol_type = other DNA
atctacacaaatttctctgt

SEQ ID NO: 132131 - DNA, 20 bp, synthetic construct
  source 1..20: mol_type = other DNA
gatctacacaaatttctctg

SEQ ID NO: 132132 - DNA, 20 bp, synthetic construct
  source 1..20: mol_type = other DNA
tgatctacacaaatttctct

SEQ ID NO: 132133 - DNA, 20 bp, synthetic construct
  source 1..20: mol_type = other DNA
ttgatctacacaaatttctc

SEQ ID NO: 132134 - DNA, 20 bp, synthetic construct
  source 1..20: mol_type = other DNA
gttgatctacacaaatttct

SEQ ID NO: 132135 - DNA, 20 bp, synthetic construct
  source 1..20: mol_type = other DNA
agttgatctacacaaatttc

SEQ ID NO: 132136 - DNA, 20 bp, synthetic construct
  source 1..20: mol_type = other DNA
aagttgatctacacaaattt

SEQ ID NO: 132137 - DNA, 20 bp, synthetic construct
  source 1..20: mol_type = other DNA
taagttgatctacacaaatt

SEQ ID NO: 132138 - DNA, 20 bp, synthetic construct
  source 1..20: mol_type = other DNA
ctaagttgatctacacaaat

SEQ ID NO: 132139 - DNA, 20 bp, synthetic construct
  source 1..20: mol_type = other DNA
gctaagttgatctacacaaa

SEQ ID NO: 132140 - DNA, 20 bp, synthetic construct
  source 1..20: mol_type = other DNA
tgctaagttgatctacacaa

SEQ ID NO: 132141 - DNA, 20 bp, synthetic construct
  source 1..20: mol_type = other DNA
ctgctaagttgatctacaca

SEQ ID NO: 132142 - DNA, 20 bp, synthetic construct
  source 1..20: mol_type = other DNA
gctgctaagttgatctacac

SEQ ID NO: 132143 - DNA, 20 bp, synthetic construct
  source 1..20: mol_type = other DNA
agctgctaagttgatctaca

SEQ ID NO: 132144 - DNA, 20 bp, synthetic construct
  source 1..20: mol_type = other DNA
cagctgctaagttgatctac

SEQ ID NO: 132145 - DNA, 20 bp, synthetic construct
  source 1..20: mol_type = other DNA
acagctgctaagttgatcta

SEQ ID NO: 132146 - DNA, 20 bp, synthetic construct
  source 1..20: mol_type = other DNA
gacagctgctaagttgatct

SEQ ID NO: 132147 - DNA, 20 bp, synthetic construct
  source 1..20: mol_type = other DNA
agacagctgctaagttgatc

SEQ ID NO: 132148 - DNA, 20 bp, synthetic construct
  source 1..20: mol_type = other DNA
tagacagctgctaagttgat

SEQ ID NO: 132149 - DNA, 20 bp, synthetic construct
  source 1..20: mol_type = other DNA
ttagacagctgctaagttga

SEQ ID NO: 132150 - DNA, 20 bp, synthetic construct
  source 1..20: mol_type = other DNA
tttagacagctgctaagttg

SEQ ID NO: 132151 - DNA, 20 bp, synthetic construct
  source 1..20: mol_type = other DNA
ctttagacagctgctaagtt

SEQ ID NO: 132152 - DNA, 20 bp, synthetic construct
  source 1..20: mol_type = other DNA
actttagacagctgctaagt

SEQ ID NO: 132153 - DNA, 20 bp, synthetic construct
  source 1..20: mol_type = other DNA
tactttagacagctgctaag

SEQ ID NO: 132154 - DNA, 20 bp, synthetic construct
  source 1..20: mol_type = other DNA
gtactttagacagctgctaa

SEQ ID NO: 132155 - DNA, 20 bp, synthetic construct
  source 1..20: mol_type = other DNA
ggtactttagacagctgcta

SEQ ID NO: 132156 - DNA, 20 bp, synthetic construct
  source 1..20: mol_type = other DNA
tggtactttagacagctgct

SEQ ID NO: 132157 - DNA, 20 bp, synthetic construct
  source 1..20: mol_type = other DNA
ttggtactttagacagctgc

SEQ ID NO: 132158 - DNA, 20 bp, synthetic construct
  source 1..20: mol_type = other DNA
tttggtactttagacagctg

SEQ ID NO: 132159 - DNA, 20 bp, synthetic construct
  source 1..20: mol_type = other DNA
ttttggtactttagacagct

SEQ ID NO: 132160 - DNA, 20 bp, synthetic construct
  source 1..20: mol_type = other DNA
attttggtactttagacagc

SEQ ID NO: 132161 - DNA, 20 bp, synthetic construct
  source 1..20: mol_type = other DNA
tattttggtactttagacag

SEQ ID NO: 132162 - DNA, 20 bp, synthetic construct
  source 1..20: mol_type = other DNA
ttattttggtactttagaca

SEQ ID NO: 132163 - DNA, 20 bp, synthetic construct
  source 1..20: mol_type = other DNA
attattttggtactttagac

SEQ ID NO: 132164 - DNA, 20 bp, synthetic construct
  source 1..20: mol_type = other DNA
tattattttggtactttaga

SEQ ID NO: 132165 - DNA, 20 bp, synthetic construct
  source 1..20: mol_type = other DNA
ctattattttggtactttag

SEQ ID NO: 132166 - DNA, 20 bp, synthetic construct
  source 1..20: mol_type = other DNA
tctattattttggtacttta

SEQ ID NO: 132167 - DNA, 20 bp, synthetic construct
  source 1..20: mol_type = other DNA
atctattattttggtacttt

SEQ ID NO: 132168 - DNA, 20 bp, synthetic construct
  source 1..20: mol_type = other DNA
aatctattattttggtactt

SEQ ID NO: 132169 - DNA, 20 bp, synthetic construct
  source 1..20: mol_type = other DNA
aaatctattattttggtact

SEQ ID NO: 132170 - DNA, 20 bp, synthetic construct
  source 1..20: mol_type = other DNA
aaaatctattattttggtac

SEQ ID NO: 132171 - DNA, 20 bp, synthetic construct
  source 1..20: mol_type = other DNA
aaaaatctattattttggta

SEQ ID NO: 132172 - DNA, 20 bp, synthetic construct
  source 1..20: mol_type = other DNA
gaaaaatctattattttggt

SEQ ID NO: 132173 - DNA, 20 bp, synthetic construct
  source 1..20: mol_type = other DNA
tgaaaaatctattattttgg

SEQ ID NO: 132174 - DNA, 20 bp, synthetic construct
  source 1..20: mol_type = other DNA
gtgaaaaatctattattttg

SEQ ID NO: 132175 - DNA, 20 bp, synthetic construct
  source 1..20: mol_type = other DNA
agtgaaaaatctattatttt

SEQ ID NO: 132176 - DNA, 20 bp, synthetic construct
  source 1..20: mol_type = other DNA
cagtgaaaaatctattattt

SEQ ID NO: 132177 - DNA, 20 bp, synthetic construct
  source 1..20: mol_type = other DNA
acagtgaaaaatctattatt

SEQ ID NO: 132178 - DNA, 20 bp, synthetic construct
  source 1..20: mol_type = other DNA
aacagtgaaaaatctattat

SEQ ID NO: 132179 - DNA, 20 bp, synthetic construct
  source 1..20: mol_type = other DNA
caacagtgaaaaatctatta

SEQ ID NO: 132180 - DNA, 20 bp, synthetic construct
  source 1..20: mol_type = other DNA
tcaacagtgaaaaatctatt

SEQ ID NO: 132181 - DNA, 20 bp, synthetic construct
  source 1..20: mol_type = other DNA
atcaacagtgaaaaatctat

SEQ ID NO: 132182 - DNA, 20 bp, synthetic construct
  source 1..20: mol_type = other DNA
tatcaacagtgaaaaatcta

SEQ ID NO: 132183 - DNA, 20 bp, synthetic construct
  source 1..20: mol_type = other DNA
ttatcaacagtgaaaaatct

SEQ ID NO: 132184 - DNA, 20 bp, synthetic construct
  source 1..20: mol_type = other DNA
attatcaacagtgaaaaatc

SEQ ID NO: 132185 - DNA, 20 bp, synthetic construct
  source 1..20: mol_type = other DNA
aattatcaacagtgaaaaat

SEQ ID NO: 132186 - DNA, 20 bp, synthetic construct
  source 1..20: mol_type = other DNA
aaattatcaacagtgaaaaa

SEQ ID NO: 132187 - DNA, 20 bp, synthetic construct
  source 1..20: mol_type = other DNA
taaattatcaacagtgaaaa

SEQ ID NO: 132188 - DNA, 20 bp, synthetic construct
  source 1..20: mol_type = other DNA
ttaaattatcaacagtgaaa

SEQ ID NO: 132189 - DNA, 20 bp, synthetic construct
  source 1..20: mol_type = other DNA
tttaaattatcaacagtgaa

SEQ ID NO: 132190 - DNA, 20 bp, synthetic construct
  source 1..20: mol_type = other DNA
ttttaaattatcaacagtga

SEQ ID NO: 132191 - DNA, 20 bp, synthetic construct
  source 1..20: mol_type = other DNA
attttaaattatcaacagtg

SEQ ID NO: 132192 - DNA, 20 bp, synthetic construct
  source 1..20: mol_type = other DNA
tattttaaattatcaacagt

SEQ ID NO: 132193 - DNA, 20 bp, synthetic construct
  source 1..20: mol_type = other DNA
ttattttaaattatcaacag

SEQ ID NO: 132194 - DNA, 20 bp, synthetic construct
  source 1..20: mol_type = other DNA
tttattttaaattatcaaca

SEQ ID NO: 132195 - DNA, 20 bp, synthetic construct
  source 1..20: mol_type = other DNA
ttttattttaaattatcaac

SEQ ID NO: 132196 - DNA, 20 bp, synthetic construct
  source 1..20: mol_type = other DNA
attttattttaaattatcaa

SEQ ID NO: 132197 - DNA, 20 bp, synthetic construct
  source 1..20: mol_type = other DNA
cattttattttaaattatca

SEQ ID NO: 132198 - DNA, 20 bp, synthetic construct
  source 1..20: mol_type = other DNA
acattttattttaaattatc

SEQ ID NO: 132199 - DNA, 20 bp, synthetic construct
  source 1..20: mol_type = other DNA
gacattttattttaaattat

SEQ ID NO: 132200 - DNA, 20 bp, synthetic construct
  source 1..20: mol_type = other DNA
ggacattttattttaaatta

SEQ ID NO: 132201 - DNA, 20 bp, synthetic construct
  source 1..20: mol_type = other DNA
tggacattttattttaaatt

SEQ ID NO: 132202 - DNA, 20 bp, synthetic construct
  source 1..20: mol_type = other DNA
atggacattttattttaaat

SEQ ID NO: 132203 - DNA, 20 bp, synthetic construct
  source 1..20: mol_type = other DNA
aatggacattttattttaaa

SEQ ID NO: 132204 - DNA, 20 bp, synthetic construct
  source 1..20: mol_type = other DNA
aaatggacattttattttaa

SEQ ID NO: 132205 - DNA, 20 bp, synthetic construct
  source 1..20: mol_type = other DNA
caaatggacattttatttta

SEQ ID NO: 132206 - DNA, 20 bp, synthetic construct
  source 1..20: mol_type = other DNA
acaaatggacattttatttt

SEQ ID NO: 132207 - DNA, 20 bp, synthetic construct
  source 1..20: mol_type = other DNA
tacaaatggacattttattt

SEQ ID NO: 132208 - DNA, 20 bp, synthetic construct
  source 1..20: mol_type = other DNA
atacaaatggacattttatt

SEQ ID NO: 132209 - DNA, 20 bp, synthetic construct
  source 1..20: mol_type = other DNA
tatacaaatggacattttat

SEQ ID NO: 132210 - DNA, 20 bp, synthetic construct
  source 1..20: mol_type = other DNA
atatacaaatggacatttta

SEQ ID NO: 132211 - DNA, 20 bp, synthetic construct
  source 1..20: mol_type = other DNA
gatatacaaatggacatttt

SEQ ID NO: 132212 - DNA, 20 bp, synthetic construct
  source 1..20: mol_type = other DNA
agatatacaaatggacattt

SEQ ID NO: 132213 - DNA, 20 bp, synthetic construct
  source 1..20: mol_type = other DNA
aagatatacaaatggacatt

SEQ ID NO: 132214 - DNA, 20 bp, synthetic construct
  source 1..20: mol_type = other DNA
taagatatacaaatggacat

SEQ ID NO: 132215 - DNA, 20 bp, synthetic construct
  source 1..20: mol_type = other DNA
ataagatatacaaatggaca

SEQ ID NO: 132216 - DNA, 20 bp, synthetic construct
  source 1..20: mol_type = other DNA
cataagatatacaaatggac

SEQ ID NO: 132217 - DNA, 20 bp, synthetic construct
  source 1..20: mol_type = other DNA
tcataagatatacaaatgga

SEQ ID NO: 132218 - DNA, 20 bp, synthetic construct
  source 1..20: mol_type = other DNA
atcataagatatacaaatgg

SEQ ID NO: 132219 - DNA, 20 bp, synthetic construct
  source 1..20: mol_type = other DNA
tatcataagatatacaaatg

SEQ ID NO: 132220 - DNA, 20 bp, synthetic construct
  source 1..20: mol_type = other DNA
gtatcataagatatacaaat

SEQ ID NO: 132221 - DNA, 20 bp, synthetic construct
  source 1..20: mol_type = other DNA
tgtatcataagatatacaaa

SEQ ID NO: 132222 - DNA, 20 bp, synthetic construct
  source 1..20: mol_type = other DNA
ctgtatcataagatatacaa

SEQ ID NO: 132223 - DNA, 20 bp, synthetic construct
  source 1..20: mol_type = other DNA
tctgtatcataagatataca

SEQ ID NO: 132224 - DNA, 20 bp, synthetic construct
  source 1..20: mol_type = other DNA
ttctgtatcataagatatac

SEQ ID NO: 132225 - DNA, 20 bp, synthetic construct
  source 1..20: mol_type = other DNA
attctgtatcataagatata

SEQ ID NO: 132226 - DNA, 20 bp, synthetic construct
  source 1..20: mol_type = other DNA
aattctgtatcataagatat

SEQ ID NO: 132227 - DNA, 20 bp, synthetic construct
  source 1..20: mol_type = other DNA
taattctgtatcataagata

SEQ ID NO: 132228 - DNA, 20 bp, synthetic construct
  source 1..20: mol_type = other DNA
ttaattctgtatcataagat

SEQ ID NO: 132229 - DNA, 20 bp, synthetic construct
  source 1..20: mol_type = other DNA
attaattctgtatcataaga

SEQ ID NO: 132230 - DNA, 20 bp, synthetic construct
  source 1..20: mol_type = other DNA
cattaattctgtatcataag

SEQ ID NO: 132231 - DNA, 20 bp, synthetic construct
  source 1..20: mol_type = other DNA
ccattaattctgtatcataa

SEQ ID NO: 132232 - DNA, 20 bp, synthetic construct
  source 1..20: mol_type = other DNA
tccattaattctgtatcata

SEQ ID NO: 132233 - DNA, 20 bp, synthetic construct
  source 1..20: mol_type = other DNA
atccattaattctgtatcat

SEQ ID NO: 132234 - DNA, 20 bp, synthetic construct
  source 1..20: mol_type = other DNA
aatccattaattctgtatca

SEQ ID NO: 132235 - DNA, 20 bp, synthetic construct
  source 1..20: mol_type = other DNA
caatccattaattctgtatc

SEQ ID NO: 132236 - DNA, 20 bp, synthetic construct
  source 1..20: mol_type = other DNA
gcaatccattaattctgtat

SEQ ID NO: 132237 - DNA, 20 bp, synthetic construct
  source 1..20: mol_type = other DNA
agcaatccattaattctgta

SEQ ID NO: 132238 - DNA, 20 bp, synthetic construct
  source 1..20: mol_type = other DNA
aagcaatccattaattctgt

SEQ ID NO: 132239 - DNA, 20 bp, synthetic construct
  source 1..20: mol_type = other DNA
gaagcaatccattaattctg

SEQ ID NO: 132240 - DNA, 20 bp, synthetic construct
  source 1..20: mol_type = other DNA
tgaagcaatccattaattct

SEQ ID NO: 132241 - DNA, 20 bp, synthetic construct
  source 1..20: mol_type = other DNA
ttgaagcaatccattaattc

SEQ ID NO: 132242 - DNA, 20 bp, synthetic construct
  source 1..20: mol_type = other DNA
tttgaagcaatccattaatt

SEQ ID NO: 132243 - DNA, 20 bp, synthetic construct
  source 1..20: mol_type = other DNA
atttgaagcaatccattaat

SEQ ID NO: 132244 - DNA, 20 bp, synthetic construct
  source 1..20: mol_type = other DNA
catttgaagcaatccattaa

SEQ ID NO: 132245 - DNA, 20 bp, synthetic construct
  source 1..20: mol_type = other DNA
acatttgaagcaatccatta

SEQ ID NO: 132246 - DNA, 20 bp, synthetic construct
  source 1..20: mol_type = other DNA
aacatttgaagcaatccatt

SEQ ID NO: 132247 - DNA, 20 bp, synthetic construct
  source 1..20: mol_type = other DNA
aaacatttgaagcaatccat

SEQ ID NO: 132248 - DNA, 20 bp, synthetic construct
  source 1..20: mol_type = other DNA
aaaacatttgaagcaatcca

SEQ ID NO: 132249 - DNA, 20 bp, synthetic construct
  source 1..20: mol_type = other DNA
aaaaacatttgaagcaatcc

SEQ ID NO: 132250 - DNA, 20 bp, synthetic construct
  source 1..20: mol_type = other DNA
gaaaaacatttgaagcaatc

SEQ ID NO: 132251 - DNA, 20 bp, synthetic construct
  source 1..20: mol_type = other DNA
tgaaaaacatttgaagcaat

SEQ ID NO: 132252 - DNA, 20 bp, synthetic construct
  source 1..20: mol_type = other DNA
ctgaaaaacatttgaagcaa

SEQ ID NO: 132253 - DNA, 20 bp, synthetic construct
  source 1..20: mol_type = other DNA
tctgaaaaacatttgaagca

SEQ ID NO: 132254 - DNA, 20 bp, synthetic construct
  source 1..20: mol_type = other DNA
ttctgaaaaacatttgaagc

SEQ ID NO: 132255 - DNA, 20 bp, synthetic construct
  source 1..20: mol_type = other DNA
attctgaaaaacatttgaag

SEQ ID NO: 132256 - DNA, 20 bp, synthetic construct
  source 1..20: mol_type = other DNA
tattctgaaaaacatttgaa

SEQ ID NO: 132257 - DNA, 20 bp, synthetic construct
  source 1..20: mol_type = other DNA
atattctgaaaaacatttga

SEQ ID NO: 132258 - DNA, 20 bp, synthetic construct
  source 1..20: mol_type = other DNA
catattctgaaaaacatttg

SEQ ID NO: 132259 - DNA, 20 bp, synthetic construct
  source 1..20: mol_type = other DNA
acatattctgaaaaacattt

SEQ ID NO: 132260 - DNA, 20 bp, synthetic construct
  source 1..20: mol_type = other DNA
aacatattctgaaaaacatt

SEQ ID NO: 132261 - DNA, 20 bp, synthetic construct
  source 1..20: mol_type = other DNA
aaacatattctgaaaaacat

SEQ ID NO: 132262 - DNA, 20 bp, synthetic construct
  source 1..20: mol_type = other DNA
aaaacatattctgaaaaaca

SEQ ID NO: 132263 - DNA, 20 bp, synthetic construct
  source 1..20: mol_type = other DNA
aaaaacatattctgaaaaac

SEQ ID NO: 132264 - DNA, 20 bp, synthetic construct
  source 1..20: mol_type = other DNA
taaaaacatattctgaaaaa

SEQ ID NO: 132265 - DNA, 20 bp, synthetic construct
  source 1..20: mol_type = other DNA
ttaaaaacatattctgaaaa

SEQ ID NO: 132266 - DNA, 20 bp, synthetic construct
  source 1..20: mol_type = other DNA
tttaaaaacatattctgaaa

SEQ ID NO: 132267 - DNA, 20 bp, synthetic construct
  source 1..20: mol_type = other DNA
atttaaaaacatattctgaa

SEQ ID NO: 132268 - DNA, 20 bp, synthetic construct
  source 1..20: mol_type = other DNA
tatttaaaaacatattctga

SEQ ID NO: 132269 - DNA, 20 bp, synthetic construct
  source 1..20: mol_type = other DNA
ctatttaaaaacatattctg

SEQ ID NO: 132270 - DNA, 20 bp, synthetic construct
  source 1..20: mol_type = other DNA
actatttaaaaacatattct

SEQ ID NO: 132271 - DNA, 20 bp, synthetic construct
  source 1..20: mol_type = other DNA
tactatttaaaaacatattc

SEQ ID NO: 132272 - DNA, 20 bp, synthetic construct
  source 1..20: mol_type = other DNA
gtactatttaaaaacatatt

SEQ ID NO: 132273 - DNA, 20 bp, synthetic construct
  source 1..20: mol_type = other DNA
agtactatttaaaaacatat

SEQ ID NO: 132274 - DNA, 20 bp, synthetic construct
  source 1..20: mol_type = other DNA
cagtactatttaaaaacata

SEQ ID NO: 132275 - DNA, 20 bp, synthetic construct
  source 1..20: mol_type = other DNA
tcagtactatttaaaaacat

SEQ ID NO: 132276 - DNA, 20 bp, synthetic construct
  source 1..20: mol_type = other DNA
atcagtactatttaaaaaca

SEQ ID NO: 132277 - DNA, 20 bp, synthetic construct
  source 1..20: mol_type = other DNA
aatcagtactatttaaaaac

SEQ ID NO: 132278 - DNA, 20 bp, synthetic construct
  source 1..20: mol_type = other DNA
aaatcagtactatttaaaaa

SEQ ID NO: 132279 - DNA, 20 bp, synthetic construct
  source 1..20: mol_type = other DNA
gaaatcagtactatttaaaa

SEQ ID NO: 132280 - DNA, 20 bp, synthetic construct
  source 1..20: mol_type = other DNA
tgaaatcagtactatttaaa

SEQ ID NO: 132281 - DNA, 20 bp, synthetic construct
  source 1..20: mol_type = other DNA
atgaaatcagtactatttaa

SEQ ID NO: 132282 - DNA, 20 bp, synthetic construct
  source 1..20: mol_type = other DNA
aatgaaatcagtactattta

SEQ ID NO: 132283 - DNA, 20 bp, synthetic construct
  source 1..20: mol_type = other DNA
taatgaaatcagtactattt

SEQ ID NO: 132284 - DNA, 20 bp, synthetic construct
  source 1..20: mol_type = other DNA
ttaatgaaatcagtactatt

SEQ ID NO: 132285 - DNA, 20 bp, synthetic construct
  source 1..20: mol_type = other DNA
cttaatgaaatcagtactat

SEQ ID NO: 132286 - DNA, 20 bp, synthetic construct
  source 1..20: mol_type = other DNA
tcttaatgaaatcagtacta

SEQ ID NO: 132287 - DNA, 20 bp, synthetic construct
  source 1..20: mol_type = other DNA
atcttaatgaaatcagtact

SEQ ID NO: 132288 - DNA, 20 bp, synthetic construct
  source 1..20: mol_type = other DNA
catcttaatgaaatcagtac

SEQ ID NO: 132289 - DNA, 20 bp, synthetic construct
  source 1..20: mol_type = other DNA
acatcttaatgaaatcagta

SEQ ID NO: 132290 - DNA, 20 bp, synthetic construct
  source 1..20: mol_type = other DNA
aacatcttaatgaaatcagt

SEQ ID NO: 132291 - DNA, 20 bp, synthetic construct
  source 1..20: mol_type = other DNA
aaacatcttaatgaaatcag

SEQ ID NO: 132292 - DNA, 20 bp, synthetic construct
  source 1..20: mol_type = other DNA
aaaacatcttaatgaaatca

SEQ ID NO: 132293 - DNA, 20 bp, synthetic construct
  source 1..20: mol_type = other DNA
caaaacatcttaatgaaatc

SEQ ID NO: 132294 - DNA, 20 bp, synthetic construct
  source 1..20: mol_type = other DNA
acaaaacatcttaatgaaat

SEQ ID NO: 132295 - DNA, 20 bp, synthetic construct
  source 1..20: mol_type = other DNA
aacaaaacatcttaatgaaa

SEQ ID NO: 132296 - DNA, 20 bp, synthetic construct
  source 1..20: mol_type = other DNA
gaacaaaacatcttaatgaa

SEQ ID NO: 132297 - DNA, 20 bp, synthetic construct
  source 1..20: mol_type = other DNA
agaacaaaacatcttaatga

SEQ ID NO: 132298 - DNA, 20 bp, synthetic construct
  source 1..20: mol_type = other DNA
cagaacaaaacatcttaatg

SEQ ID NO: 132299 - DNA, 20 bp, synthetic construct
  source 1..20: mol_type = other DNA
tcagaacaaaacatcttaat

SEQ ID NO: 132300 - DNA, 20 bp, synthetic construct
  source 1..20: mol_type = other DNA
ttcagaacaaaacatcttaa

SEQ ID NO: 132301 - DNA, 20 bp, synthetic construct
  source 1..20: mol_type = other DNA
attcagaacaaaacatctta

SEQ ID NO: 132302 - DNA, 20 bp, synthetic construct
  source 1..20: mol_type = other DNA
tattcagaacaaaacatctt

SEQ ID NO: 132303 - DNA, 20 bp, synthetic construct
  source 1..20: mol_type = other DNA
atattcagaacaaaacatct

SEQ ID NO: 132304 - DNA, 20 bp, synthetic construct
  source 1..20: mol_type = other DNA
aatattcagaacaaaacatc

SEQ ID NO: 132305 - DNA, 20 bp, synthetic construct
  source 1..20: mol_type = other DNA
aaatattcagaacaaaacat

SEQ ID NO: 132306 - DNA, 20 bp, synthetic construct
  source 1..20: mol_type = other DNA
gaaatattcagaacaaaaca

SEQ ID NO: 132307 - DNA, 20 bp, synthetic construct
  source 1..20: mol_type = other DNA
agaaatattcagaacaaaac

SEQ ID NO: 132308 - DNA, 20 bp, synthetic construct
  source 1..20: mol_type = other DNA
cagaaatattcagaacaaaa

SEQ ID NO: 132309 - DNA, 20 bp, synthetic construct
  source 1..20: mol_type = other DNA
tcagaaatattcagaacaaa

SEQ ID NO: 132310 - DNA, 20 bp, synthetic construct
  source 1..20: mol_type = other DNA
ctcagaaatattcagaacaa

SEQ ID NO: 132311 - DNA, 20 bp, synthetic construct
  source 1..20: mol_type = other DNA
tctcagaaatattcagaaca

SEQ ID NO: 132312 - DNA, 20 bp, synthetic construct
  source 1..20: mol_type = other DNA
ttctcagaaatattcagaac

SEQ ID NO: 132313 - DNA, 20 bp, synthetic construct
  source 1..20: mol_type = other DNA
gttctcagaaatattcagaa

SEQ ID NO: 132314 - DNA, 20 bp, synthetic construct
  source 1..20: mol_type = other DNA
agttctcagaaatattcaga

SEQ ID NO: 132315 - DNA, 20 bp, synthetic construct
  source 1..20: mol_type = other DNA
tagttctcagaaatattcag

SEQ ID NO: 132316 - DNA, 20 bp, synthetic construct
  source 1..20: mol_type = other DNA
gtagttctcagaaatattca

SEQ ID NO: 132317 - DNA, 20 bp, synthetic construct
  source 1..20: mol_type = other DNA
ggtagttctcagaaatattc

SEQ ID NO: 132318 - DNA, 20 bp, synthetic construct
  source 1..20: mol_type = other DNA
cggtagttctcagaaatatt

SEQ ID NO: 132319 - DNA, 20 bp, synthetic construct
  source 1..20: mol_type = other DNA
acggtagttctcagaaatat

SEQ ID NO: 132320 - DNA, 20 bp, synthetic construct
  source 1..20: mol_type = other DNA
tacggtagttctcagaaata

SEQ ID NO: 132321 - DNA, 20 bp, synthetic construct
  source 1..20: mol_type = other DNA
ctacggtagttctcagaaat

SEQ ID NO: 132322 - DNA, 20 bp, synthetic construct
  source 1..20: mol_type = other DNA
actacggtagttctcagaaa

SEQ ID NO: 132323 - DNA, 20 bp, synthetic construct
  source 1..20: mol_type = other DNA
cactacggtagttctcagaa

SEQ ID NO: 132324 - DNA, 20 bp, synthetic construct
  source 1..20: mol_type = other DNA
acactacggtagttctcaga

SEQ ID NO: 132325 - DNA, 20 bp, synthetic construct
  source 1..20: mol_type = other DNA
gacactacggtagttctcag

SEQ ID NO: 132326 - DNA, 20 bp, synthetic construct
  source 1..20: mol_type = other DNA
cgacactacggtagttctca

SEQ ID NO: 132327 - DNA, 20 bp, synthetic construct
  source 1..20: mol_type = other DNA
acgacactacggtagttctc

SEQ ID NO: 132328 - DNA, 20 bp, synthetic construct
  source 1..20: mol_type = other DNA
aacgacactacggtagttct

SEQ ID NO: 132329 - DNA, 20 bp, synthetic construct
  source 1..20: mol_type = other DNA
aaacgacactacggtagttc

SEQ ID NO: 132330 - DNA, 20 bp, synthetic construct
  source 1..20: mol_type = other DNA
taaacgacactacggtagtt

SEQ ID NO: 132331 - DNA, 20 bp, synthetic construct
  source 1..20: mol_type = other DNA
ctaaacgacactacggtagt

SEQ ID NO: 132332 - DNA, 20 bp, synthetic construct
  source 1..20: mol_type = other DNA
actaaacgacactacggtag

SEQ ID NO: 132333 - DNA, 20 bp, synthetic construct
  source 1..20: mol_type = other DNA
aactaaacgacactacggta

SEQ ID NO: 132334 - DNA, 20 bp, synthetic construct
  source 1..20: mol_type = other DNA
aaactaaacgacactacggt

SEQ ID NO: 132335 - DNA, 20 bp, synthetic construct
  source 1..20: mol_type = other DNA
aaaactaaacgacactacgg

SEQ ID NO: 132336 - DNA, 20 bp, synthetic construct
  source 1..20: mol_type = other DNA
gaaaactaaacgacactacg

SEQ ID NO: 132337 - DNA, 20 bp, synthetic construct
  source 1..20: mol_type = other DNA
ggaaaactaaacgacactac

SEQ ID NO: 132338 - DNA, 20 bp, synthetic construct
  source 1..20: mol_type = other DNA
aggaaaactaaacgacacta

SEQ ID NO: 132339 - DNA, 20 bp, synthetic construct
  source 1..20: mol_type = other DNA
taggaaaactaaacgacact

SEQ ID NO: 132340 - DNA, 20 bp, synthetic construct
  source 1..20: mol_type = other DNA
ataggaaaactaaacgacac

SEQ ID NO: 132341 - DNA, 20 bp, synthetic construct
  source 1..20: mol_type = other DNA
aataggaaaactaaacgaca

SEQ ID NO: 132342 - DNA, 20 bp, synthetic construct
  source 1..20: mol_type = other DNA
aaataggaaaactaaacgac

SEQ ID NO: 132343 - DNA, 20 bp, synthetic construct
  source 1..20: mol_type = other DNA
caaataggaaaactaaacga

SEQ ID NO: 132344 - DNA, 20 bp, synthetic construct
  source 1..20: mol_type = other DNA
gcaaataggaaaactaaacg

SEQ ID NO: 132345 - DNA, 20 bp, synthetic construct
  source 1..20: mol_type = other DNA
cgcaaataggaaaactaaac

SEQ ID NO: 132346 - DNA, 20 bp, synthetic construct
  source 1..20: mol_type = other DNA
acgcaaataggaaaactaaa

SEQ ID NO: 132347 - DNA, 20 bp, synthetic construct
  source 1..20: mol_type = other DNA
aacgcaaataggaaaactaa

SEQ ID NO: 132348 - DNA, 20 bp, synthetic construct
  source 1..20: mol_type = other DNA
aaacgcaaataggaaaacta

SEQ ID NO: 132349 - DNA, 20 bp, synthetic construct
  source 1..20: mol_type = other DNA
aaaacgcaaataggaaaact

SEQ ID NO: 132350 - DNA, 20 bp, synthetic construct
  source 1..20: mol_type = other DNA
aaaaacgcaaataggaaaac

SEQ ID NO: 132351 - DNA, 20 bp, synthetic construct
  source 1..20: mol_type = other DNA
caaaaacgcaaataggaaaa

SEQ ID NO: 132352 - DNA, 20 bp, synthetic construct
  source 1..20: mol_type = other DNA
ccaaaaacgcaaataggaaa

SEQ ID NO: 132353 - DNA, 20 bp, synthetic construct
  source 1..20: mol_type = other DNA
accaaaaacgcaaataggaa

SEQ ID NO: 132354 - DNA, 20 bp, synthetic construct
  source 1..20: mol_type = other DNA
aaccaaaaacgcaaatagga

SEQ ID NO: 132355 - DNA, 20 bp, synthetic construct
  source 1..20: mol_type = other DNA
caaccaaaaacgcaaatagg

SEQ ID NO: 132356 - DNA, 20 bp, synthetic construct
  source 1..20: mol_type = other DNA
acaaccaaaaacgcaaatag

SEQ ID NO: 132357 - DNA, 20 bp, synthetic construct
  source 1..20: mol_type = other DNA
aacaaccaaaaacgcaaata

SEQ ID NO: 132358 - DNA, 20 bp, synthetic construct
  source 1..20: mol_type = other DNA
aaacaaccaaaaacgcaaat

SEQ ID NO: 132359 - DNA, 20 bp, synthetic construct
  source 1..20: mol_type = other DNA
caaacaaccaaaaacgcaaa

SEQ ID NO: 132360 - DNA, 20 bp, synthetic construct
  source 1..20: mol_type = other DNA
ccaaacaaccaaaaacgcaa

SEQ ID NO: 132361 - DNA, 20 bp, synthetic construct
  source 1..20: mol_type = other DNA
tccaaacaaccaaaaacgca

SEQ ID NO: 132362 - DNA, 20 bp, synthetic construct
  source 1..20: mol_type = other DNA
ctccaaacaaccaaaaacgc

SEQ ID NO: 132363 - DNA, 20 bp, synthetic construct
  source 1..20: mol_type = other DNA
actccaaacaaccaaaaacg

SEQ ID NO: 132364 - DNA, 20 bp, synthetic construct
  source 1..20: mol_type = other DNA
tactccaaacaaccaaaaac

SEQ ID NO: 132365 - DNA, 20 bp, synthetic construct
  source 1..20: mol_type = other DNA
ctactccaaacaaccaaaaa

SEQ ID NO: 132366 - DNA, 20 bp, synthetic construct
  source 1..20: mol_type = other DNA
cctactccaaacaaccaaaa

SEQ ID NO: 132367 - DNA, 20 bp, synthetic construct
  source 1..20: mol_type = other DNA
ccctactccaaacaaccaaa

SEQ ID NO: 132368 - DNA, 20 bp, synthetic construct
  source 1..20: mol_type = other DNA
cccctactccaaacaaccaa

SEQ ID NO: 132369 - DNA, 20 bp, synthetic construct
  source 1..20: mol_type = other DNA
tcccctactccaaacaacca

SEQ ID NO: 132370 - DNA, 20 bp, synthetic construct
  source 1..20: mol_type = other DNA
atcccctactccaaacaacc

SEQ ID NO: 132371 - DNA, 20 bp, synthetic construct
  source 1..20: mol_type = other DNA
tatcccctactccaaacaac

SEQ ID NO: 132372 - DNA, 20 bp, synthetic construct
  source 1..20: mol_type = other DNA
ttatcccctactccaaacaa

SEQ ID NO: 132373 - DNA, 20 bp, synthetic construct
  source 1..20: mol_type = other DNA
attatcccctactccaaaca

SEQ ID NO: 132374 - DNA, 20 bp, synthetic construct
  source 1..20: mol_type = other DNA
aattatcccctactccaaac

SEQ ID NO: 132375 - DNA, 20 bp, synthetic construct
  source 1..20: mol_type = other DNA
aaattatcccctactccaaa

SEQ ID NO: 132376 - DNA, 20 bp, synthetic construct
  source 1..20: mol_type = other DNA
aaaattatcccctactccaa

SEQ ID NO: 132377 - DNA, 20 bp, synthetic construct
  source 1..20: mol_type = other DNA
caaaattatcccctactcca

SEQ ID NO: 132378 - DNA, 20 bp, synthetic construct
  source 1..20: mol_type = other DNA
ccaaaattatcccctactcc

SEQ ID NO: 132379 - DNA, 20 bp, synthetic construct
  source 1..20: mol_type = other DNA
accaaaattatcccctactc

SEQ ID NO: 132380 - DNA, 20 bp, synthetic construct
  source 1..20: mol_type = other DNA
aaccaaaattatcccctact

SEQ ID NO: 132381 - DNA, 20 bp, synthetic construct
  source 1..20: mol_type = other DNA
aaaccaaaattatcccctac

SEQ ID NO: 132382 - DNA, 20 bp, synthetic construct
  source 1..20: mol_type = other DNA
taaaccaaaattatccccta

SEQ ID NO: 132383 - DNA, 20 bp, synthetic construct
  source 1..20: mol_type = other DNA
ataaaccaaaattatcccct

SEQ ID NO: 132384 - DNA, 20 bp, synthetic construct
  source 1..20: mol_type = other DNA
aataaaccaaaattatcccc

SEQ ID NO: 132385 - DNA, 20 bp, synthetic construct
  source 1..20: mol_type = other DNA
gaataaaccaaaattatccc

SEQ ID NO: 132386 - DNA, 20 bp, synthetic construct
  source 1..20: mol_type = other DNA
tgaataaaccaaaattatcc

SEQ ID NO: 132387 - DNA, 20 bp, synthetic construct
  source 1..20: mol_type = other DNA
atgaataaaccaaaattatc

SEQ ID NO: 132388 - DNA, 20 bp, synthetic construct
  source 1..20: mol_type = other DNA
tatgaataaaccaaaattat

SEQ ID NO: 132389 - DNA, 20 bp, synthetic construct
  source 1..20: mol_type = other DNA
gtatgaataaaccaaaatta

SEQ ID NO: 132390 - DNA, 20 bp, synthetic construct
  source 1..20: mol_type = other DNA
tgtatgaataaaccaaaatt

SEQ ID NO: 132391 - DNA, 20 bp, synthetic construct
  source 1..20: mol_type = other DNA
ctgtatgaataaaccaaaat

SEQ ID NO: 132392 - DNA, 20 bp, synthetic construct
  source 1..20: mol_type = other DNA
actgtatgaataaaccaaaa

SEQ ID NO: 132393 - DNA, 20 bp, synthetic construct
  source 1..20: mol_type = other DNA
aactgtatgaataaaccaaa

SEQ ID NO: 132394 - DNA, 20 bp, synthetic construct
  source 1..20: mol_type = other DNA
caactgtatgaataaaccaa

SEQ ID NO: 132395 - DNA, 20 bp, synthetic construct
  source 1..20: mol_type = other DNA
tcaactgtatgaataaacca

SEQ ID NO: 132396 - DNA, 20 bp, synthetic construct
  source 1..20: mol_type = other DNA
ttcaactgtatgaataaacc

SEQ ID NO: 132397 - DNA, 20 bp, synthetic construct
  source 1..20: mol_type = other DNA
tttcaactgtatgaataaac

SEQ ID NO: 132398 - DNA, 20 bp, synthetic construct
  source 1..20: mol_type = other DNA
ttttcaactgtatgaataaa

SEQ ID NO: 132399 - DNA, 20 bp, synthetic construct
  source 1..20: mol_type = other DNA
cttttcaactgtatgaataa

SEQ ID NO: 132400 - DNA, 20 bp, synthetic construct
  source 1..20: mol_type = other DNA
acttttcaactgtatgaata

SEQ ID NO: 132401 - DNA, 20 bp, synthetic construct
  source 1..20: mol_type = other DNA
cacttttcaactgtatgaat

SEQ ID NO: 132402 - DNA, 20 bp, synthetic construct
  source 1..20: mol_type = other DNA
acacttttcaactgtatgaa

SEQ ID NO: 132403 - DNA, 20 bp, synthetic construct
  source 1..20: mol_type = other DNA
tacacttttcaactgtatga

SEQ ID NO: 132404 - DNA, 20 bp, synthetic construct
  source 1..20: mol_type = other DNA
gtacacttttcaactgtatg

SEQ ID NO: 132405 - DNA, 20 bp, synthetic construct
  source 1..20: mol_type = other DNA
agtacacttttcaactgtat

SEQ ID NO: 132406 - DNA, 20 bp, synthetic construct
  source 1..20: mol_type = other DNA
cagtacacttttcaactgta

SEQ ID NO: 132407 - DNA, 20 bp, synthetic construct
  source 1..20: mol_type = other DNA
gcagtacacttttcaactgt

SEQ ID NO: 132408 - DNA, 20 bp, synthetic construct
  source 1..20: mol_type = other DNA
agcagtacacttttcaactg

SEQ ID NO: 132409 - DNA, 20 bp, synthetic construct
  source 1..20: mol_type = other DNA
tagcagtacacttttcaact

SEQ ID NO: 132410 - DNA, 20 bp, synthetic construct
  source 1..20: mol_type = other DNA
atagcagtacacttttcaac

SEQ ID NO: 132411 - DNA, 20 bp, synthetic construct
  source 1..20: mol_type = other DNA
catagcagtacacttttcaa

SEQ ID NO: 132412 - DNA, 20 bp, synthetic construct
  source 1..20: mol_type = other DNA
tcatagcagtacacttttca

SEQ ID NO: 132413 - DNA, 20 bp, synthetic construct
  source 1..20: mol_type = other DNA
ctcatagcagtacacttttc

SEQ ID NO: 132414 - DNA, 20 bp, synthetic construct
  source 1..20: mol_type = other DNA
tctcatagcagtacactttt

SEQ ID NO: 132415 - DNA, 20 bp, synthetic construct
  source 1..20: mol_type = other DNA
ttctcatagcagtacacttt

SEQ ID NO: 132416 - DNA, 20 bp, synthetic construct
  source 1..20: mol_type = other DNA
attctcatagcagtacactt

SEQ ID NO: 132417 - DNA, 20 bp, synthetic construct
  source 1..20: mol_type = other DNA
cattctcatagcagtacact

SEQ ID NO: 132418 - DNA, 20 bp, synthetic construct
  source 1..20: mol_type = other DNA
tcattctcatagcagtacac

SEQ ID NO: 132419 - DNA, 20 bp, synthetic construct
  source 1..20: mol_type = other DNA
ctcattctcatagcagtaca

SEQ ID NO: 132420 - DNA, 20 bp, synthetic construct
  source 1..20: mol_type = other DNA
tctcattctcatagcagtac

SEQ ID NO: 132421 - DNA, 20 bp, synthetic construct
  source 1..20: mol_type = other DNA
atctcattctcatagcagta

SEQ ID NO: 132422 - DNA, 20 bp, synthetic construct
  source 1..20: mol_type = other DNA
aatctcattctcatagcagt

SEQ ID NO: 132423 - DNA, 20 bp, synthetic construct
  source 1..20: mol_type = other DNA
taatctcattctcatagcag

SEQ ID NO: 132424 - DNA, 20 bp, synthetic construct
  source 1..20: mol_type = other DNA
ataatctcattctcatagca

SEQ ID NO: 132425 - DNA, 20 bp, synthetic construct
  source 1..20: mol_type = other DNA
cataatctcattctcatagc

SEQ ID NO: 132426 - DNA, 20 bp, synthetic construct
  source 1..20: mol_type = other DNA
ccataatctcattctcatag

SEQ ID NO: 132427 - DNA, 20 bp, synthetic construct
  source 1..20: mol_type = other DNA
accataatctcattctcata

SEQ ID NO: 132428 - DNA, 20 bp, synthetic construct
  source 1..20: mol_type = other DNA
aaccataatctcattctcat

SEQ ID NO: 132429 - DNA, 20 bp, synthetic construct
  source 1..20: mol_type = other DNA
taaccataatctcattctca

SEQ ID NO: 132430 - DNA, 20 bp, synthetic construct
  source 1..20: mol_type = other DNA
gtaaccataatctcattctc

SEQ ID NO: 132431 - DNA, 20 bp, synthetic construct
  source 1..20: mol_type = other DNA
tgtaaccataatctcattct

SEQ ID NO: 132432 - DNA, 20 bp, synthetic construct
  source 1..20: mol_type = other DNA
atgtaaccataatctcattc

SEQ ID NO: 132433 - DNA, 20 bp, synthetic construct
  source 1..20: mol_type = other DNA
catgtaaccataatctcatt

SEQ ID NO: 132434 - DNA, 20 bp, synthetic construct
  source 1..20: mol_type = other DNA
acatgtaaccataatctcat

SEQ ID NO: 132435 - DNA, 20 bp, synthetic construct
  source 1..20: mol_type = other DNA
tacatgtaaccataatctca

SEQ ID NO: 132436 - DNA, 20 bp, synthetic construct
  source 1..20: mol_type = other DNA
ttacatgtaaccataatctc

SEQ ID NO: 132437 - DNA, 20 bp, synthetic construct
  source 1..20: mol_type = other DNA
gttacatgtaaccataatct

SEQ ID NO: 132438 - DNA, 20 bp, synthetic construct
  source 1..20: mol_type = other DNA
agttacatgtaaccataatc

SEQ ID NO: 132439 - DNA, 20 bp, synthetic construct
  source 1..20: mol_type = other DNA
tagttacatgtaaccataat

SEQ ID NO: 132440 - DNA, 20 bp, synthetic construct
  source 1..20: mol_type = other DNA
gtagttacatgtaaccataa

SEQ ID NO: 132441 - DNA, 20 bp, synthetic construct
  source 1..20: mol_type = other DNA
tgtagttacatgtaaccata

SEQ ID NO: 132442 - DNA, 20 bp, synthetic construct
  source 1..20: mol_type = other DNA
atgtagttacatgtaaccat

SEQ ID NO: 132443 - DNA, 20 bp, synthetic construct
  source 1..20: mol_type = other DNA
catgtagttacatgtaacca

SEQ ID NO: 132444 - DNA, 20 bp, synthetic construct
  source 1..20: mol_type = other DNA
ccatgtagttacatgtaacc

SEQ ID NO: 132445 - DNA, 20 bp, synthetic construct
  source 1..20: mol_type = other DNA
cccatgtagttacatgtaac

SEQ ID NO: 132446 - DNA, 20 bp, synthetic construct
  source 1..20: mol_type = other DNA
gcccatgtagttacatgtaa

SEQ ID NO: 132447 - DNA, 20 bp, synthetic construct
  source 1..20: mol_type = other DNA
tgcccatgtagttacatgta

SEQ ID NO: 132448 - DNA, 20 bp, synthetic construct
  source 1..20: mol_type = other DNA
atgcccatgtagttacatgt

SEQ ID NO: 132449 - DNA, 20 bp, synthetic construct
  source 1..20: mol_type = other DNA
aatgcccatgtagttacatg

SEQ ID NO: 132450 - DNA, 20 bp, synthetic construct
  source 1..20: mol_type = other DNA
aaatgcccatgtagttacat

SEQ ID NO: 132451 - DNA, 20 bp, synthetic construct
  source 1..20: mol_type = other DNA
gaaatgcccatgtagttaca

SEQ ID NO: 132452 - DNA, 20 bp, synthetic construct
  source 1..20: mol_type = other DNA
tgaaatgcccatgtagttac

SEQ ID NO: 132453 - DNA, 20 bp, synthetic construct
  source 1..20: mol_type = other DNA
atgaaatgcccatgtagtta

SEQ ID NO: 132454 - DNA, 20 bp, synthetic construct
  source 1..20: mol_type = other DNA
aatgaaatgcccatgtagtt

SEQ ID NO: 132455 - DNA, 20 bp, synthetic construct
  source 1..20: mol_type = other DNA
aaatgaaatgcccatgtagt

SEQ ID NO: 132456 - DNA, 20 bp, synthetic construct
  source 1..20: mol_type = other DNA
aaaatgaaatgcccatgtag

SEQ ID NO: 132457 - DNA, 20 bp, synthetic construct
  source 1..20: mol_type = other DNA
aaaaatgaaatgcccatgta

SEQ ID NO: 132458 - DNA, 20 bp, synthetic construct
  source 1..20: mol_type = other DNA
taaaaatgaaatgcccatgt

SEQ ID NO: 132459 - DNA, 20 bp, synthetic construct
  source 1..20: mol_type = other DNA
ttaaaaatgaaatgcccatg

SEQ ID NO: 132460 - DNA, 20 bp, synthetic construct
  source 1..20: mol_type = other DNA
tttaaaaatgaaatgcccat

SEQ ID NO: 132461 - DNA, 20 bp, synthetic construct
  source 1..20: mol_type = other DNA
ctttaaaaatgaaatgccca

SEQ ID NO: 132462 - DNA, 20 bp, synthetic construct
  source 1..20: mol_type = other DNA
gctttaaaaatgaaatgccc

SEQ ID NO: 132463 - DNA, 20 bp, synthetic construct
  source 1..20: mol_type = other DNA
ggctttaaaaatgaaatgcc

SEQ ID NO: 132464 - DNA, 20 bp, synthetic construct
  source 1..20: mol_type = other DNA
aggctttaaaaatgaaatgc

SEQ ID NO: 132465 - DNA, 20 bp, synthetic construct
  source 1..20: mol_type = other DNA
gaggctttaaaaatgaaatg

SEQ ID NO: 132466 - DNA, 20 bp, synthetic construct
  source 1..20: mol_type = other DNA
agaggctttaaaaatgaaat

SEQ ID NO: 132467 - DNA, 20 bp, synthetic construct
  source 1..20: mol_type = other DNA
aagaggctttaaaaatgaaa

SEQ ID NO: 132468 - DNA, 20 bp, synthetic construct
  source 1..20: mol_type = other DNA
aaagaggctttaaaaatgaa

SEQ ID NO: 132469 - DNA, 20 bp, synthetic construct
  source 1..20: mol_type = other DNA
caaagaggctttaaaaatga

SEQ ID NO: 132470 - DNA, 20 bp, synthetic construct
  source 1..20: mol_type = other DNA
tcaaagaggctttaaaaatg

SEQ ID NO: 132471 - DNA, 20 bp, synthetic construct
  source 1..20: mol_type = other DNA
ttcaaagaggctttaaaaat

SEQ ID NO: 132472 - DNA, 20 bp, synthetic construct
  source 1..20: mol_type = other DNA
gttcaaagaggctttaaaaa

SEQ ID NO: 132473 - DNA, 20 bp, synthetic construct
  source 1..20: mol_type = other DNA
agttcaaagaggctttaaaa

SEQ ID NO: 132474 - DNA, 20 bp, synthetic construct
  source 1..20: mol_type = other DNA
aagttcaaagaggctttaaa

SEQ ID NO: 132475 - DNA, 20 bp, synthetic construct
  source 1..20: mol_type = other DNA
aaagttcaaagaggctttaa

SEQ ID NO: 132476 - DNA, 20 bp, synthetic construct
  source 1..20: mol_type = other DNA
aaaagttcaaagaggcttta

SEQ ID NO: 132477 - DNA, 20 bp, synthetic construct
  source 1..20: mol_type = other DNA
aaaaagttcaaagaggcttt

SEQ ID NO: 132478 - DNA, 20 bp, synthetic construct
  source 1..20: mol_type = other DNA
caaaaagttcaaagaggctt

SEQ ID NO: 132479 - DNA, 20 bp, synthetic construct
  source 1..20: mol_type = other DNA
tcaaaaagttcaaagaggct

SEQ ID NO: 132480 - DNA, 20 bp, synthetic construct
  source 1..20: mol_type = other DNA
ttcaaaaagttcaaagaggc

SEQ ID NO: 132481 - DNA, 20 bp, synthetic construct
  source 1..20: mol_type = other DNA
tttcaaaaagttcaaagagg

SEQ ID NO: 132482 - DNA, 20 bp, synthetic construct
  source 1..20: mol_type = other DNA
atttcaaaaagttcaaagag

SEQ ID NO: 132483 - DNA, 20 bp, synthetic construct
  source 1..20: mol_type = other DNA
tatttcaaaaagttcaaaga

SEQ ID NO: 132484 - DNA, 20 bp, synthetic construct
  source 1..20: mol_type = other DNA
gtatttcaaaaagttcaaag

SEQ ID NO: 132485 - DNA, 20 bp, synthetic construct
  source 1..20: mol_type = other DNA
agtatttcaaaaagttcaaa

SEQ ID NO: 132486 - DNA, 20 bp, synthetic construct
  source 1..20: mol_type = other DNA
tagtatttcaaaaagttcaa

SEQ ID NO: 132487 - DNA, 20 bp, synthetic construct
  source 1..20: mol_type = other DNA
ttagtatttcaaaaagttca

SEQ ID NO: 132488 - DNA, 20 bp, synthetic construct
  source 1..20: mol_type = other DNA
cttagtatttcaaaaagttc

SEQ ID NO: 132489 - DNA, 20 bp, synthetic construct
  source 1..20: mol_type = other DNA
tcttagtatttcaaaaagtt

SEQ ID NO: 132490 - DNA, 20 bp, synthetic construct
  source 1..20: mol_type = other DNA
ttcttagtatttcaaaaagt

SEQ ID NO: 132491 - DNA, 20 bp, synthetic construct
  source 1..20: mol_type = other DNA
attcttagtatttcaaaaag

SEQ ID NO: 132492 - DNA, 20 bp, synthetic construct
  source 1..20: mol_type = other DNA
tattcttagtatttcaaaaa

SEQ ID NO: 132493 - DNA, 20 bp, synthetic construct
  source 1..20: mol_type = other DNA
atattcttagtatttcaaaa

SEQ ID NO: 132494 - DNA, 20 bp, synthetic construct
  source 1..20: mol_type = other DNA
tatattcttagtatttcaaa

SEQ ID NO: 132495 - DNA, 20 bp, synthetic construct
  source 1..20: mol_type = other DNA
ttatattcttagtatttcaa

SEQ ID NO: 132496 - DNA, 20 bp, synthetic construct
  source 1..20: mol_type = other DNA
tttatattcttagtatttca

SEQ ID NO: 132497 - DNA, 20 bp, synthetic construct
  source 1..20: mol_type = other DNA
ttttatattcttagtatttc

SEQ ID NO: 132498 - DNA, 20 bp, synthetic construct
  source 1..20: mol_type = other DNA
attttatattcttagtattt

SEQ ID NO: 132499 - DNA, 20 bp, synthetic construct
  source 1..20: mol_type = other DNA
aattttatattcttagtatt

SEQ ID NO: 132500 - DNA, 20 bp, synthetic construct
  source 1..20: mol_type = other DNA
aaattttatattcttagtat

SEQ ID NO: 132501 - DNA, 20 bp, synthetic construct
  source 1..20: mol_type = other DNA
aaaattttatattcttagta

SEQ ID NO: 132502 - DNA, 20 bp, synthetic construct
  source 1..20: mol_type = other DNA
aaaaattttatattcttagt

SEQ ID NO: 132503 - DNA, 20 bp, synthetic construct
  source 1..20: mol_type = other DNA
taaaaattttatattcttag

SEQ ID NO: 132504 - DNA, 20 bp, synthetic construct
  source 1..20: mol_type = other DNA
ataaaaattttatattctta

SEQ ID NO: 132505 - DNA, 20 bp, synthetic construct
  source 1..20: mol_type = other DNA
aataaaaattttatattctt

SEQ ID NO: 132506 - DNA, 20 bp, synthetic construct
  source 1..20: mol_type = other DNA
aaataaaaattttatattct

SEQ ID NO: 132507 - DNA, 20 bp, synthetic construct
  source 1..20: mol_type = other DNA
aaaataaaaattttatattc

SEQ ID NO: 132508 - DNA, 20 bp, synthetic construct
  source 1..20: mol_type = other DNA
aaaaataaaaattttatatt

SEQ ID NO: 132509 - DNA, 20 bp, synthetic construct
  source 1..20: mol_type = other DNA
aaaaaataaaaattttatat

SEQ ID NO: 132510 - DNA, 20 bp, synthetic construct
  source 1..20: mol_type = other DNA
taaaaaataaaaattttata

SEQ ID NO: 132511 - DNA, 20 bp, synthetic construct
  source 1..20: mol_type = other DNA
ttaaaaaataaaaattttat

SEQ ID NO: 132512 - DNA, 20 bp, synthetic construct
  source 1..20: mol_type = other DNA
cttaaaaaataaaaatttta

SEQ ID NO: 132513 - DNA, 20 bp, synthetic construct
  source 1..20: mol_type = other DNA
acttaaaaaataaaaatttt

SEQ ID NO: 132514 - DNA, 20 bp, synthetic construct
  source 1..20: mol_type = other DNA
aacttaaaaaataaaaattt

SEQ ID NO: 132515 - DNA, 20 bp, synthetic construct
  source 1..20: mol_type = other DNA
aaacttaaaaaataaaaatt

SEQ ID NO: 132516 - DNA, 20 bp, synthetic construct
  source 1..20: mol_type = other DNA
taaacttaaaaaataaaaat

SEQ ID NO: 132517 - DNA, 20 bp, synthetic construct
  source 1..20: mol_type = other DNA
ctaaacttaaaaaataaaaa

SEQ ID NO: 132518 - DNA, 20 bp, synthetic construct
  source 1..20: mol_type = other DNA
tctaaacttaaaaaataaaa

SEQ ID NO: 132519 - DNA, 20 bp, synthetic construct
  source 1..20: mol_type = other DNA
atctaaacttaaaaaataaa

SEQ ID NO: 132520 - DNA, 20 bp, synthetic construct
  source 1..20: mol_type = other DNA
catctaaacttaaaaaataa

SEQ ID NO: 132521 - DNA, 20 bp, synthetic construct
  source 1..20: mol_type = other DNA
acatctaaacttaaaaaata

SEQ ID NO: 132522 - DNA, 20 bp, synthetic construct
  source 1..20: mol_type = other DNA
gacatctaaacttaaaaaat

SEQ ID NO: 132523 - DNA, 20 bp, synthetic construct
  source 1..20: mol_type = other DNA
ggacatctaaacttaaaaaa

SEQ ID NO: 132524 - DNA, 20 bp, synthetic construct
  source 1..20: mol_type = other DNA
aggacatctaaacttaaaaa

SEQ ID NO: 132525 - DNA, 20 bp, synthetic construct
  source 1..20: mol_type = other DNA
caggacatctaaacttaaaa

SEQ ID NO: 132526 - DNA, 20 bp, synthetic construct
  source 1..20: mol_type = other DNA
tcaggacatctaaacttaaa

SEQ ID NO: 132527 - DNA, 20 bp, synthetic construct
  source 1..20: mol_type = other DNA
ttcaggacatctaaacttaa

SEQ ID NO: 132528 - DNA, 20 bp, synthetic construct
  source 1..20: mol_type = other DNA
gttcaggacatctaaactta

SEQ ID NO: 132529 - DNA, 20 bp, synthetic construct
  source 1..20: mol_type = other DNA
cgttcaggacatctaaactt

SEQ ID NO: 132530 - DNA, 20 bp, synthetic construct
  source 1..20: mol_type = other DNA
tcgttcaggacatctaaact

SEQ ID NO: 132531 - DNA, 20 bp, synthetic construct
  source 1..20: mol_type = other DNA
ctcgttcaggacatctaaac

SEQ ID NO: 132532 - DNA, 20 bp, synthetic construct
  source 1..20: mol_type = other DNA
actcgttcaggacatctaaa

SEQ ID NO: 132533 - DNA, 20 bp, synthetic construct
  source 1..20: mol_type = other DNA
tactcgttcaggacatctaa

SEQ ID NO: 132534 - DNA, 20 bp, synthetic construct
  source 1..20: mol_type = other DNA
atactcgttcaggacatcta

SEQ ID NO: 132535 - DNA, 20 bp, synthetic construct
  source 1..20: mol_type = other DNA
catactcgttcaggacatct

SEQ ID NO: 132536 - DNA, 20 bp, synthetic construct
  source 1..20: mol_type = other DNA
acatactcgttcaggacatc

SEQ ID NO: 132537 - DNA, 20 bp, synthetic construct
  source 1..20: mol_type = other DNA
aacatactcgttcaggacat

SEQ ID NO: 132538 - DNA, 20 bp, synthetic construct
  source 1..20: mol_type = other DNA
aaacatactcgttcaggaca

SEQ ID NO: 132539 - DNA, 20 bp, synthetic construct
  source 1..20: mol_type = other DNA
taaacatactcgttcaggac

SEQ ID NO: 132540 - DNA, 20 bp, synthetic construct
  source 1..20: mol_type = other DNA
ctaaacatactcgttcagga

SEQ ID NO: 132541 - DNA, 20 bp, synthetic construct
  source 1..20: mol_type = other DNA
cctaaacatactcgttcagg

SEQ ID NO: 132542 - DNA, 20 bp, synthetic construct
  source 1..20: mol_type = other DNA
gcctaaacatactcgttcag

SEQ ID NO: 132543 - DNA, 20 bp, synthetic construct
  source 1..20: mol_type = other DNA
tgcctaaacatactcgttca

SEQ ID NO: 132544 - DNA, 20 bp, synthetic construct
  source 1..20: mol_type = other DNA
ttgcctaaacatactcgttc

SEQ ID NO: 132545 - DNA, 20 bp, synthetic construct
  source 1..20: mol_type = other DNA
tttgcctaaacatactcgtt

SEQ ID NO: 132546 - DNA, 20 bp, synthetic construct
  source 1..20: mol_type = other DNA
ttttgcctaaacatactcgt

SEQ ID NO: 132547 - DNA, 20 bp, synthetic construct
  source 1..20: mol_type = other DNA
attttgcctaaacatactcg

SEQ ID NO: 132548 - DNA, 20 bp, synthetic construct
  source 1..20: mol_type = other DNA
aattttgcctaaacatactc

SEQ ID NO: 132549 - DNA, 20 bp, synthetic construct
  source 1..20: mol_type = other DNA
caattttgcctaaacatact

SEQ ID NO: 132550 - DNA, 20 bp, synthetic construct
  source 1..20: mol_type = other DNA
tcaattttgcctaaacatac

SEQ ID NO: 132551 - DNA, 20 bp, synthetic construct
  source 1..20: mol_type = other DNA
ctcaattttgcctaaacata

SEQ ID NO: 132552 - DNA, 20 bp, synthetic construct
  source 1..20: mol_type = other DNA
actcaattttgcctaaacat

SEQ ID NO: 132553 - DNA, 20 bp, synthetic construct
  source 1..20: mol_type = other DNA
aactcaattttgcctaaaca

SEQ ID NO: 132554 - DNA, 20 bp, synthetic construct
  source 1..20: mol_type = other DNA
taactcaattttgcctaaac

SEQ ID NO: 132555 - DNA, 20 bp, synthetic construct
  source 1..20: mol_type = other DNA
ataactcaattttgcctaaa

SEQ ID NO: 132556 - DNA, 20 bp, synthetic construct
  source 1..20: mol_type = other DNA
aataactcaattttgcctaa

SEQ ID NO: 132557 - DNA, 20 bp, synthetic construct
  source 1..20: mol_type = other DNA
aaataactcaattttgccta

SEQ ID NO: 132558 - DNA, 20 bp, synthetic construct
  source 1..20: mol_type = other DNA
taaataactcaattttgcct

SEQ ID NO: 132559 - DNA, 20 bp, synthetic construct
  source 1..20: mol_type = other DNA
ttaaataactcaattttgcc

SEQ ID NO: 132560 - DNA, 20 bp, synthetic construct
  source 1..20: mol_type = other DNA
cttaaataactcaattttgc

SEQ ID NO: 132561 - DNA, 20 bp, synthetic construct
  source 1..20: mol_type = other DNA
tcttaaataactcaattttg

SEQ ID NO: 132562 - DNA, 20 bp, synthetic construct
  source 1..20: mol_type = other DNA
ttcttaaataactcaatttt

SEQ ID NO: 132563 - DNA, 20 bp, synthetic construct
  source 1..20: mol_type = other DNA
attcttaaataactcaattt

SEQ ID NO: 132564 - DNA, 20 bp, synthetic construct
  source 1..20: mol_type = other DNA
aattcttaaataactcaatt

SEQ ID NO: 132565 - DNA, 20 bp, synthetic construct
  source 1..20: mol_type = other DNA
aaattcttaaataactcaat

SEQ ID NO: 132566 - DNA, 20 bp, synthetic construct
  source 1..20: mol_type = other DNA
taaattcttaaataactcaa

SEQ ID NO: 132567 - DNA, 20 bp, synthetic construct
  source 1..20: mol_type = other DNA
ataaattcttaaataactca

SEQ ID NO: 132568 - DNA, 20 bp, synthetic construct
  source 1..20: mol_type = other DNA
tataaattcttaaataactc

SEQ ID NO: 132569 - DNA, 20 bp, synthetic construct
  source 1..20: mol_type = other DNA
ctataaattcttaaataact

SEQ ID NO: 132570 - DNA, 20 bp, synthetic construct
  source 1..20: mol_type = other DNA
cctataaattcttaaataac

SEQ ID NO: 132571 - DNA, 20 bp, synthetic construct
  source 1..20: mol_type = other DNA
gcctataaattcttaaataa

SEQ ID NO: 132572 - DNA, 20 bp, synthetic construct
  source 1..20: mol_type = other DNA
agcctataaattcttaaata

SEQ ID NO: 132573 - DNA, 20 bp, synthetic construct
  source 1..20: mol_type = other DNA
cagcctataaattcttaaat

SEQ ID NO: 132574 - DNA, 20 bp, synthetic construct
  source 1..20: mol_type = other DNA
ccagcctataaattcttaaa

SEQ ID NO: 132575 - DNA, 20 bp, synthetic construct
  source 1..20: mol_type = other DNA
cccagcctataaattcttaa

SEQ ID NO: 132576 - DNA, 20 bp, synthetic construct
  source 1..20: mol_type = other DNA
gcccagcctataaattctta

SEQ ID NO: 132577 - DNA, 20 bp, synthetic construct
  source 1..20: mol_type = other DNA
cgcccagcctataaattctt

SEQ ID NO: 132578 - DNA, 20 bp, synthetic construct
  source 1..20: mol_type = other DNA
gcgcccagcctataaattct

SEQ ID NO: 132579 - DNA, 20 bp, synthetic construct
  source 1..20: mol_type = other DNA
tgcgcccagcctataaattc

SEQ ID NO: 132580 - DNA, 20 bp, synthetic construct
  source 1..20: mol_type = other DNA
ctgcgcccagcctataaatt

SEQ ID NO: 132581 - DNA, 20 bp, synthetic construct
  source 1..20: mol_type = other DNA
actgcgcccagcctataaat

SEQ ID NO: 132582 - DNA, 20 bp, synthetic construct
  source 1..20: mol_type = other DNA
cactgcgcccagcctataaa

SEQ ID NO: 132583 - DNA, 20 bp, synthetic construct
  source 1..20: mol_type = other DNA
ccactgcgcccagcctataa

SEQ ID NO: 132584 - DNA, 20 bp, synthetic construct
  source 1..20: mol_type = other DNA
gccactgcgcccagcctata

SEQ ID NO: 132585 - DNA, 20 bp, synthetic construct
  source 1..20: mol_type = other DNA
agccactgcgcccagcctat

SEQ ID NO: 132586 - DNA, 20 bp, synthetic construct
  source 1..20: mol_type = other DNA
gagccactgcgcccagccta

SEQ ID NO: 132587 - DNA, 20 bp, synthetic construct
  source 1..20: mol_type = other DNA
tgagccactgcgcccagcct

SEQ ID NO: 132588 - DNA, 20 bp, synthetic construct
  source 1..20: mol_type = other DNA
gtgagccactgcgcccagcc

SEQ ID NO: 132589 - DNA, 20 bp, synthetic construct
  source 1..20: mol_type = other DNA
cgtgagccactgcgcccagc

SEQ ID NO: 132590 - DNA, 20 bp, synthetic construct
  source 1..20: mol_type = other DNA
gcgtgagccactgcgcccag

SEQ ID NO: 132591 - DNA, 20 bp, synthetic construct
  source 1..20: mol_type = other DNA
ggcgtgagccactgcgccca

SEQ ID NO: 132592 - DNA, 20 bp, synthetic construct
  source 1..20: mol_type = other DNA
aggcgtgagccactgcgccc

SEQ ID NO: 132593 - DNA, 20 bp, synthetic construct
  source 1..20: mol_type = other DNA
caggcgtgagccactgcgcc

SEQ ID NO: 132594 - DNA, 20 bp, synthetic construct
  source 1..20: mol_type = other DNA
acaggcgtgagccactgcgc

SEQ ID NO: 132595 - DNA, 20 bp, synthetic construct
  source 1..20: mol_type = other DNA
tacaggcgtgagccactgcg

SEQ ID NO: 132596 - DNA, 20 bp, synthetic construct
  source 1..20: mol_type = other DNA
ttacaggcgtgagccactgc

SEQ ID NO: 132597 - DNA, 20 bp, synthetic construct
  source 1..20: mol_type = other DNA
attacaggcgtgagccactg

SEQ ID NO: 132598 - DNA, 20 bp, synthetic construct
  source 1..20: mol_type = other DNA
gattacaggcgtgagccact

SEQ ID NO: 132599 - DNA, 20 bp, synthetic construct
  source 1..20: mol_type = other DNA
ggattacaggcgtgagccac

SEQ ID NO: 132600 - DNA, 20 bp, synthetic construct
  source 1..20: mol_type = other DNA
gggattacaggcgtgagcca

SEQ ID NO: 132601 - DNA, 20 bp, synthetic construct
  source 1..20: mol_type = other DNA
tgggattacaggcgtgagcc

SEQ ID NO: 132602 - DNA, 20 bp, synthetic construct
  source 1..20: mol_type = other DNA
ctgggattacaggcgtgagc

SEQ ID NO: 132603 - DNA, 20 bp, synthetic construct
  source 1..20: mol_type = other DNA
gctgggattacaggcgtgag

SEQ ID NO: 132604 - DNA, 20 bp, synthetic construct
  source 1..20: mol_type = other DNA
tgctgggattacaggcgtga

SEQ ID NO: 132605 - DNA, 20 bp, synthetic construct
  source 1..20: mol_type = other DNA
gtgctgggattacaggcgtg

SEQ ID NO: 132606 - DNA, 20 bp, synthetic construct
  source 1..20: mol_type = other DNA
agtgctgggattacaggcgt

SEQ ID NO: 132607 - DNA, 20 bp, synthetic construct
  source 1..20: mol_type = other DNA
aagtgctgggattacaggcg

SEQ ID NO: 132608 - DNA, 20 bp, synthetic construct
  source 1..20: mol_type = other DNA
aaagtgctgggattacaggc

SEQ ID NO: 132609 - DNA, 20 bp, synthetic construct
  source 1..20: mol_type = other DNA
caaagtgctgggattacagg

SEQ ID NO: 132610 - DNA, 20 bp, synthetic construct
  source 1..20: mol_type = other DNA
ccaaagtgctgggattacag

SEQ ID NO: 132611 - DNA, 20 bp, synthetic construct
  source 1..20: mol_type = other DNA
cccaaagtgctgggattaca

SEQ ID NO: 132612 - DNA, 20 bp, synthetic construct
  source 1..20: mol_type = other DNA
tcccaaagtgctgggattac

SEQ ID NO: 132613 - DNA, 20 bp, synthetic construct
  source 1..20: mol_type = other DNA
ctcccaaagtgctgggatta

SEQ ID NO: 132614 - DNA, 20 bp, synthetic construct
  source 1..20: mol_type = other DNA
cctcccaaagtgctgggatt

SEQ ID NO: 132615 - DNA, 20 bp, synthetic construct
  source 1..20: mol_type = other DNA
gcctcccaaagtgctgggat

SEQ ID NO: 132616 - DNA, 20 bp, synthetic construct
  source 1..20: mol_type = other DNA
ggcctcccaaagtgctggga

SEQ ID NO: 132617 - DNA, 20 bp, synthetic construct
  source 1..20: mol_type = other DNA
tggcctcccaaagtgctggg

SEQ ID NO: 132618 - DNA, 20 bp, synthetic construct
  source 1..20: mol_type = other DNA
ttggcctcccaaagtgctgg

SEQ ID NO: 132619 - DNA, 20 bp, synthetic construct
  source 1..20: mol_type = other DNA
cttggcctcccaaagtgctg

SEQ ID NO: 132620 - DNA, 20 bp, synthetic construct
  source 1..20: mol_type = other DNA
ccttggcctcccaaagtgct

SEQ ID NO: 132621 - DNA, 20 bp, synthetic construct
  source 1..20: mol_type = other DNA
gccttggcctcccaaagtgc

SEQ ID NO: 132622 - DNA, 20 bp, synthetic construct
  source 1..20: mol_type = other DNA
agccttggcctcccaaagtg

SEQ ID NO: 132623 - DNA, 20 bp, synthetic construct
  source 1..20: mol_type = other DNA
cagccttggcctcccaaagt

SEQ ID NO: 132624 - DNA, 20 bp, synthetic construct
  source 1..20: mol_type = other DNA
ccagccttggcctcccaaag

SEQ ID NO: 132625 - DNA, 20 bp, synthetic construct
  source 1..20: mol_type = other DNA
gccagccttggcctcccaaa

SEQ ID NO: 132626 - DNA, 20 bp, synthetic construct
  source 1..20: mol_type = other DNA
cgccagccttggcctcccaa

SEQ ID NO: 132627 - DNA, 20 bp, synthetic construct
  source 1..20: mol_type = other DNA
ccgccagccttggcctccca

SEQ ID NO: 132628 - DNA, 20 bp, synthetic construct
  source 1..20: mol_type = other DNA
tccgccagccttggcctccc

SEQ ID NO: 132629 - DNA, 20 bp, synthetic construct
  source 1..20: mol_type = other DNA
atccgccagccttggcctcc

SEQ ID NO: 132630 - DNA, 20 bp, synthetic construct
  source 1..20: mol_type = other DNA
gatccgccagccttggcctc

SEQ ID NO: 132631 - DNA, 20 bp, synthetic construct
  source 1..20: mol_type = other DNA
tgatccgccagccttggcct

SEQ ID NO: 132632 - DNA, 20 bp, synthetic construct
  source 1..20: mol_type = other DNA
atgatccgccagccttggcc

SEQ ID NO: 132633 - DNA, 20 bp, synthetic construct
  source 1..20: mol_type = other DNA
catgatccgccagccttggc

SEQ ID NO: 132634 - DNA, 20 bp, synthetic construct
  source 1..20: mol_type = other DNA
tcatgatccgccagccttgg

SEQ ID NO: 132635 - DNA, 20 bp, synthetic construct
  source 1..20: mol_type = other DNA
ctcatgatccgccagccttg

SEQ ID NO: 132636 - DNA, 20 bp, synthetic construct
  source 1..20: mol_type = other DNA
cctcatgatccgccagcctt

SEQ ID NO: 132637 - DNA, 20 bp, synthetic construct
  source 1..20: mol_type = other DNA
acctcatgatccgccagcct

SEQ ID NO: 132638 - DNA, 20 bp, synthetic construct
  source 1..20: mol_type = other DNA
gacctcatgatccgccagcc

SEQ ID NO: 132639 - DNA, 20 bp, synthetic construct
  source 1..20: mol_type = other DNA
tgacctcatgatccgccagc

SEQ ID NO: 132640 - DNA, 20 bp, synthetic construct
  source 1..20: mol_type = other DNA
ctgacctcatgatccgccag

SEQ ID NO: 132641 - DNA, 20 bp, synthetic construct
  source 1..20: mol_type = other DNA
cctgacctcatgatccgcca

SEQ ID NO: 132642 - DNA, 20 bp, synthetic construct
  source 1..20: mol_type = other DNA
tcctgacctcatgatccgcc

SEQ ID NO: 132643 - DNA, 20 bp, synthetic construct
  source 1..20: mol_type = other DNA
ctcctgacctcatgatccgc

SEQ ID NO: 132644 - DNA, 20 bp, synthetic construct
  source 1..20: mol_type = other DNA
tctcctgacctcatgatccg

SEQ ID NO: 132645 - DNA, 20 bp, synthetic construct
  source 1..20: mol_type = other DNA
atctcctgacctcatgatcc

SEQ ID NO: 132646 - DNA, 20 bp, synthetic construct
  source 1..20: mol_type = other DNA
gatctcctgacctcatgatc

SEQ ID NO: 132647 - DNA, 20 bp, synthetic construct
  source 1..20: mol_type = other DNA
cgatctcctgacctcatgat

SEQ ID NO: 132648 - DNA, 20 bp, synthetic construct
  source 1..20: mol_type = other DNA
tcgatctcctgacctcatga

SEQ ID NO: 132649 - DNA, 20 bp, synthetic construct
  source 1..20: mol_type = other DNA
ctcgatctcctgacctcatg

SEQ ID NO: 132650 - DNA, 20 bp, synthetic construct
  source 1..20: mol_type = other DNA
tctcgatctcctgacctcat

SEQ ID NO: 132651 - DNA, 20 bp, synthetic construct
  source 1..20: mol_type = other DNA
gtctcgatctcctgacctca

SEQ ID NO: 132652 - DNA, 20 bp, synthetic construct
  source 1..20: mol_type = other DNA
ggtctcgatctcctgacctc

SEQ ID NO: 132653 - DNA, 20 bp, synthetic construct
  source 1..20: mol_type = other DNA
tggtctcgatctcctgacct

SEQ ID NO: 132654 - DNA, 20 bp, synthetic construct
  source 1..20: mol_type = other DNA
ctggtctcgatctcctgacc

SEQ ID NO: 132655 - DNA, 20 bp, synthetic construct
  source 1..20: mol_type = other DNA
gctggtctcgatctcctgac

SEQ ID NO: 132656 - DNA, 20 bp, synthetic construct
  source 1..20: mol_type = other DNA
ggctggtctcgatctcctga

SEQ ID NO: 132657 - DNA, 20 bp, synthetic construct
  source 1..20: mol_type = other DNA
aggctggtctcgatctcctg

SEQ ID NO: 132658 - DNA, 20 bp, synthetic construct
  source 1..20: mol_type = other DNA
caggctggtctcgatctcct

SEQ ID NO: 132659 - DNA, 20 bp, synthetic construct
  source 1..20: mol_type = other DNA
ccaggctggtctcgatctcc

SEQ ID NO: 132660 - DNA, 20 bp, synthetic construct
  source 1..20: mol_type = other DNA
gccaggctggtctcgatctc

SEQ ID NO: 132661 - DNA, 20 bp, synthetic construct
  source 1..20: mol_type = other DNA
ggccaggctggtctcgatct

SEQ ID NO: 132662 - DNA, 20 bp, synthetic construct
  source 1..20: mol_type = other DNA
tggccaggctggtctcgatc

SEQ ID NO: 132663 - DNA, 20 bp, synthetic construct
  source 1..20: mol_type = other DNA
ttggccaggctggtctcgat

SEQ ID NO: 132664 - DNA, 20 bp, synthetic construct
  source 1..20: mol_type = other DNA
gttggccaggctggtctcga

SEQ ID NO: 132665 - DNA, 20 bp, synthetic construct
  source 1..20: mol_type = other DNA
tgttggccaggctggtctcg

SEQ ID NO: 132666 - DNA, 20 bp, synthetic construct
  source 1..20: mol_type = other DNA
atgttggccaggctggtctc

SEQ ID NO: 132667 - DNA, 20 bp, synthetic construct
  source 1..20: mol_type = other DNA
catgttggccaggctggtct

SEQ ID NO: 132668 - DNA, 20 bp, synthetic construct
  source 1..20: mol_type = other DNA
ccatgttggccaggctggtc

SEQ ID NO: 132669 - DNA, 20 bp, synthetic construct
  source 1..20: mol_type = other DNA
accatgttggccaggctggt

SEQ ID NO: 132670 - DNA, 20 bp, synthetic construct
  source 1..20: mol_type = other DNA
caccatgttggccaggctgg

SEQ ID NO: 132671 - DNA, 20 bp, synthetic construct
  source 1..20: mol_type = other DNA
tcaccatgttggccaggctg

SEQ ID NO: 132672 - DNA, 20 bp, synthetic construct
  source 1..20: mol_type = other DNA
ttcaccatgttggccaggct

SEQ ID NO: 132673 - DNA, 20 bp, synthetic construct
  source 1..20: mol_type = other DNA
tttcaccatgttggccaggc

SEQ ID NO: 132674 - DNA, 20 bp, synthetic construct
  source 1..20: mol_type = other DNA
gtttcaccatgttggccagg

SEQ ID NO: 132675 - DNA, 20 bp, synthetic construct
  source 1..20: mol_type = other DNA
ggtttcaccatgttggccag

SEQ ID NO: 132676 - DNA, 20 bp, synthetic construct
  source 1..20: mol_type = other DNA
gggtttcaccatgttggcca

SEQ ID NO: 132677 - DNA, 20 bp, synthetic construct
  source 1..20: mol_type = other DNA
ggggtttcaccatgttggcc

SEQ ID NO: 132678 - DNA, 20 bp, synthetic construct
  source 1..20: mol_type = other DNA
tggggtttcaccatgttggc

SEQ ID NO: 132679 - DNA, 20 bp, synthetic construct
  source 1..20: mol_type = other DNA
atggggtttcaccatgttgg

SEQ ID NO: 132680 - DNA, 20 bp, synthetic construct
  source 1..20: mol_type = other DNA
gatggggtttcaccatgttg

SEQ ID NO: 132681 - DNA, 20 bp, synthetic construct
  source 1..20: mol_type = other DNA
agatggggtttcaccatgtt

SEQ ID NO: 132682 - DNA, 20 bp, synthetic construct
  source 1..20: mol_type = other DNA
gagatggggtttcaccatgt

SEQ ID NO: 132683 - DNA, 20 bp, synthetic construct
  source 1..20: mol_type = other DNA
agagatggggtttcaccatg

SEQ ID NO: 132684 - DNA, 20 bp, synthetic construct
  source 1..20: mol_type = other DNA
tagagatggggtttcaccat

SEQ ID NO: 132685 - DNA, 20 bp, synthetic construct
  source 1..20: mol_type = other DNA
gtagagatggggtttcacca

SEQ ID NO: 132686 - DNA, 20 bp, synthetic construct
  source 1..20: mol_type = other DNA
agtagagatggggtttcacc

SEQ ID NO: 132687 - DNA, 20 bp, synthetic construct
  source 1..20: mol_type = other DNA
tagtagagatggggtttcac

SEQ ID NO: 132688 - DNA, 20 bp, synthetic construct
  source 1..20: mol_type = other DNA
ttagtagagatggggtttca

SEQ ID NO: 132689 - DNA, 20 bp, synthetic construct
  source 1..20: mol_type = other DNA
tttagtagagatggggtttc

SEQ ID NO: 132690 - DNA, 20 bp, synthetic construct
  source 1..20: mol_type = other DNA
ttttagtagagatggggttt

SEQ ID NO: 132691 - DNA, 20 bp, synthetic construct
  source 1..20: mol_type = other DNA
tttttagtagagatggggtt

SEQ ID NO: 132692 - DNA, 20 bp, synthetic construct
  source 1..20: mol_type = other DNA
atttttagtagagatggggt

SEQ ID NO: 132693 - DNA, 20 bp, synthetic construct
  source 1..20: mol_type = other DNA
gatttttagtagagatgggg

SEQ ID NO: 132694 - DNA, 20 bp, synthetic construct
  source 1..20: mol_type = other DNA
ggatttttagtagagatggg

SEQ ID NO: 132695 - DNA, 20 bp, synthetic construct
  source 1..20: mol_type = other DNA
tggatttttagtagagatgg

SEQ ID NO: 132696 - DNA, 20 bp, synthetic construct
  source 1..20: mol_type = other DNA
ttggatttttagtagagatg

SEQ ID NO: 132697 - DNA, 20 bp, synthetic construct
  source 1..20: mol_type = other DNA
tttggatttttagtagagat

SEQ ID NO: 132698 - DNA, 20 bp, synthetic construct
  source 1..20: mol_type = other DNA
ttttggatttttagtagaga

SEQ ID NO: 132699 - DNA, 20 bp, synthetic construct
  source 1..20: mol_type = other DNA
tttttggatttttagtagag

SEQ ID NO: 132700 - DNA, 20 bp, synthetic construct
  source 1..20: mol_type = other DNA
ttttttggatttttagtaga

SEQ ID NO: 132701 - DNA, 20 bp, synthetic construct
  source 1..20: mol_type = other DNA
attttttggatttttagtag

SEQ ID NO: 132702 - DNA, 20 bp, synthetic construct
  source 1..20: mol_type = other DNA
aattttttggatttttagta

SEQ ID NO: 132703 - DNA, 20 bp, synthetic construct
  source 1..20: mol_type = other DNA
caattttttggatttttagt

SEQ ID NO: 132704 - DNA, 20 bp, synthetic construct
  source 1..20: mol_type = other DNA
ccaattttttggatttttag

SEQ ID NO: 132705 - DNA, 20 bp, synthetic construct
  source 1..20: mol_type = other DNA
gccaattttttggattttta

SEQ ID NO: 132706 - DNA, 20 bp, synthetic construct
  source 1..20: mol_type = other DNA
ggccaattttttggattttt

SEQ ID NO: 132707 - DNA, 20 bp, synthetic construct
  source 1..20: mol_type = other DNA
cggccaattttttggatttt

SEQ ID NO: 132708 - DNA, 20 bp, synthetic construct
  source 1..20: mol_type = other DNA
ccggccaattttttggattt

SEQ ID NO: 132709 - DNA, 20 bp, synthetic construct
  source 1..20: mol_type = other DNA
cccggccaattttttggatt

SEQ ID NO: 132710 - DNA, 20 bp, synthetic construct
  source 1..20: mol_type = other DNA
acccggccaattttttggat

SEQ ID NO: 132711 - DNA, 20 bp, synthetic construct
  source 1..20: mol_type = other DNA
cacccggccaattttttgga

SEQ ID NO: 132712 - DNA, 20 bp, synthetic construct
  source 1..20: mol_type = other DNA
acacccggccaattttttgg

SEQ ID NO: 132713 - DNA, 20 bp, synthetic construct
  source 1..20: mol_type = other DNA
cacacccggccaattttttg

SEQ ID NO: 132714 - DNA, 20 bp, synthetic construct
  source 1..20: mol_type = other DNA
ccacacccggccaatttttt

SEQ ID NO: 132715 - DNA, 20 bp, synthetic construct
  source 1..20: mol_type = other DNA
accacacccggccaattttt

SEQ ID NO: 132716 - DNA, 20 bp, synthetic construct
  source 1..20: mol_type = other DNA
caccacacccggccaatttt

SEQ ID NO: 132717 - DNA, 20 bp, synthetic construct
  source 1..20: mol_type = other DNA
ccaccacacccggccaattt

SEQ ID NO: 132718 - DNA, 20 bp, synthetic construct
  source 1..20: mol_type = other DNA
gccaccacacccggccaatt

SEQ ID NO: 132719 - DNA, 20 bp, synthetic construct
  source 1..20: mol_type = other DNA
tgccaccacacccggccaat

SEQ ID NO: 132720 - DNA, 20 bp, synthetic construct
  source 1..20: mol_type = other DNA
atgccaccacacccggccaa

SEQ ID NO: 132721 - DNA, 20 bp, synthetic construct
  source 1..20: mol_type = other DNA
catgccaccacacccggcca

SEQ ID NO: 132722 - DNA, 20 bp, synthetic construct
  source 1..20: mol_type = other DNA
acatgccaccacacccggcc

SEQ ID NO: 132723 - DNA, 20 bp, synthetic construct
  source 1..20: mol_type = other DNA
cacatgccaccacacccggc

SEQ ID NO: 132724 - DNA, 20 bp, synthetic construct
  source 1..20: mol_type = other DNA
gcacatgccaccacacccgg

SEQ ID NO: 132725 - DNA, 20 bp, synthetic construct
  source 1..20: mol_type = other DNA
ggcacatgccaccacacccg

SEQ ID NO: 132726 - DNA, 20 bp, synthetic construct
  source 1..20: mol_type = other DNA
aggcacatgccaccacaccc

SEQ ID NO: 132727 - DNA, 20 bp, synthetic construct
  source 1..20: mol_type = other DNA
caggcacatgccaccacacc

SEQ ID NO: 132728 - DNA, 20 bp, synthetic construct
  source 1..20: mol_type = other DNA
acaggcacatgccaccacac

SEQ ID NO: 132729 - DNA, 20 bp, synthetic construct
  source 1..20: mol_type = other DNA
tacaggcacatgccaccaca

SEQ ID NO: 132730 - DNA, 20 bp, synthetic construct
  source 1..20: mol_type = other DNA
ctacaggcacatgccaccac

SEQ ID NO: 132731 - DNA, 20 bp, synthetic construct
  source 1..20: mol_type = other DNA
actacaggcacatgccacca

SEQ ID NO: 132732 - DNA, 20 bp, synthetic construct
  source 1..20: mol_type = other DNA
gactacaggcacatgccacc

SEQ ID NO: 132733 - DNA, 20 bp, synthetic construct
  source 1..20: mol_type = other DNA
ggactacaggcacatgccac

SEQ ID NO: 132734 - DNA, 20 bp, synthetic construct
  source 1..20: mol_type = other DNA
gggactacaggcacatgcca

SEQ ID NO: 132735 - DNA, 20 bp, synthetic construct
  source 1..20: mol_type = other DNA
cgggactacaggcacatgcc

SEQ ID NO: 132736 - DNA, 20 bp, synthetic construct
  source 1..20: mol_type = other DNA
ccgggactacaggcacatgc

SEQ ID NO: 132737 - DNA, 20 bp, synthetic construct
  source 1..20: mol_type = other DNA
gccgggactacaggcacatg

SEQ ID NO: 132738 - DNA, 20 bp, synthetic construct
  source 1..20: mol_type = other DNA
agccgggactacaggcacat

SEQ ID NO: 132739 - DNA, 20 bp, synthetic construct
  source 1..20: mol_type = other DNA
tagccgggactacaggcaca

SEQ ID NO: 132740 - DNA, 20 bp, synthetic construct
  source 1..20: mol_type = other DNA
gtagccgggactacaggcac

SEQ ID NO: 132741 - DNA, 20 bp, synthetic construct
  source 1..20: mol_type = other DNA
agtagccgggactacaggca

SEQ ID NO: 132742 - DNA, 20 bp, synthetic construct
  source 1..20: mol_type = other DNA
aagtagccgggactacaggc

SEQ ID NO: 132743 - DNA, 20 bp, synthetic construct
  source 1..20: mol_type = other DNA
gaagtagccgggactacagg

SEQ ID NO: 132744 - DNA, 20 bp, synthetic construct
  source 1..20: mol_type = other DNA
cgaagtagccgggactacag

SEQ ID NO: 132745 - DNA, 20 bp, synthetic construct
  source 1..20: mol_type = other DNA
ccgaagtagccgggactaca

SEQ ID NO: 132746 - DNA, 20 bp, synthetic construct
  source 1..20: mol_type = other DNA
tccgaagtagccgggactac

SEQ ID NO: 132747 - DNA, 20 bp, synthetic construct
  source 1..20: mol_type = other DNA
ctccgaagtagccgggacta

SEQ ID NO: 132748 - DNA, 20 bp, synthetic construct
  source 1..20: mol_type = other DNA
cctccgaagtagccgggact

SEQ ID NO: 132749 - DNA, 20 bp, synthetic construct
  source 1..20: mol_type = other DNA
gcctccgaagtagccgggac

SEQ ID NO: 132750 - DNA, 20 bp, synthetic construct
  source 1..20: mol_type = other DNA
agcctccgaagtagccggga

SEQ ID NO: 132751 - DNA, 20 bp, synthetic construct
  source 1..20: mol_type = other DNA
cagcctccgaagtagccggg

SEQ ID NO: 132752 - DNA, 20 bp, synthetic construct
  source 1..20: mol_type = other DNA
tcagcctccgaagtagccgg

SEQ ID NO: 132753 - DNA, 20 bp, synthetic construct
  source 1..20: mol_type = other DNA
ctcagcctccgaagtagccg

SEQ ID NO: 132754 - DNA, 20 bp, synthetic construct
  source 1..20: mol_type = other DNA
cctcagcctccgaagtagcc

SEQ ID NO: 132755 - DNA, 20 bp, synthetic construct
  source 1..20: mol_type = other DNA
gcctcagcctccgaagtagc

SEQ ID NO: 132756 - DNA, 20 bp, synthetic construct
  source 1..20: mol_type = other DNA
tgcctcagcctccgaagtag

SEQ ID NO: 132757 - DNA, 20 bp, synthetic construct
  source 1..20: mol_type = other DNA
ttgcctcagcctccgaagta

SEQ ID NO: 132758 - DNA, 20 bp, synthetic construct
  source 1..20: mol_type = other DNA
gttgcctcagcctccgaagt

SEQ ID NO: 132759 - DNA, 20 bp, synthetic construct
  source 1..20: mol_type = other DNA
tgttgcctcagcctccgaag

SEQ ID NO: 132760 - DNA, 20 bp, synthetic construct
  source 1..20: mol_type = other DNA
ctgttgcctcagcctccgaa

SEQ ID NO: 132761 - DNA, 20 bp, synthetic construct
  source 1..20: mol_type = other DNA
tctgttgcctcagcctccga

SEQ ID NO: 132762 - DNA, 20 bp, synthetic construct
  source 1..20: mol_type = other DNA
ttctgttgcctcagcctccg

SEQ ID NO: 132763 - DNA, 20 bp, synthetic construct
  source 1..20: mol_type = other DNA
attctgttgcctcagcctcc

SEQ ID NO: 132764 - DNA, 20 bp, synthetic construct
  source 1..20: mol_type = other DNA
aattctgttgcctcagcctc

SEQ ID NO: 132765 - DNA, 20 bp, synthetic construct
  source 1..20: mol_type = other DNA
caattctgttgcctcagcct

SEQ ID NO: 132766 - DNA, 20 bp, synthetic construct
  source 1..20: mol_type = other DNA
gcaattctgttgcctcagcc

SEQ ID NO: 132767 - DNA, 20 bp, synthetic construct
  source 1..20: mol_type = other DNA
agcaattctgttgcctcagc

SEQ ID NO: 132768 - DNA, 20 bp, synthetic construct
  source 1..20: mol_type = other DNA
aagcaattctgttgcctcag

SEQ ID NO: 132769 - DNA, 20 bp, synthetic construct
  source 1..20: mol_type = other DNA
caagcaattctgttgcctca

SEQ ID NO: 132770 - DNA, 20 bp, synthetic construct
  source 1..20: mol_type = other DNA
tcaagcaattctgttgcctc

SEQ ID NO: 132771 - DNA, 20 bp, synthetic construct
  source 1..20: mol_type = other DNA
ttcaagcaattctgttgcct

SEQ ID NO: 132772 - DNA, 20 bp, synthetic construct
  source 1..20: mol_type = other DNA
gttcaagcaattctgttgcc

SEQ ID NO: 132773 - DNA, 20 bp, synthetic construct
  source 1..20: mol_type = other DNA
ggttcaagcaattctgttgc

SEQ ID NO: 132774 - DNA, 20 bp, synthetic construct
  source 1..20: mol_type = other DNA
gggttcaagcaattctgttg

SEQ ID NO: 132775 - DNA, 20 bp, synthetic construct
  source 1..20: mol_type = other DNA
cgggttcaagcaattctgtt

SEQ ID NO: 132776 - DNA, 20 bp, synthetic construct
  source 1..20: mol_type = other DNA
ccgggttcaagcaattctgt

SEQ ID NO: 132777 - DNA, 20 bp, synthetic construct
  source 1..20: mol_type = other DNA
cccgggttcaagcaattctg

SEQ ID NO: 132778 - DNA, 20 bp, synthetic construct
  source 1..20: mol_type = other DNA
tcccgggttcaagcaattct

SEQ ID NO: 132779 - DNA, 20 bp, synthetic construct
  source 1..20: mol_type = other DNA
ctcccgggttcaagcaattc

SEQ ID NO: 132780 - DNA, 20 bp, synthetic construct
  source 1..20: mol_type = other DNA
cctcccgggttcaagcaatt

SEQ ID NO: 132781 - DNA, 20 bp, synthetic construct
  source 1..20: mol_type = other DNA
gcctcccgggttcaagcaat

SEQ ID NO: 132782 - DNA, 20 bp, synthetic construct
  source 1..20: mol_type = other DNA
tgcctcccgggttcaagcaa

SEQ ID NO: 132783 - DNA, 20 bp, synthetic construct
  source 1..20: mol_type = other DNA
ctgcctcccgggttcaagca

SEQ ID NO: 132784 - DNA, 20 bp, synthetic construct
  source 1..20: mol_type = other DNA
tctgcctcccgggttcaagc

SEQ ID NO: 132785 - DNA, 20 bp, synthetic construct
  source 1..20: mol_type = other DNA
ctctgcctcccgggttcaag

SEQ ID NO: 132786 - DNA, 20 bp, synthetic construct
  source 1..20: mol_type = other DNA
cctctgcctcccgggttcaa

SEQ ID NO: 132787 - DNA, 20 bp, synthetic construct
  source 1..20: mol_type = other DNA
acctctgcctcccgggttca

SEQ ID NO: 132788 - DNA, 20 bp, synthetic construct
  source 1..20: mol_type = other DNA
aacctctgcctcccgggttc

SEQ ID NO: 132789 - DNA, 20 bp, synthetic construct
  source 1..20: mol_type = other DNA
caacctctgcctcccgggtt

SEQ ID NO: 132790 - DNA, 20 bp, synthetic construct
  source 1..20: mol_type = other DNA
gcaacctctgcctcccgggt

SEQ ID NO: 132791 - DNA, 20 bp, synthetic construct
  source 1..20: mol_type = other DNA
tgcaacctctgcctcccggg

SEQ ID NO: 132792 - DNA, 20 bp, synthetic construct
  source 1..20: mol_type = other DNA
ctgcaacctctgcctcccgg

SEQ ID NO: 132793 - DNA, 20 bp, synthetic construct
  source 1..20: mol_type = other DNA
actgcaacctctgcctcccg

SEQ ID NO: 132794 - DNA, 20 bp, synthetic construct
  source 1..20: mol_type = other DNA
cactgcaacctctgcctccc

SEQ ID NO: 132795 - DNA, 20 bp, synthetic construct
  source 1..20: mol_type = other DNA
tcactgcaacctctgcctcc

SEQ ID NO: 132796 - DNA, 20 bp, synthetic construct
  source 1..20: mol_type = other DNA
ctcactgcaacctctgcctc

SEQ ID NO: 132797 - DNA, 20 bp, synthetic construct
  source 1..20: mol_type = other DNA
gctcactgcaacctctgcct

SEQ ID NO: 132798 - DNA, 20 bp, synthetic construct
  source 1..20: mol_type = other DNA
ggctcactgcaacctctgcc

SEQ ID NO: 132799 - DNA, 20 bp, synthetic construct
  source 1..20: mol_type = other DNA
cggctcactgcaacctctgc

SEQ ID NO: 132800 - DNA, 20 bp, synthetic construct
  source 1..20: mol_type = other DNA
tcggctcactgcaacctctg

SEQ ID NO: 132801 - DNA, 20 bp, synthetic construct
  source 1..20: mol_type = other DNA
ctcggctcactgcaacctct

SEQ ID NO: 132802 - DNA, 20 bp, synthetic construct
  source 1..20: mol_type = other DNA
tctcggctcactgcaacctc

SEQ ID NO: 132803 - DNA, 20 bp, synthetic construct
  source 1..20: mol_type = other DNA
atctcggctcactgcaacct

SEQ ID NO: 132804 - DNA, 20 bp, synthetic construct
  source 1..20: mol_type = other DNA
gatctcggctcactgcaacc

SEQ ID NO: 132805 - DNA, 20 bp, synthetic construct
  source 1..20: mol_type = other DNA
cgatctcggctcactgcaac

SEQ ID NO: 132806 - DNA, 20 bp, synthetic construct
  source 1..20: mol_type = other DNA
gcgatctcggctcactgcaa

SEQ ID NO: 132807 - DNA, 20 bp, synthetic construct
  source 1..20: mol_type = other DNA
cgcgatctcggctcactgca

SEQ ID NO: 132808 - DNA, 20 bp, synthetic construct
  source 1..20: mol_type = other DNA
gcgcgatctcggctcactgc

SEQ ID NO: 132809 - DNA, 20 bp, synthetic construct
  source 1..20: mol_type = other DNA
ggcgcgatctcggctcactg

SEQ ID NO: 132810 - DNA, 20 bp, synthetic construct
  source 1..20: mol_type = other DNA
tggcgcgatctcggctcact

SEQ ID NO: 132811 - DNA, 20 bp, synthetic construct
  source 1..20: mol_type = other DNA
gtggcgcgatctcggctcac

SEQ ID NO: 132812 - DNA, 20 bp, synthetic construct
  source 1..20: mol_type = other DNA
agtggcgcgatctcggctca

SEQ ID NO: 132813 - DNA, 20 bp, synthetic construct
  source 1..20: mol_type = other DNA
tagtggcgcgatctcggctc

SEQ ID NO: 132814 - DNA, 20 bp, synthetic construct
  source 1..20: mol_type = other DNA
gtagtggcgcgatctcggct

SEQ ID NO: 132815 - DNA, 20 bp, synthetic construct
  source 1..20: mol_type = other DNA
tgtagtggcgcgatctcggc

SEQ ID NO: 132816 - DNA, 20 bp, synthetic construct
  source 1..20: mol_type = other DNA
gtgtagtggcgcgatctcgg

SEQ ID NO: 132817 - DNA, 20 bp, synthetic construct
  source 1..20: mol_type = other DNA
agtgtagtggcgcgatctcg

SEQ ID NO: 132818 - DNA, 20 bp, synthetic construct
  source 1..20: mol_type = other DNA
gagtgtagtggcgcgatctc

SEQ ID NO: 132819 - DNA, 20 bp, synthetic construct
  source 1..20: mol_type = other DNA
agagtgtagtggcgcgatct

SEQ ID NO: 132820 - DNA, 20 bp, synthetic construct
  source 1..20: mol_type = other DNA
tagagtgtagtggcgcgatc

SEQ ID NO: 132821 - DNA, 20 bp, synthetic construct
  source 1..20: mol_type = other DNA
ctagagtgtagtggcgcgat

SEQ ID NO: 132822 - DNA, 20 bp, synthetic construct
  source 1..20: mol_type = other DNA
gctagagtgtagtggcgcga

SEQ ID NO: 132823 - DNA, 20 bp, synthetic construct
  source 1..20: mol_type = other DNA
ggctagagtgtagtggcgcg

SEQ ID NO: 132824 - DNA, 20 bp, synthetic construct
  source 1..20: mol_type = other DNA
aggctagagtgtagtggcgc

SEQ ID NO: 132825 - DNA, 20 bp, synthetic construct
  source 1..20: mol_type = other DNA
caggctagagtgtagtggcg

SEQ ID NO: 132826 - DNA, 20 bp, synthetic construct
  source 1..20: mol_type = other DNA
tcaggctagagtgtagtggc

SEQ ID NO: 132827 - DNA, 20 bp, synthetic construct
  source 1..20: mol_type = other DNA
ctcaggctagagtgtagtgg

SEQ ID NO: 132828 - DNA, 20 bp, synthetic construct
  source 1..20: mol_type = other DNA
gctcaggctagagtgtagtg

SEQ ID NO: 132829 - DNA, 20 bp, synthetic construct
  source 1..20: mol_type = other DNA
cgctcaggctagagtgtagt

SEQ ID NO: 132830 - DNA, 20 bp, synthetic construct
  source 1..20: mol_type = other DNA
tcgctcaggctagagtgtag

SEQ ID NO: 132831 - DNA, 20 bp, synthetic construct
  source 1..20: mol_type = other DNA
gtcgctcaggctagagtgta

SEQ ID NO: 132832 - DNA, 20 bp, synthetic construct
  source 1..20: mol_type = other DNA
tgtcgctcaggctagagtgt

SEQ ID NO: 132833 - DNA, 20 bp, synthetic construct
  source 1..20: mol_type = other DNA
ctgtcgctcaggctagagtg

SEQ ID NO: 132834 - DNA, 20 bp, synthetic construct
  source 1..20: mol_type = other DNA
tctgtcgctcaggctagagt

SEQ ID NO: 132835 - DNA, 20 bp, synthetic construct
  source 1..20: mol_type = other DNA
ctctgtcgctcaggctagag

SEQ ID NO: 132836 - DNA, 20 bp, synthetic construct
  source 1..20: mol_type = other DNA
actctgtcgctcaggctaga

SEQ ID NO: 132837 - DNA, 20 bp, synthetic construct
  source 1..20: mol_type = other DNA
cactctgtcgctcaggctag

SEQ ID NO: 132838 - DNA, 20 bp, synthetic construct
  source 1..20: mol_type = other DNA
tcactctgtcgctcaggcta

SEQ ID NO: 132839 - DNA, 20 bp, synthetic construct
  source 1..20: mol_type = other DNA
ctcactctgtcgctcaggct

SEQ ID NO: 132840 - DNA, 20 bp, synthetic construct
  source 1..20: mol_type = other DNA
tctcactctgtcgctcaggc

SEQ ID NO: 132841 - DNA, 20 bp, synthetic construct
  source 1..20: mol_type = other DNA
gtctcactctgtcgctcagg

SEQ ID NO: 132842 - DNA, 20 bp, synthetic construct
  source 1..20: mol_type = other DNA
agtctcactctgtcgctcag

SEQ ID NO: 132843 - DNA, 20 bp, synthetic construct
  source 1..20: mol_type = other DNA
gagtctcactctgtcgctca

SEQ ID NO: 132844 - DNA, 20 bp, synthetic construct
  source 1..20: mol_type = other DNA
ggagtctcactctgtcgctc

SEQ ID NO: 132845 - DNA, 20 bp, synthetic construct
  source 1..20: mol_type = other DNA
tggagtctcactctgtcgct

SEQ ID NO: 132846 - DNA, 20 bp, synthetic construct
  source 1..20: mol_type = other DNA
atggagtctcactctgtcgc

SEQ ID NO: 132847 - DNA, 20 bp, synthetic construct
  source 1..20: mol_type = other DNA
gatggagtctcactctgtcg

SEQ ID NO: 132848 - DNA, 20 bp, synthetic construct
  source 1..20: mol_type = other DNA
agatggagtctcactctgtc

SEQ ID NO: 132849 - DNA, 20 bp, synthetic construct
  source 1..20: mol_type = other DNA
gagatggagtctcactctgt

SEQ ID NO: 132850 - DNA, 20 bp, synthetic construct
  source 1..20: mol_type = other DNA
ggagatggagtctcactctg

SEQ ID NO: 132851 - DNA, 20 bp, synthetic construct
  source 1..20: mol_type = other DNA
tggagatggagtctcactct

SEQ ID NO: 132852 - DNA, 20 bp, synthetic construct
  source 1..20: mol_type = other DNA
ttggagatggagtctcactc

SEQ ID NO: 132853 - DNA, 20 bp, synthetic construct
  source 1..20: mol_type = other DNA
tttggagatggagtctcact

SEQ ID NO: 132854 - DNA, 20 bp, synthetic construct
  source 1..20: mol_type = other DNA
ttttggagatggagtctcac

SEQ ID NO: 132855 - DNA, 20 bp, synthetic construct
  source 1..20: mol_type = other DNA
tttttggagatggagtctca

SEQ ID NO: 132856 - DNA, 20 bp, synthetic construct
  source 1..20: mol_type = other DNA
ttttttggagatggagtctc

SEQ ID NO: 132857 - DNA, 20 bp, synthetic construct
  source 1..20: mol_type = other DNA
tttttttggagatggagtct

SEQ ID NO: 132858 - DNA, 20 bp, synthetic construct
  source 1..20: mol_type = other DNA
ttttttttggagatggagtc

SEQ ID NO: 132859 - DNA, 20 bp, synthetic construct
  source 1..20: mol_type = other DNA
tttttttttggagatggagt

SEQ ID NO: 132860 - DNA, 20 bp, synthetic construct
  source 1..20: mol_type = other DNA
ttttttttttggagatggag

SEQ ID NO: 132861 - DNA, 20 bp, synthetic construct
  source 1..20: mol_type = other DNA
tttttttttttggagatgga

SEQ ID NO: 132862 - DNA, 20 bp, synthetic construct
  source 1..20: mol_type = other DNA
ttttttttttttggagatgg

SEQ ID NO: 132863 - DNA, 20 bp, synthetic construct
  source 1..20: mol_type = other DNA
tttttttttttttggagatg

SEQ ID NO: 132864 - DNA, 20 bp, synthetic construct
  source 1..20: mol_type = other DNA
ttttttttttttttggagat

SEQ ID NO: 132865 - DNA, 20 bp, synthetic construct
  source 1..20: mol_type = other DNA
tttttttttttttttggaga

SEQ ID NO: 132866 - DNA, 20 bp, synthetic construct
  source 1..20: mol_type = other DNA
ttttttttttttttttggag

SEQ ID NO: 132867 - DNA, 20 bp, synthetic construct
  source 1..20: mol_type = other DNA
tttttttttttttttttgga

SEQ ID NO: 132868 - DNA, 20 bp, synthetic construct
  source 1..20: mol_type = other DNA
ttttttttttttttttttgg

SEQ ID NO: 132869 - DNA, 20 bp, synthetic construct
  source 1..20: mol_type = other DNA
tttttttttttttttttttg

SEQ ID NO: 132870 - DNA, 20 bp, synthetic construct
  source 1..20: mol_type = other DNA
tttttttttttttttttttt

SEQ ID NO: 132871 - DNA, 20 bp, synthetic construct
  source 1..20: mol_type = other DNA
tttttttttttttttttttt

SEQ ID NO: 132872 - DNA, 20 bp, synthetic construct
  source 1..20: mol_type = other DNA
cttttttttttttttttttt

SEQ ID NO: 132873 - DNA, 20 bp, synthetic construct
  source 1..20: mol_type = other DNA
tctttttttttttttttttt

SEQ ID NO: 132874 - DNA, 20 bp, synthetic construct
  source 1..20: mol_type = other DNA
ttcttttttttttttttttt

SEQ ID NO: 132875 - DNA, 20 bp, synthetic construct
  source 1..20: mol_type = other DNA
attctttttttttttttttt

SEQ ID NO: 132876 - DNA, 20 bp, synthetic construct
  source 1..20: mol_type = other DNA
aattcttttttttttttttt

SEQ ID NO: 132877 - DNA, 20 bp, synthetic construct
  source 1..20: mol_type = other DNA
aaattctttttttttttttt

SEQ ID NO: 132878 - DNA, 20 bp, synthetic construct
  source 1..20: mol_type = other DNA
taaattcttttttttttttt

SEQ ID NO: 132879 - DNA, 20 bp, synthetic construct
  source 1..20: mol_type = other DNA
gtaaattctttttttttttt

SEQ ID NO: 132880 - DNA, 20 bp, synthetic construct
  source 1..20: mol_type = other DNA
tgtaaattcttttttttttt

SEQ ID NO: 132881 - DNA, 20 bp, synthetic construct
  source 1..20: mol_type = other DNA
ctgtaaattctttttttttt

SEQ ID NO: 132882 - DNA, 20 bp, synthetic construct
  source 1..20: mol_type = other DNA
tctgtaaattcttttttttt

SEQ ID NO: 132883 - DNA, 20 bp, synthetic construct
  source 1..20: mol_type = other DNA
atctgtaaattctttttttt

SEQ ID NO: 132884 - DNA, 20 bp, synthetic construct
  source 1..20: mol_type = other DNA
aatctgtaaattcttttttt

SEQ ID NO: 132885 - DNA, 20 bp, synthetic construct
  source 1..20: mol_type = other DNA
aaatctgtaaattctttttt

SEQ ID NO: 132886 - DNA, 20 bp, synthetic construct
  source 1..20: mol_type = other DNA
gaaatctgtaaattcttttt

SEQ ID NO: 132887 - DNA, 20 bp, synthetic construct
  source 1..20: mol_type = other DNA
agaaatctgtaaattctttt

SEQ ID NO: 132888 - DNA, 20 bp, synthetic construct
  source 1..20: mol_type = other DNA
cagaaatctgtaaattcttt

SEQ ID NO: 132889 - DNA, 20 bp, synthetic construct
  source 1..20: mol_type = other DNA
ccagaaatctgtaaattctt

SEQ ID NO: 132890 - DNA, 20 bp, synthetic construct
  source 1..20: mol_type = other DNA
gccagaaatctgtaaattct

SEQ ID NO: 132891 - DNA, 20 bp, synthetic construct
  source 1..20: mol_type = other DNA
tgccagaaatctgtaaattc

SEQ ID NO: 132892 - DNA, 20 bp, synthetic construct
  source 1..20: mol_type = other DNA
ttgccagaaatctgtaaatt

SEQ ID NO: 132893 - DNA, 20 bp, synthetic construct
  source 1..20: mol_type = other DNA
tttgccagaaatctgtaaat

SEQ ID NO: 132894 - DNA, 20 bp, synthetic construct
  source 1..20: mol_type = other DNA
gtttgccagaaatctgtaaa

SEQ ID NO: 132895 - DNA, 20 bp, synthetic construct
  source 1..20: mol_type = other DNA
ggtttgccagaaatctgtaa

SEQ ID NO: 132896 - DNA, 20 bp, synthetic construct
  source 1..20: mol_type = other DNA
aggtttgccagaaatctgta

SEQ ID NO: 132897 - DNA, 20 bp, synthetic construct
  source 1..20: mol_type = other DNA
aaggtttgccagaaatctgt

SEQ ID NO: 132898 - DNA, 20 bp, synthetic construct
  source 1..20: mol_type = other DNA
gaaggtttgccagaaatctg

SEQ ID NO: 132899 - DNA, 20 bp, synthetic construct
  source 1..20: mol_type = other DNA
agaaggtttgccagaaatct

SEQ ID NO: 132900 - DNA, 20 bp, synthetic construct
  source 1..20: mol_type = other DNA
aagaaggtttgccagaaatc

SEQ ID NO: 132901 - DNA, 20 bp, synthetic construct
  source 1..20: mol_type = other DNA
gaagaaggtttgccagaaat

SEQ ID NO: 132902 - DNA, 20 bp, synthetic construct
  source 1..20: mol_type = other DNA
agaagaaggtttgccagaaa

SEQ ID NO: 132903 - DNA, 20 bp, synthetic construct
  source 1..20: mol_type = other DNA
aagaagaaggtttgccagaa

SEQ ID NO: 132904 - DNA, 20 bp, synthetic construct
  source 1..20: mol_type = other DNA
caagaagaaggtttgccaga

SEQ ID NO: 132905 - DNA, 20 bp, synthetic construct
  source 1..20: mol_type = other DNA
tcaagaagaaggtttgccag

SEQ ID NO: 132906 - DNA, 20 bp, synthetic construct
  source 1..20: mol_type = other DNA
ctcaagaagaaggtttgcca

SEQ ID NO: 132907 - DNA, 20 bp, synthetic construct
  source 1..20: mol_type = other DNA
tctcaagaagaaggtttgcc

SEQ ID NO: 132908 - DNA, 20 bp, synthetic construct
  source 1..20: mol_type = other DNA
gtctcaagaagaaggtttgc

SEQ ID NO: 132909 - DNA, 20 bp, synthetic construct
  source 1..20: mol_type = other DNA
tgtctcaagaagaaggtttg

SEQ ID NO: 132910 - DNA, 20 bp, synthetic construct
  source 1..20: mol_type = other DNA
atgtctcaagaagaaggttt

SEQ ID NO: 132911 - DNA, 20 bp, synthetic construct
  source 1..20: mol_type = other DNA
aatgtctcaagaagaaggtt

SEQ ID NO: 132912 - DNA, 20 bp, synthetic construct
  source 1..20: mol_type = other DNA
taatgtctcaagaagaaggt

SEQ ID NO: 132913 - DNA, 20 bp, synthetic construct
  source 1..20: mol_type = other DNA
gtaatgtctcaagaagaagg

SEQ ID NO: 132914 - DNA, 20 bp, synthetic construct
  source 1..20: mol_type = other DNA
agtaatgtctcaagaagaag

SEQ ID NO: 132915 - DNA, 20 bp, synthetic construct
  source 1..20: mol_type = other DNA
tagtaatgtctcaagaagaa

SEQ ID NO: 132916 - DNA, 20 bp, synthetic construct
  source 1..20: mol_type = other DNA
gtagtaatgtctcaagaaga

SEQ ID NO: 132917 - DNA, 20 bp, synthetic construct
  source 1..20: mol_type = other DNA
agtagtaatgtctcaagaag

SEQ ID NO: 132918 - DNA, 20 bp, synthetic construct
  source 1..20: mol_type = other DNA
aagtagtaatgtctcaagaa

SEQ ID NO: 132919 - DNA, 20 bp, synthetic construct
  source 1..20: mol_type = other DNA
aaagtagtaatgtctcaaga

SEQ ID NO: 132920 - DNA, 20 bp, synthetic construct
  source 1..20: mol_type = other DNA
aaaagtagtaatgtctcaag

SEQ ID NO: 132921 - DNA, 20 bp, synthetic construct
  source 1..20: mol_type = other DNA
gaaaagtagtaatgtctcaa

SEQ ID NO: 132922 - DNA, 20 bp, synthetic construct
  source 1..20: mol_type = other DNA
tgaaaagtagtaatgtctca

SEQ ID NO: 132923 - DNA, 20 bp, synthetic construct
  source 1..20: mol_type = other DNA
atgaaaagtagtaatgtctc

SEQ ID NO: 132924 - DNA, 20 bp, synthetic construct
  source 1..20: mol_type = other DNA
tatgaaaagtagtaatgtct

SEQ ID NO: 132925 - DNA, 20 bp, synthetic construct
  source 1..20: mol_type = other DNA
gtatgaaaagtagtaatgtc

SEQ ID NO: 132926 - DNA, 20 bp, synthetic construct
  source 1..20: mol_type = other DNA
ggtatgaaaagtagtaatgt

SEQ ID NO: 132927 - DNA, 20 bp, synthetic construct
  source 1..20: mol_type = other DNA
tggtatgaaaagtagtaatg

SEQ ID NO: 132928 - DNA, 20 bp, synthetic construct
  source 1..20: mol_type = other DNA
gtggtatgaaaagtagtaat

SEQ ID NO: 132929 - DNA, 20 bp, synthetic construct
  source 1..20: mol_type = other DNA
ggtggtatgaaaagtagtaa

SEQ ID NO: 132930 - DNA, 20 bp, synthetic construct
  source 1..20: mol_type = other DNA
aggtggtatgaaaagtagta

SEQ ID NO: 132931 - DNA, 20 bp, synthetic construct
  source 1..20: mol_type = other DNA
gaggtggtatgaaaagtagt

SEQ ID NO: 132932 - DNA, 20 bp, synthetic construct
  source 1..20: mol_type = other DNA
agaggtggtatgaaaagtag

SEQ ID NO: 132933 - DNA, 20 bp, synthetic construct
  source 1..20: mol_type = other DNA
cagaggtggtatgaaaagta

SEQ ID NO: 132934 - DNA, 20 bp, synthetic construct
  source 1..20: mol_type = other DNA
acagaggtggtatgaaaagt

SEQ ID NO: 132935 - DNA, 20 bp, synthetic construct
  source 1..20: mol_type = other DNA
gacagaggtggtatgaaaag

SEQ ID NO: 132936 - DNA, 20 bp, synthetic construct
  source 1..20: mol_type = other DNA
ggacagaggtggtatgaaaa

SEQ ID NO: 132937 - DNA, 20 bp, synthetic construct
  source 1..20: mol_type = other DNA
aggacagaggtggtatgaaa

SEQ ID NO: 132938 - DNA, 20 bp, synthetic construct
  source 1..20: mol_type = other DNA
aaggacagaggtggtatgaa

SEQ ID NO: 132939 - DNA, 20 bp, synthetic construct
  source 1..20: mol_type = other DNA
aaaggacagaggtggtatga

SEQ ID NO: 132940 - DNA, 20 bp, synthetic construct
  source 1..20: mol_type = other DNA
aaaaggacagaggtggtatg

SEQ ID NO: 132941 - DNA, 20 bp, synthetic construct
  source 1..20: mol_type = other DNA
aaaaaggacagaggtggtat

SEQ ID NO: 132942 - DNA, 20 bp, synthetic construct
  source 1..20: mol_type = other DNA
caaaaaggacagaggtggta

SEQ ID NO: 132943 - DNA, 20 bp, synthetic construct
  source 1..20: mol_type = other DNA
tcaaaaaggacagaggtggt

SEQ ID NO: 132944 - DNA, 20 bp, synthetic construct
  source 1..20: mol_type = other DNA
ttcaaaaaggacagaggtgg

SEQ ID NO: 132945 - DNA, 20 bp, synthetic construct
  source 1..20: mol_type = other DNA
cttcaaaaaggacagaggtg

SEQ ID NO: 132946 - DNA, 20 bp, synthetic construct
  source 1..20: mol_type = other DNA
tcttcaaaaaggacagaggt

SEQ ID NO: 132947 - DNA, 20 bp, synthetic construct
  source 1..20: mol_type = other DNA
ttcttcaaaaaggacagagg

SEQ ID NO: 132948 - DNA, 20 bp, synthetic construct
  source 1..20: mol_type = other DNA
attcttcaaaaaggacagag

SEQ ID NO: 132949 - DNA, 20 bp, synthetic construct
  source 1..20: mol_type = other DNA
tattcttcaaaaaggacaga

SEQ ID NO: 132950 - DNA, 20 bp, synthetic construct
  source 1..20: mol_type = other DNA
ttattcttcaaaaaggacag

SEQ ID NO: 132951 - DNA, 20 bp, synthetic construct
  source 1..20: mol_type = other DNA
tttattcttcaaaaaggaca

SEQ ID NO: 132952 - DNA, 20 bp, synthetic construct
  source 1..20: mol_type = other DNA
ttttattcttcaaaaaggac

SEQ ID NO: 132953 - DNA, 20 bp, synthetic construct
  source 1..20: mol_type = other DNA
cttttattcttcaaaaagga

SEQ ID NO: 132954 - DNA, 20 bp, synthetic construct
  source 1..20: mol_type = other DNA
acttttattcttcaaaaagg

SEQ ID NO: 132955 - DNA, 20 bp, synthetic construct
  source 1..20: mol_type = other DNA
aacttttattcttcaaaaag

SEQ ID NO: 132956 - DNA, 20 bp, synthetic construct
  source 1..20: mol_type = other DNA
aaacttttattcttcaaaaa

SEQ ID NO: 132957 - DNA, 20 bp, synthetic construct
  source 1..20: mol_type = other DNA
aaaacttttattcttcaaaa

SEQ ID NO: 132958 - DNA, 20 bp, synthetic construct
  source 1..20: mol_type = other DNA
taaaacttttattcttcaaa

SEQ ID NO: 132959 - DNA, 20 bp, synthetic construct
  source 1..20: mol_type = other DNA
ttaaaacttttattcttcaa

SEQ ID NO: 132960 - DNA, 20 bp, synthetic construct
  source 1..20: mol_type = other DNA
gttaaaacttttattcttca

SEQ ID NO: 132961 - DNA, 20 bp, synthetic construct
  source 1..20: mol_type = other DNA
tgttaaaacttttattcttc

SEQ ID NO: 132962 - DNA, 20 bp, synthetic construct
  source 1..20: mol_type = other DNA
atgttaaaacttttattctt

SEQ ID NO: 132963 - DNA, 20 bp, synthetic construct
  source 1..20: mol_type = other DNA
aatgttaaaacttttattct

SEQ ID NO: 132964 - DNA, 20 bp, synthetic construct
  source 1..20: mol_type = other DNA
gaatgttaaaacttttattc

SEQ ID NO: 132965 - DNA, 20 bp, synthetic construct
  source 1..20: mol_type = other DNA
ggaatgttaaaacttttatt

SEQ ID NO: 132966 - DNA, 20 bp, synthetic construct
  source 1..20: mol_type = other DNA
cggaatgttaaaacttttat

SEQ ID NO: 132967 - DNA, 20 bp, synthetic construct
  source 1..20: mol_type = other DNA
acggaatgttaaaactttta

SEQ ID NO: 132968 - DNA, 20 bp, synthetic construct
  source 1..20: mol_type = other DNA
tacggaatgttaaaactttt

SEQ ID NO: 132969 - DNA, 20 bp, synthetic construct
  source 1..20: mol_type = other DNA
ctacggaatgttaaaacttt

SEQ ID NO: 132970 - DNA, 20 bp, synthetic construct
  source 1..20: mol_type = other DNA
cctacggaatgttaaaactt

SEQ ID NO: 132971 - DNA, 20 bp, synthetic construct
  source 1..20: mol_type = other DNA
acctacggaatgttaaaact

SEQ ID NO: 132972 - DNA, 20 bp, synthetic construct
  source 1..20: mol_type = other DNA
aacctacggaatgttaaaac

SEQ ID NO: 132973 - DNA, 20 bp, synthetic construct
  source 1..20: mol_type = other DNA
taacctacggaatgttaaaa

SEQ ID NO: 132974 - DNA, 20 bp, synthetic construct
  source 1..20: mol_type = other DNA
ttaacctacggaatgttaaa

SEQ ID NO: 132975 - DNA, 20 bp, synthetic construct
  source 1..20: mol_type = other DNA
attaacctacggaatgttaa

SEQ ID NO: 132976 - DNA, 20 bp, synthetic construct
  source 1..20: mol_type = other DNA
cattaacctacggaatgtta

SEQ ID NO: 132977 - DNA, 20 bp, synthetic construct
  source 1..20: mol_type = other DNA
tcattaacctacggaatgtt

SEQ ID NO: 132978 - DNA, 20 bp, synthetic construct
  source 1..20: mol_type = other DNA
ctcattaacctacggaatgt

SEQ ID NO: 132979 - DNA, 20 bp, synthetic construct
  source 1..20: mol_type = other DNA
tctcattaacctacggaatg

SEQ ID NO: 132980 - DNA, 20 bp, synthetic construct
  source 1..20: mol_type = other DNA
ttctcattaacctacggaat

SEQ ID NO: 132981 - DNA, 20 bp, synthetic construct
  source 1..20: mol_type = other DNA
attctcattaacctacggaa

SEQ ID NO: 132982 - DNA, 20 bp, synthetic construct
  source 1..20: mol_type = other DNA
tattctcattaacctacgga

SEQ ID NO: 132983 - DNA, 20 bp, synthetic construct
  source 1..20: mol_type = other DNA
ctattctcattaacctacgg

SEQ ID NO: 132984 - DNA, 20 bp, synthetic construct
  source 1..20: mol_type = other DNA
cctattctcattaacctacg

SEQ ID NO: 132985 - DNA, 20 bp, synthetic construct
  source 1..20: mol_type = other DNA
tcctattctcattaacctac

SEQ ID NO: 132986 - DNA, 20 bp, synthetic construct
  source 1..20: mol_type = other DNA
gtcctattctcattaaccta

SEQ ID NO: 132987 - DNA, 20 bp, synthetic construct
  source 1..20: mol_type = other DNA
agtcctattctcattaacct

SEQ ID NO: 132988 - DNA, 20 bp, synthetic construct
  source 1..20: mol_type = other DNA
aagtcctattctcattaacc

SEQ ID NO: 132989 - DNA, 20 bp, synthetic construct
  source 1..20: mol_type = other DNA
caagtcctattctcattaac

SEQ ID NO: 132990 - DNA, 20 bp, synthetic construct
  source 1..20: mol_type = other DNA
ccaagtcctattctcattaa

SEQ ID NO: 132991 - DNA, 20 bp, synthetic construct
  source 1..20: mol_type = other DNA
cccaagtcctattctcatta

SEQ ID NO: 132992 - DNA, 20 bp, synthetic construct
  source 1..20: mol_type = other DNA
gcccaagtcctattctcatt

SEQ ID NO: 132993 - DNA, 20 bp, synthetic construct
  source 1..20: mol_type = other DNA
tgcccaagtcctattctcat

SEQ ID NO: 132994 - DNA, 20 bp, synthetic construct
  source 1..20: mol_type = other DNA
ctgcccaagtcctattctca

SEQ ID NO: 132995 - DNA, 20 bp, synthetic construct
  source 1..20: mol_type = other DNA
gctgcccaagtcctattctc

SEQ ID NO: 132996 - DNA, 20 bp, synthetic construct
  source 1..20: mol_type = other DNA
tgctgcccaagtcctattct

SEQ ID NO: 132997 - DNA, 20 bp, synthetic construct
  source 1..20: mol_type = other DNA
ctgctgcccaagtcctattc

SEQ ID NO: 132998 - DNA, 20 bp, synthetic construct
  source 1..20: mol_type = other DNA
gctgctgcccaagtcctatt

SEQ ID NO: 132999 - DNA, 20 bp, synthetic construct
  source 1..20: mol_type = other DNA
tgctgctgcccaagtcctat

SEQ ID NO: 133000 - DNA, 20 bp, synthetic construct
  source 1..20: mol_type = other DNA
ttgctgctgcccaagtccta

SEQ ID NO: 133001 - DNA, 20 bp, synthetic construct
  source 1..20: mol_type = other DNA
attgctgctgcccaagtcct

SEQ ID NO: 133002 - DNA, 20 bp, synthetic construct
  source 1..20: mol_type = other DNA
gattgctgctgcccaagtcc

SEQ ID NO: 133003 - DNA, 20 bp, synthetic construct
  source 1..20: mol_type = other DNA
tgattgctgctgcccaagtc

SEQ ID NO: 133004 - DNA, 20 bp, synthetic construct
  source 1..20: mol_type = other DNA
atgattgctgctgcccaagt

SEQ ID NO: 133005 - DNA, 20 bp, synthetic construct
  source 1..20: mol_type = other DNA
gatgattgctgctgcccaag

SEQ ID NO: 133006 - DNA, 20 bp, synthetic construct
  source 1..20: mol_type = other DNA
ggatgattgctgctgcccaa

SEQ ID NO: 133007 - DNA, 20 bp, synthetic construct
  source 1..20: mol_type = other DNA
aggatgattgctgctgccca

SEQ ID NO: 133008 - DNA, 20 bp, synthetic construct
  source 1..20: mol_type = other DNA
aaggatgattgctgctgccc

SEQ ID NO: 133009 - DNA, 20 bp, synthetic construct
  source 1..20: mol_type = other DNA
gaaggatgattgctgctgcc

SEQ ID NO: 133010 - DNA, 20 bp, synthetic construct
  source 1..20: mol_type = other DNA
ggaaggatgattgctgctgc

SEQ ID NO: 133011 - DNA, 20 bp, synthetic construct
  source 1..20: mol_type = other DNA
aggaaggatgattgctgctg

SEQ ID NO: 133012 - DNA, 20 bp, synthetic construct
  source 1..20: mol_type = other DNA
caggaaggatgattgctgct

SEQ ID NO: 133013 - DNA, 20 bp, synthetic construct
  source 1..20: mol_type = other DNA
acaggaaggatgattgctgc

SEQ ID NO: 133014 - DNA, 20 bp, synthetic construct
  source 1..20: mol_type = other DNA
gacaggaaggatgattgctg

SEQ ID NO: 133015 - DNA, 20 bp, synthetic construct
  source 1..20: mol_type = other DNA
tgacaggaaggatgattgct

SEQ ID NO: 133016 - DNA, 20 bp, synthetic construct
  source 1..20: mol_type = other DNA
gtgacaggaaggatgattgc

SEQ ID NO: 133017 - DNA, 20 bp, synthetic construct
  source 1..20: mol_type = other DNA
ggtgacaggaaggatgattg

SEQ ID NO: 133018 - DNA, 20 bp, synthetic construct
  source 1..20: mol_type = other DNA
aggtgacaggaaggatgatt

SEQ ID NO: 133019 - DNA, 20 bp, synthetic construct
  source 1..20: mol_type = other DNA
caggtgacaggaaggatgat

SEQ ID NO: 133020 - DNA, 20 bp, synthetic construct
  source 1..20: mol_type = other DNA
acaggtgacaggaaggatga

SEQ ID NO: 133021 - DNA, 20 bp, synthetic construct
  source 1..20: mol_type = other DNA
tacaggtgacaggaaggatg

SEQ ID NO: 133022 - DNA, 20 bp, synthetic construct
  source 1..20: mol_type = other DNA
ttacaggtgacaggaaggat

SEQ ID NO: 133023 - DNA, 20 bp, synthetic construct
  source 1..20: mol_type = other DNA
gttacaggtgacaggaagga

SEQ ID NO: 133024 - DNA, 20 bp, synthetic construct
  source 1..20: mol_type = other DNA
ggttacaggtgacaggaagg

SEQ ID NO: 133025 - DNA, 20 bp, synthetic construct
  source 1..20: mol_type = other DNA
gggttacaggtgacaggaag

SEQ ID NO: 133026 - DNA, 20 bp, synthetic construct
  source 1..20: mol_type = other DNA
tgggttacaggtgacaggaa

SEQ ID NO: 133027 - DNA, 20 bp, synthetic construct
  source 1..20: mol_type = other DNA
gtgggttacaggtgacagga

SEQ ID NO: 133028 - DNA, 20 bp, synthetic construct
  source 1..20: mol_type = other DNA
tgtgggttacaggtgacagg

SEQ ID NO: 133029 - DNA, 20 bp, synthetic construct
  source 1..20: mol_type = other DNA
ctgtgggttacaggtgacag

SEQ ID NO: 133030 - DNA, 20 bp, synthetic construct
  source 1..20: mol_type = other DNA
gctgtgggttacaggtgaca

SEQ ID NO: 133031 - DNA, 20 bp, synthetic construct
  source 1..20: mol_type = other DNA
agctgtgggttacaggtgac

SEQ ID NO: 133032 - DNA, 20 bp, synthetic construct
  source 1..20: mol_type = other DNA
aagctgtgggttacaggtga

SEQ ID NO: 133033 - DNA, 20 bp, synthetic construct
  source 1..20: mol_type = other DNA
taagctgtgggttacaggtg

SEQ ID NO: 133034 - DNA, 20 bp, synthetic construct
  source 1..20: mol_type = other DNA
ataagctgtgggttacaggt

SEQ ID NO: 133035 - DNA, 20 bp, synthetic construct
  source 1..20: mol_type = other DNA
cataagctgtgggttacagg

SEQ ID NO: 133036 - DNA, 20 bp, synthetic construct
  source 1..20: mol_type = other DNA
gcataagctgtgggttacag

SEQ ID NO: 133037 - DNA, 20 bp, synthetic construct
  source 1..20: mol_type = other DNA
agcataagctgtgggttaca

SEQ ID NO: 133038 - DNA, 20 bp, synthetic construct
  source 1..20: mol_type = other DNA
aagcataagctgtgggttac

SEQ ID NO: 133039 - DNA, 20 bp, synthetic construct
  source 1..20: mol_type = other DNA
aaagcataagctgtgggtta

SEQ ID NO: 133040 - DNA, 20 bp, synthetic construct
  source 1..20: mol_type = other DNA
gaaagcataagctgtgggtt

SEQ ID NO: 133041 - DNA, 20 bp, synthetic construct
  source 1..20: mol_type = other DNA
agaaagcataagctgtgggt

SEQ ID NO: 133042 - DNA, 20 bp, synthetic construct
  source 1..20: mol_type = other DNA
aagaaagcataagctgtggg

SEQ ID NO: 133043 - DNA, 20 bp, synthetic construct
  source 1..20: mol_type = other DNA
gaagaaagcataagctgtgg

SEQ ID NO: 133044 - DNA, 20 bp, synthetic construct
  source 1..20: mol_type = other DNA
ggaagaaagcataagctgtg

SEQ ID NO: 133045 - DNA, 20 bp, synthetic construct
  source 1..20: mol_type = other DNA
aggaagaaagcataagctgt

SEQ ID NO: 133046 - DNA, 20 bp, synthetic construct
  source 1..20: mol_type = other DNA
caggaagaaagcataagctg

SEQ ID NO: 133047 - DNA, 20 bp, synthetic construct
  source 1..20: mol_type = other DNA
ccaggaagaaagcataagct

SEQ ID NO: 133048 - DNA, 20 bp, synthetic construct
  source 1..20: mol_type = other DNA
tccaggaagaaagcataagc

SEQ ID NO: 133049 - DNA, 20 bp, synthetic construct
  source 1..20: mol_type = other DNA
ctccaggaagaaagcataag

SEQ ID NO: 133050 - DNA, 20 bp, synthetic construct
  source 1..20: mol_type = other DNA
cctccaggaagaaagcataa

SEQ ID NO: 133051 - DNA, 20 bp, synthetic construct
  source 1..20: mol_type = other DNA
acctccaggaagaaagcata

SEQ ID NO: 133052 - DNA, 20 bp, synthetic construct
  source 1..20: mol_type = other DNA
aacctccaggaagaaagcat

SEQ ID NO: 133053 - DNA, 20 bp, synthetic construct
  source 1..20: mol_type = other DNA
gaacctccaggaagaaagca

SEQ ID NO: 133054 - DNA, 20 bp, synthetic construct
  source 1..20: mol_type = other DNA
agaacctccaggaagaaagc

SEQ ID NO: 133055 - DNA, 20 bp, synthetic construct
  source 1..20: mol_type = other DNA
aagaacctccaggaagaaag

SEQ ID NO: 133056 - DNA, 20 bp, synthetic construct
  source 1..20: mol_type = other DNA
caagaacctccaggaagaaa

SEQ ID NO: 133057 - DNA, 20 bp, synthetic construct
  source 1..20: mol_type = other DNA
acaagaacctccaggaagaa

SEQ ID NO: 133058 - DNA, 20 bp, synthetic construct
  source 1..20: mol_type = other DNA
gacaagaacctccaggaaga

SEQ ID NO: 133059 - DNA, 20 bp, synthetic construct
  source 1..20: mol_type = other DNA
agacaagaacctccaggaag

SEQ ID NO: 133060 - DNA, 20 bp, synthetic construct
  source 1..20: mol_type = other DNA
cagacaagaacctccaggaa

SEQ ID NO: 133061 - DNA, 20 bp, synthetic construct
  source 1..20: mol_type = other DNA
gcagacaagaacctccagga

SEQ ID NO: 133062 - DNA, 20 bp, synthetic construct
  source 1..20: mol_type = other DNA
ggcagacaagaacctccagg

SEQ ID NO: 133063 - DNA, 20 bp, synthetic construct
  source 1..20: mol_type = other DNA
tggcagacaagaacctccag

SEQ ID NO: 133064 - DNA, 20 bp, synthetic construct
  source 1..20: mol_type = other DNA
gtggcagacaagaacctcca

SEQ ID NO: 133065 - DNA, 20 bp, synthetic construct
  source 1..20: mol_type = other DNA
tgtggcagacaagaacctcc

SEQ ID NO: 133066 - DNA, 20 bp, synthetic construct
  source 1..20: mol_type = other DNA
ttgtggcagacaagaacctc

SEQ ID NO: 133067 - DNA, 20 bp, synthetic construct
  source 1..20: mol_type = other DNA
tttgtggcagacaagaacct

SEQ ID NO: 133068 - DNA, 20 bp, synthetic construct
  source 1..20: mol_type = other DNA
ctttgtggcagacaagaacc

SEQ ID NO: 133069 - DNA, 20 bp, synthetic construct
  source 1..20: mol_type = other DNA
cctttgtggcagacaagaac

SEQ ID NO: 133070 - DNA, 20 bp, synthetic construct
  source 1..20: mol_type = other DNA
gcctttgtggcagacaagaa

SEQ ID NO: 133071 - DNA, 20 bp, synthetic construct
  source 1..20: mol_type = other DNA
agcctttgtggcagacaaga

SEQ ID NO: 133072 - DNA, 20 bp, synthetic construct
  source 1..20: mol_type = other DNA
gagcctttgtggcagacaag

SEQ ID NO: 133073 - DNA, 20 bp, synthetic construct
  source 1..20: mol_type = other DNA
tgagcctttgtggcagacaa

SEQ ID NO: 133074 - DNA, 20 bp, synthetic construct
  source 1..20: mol_type = other DNA
gtgagcctttgtggcagaca

SEQ ID NO: 133075 - DNA, 20 bp, synthetic construct
  source 1..20: mol_type = other DNA
agtgagcctttgtggcagac

SEQ ID NO: 133076 - DNA, 20 bp, synthetic construct
  source 1..20: mol_type = other DNA
cagtgagcctttgtggcaga

SEQ ID NO: 133077 - DNA, 20 bp, synthetic construct
  source 1..20: mol_type = other DNA
gcagtgagcctttgtggcag

SEQ ID NO: 133078 - DNA, 20 bp, synthetic construct
  source 1..20: mol_type = other DNA
agcagtgagcctttgtggca

SEQ ID NO: 133079 - DNA, 20 bp, synthetic construct
  source 1..20: mol_type = other DNA
cagcagtgagcctttgtggc

SEQ ID NO: 133080 - DNA, 20 bp, synthetic construct
  source 1..20: mol_type = other DNA
tcagcagtgagcctttgtgg

SEQ ID NO: 133081 - DNA, 20 bp, synthetic construct
  source 1..20: mol_type = other DNA
atcagcagtgagcctttgtg

SEQ ID NO: 133082 - DNA, 20 bp, synthetic construct
  source 1..20: mol_type = other DNA
tatcagcagtgagcctttgt

SEQ ID NO: 133083 - DNA, 20 bp, synthetic construct
  source 1..20: mol_type = other DNA
ctatcagcagtgagcctttg

SEQ ID NO: 133084 - DNA, 20 bp, synthetic construct
  source 1..20: mol_type = other DNA
cctatcagcagtgagccttt

SEQ ID NO: 133085 - DNA, 20 bp, synthetic construct
  source 1..20: mol_type = other DNA
tcctatcagcagtgagcctt

SEQ ID NO: 133086 - DNA, 20 bp, synthetic construct
  source 1..20: mol_type = other DNA
ttcctatcagcagtgagcct

SEQ ID NO: 133087 - DNA, 20 bp, synthetic construct
  source 1..20: mol_type = other DNA
attcctatcagcagtgagcc

SEQ ID NO: 133088 - DNA, 20 bp, synthetic construct
  source 1..20: mol_type = other DNA
aattcctatcagcagtgagc

SEQ ID NO: 133089 - DNA, 20 bp, synthetic construct
  source 1..20: mol_type = other DNA
aaattcctatcagcagtgag

SEQ ID NO: 133090 - DNA, 20 bp, synthetic construct
  source 1..20: mol_type = other DNA
caaattcctatcagcagtga

SEQ ID NO: 133091 - DNA, 20 bp, synthetic construct
  source 1..20: mol_type = other DNA
acaaattcctatcagcagtg

SEQ ID NO: 133092 - DNA, 20 bp, synthetic construct
  source 1..20: mol_type = other DNA
tacaaattcctatcagcagt

SEQ ID NO: 133093 - DNA, 20 bp, synthetic construct
  source 1..20: mol_type = other DNA
atacaaattcctatcagcag

SEQ ID NO: 133094 - DNA, 20 bp, synthetic construct
  source 1..20: mol_type = other DNA
tatacaaattcctatcagca

SEQ ID NO: 133095 - DNA, 20 bp, synthetic construct
  source 1..20: mol_type = other DNA
atatacaaattcctatcagc

SEQ ID NO: 133096 - DNA, 20 bp, synthetic construct
  source 1..20: mol_type = other DNA
catatacaaattcctatcag

SEQ ID NO: 133097 - DNA, 20 bp, synthetic construct
  source 1..20: mol_type = other DNA
tcatatacaaattcctatca

SEQ ID NO: 133098 - DNA, 20 bp, synthetic construct
  source 1..20: mol_type = other DNA
atcatatacaaattcctatc

SEQ ID NO: 133099 - DNA, 20 bp, synthetic construct
  source 1..20: mol_type = other DNA
gatcatatacaaattcctat

SEQ ID NO: 133100 - DNA, 20 bp, synthetic construct
  source 1..20: mol_type = other DNA
tgatcatatacaaattccta

SEQ ID NO: 133101 - DNA, 20 bp, synthetic construct
  source 1..20: mol_type = other DNA
ttgatcatatacaaattcct

SEQ ID NO: 133102 - DNA, 20 bp, synthetic construct
  source 1..20: mol_type = other DNA
tttgatcatatacaaattcc

SEQ ID NO: 133103 - DNA, 20 bp, synthetic construct
  source 1..20: mol_type = other DNA
ctttgatcatatacaaattc

SEQ ID NO: 133104 - DNA, 20 bp, synthetic construct
  source 1..20: mol_type = other DNA
cctttgatcatatacaaatt

SEQ ID NO: 133105 - DNA, 20 bp, synthetic construct
  source 1..20: mol_type = other DNA
acctttgatcatatacaaat

SEQ ID NO: 133106 - DNA, 20 bp, synthetic construct
  source 1..20: mol_type = other DNA
cacctttgatcatatacaaa

SEQ ID NO: 133107 - DNA, 20 bp, synthetic construct
  source 1..20: mol_type = other DNA
acacctttgatcatatacaa

SEQ ID NO: 133108 - DNA, 20 bp, synthetic construct
  source 1..20: mol_type = other DNA
aacacctttgatcatataca

SEQ ID NO: 133109 - DNA, 20 bp, synthetic construct
  source 1..20: mol_type = other DNA
aaacacctttgatcatatac

SEQ ID NO: 133110 - DNA, 20 bp, synthetic construct
  source 1..20: mol_type = other DNA
taaacacctttgatcatata

SEQ ID NO: 133111 - DNA, 20 bp, synthetic construct
  source 1..20: mol_type = other DNA
ctaaacacctttgatcatat

SEQ ID NO: 133112 - DNA, 20 bp, synthetic construct
  source 1..20: mol_type = other DNA
actaaacacctttgatcata

SEQ ID NO: 133113 - DNA, 20 bp, synthetic construct
  source 1..20: mol_type = other DNA
aactaaacacctttgatcat

SEQ ID NO: 133114 - DNA, 20 bp, synthetic construct
  source 1..20: mol_type = other DNA
aaactaaacacctttgatca

SEQ ID NO: 133115 - DNA, 20 bp, synthetic construct
  source 1..20: mol_type = other DNA
aaaactaaacacctttgatc

SEQ ID NO: 133116 - DNA, 20 bp, synthetic construct
  source 1..20: mol_type = other DNA
taaaactaaacacctttgat

SEQ ID NO: 133117 - DNA, 20 bp, synthetic construct
  source 1..20: mol_type = other DNA
ataaaactaaacacctttga

SEQ ID NO: 133118 - DNA, 20 bp, synthetic construct
  source 1..20: mol_type = other DNA
tataaaactaaacacctttg

SEQ ID NO: 133119 - DNA, 20 bp, synthetic construct
  source 1..20: mol_type = other DNA
ttataaaactaaacaccttt

SEQ ID NO: 133120 - DNA, 20 bp, synthetic construct
  source 1..20: mol_type = other DNA
tttataaaactaaacacctt

SEQ ID NO: 133121 - DNA, 20 bp, synthetic construct
  source 1..20: mol_type = other DNA
ttttataaaactaaacacct

SEQ ID NO: 133122 - DNA, 20 bp, synthetic construct
  source 1..20: mol_type = other DNA
gttttataaaactaaacacc

SEQ ID NO: 133123 - DNA, 20 bp, synthetic construct
  source 1..20: mol_type = other DNA
tgttttataaaactaaacac

SEQ ID NO: 133124 - DNA, 20 bp, synthetic construct
  source 1..20: mol_type = other DNA
ctgttttataaaactaaaca

SEQ ID NO: 133125 - DNA, 20 bp, synthetic construct
  source 1..20: mol_type = other DNA
actgttttataaaactaaac

SEQ ID NO: 133126 - DNA, 20 bp, synthetic construct
  source 1..20: mol_type = other DNA
aactgttttataaaactaaa

SEQ ID NO: 133127 - DNA, 20 bp, synthetic construct
  source 1..20: mol_type = other DNA
taactgttttataaaactaa

SEQ ID NO: 133128 - DNA, 20 bp, synthetic construct
  source 1..20: mol_type = other DNA
ttaactgttttataaaacta

SEQ ID NO: 133129 - DNA, 20 bp, synthetic construct
  source 1..20: mol_type = other DNA
cttaactgttttataaaact

SEQ ID NO: 133130 - DNA, 20 bp, synthetic construct
  source 1..20: mol_type = other DNA
acttaactgttttataaaac

SEQ ID NO: 133131 - DNA, 20 bp, synthetic construct
  source 1..20: mol_type = other DNA
gacttaactgttttataaaa

SEQ ID NO: 133132 - DNA, 20 bp, synthetic construct
  source 1..20: mol_type = other DNA
ggacttaactgttttataaa

SEQ ID NO: 133133 - DNA, 20 bp, synthetic construct
  source 1..20: mol_type = other DNA
tggacttaactgttttataa

SEQ ID NO: 133134 - DNA, 20 bp, synthetic construct
  source 1..20: mol_type = other DNA
ctggacttaactgttttata

SEQ ID NO: 133135 - DNA, 20 bp, synthetic construct
  source 1..20: mol_type = other DNA
actggacttaactgttttat

SEQ ID NO: 133136 - DNA, 20 bp, synthetic construct
  source 1..20: mol_type = other DNA
gactggacttaactgtttta

SEQ ID NO: 133137 - DNA, 20 bp, synthetic construct
  source 1..20: mol_type = other DNA
agactggacttaactgtttt

SEQ ID NO: 133138 - DNA, 20 bp, synthetic construct
  source 1..20: mol_type = other DNA
aagactggacttaactgttt

SEQ ID NO: 133139 - DNA, 20 bp, synthetic construct
  source 1..20: mol_type = other DNA
taagactggacttaactgtt

SEQ ID NO: 133140 - DNA, 20 bp, synthetic construct
  source 1..20: mol_type = other DNA
ttaagactggacttaactgt

SEQ ID NO: 133141 - DNA, 20 bp, synthetic construct
  source 1..20: mol_type = other DNA
attaagactggacttaactg

SEQ ID NO: 133142 - DNA, 20 bp, synthetic construct
  source 1..20: mol_type = other DNA
aattaagactggacttaact

SEQ ID NO: 133143 - DNA, 20 bp, synthetic construct
  source 1..20: mol_type = other DNA
aaattaagactggacttaac

SEQ ID NO: 133144 - DNA, 20 bp, synthetic construct
  source 1..20: mol_type = other DNA
aaaattaagactggacttaa

SEQ ID NO: 133145 - DNA, 20 bp, synthetic construct
  source 1..20: mol_type = other DNA
gaaaattaagactggactta

SEQ ID NO: 133146 - DNA, 20 bp, synthetic construct
  source 1..20: mol_type = other DNA
ggaaaattaagactggactt

SEQ ID NO: 133147 - DNA, 20 bp, synthetic construct
  source 1..20: mol_type = other DNA
tggaaaattaagactggact

SEQ ID NO: 133148 - DNA, 20 bp, synthetic construct
  source 1..20: mol_type = other DNA
gtggaaaattaagactggac

SEQ ID NO: 133149 - DNA, 20 bp, synthetic construct
  source 1..20: mol_type = other DNA
tgtggaaaattaagactgga

SEQ ID NO: 133150 - DNA, 20 bp, synthetic construct
  source 1..20: mol_type = other DNA
atgtggaaaattaagactgg

SEQ ID NO: 133151 - DNA, 20 bp, synthetic construct
  source 1..20: mol_type = other DNA
aatgtggaaaattaagactg

SEQ ID NO: 133152 - DNA, 20 bp, synthetic construct
  source 1..20: mol_type = other DNA
taatgtggaaaattaagact

SEQ ID NO: 133153 - DNA, 20 bp, synthetic construct
  source 1..20: mol_type = other DNA
ataatgtggaaaattaagac

SEQ ID NO: 133154 - DNA, 20 bp, synthetic construct
  source 1..20: mol_type = other DNA
gataatgtggaaaattaaga

SEQ ID NO: 133155 - DNA, 20 bp, synthetic construct
  source 1..20: mol_type = other DNA
tgataatgtggaaaattaag

SEQ ID NO: 133156 - DNA, 20 bp, synthetic construct
  source 1..20: mol_type = other DNA
gtgataatgtggaaaattaa

SEQ ID NO: 133157 - DNA, 20 bp, synthetic construct
  source 1..20: mol_type = other DNA
agtgataatgtggaaaatta

SEQ ID NO: 133158 - DNA, 20 bp, synthetic construct
  source 1..20: mol_type = other DNA
aagtgataatgtggaaaatt

SEQ ID NO: 133159 - DNA, 20 bp, synthetic construct
  source 1..20: mol_type = other DNA
aaagtgataatgtggaaaat

SEQ ID NO: 133160 - DNA, 20 bp, synthetic construct
  source 1..20: mol_type = other DNA
gaaagtgataatgtggaaaa

SEQ ID NO: 133161 - DNA, 20 bp, synthetic construct
  source 1..20: mol_type = other DNA
tgaaagtgataatgtggaaa

SEQ ID NO: 133162 - DNA, 20 bp, synthetic construct
  source 1..20: mol_type = other DNA
ttgaaagtgataatgtggaa

SEQ ID NO: 133163 - DNA, 20 bp, synthetic construct
  source 1..20: mol_type = other DNA
attgaaagtgataatgtgga

SEQ ID NO: 133164 - DNA, 20 bp, synthetic construct
  source 1..20: mol_type = other DNA
aattgaaagtgataatgtgg

SEQ ID NO: 133165 - DNA, 20 bp, synthetic construct
  source 1..20: mol_type = other DNA
aaattgaaagtgataatgtg

SEQ ID NO: 133166 - DNA, 20 bp, synthetic construct
  source 1..20: mol_type = other DNA
aaaattgaaagtgataatgt

SEQ ID NO: 133167 - DNA, 20 bp, synthetic construct
  source 1..20: mol_type = other DNA
caaaattgaaagtgataatg

SEQ ID NO: 133168 - DNA, 20 bp, synthetic construct
  source 1..20: mol_type = other DNA
acaaaattgaaagtgataat

SEQ ID NO: 133169 - DNA, 20 bp, synthetic construct
  source 1..20: mol_type = other DNA
tacaaaattgaaagtgataa

SEQ ID NO: 133170 - DNA, 20 bp, synthetic construct
  source 1..20: mol_type = other DNA
atacaaaattgaaagtgata

SEQ ID NO: 133171 - DNA, 20 bp, synthetic construct
  source 1..20: mol_type = other DNA
aatacaaaattgaaagtgat

SEQ ID NO: 133172 - DNA, 20 bp, synthetic construct
  source 1..20: mol_type = other DNA
caatacaaaattgaaagtga

SEQ ID NO: 133173 - DNA, 20 bp, synthetic construct
  source 1..20: mol_type = other DNA
acaatacaaaattgaaagtg

SEQ ID NO: 133174 - DNA, 20 bp, synthetic construct
  source 1..20: mol_type = other DNA
cacaatacaaaattgaaagt

SEQ ID NO: 133175 - DNA, 20 bp, synthetic construct
  source 1..20: mol_type = other DNA
ccacaatacaaaattgaaag

SEQ ID NO: 133176 - DNA, 20 bp, synthetic construct
  source 1..20: mol_type = other DNA
tccacaatacaaaattgaaa

SEQ ID NO: 133177 - DNA, 20 bp, synthetic construct
  source 1..20: mol_type = other DNA
atccacaatacaaaattgaa

SEQ ID NO: 133178 - DNA, 20 bp, synthetic construct
  source 1..20: mol_type = other DNA
aatccacaatacaaaattga

SEQ ID NO: 133179 - DNA, 20 bp, synthetic construct
  source 1..20: mol_type = other DNA
taatccacaatacaaaattg

SEQ ID NO: 133180 - DNA, 20 bp, synthetic construct
  source 1..20: mol_type = other DNA
gtaatccacaatacaaaatt

SEQ ID NO: 133181 - DNA, 20 bp, synthetic construct
  source 1..20: mol_type = other DNA
cgtaatccacaatacaaaat

SEQ ID NO: 133182 - DNA, 20 bp, synthetic construct
  source 1..20: mol_type = other DNA
gcgtaatccacaatacaaaa

SEQ ID NO: 133183 - DNA, 20 bp, synthetic construct
  source 1..20: mol_type = other DNA
tgcgtaatccacaatacaaa

SEQ ID NO: 133184 - DNA, 20 bp, synthetic construct
  source 1..20: mol_type = other DNA
atgcgtaatccacaatacaa

SEQ ID NO: 133185 - DNA, 20 bp, synthetic construct
  source 1..20: mol_type = other DNA
aatgcgtaatccacaataca

SEQ ID NO: 133186 - DNA, 20 bp, synthetic construct
  source 1..20: mol_type = other DNA
aaatgcgtaatccacaatac

SEQ ID NO: 133187 - DNA, 20 bp, synthetic construct
  source 1..20: mol_type = other DNA
aaaatgcgtaatccacaata

SEQ ID NO: 133188 - DNA, 20 bp, synthetic construct
  source 1..20: mol_type = other DNA
taaaatgcgtaatccacaat

SEQ ID NO: 133189 - DNA, 20 bp, synthetic construct
  source 1..20: mol_type = other DNA
ttaaaatgcgtaatccacaa

SEQ ID NO: 133190 - DNA, 20 bp, synthetic construct
  source 1..20: mol_type = other DNA
tttaaaatgcgtaatccaca

SEQ ID NO: 133191 - DNA, 20 bp, synthetic construct
  source 1..20: mol_type = other DNA
atttaaaatgcgtaatccac

SEQ ID NO: 133192 - DNA, 20 bp, synthetic construct
  source 1..20: mol_type = other DNA
tatttaaaatgcgtaatcca

SEQ ID NO: 133193 - DNA, 20 bp, synthetic construct
  source 1..20: mol_type = other DNA
ttatttaaaatgcgtaatcc

SEQ ID NO: 133194 - DNA, 20 bp, synthetic construct
  source 1..20: mol_type = other DNA
tttatttaaaatgcgtaatc

SEQ ID NO: 133195 - DNA, 20 bp, synthetic construct
  source 1..20: mol_type = other DNA
ttttatttaaaatgcgtaat

SEQ ID NO: 133196 - DNA, 20 bp, synthetic construct
  source 1..20: mol_type = other DNA
tttttatttaaaatgcgtaa

SEQ ID NO: 133197 - DNA, 20 bp, synthetic construct
  source 1..20: mol_type = other DNA
ttttttatttaaaatgcgta

SEQ ID NO: 133198 - DNA, 20 bp, synthetic construct
  source 1..20: mol_type = other DNA
attttttatttaaaatgcgt

SEQ ID NO: 133199 - DNA, 20 bp, synthetic construct
  source 1..20: mol_type = other DNA
aattttttatttaaaatgcg

SEQ ID NO: 133200 - DNA, 20 bp, synthetic construct
  source 1..20: mol_type = other DNA
caattttttatttaaaatgc

SEQ ID NO: 133201 - DNA, 20 bp, synthetic construct
  source 1..20: mol_type = other DNA
acaattttttatttaaaatg

SEQ ID NO: 133202 - DNA, 20 bp, synthetic construct
  source 1..20: mol_type = other DNA
cacaattttttatttaaaat

SEQ ID NO: 133203 - DNA, 20 bp, synthetic construct
  source 1..20: mol_type = other DNA
acacaattttttatttaaaa

SEQ ID NO: 133204 - DNA, 20 bp, synthetic construct
  source 1..20: mol_type = other DNA
cacacaattttttatttaaa

SEQ ID NO: 133205 - DNA, 20 bp, synthetic construct
  source 1..20: mol_type = other DNA
tcacacaattttttatttaa

SEQ ID NO: 133206 - DNA, 20 bp, synthetic construct
  source 1..20: mol_type = other DNA
atcacacaattttttattta

SEQ ID NO: 133207 - DNA, 20 bp, synthetic construct
  source 1..20: mol_type = other DNA
aatcacacaattttttattt

SEQ ID NO: 133208 - DNA, 20 bp, synthetic construct
  source 1..20: mol_type = other DNA
caatcacacaattttttatt

SEQ ID NO: 133209 - DNA, 20 bp, synthetic construct
  source 1..20: mol_type = other DNA
gcaatcacacaattttttat

SEQ ID NO: 133210 - DNA, 20 bp, synthetic construct
  source 1..20: mol_type = other DNA
agcaatcacacaatttttta

SEQ ID NO: 133211 - DNA, 20 bp, synthetic construct
  source 1..20: mol_type = other DNA
tagcaatcacacaatttttt

SEQ ID NO: 133212 - DNA, 20 bp, synthetic construct
  source 1..20: mol_type = other DNA
gtagcaatcacacaattttt

SEQ ID NO: 133213 - DNA, 20 bp, synthetic construct
  source 1..20: mol_type = other DNA
tgtagcaatcacacaatttt

SEQ ID NO: 133214 - DNA, 20 bp, synthetic construct
  source 1..20: mol_type = other DNA
atgtagcaatcacacaattt

SEQ ID NO: 133215 - DNA, 20 bp, synthetic construct
  source 1..20: mol_type = other DNA
aatgtagcaatcacacaatt

SEQ ID NO: 133216 - DNA, 20 bp, synthetic construct
  source 1..20: mol_type = other DNA
aaatgtagcaatcacacaat

SEQ ID NO: 133217 - DNA, 20 bp, synthetic construct
  source 1..20: mol_type = other DNA
aaaatgtagcaatcacacaa

SEQ ID NO: 133218 - DNA, 20 bp, synthetic construct
  source 1..20: mol_type = other DNA
caaaatgtagcaatcacaca

SEQ ID NO: 133219 - DNA, 20 bp, synthetic construct
  source 1..20: mol_type = other DNA
ccaaaatgtagcaatcacac

SEQ ID NO: 133220 - DNA, 20 bp, synthetic construct
  source 1..20: mol_type = other DNA
tccaaaatgtagcaatcaca

SEQ ID NO: 133221 - DNA, 20 bp, synthetic construct
  source 1..20: mol_type = other DNA
ttccaaaatgtagcaatcac

SEQ ID NO: 133222 - DNA, 20 bp, synthetic construct
  source 1..20: mol_type = other DNA
tttccaaaatgtagcaatca

SEQ ID NO: 133223 - DNA, 20 bp, synthetic construct
  source 1..20: mol_type = other DNA
ttttccaaaatgtagcaatc

SEQ ID NO: 133224 - DNA, 20 bp, synthetic construct
  source 1..20: mol_type = other DNA
gttttccaaaatgtagcaat

SEQ ID NO: 133225 - DNA, 20 bp, synthetic construct
  source 1..20: mol_type = other DNA
tgttttccaaaatgtagcaa

SEQ ID NO: 133226 - DNA, 20 bp, synthetic construct
  source 1..20: mol_type = other DNA
atgttttccaaaatgtagca

SEQ ID NO: 133227 - DNA, 20 bp, synthetic construct
  source 1..20: mol_type = other DNA
aatgttttccaaaatgtagc

SEQ ID NO: 133228 - DNA, 20 bp, synthetic construct
  source 1..20: mol_type = other DNA
aaatgttttccaaaatgtag

SEQ ID NO: 133229 - DNA, 20 bp, synthetic construct
  source 1..20: mol_type = other DNA
aaaatgttttccaaaatgta

SEQ ID NO: 133230 - DNA, 20 bp, synthetic construct
  source 1..20: mol_type = other DNA
aaaaatgttttccaaaatgt

SEQ ID NO: 133231 - DNA, 20 bp, synthetic construct
  source 1..20: mol_type = other DNA
aaaaaatgttttccaaaatg

SEQ ID NO: 133232 - DNA, 20 bp, synthetic construct
  source 1..20: mol_type = other DNA
aaaaaaatgttttccaaaat

SEQ ID NO: 133233 - DNA, 20 bp, synthetic construct
  source 1..20: mol_type = other DNA
gaaaaaaatgttttccaaaa

SEQ ID NO: 133234 - DNA, 20 bp, synthetic construct
  source 1..20: mol_type = other DNA
tgaaaaaaatgttttccaaa

SEQ ID NO: 133235 - DNA, 20 bp, synthetic construct
  source 1..20: mol_type = other DNA
ttgaaaaaaatgttttccaa

SEQ ID NO: 133236 - DNA, 20 bp, synthetic construct
  source 1..20: mol_type = other DNA
cttgaaaaaaatgttttcca

SEQ ID NO: 133237 - DNA, 20 bp, synthetic construct
  source 1..20: mol_type = other DNA
tcttgaaaaaaatgttttcc

SEQ ID NO: 133238 - DNA, 20 bp, synthetic construct
  source 1..20: mol_type = other DNA
ctcttgaaaaaaatgttttc

SEQ ID NO: 133239 - DNA, 20 bp, synthetic construct
  source 1..20: mol_type = other DNA
cctcttgaaaaaaatgtttt

SEQ ID NO: 133240 - DNA, 20 bp, synthetic construct
  source 1..20: mol_type = other DNA
gcctcttgaaaaaaatgttt

SEQ ID NO: 133241 - DNA, 20 bp, synthetic construct
  source 1..20: mol_type = other DNA
ggcctcttgaaaaaaatgtt

SEQ ID NO: 133242 - DNA, 20 bp, synthetic construct
  source 1..20: mol_type = other DNA
gggcctcttgaaaaaaatgt

SEQ ID NO: 133243 - DNA, 20 bp, synthetic construct
  source 1..20: mol_type = other DNA
tgggcctcttgaaaaaaatg

SEQ ID NO: 133244 - DNA, 20 bp, synthetic construct
  source 1..20: mol_type = other DNA
atgggcctcttgaaaaaaat

SEQ ID NO: 133245 - DNA, 20 bp, synthetic construct
  source 1..20: mol_type = other DNA
gatgggcctcttgaaaaaaa

SEQ ID NO: 133246 - DNA, 20 bp, synthetic construct
  source 1..20: mol_type = other DNA
ggatgggcctcttgaaaaaa

SEQ ID NO: 133247 - DNA, 20 bp, synthetic construct
  source 1..20: mol_type = other DNA
cggatgggcctcttgaaaaa

SEQ ID NO: 133248 - DNA, 20 bp, synthetic construct
  source 1..20: mol_type = other DNA
acggatgggcctcttgaaaa

SEQ ID NO: 133249 - DNA, 20 bp, synthetic construct
  source 1..20: mol_type = other DNA
tacggatgggcctcttgaaa

SEQ ID NO: 133250 - DNA, 20 bp, synthetic construct
  source 1..20: mol_type = other DNA
ttacggatgggcctcttgaa

SEQ ID NO: 133251 - DNA, 20 bp, synthetic construct
  source 1..20: mol_type = other DNA
attacggatgggcctcttga

SEQ ID NO: 133252 - DNA, 20 bp, synthetic construct
  source 1..20: mol_type = other DNA
aattacggatgggcctcttg

SEQ ID NO: 133253 - DNA, 20 bp, synthetic construct
  source 1..20: mol_type = other DNA
aaattacggatgggcctctt

SEQ ID NO: 133254 - DNA, 20 bp, synthetic construct
  source 1..20: mol_type = other DNA
taaattacggatgggcctct

SEQ ID NO: 133255 - DNA, 20 bp, synthetic construct
  source 1..20: mol_type = other DNA
ttaaattacggatgggcctc

SEQ ID NO: 133256 - DNA, 20 bp, synthetic construct
  source 1..20: mol_type = other DNA
attaaattacggatgggcct

SEQ ID NO: 133257 - DNA, 20 bp, synthetic construct
  source 1..20: mol_type = other DNA
aattaaattacggatgggcc

SEQ ID NO: 133258 - DNA, 20 bp, synthetic construct
  source 1..20: mol_type = other DNA
caattaaattacggatgggc

SEQ ID NO: 133259 - DNA, 20 bp, synthetic construct
  source 1..20: mol_type = other DNA
acaattaaattacggatggg

SEQ ID NO: 133260 - DNA, 20 bp, synthetic construct
  source 1..20: mol_type = other DNA
tacaattaaattacggatgg

SEQ ID NO: 133261 - DNA, 20 bp, synthetic construct
  source 1..20: mol_type = other DNA
ttacaattaaattacggatg

SEQ ID NO: 133262 - DNA, 20 bp, synthetic construct
  source 1..20: mol_type = other DNA
tttacaattaaattacggat

SEQ ID NO: 133263 - DNA, 20 bp, synthetic construct
  source 1..20: mol_type = other DNA
ttttacaattaaattacgga

SEQ ID NO: 133264 - DNA, 20 bp, synthetic construct
  source 1..20: mol_type = other DNA
cttttacaattaaattacgg

SEQ ID NO: 133265 - DNA, 20 bp, synthetic construct
  source 1..20: mol_type = other DNA
tcttttacaattaaattacg

SEQ ID NO: 133266 - DNA, 20 bp, synthetic construct
  source 1..20: mol_type = other DNA
atcttttacaattaaattac

SEQ ID NO: 133267 - DNA, 20 bp, synthetic construct
  source 1..20: mol_type = other DNA
tatcttttacaattaaatta

SEQ ID NO: 133268 - DNA, 20 bp, synthetic construct
  source 1..20: mol_type = other DNA
gtatcttttacaattaaatt

SEQ ID NO: 133269 - DNA, 20 bp, synthetic construct
  source 1..20: mol_type = other DNA
agtatcttttacaattaaat

SEQ ID NO: 133270 - DNA, 20 bp, synthetic construct
  source 1..20: mol_type = other DNA
cagtatcttttacaattaaa

SEQ ID NO: 133271 - DNA, 20 bp, synthetic construct
  source 1..20: mol_type = other DNA
tcagtatcttttacaattaa

SEQ ID NO: 133272 - DNA, 20 bp, synthetic construct
  source 1..20: mol_type = other DNA
gtcagtatcttttacaatta

SEQ ID NO: 133273 - DNA, 20 bp, synthetic construct
  source 1..20: mol_type = other DNA
tgtcagtatcttttacaatt

SEQ ID NO: 133274 - DNA, 20 bp, synthetic construct
  source 1..20: mol_type = other DNA
ttgtcagtatcttttacaat

SEQ ID NO: 133275 - DNA, 20 bp, synthetic construct
  source 1..20: mol_type = other DNA
tttgtcagtatcttttacaa

SEQ ID NO: 133276 - DNA, 20 bp, synthetic construct
  source 1..20: mol_type = other DNA
gtttgtcagtatcttttaca

SEQ ID NO: 133277 - DNA, 20 bp, synthetic construct
  source 1..20: mol_type = other DNA
agtttgtcagtatcttttac

SEQ ID NO: 133278 - DNA, 20 bp, synthetic construct
  source 1..20: mol_type = other DNA
tagtttgtcagtatctttta

SEQ ID NO: 133279 - DNA, 20 bp, synthetic construct
  source 1..20: mol_type = other DNA
ttagtttgtcagtatctttt

SEQ ID NO: 133280 - DNA, 20 bp, synthetic construct
  source 1..20: mol_type = other DNA
gttagtttgtcagtatcttt

SEQ ID NO: 133281 - DNA, 20 bp, synthetic construct
  source 1..20: mol_type = other DNA
agttagtttgtcagtatctt

SEQ ID NO: 133282 - DNA, 20 bp, synthetic construct
  source 1..20: mol_type = other DNA
aagttagtttgtcagtatct

SEQ ID NO: 133283 - DNA, 20 bp, synthetic construct
  source 1..20: mol_type = other DNA
caagttagtttgtcagtatc

SEQ ID NO: 133284 - DNA, 20 bp, synthetic construct
  source 1..20: mol_type = other DNA
ccaagttagtttgtcagtat

SEQ ID NO: 133285 - DNA, 20 bp, synthetic construct
  source 1..20: mol_type = other DNA
accaagttagtttgtcagta

SEQ ID NO: 133286 - DNA, 20 bp, synthetic construct
  source 1..20: mol_type = other DNA
aaccaagttagtttgtcagt

SEQ ID NO: 133287 - DNA, 20 bp, synthetic construct
  source 1..20: mol_type = other DNA
aaaccaagttagtttgtcag

SEQ ID NO: 133288 - DNA, 20 bp, synthetic construct
  source 1..20: mol_type = other DNA
taaaccaagttagtttgtca

SEQ ID NO: 133289 - DNA, 20 bp, synthetic construct
  source 1..20: mol_type = other DNA
ataaaccaagttagtttgtc

SEQ ID NO: 133290 - DNA, 20 bp, synthetic construct
  source 1..20: mol_type = other DNA
aataaaccaagttagtttgt

SEQ ID NO: 133291 - DNA, 20 bp, synthetic construct
  source 1..20: mol_type = other DNA
taataaaccaagttagtttg

SEQ ID NO: 133292 - DNA, 20 bp, synthetic construct
  source 1..20: mol_type = other DNA
ataataaaccaagttagttt

SEQ ID NO: 133293 - DNA, 20 bp, synthetic construct
  source 1..20: mol_type = other DNA
aataataaaccaagttagtt

SEQ ID NO: 133294 - DNA, 20 bp, synthetic construct
  source 1..20: mol_type = other DNA
aaataataaaccaagttagt

SEQ ID NO: 133295 - DNA, 20 bp, synthetic construct
  source 1..20: mol_type = other DNA
aaaataataaaccaagttag

SEQ ID NO: 133296 - DNA, 20 bp, synthetic construct
  source 1..20: mol_type = other DNA
caaaataataaaccaagtta

SEQ ID NO: 133297 - DNA, 20 bp, synthetic construct
  source 1..20: mol_type = other DNA
ccaaaataataaaccaagtt

SEQ ID NO: 133298 - DNA, 20 bp, synthetic construct
  source 1..20: mol_type = other DNA
accaaaataataaaccaagt

SEQ ID NO: 133299 - DNA, 20 bp, synthetic construct
  source 1..20: mol_type = other DNA
aaccaaaataataaaccaag

SEQ ID NO: 133300 - DNA, 20 bp, synthetic construct
  source 1..20: mol_type = other DNA
taaccaaaataataaaccaa

SEQ ID NO: 133301 - DNA, 20 bp, synthetic construct
  source 1..20: mol_type = other DNA
ataaccaaaataataaacca

SEQ ID NO: 133302 - DNA, 20 bp, synthetic construct
  source 1..20: mol_type = other DNA
cataaccaaaataataaacc

SEQ ID NO: 133303 - DNA, 20 bp, synthetic construct
  source 1..20: mol_type = other DNA
tcataaccaaaataataaac

SEQ ID NO: 133304 - DNA, 20 bp, synthetic construct
  source 1..20: mol_type = other DNA
gtcataaccaaaataataaa

SEQ ID NO: 133305 - DNA, 20 bp, synthetic construct
  source 1..20: mol_type = other DNA
ggtcataaccaaaataataa

SEQ ID NO: 133306 - DNA, 20 bp, synthetic construct
  source 1..20: mol_type = other DNA
gggtcataaccaaaataata

SEQ ID NO: 133307 - DNA, 20 bp, synthetic construct
  source 1..20: mol_type = other DNA
ggggtcataaccaaaataat

SEQ ID NO: 133308 - DNA, 20 bp, synthetic construct
  source 1..20: mol_type = other DNA
cggggtcataaccaaaataa

SEQ ID NO: 133309 - DNA, 20 bp, synthetic construct
  source 1..20: mol_type = other DNA
acggggtcataaccaaaata

SEQ ID NO: 133310 - DNA, 20 bp, synthetic construct
  source 1..20: mol_type = other DNA
gacggggtcataaccaaaat

SEQ ID NO: 133311 - DNA, 20 bp, synthetic construct
  source 1..20: mol_type = other DNA
tgacggggtcataaccaaaa

SEQ ID NO: 133312 - DNA, 20 bp, synthetic construct
  source 1..20: mol_type = other DNA
atgacggggtcataaccaaa

SEQ ID NO: 133313 - DNA, 20 bp, synthetic construct
  source 1..20: mol_type = other DNA
aatgacggggtcataaccaa

SEQ ID NO: 133314 - DNA, 20 bp, synthetic construct
  source 1..20: mol_type = other DNA
aaatgacggggtcataacca

SEQ ID NO: 133315 - DNA, 20 bp, synthetic construct
  source 1..20: mol_type = other DNA
caaatgacggggtcataacc

SEQ ID NO: 133316 - DNA, 20 bp, synthetic construct
  source 1..20: mol_type = other DNA
tcaaatgacggggtcataac

SEQ ID NO: 133317 - DNA, 20 bp, synthetic construct
  source 1..20: mol_type = other DNA
gtcaaatgacggggtcataa

SEQ ID NO: 133318 - DNA, 20 bp, synthetic construct
  source 1..20: mol_type = other DNA
agtcaaatgacggggtcata

SEQ ID NO: 133319 - DNA, 20 bp, synthetic construct
  source 1..20: mol_type = other DNA
aagtcaaatgacggggtcat

SEQ ID NO: 133320 - DNA, 20 bp, synthetic construct
  source 1..20: mol_type = other DNA
caagtcaaatgacggggtca

SEQ ID NO: 133321 - DNA, 20 bp, synthetic construct
  source 1..20: mol_type = other DNA
acaagtcaaatgacggggtc

SEQ ID NO: 133322 - DNA, 20 bp, synthetic construct
  source 1..20: mol_type = other DNA
gacaagtcaaatgacggggt

SEQ ID NO: 133323 - DNA, 20 bp, synthetic construct
  source 1..20: mol_type = other DNA
agacaagtcaaatgacgggg

SEQ ID NO: 133324 - DNA, 20 bp, synthetic construct
  source 1..20: mol_type = other DNA
aagacaagtcaaatgacggg

SEQ ID NO: 133325 - DNA, 20 bp, synthetic construct
  source 1..20: mol_type = other DNA
aaagacaagtcaaatgacgg

SEQ ID NO: 133326 - DNA, 20 bp, synthetic construct
  source 1..20: mol_type = other DNA
taaagacaagtcaaatgacg

SEQ ID NO: 133327 - DNA, 20 bp, synthetic construct
  source 1..20: mol_type = other DNA
ctaaagacaagtcaaatgac

SEQ ID NO: 133328 - DNA, 20 bp, synthetic construct
  source 1..20: mol_type = other DNA
actaaagacaagtcaaatga

SEQ ID NO: 133329 - DNA, 20 bp, synthetic construct
  source 1..20: mol_type = other DNA
aactaaagacaagtcaaatg

SEQ ID NO: 133330 - DNA, 20 bp, synthetic construct
  source 1..20: mol_type = other DNA
caactaaagacaagtcaaat

SEQ ID NO: 133331 - DNA, 20 bp, synthetic construct
  source 1..20: mol_type = other DNA
acaactaaagacaagtcaaa

SEQ ID NO: 133332 - DNA, 20 bp, synthetic construct
  source 1..20: mol_type = other DNA
gacaactaaagacaagtcaa

SEQ ID NO: 133333 - DNA, 20 bp, synthetic construct
  source 1..20: mol_type = other DNA
agacaactaaagacaagtca

SEQ ID NO: 133334 - DNA, 20 bp, synthetic construct
  source 1..20: mol_type = other DNA
aagacaactaaagacaagtc

SEQ ID NO: 133335 - DNA, 20 bp, synthetic construct
  source 1..20: mol_type = other DNA
taagacaactaaagacaagt

SEQ ID NO: 133336 - DNA, 20 bp, synthetic construct
  source 1..20: mol_type = other DNA
ttaagacaactaaagacaag

SEQ ID NO: 133337 - DNA, 20 bp, synthetic construct
  source 1..20: mol_type = other DNA
gttaagacaactaaagacaa

SEQ ID NO: 133338 - DNA, 20 bp, synthetic construct
  source 1..20: mol_type = other DNA
cgttaagacaactaaagaca

SEQ ID NO: 133339 - DNA, 20 bp, synthetic construct
  source 1..20: mol_type = other DNA
ccgttaagacaactaaagac

SEQ ID NO: 133340 - DNA, 20 bp, synthetic construct
  source 1..20: mol_type = other DNA
cccgttaagacaactaaaga

SEQ ID NO: 133341 - DNA, 20 bp, synthetic construct
  source 1..20: mol_type = other DNA
ccccgttaagacaactaaag

SEQ ID NO: 133342 - DNA, 20 bp, synthetic construct
  source 1..20: mol_type = other DNA
tccccgttaagacaactaaa

SEQ ID NO: 133343 - DNA, 20 bp, synthetic construct
  source 1..20: mol_type = other DNA
gtccccgttaagacaactaa

SEQ ID NO: 133344 - DNA, 20 bp, synthetic construct
  source 1..20: mol_type = other DNA
agtccccgttaagacaacta

SEQ ID NO: 133345 - DNA, 20 bp, synthetic construct
  source 1..20: mol_type = other DNA
cagtccccgttaagacaact

SEQ ID NO: 133346 - DNA, 20 bp, synthetic construct
  source 1..20: mol_type = other DNA
tcagtccccgttaagacaac

SEQ ID NO: 133347 - DNA, 20 bp, synthetic construct
  source 1..20: mol_type = other DNA
ttcagtccccgttaagacaa

SEQ ID NO: 133348 - DNA, 20 bp, synthetic construct
  source 1..20: mol_type = other DNA
attcagtccccgttaagaca

SEQ ID NO: 133349 - DNA, 20 bp, synthetic construct
  source 1..20: mol_type = other DNA
tattcagtccccgttaagac

SEQ ID NO: 133350 - DNA, 20 bp, synthetic construct
  source 1..20: mol_type = other DNA
atattcagtccccgttaaga

SEQ ID NO: 133351 - DNA, 20 bp, synthetic construct
  source 1..20: mol_type = other DNA
catattcagtccccgttaag

SEQ ID NO: 133352 - DNA, 20 bp, synthetic construct
  source 1..20: mol_type = other DNA
gcatattcagtccccgttaa

SEQ ID NO: 133353 - DNA, 20 bp, synthetic construct
  source 1..20: mol_type = other DNA
cgcatattcagtccccgtta

SEQ ID NO: 133354 - DNA, 20 bp, synthetic construct
  source 1..20: mol_type = other DNA
acgcatattcagtccccgtt

SEQ ID NO: 133355 - DNA, 20 bp, synthetic construct
  source 1..20: mol_type = other DNA
cacgcatattcagtccccgt

SEQ ID NO: 133356 - DNA, 20 bp, synthetic construct
  source 1..20: mol_type = other DNA
gcacgcatattcagtccccg

SEQ ID NO: 133357 - DNA, 20 bp, synthetic construct
  source 1..20: mol_type = other DNA
tgcacgcatattcagtcccc

SEQ ID NO: 133358 - DNA, 20 bp, synthetic construct
  source 1..20: mol_type = other DNA
ttgcacgcatattcagtccc

SEQ ID NO: 133359 - DNA, 20 bp, synthetic construct
  source 1..20: mol_type = other DNA
tttgcacgcatattcagtcc

SEQ ID NO: 133360 - DNA, 20 bp, synthetic construct
  source 1..20: mol_type = other DNA
ctttgcacgcatattcagtc

SEQ ID NO: 133361 - DNA, 20 bp, synthetic construct
  source 1..20: mol_type = other DNA
cctttgcacgcatattcagt

SEQ ID NO: 133362 - DNA, 20 bp, synthetic construct
  source 1..20: mol_type = other DNA
gcctttgcacgcatattcag

SEQ ID NO: 133363 - DNA, 20 bp, synthetic construct
  source 1..20: mol_type = other DNA
tgcctttgcacgcatattca

SEQ ID NO: 133364 - DNA, 20 bp, synthetic construct
  source 1..20: mol_type = other DNA
gtgcctttgcacgcatattc

SEQ ID NO: 133365 - DNA, 20 bp, synthetic construct
  source 1..20: mol_type = other DNA
cgtgcctttgcacgcatatt

SEQ ID NO: 133366 - DNA, 20 bp, synthetic construct
  source 1..20: mol_type = other DNA
tcgtgcctttgcacgcatat

SEQ ID NO: 133367 - DNA, 20 bp, synthetic construct
  source 1..20: mol_type = other DNA
atcgtgcctttgcacgcata

SEQ ID NO: 133368 - DNA, 20 bp, synthetic construct
  source 1..20: mol_type = other DNA
aatcgtgcctttgcacgcat

SEQ ID NO: 133369 - DNA, 20 bp, synthetic construct
  source 1..20: mol_type = other DNA
caatcgtgcctttgcacgca

SEQ ID NO: 133370 - DNA, 20 bp, synthetic construct
  source 1..20: mol_type = other DNA
tcaatcgtgcctttgcacgc

SEQ ID NO: 133371 - DNA, 20 bp, synthetic construct
  source 1..20: mol_type = other DNA
atcaatcgtgcctttgcacg

SEQ ID NO: 133372 - DNA, 20 bp, synthetic construct
  source 1..20: mol_type = other DNA
aatcaatcgtgcctttgcac

SEQ ID NO: 133373 - DNA, 20 bp, synthetic construct
  source 1..20: mol_type = other DNA
aaatcaatcgtgcctttgca

SEQ ID NO: 133374 - DNA, 20 bp, synthetic construct
  source 1..20: mol_type = other DNA
taaatcaatcgtgcctttgc

SEQ ID NO: 133375 - DNA, 20 bp, synthetic construct
  source 1..20: mol_type = other DNA
ataaatcaatcgtgcctttg

SEQ ID NO: 133376 - DNA, 20 bp, synthetic construct
  source 1..20: mol_type = other DNA
gataaatcaatcgtgccttt

SEQ ID NO: 133377 - DNA, 20 bp, synthetic construct
  source 1..20: mol_type = other DNA
tgataaatcaatcgtgcctt

SEQ ID NO: 133378 - DNA, 20 bp, synthetic construct
  source 1..20: mol_type = other DNA
atgataaatcaatcgtgcct

SEQ ID NO: 133379 - DNA, 20 bp, synthetic construct
  source 1..20: mol_type = other DNA
catgataaatcaatcgtgcc

SEQ ID NO: 133380 - DNA, 20 bp, synthetic construct
  source 1..20: mol_type = other DNA
gcatgataaatcaatcgtgc

SEQ ID NO: 133381 - DNA, 20 bp, synthetic construct
  source 1..20: mol_type = other DNA
agcatgataaatcaatcgtg

SEQ ID NO: 133382 - DNA, 20 bp, synthetic construct
  source 1..20: mol_type = other DNA
cagcatgataaatcaatcgt

SEQ ID NO: 133383 - DNA, 20 bp, synthetic construct
  source 1..20: mol_type = other DNA
ccagcatgataaatcaatcg

SEQ ID NO: 133384 - DNA, 20 bp, synthetic construct
  source 1..20: mol_type = other DNA
gccagcatgataaatcaatc

SEQ ID NO: 133385 - DNA, 20 bp, synthetic construct
  source 1..20: mol_type = other DNA
agccagcatgataaatcaat

SEQ ID NO: 133386 - DNA, 20 bp, synthetic construct
  source 1..20: mol_type = other DNA
aagccagcatgataaatcaa

SEQ ID NO: 133387 - DNA, 20 bp, synthetic construct
  source 1..20: mol_type = other DNA
aaagccagcatgataaatca

SEQ ID NO: 133388 - DNA, 20 bp, synthetic construct
  source 1..20: mol_type = other DNA
aaaagccagcatgataaatc

SEQ ID NO: 133389 - DNA, 20 bp, synthetic construct
  source 1..20: mol_type = other DNA
taaaagccagcatgataaat

SEQ ID NO: 133390 - DNA, 20 bp, synthetic construct
  source 1..20: mol_type = other DNA
ataaaagccagcatgataaa

SEQ ID NO: 133391 - DNA, 20 bp, synthetic construct
  source 1..20: mol_type = other DNA
cataaaagccagcatgataa

SEQ ID NO: 133392 - DNA, 20 bp, synthetic construct
  source 1..20: mol_type = other DNA
gcataaaagccagcatgata

SEQ ID NO: 133393 - DNA, 20 bp, synthetic construct
  source 1..20: mol_type = other DNA
tgcataaaagccagcatgat

SEQ ID NO: 133394 - DNA, 20 bp, synthetic construct
  source 1..20: mol_type = other DNA
ttgcataaaagccagcatga

SEQ ID NO: 133395 - DNA, 20 bp, synthetic construct
  source 1..20: mol_type = other DNA
gttgcataaaagccagcatg

SEQ ID NO: 133396 - DNA, 20 bp, synthetic construct
  source 1..20: mol_type = other DNA
agttgcataaaagccagcat

SEQ ID NO: 133397 - DNA, 20 bp, synthetic construct
  source 1..20: mol_type = other DNA
aagttgcataaaagccagca

SEQ ID NO: 133398 - DNA, 20 bp, synthetic construct
  source 1..20: mol_type = other DNA
caagttgcataaaagccagc

SEQ ID NO: 133399 - DNA, 20 bp, synthetic construct
  source 1..20: mol_type = other DNA
acaagttgcataaaagccag

SEQ ID NO: 133400 - DNA, 20 bp, synthetic construct
  source 1..20: mol_type = other DNA
tacaagttgcataaaagcca

SEQ ID NO: 133401 - DNA, 20 bp, synthetic construct
  source 1..20: mol_type = other DNA
atacaagttgcataaaagcc

SEQ ID NO: 133402 - DNA, 20 bp, synthetic construct
  source 1..20: mol_type = other DNA
tatacaagttgcataaaagc

SEQ ID NO: 133403 - DNA, 20 bp, synthetic construct
  source 1..20: mol_type = other DNA
atatacaagttgcataaaag

SEQ ID NO: 133404 - DNA, 20 bp, synthetic construct
  source 1..20: mol_type = other DNA
tatatacaagttgcataaaa

SEQ ID NO: 133405 - DNA, 20 bp, synthetic construct
  source 1..20: mol_type = other DNA
atatatacaagttgcataaa

SEQ ID NO: 133406 - DNA, 20 bp, synthetic construct
  source 1..20: mol_type = other DNA
aatatatacaagttgcataa

SEQ ID NO: 133407 - DNA, 20 bp, synthetic construct
  source 1..20: mol_type = other DNA
aaatatatacaagttgcata

SEQ ID NO: 133408 - DNA, 20 bp, synthetic construct
  source 1..20: mol_type = other DNA
aaaatatatacaagttgcat

SEQ ID NO: 133409 - DNA, 20 bp, synthetic construct
  source 1..20: mol_type = other DNA
taaaatatatacaagttgca

SEQ ID NO: 133410 - DNA, 20 bp, synthetic construct
  source 1..20: mol_type = other DNA
ttaaaatatatacaagttgc

SEQ ID NO: 133411 - DNA, 20 bp, synthetic construct
  source 1..20: mol_type = other DNA
gttaaaatatatacaagttg

SEQ ID NO: 133412 - DNA, 20 bp, synthetic construct
  source 1..20: mol_type = other DNA
tgttaaaatatatacaagtt

SEQ ID NO: 133413 - DNA, 20 bp, synthetic construct
  source 1..20: mol_type = other DNA
ttgttaaaatatatacaagt

SEQ ID NO: 133414 - DNA, 20 bp, synthetic construct
  source 1..20: mol_type = other DNA
attgttaaaatatatacaag

SEQ ID NO: 133415 - DNA, 20 bp, synthetic construct
  source 1..20: mol_type = other DNA
aattgttaaaatatatacaa

SEQ ID NO: 133416 - DNA, 20 bp, synthetic construct
  source 1..20: mol_type = other DNA
aaattgttaaaatatataca

SEQ ID NO: 133417 - DNA, 20 bp, synthetic construct
  source 1..20: mol_type = other DNA
aaaattgttaaaatatatac

SEQ ID NO: 133418 - DNA, 20 bp, synthetic construct
  source 1..20: mol_type = other DNA
gaaaattgttaaaatatata

SEQ ID NO: 133419 - DNA, 20 bp, synthetic construct
  source 1..20: mol_type = other DNA
ggaaaattgttaaaatatat

SEQ ID NO: 133420 - DNA, 20 bp, synthetic construct
  source 1..20: mol_type = other DNA
aggaaaattgttaaaatata

SEQ ID NO: 133421 - DNA, 20 bp, synthetic construct
  source 1..20: mol_type = other DNA
caggaaaattgttaaaatat

SEQ ID NO: 133422 - DNA, 20 bp, synthetic construct
  source 1..20: mol_type = other DNA
acaggaaaattgttaaaata

SEQ ID NO: 133423 - DNA, 20 bp, synthetic construct
  source 1..20: mol_type = other DNA
aacaggaaaattgttaaaat

SEQ ID NO: 133424 - DNA, 20 bp, synthetic construct
  source 1..20: mol_type = other DNA
aaacaggaaaattgttaaaa

SEQ ID NO: 133425 - DNA, 20 bp, synthetic construct
  source 1..20: mol_type = other DNA
caaacaggaaaattgttaaa

SEQ ID NO: 133426 - DNA, 20 bp, synthetic construct
  source 1..20: mol_type = other DNA
gcaaacaggaaaattgttaa

SEQ ID NO: 133427 - DNA, 20 bp, synthetic construct
  source 1..20: mol_type = other DNA
agcaaacaggaaaattgtta

SEQ ID NO: 133428 - DNA, 20 bp, synthetic construct
  source 1..20: mol_type = other DNA
tagcaaacaggaaaattgtt

SEQ ID NO: 133429 - DNA, 20 bp, synthetic construct
  source 1..20: mol_type = other DNA
ttagcaaacaggaaaattgt

SEQ ID NO: 133430 - DNA, 20 bp, synthetic construct
  source 1..20: mol_type = other DNA
tttagcaaacaggaaaattg

SEQ ID NO: 133431 - DNA, 20 bp, synthetic construct
  source 1..20: mol_type = other DNA
ctttagcaaacaggaaaatt

SEQ ID NO: 133432 - DNA, 20 bp, synthetic construct
  source 1..20: mol_type = other DNA
cctttagcaaacaggaaaat

SEQ ID NO: 133433 - DNA, 20 bp, synthetic construct
  source 1..20: mol_type = other DNA
gcctttagcaaacaggaaaa

SEQ ID NO: 133434 - DNA, 20 bp, synthetic construct
  source 1..20: mol_type = other DNA
agcctttagcaaacaggaaa

SEQ ID NO: 133435 - DNA, 20 bp, synthetic construct
  source 1..20: mol_type = other DNA
aagcctttagcaaacaggaa

SEQ ID NO: 133436 - DNA, 20 bp, synthetic construct
  source 1..20: mol_type = other DNA
taagcctttagcaaacagga

SEQ ID NO: 133437 - DNA, 20 bp, synthetic construct
  source 1..20: mol_type = other DNA
ctaagcctttagcaaacagg

SEQ ID NO: 133438 - DNA, 20 bp, synthetic construct
  source 1..20: mol_type = other DNA
cctaagcctttagcaaacag

SEQ ID NO: 133439 - DNA, 20 bp, synthetic construct
  source 1..20: mol_type = other DNA
acctaagcctttagcaaaca

SEQ ID NO: 133440 - DNA, 20 bp, synthetic construct
  source 1..20: mol_type = other DNA
aacctaagcctttagcaaac

SEQ ID NO: 133441 - DNA, 20 bp, synthetic construct
  source 1..20: mol_type = other DNA
taacctaagcctttagcaaa

SEQ ID NO: 133442 - DNA, 20 bp, synthetic construct
  source 1..20: mol_type = other DNA
ttaacctaagcctttagcaa

SEQ ID NO: 133443 - DNA, 20 bp, synthetic construct
  source 1..20: mol_type = other DNA
tttaacctaagcctttagca

SEQ ID NO: 133444 - DNA, 20 bp, synthetic construct
  source 1..20: mol_type = other DNA
ttttaacctaagcctttagc

SEQ ID NO: 133445 - DNA, 20 bp, synthetic construct
  source 1..20: mol_type = other DNA
cttttaacctaagcctttag

SEQ ID NO: 133446 - DNA, 20 bp, synthetic construct
  source 1..20: mol_type = other DNA
acttttaacctaagccttta

SEQ ID NO: 133447 - DNA, 20 bp, synthetic construct
  source 1..20: mol_type = other DNA
aacttttaacctaagccttt

SEQ ID NO: 133448 - DNA, 20 bp, synthetic construct
  source 1..20: mol_type = other DNA
gaacttttaacctaagcctt

SEQ ID NO: 133449 - DNA, 20 bp, synthetic construct
  source 1..20: mol_type = other DNA
tgaacttttaacctaagcct

SEQ ID NO: 133450 - DNA, 20 bp, synthetic construct
  source 1..20: mol_type = other DNA
atgaacttttaacctaagcc

SEQ ID NO: 133451 - DNA, 20 bp, synthetic construct
  source 1..20: mol_type = other DNA
aatgaacttttaacctaagc

SEQ ID NO: 133452 - DNA, 20 bp, synthetic construct
  source 1..20: mol_type = other DNA
taatgaacttttaacctaag

SEQ ID NO: 133453 - DNA, 20 bp, synthetic construct
  source 1..20: mol_type = other DNA
ataatgaacttttaacctaa

SEQ ID NO: 133454 - DNA, 20 bp, synthetic construct
  source 1..20: mol_type = other DNA
cataatgaacttttaaccta

SEQ ID NO: 133455 - DNA, 20 bp, synthetic construct
  source 1..20: mol_type = other DNA
tcataatgaacttttaacct

SEQ ID NO: 133456 - DNA, 20 bp, synthetic construct
  source 1..20: mol_type = other DNA
atcataatgaacttttaacc

SEQ ID NO: 133457 - DNA, 20 bp, synthetic construct
  source 1..20: mol_type = other DNA
aatcataatgaacttttaac

SEQ ID NO: 133458 - DNA, 20 bp, synthetic construct
  source 1..20: mol_type = other DNA
caatcataatgaacttttaa

SEQ ID NO: 133459 - DNA, 20 bp, synthetic construct
  source 1..20: mol_type = other DNA
acaatcataatgaactttta

SEQ ID NO: 133460 - DNA, 20 bp, synthetic construct
  source 1..20: mol_type = other DNA
aacaatcataatgaactttt

SEQ ID NO: 133461 - DNA, 20 bp, synthetic construct
  source 1..20: mol_type = other DNA
aaacaatcataatgaacttt

SEQ ID NO: 133462 - DNA, 20 bp, synthetic construct
  source 1..20: mol_type = other DNA
taaacaatcataatgaactt

SEQ ID NO: 133463 - DNA, 20 bp, synthetic construct
  source 1..20: mol_type = other DNA
ataaacaatcataatgaact

SEQ ID NO: 133464 - DNA, 20 bp, synthetic construct
  source 1..20: mol_type = other DNA
tataaacaatcataatgaac

SEQ ID NO: 133465 - DNA, 20 bp, synthetic construct
  source 1..20: mol_type = other DNA
gtataaacaatcataatgaa

SEQ ID NO: 133466 - DNA, 20 bp, synthetic construct
  source 1..20: mol_type = other DNA
tgtataaacaatcataatga

SEQ ID NO: 133467 - DNA, 20 bp, synthetic construct
  source 1..20: mol_type = other DNA
atgtataaacaatcataatg

SEQ ID NO: 133468 - DNA, 20 bp, synthetic construct
  source 1..20: mol_type = other DNA
aatgtataaacaatcataat

SEQ ID NO: 133469 - DNA, 20 bp, synthetic construct
  source 1..20: mol_type = other DNA
aaatgtataaacaatcataa

SEQ ID NO: 133470 - DNA, 20 bp, synthetic construct
  source 1..20: mol_type = other DNA
gaaatgtataaacaatcata

SEQ ID NO: 133471 - DNA, 20 bp, synthetic construct
  source 1..20: mol_type = other DNA
agaaatgtataaacaatcat

SEQ ID NO: 133472 - DNA, 20 bp, synthetic construct
  source 1..20: mol_type = other DNA
cagaaatgtataaacaatca

SEQ ID NO: 133473 - DNA, 20 bp, synthetic construct
  source 1..20: mol_type = other DNA
ccagaaatgtataaacaatc

SEQ ID NO: 133474 - DNA, 20 bp, synthetic construct
  source 1..20: mol_type = other DNA
accagaaatgtataaacaat

SEQ ID NO: 133475 - DNA, 20 bp, synthetic construct
  source 1..20: mol_type = other DNA
caccagaaatgtataaacaa

SEQ ID NO: 133476 - DNA, 20 bp, synthetic construct
  source 1..20: mol_type = other DNA
tcaccagaaatgtataaaca

SEQ ID NO: 133477 - DNA, 20 bp, synthetic construct
  source 1..20: mol_type = other DNA
ttcaccagaaatgtataaac

SEQ ID NO: 133478 - DNA, 20 bp, synthetic construct
  source 1..20: mol_type = other DNA
attcaccagaaatgtataaa

SEQ ID NO: 133479 - DNA, 20 bp, synthetic construct
  source 1..20: mol_type = other DNA
tattcaccagaaatgtataa

SEQ ID NO: 133480 - DNA, 20 bp, synthetic construct
  source 1..20: mol_type = other DNA
gtattcaccagaaatgtata

SEQ ID NO: 133481 - DNA, 20 bp, synthetic construct
  source 1..20: mol_type = other DNA
tgtattcaccagaaatgtat

SEQ ID NO: 133482 - DNA, 20 bp, synthetic construct
  source 1..20: mol_type = other DNA
atgtattcaccagaaatgta

SEQ ID NO: 133483 - DNA, 20 bp, synthetic construct
  source 1..20: mol_type = other DNA
gatgtattcaccagaaatgt

SEQ ID NO: 133484 - DNA, 20 bp, synthetic construct
  source 1..20: mol_type = other DNA
tgatgtattcaccagaaatg

SEQ ID NO: 133485 - DNA, 20 bp, synthetic construct
  source 1..20: mol_type = other DNA
atgatgtattcaccagaaat

SEQ ID NO: 133486 - DNA, 20 bp, synthetic construct
  source 1..20: mol_type = other DNA
catgatgtattcaccagaaa

SEQ ID NO: 133487 - DNA, 20 bp, synthetic construct
  source 1..20: mol_type = other DNA
tcatgatgtattcaccagaa

SEQ ID NO: 133488 - DNA, 20 bp, synthetic construct
  source 1..20: mol_type = other DNA
atcatgatgtattcaccaga

SEQ ID NO: 133489 - DNA, 20 bp, synthetic construct
  source 1..20: mol_type = other DNA
aatcatgatgtattcaccag

SEQ ID NO: 133490 - DNA, 20 bp, synthetic construct
  source 1..20: mol_type = other DNA
aaatcatgatgtattcacca

SEQ ID NO: 133491 - DNA, 20 bp, synthetic construct
  source 1..20: mol_type = other DNA
taaatcatgatgtattcacc

SEQ ID NO: 133492 - DNA, 20 bp, synthetic construct
  source 1..20: mol_type = other DNA
ttaaatcatgatgtattcac

SEQ ID NO: 133493 - DNA, 20 bp, synthetic construct
  source 1..20: mol_type = other DNA
gttaaatcatgatgtattca

SEQ ID NO: 133494 - DNA, 20 bp, synthetic construct
  source 1..20: mol_type = other DNA
tgttaaatcatgatgtattc

SEQ ID NO: 133495 - DNA, 20 bp, synthetic construct
  source 1..20: mol_type = other DNA
ttgttaaatcatgatgtatt

SEQ ID NO: 133496 - DNA, 20 bp, synthetic construct
  source 1..20: mol_type = other DNA
cttgttaaatcatgatgtat

SEQ ID NO: 133497 - DNA, 20 bp, synthetic construct
  source 1..20: mol_type = other DNA
acttgttaaatcatgatgta

SEQ ID NO: 133498 - DNA, 20 bp, synthetic construct
  source 1..20: mol_type = other DNA
cacttgttaaatcatgatgt

SEQ ID NO: 133499 - DNA, 20 bp, synthetic construct
  source 1..20: mol_type = other DNA
ccacttgttaaatcatgatg

SEQ ID NO: 133500 - DNA, 20 bp, synthetic construct
  source 1..20: mol_type = other DNA
tccacttgttaaatcatgat

SEQ ID NO: 133501 - DNA, 20 bp, synthetic construct
  source 1..20: mol_type = other DNA
ttccacttgttaaatcatga

SEQ ID NO: 133502 - DNA, 20 bp, synthetic construct
  source 1..20: mol_type = other DNA
tttccacttgttaaatcatg

SEQ ID NO: 133503 - DNA, 20 bp, synthetic construct
  source 1..20: mol_type = other DNA
ctttccacttgttaaatcat

SEQ ID NO: 133504 - DNA, 20 bp, synthetic construct
  source 1..20: mol_type = other DNA
tctttccacttgttaaatca

SEQ ID NO: 133505 - DNA, 20 bp, synthetic construct
  source 1..20: mol_type = other DNA
ttctttccacttgttaaatc

SEQ ID NO: 133506 - DNA, 20 bp, synthetic construct
  source 1..20: mol_type = other DNA
gttctttccacttgttaaat

SEQ ID NO: 133507 - DNA, 20 bp, synthetic construct
  source 1..20: mol_type = other DNA
tgttctttccacttgttaaa

SEQ ID NO: 133508 - DNA, 20 bp, synthetic construct
  source 1..20: mol_type = other DNA
atgttctttccacttgttaa

SEQ ID NO: 133509 - DNA, 20 bp, synthetic construct
  source 1..20: mol_type = other DNA
gatgttctttccacttgtta

SEQ ID NO: 133510 - DNA, 20 bp, synthetic construct
  source 1..20: mol_type = other DNA
agatgttctttccacttgtt

SEQ ID NO: 133511 - DNA, 20 bp, synthetic construct
  source 1..20: mol_type = other DNA
gagatgttctttccacttgt

SEQ ID NO: 133512 - DNA, 20 bp, synthetic construct
  source 1..20: mol_type = other DNA
agagatgttctttccacttg

SEQ ID NO: 133513 - DNA, 20 bp, synthetic construct
  source 1..20: mol_type = other DNA
aagagatgttctttccactt

SEQ ID NO: 133514 - DNA, 20 bp, synthetic construct
  source 1..20: mol_type = other DNA
aaagagatgttctttccact

SEQ ID NO: 133515 - DNA, 20 bp, synthetic construct
  source 1..20: mol_type = other DNA
gaaagagatgttctttccac

SEQ ID NO: 133516 - DNA, 20 bp, synthetic construct
  source 1..20: mol_type = other DNA
ggaaagagatgttctttcca

SEQ ID NO: 133517 - DNA, 20 bp, synthetic construct
  source 1..20: mol_type = other DNA
aggaaagagatgttctttcc

SEQ ID NO: 133518 - DNA, 20 bp, synthetic construct
  source 1..20: mol_type = other DNA
aaggaaagagatgttctttc

SEQ ID NO: 133519 - DNA, 20 bp, synthetic construct
  source 1..20: mol_type = other DNA
gaaggaaagagatgttcttt

SEQ ID NO: 133520 - DNA, 20 bp, synthetic construct
  source 1..20: mol_type = other DNA
ggaaggaaagagatgttctt

SEQ ID NO: 133521 - DNA, 20 bp, synthetic construct
  source 1..20: mol_type = other DNA
tggaaggaaagagatgttct

SEQ ID NO: 133522 - DNA, 20 bp, synthetic construct
  source 1..20: mol_type = other DNA
atggaaggaaagagatgttc

SEQ ID NO: 133523 - DNA, 20 bp, synthetic construct
  source 1..20: mol_type = other DNA
aatggaaggaaagagatgtt

SEQ ID NO: 133524 - DNA, 20 bp, synthetic construct
  source 1..20: mol_type = other DNA
aaatggaaggaaagagatgt

SEQ ID NO: 133525 - DNA, 20 bp, synthetic construct
  source 1..20: mol_type = other DNA
aaaatggaaggaaagagatg

SEQ ID NO: 133526 - DNA, 20 bp, synthetic construct
  source 1..20: mol_type = other DNA
gaaaatggaaggaaagagat

SEQ ID NO: 133527 - DNA, 20 bp, synthetic construct
  source 1..20: mol_type = other DNA
agaaaatggaaggaaagaga

SEQ ID NO: 133528 - DNA, 20 bp, synthetic construct
  source 1..20: mol_type = other DNA
cagaaaatggaaggaaagag

SEQ ID NO: 133529 - DNA, 20 bp, synthetic construct
  source 1..20: mol_type = other DNA
ccagaaaatggaaggaaaga

SEQ ID NO: 133530 - DNA, 20 bp, synthetic construct
  source 1..20: mol_type = other DNA
gccagaaaatggaaggaaag

SEQ ID NO: 133531 - DNA, 20 bp, synthetic construct
  source 1..20: mol_type = other DNA
tgccagaaaatggaaggaaa

SEQ ID NO: 133532 - DNA, 20 bp, synthetic construct
  source 1..20: mol_type = other DNA
atgccagaaaatggaaggaa

SEQ ID NO: 133533 - DNA, 20 bp, synthetic construct
  source 1..20: mol_type = other DNA
tatgccagaaaatggaagga

SEQ ID NO: 133534 - DNA, 20 bp, synthetic construct
  source 1..20: mol_type = other DNA
gtatgccagaaaatggaagg

SEQ ID NO: 133535 - DNA, 20 bp, synthetic construct
  source 1..20: mol_type = other DNA
agtatgccagaaaatggaag

SEQ ID NO: 133536 - DNA, 20 bp, synthetic construct
  source 1..20: mol_type = other DNA
gagtatgccagaaaatggaa

SEQ ID NO: 133537 - DNA, 20 bp, synthetic construct
  source 1..20: mol_type = other DNA
ggagtatgccagaaaatgga

SEQ ID NO: 133538 - DNA, 20 bp, synthetic construct
  source 1..20: mol_type = other DNA
gggagtatgccagaaaatgg

SEQ ID NO: 133539 - DNA, 20 bp, synthetic construct
  source 1..20: mol_type = other DNA
ggggagtatgccagaaaatg

SEQ ID NO: 133540 - DNA, 20 bp, synthetic construct
  source 1..20: mol_type = other DNA
aggggagtatgccagaaaat

SEQ ID NO: 133541 - DNA, 20 bp, synthetic construct
  source 1..20: mol_type = other DNA
aaggggagtatgccagaaaa

SEQ ID NO: 133542 - DNA, 20 bp, synthetic construct
  source 1..20: mol_type = other DNA
caaggggagtatgccagaaa

SEQ ID NO: 133543 - DNA, 20 bp, synthetic construct
  source 1..20: mol_type = other DNA
ccaaggggagtatgccagaa

SEQ ID NO: 133544 - DNA, 20 bp, synthetic construct
  source 1..20: mol_type = other DNA
tccaaggggagtatgccaga

SEQ ID NO: 133545 - DNA, 20 bp, synthetic construct
  source 1..20: mol_type = other DNA
ttccaaggggagtatgccag

SEQ ID NO: 133546 - DNA, 20 bp, synthetic construct
  source 1..20: mol_type = other DNA
attccaaggggagtatgcca

SEQ ID NO: 133547 - DNA, 20 bp, synthetic construct
  source 1..20: mol_type = other DNA
gattccaaggggagtatgcc

SEQ ID NO: 133548 - DNA, 20 bp, synthetic construct
  source 1..20: mol_type = other DNA
tgattccaaggggagtatgc

SEQ ID NO: 133549 - DNA, 20 bp, synthetic construct
  source 1..20: mol_type = other DNA
ctgattccaaggggagtatg

SEQ ID NO: 133550 - DNA, 20 bp, synthetic construct
  source 1..20: mol_type = other DNA
tctgattccaaggggagtat

SEQ ID NO: 133551 - DNA, 20 bp, synthetic construct
  source 1..20: mol_type = other DNA
atctgattccaaggggagta

SEQ ID NO: 133552 - DNA, 20 bp, synthetic construct
  source 1..20: mol_type = other DNA
gatctgattccaaggggagt

SEQ ID NO: 133553 - DNA, 20 bp, synthetic construct
  source 1..20: mol_type = other DNA
agatctgattccaaggggag

SEQ ID NO: 133554 - DNA, 20 bp, synthetic construct
  source 1..20: mol_type = other DNA
cagatctgattccaagggga

SEQ ID NO: 133555 - DNA, 20 bp, synthetic construct
  source 1..20: mol_type = other DNA
tcagatctgattccaagggg

SEQ ID NO: 133556 - DNA, 20 bp, synthetic construct
  source 1..20: mol_type = other DNA
ttcagatctgattccaaggg

SEQ ID NO: 133557 - DNA, 20 bp, synthetic construct
  source 1..20: mol_type = other DNA
tttcagatctgattccaagg

SEQ ID NO: 133558 - DNA, 20 bp, synthetic construct
  source 1..20: mol_type = other DNA
gtttcagatctgattccaag

SEQ ID NO: 133559 - DNA, 20 bp, synthetic construct
  source 1..20: mol_type = other DNA
agtttcagatctgattccaa

SEQ ID NO: 133560 - DNA, 20 bp, synthetic construct
  source 1..20: mol_type = other DNA
aagtttcagatctgattcca

SEQ ID NO: 133561 - DNA, 20 bp, synthetic construct
  source 1..20: mol_type = other DNA
aaagtttcagatctgattcc

SEQ ID NO: 133562 - DNA, 20 bp, synthetic construct
  source 1..20: mol_type = other DNA
aaaagtttcagatctgattc

SEQ ID NO: 133563 - DNA, 20 bp, synthetic construct
  source 1..20: mol_type = other DNA
taaaagtttcagatctgatt

SEQ ID NO: 133564 - DNA, 20 bp, synthetic construct
  source 1..20: mol_type = other DNA
ttaaaagtttcagatctgat

SEQ ID NO: 133565 - DNA, 20 bp, synthetic construct
  source 1..20: mol_type = other DNA
cttaaaagtttcagatctga

SEQ ID NO: 133566 - DNA, 20 bp, synthetic construct
  source 1..20: mol_type = other DNA
gcttaaaagtttcagatctg

SEQ ID NO: 133567 - DNA, 20 bp, synthetic construct
  source 1..20: mol_type = other DNA
agcttaaaagtttcagatct

SEQ ID NO: 133568 - DNA, 20 bp, synthetic construct
  source 1..20: mol_type = other DNA
tagcttaaaagtttcagatc

SEQ ID NO: 133569 - DNA, 20 bp, synthetic construct
  source 1..20: mol_type = other DNA
ttagcttaaaagtttcagat

SEQ ID NO: 133570 - DNA, 20 bp, synthetic construct
  source 1..20: mol_type = other DNA
tttagcttaaaagtttcaga

SEQ ID NO: 133571 - DNA, 20 bp, synthetic construct
  source 1..20: mol_type = other DNA
ttttagcttaaaagtttcag

SEQ ID NO: 133572 - DNA, 20 bp, synthetic construct
  source 1..20: mol_type = other DNA
attttagcttaaaagtttca

SEQ ID NO: 133573 - DNA, 20 bp, synthetic construct
  source 1..20: mol_type = other DNA
aattttagcttaaaagtttc

SEQ ID NO: 133574 - DNA, 20 bp, synthetic construct
  source 1..20: mol_type = other DNA
aaattttagcttaaaagttt

SEQ ID NO: 133575 - DNA, 20 bp, synthetic construct
  source 1..20: mol_type = other DNA
gaaattttagcttaaaagtt

SEQ ID NO: 133576 - DNA, 20 bp, synthetic construct
  source 1..20: mol_type = other DNA
ggaaattttagcttaaaagt

SEQ ID NO: 133577 - DNA, 20 bp, synthetic construct
  source 1..20: mol_type = other DNA
tggaaattttagcttaaaag

SEQ ID NO: 133578 - DNA, 20 bp, synthetic construct
  source 1..20: mol_type = other DNA
atggaaattttagcttaaaa

SEQ ID NO: 133579 - DNA, 20 bp, synthetic construct
  source 1..20: mol_type = other DNA
aatggaaattttagcttaaa

SEQ ID NO: 133580 - DNA, 20 bp, synthetic construct
  source 1..20: mol_type = other DNA
caatggaaattttagcttaa

SEQ ID NO: 133581 - DNA, 20 bp, synthetic construct
  source 1..20: mol_type = other DNA
gcaatggaaattttagctta

SEQ ID NO: 133582 - DNA, 20 bp, synthetic construct
  source 1..20: mol_type = other DNA
tgcaatggaaattttagctt

SEQ ID NO: 133583 - DNA, 20 bp, synthetic construct
  source 1..20: mol_type = other DNA
atgcaatggaaattttagct

SEQ ID NO: 133584 - DNA, 20 bp, synthetic construct
  source 1..20: mol_type = other DNA
aatgcaatggaaattttagc

SEQ ID NO: 133585 - DNA, 20 bp, synthetic construct
  source 1..20: mol_type = other DNA
aaatgcaatggaaattttag

SEQ ID NO: 133586 - DNA, 20 bp, synthetic construct
  source 1..20: mol_type = other DNA
caaatgcaatggaaatttta

SEQ ID NO: 133587 - DNA, 20 bp, synthetic construct
  source 1..20: mol_type = other DNA
ccaaatgcaatggaaatttt

SEQ ID NO: 133588 - DNA, 20 bp, synthetic construct
  source 1..20: mol_type = other DNA
tccaaatgcaatggaaattt

SEQ ID NO: 133589 - DNA, 20 bp, synthetic construct
  source 1..20: mol_type = other DNA
ctccaaatgcaatggaaatt

SEQ ID NO: 133590 - DNA, 20 bp, synthetic construct
  source 1..20: mol_type = other DNA
tctccaaatgcaatggaaat

SEQ ID NO: 133591 - DNA, 20 bp, synthetic construct
  source 1..20: mol_type = other DNA
ctctccaaatgcaatggaaa

SEQ ID NO: 133592 - DNA, 20 bp, synthetic construct
  source 1..20: mol_type = other DNA
actctccaaatgcaatggaa

SEQ ID NO: 133593 - DNA, 20 bp, synthetic construct
  source 1..20: mol_type = other DNA
tactctccaaatgcaatgga

SEQ ID NO: 133594 - DNA, 20 bp, synthetic construct
  source 1..20: mol_type = other DNA
ctactctccaaatgcaatgg

SEQ ID NO: 133595 - DNA, 20 bp, synthetic construct
  source 1..20: mol_type = other DNA
actactctccaaatgcaatg

SEQ ID NO: 133596 - DNA, 20 bp, synthetic construct
  source 1..20: mol_type = other DNA
aactactctccaaatgcaat

SEQ ID NO: 133597 - DNA, 20 bp, synthetic construct
  source 1..20: mol_type = other DNA
taactactctccaaatgcaa

SEQ ID NO: 133598 - DNA, 20 bp, synthetic construct
  source 1..20: mol_type = other DNA
ataactactctccaaatgca

SEQ ID NO: 133599 - DNA, 20 bp, synthetic construct
  source 1..20: mol_type = other DNA
aataactactctccaaatgc

SEQ ID NO: 133600 - DNA, 20 bp, synthetic construct
  source 1..20: mol_type = other DNA
aaataactactctccaaatg

SEQ ID NO: 133601 - DNA, 20 bp, synthetic construct
  source 1..20: mol_type = other DNA
caaataactactctccaaat

SEQ ID NO: 133602 - DNA, 20 bp, synthetic construct
  source 1..20: mol_type = other DNA
acaaataactactctccaaa

SEQ ID NO: 133603 - DNA, 20 bp, synthetic construct
  source 1..20: mol_type = other DNA
cacaaataactactctccaa

SEQ ID NO: 133604 - DNA, 20 bp, synthetic construct
  source 1..20: mol_type = other DNA
acacaaataactactctcca

SEQ ID NO: 133605 - DNA, 20 bp, synthetic construct
  source 1..20: mol_type = other DNA
tacacaaataactactctcc

SEQ ID NO: 133606 - DNA, 20 bp, synthetic construct
  source 1..20: mol_type = other DNA
atacacaaataactactctc

SEQ ID NO: 133607 - DNA, 20 bp, synthetic construct
  source 1..20: mol_type = other DNA
catacacaaataactactct

SEQ ID NO: 133608 - DNA, 20 bp, synthetic construct
  source 1..20: mol_type = other DNA
gcatacacaaataactactc

SEQ ID NO: 133609 - DNA, 20 bp, synthetic construct
  source 1..20: mol_type = other DNA
tgcatacacaaataactact

SEQ ID NO: 133610 - DNA, 20 bp, synthetic construct
  source 1..20: mol_type = other DNA
atgcatacacaaataactac

SEQ ID NO: 133611 - DNA, 20 bp, synthetic construct
  source 1..20: mol_type = other DNA
catgcatacacaaataacta

SEQ ID NO: 133612 - DNA, 20 bp, synthetic construct
  source 1..20: mol_type = other DNA
gcatgcatacacaaataact

SEQ ID NO: 133613 - DNA, 20 bp, synthetic construct
  source 1..20: mol_type = other DNA
agcatgcatacacaaataac

SEQ ID NO: 133614 - DNA, 20 bp, synthetic construct
  source 1..20: mol_type = other DNA
aagcatgcatacacaaataa

SEQ ID NO: 133615 - DNA, 20 bp, synthetic construct
  source 1..20: mol_type = other DNA
aaagcatgcatacacaaata

SEQ ID NO: 133616 - DNA, 20 bp, synthetic construct
  source 1..20: mol_type = other DNA
aaaagcatgcatacacaaat

SEQ ID NO: 133617 - DNA, 20 bp, synthetic construct
  source 1..20: mol_type = other DNA
caaaagcatgcatacacaaa

SEQ ID NO: 133618 - DNA, 20 bp, synthetic construct
  source 1..20: mol_type = other DNA
tcaaaagcatgcatacacaa

SEQ ID NO: 133619 - DNA, 20 bp, synthetic construct
  source 1..20: mol_type = other DNA
ctcaaaagcatgcatacaca

SEQ ID NO: 133620 - DNA, 20 bp, synthetic construct
  source 1..20: mol_type = other DNA
tctcaaaagcatgcatacac

SEQ ID NO: 133621 - DNA, 20 bp, synthetic construct
  source 1..20: mol_type = other DNA
gtctcaaaagcatgcataca

SEQ ID NO: 133622 - DNA, 20 bp, synthetic construct
  source 1..20: mol_type = other DNA
tgtctcaaaagcatgcatac

SEQ ID NO: 133623 - DNA, 20 bp, synthetic construct
  source 1..20: mol_type = other DNA
atgtctcaaaagcatgcata

SEQ ID NO: 133624 - DNA, 20 bp, synthetic construct
  source 1..20: mol_type = other DNA
aatgtctcaaaagcatgcat

SEQ ID NO: 133625 - DNA, 20 bp, synthetic construct
  source 1..20: mol_type = other DNA
caatgtctcaaaagcatgca

SEQ ID NO: 133626 - DNA, 20 bp, synthetic construct
  source 1..20: mol_type = other DNA
acaatgtctcaaaagcatgc

SEQ ID NO: 133627 - DNA, 20 bp, synthetic construct
  source 1..20: mol_type = other DNA
tacaatgtctcaaaagcatg

SEQ ID NO: 133628 - DNA, 20 bp, synthetic construct
  source 1..20: mol_type = other DNA
ctacaatgtctcaaaagcat

SEQ ID NO: 133629 - DNA, 20 bp, synthetic construct
  source 1..20: mol_type = other DNA
gctacaatgtctcaaaagca

SEQ ID NO: 133630 - DNA, 20 bp, synthetic construct
  source 1..20: mol_type = other DNA
tgctacaatgtctcaaaagc

SEQ ID NO: 133631 - DNA, 20 bp, synthetic construct
  source 1..20: mol_type = other DNA
ttgctacaatgtctcaaaag

SEQ ID NO: 133632 - DNA, 20 bp, synthetic construct
  source 1..20: mol_type = other DNA
attgctacaatgtctcaaaa

SEQ ID NO: 133633 - DNA, 20 bp, synthetic construct
  source 1..20: mol_type = other DNA
tattgctacaatgtctcaaa

SEQ ID NO: 133634 - DNA, 20 bp, synthetic construct
  source 1..20: mol_type = other DNA
ttattgctacaatgtctcaa

SEQ ID NO: 133635 - DNA, 20 bp, synthetic construct
  source 1..20: mol_type = other DNA
attattgctacaatgtctca

SEQ ID NO: 133636 - DNA, 20 bp, synthetic construct
  source 1..20: mol_type = other DNA
tattattgctacaatgtctc

SEQ ID NO: 133637 - DNA, 20 bp, synthetic construct
  source 1..20: mol_type = other DNA
gtattattgctacaatgtct

SEQ ID NO: 133638 - DNA, 20 bp, synthetic construct
  source 1..20: mol_type = other DNA
agtattattgctacaatgtc

SEQ ID NO: 133639 - DNA, 20 bp, synthetic construct
  source 1..20: mol_type = other DNA
cagtattattgctacaatgt

SEQ ID NO: 133640 - DNA, 20 bp, synthetic construct
  source 1..20: mol_type = other DNA
acagtattattgctacaatg

SEQ ID NO: 133641 - DNA, 20 bp, synthetic construct
  source 1..20: mol_type = other DNA
tacagtattattgctacaat

SEQ ID NO: 133642 - DNA, 20 bp, synthetic construct
  source 1..20: mol_type = other DNA
ttacagtattattgctacaa

SEQ ID NO: 133643 - DNA, 20 bp, synthetic construct
  source 1..20: mol_type = other DNA
attacagtattattgctaca

SEQ ID NO: 133644 - DNA, 20 bp, synthetic construct
  source 1..20: mol_type = other DNA
cattacagtattattgctac

SEQ ID NO: 133645 - DNA, 20 bp, synthetic construct
  source 1..20: mol_type = other DNA
acattacagtattattgcta

SEQ ID NO: 133646 - DNA, 20 bp, synthetic construct
  source 1..20: mol_type = other DNA
aacattacagtattattgct

SEQ ID NO: 133647 - DNA, 20 bp, synthetic construct
  source 1..20: mol_type = other DNA
caacattacagtattattgc

SEQ ID NO: 133648 - DNA, 20 bp, synthetic construct
  source 1..20: mol_type = other DNA
tcaacattacagtattattg

SEQ ID NO: 133649 - DNA, 20 bp, synthetic construct
  source 1..20: mol_type = other DNA
ctcaacattacagtattatt

SEQ ID NO: 133650 - DNA, 20 bp, synthetic construct
  source 1..20: mol_type = other DNA
gctcaacattacagtattat

SEQ ID NO: 133651 - DNA, 20 bp, synthetic construct
  source 1..20: mol_type = other DNA
ggctcaacattacagtatta

SEQ ID NO: 133652 - DNA, 20 bp, synthetic construct
  source 1..20: mol_type = other DNA
cggctcaacattacagtatt

SEQ ID NO: 133653 - DNA, 20 bp, synthetic construct
  source 1..20: mol_type = other DNA
tcggctcaacattacagtat

SEQ ID NO: 133654 - DNA, 20 bp, synthetic construct
  source 1..20: mol_type = other DNA
ttcggctcaacattacagta

SEQ ID NO: 133655 - DNA, 20 bp, synthetic construct
  source 1..20: mol_type = other DNA
attcggctcaacattacagt

SEQ ID NO: 133656 - DNA, 20 bp, synthetic construct
  source 1..20: mol_type = other DNA
gattcggctcaacattacag

SEQ ID NO: 133657 - DNA, 20 bp, synthetic construct
  source 1..20: mol_type = other DNA
agattcggctcaacattaca

SEQ ID NO: 133658 - DNA, 20 bp, synthetic construct
  source 1..20: mol_type = other DNA
aagattcggctcaacattac

SEQ ID NO: 133659 - DNA, 20 bp, synthetic construct
  source 1..20: mol_type = other DNA
aaagattcggctcaacatta

SEQ ID NO: 133660 - DNA, 20 bp, synthetic construct
  source 1..20: mol_type = other DNA
gaaagattcggctcaacatt

SEQ ID NO: 133661 - DNA, 20 bp, synthetic construct
  source 1..20: mol_type = other DNA
agaaagattcggctcaacat

SEQ ID NO: 133662 - DNA, 20 bp, synthetic construct
  source 1..20: mol_type = other DNA
gagaaagattcggctcaaca

SEQ ID NO: 133663 - DNA, 20 bp, synthetic construct
  source 1..20: mol_type = other DNA
ggagaaagattcggctcaac

SEQ ID NO: 133664 - DNA, 20 bp, synthetic construct
  source 1..20: mol_type = other DNA
aggagaaagattcggctcaa

SEQ ID NO: 133665 - DNA, 20 bp, synthetic construct
  source 1..20: mol_type = other DNA
gaggagaaagattcggctca

SEQ ID NO: 133666 - DNA, 20 bp, synthetic construct
  source 1..20: mol_type = other DNA
tgaggagaaagattcggctc

SEQ ID NO: 133667 - DNA, 20 bp, synthetic construct
  source 1..20: mol_type = other DNA
atgaggagaaagattcggct

SEQ ID NO: 133668 - DNA, 20 bp, synthetic construct
  source 1..20: mol_type = other DNA
aatgaggagaaagattcggc

SEQ ID NO: 133669 - DNA, 20 bp, synthetic construct
  source 1..20: mol_type = other DNA
caatgaggagaaagattcgg

SEQ ID NO: 133670 - DNA, 20 bp, synthetic construct
  source 1..20: mol_type = other DNA
acaatgaggagaaagattcg

SEQ ID NO: 133671 - DNA, 20 bp, synthetic construct
  source 1..20: mol_type = other DNA
cacaatgaggagaaagattc

SEQ ID NO: 133672 - DNA, 20 bp, synthetic construct
  source 1..20: mol_type = other DNA
acacaatgaggagaaagatt

SEQ ID NO: 133673 - DNA, 20 bp, synthetic construct
  source 1..20: mol_type = other DNA
aacacaatgaggagaaagat

SEQ ID NO: 133674 - DNA, 20 bp, synthetic construct
  source 1..20: mol_type = other DNA
gaacacaatgaggagaaaga

SEQ ID NO: 133675 - DNA, 20 bp, synthetic construct
  source 1..20: mol_type = other DNA
tgaacacaatgaggagaaag

SEQ ID NO: 133676 - DNA, 20 bp, synthetic construct
  source 1..20: mol_type = other DNA
atgaacacaatgaggagaaa

SEQ ID NO: 133677 - DNA, 20 bp, synthetic construct
  source 1..20: mol_type = other DNA
aatgaacacaatgaggagaa

SEQ ID NO: 133678 - DNA, 20 bp, synthetic construct
  source 1..20: mol_type = other DNA
gaatgaacacaatgaggaga

SEQ ID NO: 133679 - DNA, 20 bp, synthetic construct
  source 1..20: mol_type = other DNA
tgaatgaacacaatgaggag

SEQ ID NO: 133680 - DNA, 20 bp, synthetic construct
  source 1..20: mol_type = other DNA
gtgaatgaacacaatgagga

SEQ ID NO: 133681 - DNA, 20 bp, synthetic construct
  source 1..20: mol_type = other DNA
agtgaatgaacacaatgagg

SEQ ID NO: 133682 - DNA, 20 bp, synthetic construct
  source 1..20: mol_type = other DNA
cagtgaatgaacacaatgag

SEQ ID NO: 133683 - DNA, 20 bp, synthetic construct
  source 1..20: mol_type = other DNA
gcagtgaatgaacacaatga

SEQ ID NO: 133684 - DNA, 20 bp, synthetic construct
  source 1..20: mol_type = other DNA
ggcagtgaatgaacacaatg

SEQ ID NO: 133685 - DNA, 20 bp, synthetic construct
  source 1..20: mol_type = other DNA
tggcagtgaatgaacacaat

SEQ ID NO: 133686 - DNA, 20 bp, synthetic construct
  source 1..20: mol_type = other DNA
ttggcagtgaatgaacacaa

SEQ ID NO: 133687 - DNA, 20 bp, synthetic construct
  source 1..20: mol_type = other DNA
gttggcagtgaatgaacaca

SEQ ID NO: 133688 - DNA, 20 bp, synthetic construct
  source 1..20: mol_type = other DNA
tgttggcagtgaatgaacac

SEQ ID NO: 133689 - DNA, 20 bp, synthetic construct
  source 1..20: mol_type = other DNA
atgttggcagtgaatgaaca

SEQ ID NO: 133690 - DNA, 20 bp, synthetic construct
  source 1..20: mol_type = other DNA
gatgttggcagtgaatgaac

SEQ ID NO: 133691 - DNA, 20 bp, synthetic construct
  source 1..20: mol_type = other DNA
agatgttggcagtgaatgaa

SEQ ID NO: 133692 - DNA, 20 bp, synthetic construct
  source 1..20: mol_type = other DNA
cagatgttggcagtgaatga

SEQ ID NO: 133693 - DNA, 20 bp, synthetic construct
  source 1..20: mol_type = other DNA
ccagatgttggcagtgaatg

SEQ ID NO: 133694 - DNA, 20 bp, synthetic construct
  source 1..20: mol_type = other DNA
gccagatgttggcagtgaat

SEQ ID NO: 133695 - DNA, 20 bp, synthetic construct
  source 1..20: mol_type = other DNA
agccagatgttggcagtgaa

SEQ ID NO: 133696 - DNA, 20 bp, synthetic construct
  source 1..20: mol_type = other DNA
aagccagatgttggcagtga

SEQ ID NO: 133697 - DNA, 20 bp, synthetic construct
  source 1..20: mol_type = other DNA
gaagccagatgttggcagtg

SEQ ID NO: 133698 - DNA, 20 bp, synthetic construct
  source 1..20: mol_type = other DNA
tgaagccagatgttggcagt

SEQ ID NO: 133699 - DNA, 20 bp, synthetic construct
  source 1..20: mol_type = other DNA
atgaagccagatgttggcag

SEQ ID NO: 133700 - DNA, 20 bp, synthetic construct
  source 1..20: mol_type = other DNA
gatgaagccagatgttggca

SEQ ID NO: 133701 - DNA, 20 bp, synthetic construct
  source 1..20: mol_type = other DNA
agatgaagccagatgttggc

SEQ ID NO: 133702 - DNA, 20 bp, synthetic construct
  source 1..20: mol_type = other DNA
aagatgaagccagatgttgg

SEQ ID NO: 133703 - DNA, 20 bp, synthetic construct
  source 1..20: mol_type = other DNA
aaagatgaagccagatgttg

SEQ ID NO: 133704 - DNA, 20 bp, synthetic construct
  source 1..20: mol_type = other DNA
aaaagatgaagccagatgtt

SEQ ID NO: 133705 - DNA, 20 bp, synthetic construct
  source 1..20: mol_type = other DNA
caaaagatgaagccagatgt

SEQ ID NO: 133706 - DNA, 20 bp, synthetic construct
  source 1..20: mol_type = other DNA
ccaaaagatgaagccagatg

SEQ ID NO: 133707 - DNA, 20 bp, synthetic construct
  source 1..20: mol_type = other DNA
tccaaaagatgaagccagat

SEQ ID NO: 133708 - DNA, 20 bp, synthetic construct
  source 1..20: mol_type = other DNA
atccaaaagatgaagccaga

SEQ ID NO: 133709 - DNA, 20 bp, synthetic construct
  source 1..20: mol_type = other DNA
catccaaaagatgaagccag

SEQ ID NO: 133710 - DNA, 20 bp, synthetic construct
  source 1..20: mol_type = other DNA
tcatccaaaagatgaagcca

SEQ ID NO: 133711 - DNA, 20 bp, synthetic construct
  source 1..20: mol_type = other DNA
ttcatccaaaagatgaagcc

SEQ ID NO: 133712 - DNA, 20 bp, synthetic construct
  source 1..20: mol_type = other DNA
attcatccaaaagatgaagc

SEQ ID NO: 133713 - DNA, 20 bp, synthetic construct
  source 1..20: mol_type = other DNA
cattcatccaaaagatgaag

SEQ ID NO: 133714 - DNA, 20 bp, synthetic construct
  source 1..20: mol_type = other DNA
acattcatccaaaagatgaa

SEQ ID NO: 133715 - DNA, 20 bp, synthetic construct
  source 1..20: mol_type = other DNA
aacattcatccaaaagatga

SEQ ID NO: 133716 - DNA, 20 bp, synthetic construct
  source 1..20: mol_type = other DNA
gaacattcatccaaaagatg

SEQ ID NO: 133717 - DNA, 20 bp, synthetic construct
  source 1..20: mol_type = other DNA
tgaacattcatccaaaagat

SEQ ID NO: 133718 - DNA, 20 bp, synthetic construct
  source 1..20: mol_type = other DNA
atgaacattcatccaaaaga

SEQ ID NO: 133719 - DNA, 20 bp, synthetic construct
  source 1..20: mol_type = other DNA
aatgaacattcatccaaaag

SEQ ID NO: 133720 - DNA, 20 bp, synthetic construct
  source 1..20: mol_type = other DNA
caatgaacattcatccaaaa

SEQ ID NO: 133721 - DNA, 20 bp, synthetic construct
  source 1..20: mol_type = other DNA
ccaatgaacattcatccaaa

SEQ ID NO: 133722 - DNA, 20 bp, synthetic construct
  source 1..20: mol_type = other DNA
accaatgaacattcatccaa

SEQ ID NO: 133723 - DNA, 20 bp, synthetic construct
  source 1..20: mol_type = other DNA
aaccaatgaacattcatcca

SEQ ID NO: 133724 - DNA, 20 bp, synthetic construct
  source 1..20: mol_type = other DNA
aaaccaatgaacattcatcc

SEQ ID NO: 133725 - DNA, 20 bp, synthetic construct
  source 1..20: mol_type = other DNA
aaaaccaatgaacattcatc

SEQ ID NO: 133726 - DNA, 20 bp, synthetic construct
  source 1..20: mol_type = other DNA
caaaaccaatgaacattcat

SEQ ID NO: 133727 - DNA, 20 bp, synthetic construct
  source 1..20: mol_type = other DNA
tcaaaaccaatgaacattca

SEQ ID NO: 133728 - DNA, 20 bp, synthetic construct
  source 1..20: mol_type = other DNA
ttcaaaaccaatgaacattc

SEQ ID NO: 133729 - DNA, 20 bp, synthetic construct
  source 1..20: mol_type = other DNA
tttcaaaaccaatgaacatt

SEQ ID NO: 133730 - DNA, 20 bp, synthetic construct
  source 1..20: mol_type = other DNA
gtttcaaaaccaatgaacat

SEQ ID NO: 133731 - DNA, 20 bp, synthetic construct
  source 1..20: mol_type = other DNA
tgtttcaaaaccaatgaaca

SEQ ID NO: 133732 - DNA, 20 bp, synthetic construct
  source 1..20: mol_type = other DNA
ctgtttcaaaaccaatgaac

SEQ ID NO: 133733 - DNA, 20 bp, synthetic construct
  source 1..20: mol_type = other DNA
gctgtttcaaaaccaatgaa

SEQ ID NO: 133734 - DNA, 20 bp, synthetic construct
  source 1..20: mol_type = other DNA
ggctgtttcaaaaccaatga

SEQ ID NO: 133735 - DNA, 20 bp, synthetic construct
  source 1..20: mol_type = other DNA
aggctgtttcaaaaccaatg

SEQ ID NO: 133736 - DNA, 20 bp, synthetic construct
  source 1..20: mol_type = other DNA
taggctgtttcaaaaccaat

SEQ ID NO: 133737 - DNA, 20 bp, synthetic construct
  source 1..20: mol_type = other DNA
ataggctgtttcaaaaccaa

SEQ ID NO: 133738 - DNA, 20 bp, synthetic construct
  source 1..20: mol_type = other DNA
tataggctgtttcaaaacca

SEQ ID NO: 133739 - DNA, 20 bp, synthetic construct
  source 1..20: mol_type = other DNA
ctataggctgtttcaaaacc

SEQ ID NO: 133740 - DNA, 20 bp, synthetic construct
  source 1..20: mol_type = other DNA
cctataggctgtttcaaaac

SEQ ID NO: 133741 - DNA, 20 bp, synthetic construct
  source 1..20: mol_type = other DNA
ccctataggctgtttcaaaa

SEQ ID NO: 133742 - DNA, 20 bp, synthetic construct
  source 1..20: mol_type = other DNA
accctataggctgtttcaaa

SEQ ID NO: 133743 - DNA, 20 bp, synthetic construct
  source 1..20: mol_type = other DNA
taccctataggctgtttcaa

SEQ ID NO: 133744 - DNA, 20 bp, synthetic construct
  source 1..20: mol_type = other DNA
ttaccctataggctgtttca

SEQ ID NO: 133745 - DNA, 20 bp, synthetic construct
  source 1..20: mol_type = other DNA
tttaccctataggctgtttc

SEQ ID NO: 133746 - DNA, 20 bp, synthetic construct
  source 1..20: mol_type = other DNA
atttaccctataggctgttt

SEQ ID NO: 133747 - DNA, 20 bp, synthetic construct
  source 1..20: mol_type = other DNA
tatttaccctataggctgtt

SEQ ID NO: 133748 - DNA, 20 bp, synthetic construct
  source 1..20: mol_type = other DNA
gtatttaccctataggctgt

SEQ ID NO: 133749 - DNA, 20 bp, synthetic construct
  source 1..20: mol_type = other DNA
agtatttaccctataggctg

SEQ ID NO: 133750 - DNA, 20 bp, synthetic construct
  source 1..20: mol_type = other DNA
cagtatttaccctataggct

SEQ ID NO: 133751 - DNA, 20 bp, synthetic construct
  source 1..20: mol_type = other DNA
acagtatttaccctataggc

SEQ ID NO: 133752 - DNA, 20 bp, synthetic construct
  source 1..20: mol_type = other DNA
cacagtatttaccctatagg

SEQ ID NO: 133753 - DNA, 20 bp, synthetic construct
  source 1..20: mol_type = other DNA
acacagtatttaccctatag

SEQ ID NO: 133754 - DNA, 20 bp, synthetic construct
  source 1..20: mol_type = other DNA
aacacagtatttaccctata

SEQ ID NO: 133755 - DNA, 20 bp, synthetic construct
  source 1..20: mol_type = other DNA
aaacacagtatttaccctat

SEQ ID NO: 133756 - DNA, 20 bp, synthetic construct
  source 1..20: mol_type = other DNA
caaacacagtatttacccta

SEQ ID NO: 133757 - DNA, 20 bp, synthetic construct
  source 1..20: mol_type = other DNA
tcaaacacagtatttaccct

SEQ ID NO: 133758 - DNA, 20 bp, synthetic construct
  source 1..20: mol_type = other DNA
ctcaaacacagtatttaccc

SEQ ID NO: 133759 - DNA, 20 bp, synthetic construct
  source 1..20: mol_type = other DNA
cctcaaacacagtatttacc

SEQ ID NO: 133760 - DNA, 20 bp, synthetic construct
  source 1..20: mol_type = other DNA
acctcaaacacagtatttac

SEQ ID NO: 133761 - DNA, 20 bp, synthetic construct
  source 1..20: mol_type = other DNA
tacctcaaacacagtattta

SEQ ID NO: 133762 - DNA, 20 bp, synthetic construct
  source 1..20: mol_type = other DNA
gtacctcaaacacagtattt

SEQ ID NO: 133763 - DNA, 20 bp, synthetic construct
  source 1..20: mol_type = other DNA
tgtacctcaaacacagtatt

SEQ ID NO: 133764 - DNA, 20 bp, synthetic construct
  source 1..20: mol_type = other DNA
ctgtacctcaaacacagtat

SEQ ID NO: 133765 - DNA, 20 bp, synthetic construct
  source 1..20: mol_type = other DNA
tctgtacctcaaacacagta

SEQ ID NO: 133766 - DNA, 20 bp, synthetic construct
  source 1..20: mol_type = other DNA
atctgtacctcaaacacagt

SEQ ID NO: 133767 - DNA, 20 bp, synthetic construct
  source 1..20: mol_type = other DNA
catctgtacctcaaacacag

SEQ ID NO: 133768 - DNA, 20 bp, synthetic construct
  source 1..20: mol_type = other DNA
tcatctgtacctcaaacaca

SEQ ID NO: 133769 - DNA, 20 bp, synthetic construct
  source 1..20: mol_type = other DNA
atcatctgtacctcaaacac

SEQ ID NO: 133770 - DNA, 20 bp, synthetic construct
  source 1..20: mol_type = other DNA
aatcatctgtacctcaaaca

SEQ ID NO: 133771 - DNA, 20 bp, synthetic construct
  source 1..20: mol_type = other DNA
aaatcatctgtacctcaaac

SEQ ID NO: 133772 - DNA, 20 bp, synthetic construct
  source 1..20: mol_type = other DNA
aaaatcatctgtacctcaaa

SEQ ID NO: 133773 - DNA, 20 bp, synthetic construct
  source 1..20: mol_type = other DNA
gaaaatcatctgtacctcaa

SEQ ID NO: 133774 - DNA, 20 bp, synthetic construct
  source 1..20: mol_type = other DNA
tgaaaatcatctgtacctca

SEQ ID NO: 133775 - DNA, 20 bp, synthetic construct
  source 1..20: mol_type = other DNA
atgaaaatcatctgtacctc

SEQ ID NO: 133776 - DNA, 20 bp, synthetic construct
  source 1..20: mol_type = other DNA
tatgaaaatcatctgtacct

SEQ ID NO: 133777 - DNA, 20 bp, synthetic construct
  source 1..20: mol_type = other DNA
ttatgaaaatcatctgtacc

SEQ ID NO: 133778 - DNA, 20 bp, synthetic construct
  source 1..20: mol_type = other DNA
gttatgaaaatcatctgtac

SEQ ID NO: 133779 - DNA, 20 bp, synthetic construct
  source 1..20: mol_type = other DNA
agttatgaaaatcatctgta

SEQ ID NO: 133780 - DNA, 20 bp, synthetic construct
  source 1..20: mol_type = other DNA
tagttatgaaaatcatctgt

SEQ ID NO: 133781 - DNA, 20 bp, synthetic construct
  source 1..20: mol_type = other DNA
gtagttatgaaaatcatctg

SEQ ID NO: 133782 - DNA, 20 bp, synthetic construct
  source 1..20: mol_type = other DNA
agtagttatgaaaatcatct

SEQ ID NO: 133783 - DNA, 20 bp, synthetic construct
  source 1..20: mol_type = other DNA
aagtagttatgaaaatcatc

SEQ ID NO: 133784 - DNA, 20 bp, synthetic construct
  source 1..20: mol_type = other DNA
gaagtagttatgaaaatcat

SEQ ID NO: 133785 - DNA, 20 bp, synthetic construct
  source 1..20: mol_type = other DNA
ggaagtagttatgaaaatca

SEQ ID NO: 133786 - DNA, 20 bp, synthetic construct
  source 1..20: mol_type = other DNA
aggaagtagttatgaaaatc

SEQ ID NO: 133787 - DNA, 20 bp, synthetic construct
  source 1..20: mol_type = other DNA
taggaagtagttatgaaaat

SEQ ID NO: 133788 - DNA, 20 bp, synthetic construct
  source 1..20: mol_type = other DNA
ctaggaagtagttatgaaaa

SEQ ID NO: 133789 - DNA, 20 bp, synthetic construct
  source 1..20: mol_type = other DNA
tctaggaagtagttatgaaa

SEQ ID NO: 133790 - DNA, 20 bp, synthetic construct
  source 1..20: mol_type = other DNA
ttctaggaagtagttatgaa

SEQ ID NO: 133791 - DNA, 20 bp, synthetic construct
  source 1..20: mol_type = other DNA
gttctaggaagtagttatga

SEQ ID NO: 133792 - DNA, 20 bp, synthetic construct
  source 1..20: mol_type = other DNA
tgttctaggaagtagttatg

SEQ ID NO: 133793 - DNA, 20 bp, synthetic construct
  source 1..20: mol_type = other DNA
atgttctaggaagtagttat

SEQ ID NO: 133794 - DNA, 20 bp, synthetic construct
  source 1..20: mol_type = other DNA
catgttctaggaagtagtta

SEQ ID NO: 133795 - DNA, 20 bp, synthetic construct
  source 1..20: mol_type = other DNA
acatgttctaggaagtagtt

SEQ ID NO: 133796 - DNA, 20 bp, synthetic construct
  source 1..20: mol_type = other DNA
gacatgttctaggaagtagt

SEQ ID NO: 133797 - DNA, 20 bp, synthetic construct
  source 1..20: mol_type = other DNA
ggacatgttctaggaagtag

SEQ ID NO: 133798 - DNA, 20 bp, synthetic construct
  source 1..20: mol_type = other DNA
tggacatgttctaggaagta

SEQ ID NO: 133799 - DNA, 20 bp, synthetic construct
  source 1..20: mol_type = other DNA
atggacatgttctaggaagt

SEQ ID NO: 133800 - DNA, 20 bp, synthetic construct
  source 1..20: mol_type = other DNA
aatggacatgttctaggaag

SEQ ID NO: 133801 - DNA, 20 bp, synthetic construct
  source 1..20: mol_type = other DNA
aaatggacatgttctaggaa

SEQ ID NO: 133802 - DNA, 20 bp, synthetic construct
  source 1..20: mol_type = other DNA
caaatggacatgttctagga

SEQ ID NO: 133803 - DNA, 20 bp, synthetic construct
  source 1..20: mol_type = other DNA
tcaaatggacatgttctagg

SEQ ID NO: 133804 - DNA, 20 bp, synthetic construct
  source 1..20: mol_type = other DNA
ttcaaatggacatgttctag

SEQ ID NO: 133805 - DNA, 20 bp, synthetic construct
  source 1..20: mol_type = other DNA
cttcaaatggacatgttcta

SEQ ID NO: 133806 - DNA, 20 bp, synthetic construct
  source 1..20: mol_type = other DNA
tcttcaaatggacatgttct

SEQ ID NO: 133807 - DNA, 20 bp, synthetic construct
  source 1..20: mol_type = other DNA
ctcttcaaatggacatgttc

SEQ ID NO: 133808 - DNA, 20 bp, synthetic construct
  source 1..20: mol_type = other DNA
gctcttcaaatggacatgtt

SEQ ID NO: 133809 - DNA, 20 bp, synthetic construct
  source 1..20: mol_type = other DNA
tgctcttcaaatggacatgt

SEQ ID NO: 133810 - DNA, 20 bp, synthetic construct
  source 1..20: mol_type = other DNA
ctgctcttcaaatggacatg

SEQ ID NO: 133811 - DNA, 20 bp, synthetic construct
  source 1..20: mol_type = other DNA
actgctcttcaaatggacat

SEQ ID NO: 133812 - DNA, 20 bp, synthetic construct
  source 1..20: mol_type = other DNA
cactgctcttcaaatggaca

SEQ ID NO: 133813 - DNA, 20 bp, synthetic construct
  source 1..20: mol_type = other DNA
ccactgctcttcaaatggac

SEQ ID NO: 133814 - DNA, 20 bp, synthetic construct
  source 1..20: mol_type = other DNA
cccactgctcttcaaatgga

SEQ ID NO: 133815 - DNA, 20 bp, synthetic construct
  source 1..20: mol_type = other DNA
ccccactgctcttcaaatgg

SEQ ID NO: 133816 - DNA, 20 bp, synthetic construct
  source 1..20: mol_type = other DNA
gccccactgctcttcaaatg

SEQ ID NO: 133817 - DNA, 20 bp, synthetic construct
  source 1..20: mol_type = other DNA
ggccccactgctcttcaaat

SEQ ID NO: 133818 - DNA, 20 bp, synthetic construct
  source 1..20: mol_type = other DNA
aggccccactgctcttcaaa

SEQ ID NO: 133819 - DNA, 20 bp, synthetic construct
  source 1..20: mol_type = other DNA
aaggccccactgctcttcaa

SEQ ID NO: 133820 - DNA, 20 bp, synthetic construct
  source 1..20: mol_type = other DNA
taaggccccactgctcttca

SEQ ID NO: 133821 - DNA, 20 bp, synthetic construct
  source 1..20: mol_type = other DNA
ctaaggccccactgctcttc

SEQ ID NO: 133822 - DNA, 20 bp, synthetic construct
  source 1..20: mol_type = other DNA
tctaaggccccactgctctt

SEQ ID NO: 133823 - DNA, 20 bp, synthetic construct
  source 1..20: mol_type = other DNA
gtctaaggccccactgctct

SEQ ID NO: 133824 - DNA, 20 bp, synthetic construct
  source 1..20: mol_type = other DNA
ggtctaaggccccactgctc

SEQ ID NO: 133825 - DNA, 20 bp, synthetic construct
  source 1..20: mol_type = other DNA
gggtctaaggccccactgct

SEQ ID NO: 133826 - DNA, 20 bp, synthetic construct
  source 1..20: mol_type = other DNA
ggggtctaaggccccactgc

SEQ ID NO: 133827 - DNA, 20 bp, synthetic construct
  source 1..20: mol_type = other DNA
tggggtctaaggccccactg

SEQ ID NO: 133828 - DNA, 20 bp, synthetic construct
  source 1..20: mol_type = other DNA
ttggggtctaaggccccact

SEQ ID NO: 133829 - DNA, 20 bp, synthetic construct
  source 1..20: mol_type = other DNA
tttggggtctaaggccccac

SEQ ID NO: 133830 - DNA, 20 bp, synthetic construct
  source 1..20: mol_type = other DNA
ctttggggtctaaggcccca

SEQ ID NO: 133831 - DNA, 20 bp, synthetic construct
  source 1..20: mol_type = other DNA
actttggggtctaaggcccc

SEQ ID NO: 133832 - DNA, 20 bp, synthetic construct
  source 1..20: mol_type = other DNA
gactttggggtctaaggccc

SEQ ID NO: 133833 - DNA, 20 bp, synthetic construct
  source 1..20: mol_type = other DNA
ggactttggggtctaaggcc

SEQ ID NO: 133834 - DNA, 20 bp, synthetic construct
  source 1..20: mol_type = other DNA
tggactttggggtctaaggc

SEQ ID NO: 133835 - DNA, 20 bp, synthetic construct
  source 1..20: mol_type = other DNA
atggactttggggtctaagg

SEQ ID NO: 133836 - DNA, 20 bp, synthetic construct
  source 1..20: mol_type = other DNA
aatggactttggggtctaag

SEQ ID NO: 133837 - DNA, 20 bp, synthetic construct
  source 1..20: mol_type = other DNA
aaatggactttggggtctaa

SEQ ID NO: 133838 - DNA, 20 bp, synthetic construct
  source 1..20: mol_type = other DNA
taaatggactttggggtcta

SEQ ID NO: 133839 - DNA, 20 bp, synthetic construct
  source 1..20: mol_type = other DNA
ataaatggactttggggtct

SEQ ID NO: 133840 - DNA, 20 bp, synthetic construct
  source 1..20: mol_type = other DNA
cataaatggactttggggtc

SEQ ID NO: 133841 - DNA, 20 bp, synthetic construct
  source 1..20: mol_type = other DNA
acataaatggactttggggt

SEQ ID NO: 133842 - DNA, 20 bp, synthetic construct
  source 1..20: mol_type = other DNA
cacataaatggactttgggg

SEQ ID NO: 133843 - DNA, 20 bp, synthetic construct
  source 1..20: mol_type = other DNA
acacataaatggactttggg

SEQ ID NO: 133844 - DNA, 20 bp, synthetic construct
  source 1..20: mol_type = other DNA
cacacataaatggactttgg

SEQ ID NO: 133845 - DNA, 20 bp, synthetic construct
  source 1..20: mol_type = other DNA
ccacacataaatggactttg

SEQ ID NO: 133846 - DNA, 20 bp, synthetic construct
  source 1..20: mol_type = other DNA
cccacacataaatggacttt

SEQ ID NO: 133847 - DNA, 20 bp, synthetic construct
  source 1..20: mol_type = other DNA
gcccacacataaatggactt

SEQ ID NO: 133848 - DNA, 20 bp, synthetic construct
  source 1..20: mol_type = other DNA
tgcccacacataaatggact

SEQ ID NO: 133849 - DNA, 20 bp, synthetic construct
  source 1..20: mol_type = other DNA
ttgcccacacataaatggac

SEQ ID NO: 133850 - DNA, 20 bp, synthetic construct
  source 1..20: mol_type = other DNA
tttgcccacacataaatgga

SEQ ID NO: 133851 - DNA, 20 bp, synthetic construct
  source 1..20: mol_type = other DNA
atttgcccacacataaatgg

SEQ ID NO: 133852 - DNA, 20 bp, synthetic construct
  source 1..20: mol_type = other DNA
tatttgcccacacataaatg

SEQ ID NO: 133853 - DNA, 20 bp, synthetic construct
  source 1..20: mol_type = other DNA
ctatttgcccacacataaat

SEQ ID NO: 133854 - DNA, 20 bp, synthetic construct
  source 1..20: mol_type = other DNA
cctatttgcccacacataaa

SEQ ID NO: 133855 - DNA, 20 bp, synthetic construct
  source 1..20: mol_type = other DNA
tcctatttgcccacacataa

SEQ ID NO: 133856 - DNA, 20 bp, synthetic construct
  source 1..20: mol_type = other DNA
ttcctatttgcccacacata

SEQ ID NO: 133857 - DNA, 20 bp, synthetic construct
  source 1..20: mol_type = other DNA
tttcctatttgcccacacat

SEQ ID NO: 133858 - DNA, 20 bp, synthetic construct
  source 1..20: mol_type = other DNA
atttcctatttgcccacaca

SEQ ID NO: 133859 - DNA, 20 bp, synthetic construct
  source 1..20: mol_type = other DNA
catttcctatttgcccacac

SEQ ID NO: 133860 - DNA, 20 bp, synthetic construct
  source 1..20: mol_type = other DNA
acatttcctatttgcccaca

SEQ ID NO: 133861 - DNA, 20 bp, synthetic construct
  source 1..20: mol_type = other DNA
aacatttcctatttgcccac

SEQ ID NO: 133862 - DNA, 20 bp, synthetic construct
  source 1..20: mol_type = other DNA
caacatttcctatttgccca

SEQ ID NO: 133863 - DNA, 20 bp, synthetic construct
  source 1..20: mol_type = other DNA
gcaacatttcctatttgccc

SEQ ID NO: 133864 - DNA, 20 bp, synthetic construct
  source 1..20: mol_type = other DNA
tgcaacatttcctatttgcc

SEQ ID NO: 133865 - DNA, 20 bp, synthetic construct
  source 1..20: mol_type = other DNA
ttgcaacatttcctatttgc

SEQ ID NO: 133866 - DNA, 20 bp, synthetic construct
  source 1..20: mol_type = other DNA
tttgcaacatttcctatttg

SEQ ID NO: 133867 - DNA, 20 bp, synthetic construct
  source 1..20: mol_type = other DNA
gtttgcaacatttcctattt

SEQ ID NO: 133868 - DNA, 20 bp, synthetic construct
  source 1..20: mol_type = other DNA
tgtttgcaacatttcctatt

SEQ ID NO: 133869 - DNA, 20 bp, synthetic construct
  source 1..20: mol_type = other DNA
ttgtttgcaacatttcctat

SEQ ID NO: 133870 - DNA, 20 bp, synthetic construct
  source 1..20: mol_type = other DNA
tttgtttgcaacatttccta

SEQ ID NO: 133871 - DNA, 20 bp, synthetic construct
  source 1..20: mol_type = other DNA
ttttgtttgcaacatttcct

SEQ ID NO: 133872 - DNA, 20 bp, synthetic construct
  source 1..20: mol_type = other DNA
gttttgtttgcaacatttcc

SEQ ID NO: 133873 - DNA, 20 bp, synthetic construct
  source 1..20: mol_type = other DNA
tgttttgtttgcaacatttc

SEQ ID NO: 133874 - DNA, 20 bp, synthetic construct
  source 1..20: mol_type = other DNA
ttgttttgtttgcaacattt

SEQ ID NO: 133875 - DNA, 20 bp, synthetic construct
  source 1..20: mol_type = other DNA
tttgttttgtttgcaacatt

SEQ ID NO: 133876 - DNA, 20 bp, synthetic construct
  source 1..20: mol_type = other DNA
ctttgttttgtttgcaacat

SEQ ID NO: 133877 - DNA, 20 bp, synthetic construct
  source 1..20: mol_type = other DNA
gctttgttttgtttgcaaca

SEQ ID NO: 133878 - DNA, 20 bp, synthetic construct
  source 1..20: mol_type = other DNA
tgctttgttttgtttgcaac

SEQ ID NO: 133879 - DNA, 20 bp, synthetic construct
  source 1..20: mol_type = other DNA
gtgctttgttttgtttgcaa

SEQ ID NO: 133880 - DNA, 20 bp, synthetic construct
  source 1..20: mol_type = other DNA
agtgctttgttttgtttgca

SEQ ID NO: 133881 - DNA, 20 bp, synthetic construct
  source 1..20: mol_type = other DNA
tagtgctttgttttgtttgc

SEQ ID NO: 133882 - DNA, 20 bp, synthetic construct
  source 1..20: mol_type = other DNA
ctagtgctttgttttgtttg

SEQ ID NO: 133883 - DNA, 20 bp, synthetic construct
  source 1..20: mol_type = other DNA
tctagtgctttgttttgttt

SEQ ID NO: 133884 - DNA, 20 bp, synthetic construct
  source 1..20: mol_type = other DNA
atctagtgctttgttttgtt

SEQ ID NO: 133885 - DNA, 20 bp, synthetic construct
  source 1..20: mol_type = other DNA
gatctagtgctttgttttgt

SEQ ID NO: 133886 - DNA, 20 bp, synthetic construct
  source 1..20: mol_type = other DNA
agatctagtgctttgttttg

SEQ ID NO: 133887 - DNA, 20 bp, synthetic construct
  source 1..20: mol_type = other DNA
tagatctagtgctttgtttt

SEQ ID NO: 133888 - DNA, 20 bp, synthetic construct
  source 1..20: mol_type = other DNA
ttagatctagtgctttgttt

SEQ ID NO: 133889 - DNA, 20 bp, synthetic construct
  source 1..20: mol_type = other DNA
attagatctagtgctttgtt

SEQ ID NO: 133890 - DNA, 20 bp, synthetic construct
  source 1..20: mol_type = other DNA
cattagatctagtgctttgt

SEQ ID NO: 133891 - DNA, 20 bp, synthetic construct
  source 1..20: mol_type = other DNA
acattagatctagtgctttg

SEQ ID NO: 133892 - DNA, 20 bp, synthetic construct
  source 1..20: mol_type = other DNA
gacattagatctagtgcttt

SEQ ID NO: 133893 - DNA, 20 bp, synthetic construct
  source 1..20: mol_type = other DNA
ggacattagatctagtgctt

SEQ ID NO: 133894 - DNA, 20 bp, synthetic construct
  source 1..20: mol_type = other DNA
tggacattagatctagtgct

SEQ ID NO: 133895 - DNA, 20 bp, synthetic construct
  source 1..20: mol_type = other DNA
ctggacattagatctagtgc

SEQ ID NO: 133896 - DNA, 20 bp, synthetic construct
  source 1..20: mol_type = other DNA
actggacattagatctagtg

SEQ ID NO: 133897 - DNA, 20 bp, synthetic construct
  source 1..20: mol_type = other DNA
cactggacattagatctagt

SEQ ID NO: 133898 - DNA, 20 bp, synthetic construct
  source 1..20: mol_type = other DNA
tcactggacattagatctag

SEQ ID NO: 133899 - DNA, 20 bp, synthetic construct
  source 1..20: mol_type = other DNA
ttcactggacattagatcta

SEQ ID NO: 133900 - DNA, 20 bp, synthetic construct
  source 1..20: mol_type = other DNA
tttcactggacattagatct

SEQ ID NO: 133901 - DNA, 20 bp, synthetic construct
  source 1..20: mol_type = other DNA
atttcactggacattagatc

SEQ ID NO: 133902 - DNA, 20 bp, synthetic construct
  source 1..20: mol_type = other DNA
gatttcactggacattagat

SEQ ID NO: 133903 - DNA, 20 bp, synthetic construct
  source 1..20: mol_type = other DNA
agatttcactggacattaga

SEQ ID NO: 133904 - DNA, 20 bp, synthetic construct
  source 1..20: mol_type = other DNA
cagatttcactggacattag

SEQ ID NO: 133905 - DNA, 20 bp, synthetic construct
  source 1..20: mol_type = other DNA
ccagatttcactggacatta

SEQ ID NO: 133906 - DNA, 20 bp, synthetic construct
  source 1..20: mol_type = other DNA
tccagatttcactggacatt

SEQ ID NO: 133907 - DNA, 20 bp, synthetic construct
  source 1..20: mol_type = other DNA
ttccagatttcactggacat

SEQ ID NO: 133908 - DNA, 20 bp, synthetic construct
  source 1..20: mol_type = other DNA
attccagatttcactggaca

SEQ ID NO: 133909 - DNA, 20 bp, synthetic construct
  source 1..20: mol_type = other DNA
cattccagatttcactggac

SEQ ID NO: 133910 - DNA, 20 bp, synthetic construct
  source 1..20: mol_type = other DNA
tcattccagatttcactgga

SEQ ID NO: 133911 - DNA, 20 bp, synthetic construct
  source 1..20: mol_type = other DNA
ttcattccagatttcactgg

SEQ ID NO: 133912 - DNA, 20 bp, synthetic construct
  source 1..20: mol_type = other DNA
gttcattccagatttcactg

SEQ ID NO: 133913 - DNA, 20 bp, synthetic construct
  source 1..20: mol_type = other DNA
agttcattccagatttcact

SEQ ID NO: 133914 - DNA, 20 bp, synthetic construct
  source 1..20: mol_type = other DNA
tagttcattccagatttcac

SEQ ID NO: 133915 - DNA, 20 bp, synthetic construct
  source 1..20: mol_type = other DNA
ctagttcattccagatttca

SEQ ID NO: 133916 - DNA, 20 bp, synthetic construct
  source 1..20: mol_type = other DNA
actagttcattccagatttc

SEQ ID NO: 133917 - DNA, 20 bp, synthetic construct
  source 1..20: mol_type = other DNA
gactagttcattccagattt

SEQ ID NO: 133918 - DNA, 20 bp, synthetic construct
  source 1..20: mol_type = other DNA
tgactagttcattccagatt

SEQ ID NO: 133919 - DNA, 20 bp, synthetic construct
  source 1..20: mol_type = other DNA
atgactagttcattccagat

SEQ ID NO: 133920 - DNA, 20 bp, synthetic construct
  source 1..20: mol_type = other DNA
aatgactagttcattccaga

SEQ ID NO: 133921 - DNA, 20 bp, synthetic construct
  source 1..20: mol_type = other DNA
taatgactagttcattccag

SEQ ID NO: 133922 - DNA, 20 bp, synthetic construct
  source 1..20: mol_type = other DNA
ctaatgactagttcattcca

SEQ ID NO: 133923 - DNA, 20 bp, synthetic construct
  source 1..20: mol_type = other DNA
tctaatgactagttcattcc

SEQ ID NO: 133924 - DNA, 20 bp, synthetic construct
  source 1..20: mol_type = other DNA
ctctaatgactagttcattc

SEQ ID NO: 133925 - DNA, 20 bp, synthetic construct
  source 1..20: mol_type = other DNA
gctctaatgactagttcatt

SEQ ID NO: 133926 - DNA, 20 bp, synthetic construct
  source 1..20: mol_type = other DNA
ggctctaatgactagttcat

SEQ ID NO: 133927 - DNA, 20 bp, synthetic construct
  source 1..20: mol_type = other DNA
cggctctaatgactagttca

SEQ ID NO: 133928 - DNA, 20 bp, synthetic construct
  source 1..20: mol_type = other DNA
ccggctctaatgactagttc

SEQ ID NO: 133929 - DNA, 20 bp, synthetic construct
  source 1..20: mol_type = other DNA
accggctctaatgactagtt

SEQ ID NO: 133930 - DNA, 20 bp, synthetic construct
  source 1..20: mol_type = other DNA
aaccggctctaatgactagt

SEQ ID NO: 133931 - DNA, 20 bp, synthetic construct
  source 1..20: mol_type = other DNA
gaaccggctctaatgactag

SEQ ID NO: 133932 - DNA, 20 bp, synthetic construct
  source 1..20: mol_type = other DNA
agaaccggctctaatgacta

SEQ ID NO: 133933 - DNA, 20 bp, synthetic construct
  source 1..20: mol_type = other DNA
aagaaccggctctaatgact

SEQ ID NO: 133934 - DNA, 20 bp, synthetic construct
  source 1..20: mol_type = other DNA
aaagaaccggctctaatgac

SEQ ID NO: 133935 - DNA, 20 bp, synthetic construct
  source 1..20: mol_type = other DNA
gaaagaaccggctctaatga

SEQ ID NO: 133936 - DNA, 20 bp, synthetic construct
  source 1..20: mol_type = other DNA
tgaaagaaccggctctaatg

SEQ ID NO: 133937 - DNA, 20 bp, synthetic construct
  source 1..20: mol_type = other DNA
atgaaagaaccggctctaat

SEQ ID NO: 133938 - DNA, 20 bp, synthetic construct
  source 1..20: mol_type = other DNA
catgaaagaaccggctctaa

SEQ ID NO: 133939 - DNA, 20 bp, synthetic construct
  source 1..20: mol_type = other DNA
gcatgaaagaaccggctcta

SEQ ID NO: 133940 - DNA, 20 bp, synthetic construct
  source 1..20: mol_type = other DNA
ggcatgaaagaaccggctct

SEQ ID NO: 133941 - DNA, 20 bp, synthetic construct
  source 1..20: mol_type = other DNA
tggcatgaaagaaccggctc

SEQ ID NO: 133942 - DNA, 20 bp, synthetic construct
  source 1..20: mol_type = other DNA
ctggcatgaaagaaccggct

SEQ ID NO: 133943 - DNA, 20 bp, synthetic construct
  source 1..20: mol_type = other DNA
cctggcatgaaagaaccggc

SEQ ID NO: 133944 - DNA, 20 bp, synthetic construct
  source 1..20: mol_type = other DNA
tcctggcatgaaagaaccgg

SEQ ID NO: 133945 - DNA, 20 bp, synthetic construct
  source 1..20: mol_type = other DNA
ttcctggcatgaaagaaccg

SEQ ID NO: 133946 - DNA, 20 bp, synthetic construct
  source 1..20: mol_type = other DNA
tttcctggcatgaaagaacc

SEQ ID NO: 133947 - DNA, 20 bp, synthetic construct
  source 1..20: mol_type = other DNA
ttttcctggcatgaaagaac

SEQ ID NO: 133948 - DNA, 20 bp, synthetic construct
  source 1..20: mol_type = other DNA
tttttcctggcatgaaagaa

SEQ ID NO: 133949 - DNA, 20 bp, synthetic construct
  source 1..20: mol_type = other DNA
ctttttcctggcatgaaaga

SEQ ID NO: 133950 - DNA, 20 bp, synthetic construct
  source 1..20: mol_type = other DNA
actttttcctggcatgaaag

SEQ ID NO: 133951 - DNA, 20 bp, synthetic construct
  source 1..20: mol_type = other DNA
aactttttcctggcatgaaa

SEQ ID NO: 133952 - DNA, 20 bp, synthetic construct
  source 1..20: mol_type = other DNA
taactttttcctggcatgaa

SEQ ID NO: 133953 - DNA, 20 bp, synthetic construct
  source 1..20: mol_type = other DNA
gtaactttttcctggcatga

SEQ ID NO: 133954 - DNA, 20 bp, synthetic construct
  source 1..20: mol_type = other DNA
agtaactttttcctggcatg

SEQ ID NO: 133955 - DNA, 20 bp, synthetic construct
  source 1..20: mol_type = other DNA
gagtaactttttcctggcat

SEQ ID NO: 133956 - DNA, 20 bp, synthetic construct
  source 1..20: mol_type = other DNA
tgagtaactttttcctggca

SEQ ID NO: 133957 - DNA, 20 bp, synthetic construct
  source 1..20: mol_type = other DNA
ctgagtaactttttcctggc

SEQ ID NO: 133958 - DNA, 20 bp, synthetic construct
  source 1..20: mol_type = other DNA
gctgagtaactttttcctgg

SEQ ID NO: 133959 - DNA, 20 bp, synthetic construct
  source 1..20: mol_type = other DNA
ggctgagtaactttttcctg

SEQ ID NO: 133960 - DNA, 20 bp, synthetic construct
  source 1..20: mol_type = other DNA
tggctgagtaactttttcct

SEQ ID NO: 133961 - DNA, 20 bp, synthetic construct
  source 1..20: mol_type = other DNA
ttggctgagtaactttttcc

SEQ ID NO: 133962 - DNA, 20 bp, synthetic construct
  source 1..20: mol_type = other DNA
tttggctgagtaactttttc

SEQ ID NO: 133963 - DNA, 20 bp, synthetic construct
  source 1..20: mol_type = other DNA
atttggctgagtaacttttt

SEQ ID NO: 133964 - DNA, 20 bp, synthetic construct
  source 1..20: mol_type = other DNA
gatttggctgagtaactttt

SEQ ID NO: 133965 - DNA, 20 bp, synthetic construct
  source 1..20: mol_type = other DNA
agatttggctgagtaacttt

SEQ ID NO: 133966 - DNA, 20 bp, synthetic construct
  source 1..20: mol_type = other DNA
cagatttggctgagtaactt

SEQ ID NO: 133967 - DNA, 20 bp, synthetic construct
  source 1..20: mol_type = other DNA
tcagatttggctgagtaact

SEQ ID NO: 133968 - DNA, 20 bp, synthetic construct
  source 1..20: mol_type = other DNA
ttcagatttggctgagtaac

SEQ ID NO: 133969 - DNA, 20 bp, synthetic construct
  source 1..20: mol_type = other DNA
gttcagatttggctgagtaa

SEQ ID NO: 133970 - DNA, 20 bp, synthetic construct
  source 1..20: mol_type = other DNA
agttcagatttggctgagta

SEQ ID NO: 133971 - DNA, 20 bp, synthetic construct
  source 1..20: mol_type = other DNA
tagttcagatttggctgagt

SEQ ID NO: 133972 - DNA, 20 bp, synthetic construct
  source 1..20: mol_type = other DNA
gtagttcagatttggctgag

SEQ ID NO: 133973 - DNA, 20 bp, synthetic construct
  source 1..20: mol_type = other DNA
agtagttcagatttggctga

SEQ ID NO: 133974 - DNA, 20 bp, synthetic construct
  source 1..20: mol_type = other DNA
gagtagttcagatttggctg

SEQ ID NO: 133975 - DNA, 20 bp, synthetic construct
  source 1..20: mol_type = other DNA
agagtagttcagatttggct

SEQ ID NO: 133976 - DNA, 20 bp, synthetic construct
  source 1..20: mol_type = other DNA
gagagtagttcagatttggc

SEQ ID NO: 133977 - DNA, 20 bp, synthetic construct
  source 1..20: mol_type = other DNA
ggagagtagttcagatttgg

SEQ ID NO: 133978 - DNA, 20 bp, synthetic construct
  source 1..20: mol_type = other DNA
aggagagtagttcagatttg

SEQ ID NO: 133979 - DNA, 20 bp, synthetic construct
  source 1..20: mol_type = other DNA
caggagagtagttcagattt

SEQ ID NO: 133980 - DNA, 20 bp, synthetic construct
  source 1..20: mol_type = other DNA
gcaggagagtagttcagatt

SEQ ID NO: 133981 - DNA, 20 bp, synthetic construct
  source 1..20: mol_type = other DNA
tgcaggagagtagttcagat

SEQ ID NO: 133982 - DNA, 20 bp, synthetic construct
  source 1..20: mol_type = other DNA
ctgcaggagagtagttcaga

SEQ ID NO: 133983 - DNA, 20 bp, synthetic construct
  source 1..20: mol_type = other DNA
actgcaggagagtagttcag

SEQ ID NO: 133984 - DNA, 20 bp, synthetic construct
  source 1..20: mol_type = other DNA
aactgcaggagagtagttca

SEQ ID NO: 133985 - DNA, 20 bp, synthetic construct
  source 1..20: mol_type = other DNA
aaactgcaggagagtagttc

SEQ ID NO: 133986 - DNA, 20 bp, synthetic construct
  source 1..20: mol_type = other DNA
taaactgcaggagagtagtt

SEQ ID NO: 133987 - DNA, 20 bp, synthetic construct
  source 1..20: mol_type = other DNA
gtaaactgcaggagagtagt

SEQ ID NO: 133988 - DNA, 20 bp, synthetic construct
  source 1..20: mol_type = other DNA
tgtaaactgcaggagagtag

SEQ ID NO: 133989 - DNA, 20 bp, synthetic construct
  source 1..20: mol_type = other DNA
gtgtaaactgcaggagagta

SEQ ID NO: 133990 - DNA, 20 bp, synthetic construct
  source 1..20: mol_type = other DNA
tgtgtaaactgcaggagagt

SEQ ID NO: 133991 - DNA, 20 bp, synthetic construct
  source 1..20: mol_type = other DNA
ctgtgtaaactgcaggagag

SEQ ID NO: 133992 - DNA, 20 bp, synthetic construct
  source 1..20: mol_type = other DNA
cctgtgtaaactgcaggaga

SEQ ID NO: 133993 - DNA, 20 bp, synthetic construct
  source 1..20: mol_type = other DNA
acctgtgtaaactgcaggag

SEQ ID NO: 133994 - DNA, 20 bp, synthetic construct
  source 1..20: mol_type = other DNA
cacctgtgtaaactgcagga

SEQ ID NO: 133995 - DNA, 20 bp, synthetic construct
  source 1..20: mol_type = other DNA
ccacctgtgtaaactgcagg

SEQ ID NO: 133996 - DNA, 20 bp, synthetic construct
  source 1..20: mol_type = other DNA
accacctgtgtaaactgcag

SEQ ID NO: 133997 - DNA, 20 bp, synthetic construct
  source 1..20: mol_type = other DNA
taccacctgtgtaaactgca

SEQ ID NO: 133998 - DNA, 20 bp, synthetic construct
  source 1..20: mol_type = other DNA
ataccacctgtgtaaactgc

SEQ ID NO: 133999 - DNA, 20 bp, synthetic construct
  source 1..20: mol_type = other DNA
aataccacctgtgtaaactg

SEQ ID NO: 134000 - DNA, 20 bp, synthetic construct
  source 1..20: mol_type = other DNA
aaataccacctgtgtaaact

SEQ ID NO: 134001 - DNA, 20 bp, synthetic construct
  source 1..20: mol_type = other DNA
taaataccacctgtgtaaac

SEQ ID NO: 134002 - DNA, 20 bp, synthetic construct
  source 1..20: mol_type = other DNA
ttaaataccacctgtgtaaa

SEQ ID NO: 134003 - DNA, 20 bp, synthetic construct
  source 1..20: mol_type = other DNA
attaaataccacctgtgtaa

SEQ ID NO: 134004 - DNA, 20 bp, synthetic construct
  source 1..20: mol_type = other DNA
aattaaataccacctgtgta

SEQ ID NO: 134005 - DNA, 20 bp, synthetic construct
  source 1..20: mol_type = other DNA
caattaaataccacctgtgt

SEQ ID NO: 134006 - DNA, 20 bp, synthetic construct
  source 1..20: mol_type = other DNA
gcaattaaataccacctgtg

SEQ ID NO: 134007 - DNA, 20 bp, synthetic construct
  source 1..20: mol_type = other DNA
agcaattaaataccacctgt

SEQ ID NO: 134008 - DNA, 20 bp, synthetic construct
  source 1..20: mol_type = other DNA
cagcaattaaataccacctg

SEQ ID NO: 134009 - DNA, 20 bp, synthetic construct
  source 1..20: mol_type = other DNA
acagcaattaaataccacct

SEQ ID NO: 134010 - DNA, 20 bp, synthetic construct
  source 1..20: mol_type = other DNA
gacagcaattaaataccacc

SEQ ID NO: 134011 - DNA, 20 bp, synthetic construct
  source 1..20: mol_type = other DNA
agacagcaattaaataccac

SEQ ID NO: 134012 - DNA, 20 bp, synthetic construct
  source 1..20: mol_type = other DNA
cagacagcaattaaatacca

SEQ ID NO: 134013 - DNA, 20 bp, synthetic construct
  source 1..20: mol_type = other DNA
acagacagcaattaaatacc

SEQ ID NO: 134014 - DNA, 20 bp, synthetic construct
  source 1..20: mol_type = other DNA
tacagacagcaattaaatac

SEQ ID NO: 134015 - DNA, 20 bp, synthetic construct
  source 1..20: mol_type = other DNA
atacagacagcaattaaata

SEQ ID NO: 134016 - DNA, 20 bp, synthetic construct
  source 1..20: mol_type = other DNA
catacagacagcaattaaat

SEQ ID NO: 134017 - DNA, 20 bp, synthetic construct
  source 1..20: mol_type = other DNA
ccatacagacagcaattaaa

SEQ ID NO: 134018 - DNA, 20 bp, synthetic construct
  source 1..20: mol_type = other DNA
tccatacagacagcaattaa

SEQ ID NO: 134019 - DNA, 20 bp, synthetic construct
  source 1..20: mol_type = other DNA
ctccatacagacagcaatta

SEQ ID NO: 134020 - DNA, 20 bp, synthetic construct
  source 1..20: mol_type = other DNA
cctccatacagacagcaatt

SEQ ID NO: 134021 - DNA, 20 bp, synthetic construct
  source 1..20: mol_type = other DNA
gcctccatacagacagcaat

SEQ ID NO: 134022 - DNA, 20 bp, synthetic construct
  source 1..20: mol_type = other DNA
tgcctccatacagacagcaa

SEQ ID NO: 134023 - DNA, 20 bp, synthetic construct
  source 1..20: mol_type = other DNA
ctgcctccatacagacagca

SEQ ID NO: 134024 - DNA, 20 bp, synthetic construct
  source 1..20: mol_type = other DNA
cctgcctccatacagacagc

SEQ ID NO: 134025 - DNA, 20 bp, synthetic construct
  source 1..20: mol_type = other DNA
gcctgcctccatacagacag

SEQ ID NO: 134026 - DNA, 20 bp, synthetic construct
  source 1..20: mol_type = other DNA
agcctgcctccatacagaca

SEQ ID NO: 134027 - DNA, 20 bp, synthetic construct
  source 1..20: mol_type = other DNA
tagcctgcctccatacagac

SEQ ID NO: 134028 - DNA, 20 bp, synthetic construct
  source 1..20: mol_type = other DNA
ctagcctgcctccatacaga

SEQ ID NO: 134029 - DNA, 20 bp, synthetic construct
  source 1..20: mol_type = other DNA
cctagcctgcctccatacag

SEQ ID NO: 134030 - DNA, 20 bp, synthetic construct
  source 1..20: mol_type = other DNA
tcctagcctgcctccataca

SEQ ID NO: 134031 - DNA, 20 bp, synthetic construct
  source 1..20: mol_type = other DNA
ctcctagcctgcctccatac

SEQ ID NO: 134032 - DNA, 20 bp, synthetic construct
  source 1..20: mol_type = other DNA
gctcctagcctgcctccata

SEQ ID NO: 134033 - DNA, 20 bp, synthetic construct
  source 1..20: mol_type = other DNA
tgctcctagcctgcctccat

SEQ ID NO: 134034 - DNA, 20 bp, synthetic construct
  source 1..20: mol_type = other DNA
ttgctcctagcctgcctcca

SEQ ID NO: 134035 - DNA, 20 bp, synthetic construct
  source 1..20: mol_type = other DNA
cttgctcctagcctgcctcc

SEQ ID NO: 134036 - DNA, 20 bp, synthetic construct
  source 1..20: mol_type = other DNA
ccttgctcctagcctgcctc

SEQ ID NO: 134037 - DNA, 20 bp, synthetic construct
  source 1..20: mol_type = other DNA
gccttgctcctagcctgcct

SEQ ID NO: 134038 - DNA, 20 bp, synthetic construct
  source 1..20: mol_type = other DNA
agccttgctcctagcctgcc

SEQ ID NO: 134039 - DNA, 20 bp, synthetic construct
  source 1..20: mol_type = other DNA
cagccttgctcctagcctgc

SEQ ID NO: 134040 - DNA, 20 bp, synthetic construct
  source 1..20: mol_type = other DNA
acagccttgctcctagcctg

SEQ ID NO: 134041 - DNA, 20 bp, synthetic construct
  source 1..20: mol_type = other DNA
cacagccttgctcctagcct

SEQ ID NO: 134042 - DNA, 20 bp, synthetic construct
  source 1..20: mol_type = other DNA
ccacagccttgctcctagcc

SEQ ID NO: 134043 - DNA, 20 bp, synthetic construct
  source 1..20: mol_type = other DNA
tccacagccttgctcctagc

SEQ ID NO: 134044 - DNA, 20 bp, synthetic construct
  source 1..20: mol_type = other DNA
gtccacagccttgctcctag

SEQ ID NO: 134045 - DNA, 20 bp, synthetic construct
  source 1..20: mol_type = other DNA
agtccacagccttgctccta

SEQ ID NO: 134046 - DNA, 20 bp, synthetic construct
  source 1..20: mol_type = other DNA
aagtccacagccttgctcct

SEQ ID NO: 134047 - DNA, 20 bp, synthetic construct
  source 1..20: mol_type = other DNA
caagtccacagccttgctcc

SEQ ID NO: 134048 - DNA, 20 bp, synthetic construct
  source 1..20: mol_type = other DNA
acaagtccacagccttgctc

SEQ ID NO: 134049 - DNA, 20 bp, synthetic construct
  source 1..20: mol_type = other DNA
aacaagtccacagccttgct

SEQ ID NO: 134050 - DNA, 20 bp, synthetic construct
  source 1..20: mol_type = other DNA
caacaagtccacagccttgc

SEQ ID NO: 134051 - DNA, 20 bp, synthetic construct
  source 1..20: mol_type = other DNA
acaacaagtccacagccttg

SEQ ID NO: 134052 - DNA, 20 bp, synthetic construct
  source 1..20: mol_type = other DNA
cacaacaagtccacagcctt

SEQ ID NO: 134053 - DNA, 20 bp, synthetic construct
  source 1..20: mol_type = other DNA
tcacaacaagtccacagcct

SEQ ID NO: 134054 - DNA, 20 bp, synthetic construct
  source 1..20: mol_type = other DNA
atcacaacaagtccacagcc

SEQ ID NO: 134055 - DNA, 20 bp, synthetic construct
  source 1..20: mol_type = other DNA
aatcacaacaagtccacagc

SEQ ID NO: 134056 - DNA, 20 bp, synthetic construct
  source 1..20: mol_type = other DNA
caatcacaacaagtccacag

SEQ ID NO: 134057 - DNA, 20 bp, synthetic construct
  source 1..20: mol_type = other DNA
acaatcacaacaagtccaca

SEQ ID NO: 134058 - DNA, 20 bp, synthetic construct
  source 1..20: mol_type = other DNA
gacaatcacaacaagtccac

SEQ ID NO: 134059 - DNA, 20 bp, synthetic construct
  source 1..20: mol_type = other DNA
tgacaatcacaacaagtcca

SEQ ID NO: 134060 - DNA, 20 bp, synthetic construct
  source 1..20: mol_type = other DNA
gtgacaatcacaacaagtcc

SEQ ID NO: 134061 - DNA, 20 bp, synthetic construct
  source 1..20: mol_type = other DNA
agtgacaatcacaacaagtc

SEQ ID NO: 134062 - DNA, 20 bp, synthetic construct
  source 1..20: mol_type = other DNA
tagtgacaatcacaacaagt

SEQ ID NO: 134063 - DNA, 20 bp, synthetic construct
  source 1..20: mol_type = other DNA
ctagtgacaatcacaacaag

SEQ ID NO: 134064 - DNA, 20 bp, synthetic construct
  source 1..20: mol_type = other DNA
actagtgacaatcacaacaa

SEQ ID NO: 134065 - DNA, 20 bp, synthetic construct
  source 1..20: mol_type = other DNA
aactagtgacaatcacaaca

SEQ ID NO: 134066 - DNA, 20 bp, synthetic construct
  source 1..20: mol_type = other DNA
taactagtgacaatcacaac

SEQ ID NO: 134067 - DNA, 20 bp, synthetic construct
  source 1..20: mol_type = other DNA
ttaactagtgacaatcacaa

SEQ ID NO: 134068 - DNA, 20 bp, synthetic construct
  source 1..20: mol_type = other DNA
attaactagtgacaatcaca

SEQ ID NO: 134069 - DNA, 20 bp, synthetic construct
  source 1..20: mol_type = other DNA
gattaactagtgacaatcac

SEQ ID NO: 134070 - DNA, 20 bp, synthetic construct
  source 1..20: mol_type = other DNA
tgattaactagtgacaatca

SEQ ID NO: 134071 - DNA, 20 bp, synthetic construct
  source 1..20: mol_type = other DNA
ttgattaactagtgacaatc

SEQ ID NO: 134072 - DNA, 20 bp, synthetic construct
  source 1..20: mol_type = other DNA
cttgattaactagtgacaat

SEQ ID NO: 134073 - DNA, 20 bp, synthetic construct
  source 1..20: mol_type = other DNA
tcttgattaactagtgacaa

SEQ ID NO: 134074 - DNA, 20 bp, synthetic construct
  source 1..20: mol_type = other DNA
atcttgattaactagtgaca

SEQ ID NO: 134075 - DNA, 20 bp, synthetic construct
  source 1..20: mol_type = other DNA
aatcttgattaactagtgac

SEQ ID NO: 134076 - DNA, 20 bp, synthetic construct
  source 1..20: mol_type = other DNA
gaatcttgattaactagtga

SEQ ID NO: 134077 - DNA, 20 bp, synthetic construct
  source 1..20: mol_type = other DNA
ggaatcttgattaactagtg

SEQ ID NO: 134078 - DNA, 20 bp, synthetic construct
  source 1..20: mol_type = other DNA
gggaatcttgattaactagt

SEQ ID NO: 134079 - DNA, 20 bp, synthetic construct
  source 1..20: mol_type = other DNA
agggaatcttgattaactag

SEQ ID NO: 134080 - DNA, 20 bp, synthetic construct
  source 1..20: mol_type = other DNA
aagggaatcttgattaacta

SEQ ID NO: 134081 - DNA, 20 bp, synthetic construct
  source 1..20: mol_type = other DNA
aaagggaatcttgattaact

SEQ ID NO: 134082 - DNA, 20 bp, synthetic construct
  source 1..20: mol_type = other DNA
caaagggaatcttgattaac

SEQ ID NO: 134083 - DNA, 20 bp, synthetic construct
  source 1..20: mol_type = other DNA
acaaagggaatcttgattaa

SEQ ID NO: 134084 - DNA, 20 bp, synthetic construct
  source 1..20: mol_type = other DNA
cacaaagggaatcttgatta

SEQ ID NO: 134085 - DNA, 20 bp, synthetic construct
  source 1..20: mol_type = other DNA
ccacaaagggaatcttgatt

SEQ ID NO: 134086 - DNA, 20 bp, synthetic construct
  source 1..20: mol_type = other DNA
accacaaagggaatcttgat

SEQ ID NO: 134087 - DNA, 20 bp, synthetic construct
  source 1..20: mol_type = other DNA
caccacaaagggaatcttga

SEQ ID NO: 134088 - DNA, 20 bp, synthetic construct
  source 1..20: mol_type = other DNA
gcaccacaaagggaatcttg

SEQ ID NO: 134089 - DNA, 20 bp, synthetic construct
  source 1..20: mol_type = other DNA
agcaccacaaagggaatctt

SEQ ID NO: 134090 - DNA, 20 bp, synthetic construct
  source 1..20: mol_type = other DNA
aagcaccacaaagggaatct

SEQ ID NO: 134091 - DNA, 20 bp, synthetic construct
  source 1..20: mol_type = other DNA
taagcaccacaaagggaatc

SEQ ID NO: 134092 - DNA, 20 bp, synthetic construct
  source 1..20: mol_type = other DNA
ttaagcaccacaaagggaat

SEQ ID NO: 134093 - DNA, 20 bp, synthetic construct
  source 1..20: mol_type = other DNA
cttaagcaccacaaagggaa

SEQ ID NO: 134094 - DNA, 20 bp, synthetic construct
  source 1..20: mol_type = other DNA
tcttaagcaccacaaaggga

SEQ ID NO: 134095 - DNA, 20 bp, synthetic construct
  source 1..20: mol_type = other DNA
gtcttaagcaccacaaaggg

SEQ ID NO: 134096 - DNA, 20 bp, synthetic construct
  source 1..20: mol_type = other DNA
ggtcttaagcaccacaaagg

SEQ ID NO: 134097 - DNA, 20 bp, synthetic construct
  source 1..20: mol_type = other DNA
gggtcttaagcaccacaaag

SEQ ID NO: 134098 - DNA, 20 bp, synthetic construct
  source 1..20: mol_type = other DNA
agggtcttaagcaccacaaa

SEQ ID NO: 134099 - DNA, 20 bp, synthetic construct
  source 1..20: mol_type = other DNA
tagggtcttaagcaccacaa

SEQ ID NO: 134100 - DNA, 20 bp, synthetic construct
  source 1..20: mol_type = other DNA
ttagggtcttaagcaccaca

SEQ ID NO: 134101 - DNA, 20 bp, synthetic construct
  source 1..20: mol_type = other DNA
tttagggtcttaagcaccac

SEQ ID NO: 134102 - DNA, 20 bp, synthetic construct
  source 1..20: mol_type = other DNA
ttttagggtcttaagcacca

SEQ ID NO: 134103 - DNA, 20 bp, synthetic construct
  source 1..20: mol_type = other DNA
tttttagggtcttaagcacc

SEQ ID NO: 134104 - DNA, 20 bp, synthetic construct
  source 1..20: mol_type = other DNA
ctttttagggtcttaagcac

SEQ ID NO: 134105 - DNA, 20 bp, synthetic construct
  source 1..20: mol_type = other DNA
cctttttagggtcttaagca

SEQ ID NO: 134106 - DNA, 20 bp, synthetic construct
  source 1..20: mol_type = other DNA
tcctttttagggtcttaagc

SEQ ID NO: 134107 - DNA, 20 bp, synthetic construct
  source 1..20: mol_type = other DNA
gtcctttttagggtcttaag

SEQ ID NO: 134108 - DNA, 20 bp, synthetic construct
  source 1..20: mol_type = other DNA
tgtcctttttagggtcttaa

SEQ ID NO: 134109 - DNA, 20 bp, synthetic construct
  source 1..20: mol_type = other DNA
gtgtcctttttagggtctta

SEQ ID NO: 134110 - DNA, 20 bp, synthetic construct
  source 1..20: mol_type = other DNA
agtgtcctttttagggtctt

SEQ ID NO: 134111 - DNA, 20 bp, synthetic construct
  source 1..20: mol_type = other DNA
tagtgtcctttttagggtct

SEQ ID NO: 134112 - DNA, 20 bp, synthetic construct
  source 1..20: mol_type = other DNA
ctagtgtcctttttagggtc

SEQ ID NO: 134113 - DNA, 20 bp, synthetic construct
  source 1..20: mol_type = other DNA
cctagtgtcctttttagggt

SEQ ID NO: 134114 - DNA, 20 bp, synthetic construct
  source 1..20: mol_type = other DNA
tcctagtgtcctttttaggg

SEQ ID NO: 134115 - DNA, 20 bp, synthetic construct
  source 1..20: mol_type = other DNA
ctcctagtgtcctttttagg

SEQ ID NO: 134116 - DNA, 20 bp, synthetic construct
  source 1..20: mol_type = other DNA
gctcctagtgtcctttttag

SEQ ID NO: 134117 - DNA, 20 bp, synthetic construct
  source 1..20: mol_type = other DNA
agctcctagtgtccttttta

SEQ ID NO: 134118 - DNA, 20 bp, synthetic construct
  source 1..20: mol_type = other DNA
cagctcctagtgtccttttt

SEQ ID NO: 134119 - DNA, 20 bp, synthetic construct
  source 1..20: mol_type = other DNA
ccagctcctagtgtcctttt

SEQ ID NO: 134120 - DNA, 20 bp, synthetic construct
  source 1..20: mol_type = other DNA
cccagctcctagtgtccttt

SEQ ID NO: 134121 - DNA, 20 bp, synthetic construct
  source 1..20: mol_type = other DNA
gcccagctcctagtgtcctt

SEQ ID NO: 134122 - DNA, 20 bp, synthetic construct
  source 1..20: mol_type = other DNA
tgcccagctcctagtgtcct

SEQ ID NO: 134123 - DNA, 20 bp, synthetic construct
  source 1..20: mol_type = other DNA
atgcccagctcctagtgtcc

SEQ ID NO: 134124 - DNA, 20 bp, synthetic construct
  source 1..20: mol_type = other DNA
catgcccagctcctagtgtc

SEQ ID NO: 134125 - DNA, 20 bp, synthetic construct
  source 1..20: mol_type = other DNA
ccatgcccagctcctagtgt

SEQ ID NO: 134126 - DNA, 20 bp, synthetic construct
  source 1..20: mol_type = other DNA
accatgcccagctcctagtg

SEQ ID NO: 134127 - DNA, 20 bp, synthetic construct
  source 1..20: mol_type = other DNA
caccatgcccagctcctagt

SEQ ID NO: 134128 - DNA, 20 bp, synthetic construct
  source 1..20: mol_type = other DNA
ccaccatgcccagctcctag

SEQ ID NO: 134129 - DNA, 20 bp, synthetic construct
  source 1..20: mol_type = other DNA
gccaccatgcccagctccta

SEQ ID NO: 134130 - DNA, 20 bp, synthetic construct
  source 1..20: mol_type = other DNA
agccaccatgcccagctcct

SEQ ID NO: 134131 - DNA, 20 bp, synthetic construct
  source 1..20: mol_type = other DNA
cagccaccatgcccagctcc

SEQ ID NO: 134132 - DNA, 20 bp, synthetic construct
  source 1..20: mol_type = other DNA
tcagccaccatgcccagctc

SEQ ID NO: 134133 - DNA, 20 bp, synthetic construct
  source 1..20: mol_type = other DNA
gtcagccaccatgcccagct

SEQ ID NO: 134134 - DNA, 20 bp, synthetic construct
  source 1..20: mol_type = other DNA
tgtcagccaccatgcccagc

SEQ ID NO: 134135 - DNA, 20 bp, synthetic construct
  source 1..20: mol_type = other DNA
gtgtcagccaccatgcccag

SEQ ID NO: 134136 - DNA, 20 bp, synthetic construct
  source 1..20: mol_type = other DNA
ggtgtcagccaccatgccca

SEQ ID NO: 134137 - DNA, 20 bp, synthetic construct
  source 1..20: mol_type = other DNA
aggtgtcagccaccatgccc

SEQ ID NO: 134138 - DNA, 20 bp, synthetic construct
  source 1..20: mol_type = other DNA
caggtgtcagccaccatgcc

SEQ ID NO: 134139 - DNA, 20 bp, synthetic construct
  source 1..20: mol_type = other DNA
acaggtgtcagccaccatgc

SEQ ID NO: 134140 - DNA, 20 bp, synthetic construct
  source 1..20: mol_type = other DNA
tacaggtgtcagccaccatg

SEQ ID NO: 134141 - DNA, 20 bp, synthetic construct
  source 1..20: mol_type = other DNA
ttacaggtgtcagccaccat

SEQ ID NO: 134142 - DNA, 20 bp, synthetic construct
  source 1..20: mol_type = other DNA
attacaggtgtcagccacca

SEQ ID NO: 134143 - DNA, 20 bp, synthetic construct
  source 1..20: mol_type = other DNA
gattacaggtgtcagccacc

SEQ ID NO: 134144 - DNA, 20 bp, synthetic construct
  source 1..20: mol_type = other DNA
ggattacaggtgtcagccac

SEQ ID NO: 134145 - DNA, 20 bp, synthetic construct
  source 1..20: mol_type = other DNA
tggattacaggtgtcagcca

SEQ ID NO: 134146 - DNA, 20 bp, synthetic construct
  source 1..20: mol_type = other DNA
ttggattacaggtgtcagcc

SEQ ID NO: 134147 - DNA, 20 bp, synthetic construct
  source 1..20: mol_type = other DNA
cttggattacaggtgtcagc

SEQ ID NO: 134148 - DNA, 20 bp, synthetic construct
  source 1..20: mol_type = other DNA
tcttggattacaggtgtcag

SEQ ID NO: 134149 - DNA, 20 bp, synthetic construct
  source 1..20: mol_type = other DNA
ttcttggattacaggtgtca

SEQ ID NO: 134150 - DNA, 20 bp, synthetic construct
  source 1..20: mol_type = other DNA
gttcttggattacaggtgtc

SEQ ID NO: 134151 - DNA, 20 bp, synthetic construct
  source 1..20: mol_type = other DNA
agttcttggattacaggtgt

SEQ ID NO: 134152 - DNA, 20 bp, synthetic construct
  source 1..20: mol_type = other DNA
aagttcttggattacaggtg

SEQ ID NO: 134153 - DNA, 20 bp, synthetic construct
  source 1..20: mol_type = other DNA
caagttcttggattacaggt

SEQ ID NO: 134154 - DNA, 20 bp, synthetic construct
  source 1..20: mol_type = other DNA
ccaagttcttggattacagg

SEQ ID NO: 134155 - DNA, 20 bp, synthetic construct
  source 1..20: mol_type = other DNA
cccaagttcttggattacag

SEQ ID NO: 134156 - DNA, 20 bp, synthetic construct
  source 1..20: mol_type = other DNA
ccccaagttcttggattaca

SEQ ID NO: 134157 - DNA, 20 bp, synthetic construct
  source 1..20: mol_type = other DNA
tccccaagttcttggattac

SEQ ID NO: 134158 - DNA, 20 bp, synthetic construct
  source 1..20: mol_type = other DNA
ctccccaagttcttggatta

SEQ ID NO: 134159 - DNA, 20 bp, synthetic construct
  source 1..20: mol_type = other DNA
cctccccaagttcttggatt

SEQ ID NO: 134160 - DNA, 20 bp, synthetic construct
  source 1..20: mol_type = other DNA
gcctccccaagttcttggat

SEQ ID NO: 134161 - DNA, 20 bp, synthetic construct
  source 1..20: mol_type = other DNA
agcctccccaagttcttgga

SEQ ID NO: 134162 - DNA, 20 bp, synthetic construct
  source 1..20: mol_type = other DNA
cagcctccccaagttcttgg

SEQ ID NO: 134163 - DNA, 20 bp, synthetic construct
  source 1..20: mol_type = other DNA
tcagcctccccaagttcttg

SEQ ID NO: 134164 - DNA, 20 bp, synthetic construct
  source 1..20: mol_type = other DNA
ttcagcctccccaagttctt

SEQ ID NO: 134165 - DNA, 20 bp, synthetic construct
  source 1..20: mol_type = other DNA
cttcagcctccccaagttct

SEQ ID NO: 134166 - DNA, 20 bp, synthetic construct
  source 1..20: mol_type = other DNA
acttcagcctccccaagttc

SEQ ID NO: 134167 - DNA, 20 bp, synthetic construct
  source 1..20: mol_type = other DNA
cacttcagcctccccaagtt

SEQ ID NO: 134168 - DNA, 20 bp, synthetic construct
  source 1..20: mol_type = other DNA
ccacttcagcctccccaagt

SEQ ID NO: 134169 - DNA, 20 bp, synthetic construct
  source 1..20: mol_type = other DNA
tccacttcagcctccccaag

SEQ ID NO: 134170 - DNA, 20 bp, synthetic construct
  source 1..20: mol_type = other DNA
ctccacttcagcctccccaa

SEQ ID NO: 134171 - DNA, 20 bp, synthetic construct
  source 1..20: mol_type = other DNA
cctccacttcagcctcccca

SEQ ID NO: 134172 - DNA, 20 bp, synthetic construct
  source 1..20: mol_type = other DNA
tcctccacttcagcctcccc

SEQ ID NO: 134173 - DNA, 20 bp, synthetic construct
  source 1..20: mol_type = other DNA
atcctccacttcagcctccc

SEQ ID NO: 134174 - DNA, 20 bp, synthetic construct
  source 1..20: mol_type = other DNA
gatcctccacttcagcctcc

SEQ ID NO: 134175 - DNA, 20 bp, synthetic construct
  source 1..20: mol_type = other DNA
cgatcctccacttcagcctc

SEQ ID NO: 134176 - DNA, 20 bp, synthetic construct
  source 1..20: mol_type = other DNA
gcgatcctccacttcagcct

SEQ ID NO: 134177 - DNA, 20 bp, synthetic construct
  source 1..20: mol_type = other DNA
agcgatcctccacttcagcc

SEQ ID NO: 134178 - DNA, 20 bp, synthetic construct
  source 1..20: mol_type = other DNA
aagcgatcctccacttcagc

SEQ ID NO: 134179 - DNA, 20 bp, synthetic construct
  source 1..20: mol_type = other DNA
taagcgatcctccacttcag

SEQ ID NO: 134180 - DNA, 20 bp, synthetic construct
  source 1..20: mol_type = other DNA
ctaagcgatcctccacttca

SEQ ID NO: 134181 - DNA, 20 bp, synthetic construct
  source 1..20: mol_type = other DNA
gctaagcgatcctccacttc

SEQ ID NO: 134182 - DNA, 20 bp, synthetic construct
  source 1..20: mol_type = other DNA
ggctaagcgatcctccactt

SEQ ID NO: 134183 - DNA, 20 bp, synthetic construct
  source 1..20: mol_type = other DNA
gggctaagcgatcctccact

SEQ ID NO: 134184 - DNA, 20 bp, synthetic construct
  source 1..20: mol_type = other DNA
tgggctaagcgatcctccac

SEQ ID NO: 134185 - DNA, 20 bp, synthetic construct
  source 1..20: mol_type = other DNA
ctgggctaagcgatcctcca

SEQ ID NO: 134186 - DNA, 20 bp, synthetic construct
  source 1..20: mol_type = other DNA
cctgggctaagcgatcctcc

SEQ ID NO: 134187 - DNA, 20 bp, synthetic construct
  source 1..20: mol_type = other DNA
acctgggctaagcgatcctc

SEQ ID NO: 134188 - DNA, 20 bp, synthetic construct
  source 1..20: mol_type = other DNA
cacctgggctaagcgatcct

SEQ ID NO: 134189 - DNA, 20 bp, synthetic construct
  source 1..20: mol_type = other DNA
acacctgggctaagcgatcc

SEQ ID NO: 134190 - DNA, 20 bp, synthetic construct
  source 1..20: mol_type = other DNA
aacacctgggctaagcgatc

SEQ ID NO: 134191 - DNA, 20 bp, synthetic construct
  source 1..20: mol_type = other DNA
gaacacctgggctaagcgat

SEQ ID NO: 134192 - DNA, 20 bp, synthetic construct
  source 1..20: mol_type = other DNA
tgaacacctgggctaagcga

SEQ ID NO: 134193 - DNA, 20 bp, synthetic construct
  source 1..20: mol_type = other DNA
ttgaacacctgggctaagcg

SEQ ID NO: 134194 - DNA, 20 bp, synthetic construct
  source 1..20: mol_type = other DNA
cttgaacacctgggctaagc

SEQ ID NO: 134195 - DNA, 20 bp, synthetic construct
  source 1..20: mol_type = other DNA
tcttgaacacctgggctaag

SEQ ID NO: 134196 - DNA, 20 bp, synthetic construct
  source 1..20: mol_type = other DNA
gtcttgaacacctgggctaa

SEQ ID NO: 134197 - DNA, 20 bp, synthetic construct
  source 1..20: mol_type = other DNA
ggtcttgaacacctgggcta

SEQ ID NO: 134198 - DNA, 20 bp, synthetic construct
  source 1..20: mol_type = other DNA
tggtcttgaacacctgggct

SEQ ID NO: 134199 - DNA, 20 bp, synthetic construct
  source 1..20: mol_type = other DNA
ctggtcttgaacacctgggc

SEQ ID NO: 134200 - DNA, 20 bp, synthetic construct
  source 1..20: mol_type = other DNA
actggtcttgaacacctggg

SEQ ID NO: 134201 - DNA, 20 bp, synthetic construct
  source 1..20: mol_type = other DNA
gactggtcttgaacacctgg

SEQ ID NO: 134202 - DNA, 20 bp, synthetic construct
  source 1..20: mol_type = other DNA
agactggtcttgaacacctg

SEQ ID NO: 134203 - DNA, 20 bp, synthetic construct
  source 1..20: mol_type = other DNA
tagactggtcttgaacacct

SEQ ID NO: 134204 - DNA, 20 bp, synthetic construct
  source 1..20: mol_type = other DNA
ctagactggtcttgaacacc

SEQ ID NO: 134205 - DNA, 20 bp, synthetic construct
  source 1..20: mol_type = other DNA
cctagactggtcttgaacac

SEQ ID NO: 134206 - DNA, 20 bp, synthetic construct
  source 1..20: mol_type = other DNA
gcctagactggtcttgaaca

SEQ ID NO: 134207 - DNA, 20 bp, synthetic construct
  source 1..20: mol_type = other DNA
tgcctagactggtcttgaac

SEQ ID NO: 134208 - DNA, 20 bp, synthetic construct
  source 1..20: mol_type = other DNA
ttgcctagactggtcttgaa

SEQ ID NO: 134209 - DNA, 20 bp, synthetic construct
  source 1..20: mol_type = other DNA
cttgcctagactggtcttga

SEQ ID NO: 134210 - DNA, 20 bp, synthetic construct
  source 1..20: mol_type = other DNA
tcttgcctagactggtcttg

SEQ ID NO: 134211 - DNA, 20 bp, synthetic construct
  source 1..20: mol_type = other DNA
atcttgcctagactggtctt

SEQ ID NO: 134212 - DNA, 20 bp, synthetic construct
  source 1..20: mol_type = other DNA
catcttgcctagactggtct

SEQ ID NO: 134213 - DNA, 20 bp, synthetic construct
  source 1..20: mol_type = other DNA
ccatcttgcctagactggtc

SEQ ID NO: 134214 - DNA, 20 bp, synthetic construct
  source 1..20: mol_type = other DNA
gccatcttgcctagactggt

SEQ ID NO: 134215 - DNA, 20 bp, synthetic construct
  source 1..20: mol_type = other DNA
cgccatcttgcctagactgg

SEQ ID NO: 134216 - DNA, 20 bp, synthetic construct
  source 1..20: mol_type = other DNA
tcgccatcttgcctagactg

SEQ ID NO: 134217 - DNA, 20 bp, synthetic construct
  source 1..20: mol_type = other DNA
ctcgccatcttgcctagact

SEQ ID NO: 134218 - DNA, 20 bp, synthetic construct
  source 1..20: mol_type = other DNA
tctcgccatcttgcctagac

SEQ ID NO: 134219 - DNA, 20 bp, synthetic construct
  source 1..20: mol_type = other DNA
atctcgccatcttgcctaga

SEQ ID NO: 134220 - DNA, 20 bp, synthetic construct
  source 1..20: mol_type = other DNA
gatctcgccatcttgcctag

SEQ ID NO: 134221 - DNA, 20 bp, synthetic construct
  source 1..20: mol_type = other DNA
ggatctcgccatcttgccta

SEQ ID NO: 134222 - DNA, 20 bp, synthetic construct
  source 1..20: mol_type = other DNA
gggatctcgccatcttgcct

SEQ ID NO: 134223 - DNA, 20 bp, synthetic construct
  source 1..20: mol_type = other DNA
tgggatctcgccatcttgcc

SEQ ID NO: 134224 - DNA, 20 bp, synthetic construct
  source 1..20: mol_type = other DNA
atgggatctcgccatcttgc

SEQ ID NO: 134225 - DNA, 20 bp, synthetic construct
  source 1..20: mol_type = other DNA
gatgggatctcgccatcttg

SEQ ID NO: 134226 - DNA, 20 bp, synthetic construct
  source 1..20: mol_type = other DNA
agatgggatctcgccatctt

SEQ ID NO: 134227 - DNA, 20 bp, synthetic construct
  source 1..20: mol_type = other DNA
gagatgggatctcgccatct

SEQ ID NO: 134228 - DNA, 20 bp, synthetic construct
  source 1..20: mol_type = other DNA
agagatgggatctcgccatc

SEQ ID NO: 134229 - DNA, 20 bp, synthetic construct
  source 1..20: mol_type = other DNA
tagagatgggatctcgccat

SEQ ID NO: 134230 - DNA, 20 bp, synthetic construct
  source 1..20: mol_type = other DNA
gtagagatgggatctcgcca

SEQ ID NO: 134231 - DNA, 20 bp, synthetic construct
  source 1..20: mol_type = other DNA
ggtagagatgggatctcgcc

SEQ ID NO: 134232 - DNA, 20 bp, synthetic construct
  source 1..20: mol_type = other DNA
tggtagagatgggatctcgc

SEQ ID NO: 134233 - DNA, 20 bp, synthetic construct
  source 1..20: mol_type = other DNA
ttggtagagatgggatctcg

SEQ ID NO: 134234 - DNA, 20 bp, synthetic construct
  source 1..20: mol_type = other DNA
tttggtagagatgggatctc

SEQ ID NO: 134235 - DNA, 20 bp, synthetic construct
  source 1..20: mol_type = other DNA
ttttggtagagatgggatct

SEQ ID NO: 134236 - DNA, 20 bp, synthetic construct
  source 1..20: mol_type = other DNA
tttttggtagagatgggatc

SEQ ID NO: 134237 - DNA, 20 bp, synthetic construct
  source 1..20: mol_type = other DNA
ttttttggtagagatgggat

SEQ ID NO: 134238 - DNA, 20 bp, synthetic construct
  source 1..20: mol_type = other DNA
tttttttggtagagatggga

SEQ ID NO: 134239 - DNA, 20 bp, synthetic construct
  source 1..20: mol_type = other DNA
ttttttttggtagagatggg

SEQ ID NO: 134240 - DNA, 20 bp, synthetic construct
  source 1..20: mol_type = other DNA
tttttttttggtagagatgg

SEQ ID NO: 134241 - DNA, 20 bp, synthetic construct
  source 1..20: mol_type = other DNA
ttttttttttggtagagatg

SEQ ID NO: 134242 - DNA, 20 bp, synthetic construct
  source 1..20: mol_type = other DNA
tttttttttttggtagagat

SEQ ID NO: 134243 - DNA, 20 bp, synthetic construct
  source 1..20: mol_type = other DNA
ttttttttttttggtagaga

SEQ ID NO: 134244 - DNA, 20 bp, synthetic construct
  source 1..20: mol_type = other DNA
tttttttttttttggtagag

SEQ ID NO: 134245 - DNA, 20 bp, synthetic construct
  source 1..20: mol_type = other DNA
ttttttttttttttggtaga

SEQ ID NO: 134246 - DNA, 20 bp, synthetic construct
  source 1..20: mol_type = other DNA
tttttttttttttttggtag

SEQ ID NO: 134247 - DNA, 20 bp, synthetic construct
  source 1..20: mol_type = other DNA
ttttttttttttttttggta

SEQ ID NO: 134248 - DNA, 20 bp, synthetic construct
  source 1..20: mol_type = other DNA
tttttttttttttttttggt

SEQ ID NO: 134249 - DNA, 20 bp, synthetic construct
  source 1..20: mol_type = other DNA
ttttttttttttttttttgg

SEQ ID NO: 134250 - DNA, 20 bp, synthetic construct
  source 1..20: mol_type = other DNA
tttttttttttttttttttg

SEQ ID NO: 134251 - DNA, 20 bp, synthetic construct
  source 1..20: mol_type = other DNA
tttttttttttttttttttt

SEQ ID NO: 134252 - DNA, 20 bp, synthetic construct
  source 1..20: mol_type = other DNA
tttttttttttttttttttt

SEQ ID NO: 134253 - DNA, 20 bp, synthetic construct
  source 1..20: mol_type = other DNA
tttttttttttttttttttt

SEQ ID NO: 134254 - DNA, 20 bp, synthetic construct
  source 1..20: mol_type = other DNA
tttttttttttttttttttt

SEQ ID NO: 134255 - DNA, 20 bp, synthetic construct
  source 1..20: mol_type = other DNA
tttttttttttttttttttt

SEQ ID NO: 134256 - DNA, 20 bp, synthetic construct
  source 1..20: mol_type = other DNA
tttttttttttttttttttt

SEQ ID NO: 134257 - DNA, 20 bp, synthetic construct
  source 1..20: mol_type = other DNA
tttttttttttttttttttt

SEQ ID NO: 134258 - DNA, 20 bp, synthetic construct
  source 1..20: mol_type = other DNA
tttttttttttttttttttt

SEQ ID NO: 134259 - DNA, 20 bp, synthetic construct
  source 1..20: mol_type = other DNA
tttttttttttttttttttt

SEQ ID NO: 134260 - DNA, 20 bp, synthetic construct
  source 1..20: mol_type = other DNA
tttttttttttttttttttt

SEQ ID NO: 134261 - DNA, 20 bp, synthetic construct
  source 1..20: mol_type = other DNA
cttttttttttttttttttt

SEQ ID NO: 134262 - DNA, 20 bp, synthetic construct
  source 1..20: mol_type = other DNA
gctttttttttttttttttt

SEQ ID NO: 134263 - DNA, 20 bp, synthetic construct
  source 1..20: mol_type = other DNA
ggcttttttttttttttttt

SEQ ID NO: 134264 - DNA, 20 bp, synthetic construct
  source 1..20: mol_type = other DNA
gggctttttttttttttttt

SEQ ID NO: 134265 - DNA, 20 bp, synthetic construct
  source 1..20: mol_type = other DNA
tgggcttttttttttttttt

SEQ ID NO: 134266 - DNA, 20 bp, synthetic construct
  source 1..20: mol_type = other DNA
ctgggctttttttttttttt

SEQ ID NO: 134267 - DNA, 20 bp, synthetic construct
  source 1..20: mol_type = other DNA
actgggcttttttttttttt

SEQ ID NO: 134268 - DNA, 20 bp, synthetic construct
  source 1..20: mol_type = other DNA
gactgggctttttttttttt

SEQ ID NO: 134269 - DNA, 20 bp, synthetic construct
  source 1..20: mol_type = other DNA
tgactgggcttttttttttt

SEQ ID NO: 134270 - DNA, 20 bp, synthetic construct
  source 1..20: mol_type = other DNA
atgactgggctttttttttt

SEQ ID NO: 134271 - DNA, 20 bp, synthetic construct
  source 1..20: mol_type = other DNA
catgactgggcttttttttt

SEQ ID NO: 134272 - DNA, 20 bp, synthetic construct
  source 1..20: mol_type = other DNA
ccatgactgggctttttttt

SEQ ID NO: 134273 - DNA, 20 bp, synthetic construct
  source 1..20: mol_type = other DNA
accatgactgggcttttttt

SEQ ID NO: 134274 - DNA, 20 bp, synthetic construct
  source 1..20: mol_type = other DNA
caccatgactgggctttttt

SEQ ID NO: 134275 - DNA, 20 bp, synthetic construct
  source 1..20: mol_type = other DNA
ccaccatgactgggcttttt

SEQ ID NO: 134276 - DNA, 20 bp, synthetic construct
  source 1..20: mol_type = other DNA
gccaccatgactgggctttt

SEQ ID NO: 134277 - DNA, 20 bp, synthetic construct
  source 1..20: mol_type = other DNA
tgccaccatgactgggcttt

SEQ ID NO: 134278 - DNA, 20 bp, synthetic construct
  source 1..20: mol_type = other DNA
gtgccaccatgactgggctt

SEQ ID NO: 134279 - DNA, 20 bp, synthetic construct
  source 1..20: mol_type = other DNA
tgtgccaccatgactgggct

SEQ ID NO: 134280 - DNA, 20 bp, synthetic construct
  source 1..20: mol_type = other DNA
atgtgccaccatgactgggc

SEQ ID NO: 134281 - DNA, 20 bp, synthetic construct
  source 1..20: mol_type = other DNA
catgtgccaccatgactggg

SEQ ID NO: 134282 - DNA, 20 bp, synthetic construct
  source 1..20: mol_type = other DNA
gcatgtgccaccatgactgg

SEQ ID NO: 134283 - DNA, 20 bp, synthetic construct
  source 1..20: mol_type = other DNA
ggcatgtgccaccatgactg

SEQ ID NO: 134284 - DNA, 20 bp, synthetic construct
  source 1..20: mol_type = other DNA
aggcatgtgccaccatgact

SEQ ID NO: 134285 - DNA, 20 bp, synthetic construct
  source 1..20: mol_type = other DNA
caggcatgtgccaccatgac

SEQ ID NO: 134286 - DNA, 20 bp, synthetic construct
  source 1..20: mol_type = other DNA
acaggcatgtgccaccatga

SEQ ID NO: 134287 - DNA, 20 bp, synthetic construct
  source 1..20: mol_type = other DNA
tacaggcatgtgccaccatg

SEQ ID NO: 134288 - DNA, 20 bp, synthetic construct
  source 1..20: mol_type = other DNA
ctacaggcatgtgccaccat

SEQ ID NO: 134289 - DNA, 20 bp, synthetic construct
  source 1..20: mol_type = other DNA
actacaggcatgtgccacca

SEQ ID NO: 134290 - DNA, 20 bp, synthetic construct
  source 1..20: mol_type = other DNA
gactacaggcatgtgccacc

SEQ ID NO: 134291 - DNA, 20 bp, synthetic construct
  source 1..20: mol_type = other DNA
ggactacaggcatgtgccac

SEQ ID NO: 134292 - DNA, 20 bp, synthetic construct
  source 1..20: mol_type = other DNA
gggactacaggcatgtgcca

SEQ ID NO: 134293 - DNA, 20 bp, synthetic construct
  source 1..20: mol_type = other DNA
tgggactacaggcatgtgcc

SEQ ID NO: 134294 - DNA, 20 bp, synthetic construct
  source 1..20: mol_type = other DNA
gtgggactacaggcatgtgc

SEQ ID NO: 134295 - DNA, 20 bp, synthetic construct
  source 1..20: mol_type = other DNA
ggtgggactacaggcatgtg

SEQ ID NO: 134296 - DNA, 20 bp, synthetic construct
  source 1..20: mol_type = other DNA
aggtgggactacaggcatgt

SEQ ID NO: 134297 - DNA, 20 bp, synthetic construct
  source 1..20: mol_type = other DNA
taggtgggactacaggcatg

SEQ ID NO: 134298 - DNA, 20 bp, synthetic construct
  source 1..20: mol_type = other DNA
gtaggtgggactacaggcat

SEQ ID NO: 134299 - DNA, 20 bp, synthetic construct
  source 1..20: mol_type = other DNA
tgtaggtgggactacaggca

SEQ ID NO: 134300 - DNA, 20 bp, synthetic construct
  source 1..20: mol_type = other DNA
gtgtaggtgggactacaggc

SEQ ID NO: 134301 - DNA, 20 bp, synthetic construct
  source 1..20: mol_type = other DNA
tgtgtaggtgggactacagg

SEQ ID NO: 134302 - DNA, 20 bp, synthetic construct
  source 1..20: mol_type = other DNA
ctgtgtaggtgggactacag

SEQ ID NO: 134303 - DNA, 20 bp, synthetic construct
  source 1..20: mol_type = other DNA
cctgtgtaggtgggactaca

SEQ ID NO: 134304 - DNA, 20 bp, synthetic construct
  source 1..20: mol_type = other DNA
tcctgtgtaggtgggactac

SEQ ID NO: 134305 - DNA, 20 bp, synthetic construct
  source 1..20: mol_type = other DNA
ttcctgtgtaggtgggacta

SEQ ID NO: 134306 - DNA, 20 bp, synthetic construct
  source 1..20: mol_type = other DNA
cttcctgtgtaggtgggact

SEQ ID NO: 134307 - DNA, 20 bp, synthetic construct
  source 1..20: mol_type = other DNA
gcttcctgtgtaggtgggac

SEQ ID NO: 134308 - DNA, 20 bp, synthetic construct
  source 1..20: mol_type = other DNA
agcttcctgtgtaggtggga

SEQ ID NO: 134309 - DNA, 20 bp, synthetic construct
  source 1..20: mol_type = other DNA
cagcttcctgtgtaggtggg

SEQ ID NO: 134310 - DNA, 20 bp, synthetic construct
  source 1..20: mol_type = other DNA
tcagcttcctgtgtaggtgg

SEQ ID NO: 134311 - DNA, 20 bp, synthetic construct
  source 1..20: mol_type = other DNA
ctcagcttcctgtgtaggtg

SEQ ID NO: 134312 - DNA, 20 bp, synthetic construct
  source 1..20: mol_type = other DNA
tctcagcttcctgtgtaggt

SEQ ID NO: 134313 - DNA, 20 bp, synthetic construct
  source 1..20: mol_type = other DNA
atctcagcttcctgtgtagg

SEQ ID NO: 134314 - DNA, 20 bp, synthetic construct
  source 1..20: mol_type = other DNA
catctcagcttcctgtgtag

SEQ ID NO: 134315 - DNA, 20 bp, synthetic construct
  source 1..20: mol_type = other DNA
ccatctcagcttcctgtgta

SEQ ID NO: 134316 - DNA, 20 bp, synthetic construct
  source 1..20: mol_type = other DNA
cccatctcagcttcctgtgt

SEQ ID NO: 134317 - DNA, 20 bp, synthetic construct
  source 1..20: mol_type = other DNA
tcccatctcagcttcctgtg

SEQ ID NO: 134318 - DNA, 20 bp, synthetic construct
  source 1..20: mol_type = other DNA
ctcccatctcagcttcctgt

SEQ ID NO: 134319 - DNA, 20 bp, synthetic construct
  source 1..20: mol_type = other DNA
cctcccatctcagcttcctg

SEQ ID NO: 134320 - DNA, 20 bp, synthetic construct
  source 1..20: mol_type = other DNA
tcctcccatctcagcttcct

SEQ ID NO: 134321 - DNA, 20 bp, synthetic construct
  source 1..20: mol_type = other DNA
atcctcccatctcagcttcc

SEQ ID NO: 134322 - DNA, 20 bp, synthetic construct
  source 1..20: mol_type = other DNA
gatcctcccatctcagcttc

SEQ ID NO: 134323 - DNA, 20 bp, synthetic construct
  source 1..20: mol_type = other DNA
tgatcctcccatctcagctt

SEQ ID NO: 134324 - DNA, 20 bp, synthetic construct
  source 1..20: mol_type = other DNA
gtgatcctcccatctcagct

SEQ ID NO: 134325 - DNA, 20 bp, synthetic construct
  source 1..20: mol_type = other DNA
agtgatcctcccatctcagc

SEQ ID NO: 134326 - DNA, 20 bp, synthetic construct
  source 1..20: mol_type = other DNA
aagtgatcctcccatctcag

SEQ ID NO: 134327 - DNA, 20 bp, synthetic construct
  source 1..20: mol_type = other DNA
caagtgatcctcccatctca

SEQ ID NO: 134328 - DNA, 20 bp, synthetic construct
  source 1..20: mol_type = other DNA
tcaagtgatcctcccatctc

SEQ ID NO: 134329 - DNA, 20 bp, synthetic construct
  source 1..20: mol_type = other DNA
ctcaagtgatcctcccatct

SEQ ID NO: 134330 - DNA, 20 bp, synthetic construct
  source 1..20: mol_type = other DNA
actcaagtgatcctcccatc

SEQ ID NO: 134331 - DNA, 20 bp, synthetic construct
  source 1..20: mol_type = other DNA
gactcaagtgatcctcccat

SEQ ID NO: 134332 - DNA, 20 bp, synthetic construct
  source 1..20: mol_type = other DNA
ggactcaagtgatcctccca

SEQ ID NO: 134333 - DNA, 20 bp, synthetic construct
  source 1..20: mol_type = other DNA
tggactcaagtgatcctccc

SEQ ID NO: 134334 - DNA, 20 bp, synthetic construct
  source 1..20: mol_type = other DNA
ctggactcaagtgatcctcc

SEQ ID NO: 134335 - DNA, 20 bp, synthetic construct
  source 1..20: mol_type = other DNA
cctggactcaagtgatcctc

SEQ ID NO: 134336 - DNA, 20 bp, synthetic construct
  source 1..20: mol_type = other DNA
tcctggactcaagtgatcct

SEQ ID NO: 134337 - DNA, 20 bp, synthetic construct
  source 1..20: mol_type = other DNA
gtcctggactcaagtgatcc

SEQ ID NO: 134338 - DNA, 20 bp, synthetic construct
  source 1..20: mol_type = other DNA
agtcctggactcaagtgatc

SEQ ID NO: 134339 - DNA, 20 bp, synthetic construct
  source 1..20: mol_type = other DNA
aagtcctggactcaagtgat

SEQ ID NO: 134340 - DNA, 20 bp, synthetic construct
  source 1..20: mol_type = other DNA
aaagtcctggactcaagtga

SEQ ID NO: 134341 - DNA, 20 bp, synthetic construct
  source 1..20: mol_type = other DNA
caaagtcctggactcaagtg

SEQ ID NO: 134342 - DNA, 20 bp, synthetic construct
  source 1..20: mol_type = other DNA
tcaaagtcctggactcaagt

SEQ ID NO: 134343 - DNA, 20 bp, synthetic construct
  source 1..20: mol_type = other DNA
ctcaaagtcctggactcaag

SEQ ID NO: 134344 - DNA, 20 bp, synthetic construct
  source 1..20: mol_type = other DNA
cctcaaagtcctggactcaa

SEQ ID NO: 134345 - DNA, 20 bp, synthetic construct
  source 1..20: mol_type = other DNA
gcctcaaagtcctggactca

SEQ ID NO: 134346 - DNA, 20 bp, synthetic construct
  source 1..20: mol_type = other DNA
agcctcaaagtcctggactc

SEQ ID NO: 134347 - DNA, 20 bp, synthetic construct
  source 1..20: mol_type = other DNA
tagcctcaaagtcctggact

SEQ ID NO: 134348 - DNA, 20 bp, synthetic construct
  source 1..20: mol_type = other DNA
gtagcctcaaagtcctggac

SEQ ID NO: 134349 - DNA, 20 bp, synthetic construct
  source 1..20: mol_type = other DNA
tgtagcctcaaagtcctgga

SEQ ID NO: 134350 - DNA, 20 bp, synthetic construct
  source 1..20: mol_type = other DNA
ctgtagcctcaaagtcctgg

SEQ ID NO: 134351 - DNA, 20 bp, synthetic construct
  source 1..20: mol_type = other DNA
actgtagcctcaaagtcctg

SEQ ID NO: 134352 - DNA, 20 bp, synthetic construct
  source 1..20: mol_type = other DNA
cactgtagcctcaaagtcct

SEQ ID NO: 134353 - DNA, 20 bp, synthetic construct
  source 1..20: mol_type = other DNA
tcactgtagcctcaaagtcc

SEQ ID NO: 134354 - DNA, 20 bp, synthetic construct
  source 1..20: mol_type = other DNA
ctcactgtagcctcaaagtc

SEQ ID NO: 134355 - DNA, 20 bp, synthetic construct
  source 1..20: mol_type = other DNA
gctcactgtagcctcaaagt

SEQ ID NO: 134356 - DNA, 20 bp, synthetic construct
  source 1..20: mol_type = other DNA
agctcactgtagcctcaaag

SEQ ID NO: 134357 - DNA, 20 bp, synthetic construct
  source 1..20: mol_type = other DNA
tagctcactgtagcctcaaa

SEQ ID NO: 134358 - DNA, 20 bp, synthetic construct
  source 1..20: mol_type = other DNA
atagctcactgtagcctcaa

SEQ ID NO: 134359 - DNA, 20 bp, synthetic construct
  source 1..20: mol_type = other DNA
gatagctcactgtagcctca

SEQ ID NO: 134360 - DNA, 20 bp, synthetic construct
  source 1..20: mol_type = other DNA
tgatagctcactgtagcctc

SEQ ID NO: 134361 - DNA, 20 bp, synthetic construct
  source 1..20: mol_type = other DNA
atgatagctcactgtagcct

SEQ ID NO: 134362 - DNA, 20 bp, synthetic construct
  source 1..20: mol_type = other DNA
catgatagctcactgtagcc

SEQ ID NO: 134363 - DNA, 20 bp, synthetic construct
  source 1..20: mol_type = other DNA
ccatgatagctcactgtagc

SEQ ID NO: 134364 - DNA, 20 bp, synthetic construct
  source 1..20: mol_type = other DNA
gccatgatagctcactgtag

SEQ ID NO: 134365 - DNA, 20 bp, synthetic construct
  source 1..20: mol_type = other DNA
tgccatgatagctcactgta

SEQ ID NO: 134366 - DNA, 20 bp, synthetic construct
  source 1..20: mol_type = other DNA
gtgccatgatagctcactgt

SEQ ID NO: 134367 - DNA, 20 bp, synthetic construct
  source 1..20: mol_type = other DNA
ggtgccatgatagctcactg

SEQ ID NO: 134368 - DNA, 20 bp, synthetic construct
  source 1..20: mol_type = other DNA
tggtgccatgatagctcact

SEQ ID NO: 134369 - DNA, 20 bp, synthetic construct
  source 1..20: mol_type = other DNA
gtggtgccatgatagctcac

SEQ ID NO: 134370 - DNA, 20 bp, synthetic construct
  source 1..20: mol_type = other DNA
agtggtgccatgatagctca

SEQ ID NO: 134371 - DNA, 20 bp, synthetic construct
  source 1..20: mol_type = other DNA
cagtggtgccatgatagctc

SEQ ID NO: 134372 - DNA, 20 bp, synthetic construct
  source 1..20: mol_type = other DNA
acagtggtgccatgatagct

SEQ ID NO: 134373 - DNA, 20 bp, synthetic construct
  source 1..20: mol_type = other DNA
tacagtggtgccatgatagc

SEQ ID NO: 134374 - DNA, 20 bp, synthetic construct
  source 1..20: mol_type = other DNA
ttacagtggtgccatgatag

SEQ ID NO: 134375 - DNA, 20 bp, synthetic construct
  source 1..20: mol_type = other DNA
attacagtggtgccatgata

SEQ ID NO: 134376 - DNA, 20 bp, synthetic construct
  source 1..20: mol_type = other DNA
gattacagtggtgccatgat

SEQ ID NO: 134377 - DNA, 20 bp, synthetic construct
  source 1..20: mol_type = other DNA
ggattacagtggtgccatga

SEQ ID NO: 134378 - DNA, 20 bp, synthetic construct
  source 1..20: mol_type = other DNA
tggattacagtggtgccatg

SEQ ID NO: 134379 - DNA, 20 bp, synthetic construct
  source 1..20: mol_type = other DNA
ctggattacagtggtgccat

SEQ ID NO: 134380 - DNA, 20 bp, synthetic construct
  source 1..20: mol_type = other DNA
gctggattacagtggtgcca

SEQ ID NO: 134381 - DNA, 20 bp, synthetic construct
  source 1..20: mol_type = other DNA
ggctggattacagtggtgcc

SEQ ID NO: 134382 - DNA, 20 bp, synthetic construct
  source 1..20: mol_type = other DNA
aggctggattacagtggtgc

SEQ ID NO: 134383 - DNA, 20 bp, synthetic construct
  source 1..20: mol_type = other DNA
caggctggattacagtggtg

SEQ ID NO: 134384 - DNA, 20 bp, synthetic construct
  source 1..20: mol_type = other DNA
ccaggctggattacagtggt

SEQ ID NO: 134385 - DNA, 20 bp, synthetic construct
  source 1..20: mol_type = other DNA
cccaggctggattacagtgg

SEQ ID NO: 134386 - DNA, 20 bp, synthetic construct
  source 1..20: mol_type = other DNA
acccaggctggattacagtg

SEQ ID NO: 134387 - DNA, 20 bp, synthetic construct
  source 1..20: mol_type = other DNA
cacccaggctggattacagt

SEQ ID NO: 134388 - DNA, 20 bp, synthetic construct
  source 1..20: mol_type = other DNA
tcacccaggctggattacag

SEQ ID NO: 134389 - DNA, 20 bp, synthetic construct
  source 1..20: mol_type = other DNA
gtcacccaggctggattaca

SEQ ID NO: 134390 - DNA, 20 bp, synthetic construct
  source 1..20: mol_type = other DNA
tgtcacccaggctggattac

SEQ ID NO: 134391 - DNA, 20 bp, synthetic construct
  source 1..20: mol_type = other DNA
ctgtcacccaggctggatta

SEQ ID NO: 134392 - DNA, 20 bp, synthetic construct
  source 1..20: mol_type = other DNA
tctgtcacccaggctggatt

SEQ ID NO: 134393 - DNA, 20 bp, synthetic construct
  source 1..20: mol_type = other DNA
ctctgtcacccaggctggat

SEQ ID NO: 134394 - DNA, 20 bp, synthetic construct
  source 1..20: mol_type = other DNA
gctctgtcacccaggctgga

SEQ ID NO: 134395 - DNA, 20 bp, synthetic construct
  source 1..20: mol_type = other DNA
tgctctgtcacccaggctgg

SEQ ID NO: 134396 - DNA, 20 bp, synthetic construct
  source 1..20: mol_type = other DNA
ttgctctgtcacccaggctg

SEQ ID NO: 134397 - DNA, 20 bp, synthetic construct
  source 1..20: mol_type = other DNA
cttgctctgtcacccaggct

SEQ ID NO: 134398 - DNA, 20 bp, synthetic construct
  source 1..20: mol_type = other DNA
tcttgctctgtcacccaggc

SEQ ID NO: 134399 - DNA, 20 bp, synthetic construct
  source 1..20: mol_type = other DNA
gtcttgctctgtcacccagg

SEQ ID NO: 134400 - DNA, 20 bp, synthetic construct
  source 1..20: mol_type = other DNA
ggtcttgctctgtcacccag

SEQ ID NO: 134401 - DNA, 20 bp, synthetic construct
  source 1..20: mol_type = other DNA
gggtcttgctctgtcaccca

SEQ ID NO: 134402 - DNA, 20 bp, synthetic construct
  source 1..20: mol_type = other DNA
agggtcttgctctgtcaccc

SEQ ID NO: 134403 - DNA, 20 bp, synthetic construct
  source 1..20: mol_type = other DNA
cagggtcttgctctgtcacc

SEQ ID NO: 134404 - DNA, 20 bp, synthetic construct
  source 1..20: mol_type = other DNA
acagggtcttgctctgtcac

SEQ ID NO: 134405 - DNA, 20 bp, synthetic construct
  source 1..20: mol_type = other DNA
gacagggtcttgctctgtca

SEQ ID NO: 134406 - DNA, 20 bp, synthetic construct
  source 1..20: mol_type = other DNA
agacagggtcttgctctgtc

SEQ ID NO: 134407 - DNA, 20 bp, synthetic construct
  source 1..20: mol_type = other DNA
gagacagggtcttgctctgt

SEQ ID NO: 134408 - DNA, 20 bp, synthetic construct
  source 1..20: mol_type = other DNA
agagacagggtcttgctctg

SEQ ID NO: 134409 - DNA, 20 bp, synthetic construct
  source 1..20: mol_type = other DNA
tagagacagggtcttgctct

SEQ ID NO: 134410 - DNA, 20 bp, synthetic construct
  source 1..20: mol_type = other DNA
atagagacagggtcttgctc

SEQ ID NO: 134411 - DNA, 20 bp, synthetic construct
  source 1..20: mol_type = other DNA
aatagagacagggtcttgct

SEQ ID NO: 134412 - DNA, 20 bp, synthetic construct
  source 1..20: mol_type = other DNA
aaatagagacagggtcttgc

SEQ ID NO: 134413 - DNA, 20 bp, synthetic construct
  source 1..20: mol_type = other DNA
taaatagagacagggtcttg

SEQ ID NO: 134414 - DNA, 20 bp, synthetic construct
  source 1..20: mol_type = other DNA
ttaaatagagacagggtctt

SEQ ID NO: 134415 - DNA, 20 bp, synthetic construct
  source 1..20: mol_type = other DNA
tttaaatagagacagggtct

SEQ ID NO: 134416 - DNA, 20 bp, synthetic construct
  source 1..20: mol_type = other DNA
ttttaaatagagacagggtc

SEQ ID NO: 134417 - DNA, 20 bp, synthetic construct
  source 1..20: mol_type = other DNA
tttttaaatagagacagggt

SEQ ID NO: 134418 - DNA, 20 bp, synthetic construct
  source 1..20: mol_type = other DNA
ttttttaaatagagacaggg

SEQ ID NO: 134419 - DNA, 20 bp, synthetic construct
  source 1..20: mol_type = other DNA
tttttttaaatagagacagg

SEQ ID NO: 134420 - DNA, 20 bp, synthetic construct
  source 1..20: mol_type = other DNA
ttttttttaaatagagacag

SEQ ID NO: 134421 - DNA, 20 bp, synthetic construct
  source 1..20: mol_type = other DNA
cttttttttaaatagagaca

SEQ ID NO: 134422 - DNA, 20 bp, synthetic construct
  source 1..20: mol_type = other DNA
tcttttttttaaatagagac

SEQ ID NO: 134423 - DNA, 20 bp, synthetic construct
  source 1..20: mol_type = other DNA
ttcttttttttaaatagaga

SEQ ID NO: 134424 - DNA, 20 bp, synthetic construct
  source 1..20: mol_type = other DNA
tttcttttttttaaatagag

SEQ ID NO: 134425 - DNA, 20 bp, synthetic construct
  source 1..20: mol_type = other DNA
ttttcttttttttaaataga

SEQ ID NO: 134426 - DNA, 20 bp, synthetic construct
  source 1..20: mol_type = other DNA
gttttcttttttttaaatag

SEQ ID NO: 134427 - DNA, 20 bp, synthetic construct
  source 1..20: mol_type = other DNA
tgttttcttttttttaaata

SEQ ID NO: 134428 - DNA, 20 bp, synthetic construct
  source 1..20: mol_type = other DNA
atgttttcttttttttaaat

SEQ ID NO: 134429 - DNA, 20 bp, synthetic construct
  source 1..20: mol_type = other DNA
tatgttttcttttttttaaa

SEQ ID NO: 134430 - DNA, 20 bp, synthetic construct
  source 1..20: mol_type = other DNA
ttatgttttcttttttttaa

SEQ ID NO: 134431 - DNA, 20 bp, synthetic construct
  source 1..20: mol_type = other DNA
cttatgttttctttttttta

SEQ ID NO: 134432 - DNA, 20 bp, synthetic construct
  source 1..20: mol_type = other DNA
tcttatgttttctttttttt

SEQ ID NO: 134433 - DNA, 20 bp, synthetic construct
  source 1..20: mol_type = other DNA
ttcttatgttttcttttttt

SEQ ID NO: 134434 - DNA, 20 bp, synthetic construct
  source 1..20: mol_type = other DNA
tttcttatgttttctttttt

SEQ ID NO: 134435 - DNA, 20 bp, synthetic construct
  source 1..20: mol_type = other DNA
ctttcttatgttttcttttt

SEQ ID NO: 134436 - DNA, 20 bp, synthetic construct
  source 1..20: mol_type = other DNA
tctttcttatgttttctttt

SEQ ID NO: 134437 - DNA, 20 bp, synthetic construct
  source 1..20: mol_type = other DNA
ttctttcttatgttttcttt

SEQ ID NO: 134438 - DNA, 20 bp, synthetic construct
  source 1..20: mol_type = other DNA
attctttcttatgttttctt

SEQ ID NO: 134439 - DNA, 20 bp, synthetic construct
  source 1..20: mol_type = other DNA
aattctttcttatgttttct

SEQ ID NO: 134440 - DNA, 20 bp, synthetic construct
  source 1..20: mol_type = other DNA
caattctttcttatgttttc

SEQ ID NO: 134441 - DNA, 20 bp, synthetic construct
  source 1..20: mol_type = other DNA
acaattctttcttatgtttt

SEQ ID NO: 134442 - DNA, 20 bp, synthetic construct
  source 1..20: mol_type = other DNA
aacaattctttcttatgttt

SEQ ID NO: 134443 - DNA, 20 bp, synthetic construct
  source 1..20: mol_type = other DNA
aaacaattctttcttatgtt

SEQ ID NO: 134444 - DNA, 20 bp, synthetic construct
  source 1..20: mol_type = other DNA
aaaacaattctttcttatgt

SEQ ID NO: 134445 - DNA, 20 bp, synthetic construct
  source 1..20: mol_type = other DNA
caaaacaattctttcttatg

SEQ ID NO: 134446 - DNA, 20 bp, synthetic construct
  source 1..20: mol_type = other DNA
acaaaacaattctttcttat

SEQ ID NO: 134447 - DNA, 20 bp, synthetic construct
  source 1..20: mol_type = other DNA
aacaaaacaattctttctta

SEQ ID NO: 134448 - DNA, 20 bp, synthetic construct
  source 1..20: mol_type = other DNA
gaacaaaacaattctttctt

SEQ ID NO: 134449 - DNA, 20 bp, synthetic construct
  source 1..20: mol_type = other DNA
agaacaaaacaattctttct

SEQ ID NO: 134450 - DNA, 20 bp, synthetic construct
  source 1..20: mol_type = other DNA
tagaacaaaacaattctttc

SEQ ID NO: 134451 - DNA, 20 bp, synthetic construct
  source 1..20: mol_type = other DNA
atagaacaaaacaattcttt

SEQ ID NO: 134452 - DNA, 20 bp, synthetic construct
  source 1..20: mol_type = other DNA
catagaacaaaacaattctt

SEQ ID NO: 134453 - DNA, 20 bp, synthetic construct
  source 1..20: mol_type = other DNA
gcatagaacaaaacaattct

SEQ ID NO: 134454 - DNA, 20 bp, synthetic construct
  source 1..20: mol_type = other DNA
ggcatagaacaaaacaattc

SEQ ID NO: 134455 - DNA, 20 bp, synthetic construct
  source 1..20: mol_type = other DNA
tggcatagaacaaaacaatt

SEQ ID NO: 134456 - DNA, 20 bp, synthetic construct
  source 1..20: mol_type = other DNA
atggcatagaacaaaacaat

SEQ ID NO: 134457 - DNA, 20 bp, synthetic construct
  source 1..20: mol_type = other DNA
gatggcatagaacaaaacaa

SEQ ID NO: 134458 - DNA, 20 bp, synthetic construct
  source 1..20: mol_type = other DNA
tgatggcatagaacaaaaca

SEQ ID NO: 134459 - DNA, 20 bp, synthetic construct
  source 1..20: mol_type = other DNA
atgatggcatagaacaaaac

SEQ ID NO: 134460 - DNA, 20 bp, synthetic construct
  source 1..20: mol_type = other DNA
tatgatggcatagaacaaaa

SEQ ID NO: 134461 - DNA, 20 bp, synthetic construct
  source 1..20: mol_type = other DNA
ttatgatggcatagaacaaa

SEQ ID NO: 134462 - DNA, 20 bp, synthetic construct
  source 1..20: mol_type = other DNA
cttatgatggcatagaacaa

SEQ ID NO: 134463 - DNA, 20 bp, synthetic construct
  source 1..20: mol_type = other DNA
gcttatgatggcatagaaca

SEQ ID NO: 134464 - DNA, 20 bp, synthetic construct
  source 1..20: mol_type = other DNA
ggcttatgatggcatagaac

SEQ ID NO: 134465 - DNA, 20 bp, synthetic construct
  source 1..20: mol_type = other DNA
tggcttatgatggcatagaa

SEQ ID NO: 134466 - DNA, 20 bp, synthetic construct
  source 1..20: mol_type = other DNA
atggcttatgatggcataga

SEQ ID NO: 134467 - DNA, 20 bp, synthetic construct
  source 1..20: mol_type = other DNA
tatggcttatgatggcatag

SEQ ID NO: 134468 - DNA, 20 bp, synthetic construct
  source 1..20: mol_type = other DNA
ttatggcttatgatggcata

SEQ ID NO: 134469 - DNA, 20 bp, synthetic construct
  source 1..20: mol_type = other DNA
attatggcttatgatggcat

SEQ ID NO: 134470 - DNA, 20 bp, synthetic construct
  source 1..20: mol_type = other DNA
aattatggcttatgatggca

SEQ ID NO: 134471 - DNA, 20 bp, synthetic construct
  source 1..20: mol_type = other DNA
aaattatggcttatgatggc

SEQ ID NO: 134472 - DNA, 20 bp, synthetic construct
  source 1..20: mol_type = other DNA
taaattatggcttatgatgg

SEQ ID NO: 134473 - DNA, 20 bp, synthetic construct
  source 1..20: mol_type = other DNA
ttaaattatggcttatgatg

SEQ ID NO: 134474 - DNA, 20 bp, synthetic construct
  source 1..20: mol_type = other DNA
attaaattatggcttatgat

SEQ ID NO: 134475 - DNA, 20 bp, synthetic construct
  source 1..20: mol_type = other DNA
gattaaattatggcttatga

SEQ ID NO: 134476 - DNA, 20 bp, synthetic construct
  source 1..20: mol_type = other DNA
agattaaattatggcttatg

SEQ ID NO: 134477 - DNA, 20 bp, synthetic construct
  source 1..20: mol_type = other DNA
cagattaaattatggcttat

SEQ ID NO: 134478 - DNA, 20 bp, synthetic construct
  source 1..20: mol_type = other DNA
gcagattaaattatggctta

SEQ ID NO: 134479 - DNA, 20 bp, synthetic construct
  source 1..20: mol_type = other DNA
agcagattaaattatggctt

SEQ ID NO: 134480 - DNA, 20 bp, synthetic construct
  source 1..20: mol_type = other DNA
aagcagattaaattatggct

SEQ ID NO: 134481 - DNA, 20 bp, synthetic construct
  source 1..20: mol_type = other DNA
taagcagattaaattatggc

SEQ ID NO: 134482 - DNA, 20 bp, synthetic construct
  source 1..20: mol_type = other DNA
ttaagcagattaaattatgg

SEQ ID NO: 134483 - DNA, 20 bp, synthetic construct
  source 1..20: mol_type = other DNA
cttaagcagattaaattatg

SEQ ID NO: 134484 - DNA, 20 bp, synthetic construct
  source 1..20: mol_type = other DNA
gcttaagcagattaaattat

SEQ ID NO: 134485 - DNA, 20 bp, synthetic construct
  source 1..20: mol_type = other DNA
tgcttaagcagattaaatta

SEQ ID NO: 134486 - DNA, 20 bp, synthetic construct
  source 1..20: mol_type = other DNA
atgcttaagcagattaaatt

SEQ ID NO: 134487 - DNA, 20 bp, synthetic construct
  source 1..20: mol_type = other DNA
catgcttaagcagattaaat

SEQ ID NO: 134488 - DNA, 20 bp, synthetic construct
  source 1..20: mol_type = other DNA
acatgcttaagcagattaaa

SEQ ID NO: 134489 - DNA, 20 bp, synthetic construct
  source 1..20: mol_type = other DNA
aacatgcttaagcagattaa

SEQ ID NO: 134490 - DNA, 20 bp, synthetic construct
  source 1..20: mol_type = other DNA
gaacatgcttaagcagatta

SEQ ID NO: 134491 - DNA, 20 bp, synthetic construct
  source 1..20: mol_type = other DNA
agaacatgcttaagcagatt

SEQ ID NO: 134492 - DNA, 20 bp, synthetic construct
  source 1..20: mol_type = other DNA
aagaacatgcttaagcagat

SEQ ID NO: 134493 - DNA, 20 bp, synthetic construct
  source 1..20: mol_type = other DNA
gaagaacatgcttaagcaga

SEQ ID NO: 134494 - DNA, 20 bp, synthetic construct
  source 1..20: mol_type = other DNA
tgaagaacatgcttaagcag

SEQ ID NO: 134495 - DNA, 20 bp, synthetic construct
  source 1..20: mol_type = other DNA
atgaagaacatgcttaagca

SEQ ID NO: 134496 - DNA, 20 bp, synthetic construct
  source 1..20: mol_type = other DNA
aatgaagaacatgcttaagc

SEQ ID NO: 134497 - DNA, 20 bp, synthetic construct
  source 1..20: mol_type = other DNA
taatgaagaacatgcttaag

SEQ ID NO: 134498 - DNA, 20 bp, synthetic construct
  source 1..20: mol_type = other DNA
ttaatgaagaacatgcttaa

SEQ ID NO: 134499 - DNA, 20 bp, synthetic construct
  source 1..20: mol_type = other DNA
tttaatgaagaacatgctta

SEQ ID NO: 134500 - DNA, 20 bp, synthetic construct
  source 1..20: mol_type = other DNA
atttaatgaagaacatgctt

SEQ ID NO: 134501 - DNA, 20 bp, synthetic construct
  source 1..20: mol_type = other DNA
gatttaatgaagaacatgct

SEQ ID NO: 134502 - DNA, 20 bp, synthetic construct
  source 1..20: mol_type = other DNA
agatttaatgaagaacatgc

SEQ ID NO: 134503 - DNA, 20 bp, synthetic construct
  source 1..20: mol_type = other DNA
cagatttaatgaagaacatg

SEQ ID NO: 134504 - DNA, 20 bp, synthetic construct
  source 1..20: mol_type = other DNA
gcagatttaatgaagaacat

SEQ ID NO: 134505 - DNA, 20 bp, synthetic construct
  source 1..20: mol_type = other DNA
tgcagatttaatgaagaaca

SEQ ID NO: 134506 - DNA, 20 bp, synthetic construct
  source 1..20: mol_type = other DNA
ctgcagatttaatgaagaac

SEQ ID NO: 134507 - DNA, 20 bp, synthetic construct
  source 1..20: mol_type = other DNA
actgcagatttaatgaagaa

SEQ ID NO: 134508 - DNA, 20 bp, synthetic construct
  source 1..20: mol_type = other DNA
cactgcagatttaatgaaga

SEQ ID NO: 134509 - DNA, 20 bp, synthetic construct
  source 1..20: mol_type = other DNA
tcactgcagatttaatgaag

SEQ ID NO: 134510 - DNA, 20 bp, synthetic construct
  source 1..20: mol_type = other DNA
atcactgcagatttaatgaa

SEQ ID NO: 134511 - DNA, 20 bp, synthetic construct
  source 1..20: mol_type = other DNA
aatcactgcagatttaatga

SEQ ID NO: 134512 - DNA, 20 bp, synthetic construct
  source 1..20: mol_type = other DNA
aaatcactgcagatttaatg

SEQ ID NO: 134513 - DNA, 20 bp, synthetic construct
  source 1..20: mol_type = other DNA
taaatcactgcagatttaat

SEQ ID NO: 134514 - DNA, 20 bp, synthetic construct
  source 1..20: mol_type = other DNA
ataaatcactgcagatttaa

SEQ ID NO: 134515 - DNA, 20 bp, synthetic construct
  source 1..20: mol_type = other DNA
aataaatcactgcagattta

SEQ ID NO: 134516 - DNA, 20 bp, synthetic construct
  source 1..20: mol_type = other DNA
aaataaatcactgcagattt

SEQ ID NO: 134517 - DNA, 20 bp, synthetic construct
  source 1..20: mol_type = other DNA
caaataaatcactgcagatt

SEQ ID NO: 134518 - DNA, 20 bp, synthetic construct
  source 1..20: mol_type = other DNA
tcaaataaatcactgcagat

SEQ ID NO: 134519 - DNA, 20 bp, synthetic construct
  source 1..20: mol_type = other DNA
ttcaaataaatcactgcaga

SEQ ID NO: 134520 - DNA, 20 bp, synthetic construct
  source 1..20: mol_type = other DNA
attcaaataaatcactgcag

SEQ ID NO: 134521 - DNA, 20 bp, synthetic construct
  source 1..20: mol_type = other DNA
aattcaaataaatcactgca

SEQ ID NO: 134522 - DNA, 20 bp, synthetic construct
  source 1..20: mol_type = other DNA
taattcaaataaatcactgc

SEQ ID NO: 134523 - DNA, 20 bp, synthetic construct
  source 1..20: mol_type = other DNA
ataattcaaataaatcactg

SEQ ID NO: 134524 - DNA, 20 bp, synthetic construct
  source 1..20: mol_type = other DNA
aataattcaaataaatcact

SEQ ID NO: 134525 - DNA, 20 bp, synthetic construct
  source 1..20: mol_type = other DNA
taataattcaaataaatcac

SEQ ID NO: 134526 - DNA, 20 bp, synthetic construct
  source 1..20: mol_type = other DNA
ctaataattcaaataaatca

SEQ ID NO: 134527 - DNA, 20 bp, synthetic construct
  source 1..20: mol_type = other DNA
tctaataattcaaataaatc

SEQ ID NO: 134528 - DNA, 20 bp, synthetic construct
  source 1..20: mol_type = other DNA
gtctaataattcaaataaat

SEQ ID NO: 134529 - DNA, 20 bp, synthetic construct
  source 1..20: mol_type = other DNA
agtctaataattcaaataaa

SEQ ID NO: 134530 - DNA, 20 bp, synthetic construct
  source 1..20: mol_type = other DNA
aagtctaataattcaaataa

SEQ ID NO: 134531 - DNA, 20 bp, synthetic construct
  source 1..20: mol_type = other DNA
aaagtctaataattcaaata

SEQ ID NO: 134532 - DNA, 20 bp, synthetic construct
  source 1..20: mol_type = other DNA
gaaagtctaataattcaaat

SEQ ID NO: 134533 - DNA, 20 bp, synthetic construct
  source 1..20: mol_type = other DNA
tgaaagtctaataattcaaa

SEQ ID NO: 134534 - DNA, 20 bp, synthetic construct
  source 1..20: mol_type = other DNA
ttgaaagtctaataattcaa

SEQ ID NO: 134535 - DNA, 20 bp, synthetic construct
  source 1..20: mol_type = other DNA
tttgaaagtctaataattca

SEQ ID NO: 134536 - DNA, 20 bp, synthetic construct
  source 1..20: mol_type = other DNA
ctttgaaagtctaataattc

SEQ ID NO: 134537 - DNA, 20 bp, synthetic construct
  source 1..20: mol_type = other DNA
gctttgaaagtctaataatt

SEQ ID NO: 134538 - DNA, 20 bp, synthetic construct
  source 1..20: mol_type = other DNA
ggctttgaaagtctaataat

SEQ ID NO: 134539 - DNA, 20 bp, synthetic construct
  source 1..20: mol_type = other DNA
aggctttgaaagtctaataa

SEQ ID NO: 134540 - DNA, 20 bp, synthetic construct
  source 1..20: mol_type = other DNA
aaggctttgaaagtctaata

SEQ ID NO: 134541 - DNA, 20 bp, synthetic construct
  source 1..20: mol_type = other DNA
taaggctttgaaagtctaat

SEQ ID NO: 134542 - DNA, 20 bp, synthetic construct
  source 1..20: mol_type = other DNA
ataaggctttgaaagtctaa

SEQ ID NO: 134543 - DNA, 20 bp, synthetic construct
  source 1..20: mol_type = other DNA
aataaggctttgaaagtcta

SEQ ID NO: 134544 - DNA, 20 bp, synthetic construct
  source 1..20: mol_type = other DNA
taataaggctttgaaagtct

SEQ ID NO: 134545 - DNA, 20 bp, synthetic construct
  source 1..20: mol_type = other DNA
ataataaggctttgaaagtc

SEQ ID NO: 134546 - DNA, 20 bp, synthetic construct
  source 1..20: mol_type = other DNA
tataataaggctttgaaagt

SEQ ID NO: 134547 - DNA, 20 bp, synthetic construct
  source 1..20: mol_type = other DNA
atataataaggctttgaaag

SEQ ID NO: 134548 - DNA, 20 bp, synthetic construct
  source 1..20: mol_type = other DNA
gatataataaggctttgaaa

SEQ ID NO: 134549 - DNA, 20 bp, synthetic construct
  source 1..20: mol_type = other DNA
tgatataataaggctttgaa

SEQ ID NO: 134550 - DNA, 20 bp, synthetic construct
  source 1..20: mol_type = other DNA
ttgatataataaggctttga

SEQ ID NO: 134551 - DNA, 20 bp, synthetic construct
  source 1..20: mol_type = other DNA
tttgatataataaggctttg

SEQ ID NO: 134552 - DNA, 20 bp, synthetic construct
  source 1..20: mol_type = other DNA
atttgatataataaggcttt

SEQ ID NO: 134553 - DNA, 20 bp, synthetic construct
  source 1..20: mol_type = other DNA
tatttgatataataaggctt

SEQ ID NO: 134554 - DNA, 20 bp, synthetic construct
  source 1..20: mol_type = other DNA
atatttgatataataaggct

SEQ ID NO: 134555 - DNA, 20 bp, synthetic construct
  source 1..20: mol_type = other DNA
tatatttgatataataaggc

SEQ ID NO: 134556 - DNA, 20 bp, synthetic construct
  source 1..20: mol_type = other DNA
ttatatttgatataataagg

SEQ ID NO: 134557 - DNA, 20 bp, synthetic construct
  source 1..20: mol_type = other DNA
tttatatttgatataataag

SEQ ID NO: 134558 - DNA, 20 bp, synthetic construct
  source 1..20: mol_type = other DNA
gtttatatttgatataataa

SEQ ID NO: 134559 - DNA, 20 bp, synthetic construct
  source 1..20: mol_type = other DNA
tgtttatatttgatataata

SEQ ID NO: 134560 - DNA, 20 bp, synthetic construct
  source 1..20: mol_type = other DNA
ttgtttatatttgatataat

SEQ ID NO: 134561 - DNA, 20 bp, synthetic construct
  source 1..20: mol_type = other DNA
tttgtttatatttgatataa

SEQ ID NO: 134562 - DNA, 20 bp, synthetic construct
  source 1..20: mol_type = other DNA
ttttgtttatatttgatata

SEQ ID NO: 134563 - DNA, 20 bp, synthetic construct
  source 1..20: mol_type = other DNA
attttgtttatatttgatat

SEQ ID NO: 134564 - DNA, 20 bp, synthetic construct
  source 1..20: mol_type = other DNA
aattttgtttatatttgata

SEQ ID NO: 134565 - DNA, 20 bp, synthetic construct
  source 1..20: mol_type = other DNA
aaattttgtttatatttgat

SEQ ID NO: 134566 - DNA, 20 bp, synthetic construct
  source 1..20: mol_type = other DNA
caaattttgtttatatttga

SEQ ID NO: 134567 - DNA, 20 bp, synthetic construct
  source 1..20: mol_type = other DNA
tcaaattttgtttatatttg

SEQ ID NO: 134568 - DNA, 20 bp, synthetic construct
  source 1..20: mol_type = other DNA
ttcaaattttgtttatattt

SEQ ID NO: 134569 - DNA, 20 bp, synthetic construct
  source 1..20: mol_type = other DNA
cttcaaattttgtttatatt

SEQ ID NO: 134570 - DNA, 20 bp, synthetic construct
  source 1..20: mol_type = other DNA
acttcaaattttgtttatat

SEQ ID NO: 134571 - DNA, 20 bp, synthetic construct
  source 1..20: mol_type = other DNA
tacttcaaattttgtttata

SEQ ID NO: 134572 - DNA, 20 bp, synthetic construct
  source 1..20: mol_type = other DNA
gtacttcaaattttgtttat

SEQ ID NO: 134573 - DNA, 20 bp, synthetic construct
  source 1..20: mol_type = other DNA
tgtacttcaaattttgttta

SEQ ID NO: 134574 - DNA, 20 bp, synthetic construct
  source 1..20: mol_type = other DNA
atgtacttcaaattttgttt

SEQ ID NO: 134575 - DNA, 20 bp, synthetic construct
  source 1..20: mol_type = other DNA
aatgtacttcaaattttgtt

SEQ ID NO: 134576 - DNA, 20 bp, synthetic construct
  source 1..20: mol_type = other DNA
gaatgtacttcaaattttgt

SEQ ID NO: 134577 - DNA, 20 bp, synthetic construct
  source 1..20: mol_type = other DNA
agaatgtacttcaaattttg

SEQ ID NO: 134578 - DNA, 20 bp, synthetic construct
  source 1..20: mol_type = other DNA
aagaatgtacttcaaatttt

SEQ ID NO: 134579 - DNA, 20 bp, synthetic construct
  source 1..20: mol_type = other DNA
taagaatgtacttcaaattt

SEQ ID NO: 134580 - DNA, 20 bp, synthetic construct
  source 1..20: mol_type = other DNA
ataagaatgtacttcaaatt

SEQ ID NO: 134581 - DNA, 20 bp, synthetic construct
  source 1..20: mol_type = other DNA
tataagaatgtacttcaaat

SEQ ID NO: 134582 - DNA, 20 bp, synthetic construct
  source 1..20: mol_type = other DNA
ttataagaatgtacttcaaa

SEQ ID NO: 134583 - DNA, 20 bp, synthetic construct
  source 1..20: mol_type = other DNA
tttataagaatgtacttcaa

SEQ ID NO: 134584 - DNA, 20 bp, synthetic construct
  source 1..20: mol_type = other DNA
gtttataagaatgtacttca

SEQ ID NO: 134585 - DNA, 20 bp, synthetic construct
  source 1..20: mol_type = other DNA
agtttataagaatgtacttc

SEQ ID NO: 134586 - DNA, 20 bp, synthetic construct
  source 1..20: mol_type = other DNA
tagtttataagaatgtactt

SEQ ID NO: 134587 - DNA, 20 bp, synthetic construct
  source 1..20: mol_type = other DNA
gtagtttataagaatgtact

SEQ ID NO: 134588 - DNA, 20 bp, synthetic construct
  source 1..20: mol_type = other DNA
tgtagtttataagaatgtac

SEQ ID NO: 134589 - DNA, 20 bp, synthetic construct
  source 1..20: mol_type = other DNA
ttgtagtttataagaatgta

SEQ ID NO: 134590 - DNA, 20 bp, synthetic construct
  source 1..20: mol_type = other DNA
gttgtagtttataagaatgt

SEQ ID NO: 134591 - DNA, 20 bp, synthetic construct
  source 1..20: mol_type = other DNA
tgttgtagtttataagaatg

SEQ ID NO: 134592 - DNA, 20 bp, synthetic construct
  source 1..20: mol_type = other DNA
ttgttgtagtttataagaat

SEQ ID NO: 134593 - DNA, 20 bp, synthetic construct
  source 1..20: mol_type = other DNA
tttgttgtagtttataagaa

SEQ ID NO: 134594 - DNA, 20 bp, synthetic construct
  source 1..20: mol_type = other DNA
gtttgttgtagtttataaga

SEQ ID NO: 134595 - DNA, 20 bp, synthetic construct
  source 1..20: mol_type = other DNA
agtttgttgtagtttataag

SEQ ID NO: 134596 - DNA, 20 bp, synthetic construct
  source 1..20: mol_type = other DNA
aagtttgttgtagtttataa

SEQ ID NO: 134597 - DNA, 20 bp, synthetic construct
  source 1..20: mol_type = other DNA
taagtttgttgtagtttata

SEQ ID NO: 134598 - DNA, 20 bp, synthetic construct
  source 1..20: mol_type = other DNA
gtaagtttgttgtagtttat

SEQ ID NO: 134599 - DNA, 20 bp, synthetic construct
  source 1..20: mol_type = other DNA
tgtaagtttgttgtagttta

SEQ ID NO: 134600 - DNA, 20 bp, synthetic construct
  source 1..20: mol_type = other DNA
atgtaagtttgttgtagttt

SEQ ID NO: 134601 - DNA, 20 bp, synthetic construct
  source 1..20: mol_type = other DNA
tatgtaagtttgttgtagtt

SEQ ID NO: 134602 - DNA, 20 bp, synthetic construct
  source 1..20: mol_type = other DNA
ctatgtaagtttgttgtagt

SEQ ID NO: 134603 - DNA, 20 bp, synthetic construct
  source 1..20: mol_type = other DNA
tctatgtaagtttgttgtag

SEQ ID NO: 134604 - DNA, 20 bp, synthetic construct
  source 1..20: mol_type = other DNA
ttctatgtaagtttgttgta

SEQ ID NO: 134605 - DNA, 20 bp, synthetic construct
  source 1..20: mol_type = other DNA
cttctatgtaagtttgttgt

SEQ ID NO: 134606 - DNA, 20 bp, synthetic construct
  source 1..20: mol_type = other DNA
acttctatgtaagtttgttg

SEQ ID NO: 134607 - DNA, 20 bp, synthetic construct
  source 1..20: mol_type = other DNA
cacttctatgtaagtttgtt

SEQ ID NO: 134608 - DNA, 20 bp, synthetic construct
  source 1..20: mol_type = other DNA
acacttctatgtaagtttgt

SEQ ID NO: 134609 - DNA, 20 bp, synthetic construct
  source 1..20: mol_type = other DNA
aacacttctatgtaagtttg

SEQ ID NO: 134610 - DNA, 20 bp, synthetic construct
  source 1..20: mol_type = other DNA
taacacttctatgtaagttt

SEQ ID NO: 134611 - DNA, 20 bp, synthetic construct
  source 1..20: mol_type = other DNA
ttaacacttctatgtaagtt

SEQ ID NO: 134612 - DNA, 20 bp, synthetic construct
  source 1..20: mol_type = other DNA
attaacacttctatgtaagt

SEQ ID NO: 134613 - DNA, 20 bp, synthetic construct
  source 1..20: mol_type = other DNA
aattaacacttctatgtaag

SEQ ID NO: 134614 - DNA, 20 bp, synthetic construct
  source 1..20: mol_type = other DNA
aaattaacacttctatgtaa

SEQ ID NO: 134615 - DNA, 20 bp, synthetic construct
  source 1..20: mol_type = other DNA
aaaattaacacttctatgta

SEQ ID NO: 134616 - DNA, 20 bp, synthetic construct
  source 1..20: mol_type = other DNA
taaaattaacacttctatgt

SEQ ID NO: 134617 - DNA, 20 bp, synthetic construct
  source 1..20: mol_type = other DNA
ataaaattaacacttctatg

SEQ ID NO: 134618 - DNA, 20 bp, synthetic construct
  source 1..20: mol_type = other DNA
tataaaattaacacttctat

SEQ ID NO: 134619 - DNA, 20 bp, synthetic construct
  source 1..20: mol_type = other DNA
gtataaaattaacacttcta

SEQ ID NO: 134620 - DNA, 20 bp, synthetic construct
  source 1..20: mol_type = other DNA
agtataaaattaacacttct

SEQ ID NO: 134621 - DNA, 20 bp, synthetic construct
  source 1..20: mol_type = other DNA
gagtataaaattaacacttc

SEQ ID NO: 134622 - DNA, 20 bp, synthetic construct
  source 1..20: mol_type = other DNA
tgagtataaaattaacactt

SEQ ID NO: 134623 - DNA, 20 bp, synthetic construct
  source 1..20: mol_type = other DNA
atgagtataaaattaacact

SEQ ID NO: 134624 - DNA, 20 bp, synthetic construct
  source 1..20: mol_type = other DNA
gatgagtataaaattaacac

SEQ ID NO: 134625 - DNA, 20 bp, synthetic construct
  source 1..20: mol_type = other DNA
agatgagtataaaattaaca

SEQ ID NO: 134626 - DNA, 20 bp, synthetic construct
  source 1..20: mol_type = other DNA
aagatgagtataaaattaac

SEQ ID NO: 134627 - DNA, 20 bp, synthetic construct
  source 1..20: mol_type = other DNA
gaagatgagtataaaattaa

SEQ ID NO: 134628 - DNA, 20 bp, synthetic construct
  source 1..20: mol_type = other DNA
ggaagatgagtataaaatta

SEQ ID NO: 134629 - DNA, 20 bp, synthetic construct
  source 1..20: mol_type = other DNA
gggaagatgagtataaaatt

SEQ ID NO: 134630 - DNA, 20 bp, synthetic construct
  source 1..20: mol_type = other DNA
agggaagatgagtataaaat

SEQ ID NO: 134631 - DNA, 20 bp, synthetic construct
  source 1..20: mol_type = other DNA
cagggaagatgagtataaaa

SEQ ID NO: 134632 - DNA, 20 bp, synthetic construct
  source 1..20: mol_type = other DNA
tcagggaagatgagtataaa

SEQ ID NO: 134633 - DNA, 20 bp, synthetic construct
  source 1..20: mol_type = other DNA
ttcagggaagatgagtataa

SEQ ID NO: 134634 - DNA, 20 bp, synthetic construct
  source 1..20: mol_type = other DNA
gttcagggaagatgagtata

SEQ ID NO: 134635 - DNA, 20 bp, synthetic construct
  source 1..20: mol_type = other DNA
tgttcagggaagatgagtat

SEQ ID NO: 134636 - DNA, 20 bp, synthetic construct
  source 1..20: mol_type = other DNA
ttgttcagggaagatgagta

SEQ ID NO: 134637 - DNA, 20 bp, synthetic construct
  source 1..20: mol_type = other DNA
attgttcagggaagatgagt

SEQ ID NO: 134638 - DNA, 20 bp, synthetic construct
  source 1..20: mol_type = other DNA
aattgttcagggaagatgag

SEQ ID NO: 134639 - DNA, 20 bp, synthetic construct
  source 1..20: mol_type = other DNA
aaattgttcagggaagatga

SEQ ID NO: 134640 - DNA, 20 bp, synthetic construct
  source 1..20: mol_type = other DNA
taaattgttcagggaagatg

SEQ ID NO: 134641 - DNA, 20 bp, synthetic construct
  source 1..20: mol_type = other DNA
ataaattgttcagggaagat

SEQ ID NO: 134642 - DNA, 20 bp, synthetic construct
  source 1..20: mol_type = other DNA
tataaattgttcagggaaga

SEQ ID NO: 134643 - DNA, 20 bp, synthetic construct
  source 1..20: mol_type = other DNA
atataaattgttcagggaag

SEQ ID NO: 134644 - DNA, 20 bp, synthetic construct
  source 1..20: mol_type = other DNA
aatataaattgttcagggaa

SEQ ID NO: 134645 - DNA, 20 bp, synthetic construct
  source 1..20: mol_type = other DNA
aaatataaattgttcaggga

SEQ ID NO: 134646 - DNA, 20 bp, synthetic construct
  source 1..20: mol_type = other DNA
aaaatataaattgttcaggg

SEQ ID NO: 134647 - DNA, 20 bp, synthetic construct
  source 1..20: mol_type = other DNA
taaaatataaattgttcagg

SEQ ID NO: 134648 - DNA, 20 bp, synthetic construct
  source 1..20: mol_type = other DNA
ataaaatataaattgttcag

SEQ ID NO: 134649 - DNA, 20 bp, synthetic construct
  source 1..20: mol_type = other DNA
tataaaatataaattgttca

SEQ ID NO: 134650 - DNA, 20 bp, synthetic construct
  source 1..20: mol_type = other DNA
ttataaaatataaattgttc

SEQ ID NO: 134651 - DNA, 20 bp, synthetic construct
  source 1..20: mol_type = other DNA
tttataaaatataaattgtt

SEQ ID NO: 134652 - DNA, 20 bp, synthetic construct
  source 1..20: mol_type = other DNA
atttataaaatataaattgt

SEQ ID NO: 134653 - DNA, 20 bp, synthetic construct
  source 1..20: mol_type = other DNA
tatttataaaatataaattg

SEQ ID NO: 134654 - DNA, 20 bp, synthetic construct
  source 1..20: mol_type = other DNA
atatttataaaatataaatt

SEQ ID NO: 134655 - DNA, 20 bp, synthetic construct
  source 1..20: mol_type = other DNA
tatatttataaaatataaat

SEQ ID NO: 134656 - DNA, 20 bp, synthetic construct
  source 1..20: mol_type = other DNA
atatatttataaaatataaa

SEQ ID NO: 134657 - DNA, 20 bp, synthetic construct
  source 1..20: mol_type = other DNA
aatatatttataaaatataa

SEQ ID NO: 134658 - DNA, 20 bp, synthetic construct
  source 1..20: mol_type = other DNA
taatatatttataaaatata

SEQ ID NO: 134659 - DNA, 20 bp, synthetic construct
  source 1..20: mol_type = other DNA
ttaatatatttataaaatat

SEQ ID NO: 134660 - DNA, 20 bp, synthetic construct
  source 1..20: mol_type = other DNA
tttaatatatttataaaata

SEQ ID NO: 134661 - DNA, 20 bp, synthetic construct
  source 1..20: mol_type = other DNA
atttaatatatttataaaat

SEQ ID NO: 134662 - DNA, 20 bp, synthetic construct
  source 1..20: mol_type = other DNA
tatttaatatatttataaaa

SEQ ID NO: 134663 - DNA, 20 bp, synthetic construct
  source 1..20: mol_type = other DNA
atatttaatatatttataaa

SEQ ID NO: 134664 - DNA, 20 bp, synthetic construct
  source 1..20: mol_type = other DNA
tatatttaatatatttataa

SEQ ID NO: 134665 - DNA, 20 bp, synthetic construct
  source 1..20: mol_type = other DNA
atatatttaatatatttata

SEQ ID NO: 134666 - DNA, 20 bp, synthetic construct
  source 1..20: mol_type = other DNA
aatatatttaatatatttat

SEQ ID NO: 134667 - DNA, 20 bp, synthetic construct
  source 1..20: mol_type = other DNA
caatatatttaatatattta

SEQ ID NO: 134668 - DNA, 20 bp, synthetic construct
  source 1..20: mol_type = other DNA
acaatatatttaatatattt

SEQ ID NO: 134669 - DNA, 20 bp, synthetic construct
  source 1..20: mol_type = other DNA
gacaatatatttaatatatt

SEQ ID NO: 134670 - DNA, 20 bp, synthetic construct
  source 1..20: mol_type = other DNA
tgacaatatatttaatatat

SEQ ID NO: 134671 - DNA, 20 bp, synthetic construct
  source 1..20: mol_type = other DNA
atgacaatatatttaatata

SEQ ID NO: 134672 - DNA, 20 bp, synthetic construct
  source 1..20: mol_type = other DNA
tatgacaatatatttaatat

SEQ ID NO: 134673 - DNA, 20 bp, synthetic construct
  source 1..20: mol_type = other DNA
ttatgacaatatatttaata

SEQ ID NO: 134674 - DNA, 20 bp, synthetic construct
  source 1..20: mol_type = other DNA
tttatgacaatatatttaat

SEQ ID NO: 134675 - DNA, 20 bp, synthetic construct
  source 1..20: mol_type = other DNA
atttatgacaatatatttaa

SEQ ID NO: 134676 - DNA, 20 bp, synthetic construct
  source 1..20: mol_type = other DNA
aatttatgacaatatattta

SEQ ID NO: 134677 - DNA, 20 bp, synthetic construct
  source 1..20: mol_type = other DNA
aaatttatgacaatatattt

SEQ ID NO: 134678 - DNA, 20 bp, synthetic construct
  source 1..20: mol_type = other DNA
aaaatttatgacaatatatt

SEQ ID NO: 134679 - DNA, 20 bp, synthetic construct
  source 1..20: mol_type = other DNA
gaaaatttatgacaatatat

SEQ ID NO: 134680 - DNA, 20 bp, synthetic construct
  source 1..20: mol_type = other DNA
agaaaatttatgacaatata

SEQ ID NO: 134681 - DNA, 20 bp, synthetic construct
  source 1..20: mol_type = other DNA
gagaaaatttatgacaatat

SEQ ID NO: 134682 - DNA, 20 bp, synthetic construct
  source 1..20: mol_type = other DNA
tgagaaaatttatgacaata

SEQ ID NO: 134683 - DNA, 20 bp, synthetic construct
  source 1..20: mol_type = other DNA
ttgagaaaatttatgacaat

SEQ ID NO: 134684 - DNA, 20 bp, synthetic construct
  source 1..20: mol_type = other DNA
tttgagaaaatttatgacaa

SEQ ID NO: 134685 - DNA, 20 bp, synthetic construct
  source 1..20: mol_type = other DNA
ctttgagaaaatttatgaca

SEQ ID NO: 134686 - DNA, 20 bp, synthetic construct
  source 1..20: mol_type = other DNA
cctttgagaaaatttatgac

SEQ ID NO: 134687 - DNA, 20 bp, synthetic construct
  source 1..20: mol_type = other DNA
tcctttgagaaaatttatga

SEQ ID NO: 134688 - DNA, 20 bp, synthetic construct
  source 1..20: mol_type = other DNA
ttcctttgagaaaatttatg

SEQ ID NO: 134689 - DNA, 20 bp, synthetic construct
  source 1..20: mol_type = other DNA
gttcctttgagaaaatttat

SEQ ID NO: 134690 - DNA, 20 bp, synthetic construct
  source 1..20: mol_type = other DNA
ggttcctttgagaaaattta

SEQ ID NO: 134691 - DNA, 20 bp, synthetic construct
  source 1..20: mol_type = other DNA
tggttcctttgagaaaattt

SEQ ID NO: 134692 - DNA, 20 bp, synthetic construct
  source 1..20: mol_type = other DNA
ttggttcctttgagaaaatt

SEQ ID NO: 134693 - DNA, 20 bp, synthetic construct
  source 1..20: mol_type = other DNA
tttggttcctttgagaaaat

SEQ ID NO: 134694 - DNA, 20 bp, synthetic construct
  source 1..20: mol_type = other DNA
atttggttcctttgagaaaa

SEQ ID NO: 134695 - DNA, 20 bp, synthetic construct
  source 1..20: mol_type = other DNA
tatttggttcctttgagaaa

SEQ ID NO: 134696 - DNA, 20 bp, synthetic construct
  source 1..20: mol_type = other DNA
gtatttggttcctttgagaa

SEQ ID NO: 134697 - DNA, 20 bp, synthetic construct
  source 1..20: mol_type = other DNA
agtatttggttcctttgaga

SEQ ID NO: 134698 - DNA, 20 bp, synthetic construct
  source 1..20: mol_type = other DNA
aagtatttggttcctttgag

SEQ ID NO: 134699 - DNA, 20 bp, synthetic construct
  source 1..20: mol_type = other DNA
aaagtatttggttcctttga

SEQ ID NO: 134700 - DNA, 20 bp, synthetic construct
  source 1..20: mol_type = other DNA
caaagtatttggttcctttg

SEQ ID NO: 134701 - DNA, 20 bp, synthetic construct
  source 1..20: mol_type = other DNA
tcaaagtatttggttccttt

SEQ ID NO: 134702 - DNA, 20 bp, synthetic construct
  source 1..20: mol_type = other DNA
ctcaaagtatttggttcctt

SEQ ID NO: 134703 - DNA, 20 bp, synthetic construct
  source 1..20: mol_type = other DNA
actcaaagtatttggttcct

SEQ ID NO: 134704 - DNA, 20 bp, synthetic construct
  source 1..20: mol_type = other DNA
tactcaaagtatttggttcc

SEQ ID NO: 134705 - DNA, 20 bp, synthetic construct
  source 1..20: mol_type = other DNA
atactcaaagtatttggttc

SEQ ID NO: 134706 - DNA, 20 bp, synthetic construct
  source 1..20: mol_type = other DNA
catactcaaagtatttggtt

SEQ ID NO: 134707 - DNA, 20 bp, synthetic construct
  source 1..20: mol_type = other DNA
tcatactcaaagtatttggt

SEQ ID NO: 134708 - DNA, 20 bp, synthetic construct
  source 1..20: mol_type = other DNA
ttcatactcaaagtatttgg

SEQ ID NO: 134709 - DNA, 20 bp, synthetic construct
  source 1..20: mol_type = other DNA
attcatactcaaagtatttg

SEQ ID NO: 134710 - DNA, 20 bp, synthetic construct
  source 1..20: mol_type = other DNA
aattcatactcaaagtattt

SEQ ID NO: 134711 - DNA, 20 bp, synthetic construct
  source 1..20: mol_type = other DNA
caattcatactcaaagtatt

SEQ ID NO: 134712 - DNA, 20 bp, synthetic construct
  source 1..20: mol_type = other DNA
acaattcatactcaaagtat

SEQ ID NO: 134713 - DNA, 20 bp, synthetic construct
  source 1..20: mol_type = other DNA
cacaattcatactcaaagta

SEQ ID NO: 134714 - DNA, 20 bp, synthetic construct
  source 1..20: mol_type = other DNA
gcacaattcatactcaaagt

SEQ ID NO: 134715 - DNA, 20 bp, synthetic construct
  source 1..20: mol_type = other DNA
agcacaattcatactcaaag

SEQ ID NO: 134716 - DNA, 20 bp, synthetic construct
  source 1..20: mol_type = other DNA
aagcacaattcatactcaaa

SEQ ID NO: 134717 - DNA, 20 bp, synthetic construct
  source 1..20: mol_type = other DNA
aaagcacaattcatactcaa

SEQ ID NO: 134718 - DNA, 20 bp, synthetic construct
  source 1..20: mol_type = other DNA
aaaagcacaattcatactca

SEQ ID NO: 134719 - DNA, 20 bp, synthetic construct
  source 1..20: mol_type = other DNA
gaaaagcacaattcatactc

SEQ ID NO: 134720 - DNA, 20 bp, synthetic construct
  source 1..20: mol_type = other DNA
agaaaagcacaattcatact

SEQ ID NO: 134721 - DNA, 20 bp, synthetic construct
  source 1..20: mol_type = other DNA
aagaaaagcacaattcatac

SEQ ID NO: 134722 - DNA, 20 bp, synthetic construct
  source 1..20: mol_type = other DNA
aaagaaaagcacaattcata

SEQ ID NO: 134723 - DNA, 20 bp, synthetic construct
  source 1..20: mol_type = other DNA
aaaagaaaagcacaattcat

SEQ ID NO: 134724 - DNA, 20 bp, synthetic construct
  source 1..20: mol_type = other DNA
aaaaagaaaagcacaattca

SEQ ID NO: 134725 - DNA, 20 bp, synthetic construct
  source 1..20: mol_type = other DNA
taaaaagaaaagcacaattc

SEQ ID NO: 134726 - DNA, 20 bp, synthetic construct
  source 1..20: mol_type = other DNA
ttaaaaagaaaagcacaatt

SEQ ID NO: 134727 - DNA, 20 bp, synthetic construct
  source 1..20: mol_type = other DNA
cttaaaaagaaaagcacaat

SEQ ID NO: 134728 - DNA, 20 bp, synthetic construct
  source 1..20: mol_type = other DNA
gcttaaaaagaaaagcacaa

SEQ ID NO: 134729 - DNA, 20 bp, synthetic construct
  source 1..20: mol_type = other DNA
agcttaaaaagaaaagcaca

SEQ ID NO: 134730 - DNA, 20 bp, synthetic construct
  source 1..20: mol_type = other DNA
tagcttaaaaagaaaagcac

SEQ ID NO: 134731 - DNA, 20 bp, synthetic construct
  source 1..20: mol_type = other DNA
gtagcttaaaaagaaaagca

SEQ ID NO: 134732 - DNA, 20 bp, synthetic construct
  source 1..20: mol_type = other DNA
tgtagcttaaaaagaaaagc

SEQ ID NO: 134733 - DNA, 20 bp, synthetic construct
  source 1..20: mol_type = other DNA
atgtagcttaaaaagaaaag

SEQ ID NO: 134734 - DNA, 20 bp, synthetic construct
  source 1..20: mol_type = other DNA
gatgtagcttaaaaagaaaa

SEQ ID NO: 134735 - DNA, 20 bp, synthetic construct
  source 1..20: mol_type = other DNA
tgatgtagcttaaaaagaaa

SEQ ID NO: 134736 - DNA, 20 bp, synthetic construct
  source 1..20: mol_type = other DNA
atgatgtagcttaaaaagaa

SEQ ID NO: 134737 - DNA, 20 bp, synthetic construct
  source 1..20: mol_type = other DNA
tatgatgtagcttaaaaaga

SEQ ID NO: 134738 - DNA, 20 bp, synthetic construct
  source 1..20: mol_type = other DNA
atatgatgtagcttaaaaag

SEQ ID NO: 134739 - DNA, 20 bp, synthetic construct
  source 1..20: mol_type = other DNA
gatatgatgtagcttaaaaa

SEQ ID NO: 134740 - DNA, 20 bp, synthetic construct
  source 1..20: mol_type = other DNA
agatatgatgtagcttaaaa

SEQ ID NO: 134741 - DNA, 20 bp, synthetic construct
  source 1..20: mol_type = other DNA
tagatatgatgtagcttaaa

SEQ ID NO: 134742 - DNA, 20 bp, synthetic construct
  source 1..20: mol_type = other DNA
ctagatatgatgtagcttaa

SEQ ID NO: 134743 - DNA, 20 bp, synthetic construct
  source 1..20: mol_type = other DNA
cctagatatgatgtagctta

SEQ ID NO: 134744 - DNA, 20 bp, synthetic construct
  source 1..20: mol_type = other DNA
acctagatatgatgtagctt

SEQ ID NO: 134745 - DNA, 20 bp, synthetic construct
  source 1..20: mol_type = other DNA
aacctagatatgatgtagct

SEQ ID NO: 134746 - DNA, 20 bp, synthetic construct
  source 1..20: mol_type = other DNA
aaacctagatatgatgtagc

SEQ ID NO: 134747 - DNA, 20 bp, synthetic construct
  source 1..20: mol_type = other DNA
aaaacctagatatgatgtag

SEQ ID NO: 134748 - DNA, 20 bp, synthetic construct
  source 1..20: mol_type = other DNA
aaaaacctagatatgatgta

SEQ ID NO: 134749 - DNA, 20 bp, synthetic construct
  source 1..20: mol_type = other DNA
taaaaacctagatatgatgt

SEQ ID NO: 134750 - DNA, 20 bp, synthetic construct
  source 1..20: mol_type = other DNA
ttaaaaacctagatatgatg

SEQ ID NO: 134751 - DNA, 20 bp, synthetic construct
  source 1..20: mol_type = other DNA
tttaaaaacctagatatgat

SEQ ID NO: 134752 - DNA, 20 bp, synthetic construct
  source 1..20: mol_type = other DNA
ttttaaaaacctagatatga

SEQ ID NO: 134753 - DNA, 20 bp, synthetic construct
  source 1..20: mol_type = other DNA
gttttaaaaacctagatatg

SEQ ID NO: 134754 - DNA, 20 bp, synthetic construct
  source 1..20: mol_type = other DNA
tgttttaaaaacctagatat

SEQ ID NO: 134755 - DNA, 20 bp, synthetic construct
  source 1..20: mol_type = other DNA
atgttttaaaaacctagata

SEQ ID NO: 134756 - DNA, 20 bp, synthetic construct
  source 1..20: mol_type = other DNA
aatgttttaaaaacctagat

SEQ ID NO: 134757 - DNA, 20 bp, synthetic construct
  source 1..20: mol_type = other DNA
aaatgttttaaaaacctaga

SEQ ID NO: 134758 - DNA, 20 bp, synthetic construct
  source 1..20: mol_type = other DNA
taaatgttttaaaaacctag

SEQ ID NO: 134759 - DNA, 20 bp, synthetic construct
  source 1..20: mol_type = other DNA
ttaaatgttttaaaaaccta

SEQ ID NO: 134760 - DNA, 20 bp, synthetic construct
  source 1..20: mol_type = other DNA
attaaatgttttaaaaacct

SEQ ID NO: 134761 - DNA, 20 bp, synthetic construct
  source 1..20: mol_type = other DNA
cattaaatgttttaaaaacc

SEQ ID NO: 134762 - DNA, 20 bp, synthetic construct
  source 1..20: mol_type = other DNA
gcattaaatgttttaaaaac

SEQ ID NO: 134763 - DNA, 20 bp, synthetic construct
  source 1..20: mol_type = other DNA
tgcattaaatgttttaaaaa

SEQ ID NO: 134764 - DNA, 20 bp, synthetic construct
  source 1..20: mol_type = other DNA
ttgcattaaatgttttaaaa

SEQ ID NO: 134765 - DNA, 20 bp, synthetic construct
  source 1..20: mol_type = other DNA
tttgcattaaatgttttaaa

SEQ ID NO: 134766 - DNA, 20 bp, synthetic construct
  source 1..20: mol_type = other DNA
gtttgcattaaatgttttaa

SEQ ID NO: 134767 - DNA, 20 bp, synthetic construct
  source 1..20: mol_type = other DNA
tgtttgcattaaatgtttta

SEQ ID NO: 134768 - DNA, 20 bp, synthetic construct
  source 1..20: mol_type = other DNA
ctgtttgcattaaatgtttt

SEQ ID NO: 134769 - DNA, 20 bp, synthetic construct
  source 1..20: mol_type = other DNA
tctgtttgcattaaatgttt

SEQ ID NO: 134770 - DNA, 20 bp, synthetic construct
  source 1..20: mol_type = other DNA
ttctgtttgcattaaatgtt

SEQ ID NO: 134771 - DNA, 20 bp, synthetic construct
  source 1..20: mol_type = other DNA
cttctgtttgcattaaatgt

SEQ ID NO: 134772 - DNA, 20 bp, synthetic construct
  source 1..20: mol_type = other DNA
tcttctgtttgcattaaatg

SEQ ID NO: 134773 - DNA, 20 bp, synthetic construct
  source 1..20: mol_type = other DNA
ttcttctgtttgcattaaat

SEQ ID NO: 134774 - DNA, 20 bp, synthetic construct
  source 1..20: mol_type = other DNA
gttcttctgtttgcattaaa

SEQ ID NO: 134775 - DNA, 20 bp, synthetic construct
  source 1..20: mol_type = other DNA
tgttcttctgtttgcattaa

SEQ ID NO: 134776 - DNA, 20 bp, synthetic construct
  source 1..20: mol_type = other DNA
atgttcttctgtttgcatta

SEQ ID NO: 134777 - DNA, 20 bp, synthetic construct
  source 1..20: mol_type = other DNA
catgttcttctgtttgcatt

SEQ ID NO: 134778 - DNA, 20 bp, synthetic construct
  source 1..20: mol_type = other DNA
gcatgttcttctgtttgcat

SEQ ID NO: 134779 - DNA, 20 bp, synthetic construct
  source 1..20: mol_type = other DNA
tgcatgttcttctgtttgca

SEQ ID NO: 134780 - DNA, 20 bp, synthetic construct
  source 1..20: mol_type = other DNA
gtgcatgttcttctgtttgc

SEQ ID NO: 134781 - DNA, 20 bp, synthetic construct
  source 1..20: mol_type = other DNA
ggtgcatgttcttctgtttg

SEQ ID NO: 134782 - DNA, 20 bp, synthetic construct
  source 1..20: mol_type = other DNA
gggtgcatgttcttctgttt

SEQ ID NO: 134783 - DNA, 20 bp, synthetic construct
  source 1..20: mol_type = other DNA
tgggtgcatgttcttctgtt

SEQ ID NO: 134784 - DNA, 20 bp, synthetic construct
  source 1..20: mol_type = other DNA
ctgggtgcatgttcttctgt

SEQ ID NO: 134785 - DNA, 20 bp, synthetic construct
  source 1..20: mol_type = other DNA
tctgggtgcatgttcttctg

SEQ ID NO: 134786 - DNA, 20 bp, synthetic construct
  source 1..20: mol_type = other DNA
atctgggtgcatgttcttct

SEQ ID NO: 134787 - DNA, 20 bp, synthetic construct
  source 1..20: mol_type = other DNA
catctgggtgcatgttcttc

SEQ ID NO: 134788 - DNA, 20 bp, synthetic construct
  source 1..20: mol_type = other DNA
acatctgggtgcatgttctt

SEQ ID NO: 134789 - DNA, 20 bp, synthetic construct
  source 1..20: mol_type = other DNA
aacatctgggtgcatgttct

SEQ ID NO: 134790 - DNA, 20 bp, synthetic construct
  source 1..20: mol_type = other DNA
caacatctgggtgcatgttc

SEQ ID NO: 134791 - DNA, 20 bp, synthetic construct
  source 1..20: mol_type = other DNA
ccaacatctgggtgcatgtt

SEQ ID NO: 134792 - DNA, 20 bp, synthetic construct
  source 1..20: mol_type = other DNA
accaacatctgggtgcatgt

SEQ ID NO: 134793 - DNA, 20 bp, synthetic construct
  source 1..20: mol_type = other DNA
caccaacatctgggtgcatg

SEQ ID NO: 134794 - DNA, 20 bp, synthetic construct
  source 1..20: mol_type = other DNA
tcaccaacatctgggtgcat

SEQ ID NO: 134795 - DNA, 20 bp, synthetic construct
  source 1..20: mol_type = other DNA
gtcaccaacatctgggtgca

SEQ ID NO: 134796 - DNA, 20 bp, synthetic construct
  source 1..20: mol_type = other DNA
tgtcaccaacatctgggtgc

SEQ ID NO: 134797 - DNA, 20 bp, synthetic construct
  source 1..20: mol_type = other DNA
ttgtcaccaacatctgggtg

SEQ ID NO: 134798 - DNA, 20 bp, synthetic construct
  source 1..20: mol_type = other DNA
attgtcaccaacatctgggt

SEQ ID NO: 134799 - DNA, 20 bp, synthetic construct
  source 1..20: mol_type = other DNA
aattgtcaccaacatctggg

SEQ ID NO: 134800 - DNA, 20 bp, synthetic construct
  source 1..20: mol_type = other DNA
aaattgtcaccaacatctgg

SEQ ID NO: 134801 - DNA, 20 bp, synthetic construct
  source 1..20: mol_type = other DNA
aaaattgtcaccaacatctg

SEQ ID NO: 134802 - DNA, 20 bp, synthetic construct
  source 1..20: mol_type = other DNA
taaaattgtcaccaacatct

SEQ ID NO: 134803 - DNA, 20 bp, synthetic construct
  source 1..20: mol_type = other DNA
ataaaattgtcaccaacatc

SEQ ID NO: 134804 - DNA, 20 bp, synthetic construct
  source 1..20: mol_type = other DNA
cataaaattgtcaccaacat

SEQ ID NO: 134805 - DNA, 20 bp, synthetic construct
  source 1..20: mol_type = other DNA
acataaaattgtcaccaaca

SEQ ID NO: 134806 - DNA, 20 bp, synthetic construct
  source 1..20: mol_type = other DNA
gacataaaattgtcaccaac

SEQ ID NO: 134807 - DNA, 20 bp, synthetic construct
  source 1..20: mol_type = other DNA
tgacataaaattgtcaccaa

SEQ ID NO: 134808 - DNA, 20 bp, synthetic construct
  source 1..20: mol_type = other DNA
gtgacataaaattgtcacca

SEQ ID NO: 134809 - DNA, 20 bp, synthetic construct
  source 1..20: mol_type = other DNA
ggtgacataaaattgtcacc

SEQ ID NO: 134810 - DNA, 20 bp, synthetic construct
  source 1..20: mol_type = other DNA
aggtgacataaaattgtcac

SEQ ID NO: 134811 - DNA, 20 bp, synthetic construct
  source 1..20: mol_type = other DNA
aaggtgacataaaattgtca

SEQ ID NO: 134812 - DNA, 20 bp, synthetic construct
  source 1..20: mol_type = other DNA
aaaggtgacataaaattgtc

SEQ ID NO: 134813 - DNA, 20 bp, synthetic construct
  source 1..20: mol_type = other DNA
aaaaggtgacataaaattgt

SEQ ID NO: 134814 - DNA, 20 bp, synthetic construct
  source 1..20: mol_type = other DNA
gaaaaggtgacataaaattg

SEQ ID NO: 134815 - DNA, 20 bp, synthetic construct
  source 1..20: mol_type = other DNA
agaaaaggtgacataaaatt

SEQ ID NO: 134816 - DNA, 20 bp, synthetic construct
  source 1..20: mol_type = other DNA
gagaaaaggtgacataaaat

SEQ ID NO: 134817 - DNA, 20 bp, synthetic construct
  source 1..20: mol_type = other DNA
tgagaaaaggtgacataaaa

SEQ ID NO: 134818 - DNA, 20 bp, synthetic construct
  source 1..20: mol_type = other DNA
atgagaaaaggtgacataaa

SEQ ID NO: 134819 - DNA, 20 bp, synthetic construct
  source 1..20: mol_type = other DNA
aatgagaaaaggtgacataa

SEQ ID NO: 134820 - DNA, 20 bp, synthetic construct
  source 1..20: mol_type = other DNA
gaatgagaaaaggtgacata

SEQ ID NO: 134821 - DNA, 20 bp, synthetic construct
  source 1..20: mol_type = other DNA
tgaatgagaaaaggtgacat

SEQ ID NO: 134822 - DNA, 20 bp, synthetic construct
  source 1..20: mol_type = other DNA
atgaatgagaaaaggtgaca

SEQ ID NO: 134823 - DNA, 20 bp, synthetic construct
  source 1..20: mol_type = other DNA
aatgaatgagaaaaggtgac

SEQ ID NO: 134824 - DNA, 20 bp, synthetic construct
  source 1..20: mol_type = other DNA
taatgaatgagaaaaggtga

SEQ ID NO: 134825 - DNA, 20 bp, synthetic construct
  source 1..20: mol_type = other DNA
ttaatgaatgagaaaaggtg

SEQ ID NO: 134826 - DNA, 20 bp, synthetic construct
  source 1..20: mol_type = other DNA
attaatgaatgagaaaaggt

SEQ ID NO: 134827 - DNA, 20 bp, synthetic construct
  source 1..20: mol_type = other DNA
aattaatgaatgagaaaagg

SEQ ID NO: 134828 - DNA, 20 bp, synthetic construct
  source 1..20: mol_type = other DNA
caattaatgaatgagaaaag

SEQ ID NO: 134829 - DNA, 20 bp, synthetic construct
  source 1..20: mol_type = other DNA
acaattaatgaatgagaaaa

SEQ ID NO: 134830 - DNA, 20 bp, synthetic construct
  source 1..20: mol_type = other DNA
aacaattaatgaatgagaaa

SEQ ID NO: 134831 - DNA, 20 bp, synthetic construct
  source 1..20: mol_type = other DNA
taacaattaatgaatgagaa

SEQ ID NO: 134832 - DNA, 20 bp, synthetic construct
  source 1..20: mol_type = other DNA
ataacaattaatgaatgaga

SEQ ID NO: 134833 - DNA, 20 bp, synthetic construct
  source 1..20: mol_type = other DNA
tataacaattaatgaatgag

SEQ ID NO: 134834 - DNA, 20 bp, synthetic construct
  source 1..20: mol_type = other DNA
ctataacaattaatgaatga

SEQ ID NO: 134835 - DNA, 20 bp, synthetic construct
  source 1..20: mol_type = other DNA
gctataacaattaatgaatg

SEQ ID NO: 134836 - DNA, 20 bp, synthetic construct
  source 1..20: mol_type = other DNA
ggctataacaattaatgaat

SEQ ID NO: 134837 - DNA, 20 bp, synthetic construct
  source 1..20: mol_type = other DNA
tggctataacaattaatgaa

SEQ ID NO: 134838 - DNA, 20 bp, synthetic construct
  source 1..20: mol_type = other DNA
atggctataacaattaatga

SEQ ID NO: 134839 - DNA, 20 bp, synthetic construct
  source 1..20: mol_type = other DNA
tatggctataacaattaatg

SEQ ID NO: 134840 - DNA, 20 bp, synthetic construct
  source 1..20: mol_type = other DNA
ctatggctataacaattaat

SEQ ID NO: 134841 - DNA, 20 bp, synthetic construct
  source 1..20: mol_type = other DNA
gctatggctataacaattaa

SEQ ID NO: 134842 - DNA, 20 bp, synthetic construct
  source 1..20: mol_type = other DNA
ggctatggctataacaatta

SEQ ID NO: 134843 - DNA, 20 bp, synthetic construct
  source 1..20: mol_type = other DNA
tggctatggctataacaatt

SEQ ID NO: 134844 - DNA, 20 bp, synthetic construct
  source 1..20: mol_type = other DNA
ttggctatggctataacaat

SEQ ID NO: 134845 - DNA, 20 bp, synthetic construct
  source 1..20: mol_type = other DNA
tttggctatggctataacaa

SEQ ID NO: 134846 - DNA, 20 bp, synthetic construct
  source 1..20: mol_type = other DNA
ctttggctatggctataaca

SEQ ID NO: 134847 - DNA, 20 bp, synthetic construct
  source 1..20: mol_type = other DNA
cctttggctatggctataac

SEQ ID NO: 134848 - DNA, 20 bp, synthetic construct
  source 1..20: mol_type = other DNA
gcctttggctatggctataa

SEQ ID NO: 134849 - DNA, 20 bp, synthetic construct
  source 1..20: mol_type = other DNA
tgcctttggctatggctata

SEQ ID NO: 134850 - DNA, 20 bp, synthetic construct
  source 1..20: mol_type = other DNA
atgcctttggctatggctat

SEQ ID NO: 134851 - DNA, 20 bp, synthetic construct
  source 1..20: mol_type = other DNA
aatgcctttggctatggcta

SEQ ID NO: 134852 - DNA, 20 bp, synthetic construct
  source 1..20: mol_type = other DNA
caatgcctttggctatggct

SEQ ID NO: 134853 - DNA, 20 bp, synthetic construct
  source 1..20: mol_type = other DNA
tcaatgcctttggctatggc

SEQ ID NO: 134854 - DNA, 20 bp, synthetic construct
  source 1..20: mol_type = other DNA
ttcaatgcctttggctatgg

SEQ ID NO: 134855 - DNA, 20 bp, synthetic construct
  source 1..20: mol_type = other DNA
tttcaatgcctttggctatg

SEQ ID NO: 134856 - DNA, 20 bp, synthetic construct
  source 1..20: mol_type = other DNA
ttttcaatgcctttggctat

SEQ ID NO: 134857 - DNA, 20 bp, synthetic construct
  source 1..20: mol_type = other DNA
gttttcaatgcctttggcta

SEQ ID NO: 134858 - DNA, 20 bp, synthetic construct
  source 1..20: mol_type = other DNA
tgttttcaatgcctttggct

SEQ ID NO: 134859 - DNA, 20 bp, synthetic construct
  source 1..20: mol_type = other DNA
atgttttcaatgcctttggc

SEQ ID NO: 134860 - DNA, 20 bp, synthetic construct
  source 1..20: mol_type = other DNA
tatgttttcaatgcctttgg

SEQ ID NO: 134861 - DNA, 20 bp, synthetic construct
  source 1..20: mol_type = other DNA
ctatgttttcaatgcctttg

SEQ ID NO: 134862 - DNA, 20 bp, synthetic construct
  source 1..20: mol_type = other DNA
cctatgttttcaatgccttt

SEQ ID NO: 134863 - DNA, 20 bp, synthetic construct
  source 1..20: mol_type = other DNA
tcctatgttttcaatgcctt

SEQ ID NO: 134864 - DNA, 20 bp, synthetic construct
  source 1..20: mol_type = other DNA
gtcctatgttttcaatgcct

SEQ ID NO: 134865 - DNA, 20 bp, synthetic construct
  source 1..20: mol_type = other DNA
ggtcctatgttttcaatgcc

SEQ ID NO: 134866 - DNA, 20 bp, synthetic construct
  source 1..20: mol_type = other DNA
tggtcctatgttttcaatgc

SEQ ID NO: 134867 - DNA, 20 bp, synthetic construct
  source 1..20: mol_type = other DNA
gtggtcctatgttttcaatg

SEQ ID NO: 134868 - DNA, 20 bp, synthetic construct
  source 1..20: mol_type = other DNA
agtggtcctatgttttcaat

SEQ ID NO: 134869 - DNA, 20 bp, synthetic construct
  source 1..20: mol_type = other DNA
tagtggtcctatgttttcaa

SEQ ID NO: 134870 - DNA, 20 bp, synthetic construct
  source 1..20: mol_type = other DNA
ttagtggtcctatgttttca

SEQ ID NO: 134871 - DNA, 20 bp, synthetic construct
  source 1..20: mol_type = other DNA
attagtggtcctatgttttc

SEQ ID NO: 134872 - DNA, 20 bp, synthetic construct
  source 1..20: mol_type = other DNA
cattagtggtcctatgtttt

SEQ ID NO: 134873 - DNA, 20 bp, synthetic construct
  source 1..20: mol_type = other DNA
tcattagtggtcctatgttt

SEQ ID NO: 134874 - DNA, 20 bp, synthetic construct
  source 1..20: mol_type = other DNA
gtcattagtggtcctatgtt

SEQ ID NO: 134875 - DNA, 20 bp, synthetic construct
  source 1..20: mol_type = other DNA
agtcattagtggtcctatgt

SEQ ID NO: 134876 - DNA, 20 bp, synthetic construct
  source 1..20: mol_type = other DNA
cagtcattagtggtcctatg

SEQ ID NO: 134877 - DNA, 20 bp, synthetic construct
  source 1..20: mol_type = other DNA
gcagtcattagtggtcctat

SEQ ID NO: 134878 - DNA, 20 bp, synthetic construct
  source 1..20: mol_type = other DNA
tgcagtcattagtggtccta

SEQ ID NO: 134879 - DNA, 20 bp, synthetic construct
  source 1..20: mol_type = other DNA
ttgcagtcattagtggtcct

SEQ ID NO: 134880 - DNA, 20 bp, synthetic construct
  source 1..20: mol_type = other DNA
tttgcagtcattagtggtcc

SEQ ID NO: 134881 - DNA, 20 bp, synthetic construct
  source 1..20: mol_type = other DNA
ttttgcagtcattagtggtc

SEQ ID NO: 134882 - DNA, 20 bp, synthetic construct
  source 1..20: mol_type = other DNA
attttgcagtcattagtggt

SEQ ID NO: 134883 - DNA, 20 bp, synthetic construct
  source 1..20: mol_type = other DNA
cattttgcagtcattagtgg

SEQ ID NO: 134884 - DNA, 20 bp, synthetic construct
  source 1..20: mol_type = other DNA
tcattttgcagtcattagtg

SEQ ID NO: 134885 - DNA, 20 bp, synthetic construct
  source 1..20: mol_type = other DNA
ttcattttgcagtcattagt

SEQ ID NO: 134886 - DNA, 20 bp, synthetic construct
  source 1..20: mol_type = other DNA
tttcattttgcagtcattag

SEQ ID NO: 134887 - DNA, 20 bp, synthetic construct
  source 1..20: mol_type = other DNA
atttcattttgcagtcatta

SEQ ID NO: 134888 - DNA, 20 bp, synthetic construct
  source 1..20: mol_type = other DNA
gatttcattttgcagtcatt

SEQ ID NO: 134889 - DNA, 20 bp, synthetic construct
  source 1..20: mol_type = other DNA
ggatttcattttgcagtcat

SEQ ID NO: 134890 - DNA, 20 bp, synthetic construct
  source 1..20: mol_type = other DNA
aggatttcattttgcagtca

SEQ ID NO: 134891 - DNA, 20 bp, synthetic construct
  source 1..20: mol_type = other DNA
caggatttcattttgcagtc

SEQ ID NO: 134892 - DNA, 20 bp, synthetic construct
  source 1..20: mol_type = other DNA
tcaggatttcattttgcagt

SEQ ID NO: 134893 - DNA, 20 bp, synthetic construct
  source 1..20: mol_type = other DNA
atcaggatttcattttgcag

SEQ ID NO: 134894 - DNA, 20 bp, synthetic construct
  source 1..20: mol_type = other DNA
aatcaggatttcattttgca

SEQ ID NO: 134895 - DNA, 20 bp, synthetic construct
  source 1..20: mol_type = other DNA
taatcaggatttcattttgc

SEQ ID NO: 134896 - DNA, 20 bp, synthetic construct
  source 1..20: mol_type = other DNA
ataatcaggatttcattttg

SEQ ID NO: 134897 - DNA, 20 bp, synthetic construct
  source 1..20: mol_type = other DNA
aataatcaggatttcatttt

SEQ ID NO: 134898 - DNA, 20 bp, synthetic construct
  source 1..20: mol_type = other DNA
caataatcaggatttcattt

SEQ ID NO: 134899 - DNA, 20 bp, synthetic construct
  source 1..20: mol_type = other DNA
acaataatcaggatttcatt

SEQ ID NO: 134900 - DNA, 20 bp, synthetic construct
  source 1..20: mol_type = other DNA
aacaataatcaggatttcat

SEQ ID NO: 134901 - DNA, 20 bp, synthetic construct
  source 1..20: mol_type = other DNA
aaacaataatcaggatttca

SEQ ID NO: 134902 - DNA, 20 bp, synthetic construct
  source 1..20: mol_type = other DNA
aaaacaataatcaggatttc

SEQ ID NO: 134903 - DNA, 20 bp, synthetic construct
  source 1..20: mol_type = other DNA
aaaaacaataatcaggattt

SEQ ID NO: 134904 - DNA, 20 bp, synthetic construct
  source 1..20: mol_type = other DNA
taaaaacaataatcaggatt

SEQ ID NO: 134905 - DNA, 20 bp, synthetic construct
  source 1..20: mol_type = other DNA
ttaaaaacaataatcaggat

SEQ ID NO: 134906 - DNA, 20 bp, synthetic construct
  source 1..20: mol_type = other DNA
tttaaaaacaataatcagga

SEQ ID NO: 134907 - DNA, 20 bp, synthetic construct
  source 1..20: mol_type = other DNA
atttaaaaacaataatcagg

SEQ ID NO: 134908 - DNA, 20 bp, synthetic construct
  source 1..20: mol_type = other DNA
aatttaaaaacaataatcag

SEQ ID NO: 134909 - DNA, 20 bp, synthetic construct
  source 1..20: mol_type = other DNA
aaatttaaaaacaataatca

SEQ ID NO: 134910 - DNA, 20 bp, synthetic construct
  source 1..20: mol_type = other DNA
aaaatttaaaaacaataatc

SEQ ID NO: 134911 - DNA, 20 bp, synthetic construct
  source 1..20: mol_type = other DNA
aaaaatttaaaaacaataat

SEQ ID NO: 134912 - DNA, 20 bp, synthetic construct
  source 1..20: mol_type = other DNA
taaaaatttaaaaacaataa

SEQ ID NO: 134913 - DNA, 20 bp, synthetic construct
  source 1..20: mol_type = other DNA
ctaaaaatttaaaaacaata

SEQ ID NO: 134914 - DNA, 20 bp, synthetic construct
  source 1..20: mol_type = other DNA
actaaaaatttaaaaacaat

SEQ ID NO: 134915 - DNA, 20 bp, synthetic construct
  source 1..20: mol_type = other DNA
tactaaaaatttaaaaacaa

SEQ ID NO: 134916 - DNA, 20 bp, synthetic construct
  source 1..20: mol_type = other DNA
atactaaaaatttaaaaaca

SEQ ID NO: 134917 - DNA, 20 bp, synthetic construct
  source 1..20: mol_type = other DNA
catactaaaaatttaaaaac

SEQ ID NO: 134918 - DNA, 20 bp, synthetic construct
  source 1..20: mol_type = other DNA
acatactaaaaatttaaaaa

SEQ ID NO: 134919 - DNA, 20 bp, synthetic construct
  source 1..20: mol_type = other DNA
aacatactaaaaatttaaaa

SEQ ID NO: 134920 - DNA, 20 bp, synthetic construct
  source 1..20: mol_type = other DNA
aaacatactaaaaatttaaa

SEQ ID NO: 134921 - DNA, 20 bp, synthetic construct
  source 1..20: mol_type = other DNA
taaacatactaaaaatttaa

SEQ ID NO: 134922 - DNA, 20 bp, synthetic construct
  source 1..20: mol_type = other DNA
ttaaacatactaaaaattta

SEQ ID NO: 134923 - DNA, 20 bp, synthetic construct
  source 1..20: mol_type = other DNA
attaaacatactaaaaattt

SEQ ID NO: 134924 - DNA, 20 bp, synthetic construct
  source 1..20: mol_type = other DNA
tattaaacatactaaaaatt

SEQ ID NO: 134925 - DNA, 20 bp, synthetic construct
  source 1..20: mol_type = other DNA
gtattaaacatactaaaaat

SEQ ID NO: 134926 - DNA, 20 bp, synthetic construct
  source 1..20: mol_type = other DNA
tgtattaaacatactaaaaa

SEQ ID NO: 134927 - DNA, 20 bp, synthetic construct
  source 1..20: mol_type = other DNA
gtgtattaaacatactaaaa

SEQ ID NO: 134928 - DNA, 20 bp, synthetic construct
  source 1..20: mol_type = other DNA
tgtgtattaaacatactaaa

SEQ ID NO: 134929 - DNA, 20 bp, synthetic construct
  source 1..20: mol_type = other DNA
atgtgtattaaacatactaa

SEQ ID NO: 134930 - DNA, 20 bp, synthetic construct
  source 1..20: mol_type = other DNA
tatgtgtattaaacatacta

SEQ ID NO: 134931 - DNA, 20 bp, synthetic construct
  source 1..20: mol_type = other DNA
atatgtgtattaaacatact

SEQ ID NO: 134932 - DNA, 20 bp, synthetic construct
  source 1..20: mol_type = other DNA
catatgtgtattaaacatac

SEQ ID NO: 134933 - DNA, 20 bp, synthetic construct
  source 1..20: mol_type = other DNA
gcatatgtgtattaaacata

SEQ ID NO: 134934 - DNA, 20 bp, synthetic construct
  source 1..20: mol_type = other DNA
agcatatgtgtattaaacat

SEQ ID NO: 134935 - DNA, 20 bp, synthetic construct
  source 1..20: mol_type = other DNA
tagcatatgtgtattaaaca

SEQ ID NO: 134936 - DNA, 20 bp, synthetic construct
  source 1..20: mol_type = other DNA
ttagcatatgtgtattaaac

SEQ ID NO: 134937 - DNA, 20 bp, synthetic construct
  source 1..20: mol_type = other DNA
gttagcatatgtgtattaaa

SEQ ID NO: 134938 - DNA, 20 bp, synthetic construct
  source 1..20: mol_type = other DNA
tgttagcatatgtgtattaa

SEQ ID NO: 134939 - DNA, 20 bp, synthetic construct
  source 1..20: mol_type = other DNA
atgttagcatatgtgtatta

SEQ ID NO: 134940 - DNA, 20 bp, synthetic construct
  source 1..20: mol_type = other DNA
aatgttagcatatgtgtatt

SEQ ID NO: 134941 - DNA, 20 bp, synthetic construct
  source 1..20: mol_type = other DNA
taatgttagcatatgtgtat

SEQ ID NO: 134942 - DNA, 20 bp, synthetic construct
  source 1..20: mol_type = other DNA
gtaatgttagcatatgtgta

SEQ ID NO: 134943 - DNA, 20 bp, synthetic construct
  source 1..20: mol_type = other DNA
agtaatgttagcatatgtgt

SEQ ID NO: 134944 - DNA, 20 bp, synthetic construct
  source 1..20: mol_type = other DNA
cagtaatgttagcatatgtg

SEQ ID NO: 134945 - DNA, 20 bp, synthetic construct
  source 1..20: mol_type = other DNA
tcagtaatgttagcatatgt

SEQ ID NO: 134946 - DNA, 20 bp, synthetic construct
  source 1..20: mol_type = other DNA
ttcagtaatgttagcatatg

SEQ ID NO: 134947 - DNA, 20 bp, synthetic construct
  source 1..20: mol_type = other DNA
gttcagtaatgttagcatat

SEQ ID NO: 134948 - DNA, 20 bp, synthetic construct
  source 1..20: mol_type = other DNA
tgttcagtaatgttagcata

SEQ ID NO: 134949 - DNA, 20 bp, synthetic construct
  source 1..20: mol_type = other DNA
ctgttcagtaatgttagcat

SEQ ID NO: 134950 - DNA, 20 bp, synthetic construct
  source 1..20: mol_type = other DNA
actgttcagtaatgttagca

SEQ ID NO: 134951 - DNA, 20 bp, synthetic construct
  source 1..20: mol_type = other DNA
aactgttcagtaatgttagc

SEQ ID NO: 134952 - DNA, 20 bp, synthetic construct
  source 1..20: mol_type = other DNA
taactgttcagtaatgttag

SEQ ID NO: 134953 - DNA, 20 bp, synthetic construct
  source 1..20: mol_type = other DNA
ttaactgttcagtaatgtta

SEQ ID NO: 134954 - DNA, 20 bp, synthetic construct
  source 1..20: mol_type = other DNA
tttaactgttcagtaatgtt

SEQ ID NO: 134955 - DNA, 20 bp, synthetic construct
  source 1..20: mol_type = other DNA
atttaactgttcagtaatgt

SEQ ID NO: 134956 - DNA, 20 bp, synthetic construct
  source 1..20: mol_type = other DNA
catttaactgttcagtaatg

SEQ ID NO: 134957 - DNA, 20 bp, synthetic construct
  source 1..20: mol_type = other DNA
tcatttaactgttcagtaat

SEQ ID NO: 134958 - DNA, 20 bp, synthetic construct
  source 1..20: mol_type = other DNA
atcatttaactgttcagtaa

SEQ ID NO: 134959 - DNA, 20 bp, synthetic construct
  source 1..20: mol_type = other DNA
tatcatttaactgttcagta

SEQ ID NO: 134960 - DNA, 20 bp, synthetic construct
  source 1..20: mol_type = other DNA
ttatcatttaactgttcagt

SEQ ID NO: 134961 - DNA, 20 bp, synthetic construct
  source 1..20: mol_type = other DNA
tttatcatttaactgttcag

SEQ ID NO: 134962 - DNA, 20 bp, synthetic construct
  source 1..20: mol_type = other DNA
ttttatcatttaactgttca

SEQ ID NO: 134963 - DNA, 20 bp, synthetic construct
  source 1..20: mol_type = other DNA
attttatcatttaactgttc

SEQ ID NO: 134964 - DNA, 20 bp, synthetic construct
  source 1..20: mol_type = other DNA
tattttatcatttaactgtt

SEQ ID NO: 134965 - DNA, 20 bp, synthetic construct
  source 1..20: mol_type = other DNA
ctattttatcatttaactgt

SEQ ID NO: 134966 - DNA, 20 bp, synthetic construct
  source 1..20: mol_type = other DNA
cctattttatcatttaactg

SEQ ID NO: 134967 - DNA, 20 bp, synthetic construct
  source 1..20: mol_type = other DNA
tcctattttatcatttaact

SEQ ID NO: 134968 - DNA, 20 bp, synthetic construct
  source 1..20: mol_type = other DNA
atcctattttatcatttaac

SEQ ID NO: 134969 - DNA, 20 bp, synthetic construct
  source 1..20: mol_type = other DNA
tatcctattttatcatttaa

SEQ ID NO: 134970 - DNA, 20 bp, synthetic construct
  source 1..20: mol_type = other DNA
ttatcctattttatcattta

SEQ ID NO: 134971 - DNA, 20 bp, synthetic construct
  source 1..20: mol_type = other DNA
attatcctattttatcattt

SEQ ID NO: 134972 - DNA, 20 bp, synthetic construct
  source 1..20: mol_type = other DNA
aattatcctattttatcatt

SEQ ID NO: 134973 - DNA, 20 bp, synthetic construct
  source 1..20: mol_type = other DNA
taattatcctattttatcat

SEQ ID NO: 134974 - DNA, 20 bp, synthetic construct
  source 1..20: mol_type = other DNA
ataattatcctattttatca

SEQ ID NO: 134975 - DNA, 20 bp, synthetic construct
  source 1..20: mol_type = other DNA
aataattatcctattttatc

SEQ ID NO: 134976 - DNA, 20 bp, synthetic construct
  source 1..20: mol_type = other DNA
aaataattatcctattttat

SEQ ID NO: 134977 - DNA, 20 bp, synthetic construct
  source 1..20: mol_type = other DNA
aaaataattatcctatttta

SEQ ID NO: 134978 - DNA, 20 bp, synthetic construct
  source 1..20: mol_type = other DNA
taaaataattatcctatttt

SEQ ID NO: 134979 - DNA, 20 bp, synthetic construct
  source 1..20: mol_type = other DNA
ataaaataattatcctattt

SEQ ID NO: 134980 - DNA, 20 bp, synthetic construct
  source 1..20: mol_type = other DNA
aataaaataattatcctatt

SEQ ID NO: 134981 - DNA, 20 bp, synthetic construct
  source 1..20: mol_type = other DNA
gaataaaataattatcctat

SEQ ID NO: 134982 - DNA, 20 bp, synthetic construct
  source 1..20: mol_type = other DNA
agaataaaataattatccta

SEQ ID NO: 134983 - DNA, 20 bp, synthetic construct
  source 1..20: mol_type = other DNA
tagaataaaataattatcct

SEQ ID NO: 134984 - DNA, 20 bp, synthetic construct
  source 1..20: mol_type = other DNA
ttagaataaaataattatcc

SEQ ID NO: 134985 - DNA, 20 bp, synthetic construct
  source 1..20: mol_type = other DNA
tttagaataaaataattatc

SEQ ID NO: 134986 - DNA, 20 bp, synthetic construct
  source 1..20: mol_type = other DNA
ttttagaataaaataattat

SEQ ID NO: 134987 - DNA, 20 bp, synthetic construct
  source 1..20: mol_type = other DNA
tttttagaataaaataatta

SEQ ID NO: 134988 - DNA, 20 bp, synthetic construct
  source 1..20: mol_type = other DNA
ttttttagaataaaataatt

SEQ ID NO: 134989 - DNA, 20 bp, synthetic construct
  source 1..20: mol_type = other DNA
cttttttagaataaaataat

SEQ ID NO: 134990 - DNA, 20 bp, synthetic construct
  source 1..20: mol_type = other DNA
acttttttagaataaaataa

SEQ ID NO: 134991 - DNA, 20 bp, synthetic construct
  source 1..20: mol_type = other DNA
tacttttttagaataaaata

SEQ ID NO: 134992 - DNA, 20 bp, synthetic construct
  source 1..20: mol_type = other DNA
atacttttttagaataaaat

SEQ ID NO: 134993 - DNA, 20 bp, synthetic construct
  source 1..20: mol_type = other DNA
aatacttttttagaataaaa

SEQ ID NO: 134994 - DNA, 20 bp, synthetic construct
  source 1..20: mol_type = other DNA
caatacttttttagaataaa

SEQ ID NO: 134995 - DNA, 20 bp, synthetic construct
  source 1..20: mol_type = other DNA
tcaatacttttttagaataa

SEQ ID NO: 134996 - DNA, 20 bp, synthetic construct
  source 1..20: mol_type = other DNA
gtcaatacttttttagaata

SEQ ID NO: 134997 - DNA, 20 bp, synthetic construct
  source 1..20: mol_type = other DNA
ggtcaatacttttttagaat

SEQ ID NO: 134998 - DNA, 20 bp, synthetic construct
  source 1..20: mol_type = other DNA
aggtcaatacttttttagaa

SEQ ID NO: 134999 - DNA, 20 bp, synthetic construct
  source 1..20: mol_type = other DNA
aaggtcaatacttttttaga

SEQ ID NO: 135000 - DNA, 20 bp, synthetic construct
  source 1..20: mol_type = other DNA
caaggtcaatacttttttag

SEQ ID NO: 135001 - DNA, 20 bp, synthetic construct
  source 1..20: mol_type = other DNA
tcaaggtcaatactttttta

SEQ ID NO: 135002 - DNA, 20 bp, synthetic construct
  source 1..20: mol_type = other DNA
gtcaaggtcaatactttttt

SEQ ID NO: 135003 - DNA, 20 bp, synthetic construct
  source 1..20: mol_type = other DNA
ggtcaaggtcaatacttttt

SEQ ID NO: 135004 - DNA, 20 bp, synthetic construct
  source 1..20: mol_type = other DNA
aggtcaaggtcaatactttt

SEQ ID NO: 135005 - DNA, 20 bp, synthetic construct
  source 1..20: mol_type = other DNA
gaggtcaaggtcaatacttt

SEQ ID NO: 135006 - DNA, 20 bp, synthetic construct
  source 1..20: mol_type = other DNA
agaggtcaaggtcaatactt

SEQ ID NO: 135007 - DNA, 20 bp, synthetic construct
  source 1..20: mol_type = other DNA
aagaggtcaaggtcaatact

SEQ ID NO: 135008 - DNA, 20 bp, synthetic construct
  source 1..20: mol_type = other DNA
aaagaggtcaaggtcaatac

SEQ ID NO: 135009 - DNA, 20 bp, synthetic construct
  source 1..20: mol_type = other DNA
gaaagaggtcaaggtcaata

SEQ ID NO: 135010 - DNA, 20 bp, synthetic construct
  source 1..20: mol_type = other DNA
agaaagaggtcaaggtcaat

SEQ ID NO: 135011 - DNA, 20 bp, synthetic construct
  source 1..20: mol_type = other DNA
tagaaagaggtcaaggtcaa

SEQ ID NO: 135012 - DNA, 20 bp, synthetic construct
  source 1..20: mol_type = other DNA
ctagaaagaggtcaaggtca

SEQ ID NO: 135013 - DNA, 20 bp, synthetic construct
  source 1..20: mol_type = other DNA
gctagaaagaggtcaaggtc

SEQ ID NO: 135014 - DNA, 20 bp, synthetic construct
  source 1..20: mol_type = other DNA
agctagaaagaggtcaaggt

SEQ ID NO: 135015 - DNA, 20 bp, synthetic construct
  source 1..20: mol_type = other DNA
tagctagaaagaggtcaagg

SEQ ID NO: 135016 - DNA, 20 bp, synthetic construct
  source 1..20: mol_type = other DNA
atagctagaaagaggtcaag

SEQ ID NO: 135017 - DNA, 20 bp, synthetic construct
  source 1..20: mol_type = other DNA
gatagctagaaagaggtcaa

SEQ ID NO: 135018 - DNA, 20 bp, synthetic construct
  source 1..20: mol_type = other DNA
agatagctagaaagaggtca

SEQ ID NO: 135019 - DNA, 20 bp, synthetic construct
  source 1..20: mol_type = other DNA
aagatagctagaaagaggtc

SEQ ID NO: 135020 - DNA, 20 bp, synthetic construct
  source 1..20: mol_type = other DNA
taagatagctagaaagaggt

SEQ ID NO: 135021 - DNA, 20 bp, synthetic construct
  source 1..20: mol_type = other DNA
ctaagatagctagaaagagg

SEQ ID NO: 135022 - DNA, 20 bp, synthetic construct
  source 1..20: mol_type = other DNA
tctaagatagctagaaagag

SEQ ID NO: 135023 - DNA, 20 bp, synthetic construct
  source 1..20: mol_type = other DNA
ttctaagatagctagaaaga

SEQ ID NO: 135024 - DNA, 20 bp, synthetic construct
  source 1..20: mol_type = other DNA
tttctaagatagctagaaag

SEQ ID NO: 135025 - DNA, 20 bp, synthetic construct
  source 1..20: mol_type = other DNA
ctttctaagatagctagaaa

SEQ ID NO: 135026 - DNA, 20 bp, synthetic construct
  source 1..20: mol_type = other DNA
cctttctaagatagctagaa

SEQ ID NO: 135027 - DNA, 20 bp, synthetic construct
  source 1..20: mol_type = other DNA
ccctttctaagatagctaga

SEQ ID NO: 135028 - DNA, 20 bp, synthetic construct
  source 1..20: mol_type = other DNA
gccctttctaagatagctag

SEQ ID NO: 135029 - DNA, 20 bp, synthetic construct
  source 1..20: mol_type = other DNA
agccctttctaagatagcta

SEQ ID NO: 135030 - DNA, 20 bp, synthetic construct
  source 1..20: mol_type = other DNA
aagccctttctaagatagct

SEQ ID NO: 135031 - DNA, 20 bp, synthetic construct
  source 1..20: mol_type = other DNA
aaagccctttctaagatagc

SEQ ID NO: 135032 - DNA, 20 bp, synthetic construct
  source 1..20: mol_type = other DNA
aaaagccctttctaagatag

SEQ ID NO: 135033 - DNA, 20 bp, synthetic construct
  source 1..20: mol_type = other DNA
caaaagccctttctaagata

SEQ ID NO: 135034 - DNA, 20 bp, synthetic construct
  source 1..20: mol_type = other DNA
acaaaagccctttctaagat

SEQ ID NO: 135035 - DNA, 20 bp, synthetic construct
  source 1..20: mol_type = other DNA
gacaaaagccctttctaaga

SEQ ID NO: 135036 - DNA, 20 bp, synthetic construct
  source 1..20: mol_type = other DNA
tgacaaaagccctttctaag

SEQ ID NO: 135037 - DNA, 20 bp, synthetic construct
  source 1..20: mol_type = other DNA
ttgacaaaagccctttctaa

SEQ ID NO: 135038 - DNA, 20 bp, synthetic construct
  source 1..20: mol_type = other DNA
tttgacaaaagccctttcta

SEQ ID NO: 135039 - DNA, 20 bp, synthetic construct
  source 1..20: mol_type = other DNA
ttttgacaaaagccctttct

SEQ ID NO: 135040 - DNA, 20 bp, synthetic construct
  source 1..20: mol_type = other DNA
tttttgacaaaagccctttc

SEQ ID NO: 135041 - DNA, 20 bp, synthetic construct
  source 1..20: mol_type = other DNA
gtttttgacaaaagcccttt

SEQ ID NO: 135042 - DNA, 20 bp, synthetic construct
  source 1..20: mol_type = other DNA
ggtttttgacaaaagccctt

SEQ ID NO: 135043 - DNA, 20 bp, synthetic construct
  source 1..20: mol_type = other DNA
aggtttttgacaaaagccct

SEQ ID NO: 135044 - DNA, 20 bp, synthetic construct
  source 1..20: mol_type = other DNA
aaggtttttgacaaaagccc

SEQ ID NO: 135045 - DNA, 20 bp, synthetic construct
  source 1..20: mol_type = other DNA
taaggtttttgacaaaagcc

SEQ ID NO: 135046 - DNA, 20 bp, synthetic construct
  source 1..20: mol_type = other DNA
ataaggtttttgacaaaagc

SEQ ID NO: 135047 - DNA, 20 bp, synthetic construct
  source 1..20: mol_type = other DNA
gataaggtttttgacaaaag

SEQ ID NO: 135048 - DNA, 20 bp, synthetic construct
  source 1..20: mol_type = other DNA
agataaggtttttgacaaaa

SEQ ID NO: 135049 - DNA, 20 bp, synthetic construct
  source 1..20: mol_type = other DNA
gagataaggtttttgacaaa

SEQ ID NO: 135050 - DNA, 20 bp, synthetic construct
  source 1..20: mol_type = other DNA
agagataaggtttttgacaa

SEQ ID NO: 135051 - DNA, 20 bp, synthetic construct
  source 1..20: mol_type = other DNA
aagagataaggtttttgaca

SEQ ID NO: 135052 - DNA, 20 bp, synthetic construct
  source 1..20: mol_type = other DNA
aaagagataaggtttttgac

SEQ ID NO: 135053 - DNA, 20 bp, synthetic construct
  source 1..20: mol_type = other DNA
caaagagataaggtttttga

SEQ ID NO: 135054 - DNA, 20 bp, synthetic construct
  source 1..20: mol_type = other DNA
tcaaagagataaggtttttg

SEQ ID NO: 135055 - DNA, 20 bp, synthetic construct
  source 1..20: mol_type = other DNA
atcaaagagataaggttttt

SEQ ID NO: 135056 - DNA, 20 bp, synthetic construct
  source 1..20: mol_type = other DNA
catcaaagagataaggtttt

SEQ ID NO: 135057 - DNA, 20 bp, synthetic construct
  source 1..20: mol_type = other DNA
acatcaaagagataaggttt

SEQ ID NO: 135058 - DNA, 20 bp, synthetic construct
  source 1..20: mol_type = other DNA
gacatcaaagagataaggtt

SEQ ID NO: 135059 - DNA, 20 bp, synthetic construct
  source 1..20: mol_type = other DNA
agacatcaaagagataaggt

SEQ ID NO: 135060 - DNA, 20 bp, synthetic construct
  source 1..20: mol_type = other DNA
gagacatcaaagagataagg

SEQ ID NO: 135061 - DNA, 20 bp, synthetic construct
  source 1..20: mol_type = other DNA
agagacatcaaagagataag

SEQ ID NO: 135062 - DNA, 20 bp, synthetic construct
  source 1..20: mol_type = other DNA
aagagacatcaaagagataa

SEQ ID NO: 135063 - DNA, 20 bp, synthetic construct
  source 1..20: mol_type = other DNA
aaagagacatcaaagagata

SEQ ID NO: 135064 - DNA, 20 bp, synthetic construct
  source 1..20: mol_type = other DNA
aaaagagacatcaaagagat

SEQ ID NO: 135065 - DNA, 20 bp, synthetic construct
  source 1..20: mol_type = other DNA
aaaaagagacatcaaagaga

SEQ ID NO: 135066 - DNA, 20 bp, synthetic construct
  source 1..20: mol_type = other DNA
aaaaaagagacatcaaagag

SEQ ID NO: 135067 - DNA, 20 bp, synthetic construct
  source 1..20: mol_type = other DNA
aaaaaaagagacatcaaaga

SEQ ID NO: 135068 - DNA, 20 bp, synthetic construct
  source 1..20: mol_type = other DNA
caaaaaaagagacatcaaag

SEQ ID NO: 135069 - DNA, 20 bp, synthetic construct
  source 1..20: mol_type = other DNA
tcaaaaaaagagacatcaaa

SEQ ID NO: 135070 - DNA, 20 bp, synthetic construct
  source 1..20: mol_type = other DNA
ctcaaaaaaagagacatcaa

SEQ ID NO: 135071 - DNA, 20 bp, synthetic construct
  source 1..20: mol_type = other DNA
tctcaaaaaaagagacatca

SEQ ID NO: 135072 - DNA, 20 bp, synthetic construct
  source 1..20: mol_type = other DNA
atctcaaaaaaagagacatc

SEQ ID NO: 135073 - DNA, 20 bp, synthetic construct
  source 1..20: mol_type = other DNA
catctcaaaaaaagagacat

SEQ ID NO: 135074 - DNA, 20 bp, synthetic construct
  source 1..20: mol_type = other DNA
ccatctcaaaaaaagagaca

SEQ ID NO: 135075 - DNA, 20 bp, synthetic construct
  source 1..20: mol_type = other DNA
tccatctcaaaaaaagagac

SEQ ID NO: 135076 - DNA, 20 bp, synthetic construct
  source 1..20: mol_type = other DNA
ctccatctcaaaaaaagaga

SEQ ID NO: 135077 - DNA, 20 bp, synthetic construct
  source 1..20: mol_type = other DNA
actccatctcaaaaaaagag

SEQ ID NO: 135078 - DNA, 20 bp, synthetic construct
  source 1..20: mol_type = other DNA
gactccatctcaaaaaaaga

SEQ ID NO: 135079 - DNA, 20 bp, synthetic construct
  source 1..20: mol_type = other DNA
agactccatctcaaaaaaag

SEQ ID NO: 135080 - DNA, 20 bp, synthetic construct
  source 1..20: mol_type = other DNA
gagactccatctcaaaaaaa

SEQ ID NO: 135081 - DNA, 20 bp, synthetic construct
  source 1..20: mol_type = other DNA
agagactccatctcaaaaaa

SEQ ID NO: 135082 - DNA, 20 bp, synthetic construct
  source 1..20: mol_type = other DNA
gagagactccatctcaaaaa

SEQ ID NO: 135083 - DNA, 20 bp, synthetic construct
  source 1..20: mol_type = other DNA
ggagagactccatctcaaaa

SEQ ID NO: 135084 - DNA, 20 bp, synthetic construct
  source 1..20: mol_type = other DNA
gggagagactccatctcaaa

SEQ ID NO: 135085 - DNA, 20 bp, synthetic construct
  source 1..20: mol_type = other DNA
agggagagactccatctcaa

SEQ ID NO: 135086 - DNA, 20 bp, synthetic construct
  source 1..20: mol_type = other DNA
cagggagagactccatctca

SEQ ID NO: 135087 - DNA, 20 bp, synthetic construct
  source 1..20: mol_type = other DNA
acagggagagactccatctc

SEQ ID NO: 135088 - DNA, 20 bp, synthetic construct
  source 1..20: mol_type = other DNA
gacagggagagactccatct

SEQ ID NO: 135089 - DNA, 20 bp, synthetic construct
  source 1..20: mol_type = other DNA
cgacagggagagactccatc

SEQ ID NO: 135090 - DNA, 20 bp, synthetic construct
  source 1..20: mol_type = other DNA
gcgacagggagagactccat

SEQ ID NO: 135091 - DNA, 20 bp, synthetic construct
  source 1..20: mol_type = other DNA
ggcgacagggagagactcca

SEQ ID NO: 135092 - DNA, 20 bp, synthetic construct
  source 1..20: mol_type = other DNA
gggcgacagggagagactcc

SEQ ID NO: 135093 - DNA, 20 bp, synthetic construct
  source 1..20: mol_type = other DNA
tgggcgacagggagagactc

SEQ ID NO: 135094 - DNA, 20 bp, synthetic construct
  source 1..20: mol_type = other DNA
ctgggcgacagggagagact

SEQ ID NO: 135095 - DNA, 20 bp, synthetic construct
  source 1..20: mol_type = other DNA
cctgggcgacagggagagac

SEQ ID NO: 135096 - DNA, 20 bp, synthetic construct
  source 1..20: mol_type = other DNA
gcctgggcgacagggagaga

SEQ ID NO: 135097 - DNA, 20 bp, synthetic construct
  source 1..20: mol_type = other DNA
agcctgggcgacagggagag

SEQ ID NO: 135098 - DNA, 20 bp, synthetic construct
  source 1..20: mol_type = other DNA
cagcctgggcgacagggaga

SEQ ID NO: 135099 - DNA, 20 bp, synthetic construct
  source 1..20: mol_type = other DNA
ccagcctgggcgacagggag

SEQ ID NO: 135100 - DNA, 20 bp, synthetic construct
  source 1..20: mol_type = other DNA
tccagcctgggcgacaggga

SEQ ID NO: 135101 - DNA, 20 bp, synthetic construct
  source 1..20: mol_type = other DNA
ctccagcctgggcgacaggg

SEQ ID NO: 135102 - DNA, 20 bp, synthetic construct
  source 1..20: mol_type = other DNA
actccagcctgggcgacagg

SEQ ID NO: 135103 - DNA, 20 bp, synthetic construct
  source 1..20: mol_type = other DNA
cactccagcctgggcgacag

SEQ ID NO: 135104 - DNA, 20 bp, synthetic construct
  source 1..20: mol_type = other DNA
gcactccagcctgggcgaca

SEQ ID NO: 135105 - DNA, 20 bp, synthetic construct
  source 1..20: mol_type = other DNA
tgcactccagcctgggcgac

SEQ ID NO: 135106 - DNA, 20 bp, synthetic construct
  source 1..20: mol_type = other DNA
ctgcactccagcctgggcga

SEQ ID NO: 135107 - DNA, 20 bp, synthetic construct
  source 1..20: mol_type = other DNA
actgcactccagcctgggcg

SEQ ID NO: 135108 - DNA, 20 bp, synthetic construct
  source 1..20: mol_type = other DNA
cactgcactccagcctgggc

SEQ ID NO: 135109 - DNA, 20 bp, synthetic construct
  source 1..20: mol_type = other DNA
ccactgcactccagcctggg

SEQ ID NO: 135110 - DNA, 20 bp, synthetic construct
  source 1..20: mol_type = other DNA
gccactgcactccagcctgg

SEQ ID NO: 135111 - DNA, 20 bp, synthetic construct
  source 1..20: mol_type = other DNA
cgccactgcactccagcctg

SEQ ID NO: 135112 - DNA, 20 bp, synthetic construct
  source 1..20: mol_type = other DNA
acgccactgcactccagcct

SEQ ID NO: 135113 - DNA, 20 bp, synthetic construct
  source 1..20: mol_type = other DNA
cacgccactgcactccagcc

SEQ ID NO: 135114 - DNA, 20 bp, synthetic construct
  source 1..20: mol_type = other DNA
tcacgccactgcactccagc

SEQ ID NO: 135115 - DNA, 20 bp, synthetic construct
  source 1..20: mol_type = other DNA
atcacgccactgcactccag

SEQ ID NO: 135116 - DNA, 20 bp, synthetic construct
  source 1..20: mol_type = other DNA
gatcacgccactgcactcca

SEQ ID NO: 135117 - DNA, 20 bp, synthetic construct
  source 1..20: mol_type = other DNA
agatcacgccactgcactcc

SEQ ID NO: 135118 - DNA, 20 bp, synthetic construct
  source 1..20: mol_type = other DNA
gagatcacgccactgcactc

SEQ ID NO: 135119 - DNA, 20 bp, synthetic construct
  source 1..20: mol_type = other DNA
tgagatcacgccactgcact

SEQ ID NO: 135120 - DNA, 20 bp, synthetic construct
  source 1..20: mol_type = other DNA
ctgagatcacgccactgcac

SEQ ID NO: 135121 - DNA, 20 bp, synthetic construct
  source 1..20: mol_type = other DNA
gctgagatcacgccactgca

SEQ ID NO: 135122 - DNA, 20 bp, synthetic construct
  source 1..20: mol_type = other DNA
agctgagatcacgccactgc

SEQ ID NO: 135123 - DNA, 20 bp, synthetic construct
  source 1..20: mol_type = other DNA
gagctgagatcacgccactg

SEQ ID NO: 135124 - DNA, 20 bp, synthetic construct
  source 1..20: mol_type = other DNA
tgagctgagatcacgccact

SEQ ID NO: 135125 - DNA, 20 bp, synthetic construct
  source 1..20: mol_type = other DNA
gtgagctgagatcacgccac

SEQ ID NO: 135126 - DNA, 20 bp, synthetic construct
  source 1..20: mol_type = other DNA
agtgagctgagatcacgcca

SEQ ID NO: 135127 - DNA, 20 bp, synthetic construct
  source 1..20: mol_type = other DNA
cagtgagctgagatcacgcc

SEQ ID NO: 135128 - DNA, 20 bp, synthetic construct
  source 1..20: mol_type = other DNA
gcagtgagctgagatcacgc

SEQ ID NO: 135129 - DNA, 20 bp, synthetic construct
  source 1..20: mol_type = other DNA
tgcagtgagctgagatcacg

SEQ ID NO: 135130 - DNA, 20 bp, synthetic construct
  source 1..20: mol_type = other DNA
gtgcagtgagctgagatcac

SEQ ID NO: 135131 - DNA, 20 bp, synthetic construct
  source 1..20: mol_type = other DNA
cgtgcagtgagctgagatca

SEQ ID NO: 135132 - DNA, 20 bp, synthetic construct
  source 1..20: mol_type = other DNA
gcgtgcagtgagctgagatc

SEQ ID NO: 135133 - DNA, 20 bp, synthetic construct
  source 1..20: mol_type = other DNA
agcgtgcagtgagctgagat

SEQ ID NO: 135134 - DNA, 20 bp, synthetic construct
  source 1..20: mol_type = other DNA
gagcgtgcagtgagctgaga

SEQ ID NO: 135135 - DNA, 20 bp, synthetic construct
  source 1..20: mol_type = other DNA
ggagcgtgcagtgagctgag

SEQ ID NO: 135136 - DNA, 20 bp, synthetic construct
  source 1..20: mol_type = other DNA
cggagcgtgcagtgagctga

SEQ ID NO: 135137 - DNA, 20 bp, synthetic construct
  source 1..20: mol_type = other DNA
gcggagcgtgcagtgagctg

SEQ ID NO: 135138 - DNA, 20 bp, synthetic construct
  source 1..20: mol_type = other DNA
ggcggagcgtgcagtgagct

SEQ ID NO: 135139 - DNA, 20 bp, synthetic construct
  source 1..20: mol_type = other DNA
aggcggagcgtgcagtgagc

SEQ ID NO: 135140 - DNA, 20 bp, synthetic construct
  source 1..20: mol_type = other DNA
gaggcggagcgtgcagtgag

SEQ ID NO: 135141 - DNA, 20 bp, synthetic construct
  source 1..20: mol_type = other DNA
ggaggcggagcgtgcagtga

SEQ ID NO: 135142 - DNA, 20 bp, synthetic construct
  source 1..20: mol_type = other DNA
aggaggcggagcgtgcagtg

SEQ ID NO: 135143 - DNA, 20 bp, synthetic construct
  source 1..20: mol_type = other DNA
caggaggcggagcgtgcagt

SEQ ID NO: 135144 - DNA, 20 bp, synthetic construct
  source 1..20: mol_type = other DNA
gcaggaggcggagcgtgcag

SEQ ID NO: 135145 - DNA, 20 bp, synthetic construct
  source 1..20: mol_type = other DNA
cgcaggaggcggagcgtgca

SEQ ID NO: 135146 - DNA, 20 bp, synthetic construct
  source 1..20: mol_type = other DNA
acgcaggaggcggagcgtgc

SEQ ID NO: 135147 - DNA, 20 bp, synthetic construct
  source 1..20: mol_type = other DNA
aacgcaggaggcggagcgtg

SEQ ID NO: 135148 - DNA, 20 bp, synthetic construct
  source 1..20: mol_type = other DNA
gaacgcaggaggcggagcgt

SEQ ID NO: 135149 - DNA, 20 bp, synthetic construct
  source 1..20: mol_type = other DNA
tgaacgcaggaggcggagcg

SEQ ID NO: 135150 - DNA, 20 bp, synthetic construct
  source 1..20: mol_type = other DNA
gtgaacgcaggaggcggagc

SEQ ID NO: 135151 - DNA, 20 bp, synthetic construct
  source 1..20: mol_type = other DNA
cgtgaacgcaggaggcggag

SEQ ID NO: 135152 - DNA, 20 bp, synthetic construct
  source 1..20: mol_type = other DNA
gcgtgaacgcaggaggcgga

SEQ ID NO: 135153 - DNA, 20 bp, synthetic construct
  source 1..20: mol_type = other DNA
ggcgtgaacgcaggaggcgg

SEQ ID NO: 135154 - DNA, 20 bp, synthetic construct
  source 1..20: mol_type = other DNA
tggcgtgaacgcaggaggcg

SEQ ID NO: 135155 - DNA, 20 bp, synthetic construct
  source 1..20: mol_type = other DNA
atggcgtgaacgcaggaggc

SEQ ID NO: 135156 - DNA, 20 bp, synthetic construct
  source 1..20: mol_type = other DNA
aatggcgtgaacgcaggagg

SEQ ID NO: 135157 - DNA, 20 bp, synthetic construct
  source 1..20: mol_type = other DNA
gaatggcgtgaacgcaggag

SEQ ID NO: 135158 - DNA, 20 bp, synthetic construct
  source 1..20: mol_type = other DNA
agaatggcgtgaacgcagga

SEQ ID NO: 135159 - DNA, 20 bp, synthetic construct
  source 1..20: mol_type = other DNA
gagaatggcgtgaacgcagg

SEQ ID NO: 135160 - DNA, 20 bp, synthetic construct
  source 1..20: mol_type = other DNA
ggagaatggcgtgaacgcag

SEQ ID NO: 135161 - DNA, 20 bp, synthetic construct
  source 1..20: mol_type = other DNA
aggagaatggcgtgaacgca

SEQ ID NO: 135162 - DNA, 20 bp, synthetic construct
  source 1..20: mol_type = other DNA
taggagaatggcgtgaacgc

SEQ ID NO: 135163 - DNA, 20 bp, synthetic construct
  source 1..20: mol_type = other DNA
gtaggagaatggcgtgaacg

SEQ ID NO: 135164 - DNA, 20 bp, synthetic construct
  source 1..20: mol_type = other DNA
ggtaggagaatggcgtgaac

SEQ ID NO: 135165 - DNA, 20 bp, synthetic construct
  source 1..20: mol_type = other DNA
aggtaggagaatggcgtgaa

SEQ ID NO: 135166 - DNA, 20 bp, synthetic construct
  source 1..20: mol_type = other DNA
gaggtaggagaatggcgtga

SEQ ID NO: 135167 - DNA, 20 bp, synthetic construct
  source 1..20: mol_type = other DNA
tgaggtaggagaatggcgtg

SEQ ID NO: 135168 - DNA, 20 bp, synthetic construct
  source 1..20: mol_type = other DNA
ctgaggtaggagaatggcgt

SEQ ID NO: 135169 - DNA, 20 bp, synthetic construct
  source 1..20: mol_type = other DNA
gctgaggtaggagaatggcg

SEQ ID NO: 135170 - DNA, 20 bp, synthetic construct
  source 1..20: mol_type = other DNA
ggctgaggtaggagaatggc

SEQ ID NO: 135171 - DNA, 20 bp, synthetic construct
  source 1..20: mol_type = other DNA
aggctgaggtaggagaatgg

SEQ ID NO: 135172 - DNA, 20 bp, synthetic construct
  source 1..20: mol_type = other DNA
gaggctgaggtaggagaatg

SEQ ID NO: 135173 - DNA, 20 bp, synthetic construct
  source 1..20: mol_type = other DNA
ggaggctgaggtaggagaat

SEQ ID NO: 135174 - DNA, 20 bp, synthetic construct
  source 1..20: mol_type = other DNA
gggaggctgaggtaggagaa

SEQ ID NO: 135175 - DNA, 20 bp, synthetic construct
  source 1..20: mol_type = other DNA
cgggaggctgaggtaggaga

SEQ ID NO: 135176 - DNA, 20 bp, synthetic construct
  source 1..20: mol_type = other DNA
tcgggaggctgaggtaggag

SEQ ID NO: 135177 - DNA, 20 bp, synthetic construct
  source 1..20: mol_type = other DNA
ctcgggaggctgaggtagga

SEQ ID NO: 135178 - DNA, 20 bp, synthetic construct
  source 1..20: mol_type = other DNA
actcgggaggctgaggtagg

SEQ ID NO: 135179 - DNA, 20 bp, synthetic construct
  source 1..20: mol_type = other DNA
tactcgggaggctgaggtag

SEQ ID NO: 135180 - DNA, 20 bp, synthetic construct
  source 1..20: mol_type = other DNA
ctactcgggaggctgaggta

SEQ ID NO: 135181 - DNA, 20 bp, synthetic construct
  source 1..20: mol_type = other DNA
gctactcgggaggctgaggt

SEQ ID NO: 135182 - DNA, 20 bp, synthetic construct
  source 1..20: mol_type = other DNA
agctactcgggaggctgagg

SEQ ID NO: 135183 - DNA, 20 bp, synthetic construct
  source 1..20: mol_type = other DNA
tagctactcgggaggctgag

SEQ ID NO: 135184 - DNA, 20 bp, synthetic construct
  source 1..20: mol_type = other DNA
ctagctactcgggaggctga

SEQ ID NO: 135185 - DNA, 20 bp, synthetic construct
  source 1..20: mol_type = other DNA
cctagctactcgggaggctg

SEQ ID NO: 135186 - DNA, 20 bp, synthetic construct
  source 1..20: mol_type = other DNA
tcctagctactcgggaggct

SEQ ID NO: 135187 - DNA, 20 bp, synthetic construct
  source 1..20: mol_type = other DNA
gtcctagctactcgggaggc

SEQ ID NO: 135188 - DNA, 20 bp, synthetic construct
  source 1..20: mol_type = other DNA
agtcctagctactcgggagg

SEQ ID NO: 135189 - DNA, 20 bp, synthetic construct
  source 1..20: mol_type = other DNA
tagtcctagctactcgggag

SEQ ID NO: 135190 - DNA, 20 bp, synthetic construct
  source 1..20: mol_type = other DNA
gtagtcctagctactcggga

SEQ ID NO: 135191 - DNA, 20 bp, synthetic construct
  source 1..20: mol_type = other DNA
tgtagtcctagctactcggg

SEQ ID NO: 135192 - DNA, 20 bp, synthetic construct
  source 1..20: mol_type = other DNA
ctgtagtcctagctactcgg

SEQ ID NO: 135193 - DNA, 20 bp, synthetic construct
  source 1..20: mol_type = other DNA
cctgtagtcctagctactcg

SEQ ID NO: 135194 - DNA, 20 bp, synthetic construct
  source 1..20: mol_type = other DNA
gcctgtagtcctagctactc

SEQ ID NO: 135195 - DNA, 20 bp, synthetic construct
  source 1..20: mol_type = other DNA
cgcctgtagtcctagctact

SEQ ID NO: 135196 - DNA, 20 bp, synthetic construct
  source 1..20: mol_type = other DNA
gcgcctgtagtcctagctac

SEQ ID NO: 135197 - DNA, 20 bp, synthetic construct
  source 1..20: mol_type = other DNA
ggcgcctgtagtcctagcta

SEQ ID NO: 135198 - DNA, 20 bp, synthetic construct
  source 1..20: mol_type = other DNA
gggcgcctgtagtcctagct

SEQ ID NO: 135199 - DNA, 20 bp, synthetic construct
  source 1..20: mol_type = other DNA
cgggcgcctgtagtcctagc

SEQ ID NO: 135200 - DNA, 20 bp, synthetic construct
  source 1..20: mol_type = other DNA
gcgggcgcctgtagtcctag

SEQ ID NO: 135201 - DNA, 20 bp, synthetic construct
  source 1..20: mol_type = other DNA
ggcgggcgcctgtagtccta

SEQ ID NO: 135202 - DNA, 20 bp, synthetic construct
  source 1..20: mol_type = other DNA
tggcgggcgcctgtagtcct

SEQ ID NO: 135203 - DNA, 20 bp, synthetic construct
  source 1..20: mol_type = other DNA
gtggcgggcgcctgtagtcc

SEQ ID NO: 135204 - DNA, 20 bp, synthetic construct
  source 1..20: mol_type = other DNA
ggtggcgggcgcctgtagtc

SEQ ID NO: 135205 - DNA, 20 bp, synthetic construct
  source 1..20: mol_type = other DNA
tggtggcgggcgcctgtagt

SEQ ID NO: 135206 - DNA, 20 bp, synthetic construct
  source 1..20: mol_type = other DNA
atggtggcgggcgcctgtag

SEQ ID NO: 135207 - DNA, 20 bp, synthetic construct
  source 1..20: mol_type = other DNA
catggtggcgggcgcctgta

SEQ ID NO: 135208 - DNA, 20 bp, synthetic construct
  source 1..20: mol_type = other DNA
gcatggtggcgggcgcctgt

SEQ ID NO: 135209 - DNA, 20 bp, synthetic construct
  source 1..20: mol_type = other DNA
ggcatggtggcgggcgcctg

SEQ ID NO: 135210 - DNA, 20 bp, synthetic construct
  source 1..20: mol_type = other DNA
gggcatggtggcgggcgcct

SEQ ID NO: 135211 - DNA, 20 bp, synthetic construct
  source 1..20: mol_type = other DNA
cgggcatggtggcgggcgcc

SEQ ID NO: 135212 - DNA, 20 bp, synthetic construct
  source 1..20: mol_type = other DNA
ccgggcatggtggcgggcgc

SEQ ID NO: 135213 - DNA, 20 bp, synthetic construct
  source 1..20: mol_type = other DNA
gccgggcatggtggcgggcg

SEQ ID NO: 135214 - DNA, 20 bp, synthetic construct
  source 1..20: mol_type = other DNA
agccgggcatggtggcgggc

SEQ ID NO: 135215 - DNA, 20 bp, synthetic construct
  source 1..20: mol_type = other DNA
tagccgggcatggtggcggg

SEQ ID NO: 135216 - DNA, 20 bp, synthetic construct
  source 1..20: mol_type = other DNA
ttagccgggcatggtggcgg

SEQ ID NO: 135217 - DNA, 20 bp, synthetic construct
  source 1..20: mol_type = other DNA
attagccgggcatggtggcg

SEQ ID NO: 135218 - DNA, 20 bp, synthetic construct
  source 1..20: mol_type = other DNA
aattagccgggcatggtggc

SEQ ID NO: 135219 - DNA, 20 bp, synthetic construct
  source 1..20: mol_type = other DNA
aaattagccgggcatggtgg

SEQ ID NO: 135220 - DNA, 20 bp, synthetic construct
  source 1..20: mol_type = other DNA
aaaattagccgggcatggtg

SEQ ID NO: 135221 - DNA, 20 bp, synthetic construct
  source 1..20: mol_type = other DNA
aaaaattagccgggcatggt

SEQ ID NO: 135222 - DNA, 20 bp, synthetic construct
  source 1..20: mol_type = other DNA
aaaaaattagccgggcatgg

SEQ ID NO: 135223 - DNA, 20 bp, synthetic construct
  source 1..20: mol_type = other DNA
caaaaaattagccgggcatg

SEQ ID NO: 135224 - DNA, 20 bp, synthetic construct
  source 1..20: mol_type = other DNA
acaaaaaattagccgggcat

SEQ ID NO: 135225 - DNA, 20 bp, synthetic construct
  source 1..20: mol_type = other DNA
tacaaaaaattagccgggca

SEQ ID NO: 135226 - DNA, 20 bp, synthetic construct
  source 1..20: mol_type = other DNA
atacaaaaaattagccgggc

SEQ ID NO: 135227 - DNA, 20 bp, synthetic construct
  source 1..20: mol_type = other DNA
aatacaaaaaattagccggg

SEQ ID NO: 135228 - DNA, 20 bp, synthetic construct
  source 1..20: mol_type = other DNA
aaatacaaaaaattagccgg

SEQ ID NO: 135229 - DNA, 20 bp, synthetic construct
  source 1..20: mol_type = other DNA
aaaatacaaaaaattagccg

SEQ ID NO: 135230 - DNA, 20 bp, synthetic construct
  source 1..20: mol_type = other DNA
caaaatacaaaaaattagcc

SEQ ID NO: 135231 - DNA, 20 bp, synthetic construct
  source 1..20: mol_type = other DNA
acaaaatacaaaaaattagc

SEQ ID NO: 135232 - DNA, 20 bp, synthetic construct
  source 1..20: mol_type = other DNA
aacaaaatacaaaaaattag

SEQ ID NO: 135233 - DNA, 20 bp, synthetic construct
  source 1..20: mol_type = other DNA
aaacaaaatacaaaaaatta

SEQ ID NO: 135234 - DNA, 20 bp, synthetic construct
  source 1..20: mol_type = other DNA
taaacaaaatacaaaaaatt

SEQ ID NO: 135235 - DNA, 20 bp, synthetic construct
  source 1..20: mol_type = other DNA
ctaaacaaaatacaaaaaat

SEQ ID NO: 135236 - DNA, 20 bp, synthetic construct
  source 1..20: mol_type = other DNA
actaaacaaaatacaaaaaa

SEQ ID NO: 135237 - DNA, 20 bp, synthetic construct
  source 1..20: mol_type = other DNA
tactaaacaaaatacaaaaa

SEQ ID NO: 135238 - DNA, 20 bp, synthetic construct
  source 1..20: mol_type = other DNA
ctactaaacaaaatacaaaa

SEQ ID NO: 135239 - DNA, 20 bp, synthetic construct
  source 1..20: mol_type = other DNA
tctactaaacaaaatacaaa

SEQ ID NO: 135240 - DNA, 20 bp, synthetic construct
  source 1..20: mol_type = other DNA
ctctactaaacaaaatacaa

SEQ ID NO: 135241 - DNA, 20 bp, synthetic construct
  source 1..20: mol_type = other DNA
tctctactaaacaaaataca

SEQ ID NO: 135242 - DNA, 20 bp, synthetic construct
  source 1..20: mol_type = other DNA
atctctactaaacaaaatac

SEQ ID NO: 135243 - DNA, 20 bp, synthetic construct
  source 1..20: mol_type = other DNA
catctctactaaacaaaata

SEQ ID NO: 135244 - DNA, 20 bp, synthetic construct
  source 1..20: mol_type = other DNA
ccatctctactaaacaaaat

SEQ ID NO: 135245 - DNA, 20 bp, synthetic construct
  source 1..20: mol_type = other DNA
cccatctctactaaacaaaa

SEQ ID NO: 135246 - DNA, 20 bp, synthetic construct
  source 1..20: mol_type = other DNA
ccccatctctactaaacaaa

SEQ ID NO: 135247 - DNA, 20 bp, synthetic construct
  source 1..20: mol_type = other DNA
accccatctctactaaacaa

SEQ ID NO: 135248 - DNA, 20 bp, synthetic construct
  source 1..20: mol_type = other DNA
aaccccatctctactaaaca

SEQ ID NO: 135249 - DNA, 20 bp, synthetic construct
  source 1..20: mol_type = other DNA
aaaccccatctctactaaac

SEQ ID NO: 135250 - DNA, 20 bp, synthetic construct
  source 1..20: mol_type = other DNA
gaaaccccatctctactaaa

SEQ ID NO: 135251 - DNA, 20 bp, synthetic construct
  source 1..20: mol_type = other DNA
tgaaaccccatctctactaa

SEQ ID NO: 135252 - DNA, 20 bp, synthetic construct
  source 1..20: mol_type = other DNA
gtgaaaccccatctctacta

SEQ ID NO: 135253 - DNA, 20 bp, synthetic construct
  source 1..20: mol_type = other DNA
agtgaaaccccatctctact

SEQ ID NO: 135254 - DNA, 20 bp, synthetic construct
  source 1..20: mol_type = other DNA
cagtgaaaccccatctctac

SEQ ID NO: 135255 - DNA, 20 bp, synthetic construct
  source 1..20: mol_type = other DNA
acagtgaaaccccatctcta

SEQ ID NO: 135256 - DNA, 20 bp, synthetic construct
  source 1..20: mol_type = other DNA
cacagtgaaaccccatctct

SEQ ID NO: 135257 - DNA, 20 bp, synthetic construct
  source 1..20: mol_type = other DNA
acacagtgaaaccccatctc

SEQ ID NO: 135258 - DNA, 20 bp, synthetic construct
  source 1..20: mol_type = other DNA
aacacagtgaaaccccatct

SEQ ID NO: 135259 - DNA, 20 bp, synthetic construct
  source 1..20: mol_type = other DNA
taacacagtgaaaccccatc

SEQ ID NO: 135260 - DNA, 20 bp, synthetic construct
  source 1..20: mol_type = other DNA
ctaacacagtgaaaccccat

SEQ ID NO: 135261 - DNA, 20 bp, synthetic construct
  source 1..20: mol_type = other DNA
gctaacacagtgaaacccca

SEQ ID NO: 135262 - DNA, 20 bp, synthetic construct
  source 1..20: mol_type = other DNA
ggctaacacagtgaaacccc

SEQ ID NO: 135263 - DNA, 20 bp, synthetic construct
  source 1..20: mol_type = other DNA
tggctaacacagtgaaaccc

SEQ ID NO: 135264 - DNA, 20 bp, synthetic construct
  source 1..20: mol_type = other DNA
ctggctaacacagtgaaacc

SEQ ID NO: 135265 - DNA, 20 bp, synthetic construct
  source 1..20: mol_type = other DNA
cctggctaacacagtgaaac

SEQ ID NO: 135266 - DNA, 20 bp, synthetic construct
  source 1..20: mol_type = other DNA
tcctggctaacacagtgaaa

SEQ ID NO: 135267 - DNA, 20 bp, synthetic construct
  source 1..20: mol_type = other DNA
atcctggctaacacagtgaa

SEQ ID NO: 135268 - DNA, 20 bp, synthetic construct
  source 1..20: mol_type = other DNA
catcctggctaacacagtga

SEQ ID NO: 135269 - DNA, 20 bp, synthetic construct
  source 1..20: mol_type = other DNA
ccatcctggctaacacagtg

SEQ ID NO: 135270 - DNA, 20 bp, synthetic construct
  source 1..20: mol_type = other DNA
accatcctggctaacacagt

SEQ ID NO: 135271 - DNA, 20 bp, synthetic construct
  source 1..20: mol_type = other DNA
gaccatcctggctaacacag

SEQ ID NO: 135272 - DNA, 20 bp, synthetic construct
  source 1..20: mol_type = other DNA
agaccatcctggctaacaca

SEQ ID NO: 135273 - DNA, 20 bp, synthetic construct
  source 1..20: mol_type = other DNA
aagaccatcctggctaacac

SEQ ID NO: 135274 - DNA, 20 bp, synthetic construct
  source 1..20: mol_type = other DNA
caagaccatcctggctaaca

SEQ ID NO: 135275 - DNA, 20 bp, synthetic construct
  source 1..20: mol_type = other DNA
tcaagaccatcctggctaac

SEQ ID NO: 135276 - DNA, 20 bp, synthetic construct
  source 1..20: mol_type = other DNA
atcaagaccatcctggctaa

SEQ ID NO: 135277 - DNA, 20 bp, synthetic construct
  source 1..20: mol_type = other DNA
gatcaagaccatcctggcta

SEQ ID NO: 135278 - DNA, 20 bp, synthetic construct
  source 1..20: mol_type = other DNA
agatcaagaccatcctggct

SEQ ID NO: 135279 - DNA, 20 bp, synthetic construct
  source 1..20: mol_type = other DNA
gagatcaagaccatcctggc

SEQ ID NO: 135280 - DNA, 20 bp, synthetic construct
  source 1..20: mol_type = other DNA
ggagatcaagaccatcctgg

SEQ ID NO: 135281 - DNA, 20 bp, synthetic construct
  source 1..20: mol_type = other DNA
aggagatcaagaccatcctg

SEQ ID NO: 135282 - DNA, 20 bp, synthetic construct
  source 1..20: mol_type = other DNA
caggagatcaagaccatcct

SEQ ID NO: 135283 - DNA, 20 bp, synthetic construct
  source 1..20: mol_type = other DNA
tcaggagatcaagaccatcc

SEQ ID NO: 135284 - DNA, 20 bp, synthetic construct
  source 1..20: mol_type = other DNA
gtcaggagatcaagaccatc

SEQ ID NO: 135285 - DNA, 20 bp, synthetic construct
  source 1..20: mol_type = other DNA
ggtcaggagatcaagaccat

SEQ ID NO: 135286 - DNA, 20 bp, synthetic construct
  source 1..20: mol_type = other DNA
aggtcaggagatcaagacca

SEQ ID NO: 135287 - DNA, 20 bp, synthetic construct
  source 1..20: mol_type = other DNA
gaggtcaggagatcaagacc

SEQ ID NO: 135288 - DNA, 20 bp, synthetic construct
  source 1..20: mol_type = other DNA
cgaggtcaggagatcaagac

SEQ ID NO: 135289 - DNA, 20 bp, synthetic construct
  source 1..20: mol_type = other DNA
acgaggtcaggagatcaaga

SEQ ID NO: 135290 - DNA, 20 bp, synthetic construct
  source 1..20: mol_type = other DNA
cacgaggtcaggagatcaag

SEQ ID NO: 135291 - DNA, 20 bp, synthetic construct
  source 1..20: mol_type = other DNA
tcacgaggtcaggagatcaa

SEQ ID NO: 135292 - DNA, 20 bp, synthetic construct
  source 1..20: mol_type = other DNA
atcacgaggtcaggagatca

SEQ ID NO: 135293 - DNA, 20 bp, synthetic construct
  source 1..20: mol_type = other DNA
gatcacgaggtcaggagatc

SEQ ID NO: 135294 - DNA, 20 bp, synthetic construct
  source 1..20: mol_type = other DNA
ggatcacgaggtcaggagat

SEQ ID NO: 135295 - DNA, 20 bp, synthetic construct
  source 1..20: mol_type = other DNA
cggatcacgaggtcaggaga

SEQ ID NO: 135296 - DNA, 20 bp, synthetic construct
  source 1..20: mol_type = other DNA
gcggatcacgaggtcaggag

SEQ ID NO: 135297 - DNA, 20 bp, synthetic construct
  source 1..20: mol_type = other DNA
ggcggatcacgaggtcagga

SEQ ID NO: 135298 - DNA, 20 bp, synthetic construct
  source 1..20: mol_type = other DNA
aggcggatcacgaggtcagg

SEQ ID NO: 135299 - DNA, 20 bp, synthetic construct
  source 1..20: mol_type = other DNA
caggcggatcacgaggtcag

SEQ ID NO: 135300 - DNA, 20 bp, synthetic construct
  source 1..20: mol_type = other DNA
gcaggcggatcacgaggtca

SEQ ID NO: 135301 - DNA, 20 bp, synthetic construct
  source 1..20: mol_type = other DNA
ggcaggcggatcacgaggtc

SEQ ID NO: 135302 - DNA, 20 bp, synthetic construct
  source 1..20: mol_type = other DNA
aggcaggcggatcacgaggt

SEQ ID NO: 135303 - DNA, 20 bp, synthetic construct
  source 1..20: mol_type = other DNA
gaggcaggcggatcacgagg

SEQ ID NO: 135304 - DNA, 20 bp, synthetic construct
  source 1..20: mol_type = other DNA
tgaggcaggcggatcacgag

SEQ ID NO: 135305 - DNA, 20 bp, synthetic construct
  source 1..20: mol_type = other DNA
ctgaggcaggcggatcacga

SEQ ID NO: 135306 - DNA, 20 bp, synthetic construct
  source 1..20: mol_type = other DNA
gctgaggcaggcggatcacg

SEQ ID NO: 135307 - DNA, 20 bp, synthetic construct
  source 1..20: mol_type = other DNA
ggctgaggcaggcggatcac

SEQ ID NO: 135308 - DNA, 20 bp, synthetic construct
  source 1..20: mol_type = other DNA
aggctgaggcaggcggatca

SEQ ID NO: 135309 - DNA, 20 bp, synthetic construct
  source 1..20: mol_type = other DNA
gaggctgaggcaggcggatc

SEQ ID NO: 135310 - DNA, 20 bp, synthetic construct
  source 1..20: mol_type = other DNA
ggaggctgaggcaggcggat

SEQ ID NO: 135311 - DNA, 20 bp, synthetic construct
  source 1..20: mol_type = other DNA
gggaggctgaggcaggcgga

SEQ ID NO: 135312 - DNA, 20 bp, synthetic construct
  source 1..20: mol_type = other DNA
tgggaggctgaggcaggcgg

SEQ ID NO: 135313 - DNA, 20 bp, synthetic construct
  source 1..20: mol_type = other DNA
ttgggaggctgaggcaggcg

SEQ ID NO: 135314 - DNA, 20 bp, synthetic construct
  source 1..20: mol_type = other DNA
tttgggaggctgaggcaggc

SEQ ID NO: 135315 - DNA, 20 bp, synthetic construct
  source 1..20: mol_type = other DNA
ctttgggaggctgaggcagg

SEQ ID NO: 135316 - DNA, 20 bp, synthetic construct
  source 1..20: mol_type = other DNA
actttgggaggctgaggcag

SEQ ID NO: 135317 - DNA, 20 bp, synthetic construct
  source 1..20: mol_type = other DNA
cactttgggaggctgaggca

SEQ ID NO: 135318 - DNA, 20 bp, synthetic construct
  source 1..20: mol_type = other DNA
gcactttgggaggctgaggc

SEQ ID NO: 135319 - DNA, 20 bp, synthetic construct
  source 1..20: mol_type = other DNA
agcactttgggaggctgagg

SEQ ID NO: 135320 - DNA, 20 bp, synthetic construct
  source 1..20: mol_type = other DNA
cagcactttgggaggctgag

SEQ ID NO: 135321 - DNA, 20 bp, synthetic construct
  source 1..20: mol_type = other DNA
ccagcactttgggaggctga

SEQ ID NO: 135322 - DNA, 20 bp, synthetic construct
  source 1..20: mol_type = other DNA
cccagcactttgggaggctg

SEQ ID NO: 135323 - DNA, 20 bp, synthetic construct
  source 1..20: mol_type = other DNA
tcccagcactttgggaggct

SEQ ID NO: 135324 - DNA, 20 bp, synthetic construct
  source 1..20: mol_type = other DNA
atcccagcactttgggaggc

SEQ ID NO: 135325 - DNA, 20 bp, synthetic construct
  source 1..20: mol_type = other DNA
aatcccagcactttgggagg

SEQ ID NO: 135326 - DNA, 20 bp, synthetic construct
  source 1..20: mol_type = other DNA
taatcccagcactttgggag

SEQ ID NO: 135327 - DNA, 20 bp, synthetic construct
  source 1..20: mol_type = other DNA
gtaatcccagcactttggga

SEQ ID NO: 135328 - DNA, 20 bp, synthetic construct
  source 1..20: mol_type = other DNA
tgtaatcccagcactttggg

SEQ ID NO: 135329 - DNA, 20 bp, synthetic construct
  source 1..20: mol_type = other DNA
ctgtaatcccagcactttgg

SEQ ID NO: 135330 - DNA, 20 bp, synthetic construct
  source 1..20: mol_type = other DNA
cctgtaatcccagcactttg

SEQ ID NO: 135331 - DNA, 20 bp, synthetic construct
  source 1..20: mol_type = other DNA
gcctgtaatcccagcacttt

SEQ ID NO: 135332 - DNA, 20 bp, synthetic construct
  source 1..20: mol_type = other DNA
cgcctgtaatcccagcactt

SEQ ID NO: 135333 - DNA, 20 bp, synthetic construct
  source 1..20: mol_type = other DNA
acgcctgtaatcccagcact

SEQ ID NO: 135334 - DNA, 20 bp, synthetic construct
  source 1..20: mol_type = other DNA
cacgcctgtaatcccagcac

SEQ ID NO: 135335 - DNA, 20 bp, synthetic construct
  source 1..20: mol_type = other DNA
tcacgcctgtaatcccagca

SEQ ID NO: 135336 - DNA, 20 bp, synthetic construct
  source 1..20: mol_type = other DNA
ctcacgcctgtaatcccagc

SEQ ID NO: 135337 - DNA, 20 bp, synthetic construct
  source 1..20: mol_type = other DNA
gctcacgcctgtaatcccag

SEQ ID NO: 135338 - DNA, 20 bp, synthetic construct
  source 1..20: mol_type = other DNA
ggctcacgcctgtaatccca

SEQ ID NO: 135339 - DNA, 20 bp, synthetic construct
  source 1..20: mol_type = other DNA
tggctcacgcctgtaatccc

SEQ ID NO: 135340 - DNA, 20 bp, synthetic construct
  source 1..20: mol_type = other DNA
gtggctcacgcctgtaatcc

SEQ ID NO: 135341 - DNA, 20 bp, synthetic construct
  source 1..20: mol_type = other DNA
agtggctcacgcctgtaatc

SEQ ID NO: 135342 - DNA, 20 bp, synthetic construct
  source 1..20: mol_type = other DNA
cagtggctcacgcctgtaat

SEQ ID NO: 135343 - DNA, 20 bp, synthetic construct
  source 1..20: mol_type = other DNA
acagtggctcacgcctgtaa

SEQ ID NO: 135344 - DNA, 20 bp, synthetic construct
  source 1..20: mol_type = other DNA
cacagtggctcacgcctgta

SEQ ID NO: 135345 - DNA, 20 bp, synthetic construct
  source 1..20: mol_type = other DNA
gcacagtggctcacgcctgt

SEQ ID NO: 135346 - DNA, 20 bp, synthetic construct
  source 1..20: mol_type = other DNA
ggcacagtggctcacgcctg

SEQ ID NO: 135347 - DNA, 20 bp, synthetic construct
  source 1..20: mol_type = other DNA
gggcacagtggctcacgcct

SEQ ID NO: 135348 - DNA, 20 bp, synthetic construct
  source 1..20: mol_type = other DNA
tgggcacagtggctcacgcc

SEQ ID NO: 135349 - DNA, 20 bp, synthetic construct
  source 1..20: mol_type = other DNA
ctgggcacagtggctcacgc

SEQ ID NO: 135350 - DNA, 20 bp, synthetic construct
  source 1..20: mol_type = other DNA
gctgggcacagtggctcacg

SEQ ID NO: 135351 - DNA, 20 bp, synthetic construct
  source 1..20: mol_type = other DNA
ggctgggcacagtggctcac

SEQ ID NO: 135352 - DNA, 20 bp, synthetic construct
  source 1..20: mol_type = other DNA
aggctgggcacagtggctca

SEQ ID NO: 135353 - DNA, 20 bp, synthetic construct
  source 1..20: mol_type = other DNA
gaggctgggcacagtggctc

SEQ ID NO: 135354 - DNA, 20 bp, synthetic construct
  source 1..20: mol_type = other DNA
agaggctgggcacagtggct

SEQ ID NO: 135355 - DNA, 20 bp, synthetic construct
  source 1..20: mol_type = other DNA
aagaggctgggcacagtggc

SEQ ID NO: 135356 - DNA, 20 bp, synthetic construct
  source 1..20: mol_type = other DNA
aaagaggctgggcacagtgg

SEQ ID NO: 135357 - DNA, 20 bp, synthetic construct
  source 1..20: mol_type = other DNA
aaaagaggctgggcacagtg

SEQ ID NO: 135358 - DNA, 20 bp, synthetic construct
  source 1..20: mol_type = other DNA
aaaaagaggctgggcacagt

SEQ ID NO: 135359 - DNA, 20 bp, synthetic construct
  source 1..20: mol_type = other DNA
aaaaaagaggctgggcacag

SEQ ID NO: 135360 - DNA, 20 bp, synthetic construct
  source 1..20: mol_type = other DNA
aaaaaaagaggctgggcaca

SEQ ID NO: 135361 - DNA, 20 bp, synthetic construct
  source 1..20: mol_type = other DNA
aaaaaaaagaggctgggcac

SEQ ID NO: 135362 - DNA, 20 bp, synthetic construct
  source 1..20: mol_type = other DNA
aaaaaaaaagaggctgggca

SEQ ID NO: 135363 - DNA, 20 bp, synthetic construct
  source 1..20: mol_type = other DNA
aaaaaaaaaagaggctgggc

SEQ ID NO: 135364 - DNA, 20 bp, synthetic construct
  source 1..20: mol_type = other DNA
aaaaaaaaaaagaggctggg

SEQ ID NO: 135365 - DNA, 20 bp, synthetic construct
  source 1..20: mol_type = other DNA
aaaaaaaaaaaagaggctgg

SEQ ID NO: 135366 - DNA, 20 bp, synthetic construct
  source 1..20: mol_type = other DNA
aaaaaaaaaaaaagaggctg

SEQ ID NO: 135367 - DNA, 20 bp, synthetic construct
  source 1..20: mol_type = other DNA
taaaaaaaaaaaaagaggct

SEQ ID NO: 135368 - DNA, 20 bp, synthetic construct
  source 1..20: mol_type = other DNA
ataaaaaaaaaaaaagaggc

SEQ ID NO: 135369 - DNA, 20 bp, synthetic construct
  source 1..20: mol_type = other DNA
aataaaaaaaaaaaaagagg

SEQ ID NO: 135370 - DNA, 20 bp, synthetic construct
  source 1..20: mol_type = other DNA
aaataaaaaaaaaaaaagag

SEQ ID NO: 135371 - DNA, 20 bp, synthetic construct
  source 1..20: mol_type = other DNA
aaaataaaaaaaaaaaaaga

SEQ ID NO: 135372 - DNA, 20 bp, synthetic construct
  source 1..20: mol_type = other DNA
aaaaataaaaaaaaaaaaag

SEQ ID NO: 135373 - DNA, 20 bp, synthetic construct
  source 1..20: mol_type = other DNA
aaaaaataaaaaaaaaaaaa

SEQ ID NO: 135374 - DNA, 20 bp, synthetic construct
  source 1..20: mol_type = other DNA
taaaaaataaaaaaaaaaaa

SEQ ID NO: 135375 - DNA, 20 bp, synthetic construct
  source 1..20: mol_type = other DNA
ataaaaaataaaaaaaaaaa

SEQ ID NO: 135376 - DNA, 20 bp, synthetic construct
  source 1..20: mol_type = other DNA
aataaaaaataaaaaaaaaa

SEQ ID NO: 135377 - DNA, 20 bp, synthetic construct
  source 1..20: mol_type = other DNA
aaataaaaaataaaaaaaaa

SEQ ID NO: 135378 - DNA, 20 bp, synthetic construct
  source 1..20: mol_type = other DNA
taaataaaaaataaaaaaaa

SEQ ID NO: 135379 - DNA, 20 bp, synthetic construct
  source 1..20: mol_type = other DNA
ataaataaaaaataaaaaaa

SEQ ID NO: 135380 - DNA, 20 bp, synthetic construct
  source 1..20: mol_type = other DNA
aataaataaaaaataaaaaa

SEQ ID NO: 135381 - DNA, 20 bp, synthetic construct
  source 1..20: mol_type = other DNA
aaataaataaaaaataaaaa

SEQ ID NO: 135382 - DNA, 20 bp, synthetic construct
  source 1..20: mol_type = other DNA
aaaataaataaaaaataaaa

SEQ ID NO: 135383 - DNA, 20 bp, synthetic construct
  source 1..20: mol_type = other DNA
aaaaataaataaaaaataaa

SEQ ID NO: 135384 - DNA, 20 bp, synthetic construct
  source 1..20: mol_type = other DNA
aaaaaataaataaaaaataa

SEQ ID NO: 135385 - DNA, 20 bp, synthetic construct
  source 1..20: mol_type = other DNA
taaaaaataaataaaaaata

SEQ ID NO: 135386 - DNA, 20 bp, synthetic construct
  source 1..20: mol_type = other DNA
ataaaaaataaataaaaaat

SEQ ID NO: 135387 - DNA, 20 bp, synthetic construct
  source 1..20: mol_type = other DNA
aataaaaaataaataaaaaa

SEQ ID NO: 135388 - DNA, 20 bp, synthetic construct
  source 1..20: mol_type = other DNA
aaataaaaaataaataaaaa

SEQ ID NO: 135389 - DNA, 20 bp, synthetic construct
  source 1..20: mol_type = other DNA
aaaataaaaaataaataaaa

SEQ ID NO: 135390 - DNA, 20 bp, synthetic construct
  source 1..20: mol_type = other DNA
aaaaataaaaaataaataaa

SEQ ID NO: 135391 - DNA, 20 bp, synthetic construct
  source 1..20: mol_type = other DNA
aaaaaataaaaaataaataa

SEQ ID NO: 135392 - DNA, 20 bp, synthetic construct
  source 1..20: mol_type = other DNA
aaaaaaataaaaaataaata

SEQ ID NO: 135393 - DNA, 20 bp, synthetic construct
  source 1..20: mol_type = other DNA
aaaaaaaataaaaaataaat

SEQ ID NO: 135394 - DNA, 20 bp, synthetic construct
  source 1..20: mol_type = other DNA
aaaaaaaaataaaaaataaa

SEQ ID NO: 135395 - DNA, 20 bp, synthetic construct
  source 1..20: mol_type = other DNA
aaaaaaaaaataaaaaataa

SEQ ID NO: 135396 - DNA, 20 bp, synthetic construct
  source 1..20: mol_type = other DNA
taaaaaaaaaataaaaaata

SEQ ID NO: 135397 - DNA, 20 bp, synthetic construct
  source 1..20: mol_type = other DNA
ttaaaaaaaaaataaaaaat

SEQ ID NO: 135398 - DNA, 20 bp, synthetic construct
  source 1..20: mol_type = other DNA
attaaaaaaaaaataaaaaa

SEQ ID NO: 135399 - DNA, 20 bp, synthetic construct
  source 1..20: mol_type = other DNA
aattaaaaaaaaaataaaaa

SEQ ID NO: 135400 - DNA, 20 bp, synthetic construct
  source 1..20: mol_type = other DNA
aaattaaaaaaaaaataaaa

SEQ ID NO: 135401 - DNA, 20 bp, synthetic construct
  source 1..20: mol_type = other DNA
aaaattaaaaaaaaaataaa

SEQ ID NO: 135402 - DNA, 20 bp, synthetic construct
  source 1..20: mol_type = other DNA
aaaaattaaaaaaaaaataa

SEQ ID NO: 135403 - DNA, 20 bp, synthetic construct
  source 1..20: mol_type = other DNA
caaaaattaaaaaaaaaata

SEQ ID NO: 135404 - DNA, 20 bp, synthetic construct
  source 1..20: mol_type = other DNA
tcaaaaattaaaaaaaaaat

SEQ ID NO: 135405 - DNA, 20 bp, synthetic construct
  source 1..20: mol_type = other DNA
ctcaaaaattaaaaaaaaaa

SEQ ID NO: 135406 - DNA, 20 bp, synthetic construct
  source 1..20: mol_type = other DNA
tctcaaaaattaaaaaaaaa

SEQ ID NO: 135407 - DNA, 20 bp, synthetic construct
  source 1..20: mol_type = other DNA
ttctcaaaaattaaaaaaaa

SEQ ID NO: 135408 - DNA, 20 bp, synthetic construct
  source 1..20: mol_type = other DNA
cttctcaaaaattaaaaaaa

SEQ ID NO: 135409 - DNA, 20 bp, synthetic construct
  source 1..20: mol_type = other DNA
ccttctcaaaaattaaaaaa

SEQ ID NO: 135410 - DNA, 20 bp, synthetic construct
  source 1..20: mol_type = other DNA
tccttctcaaaaattaaaaa

SEQ ID NO: 135411 - DNA, 20 bp, synthetic construct
  source 1..20: mol_type = other DNA
ctccttctcaaaaattaaaa

SEQ ID NO: 135412 - DNA, 20 bp, synthetic construct
  source 1..20: mol_type = other DNA
actccttctcaaaaattaaa

SEQ ID NO: 135413 - DNA, 20 bp, synthetic construct
  source 1..20: mol_type = other DNA
gactccttctcaaaaattaa

SEQ ID NO: 135414 - DNA, 20 bp, synthetic construct
  source 1..20: mol_type = other DNA
agactccttctcaaaaatta

SEQ ID NO: 135415 - DNA, 20 bp, synthetic construct
  source 1..20: mol_type = other DNA
gagactccttctcaaaaatt

SEQ ID NO: 135416 - DNA, 20 bp, synthetic construct
  source 1..20: mol_type = other DNA
ggagactccttctcaaaaat

SEQ ID NO: 135417 - DNA, 20 bp, synthetic construct
  source 1..20: mol_type = other DNA
gggagactccttctcaaaaa

SEQ ID NO: 135418 - DNA, 20 bp, synthetic construct
  source 1..20: mol_type = other DNA
agggagactccttctcaaaa

SEQ ID NO: 135419 - DNA, 20 bp, synthetic construct
  source 1..20: mol_type = other DNA
gagggagactccttctcaaa

SEQ ID NO: 135420 - DNA, 20 bp, synthetic construct
  source 1..20: mol_type = other DNA
agagggagactccttctcaa

SEQ ID NO: 135421 - DNA, 20 bp, synthetic construct
  source 1..20: mol_type = other DNA
cagagggagactccttctca

SEQ ID NO: 135422 - DNA, 20 bp, synthetic construct
  source 1..20: mol_type = other DNA
gcagagggagactccttctc

SEQ ID NO: 135423 - DNA, 20 bp, synthetic construct
  source 1..20: mol_type = other DNA
ggcagagggagactccttct

SEQ ID NO: 135424 - DNA, 20 bp, synthetic construct
  source 1..20: mol_type = other DNA
tggcagagggagactccttc

SEQ ID NO: 135425 - DNA, 20 bp, synthetic construct
  source 1..20: mol_type = other DNA
gtggcagagggagactcctt

SEQ ID NO: 135426 - DNA, 20 bp, synthetic construct
  source 1..20: mol_type = other DNA
ggtggcagagggagactcct

SEQ ID NO: 135427 - DNA, 20 bp, synthetic construct
  source 1..20: mol_type = other DNA
gggtggcagagggagactcc

SEQ ID NO: 135428 - DNA, 20 bp, synthetic construct
  source 1..20: mol_type = other DNA
tgggtggcagagggagactc

SEQ ID NO: 135429 - DNA, 20 bp, synthetic construct
  source 1..20: mol_type = other DNA
ctgggtggcagagggagact

SEQ ID NO: 135430 - DNA, 20 bp, synthetic construct
  source 1..20: mol_type = other DNA
cctgggtggcagagggagac

SEQ ID NO: 135431 - DNA, 20 bp, synthetic construct
  source 1..20: mol_type = other DNA
gcctgggtggcagagggaga

SEQ ID NO: 135432 - DNA, 20 bp, synthetic construct
  source 1..20: mol_type = other DNA
agcctgggtggcagagggag

SEQ ID NO: 135433 - DNA, 20 bp, synthetic construct
  source 1..20: mol_type = other DNA
cagcctgggtggcagaggga

SEQ ID NO: 135434 - DNA, 20 bp, synthetic construct
  source 1..20: mol_type = other DNA
ccagcctgggtggcagaggg

SEQ ID NO: 135435 - DNA, 20 bp, synthetic construct
  source 1..20: mol_type = other DNA
tccagcctgggtggcagagg

SEQ ID NO: 135436 - DNA, 20 bp, synthetic construct
  source 1..20: mol_type = other DNA
ctccagcctgggtggcagag

SEQ ID NO: 135437 - DNA, 20 bp, synthetic construct
  source 1..20: mol_type = other DNA
actccagcctgggtggcaga

SEQ ID NO: 135438 - DNA, 20 bp, synthetic construct
  source 1..20: mol_type = other DNA
cactccagcctgggtggcag

SEQ ID NO: 135439 - DNA, 20 bp, synthetic construct
  source 1..20: mol_type = other DNA
gcactccagcctgggtggca

SEQ ID NO: 135440 - DNA, 20 bp, synthetic construct
  source 1..20: mol_type = other DNA
tgcactccagcctgggtggc

SEQ ID NO: 135441 - DNA, 20 bp, synthetic construct
  source 1..20: mol_type = other DNA
ctgcactccagcctgggtgg

SEQ ID NO: 135442 - DNA, 20 bp, synthetic construct
  source 1..20: mol_type = other DNA
actgcactccagcctgggtg

SEQ ID NO: 135443 - DNA, 20 bp, synthetic construct
  source 1..20: mol_type = other DNA
cactgcactccagcctgggt

SEQ ID NO: 135444 - DNA, 20 bp, synthetic construct
  source 1..20: mol_type = other DNA
ccactgcactccagcctggg

SEQ ID NO: 135445 - DNA, 20 bp, synthetic construct
  source 1..20: mol_type = other DNA
gccactgcactccagcctgg

SEQ ID NO: 135446 - DNA, 20 bp, synthetic construct
  source 1..20: mol_type = other DNA
cgccactgcactccagcctg

SEQ ID NO: 135447 - DNA, 20 bp, synthetic construct
  source 1..20: mol_type = other DNA
gcgccactgcactccagcct

SEQ ID NO: 135448 - DNA, 20 bp, synthetic construct
  source 1..20: mol_type = other DNA
cgcgccactgcactccagcc

SEQ ID NO: 135449 - DNA, 20 bp, synthetic construct
  source 1..20: mol_type = other DNA
tcgcgccactgcactccagc

SEQ ID NO: 135450 - DNA, 20 bp, synthetic construct
  source 1..20: mol_type = other DNA
atcgcgccactgcactccag

SEQ ID NO: 135451 - DNA, 20 bp, synthetic construct
  source 1..20: mol_type = other DNA
gatcgcgccactgcactcca

SEQ ID NO: 135452 - DNA, 20 bp, synthetic construct
  source 1..20: mol_type = other DNA
agatcgcgccactgcactcc

SEQ ID NO: 135453 - DNA, 20 bp, synthetic construct
  source 1..20: mol_type = other DNA
gagatcgcgccactgcactc

SEQ ID NO: 135454 - DNA, 20 bp, synthetic construct
  source 1..20: mol_type = other DNA
tgagatcgcgccactgcact

SEQ ID NO: 135455 - DNA, 20 bp, synthetic construct
  source 1..20: mol_type = other DNA
ctgagatcgcgccactgcac

SEQ ID NO: 135456 - DNA, 20 bp, synthetic construct
  source 1..20: mol_type = other DNA
gctgagatcgcgccactgca

SEQ ID NO: 135457 - DNA, 20 bp, synthetic construct
  source 1..20: mol_type = other DNA
agctgagatcgcgccactgc

SEQ ID NO: 135458 - DNA, 20 bp, synthetic construct
  source 1..20: mol_type = other DNA
gagctgagatcgcgccactg

SEQ ID NO: 135459 - DNA, 20 bp, synthetic construct
  source 1..20: mol_type = other DNA
ggagctgagatcgcgccact

SEQ ID NO: 135460 - DNA, 20 bp, synthetic construct
  source 1..20: mol_type = other DNA
gggagctgagatcgcgccac

SEQ ID NO: 135461 - DNA, 20 bp, synthetic construct
  source 1..20: mol_type = other DNA
agggagctgagatcgcgcca

SEQ ID NO: 135462 - DNA, 20 bp, synthetic construct
  source 1..20: mol_type = other DNA
cagggagctgagatcgcgcc

SEQ ID NO: 135463 - DNA, 20 bp, synthetic construct
  source 1..20: mol_type = other DNA
gcagggagctgagatcgcgc

SEQ ID NO: 135464 - DNA, 20 bp, synthetic construct
  source 1..20: mol_type = other DNA
tgcagggagctgagatcgcg

SEQ ID NO: 135465 - DNA, 20 bp, synthetic construct
  source 1..20: mol_type = other DNA
ttgcagggagctgagatcgc

SEQ ID NO: 135466 - DNA, 20 bp, synthetic construct
  source 1..20: mol_type = other DNA
tttgcagggagctgagatcg

SEQ ID NO: 135467 - DNA, 20 bp, synthetic construct
  source 1..20: mol_type = other DNA
gtttgcagggagctgagatc

SEQ ID NO: 135468 - DNA, 20 bp, synthetic construct
  source 1..20: mol_type = other DNA
agtttgcagggagctgagat

SEQ ID NO: 135469 - DNA, 20 bp, synthetic construct
  source 1..20: mol_type = other DNA
gagtttgcagggagctgaga

SEQ ID NO: 135470 - DNA, 20 bp, synthetic construct
  source 1..20: mol_type = other DNA
ggagtttgcagggagctgag

SEQ ID NO: 135471 - DNA, 20 bp, synthetic construct
  source 1..20: mol_type = other DNA
cggagtttgcagggagctga

SEQ ID NO: 135472 - DNA, 20 bp, synthetic construct
  source 1..20: mol_type = other DNA
gcggagtttgcagggagctg

SEQ ID NO: 135473 - DNA, 20 bp, synthetic construct
  source 1..20: mol_type = other DNA
ggcggagtttgcagggagct

SEQ ID NO: 135474 - DNA, 20 bp, synthetic construct
  source 1..20: mol_type = other DNA
aggcggagtttgcagggagc

SEQ ID NO: 135475 - DNA, 20 bp, synthetic construct
  source 1..20: mol_type = other DNA
gaggcggagtttgcagggag

SEQ ID NO: 135476 - DNA, 20 bp, synthetic construct
  source 1..20: mol_type = other DNA
ggaggcggagtttgcaggga

SEQ ID NO: 135477 - DNA, 20 bp, synthetic construct
  source 1..20: mol_type = other DNA
aggaggcggagtttgcaggg

SEQ ID NO: 135478 - DNA, 20 bp, synthetic construct
  source 1..20: mol_type = other DNA
caggaggcggagtttgcagg

SEQ ID NO: 135479 - DNA, 20 bp, synthetic construct
  source 1..20: mol_type = other DNA
ccaggaggcggagtttgcag

SEQ ID NO: 135480 - DNA, 20 bp, synthetic construct
  source 1..20: mol_type = other DNA
cccaggaggcggagtttgca

SEQ ID NO: 135481 - DNA, 20 bp, synthetic construct
  source 1..20: mol_type = other DNA
acccaggaggcggagtttgc

SEQ ID NO: 135482 - DNA, 20 bp, synthetic construct
  source 1..20: mol_type = other DNA
aacccaggaggcggagtttg

SEQ ID NO: 135483 - DNA, 20 bp, synthetic construct
  source 1..20: mol_type = other DNA
gaacccaggaggcggagttt

SEQ ID NO: 135484 - DNA, 20 bp, synthetic construct
  source 1..20: mol_type = other DNA
tgaacccaggaggcggagtt

SEQ ID NO: 135485 - DNA, 20 bp, synthetic construct
  source 1..20: mol_type = other DNA
ttgaacccaggaggcggagt

SEQ ID NO: 135486 - DNA, 20 bp, synthetic construct
  source 1..20: mol_type = other DNA
cttgaacccaggaggcggag

SEQ ID NO: 135487 - DNA, 20 bp, synthetic construct
  source 1..20: mol_type = other DNA
gcttgaacccaggaggcgga

SEQ ID NO: 135488 - DNA, 20 bp, synthetic construct
  source 1..20: mol_type = other DNA
tgcttgaacccaggaggcgg

SEQ ID NO: 135489 - DNA, 20 bp, synthetic construct
  source 1..20: mol_type = other DNA
ctgcttgaacccaggaggcg

SEQ ID NO: 135490 - DNA, 20 bp, synthetic construct
  source 1..20: mol_type = other DNA
actgcttgaacccaggaggc

SEQ ID NO: 135491 - DNA, 20 bp, synthetic construct
  source 1..20: mol_type = other DNA
aactgcttgaacccaggagg

SEQ ID NO: 135492 - DNA, 20 bp, synthetic construct
  source 1..20: mol_type = other DNA
gaactgcttgaacccaggag

SEQ ID NO: 135493 - DNA, 20 bp, synthetic construct
  source 1..20: mol_type = other DNA
agaactgcttgaacccagga

SEQ ID NO: 135494 - DNA, 20 bp, synthetic construct
  source 1..20: mol_type = other DNA
gagaactgcttgaacccagg

SEQ ID NO: 135495 - DNA, 20 bp, synthetic construct
  source 1..20: mol_type = other DNA
ggagaactgcttgaacccag

SEQ ID NO: 135496 - DNA, 20 bp, synthetic construct
  source 1..20: mol_type = other DNA
aggagaactgcttgaaccca

SEQ ID NO: 135497 - DNA, 20 bp, synthetic construct
  source 1..20: mol_type = other DNA
caggagaactgcttgaaccc

SEQ ID NO: 135498 - DNA, 20 bp, synthetic construct
  source 1..20: mol_type = other DNA
gcaggagaactgcttgaacc

SEQ ID NO: 135499 - DNA, 20 bp, synthetic construct
  source 1..20: mol_type = other DNA
ggcaggagaactgcttgaac

SEQ ID NO: 135500 - DNA, 20 bp, synthetic construct
  source 1..20: mol_type = other DNA
aggcaggagaactgcttgaa

SEQ ID NO: 135501 - DNA, 20 bp, synthetic construct
  source 1..20: mol_type = other DNA
gaggcaggagaactgcttga

SEQ ID NO: 135502 - DNA, 20 bp, synthetic construct
  source 1..20: mol_type = other DNA
tgaggcaggagaactgcttg

SEQ ID NO: 135503 - DNA, 20 bp, synthetic construct
  source 1..20: mol_type = other DNA
ctgaggcaggagaactgctt

SEQ ID NO: 135504 - DNA, 20 bp, synthetic construct
  source 1..20: mol_type = other DNA
gctgaggcaggagaactgct

SEQ ID NO: 135505 - DNA, 20 bp, synthetic construct
  source 1..20: mol_type = other DNA
ggctgaggcaggagaactgc

SEQ ID NO: 135506 - DNA, 20 bp, synthetic construct
  source 1..20: mol_type = other DNA
aggctgaggcaggagaactg

SEQ ID NO: 135507 - DNA, 20 bp, synthetic construct
  source 1..20: mol_type = other DNA
gaggctgaggcaggagaact

SEQ ID NO: 135508 - DNA, 20 bp, synthetic construct
  source 1..20: mol_type = other DNA
ggaggctgaggcaggagaac

SEQ ID NO: 135509 - DNA, 20 bp, synthetic construct
  source 1..20: mol_type = other DNA
aggaggctgaggcaggagaa

SEQ ID NO: 135510 - DNA, 20 bp, synthetic construct
  source 1..20: mol_type = other DNA
caggaggctgaggcaggaga

SEQ ID NO: 135511 - DNA, 20 bp, synthetic construct
  source 1..20: mol_type = other DNA
tcaggaggctgaggcaggag

SEQ ID NO: 135512 - DNA, 20 bp, synthetic construct
  source 1..20: mol_type = other DNA
ctcaggaggctgaggcagga

SEQ ID NO: 135513 - DNA, 20 bp, synthetic construct
  source 1..20: mol_type = other DNA
actcaggaggctgaggcagg

SEQ ID NO: 135514 - DNA, 20 bp, synthetic construct
  source 1..20: mol_type = other DNA
tactcaggaggctgaggcag

SEQ ID NO: 135515 - DNA, 20 bp, synthetic construct
  source 1..20: mol_type = other DNA
ctactcaggaggctgaggca

SEQ ID NO: 135516 - DNA, 20 bp, synthetic construct
  source 1..20: mol_type = other DNA
gctactcaggaggctgaggc

SEQ ID NO: 135517 - DNA, 20 bp, synthetic construct
  source 1..20: mol_type = other DNA
agctactcaggaggctgagg

SEQ ID NO: 135518 - DNA, 20 bp, synthetic construct
  source 1..20: mol_type = other DNA
cagctactcaggaggctgag

SEQ ID NO: 135519 - DNA, 20 bp, synthetic construct
  source 1..20: mol_type = other DNA
ccagctactcaggaggctga

SEQ ID NO: 135520 - DNA, 20 bp, synthetic construct
  source 1..20: mol_type = other DNA
cccagctactcaggaggctg

SEQ ID NO: 135521 - DNA, 20 bp, synthetic construct
  source 1..20: mol_type = other DNA
tcccagctactcaggaggct

SEQ ID NO: 135522 - DNA, 20 bp, synthetic construct
  source 1..20: mol_type = other DNA
gtcccagctactcaggaggc

SEQ ID NO: 135523 - DNA, 20 bp, synthetic construct
  source 1..20: mol_type = other DNA
agtcccagctactcaggagg

SEQ ID NO: 135524 - DNA, 20 bp, synthetic construct
  source 1..20: mol_type = other DNA
tagtcccagctactcaggag

SEQ ID NO: 135525 - DNA, 20 bp, synthetic construct
  source 1..20: mol_type = other DNA
gtagtcccagctactcagga

SEQ ID NO: 135526 - DNA, 20 bp, synthetic construct
  source 1..20: mol_type = other DNA
tgtagtcccagctactcagg

SEQ ID NO: 135527 - DNA, 20 bp, synthetic construct
  source 1..20: mol_type = other DNA
ctgtagtcccagctactcag

SEQ ID NO: 135528 - DNA, 20 bp, synthetic construct
  source 1..20: mol_type = other DNA
cctgtagtcccagctactca

SEQ ID NO: 135529 - DNA, 20 bp, synthetic construct
  source 1..20: mol_type = other DNA
acctgtagtcccagctactc

SEQ ID NO: 135530 - DNA, 20 bp, synthetic construct
  source 1..20: mol_type = other DNA
cacctgtagtcccagctact

SEQ ID NO: 135531 - DNA, 20 bp, synthetic construct
  source 1..20: mol_type = other DNA
gcacctgtagtcccagctac

SEQ ID NO: 135532 - DNA, 20 bp, synthetic construct
  source 1..20: mol_type = other DNA
ggcacctgtagtcccagcta

SEQ ID NO: 135533 - DNA, 20 bp, synthetic construct
  source 1..20: mol_type = other DNA
gggcacctgtagtcccagct

SEQ ID NO: 135534 - DNA, 20 bp, synthetic construct
  source 1..20: mol_type = other DNA
cgggcacctgtagtcccagc

SEQ ID NO: 135535 - DNA, 20 bp, synthetic construct
  source 1..20: mol_type = other DNA
gcgggcacctgtagtcccag

SEQ ID NO: 135536 - DNA, 20 bp, synthetic construct
  source 1..20: mol_type = other DNA
ggcgggcacctgtagtccca

SEQ ID NO: 135537 - DNA, 20 bp, synthetic construct
  source 1..20: mol_type = other DNA
tggcgggcacctgtagtccc

SEQ ID NO: 135538 - DNA, 20 bp, synthetic construct
  source 1..20: mol_type = other DNA
gtggcgggcacctgtagtcc

SEQ ID NO: 135539 - DNA, 20 bp, synthetic construct
  source 1..20: mol_type = other DNA
ggtggcgggcacctgtagtc

SEQ ID NO: 135540 - DNA, 20 bp, synthetic construct
  source 1..20: mol_type = other DNA
tggtggcgggcacctgtagt

SEQ ID NO: 135541 - DNA, 20 bp, synthetic construct
  source 1..20: mol_type = other DNA
gtggtggcgggcacctgtag

SEQ ID NO: 135542 - DNA, 20 bp, synthetic construct
  source 1..20: mol_type = other DNA
tgtggtggcgggcacctgta

SEQ ID NO: 135543 - DNA, 20 bp, synthetic construct
  source 1..20: mol_type = other DNA
gtgtggtggcgggcacctgt

SEQ ID NO: 135544 - DNA, 20 bp, synthetic construct
  source 1..20: mol_type = other DNA
ggtgtggtggcgggcacctg

SEQ ID NO: 135545 - DNA, 20 bp, synthetic construct
  source 1..20: mol_type = other DNA
aggtgtggtggcgggcacct

SEQ ID NO: 135546 - DNA, 20 bp, synthetic construct
  source 1..20: mol_type = other DNA
caggtgtggtggcgggcacc

SEQ ID NO: 135547 - DNA, 20 bp, synthetic construct
  source 1..20: mol_type = other DNA
ccaggtgtggtggcgggcac

SEQ ID NO: 135548 - DNA, 20 bp, synthetic construct
  source 1..20: mol_type = other DNA
gccaggtgtggtggcgggca

SEQ ID NO: 135549 - DNA, 20 bp, synthetic construct
  source 1..20: mol_type = other DNA
agccaggtgtggtggcgggc

SEQ ID NO: 135550 - DNA, 20 bp, synthetic construct
  source 1..20: mol_type = other DNA
tagccaggtgtggtggcggg

SEQ ID NO: 135551 - DNA, 20 bp, synthetic construct
  source 1..20: mol_type = other DNA
ttagccaggtgtggtggcgg

SEQ ID NO: 135552 - DNA, 20 bp, synthetic construct
  source 1..20: mol_type = other DNA
attagccaggtgtggtggcg

SEQ ID NO: 135553 - DNA, 20 bp, synthetic construct
  source 1..20: mol_type = other DNA
aattagccaggtgtggtggc

SEQ ID NO: 135554 - DNA, 20 bp, synthetic construct
  source 1..20: mol_type = other DNA
aaattagccaggtgtggtgg

SEQ ID NO: 135555 - DNA, 20 bp, synthetic construct
  source 1..20: mol_type = other DNA
aaaattagccaggtgtggtg

SEQ ID NO: 135556 - DNA, 20 bp, synthetic construct
  source 1..20: mol_type = other DNA
aaaaattagccaggtgtggt

SEQ ID NO: 135557 - DNA, 20 bp, synthetic construct
  source 1..20: mol_type = other DNA
caaaaattagccaggtgtgg

SEQ ID NO: 135558 - DNA, 20 bp, synthetic construct
  source 1..20: mol_type = other DNA
acaaaaattagccaggtgtg

SEQ ID NO: 135559 - DNA, 20 bp, synthetic construct
  source 1..20: mol_type = other DNA
cacaaaaattagccaggtgt

SEQ ID NO: 135560 - DNA, 20 bp, synthetic construct
  source 1..20: mol_type = other DNA
acacaaaaattagccaggtg

SEQ ID NO: 135561 - DNA, 20 bp, synthetic construct
  source 1..20: mol_type = other DNA
aacacaaaaattagccaggt

SEQ ID NO: 135562 - DNA, 20 bp, synthetic construct
  source 1..20: mol_type = other DNA
aaacacaaaaattagccagg

SEQ ID NO: 135563 - DNA, 20 bp, synthetic construct
  source 1..20: mol_type = other DNA
aaaacacaaaaattagccag

SEQ ID NO: 135564 - DNA, 20 bp, synthetic construct
  source 1..20: mol_type = other DNA
aaaaacacaaaaattagcca

SEQ ID NO: 135565 - DNA, 20 bp, synthetic construct
  source 1..20: mol_type = other DNA
taaaaacacaaaaattagcc

SEQ ID NO: 135566 - DNA, 20 bp, synthetic construct
  source 1..20: mol_type = other DNA
ctaaaaacacaaaaattagc

SEQ ID NO: 135567 - DNA, 20 bp, synthetic construct
  source 1..20: mol_type = other DNA
actaaaaacacaaaaattag

SEQ ID NO: 135568 - DNA, 20 bp, synthetic construct
  source 1..20: mol_type = other DNA
tactaaaaacacaaaaatta

SEQ ID NO: 135569 - DNA, 20 bp, synthetic construct
  source 1..20: mol_type = other DNA
ctactaaaaacacaaaaatt

SEQ ID NO: 135570 - DNA, 20 bp, synthetic construct
  source 1..20: mol_type = other DNA
tctactaaaaacacaaaaat

SEQ ID NO: 135571 - DNA, 20 bp, synthetic construct
  source 1..20: mol_type = other DNA
ctctactaaaaacacaaaaa

SEQ ID NO: 135572 - DNA, 20 bp, synthetic construct
  source 1..20: mol_type = other DNA
tctctactaaaaacacaaaa

SEQ ID NO: 135573 - DNA, 20 bp, synthetic construct
  source 1..20: mol_type = other DNA
gtctctactaaaaacacaaa

SEQ ID NO: 135574 - DNA, 20 bp, synthetic construct
  source 1..20: mol_type = other DNA
tgtctctactaaaaacacaa

SEQ ID NO: 135575 - DNA, 20 bp, synthetic construct
  source 1..20: mol_type = other DNA
ctgtctctactaaaaacaca

SEQ ID NO: 135576 - DNA, 20 bp, synthetic construct
  source 1..20: mol_type = other DNA
cctgtctctactaaaaacac

SEQ ID NO: 135577 - DNA, 20 bp, synthetic construct
  source 1..20: mol_type = other DNA
ccctgtctctactaaaaaca

SEQ ID NO: 135578 - DNA, 20 bp, synthetic construct
  source 1..20: mol_type = other DNA
accctgtctctactaaaaac

SEQ ID NO: 135579 - DNA, 20 bp, synthetic construct
  source 1..20: mol_type = other DNA
aaccctgtctctactaaaaa

SEQ ID NO: 135580 - DNA, 20 bp, synthetic construct
  source 1..20: mol_type = other DNA
aaaccctgtctctactaaaa

SEQ ID NO: 135581 - DNA, 20 bp, synthetic construct
  source 1..20: mol_type = other DNA
gaaaccctgtctctactaaa

SEQ ID NO: 135582 - DNA, 20 bp, synthetic construct
  source 1..20: mol_type = other DNA
tgaaaccctgtctctactaa

SEQ ID NO: 135583 - DNA, 20 bp, synthetic construct
  source 1..20: mol_type = other DNA
gtgaaaccctgtctctacta

SEQ ID NO: 135584 - DNA, 20 bp, synthetic construct
  source 1..20: mol_type = other DNA
ggtgaaaccctgtctctact

SEQ ID NO: 135585 - DNA, 20 bp, synthetic construct
  source 1..20: mol_type = other DNA
tggtgaaaccctgtctctac

SEQ ID NO: 135586 - DNA, 20 bp, synthetic construct
  source 1..20: mol_type = other DNA
atggtgaaaccctgtctcta

SEQ ID NO: 135587 - DNA, 20 bp, synthetic construct
  source 1..20: mol_type = other DNA
catggtgaaaccctgtctct

SEQ ID NO: 135588 - DNA, 20 bp, synthetic construct
  source 1..20: mol_type = other DNA
acatggtgaaaccctgtctc

SEQ ID NO: 135589 - DNA, 20 bp, synthetic construct
  source 1..20: mol_type = other DNA
aacatggtgaaaccctgtct

SEQ ID NO: 135590 - DNA, 20 bp, synthetic construct
  source 1..20: mol_type = other DNA
caacatggtgaaaccctgtc

SEQ ID NO: 135591 - DNA, 20 bp, synthetic construct
  source 1..20: mol_type = other DNA
ccaacatggtgaaaccctgt

SEQ ID NO: 135592 - DNA, 20 bp, synthetic construct
  source 1..20: mol_type = other DNA
accaacatggtgaaaccctg

SEQ ID NO: 135593 - DNA, 20 bp, synthetic construct
  source 1..20: mol_type = other DNA
gaccaacatggtgaaaccct

SEQ ID NO: 135594 - DNA, 20 bp, synthetic construct
  source 1..20: mol_type = other DNA
tgaccaacatggtgaaaccc

SEQ ID NO: 135595 - DNA, 20 bp, synthetic construct
  source 1..20: mol_type = other DNA
ctgaccaacatggtgaaacc

SEQ ID NO: 135596 - DNA, 20 bp, synthetic construct
  source 1..20: mol_type = other DNA
cctgaccaacatggtgaaac

SEQ ID NO: 135597 - DNA, 20 bp, synthetic construct
  source 1..20: mol_type = other DNA
gcctgaccaacatggtgaaa

SEQ ID NO: 135598 - DNA, 20 bp, synthetic construct
  source 1..20: mol_type = other DNA
agcctgaccaacatggtgaa

SEQ ID NO: 135599 - DNA, 20 bp, synthetic construct
  source 1..20: mol_type = other DNA
cagcctgaccaacatggtga

SEQ ID NO: 135600 - DNA, 20 bp, synthetic construct
  source 1..20: mol_type = other DNA
ccagcctgaccaacatggtg

SEQ ID NO: 135601 - DNA, 20 bp, synthetic construct
  source 1..20: mol_type = other DNA
accagcctgaccaacatggt

SEQ ID NO: 135602 - DNA, 20 bp, synthetic construct
  source 1..20: mol_type = other DNA
gaccagcctgaccaacatgg

SEQ ID NO: 135603 - DNA, 20 bp, synthetic construct
  source 1..20: mol_type = other DNA
agaccagcctgaccaacatg

SEQ ID NO: 135604 - DNA, 20 bp, synthetic construct
  source 1..20: mol_type = other DNA
aagaccagcctgaccaacat

SEQ ID NO: 135605 - DNA, 20 bp, synthetic construct
  source 1..20: mol_type = other DNA
caagaccagcctgaccaaca

SEQ ID NO: 135606 - DNA, 20 bp, synthetic construct
  source 1..20: mol_type = other DNA
tcaagaccagcctgaccaac

SEQ ID NO: 135607 - DNA, 20 bp, synthetic construct
  source 1..20: mol_type = other DNA
ttcaagaccagcctgaccaa

SEQ ID NO: 135608 - DNA, 20 bp, synthetic construct
  source 1..20: mol_type = other DNA
attcaagaccagcctgacca

SEQ ID NO: 135609 - DNA, 20 bp, synthetic construct
  source 1..20: mol_type = other DNA
aattcaagaccagcctgacc

SEQ ID NO: 135610 - DNA, 20 bp, synthetic construct
  source 1..20: mol_type = other DNA
gaattcaagaccagcctgac

SEQ ID NO: 135611 - DNA, 20 bp, synthetic construct
  source 1..20: mol_type = other DNA
ggaattcaagaccagcctga

SEQ ID NO: 135612 - DNA, 20 bp, synthetic construct
  source 1..20: mol_type = other DNA
gggaattcaagaccagcctg

SEQ ID NO: 135613 - DNA, 20 bp, synthetic construct
  source 1..20: mol_type = other DNA
cgggaattcaagaccagcct

SEQ ID NO: 135614 - DNA, 20 bp, synthetic construct
  source 1..20: mol_type = other DNA
tcgggaattcaagaccagcc

SEQ ID NO: 135615 - DNA, 20 bp, synthetic construct
  source 1..20: mol_type = other DNA
gtcgggaattcaagaccagc

SEQ ID NO: 135616 - DNA, 20 bp, synthetic construct
  source 1..20: mol_type = other DNA
ggtcgggaattcaagaccag

SEQ ID NO: 135617 - DNA, 20 bp, synthetic construct
  source 1..20: mol_type = other DNA
aggtcgggaattcaagacca

SEQ ID NO: 135618 - DNA, 20 bp, synthetic construct
  source 1..20: mol_type = other DNA
gaggtcgggaattcaagacc

SEQ ID NO: 135619 - DNA, 20 bp, synthetic construct
  source 1..20: mol_type = other DNA
tgaggtcgggaattcaagac

SEQ ID NO: 135620 - DNA, 20 bp, synthetic construct
  source 1..20: mol_type = other DNA
ctgaggtcgggaattcaaga

SEQ ID NO: 135621 - DNA, 20 bp, synthetic construct
  source 1..20: mol_type = other DNA
cctgaggtcgggaattcaag

SEQ ID NO: 135622 - DNA, 20 bp, synthetic construct
  source 1..20: mol_type = other DNA
acctgaggtcgggaattcaa

SEQ ID NO: 135623 - DNA, 20 bp, synthetic construct
  source 1..20: mol_type = other DNA
cacctgaggtcgggaattca

SEQ ID NO: 135624 - DNA, 20 bp, synthetic construct
  source 1..20: mol_type = other DNA
tcacctgaggtcgggaattc

SEQ ID NO: 135625 - DNA, 20 bp, synthetic construct
  source 1..20: mol_type = other DNA
atcacctgaggtcgggaatt

SEQ ID NO: 135626 - DNA, 20 bp, synthetic construct
  source 1..20: mol_type = other DNA
gatcacctgaggtcgggaat

SEQ ID NO: 135627 - DNA, 20 bp, synthetic construct
  source 1..20: mol_type = other DNA
ggatcacctgaggtcgggaa

SEQ ID NO: 135628 - DNA, 20 bp, synthetic construct
  source 1..20: mol_type = other DNA
tggatcacctgaggtcggga

SEQ ID NO: 135629 - DNA, 20 bp, synthetic construct
  source 1..20: mol_type = other DNA
gtggatcacctgaggtcggg

SEQ ID NO: 135630 - DNA, 20 bp, synthetic construct
  source 1..20: mol_type = other DNA
ggtggatcacctgaggtcgg

SEQ ID NO: 135631 - DNA, 20 bp, synthetic construct
  source 1..20: mol_type = other DNA
gggtggatcacctgaggtcg

SEQ ID NO: 135632 - DNA, 20 bp, synthetic construct
  source 1..20: mol_type = other DNA
tgggtggatcacctgaggtc

SEQ ID NO: 135633 - DNA, 20 bp, synthetic construct
  source 1..20: mol_type = other DNA
gtgggtggatcacctgaggt

SEQ ID NO: 135634 - DNA, 20 bp, synthetic construct
  source 1..20: mol_type = other DNA
ggtgggtggatcacctgagg

SEQ ID NO: 135635 - DNA, 20 bp, synthetic construct
  source 1..20: mol_type = other DNA
aggtgggtggatcacctgag

SEQ ID NO: 135636 - DNA, 20 bp, synthetic construct
  source 1..20: mol_type = other DNA
gaggtgggtggatcacctga

SEQ ID NO: 135637 - DNA, 20 bp, synthetic construct
  source 1..20: mol_type = other DNA
tgaggtgggtggatcacctg

SEQ ID NO: 135638 - DNA, 20 bp, synthetic construct
  source 1..20: mol_type = other DNA
ctgaggtgggtggatcacct

SEQ ID NO: 135639 - DNA, 20 bp, synthetic construct
  source 1..20: mol_type = other DNA
gctgaggtgggtggatcacc

SEQ ID NO: 135640 - DNA, 20 bp, synthetic construct
  source 1..20: mol_type = other DNA
ggctgaggtgggtggatcac

SEQ ID NO: 135641 - DNA, 20 bp, synthetic construct
  source 1..20: mol_type = other DNA
aggctgaggtgggtggatca

SEQ ID NO: 135642 - DNA, 20 bp, synthetic construct
  source 1..20: mol_type = other DNA
gaggctgaggtgggtggatc

SEQ ID NO: 135643 - DNA, 20 bp, synthetic construct
  source 1..20: mol_type = other DNA
ggaggctgaggtgggtggat

SEQ ID NO: 135644 - DNA, 20 bp, synthetic construct
  source 1..20: mol_type = other DNA
gggaggctgaggtgggtgga

SEQ ID NO: 135645 - DNA, 20 bp, synthetic construct
  source 1..20: mol_type = other DNA
tgggaggctgaggtgggtgg

SEQ ID NO: 135646 - DNA, 20 bp, synthetic construct
  source 1..20: mol_type = other DNA
ttgggaggctgaggtgggtg

SEQ ID NO: 135647 - DNA, 20 bp, synthetic construct
  source 1..20: mol_type = other DNA
tttgggaggctgaggtgggt

SEQ ID NO: 135648 - DNA, 20 bp, synthetic construct
  source 1..20: mol_type = other DNA
ctttgggaggctgaggtggg

SEQ ID NO: 135649 - DNA, 20 bp, synthetic construct
  source 1..20: mol_type = other DNA
actttgggaggctgaggtgg

SEQ ID NO: 135650 - DNA, 20 bp, synthetic construct
  source 1..20: mol_type = other DNA
cactttgggaggctgaggtg

SEQ ID NO: 135651 - DNA, 20 bp, synthetic construct
  source 1..20: mol_type = other DNA
gcactttgggaggctgaggt

SEQ ID NO: 135652 - DNA, 20 bp, synthetic construct
  source 1..20: mol_type = other DNA
agcactttgggaggctgagg

SEQ ID NO: 135653 - DNA, 20 bp, synthetic construct
  source 1..20: mol_type = other DNA
cagcactttgggaggctgag

SEQ ID NO: 135654 - DNA, 20 bp, synthetic construct
  source 1..20: mol_type = other DNA
ccagcactttgggaggctga

SEQ ID NO: 135655 - DNA, 20 bp, synthetic construct
  source 1..20: mol_type = other DNA
cccagcactttgggaggctg

SEQ ID NO: 135656 - DNA, 20 bp, synthetic construct
  source 1..20: mol_type = other DNA
tcccagcactttgggaggct

SEQ ID NO: 135657 - DNA, 20 bp, synthetic construct
  source 1..20: mol_type = other DNA
atcccagcactttgggaggc

SEQ ID NO: 135658 - DNA, 20 bp, synthetic construct
  source 1..20: mol_type = other DNA
aatcccagcactttgggagg

SEQ ID NO: 135659 - DNA, 20 bp, synthetic construct
  source 1..20: mol_type = other DNA
taatcccagcactttgggag

SEQ ID NO: 135660 - DNA, 20 bp, synthetic construct
  source 1..20: mol_type = other DNA
gtaatcccagcactttggga

SEQ ID NO: 135661 - DNA, 20 bp, synthetic construct
  source 1..20: mol_type = other DNA
tgtaatcccagcactttggg

SEQ ID NO: 135662 - DNA, 20 bp, synthetic construct
  source 1..20: mol_type = other DNA
ctgtaatcccagcactttgg

SEQ ID NO: 135663 - DNA, 20 bp, synthetic construct
  source 1..20: mol_type = other DNA
cctgtaatcccagcactttg

SEQ ID NO: 135664 - DNA, 20 bp, synthetic construct
  source 1..20: mol_type = other DNA
gcctgtaatcccagcacttt

SEQ ID NO: 135665 - DNA, 20 bp, synthetic construct
  source 1..20: mol_type = other DNA
cgcctgtaatcccagcactt

SEQ ID NO: 135666 - DNA, 20 bp, synthetic construct
  source 1..20: mol_type = other DNA
acgcctgtaatcccagcact

SEQ ID NO: 135667 - DNA, 20 bp, synthetic construct
  source 1..20: mol_type = other DNA
cacgcctgtaatcccagcac

SEQ ID NO: 135668 - DNA, 20 bp, synthetic construct
  source 1..20: mol_type = other DNA
tcacgcctgtaatcccagca

SEQ ID NO: 135669 - DNA, 20 bp, synthetic construct
  source 1..20: mol_type = other DNA
ctcacgcctgtaatcccagc

SEQ ID NO: 135670 - DNA, 20 bp, synthetic construct
  source 1..20: mol_type = other DNA
gctcacgcctgtaatcccag

SEQ ID NO: 135671 - DNA, 20 bp, synthetic construct
  source 1..20: mol_type = other DNA
ggctcacgcctgtaatccca

SEQ ID NO: 135672 - DNA, 20 bp, synthetic construct
  source 1..20: mol_type = other DNA
tggctcacgcctgtaatccc

SEQ ID NO: 135673 - DNA, 20 bp, synthetic construct
  source 1..20: mol_type = other DNA
gtggctcacgcctgtaatcc

SEQ ID NO: 135674 - DNA, 20 bp, synthetic construct
  source 1..20: mol_type = other DNA
agtggctcacgcctgtaatc

SEQ ID NO: 135675 - DNA, 20 bp, synthetic construct
  source 1..20: mol_type = other DNA
cagtggctcacgcctgtaat

SEQ ID NO: 135676 - DNA, 20 bp, synthetic construct
  source 1..20: mol_type = other DNA
gcagtggctcacgcctgtaa

SEQ ID NO: 135677 - DNA, 20 bp, synthetic construct
  source 1..20: mol_type = other DNA
ggcagtggctcacgcctgta

SEQ ID NO: 135678 - DNA, 20 bp, synthetic construct
  source 1..20: mol_type = other DNA
gggcagtggctcacgcctgt

SEQ ID NO: 135679 - DNA, 20 bp, synthetic construct
  source 1..20: mol_type = other DNA
ggggcagtggctcacgcctg

SEQ ID NO: 135680 - DNA, 20 bp, synthetic construct
  source 1..20: mol_type = other DNA
cggggcagtggctcacgcct

SEQ ID NO: 135681 - DNA, 20 bp, synthetic construct
  source 1..20: mol_type = other DNA
ccggggcagtggctcacgcc

SEQ ID NO: 135682 - DNA, 20 bp, synthetic construct
  source 1..20: mol_type = other DNA
gccggggcagtggctcacgc

SEQ ID NO: 135683 - DNA, 20 bp, synthetic construct
  source 1..20: mol_type = other DNA
ggccggggcagtggctcacg

SEQ ID NO: 135684 - DNA, 20 bp, synthetic construct
  source 1..20: mol_type = other DNA
aggccggggcagtggctcac

SEQ ID NO: 135685 - DNA, 20 bp, synthetic construct
  source 1..20: mol_type = other DNA
gaggccggggcagtggctca

SEQ ID NO: 135686 - DNA, 20 bp, synthetic construct
  source 1..20: mol_type = other DNA
agaggccggggcagtggctc

SEQ ID NO: 135687 - DNA, 20 bp, synthetic construct
  source 1..20: mol_type = other DNA
aagaggccggggcagtggct

SEQ ID NO: 135688 - DNA, 20 bp, synthetic construct
  source 1..20: mol_type = other DNA
aaagaggccggggcagtggc

SEQ ID NO: 135689 - DNA, 20 bp, synthetic construct
  source 1..20: mol_type = other DNA
caaagaggccggggcagtgg

SEQ ID NO: 135690 - DNA, 20 bp, synthetic construct
  source 1..20: mol_type = other DNA
tcaaagaggccggggcagtg

SEQ ID NO: 135691 - DNA, 20 bp, synthetic construct
  source 1..20: mol_type = other DNA
atcaaagaggccggggcagt

SEQ ID NO: 135692 - DNA, 20 bp, synthetic construct
  source 1..20: mol_type = other DNA
catcaaagaggccggggcag

SEQ ID NO: 135693 - DNA, 20 bp, synthetic construct
  source 1..20: mol_type = other DNA
acatcaaagaggccggggca

SEQ ID NO: 135694 - DNA, 20 bp, synthetic construct
  source 1..20: mol_type = other DNA
gacatcaaagaggccggggc

SEQ ID NO: 135695 - DNA, 20 bp, synthetic construct
  source 1..20: mol_type = other DNA
agacatcaaagaggccgggg

SEQ ID NO: 135696 - DNA, 20 bp, synthetic construct
  source 1..20: mol_type = other DNA
gagacatcaaagaggccggg

SEQ ID NO: 135697 - DNA, 20 bp, synthetic construct
  source 1..20: mol_type = other DNA
agagacatcaaagaggccgg

SEQ ID NO: 135698 - DNA, 20 bp, synthetic construct
  source 1..20: mol_type = other DNA
aagagacatcaaagaggccg

SEQ ID NO: 135699 - DNA, 20 bp, synthetic construct
  source 1..20: mol_type = other DNA
taagagacatcaaagaggcc

SEQ ID NO: 135700 - DNA, 20 bp, synthetic construct
  source 1..20: mol_type = other DNA
ttaagagacatcaaagaggc

SEQ ID NO: 135701 - DNA, 20 bp, synthetic construct
  source 1..20: mol_type = other DNA
attaagagacatcaaagagg

SEQ ID NO: 135702 - DNA, 20 bp, synthetic construct
  source 1..20: mol_type = other DNA
gattaagagacatcaaagag

SEQ ID NO: 135703 - DNA, 20 bp, synthetic construct
  source 1..20: mol_type = other DNA
agattaagagacatcaaaga

SEQ ID NO: 135704 - DNA, 20 bp, synthetic construct
  source 1..20: mol_type = other DNA
tagattaagagacatcaaag

SEQ ID NO: 135705 - DNA, 20 bp, synthetic construct
  source 1..20: mol_type = other DNA
ttagattaagagacatcaaa

SEQ ID NO: 135706 - DNA, 20 bp, synthetic construct
  source 1..20: mol_type = other DNA
gttagattaagagacatcaa

SEQ ID NO: 135707 - DNA, 20 bp, synthetic construct
  source 1..20: mol_type = other DNA
agttagattaagagacatca

SEQ ID NO: 135708 - DNA, 20 bp, synthetic construct
  source 1..20: mol_type = other DNA
aagttagattaagagacatc

SEQ ID NO: 135709 - DNA, 20 bp, synthetic construct
  source 1..20: mol_type = other DNA
gaagttagattaagagacat

SEQ ID NO: 135710 - DNA, 20 bp, synthetic construct
  source 1..20: mol_type = other DNA
ggaagttagattaagagaca

SEQ ID NO: 135711 - DNA, 20 bp, synthetic construct
  source 1..20: mol_type = other DNA
tggaagttagattaagagac

SEQ ID NO: 135712 - DNA, 20 bp, synthetic construct
  source 1..20: mol_type = other DNA
atggaagttagattaagaga

SEQ ID NO: 135713 - DNA, 20 bp, synthetic construct
  source 1..20: mol_type = other DNA
gatggaagttagattaagag

SEQ ID NO: 135714 - DNA, 20 bp, synthetic construct
  source 1..20: mol_type = other DNA
tgatggaagttagattaaga

SEQ ID NO: 135715 - DNA, 20 bp, synthetic construct
  source 1..20: mol_type = other DNA
atgatggaagttagattaag

SEQ ID NO: 135716 - DNA, 20 bp, synthetic construct
  source 1..20: mol_type = other DNA
aatgatggaagttagattaa

SEQ ID NO: 135717 - DNA, 20 bp, synthetic construct
  source 1..20: mol_type = other DNA
caatgatggaagttagatta

SEQ ID NO: 135718 - DNA, 20 bp, synthetic construct
  source 1..20: mol_type = other DNA
gcaatgatggaagttagatt

SEQ ID NO: 135719 - DNA, 20 bp, synthetic construct
  source 1..20: mol_type = other DNA
ggcaatgatggaagttagat

SEQ ID NO: 135720 - DNA, 20 bp, synthetic construct
  source 1..20: mol_type = other DNA
aggcaatgatggaagttaga

SEQ ID NO: 135721 - DNA, 20 bp, synthetic construct
  source 1..20: mol_type = other DNA
gaggcaatgatggaagttag

SEQ ID NO: 135722 - DNA, 20 bp, synthetic construct
  source 1..20: mol_type = other DNA
agaggcaatgatggaagtta

SEQ ID NO: 135723 - DNA, 20 bp, synthetic construct
  source 1..20: mol_type = other DNA
tagaggcaatgatggaagtt

SEQ ID NO: 135724 - DNA, 20 bp, synthetic construct
  source 1..20: mol_type = other DNA
gtagaggcaatgatggaagt

SEQ ID NO: 135725 - DNA, 20 bp, synthetic construct
  source 1..20: mol_type = other DNA
ggtagaggcaatgatggaag

SEQ ID NO: 135726 - DNA, 20 bp, synthetic construct
  source 1..20: mol_type = other DNA
gggtagaggcaatgatggaa

SEQ ID NO: 135727 - DNA, 20 bp, synthetic construct
  source 1..20: mol_type = other DNA
ggggtagaggcaatgatgga

SEQ ID NO: 135728 - DNA, 20 bp, synthetic construct
  source 1..20: mol_type = other DNA
tggggtagaggcaatgatgg

SEQ ID NO: 135729 - DNA, 20 bp, synthetic construct
  source 1..20: mol_type = other DNA
atggggtagaggcaatgatg

SEQ ID NO: 135730 - DNA, 20 bp, synthetic construct
  source 1..20: mol_type = other DNA
gatggggtagaggcaatgat

SEQ ID NO: 135731 - DNA, 20 bp, synthetic construct
  source 1..20: mol_type = other DNA
ggatggggtagaggcaatga

SEQ ID NO: 135732 - DNA, 20 bp, synthetic construct
  source 1..20: mol_type = other DNA
gggatggggtagaggcaatg

SEQ ID NO: 135733 - DNA, 20 bp, synthetic construct
  source 1..20: mol_type = other DNA
agggatggggtagaggcaat

SEQ ID NO: 135734 - DNA, 20 bp, synthetic construct
  source 1..20: mol_type = other DNA
aagggatggggtagaggcaa

SEQ ID NO: 135735 - DNA, 20 bp, synthetic construct
  source 1..20: mol_type = other DNA
gaagggatggggtagaggca

SEQ ID NO: 135736 - DNA, 20 bp, synthetic construct
  source 1..20: mol_type = other DNA
agaagggatggggtagaggc

SEQ ID NO: 135737 - DNA, 20 bp, synthetic construct
  source 1..20: mol_type = other DNA
tagaagggatggggtagagg

SEQ ID NO: 135738 - DNA, 20 bp, synthetic construct
  source 1..20: mol_type = other DNA
ttagaagggatggggtagag

SEQ ID NO: 135739 - DNA, 20 bp, synthetic construct
  source 1..20: mol_type = other DNA
cttagaagggatggggtaga

SEQ ID NO: 135740 - DNA, 20 bp, synthetic construct
  source 1..20: mol_type = other DNA
tcttagaagggatggggtag

SEQ ID NO: 135741 - DNA, 20 bp, synthetic construct
  source 1..20: mol_type = other DNA
ttcttagaagggatggggta

SEQ ID NO: 135742 - DNA, 20 bp, synthetic construct
  source 1..20: mol_type = other DNA
cttcttagaagggatggggt

SEQ ID NO: 135743 - DNA, 20 bp, synthetic construct
  source 1..20: mol_type = other DNA
acttcttagaagggatgggg

SEQ ID NO: 135744 - DNA, 20 bp, synthetic construct
  source 1..20: mol_type = other DNA
aacttcttagaagggatggg

SEQ ID NO: 135745 - DNA, 20 bp, synthetic construct
  source 1..20: mol_type = other DNA
taacttcttagaagggatgg

SEQ ID NO: 135746 - DNA, 20 bp, synthetic construct
  source 1..20: mol_type = other DNA
gtaacttcttagaagggatg

SEQ ID NO: 135747 - DNA, 20 bp, synthetic construct
  source 1..20: mol_type = other DNA
agtaacttcttagaagggat

SEQ ID NO: 135748 - DNA, 20 bp, synthetic construct
  source 1..20: mol_type = other DNA
aagtaacttcttagaaggga

SEQ ID NO: 135749 - DNA, 20 bp, synthetic construct
  source 1..20: mol_type = other DNA
aaagtaacttcttagaaggg

SEQ ID NO: 135750 - DNA, 20 bp, synthetic construct
  source 1..20: mol_type = other DNA
taaagtaacttcttagaagg

SEQ ID NO: 135751 - DNA, 20 bp, synthetic construct
  source 1..20: mol_type = other DNA
ttaaagtaacttcttagaag

SEQ ID NO: 135752 - DNA, 20 bp, synthetic construct
  source 1..20: mol_type = other DNA
attaaagtaacttcttagaa

SEQ ID NO: 135753 - DNA, 20 bp, synthetic construct
  source 1..20: mol_type = other DNA
aattaaagtaacttcttaga

SEQ ID NO: 135754 - DNA, 20 bp, synthetic construct
  source 1..20: mol_type = other DNA
aaattaaagtaacttcttag

SEQ ID NO: 135755 - DNA, 20 bp, synthetic construct
  source 1..20: mol_type = other DNA
aaaattaaagtaacttctta

SEQ ID NO: 135756 - DNA, 20 bp, synthetic construct
  source 1..20: mol_type = other DNA
aaaaattaaagtaacttctt

SEQ ID NO: 135757 - DNA, 20 bp, synthetic construct
  source 1..20: mol_type = other DNA
aaaaaattaaagtaacttct

SEQ ID NO: 135758 - DNA, 20 bp, synthetic construct
  source 1..20: mol_type = other DNA
aaaaaaattaaagtaacttc

SEQ ID NO: 135759 - DNA, 20 bp, synthetic construct
  source 1..20: mol_type = other DNA
aaaaaaaattaaagtaactt

SEQ ID NO: 135760 - DNA, 20 bp, synthetic construct
  source 1..20: mol_type = other DNA
gaaaaaaaattaaagtaact

SEQ ID NO: 135761 - DNA, 20 bp, synthetic construct
  source 1..20: mol_type = other DNA
ggaaaaaaaattaaagtaac

SEQ ID NO: 135762 - DNA, 20 bp, synthetic construct
  source 1..20: mol_type = other DNA
aggaaaaaaaattaaagtaa

SEQ ID NO: 135763 - DNA, 20 bp, synthetic construct
  source 1..20: mol_type = other DNA
gaggaaaaaaaattaaagta

SEQ ID NO: 135764 - DNA, 20 bp, synthetic construct
  source 1..20: mol_type = other DNA
agaggaaaaaaaattaaagt

SEQ ID NO: 135765 - DNA, 20 bp, synthetic construct
  source 1..20: mol_type = other DNA
gagaggaaaaaaaattaaag

SEQ ID NO: 135766 - DNA, 20 bp, synthetic construct
  source 1..20: mol_type = other DNA
tgagaggaaaaaaaattaaa

SEQ ID NO: 135767 - DNA, 20 bp, synthetic construct
  source 1..20: mol_type = other DNA
gtgagaggaaaaaaaattaa

SEQ ID NO: 135768 - DNA, 20 bp, synthetic construct
  source 1..20: mol_type = other DNA
tgtgagaggaaaaaaaatta

SEQ ID NO: 135769 - DNA, 20 bp, synthetic construct
  source 1..20: mol_type = other DNA
atgtgagaggaaaaaaaatt

SEQ ID NO: 135770 - DNA, 20 bp, synthetic construct
  source 1..20: mol_type = other DNA
gatgtgagaggaaaaaaaat

SEQ ID NO: 135771 - DNA, 20 bp, synthetic construct
  source 1..20: mol_type = other DNA
agatgtgagaggaaaaaaaa

SEQ ID NO: 135772 - DNA, 20 bp, synthetic construct
  source 1..20: mol_type = other DNA
tagatgtgagaggaaaaaaa

SEQ ID NO: 135773 - DNA, 20 bp, synthetic construct
  source 1..20: mol_type = other DNA
gtagatgtgagaggaaaaaa

SEQ ID NO: 135774 - DNA, 20 bp, synthetic construct
  source 1..20: mol_type = other DNA
agtagatgtgagaggaaaaa

SEQ ID NO: 135775 - DNA, 20 bp, synthetic construct
  source 1..20: mol_type = other DNA
gagtagatgtgagaggaaaa

SEQ ID NO: 135776 - DNA, 20 bp, synthetic construct
  source 1..20: mol_type = other DNA
agagtagatgtgagaggaaa

SEQ ID NO: 135777 - DNA, 20 bp, synthetic construct
  source 1..20: mol_type = other DNA
aagagtagatgtgagaggaa

SEQ ID NO: 135778 - DNA, 20 bp, synthetic construct
  source 1..20: mol_type = other DNA
aaagagtagatgtgagagga

SEQ ID NO: 135779 - DNA, 20 bp, synthetic construct
  source 1..20: mol_type = other DNA
aaaagagtagatgtgagagg

SEQ ID NO: 135780 - DNA, 20 bp, synthetic construct
  source 1..20: mol_type = other DNA
aaaaagagtagatgtgagag

SEQ ID NO: 135781 - DNA, 20 bp, synthetic construct
  source 1..20: mol_type = other DNA
aaaaaagagtagatgtgaga

SEQ ID NO: 135782 - DNA, 20 bp, synthetic construct
  source 1..20: mol_type = other DNA
aaaaaaagagtagatgtgag

SEQ ID NO: 135783 - DNA, 20 bp, synthetic construct
  source 1..20: mol_type = other DNA
aaaaaaaagagtagatgtga

SEQ ID NO: 135784 - DNA, 20 bp, synthetic construct
  source 1..20: mol_type = other DNA
aaaaaaaaagagtagatgtg

SEQ ID NO: 135785 - DNA, 20 bp, synthetic construct
  source 1..20: mol_type = other DNA
aaaaaaaaaagagtagatgt

SEQ ID NO: 135786 - DNA, 20 bp, synthetic construct
  source 1..20: mol_type = other DNA
aaaaaaaaaaagagtagatg

SEQ ID NO: 135787 - DNA, 20 bp, synthetic construct
  source 1..20: mol_type = other DNA
aaaaaaaaaaaagagtagat

SEQ ID NO: 135788 - DNA, 20 bp, synthetic construct
  source 1..20: mol_type = other DNA
aaaaaaaaaaaaagagtaga

SEQ ID NO: 135789 - DNA, 20 bp, synthetic construct
  source 1..20: mol_type = other DNA
aaaaaaaaaaaaaagagtag

SEQ ID NO: 135790 - DNA, 20 bp, synthetic construct
  source 1..20: mol_type = other DNA
aaaaaaaaaaaaaaagagta

SEQ ID NO: 135791 - DNA, 20 bp, synthetic construct
  source 1..20: mol_type = other DNA
aaaaaaaaaaaaaaaagagt

SEQ ID NO: 135792 - DNA, 20 bp, synthetic construct
  source 1..20: mol_type = other DNA
aaaaaaaaaaaaaaaaagag

SEQ ID NO: 135793 - DNA, 20 bp, synthetic construct
  source 1..20: mol_type = other DNA
aaaaaaaaaaaaaaaaaaga

SEQ ID NO: 135794 - DNA, 20 bp, synthetic construct
  source 1..20: mol_type = other DNA
aaaaaaaaaaaaaaaaaaag

SEQ ID NO: 135795 - DNA, 20 bp, synthetic construct
  source 1..20: mol_type = other DNA
aaaaaaaaaaaaaaaaaaaa

SEQ ID NO: 135796 - DNA, 20 bp, synthetic construct
  source 1..20: mol_type = other DNA
aaaaaaaaaaaaaaaaaaaa

SEQ ID NO: 135797 - DNA, 20 bp, synthetic construct
  source 1..20: mol_type = other DNA
aaaaaaaaaaaaaaaaaaaa

SEQ ID NO: 135798 - DNA, 20 bp, synthetic construct
  source 1..20: mol_type = other DNA
aaaaaaaaaaaaaaaaaaaa

SEQ ID NO: 135799 - DNA, 20 bp, synthetic construct
  source 1..20: mol_type = other DNA
aaaaaaaaaaaaaaaaaaaa

SEQ ID NO: 135800 - DNA, 20 bp, synthetic construct
  source 1..20: mol_type = other DNA
aaaaaaaaaaaaaaaaaaaa

SEQ ID NO: 135801 - DNA, 20 bp, synthetic construct
  source 1..20: mol_type = other DNA
caaaaaaaaaaaaaaaaaaa

SEQ ID NO: 135802 - DNA, 20 bp, synthetic construct
  source 1..20: mol_type = other DNA
tcaaaaaaaaaaaaaaaaaa

SEQ ID NO: 135803 - DNA, 20 bp, synthetic construct
  source 1..20: mol_type = other DNA
ctcaaaaaaaaaaaaaaaaa

SEQ ID NO: 135804 - DNA, 20 bp, synthetic construct
  source 1..20: mol_type = other DNA
cctcaaaaaaaaaaaaaaaa

SEQ ID NO: 135805 - DNA, 20 bp, synthetic construct
  source 1..20: mol_type = other DNA
acctcaaaaaaaaaaaaaaa

SEQ ID NO: 135806 - DNA, 20 bp, synthetic construct
  source 1..20: mol_type = other DNA
tacctcaaaaaaaaaaaaaa

SEQ ID NO: 135807 - DNA, 20 bp, synthetic construct
  source 1..20: mol_type = other DNA
ctacctcaaaaaaaaaaaaa

SEQ ID NO: 135808 - DNA, 20 bp, synthetic construct
  source 1..20: mol_type = other DNA
actacctcaaaaaaaaaaaa

SEQ ID NO: 135809 - DNA, 20 bp, synthetic construct
  source 1..20: mol_type = other DNA
gactacctcaaaaaaaaaaa

SEQ ID NO: 135810 - DNA, 20 bp, synthetic construct
  source 1..20: mol_type = other DNA
agactacctcaaaaaaaaaa

SEQ ID NO: 135811 - DNA, 20 bp, synthetic construct
  source 1..20: mol_type = other DNA
gagactacctcaaaaaaaaa

SEQ ID NO: 135812 - DNA, 20 bp, synthetic construct
  source 1..20: mol_type = other DNA
tgagactacctcaaaaaaaa

SEQ ID NO: 135813 - DNA, 20 bp, synthetic construct
  source 1..20: mol_type = other DNA
gtgagactacctcaaaaaaa

SEQ ID NO: 135814 - DNA, 20 bp, synthetic construct
  source 1..20: mol_type = other DNA
agtgagactacctcaaaaaa

SEQ ID NO: 135815 - DNA, 20 bp, synthetic construct
  source 1..20: mol_type = other DNA
gagtgagactacctcaaaaa

SEQ ID NO: 135816 - DNA, 20 bp, synthetic construct
  source 1..20: mol_type = other DNA
agagtgagactacctcaaaa

SEQ ID NO: 135817 - DNA, 20 bp, synthetic construct
  source 1..20: mol_type = other DNA
cagagtgagactacctcaaa

SEQ ID NO: 135818 - DNA, 20 bp, synthetic construct
  source 1..20: mol_type = other DNA
acagagtgagactacctcaa

SEQ ID NO: 135819 - DNA, 20 bp, synthetic construct
  source 1..20: mol_type = other DNA
gacagagtgagactacctca

SEQ ID NO: 135820 - DNA, 20 bp, synthetic construct
  source 1..20: mol_type = other DNA
tgacagagtgagactacctc

SEQ ID NO: 135821 - DNA, 20 bp, synthetic construct
  source 1..20: mol_type = other DNA
gtgacagagtgagactacct

SEQ ID NO: 135822 - DNA, 20 bp, synthetic construct
  source 1..20: mol_type = other DNA
ggtgacagagtgagactacc

SEQ ID NO: 135823 - DNA, 20 bp, synthetic construct
  source 1..20: mol_type = other DNA
gggtgacagagtgagactac

SEQ ID NO: 135824 - DNA, 20 bp, synthetic construct
  source 1..20: mol_type = other DNA
tgggtgacagagtgagacta

SEQ ID NO: 135825 - DNA, 20 bp, synthetic construct
  source 1..20: mol_type = other DNA
atgggtgacagagtgagact

SEQ ID NO: 135826 - DNA, 20 bp, synthetic construct
  source 1..20: mol_type = other DNA
aatgggtgacagagtgagac

SEQ ID NO: 135827 - DNA, 20 bp, synthetic construct
  source 1..20: mol_type = other DNA
gaatgggtgacagagtgaga

SEQ ID NO: 135828 - DNA, 20 bp, synthetic construct
  source 1..20: mol_type = other DNA
agaatgggtgacagagtgag

SEQ ID NO: 135829 - DNA, 20 bp, synthetic construct
  source 1..20: mol_type = other DNA
cagaatgggtgacagagtga

SEQ ID NO: 135830 - DNA, 20 bp, synthetic construct
  source 1..20: mol_type = other DNA
tcagaatgggtgacagagtg

SEQ ID NO: 135831 - DNA, 20 bp, synthetic construct
  source 1..20: mol_type = other DNA
ttcagaatgggtgacagagt

SEQ ID NO: 135832 - DNA, 20 bp, synthetic construct
  source 1..20: mol_type = other DNA
cttcagaatgggtgacagag

SEQ ID NO: 135833 - DNA, 20 bp, synthetic construct
  source 1..20: mol_type = other DNA
acttcagaatgggtgacaga

SEQ ID NO: 135834 - DNA, 20 bp, synthetic construct
  source 1..20: mol_type = other DNA
cacttcagaatgggtgacag

SEQ ID NO: 135835 - DNA, 20 bp, synthetic construct
  source 1..20: mol_type = other DNA
gcacttcagaatgggtgaca

SEQ ID NO: 135836 - DNA, 20 bp, synthetic construct
  source 1..20: mol_type = other DNA
tgcacttcagaatgggtgac

SEQ ID NO: 135837 - DNA, 20 bp, synthetic construct
  source 1..20: mol_type = other DNA
ctgcacttcagaatgggtga

SEQ ID NO: 135838 - DNA, 20 bp, synthetic construct
  source 1..20: mol_type = other DNA
gctgcacttcagaatgggtg

SEQ ID NO: 135839 - DNA, 20 bp, synthetic construct
  source 1..20: mol_type = other DNA
cgctgcacttcagaatgggt

SEQ ID NO: 135840 - DNA, 20 bp, synthetic construct
  source 1..20: mol_type = other DNA
ccgctgcacttcagaatggg

SEQ ID NO: 135841 - DNA, 20 bp, synthetic construct
  source 1..20: mol_type = other DNA
accgctgcacttcagaatgg

SEQ ID NO: 135842 - DNA, 20 bp, synthetic construct
  source 1..20: mol_type = other DNA
caccgctgcacttcagaatg

SEQ ID NO: 135843 - DNA, 20 bp, synthetic construct
  source 1..20: mol_type = other DNA
gcaccgctgcacttcagaat

SEQ ID NO: 135844 - DNA, 20 bp, synthetic construct
  source 1..20: mol_type = other DNA
cgcaccgctgcacttcagaa

SEQ ID NO: 135845 - DNA, 20 bp, synthetic construct
  source 1..20: mol_type = other DNA
tcgcaccgctgcacttcaga

SEQ ID NO: 135846 - DNA, 20 bp, synthetic construct
  source 1..20: mol_type = other DNA
atcgcaccgctgcacttcag

SEQ ID NO: 135847 - DNA, 20 bp, synthetic construct
  source 1..20: mol_type = other DNA
gatcgcaccgctgcacttca

SEQ ID NO: 135848 - DNA, 20 bp, synthetic construct
  source 1..20: mol_type = other DNA
agatcgcaccgctgcacttc

SEQ ID NO: 135849 - DNA, 20 bp, synthetic construct
  source 1..20: mol_type = other DNA
gagatcgcaccgctgcactt

SEQ ID NO: 135850 - DNA, 20 bp, synthetic construct
  source 1..20: mol_type = other DNA
tgagatcgcaccgctgcact

SEQ ID NO: 135851 - DNA, 20 bp, synthetic construct
  source 1..20: mol_type = other DNA
ctgagatcgcaccgctgcac

SEQ ID NO: 135852 - DNA, 20 bp, synthetic construct
  source 1..20: mol_type = other DNA
gctgagatcgcaccgctgca

SEQ ID NO: 135853 - DNA, 20 bp, synthetic construct
  source 1..20: mol_type = other DNA
agctgagatcgcaccgctgc

SEQ ID NO: 135854 - DNA, 20 bp, synthetic construct
  source 1..20: mol_type = other DNA
gagctgagatcgcaccgctg

SEQ ID NO: 135855 - DNA, 20 bp, synthetic construct
  source 1..20: mol_type = other DNA
tgagctgagatcgcaccgct

SEQ ID NO: 135856 - DNA, 20 bp, synthetic construct
  source 1..20: mol_type = other DNA
gtgagctgagatcgcaccgc

SEQ ID NO: 135857 - DNA, 20 bp, synthetic construct
  source 1..20: mol_type = other DNA
agtgagctgagatcgcaccg

SEQ ID NO: 135858 - DNA, 20 bp, synthetic construct
  source 1..20: mol_type = other DNA
cagtgagctgagatcgcacc

SEQ ID NO: 135859 - DNA, 20 bp, synthetic construct
  source 1..20: mol_type = other DNA
gcagtgagctgagatcgcac

SEQ ID NO: 135860 - DNA, 20 bp, synthetic construct
  source 1..20: mol_type = other DNA
tgcagtgagctgagatcgca

SEQ ID NO: 135861 - DNA, 20 bp, synthetic construct
  source 1..20: mol_type = other DNA
ttgcagtgagctgagatcgc

SEQ ID NO: 135862 - DNA, 20 bp, synthetic construct
  source 1..20: mol_type = other DNA
gttgcagtgagctgagatcg

SEQ ID NO: 135863 - DNA, 20 bp, synthetic construct
  source 1..20: mol_type = other DNA
tgttgcagtgagctgagatc

SEQ ID NO: 135864 - DNA, 20 bp, synthetic construct
  source 1..20: mol_type = other DNA
atgttgcagtgagctgagat

SEQ ID NO: 135865 - DNA, 20 bp, synthetic construct
  source 1..20: mol_type = other DNA
gatgttgcagtgagctgaga

SEQ ID NO: 135866 - DNA, 20 bp, synthetic construct
  source 1..20: mol_type = other DNA
agatgttgcagtgagctgag

SEQ ID NO: 135867 - DNA, 20 bp, synthetic construct
  source 1..20: mol_type = other DNA
cagatgttgcagtgagctga

SEQ ID NO: 135868 - DNA, 20 bp, synthetic construct
  source 1..20: mol_type = other DNA
gcagatgttgcagtgagctg

SEQ ID NO: 135869 - DNA, 20 bp, synthetic construct
  source 1..20: mol_type = other DNA
ggcagatgttgcagtgagct

SEQ ID NO: 135870 - DNA, 20 bp, synthetic construct
  source 1..20: mol_type = other DNA
aggcagatgttgcagtgagc

SEQ ID NO: 135871 - DNA, 20 bp, synthetic construct
  source 1..20: mol_type = other DNA
gaggcagatgttgcagtgag

SEQ ID NO: 135872 - DNA, 20 bp, synthetic construct
  source 1..20: mol_type = other DNA
ggaggcagatgttgcagtga

SEQ ID NO: 135873 - DNA, 20 bp, synthetic construct
  source 1..20: mol_type = other DNA
gggaggcagatgttgcagtg

SEQ ID NO: 135874 - DNA, 20 bp, synthetic construct
  source 1..20: mol_type = other DNA
tgggaggcagatgttgcagt

SEQ ID NO: 135875 - DNA, 20 bp, synthetic construct
  source 1..20: mol_type = other DNA
ctgggaggcagatgttgcag

SEQ ID NO: 135876 - DNA, 20 bp, synthetic construct
  source 1..20: mol_type = other DNA
cctgggaggcagatgttgca

SEQ ID NO: 135877 - DNA, 20 bp, synthetic construct
  source 1..20: mol_type = other DNA
acctgggaggcagatgttgc

SEQ ID NO: 135878 - DNA, 20 bp, synthetic construct
  source 1..20: mol_type = other DNA
aacctgggaggcagatgttg

SEQ ID NO: 135879 - DNA, 20 bp, synthetic construct
  source 1..20: mol_type = other DNA
gaacctgggaggcagatgtt

SEQ ID NO: 135880 - DNA, 20 bp, synthetic construct
  source 1..20: mol_type = other DNA
tgaacctgggaggcagatgt

SEQ ID NO: 135881 - DNA, 20 bp, synthetic construct
  source 1..20: mol_type = other DNA
ttgaacctgggaggcagatg

SEQ ID NO: 135882 - DNA, 20 bp, synthetic construct
  source 1..20: mol_type = other DNA
cttgaacctgggaggcagat

SEQ ID NO: 135883 - DNA, 20 bp, synthetic construct
  source 1..20: mol_type = other DNA
gcttgaacctgggaggcaga

SEQ ID NO: 135884 - DNA, 20 bp, synthetic construct
  source 1..20: mol_type = other DNA
cgcttgaacctgggaggcag

SEQ ID NO: 135885 - DNA, 20 bp, synthetic construct
  source 1..20: mol_type = other DNA
ccgcttgaacctgggaggca

SEQ ID NO: 135886 - DNA, 20 bp, synthetic construct
  source 1..20: mol_type = other DNA
accgcttgaacctgggaggc

SEQ ID NO: 135887 - DNA, 20 bp, synthetic construct
  source 1..20: mol_type = other DNA
aaccgcttgaacctgggagg

SEQ ID NO: 135888 - DNA, 20 bp, synthetic construct
  source 1..20: mol_type = other DNA
aaaccgcttgaacctgggag

SEQ ID NO: 135889 - DNA, 20 bp, synthetic construct
  source 1..20: mol_type = other DNA
aaaaccgcttgaacctggga

SEQ ID NO: 135890 - DNA, 20 bp, synthetic construct
  source 1..20: mol_type = other DNA
aaaaaccgcttgaacctggg

SEQ ID NO: 135891 - DNA, 20 bp, synthetic construct
  source 1..20: mol_type = other DNA
gaaaaaccgcttgaacctgg

SEQ ID NO: 135892 - DNA, 20 bp, synthetic construct
  source 1..20: mol_type = other DNA
agaaaaaccgcttgaacctg

SEQ ID NO: 135893 - DNA, 20 bp, synthetic construct
  source 1..20: mol_type = other DNA
cagaaaaaccgcttgaacct

SEQ ID NO: 135894 - DNA, 20 bp, synthetic construct
  source 1..20: mol_type = other DNA
gcagaaaaaccgcttgaacc

SEQ ID NO: 135895 - DNA, 20 bp, synthetic construct
  source 1..20: mol_type = other DNA
ggcagaaaaaccgcttgaac

SEQ ID NO: 135896 - DNA, 20 bp, synthetic construct
  source 1..20: mol_type = other DNA
aggcagaaaaaccgcttgaa

SEQ ID NO: 135897 - DNA, 20 bp, synthetic construct
  source 1..20: mol_type = other DNA
gaggcagaaaaaccgcttga

SEQ ID NO: 135898 - DNA, 20 bp, synthetic construct
  source 1..20: mol_type = other DNA
tgaggcagaaaaaccgcttg

SEQ ID NO: 135899 - DNA, 20 bp, synthetic construct
  source 1..20: mol_type = other DNA
ctgaggcagaaaaaccgctt

SEQ ID NO: 135900 - DNA, 20 bp, synthetic construct
  source 1..20: mol_type = other DNA
gctgaggcagaaaaaccgct

SEQ ID NO: 135901 - DNA, 20 bp, synthetic construct
  source 1..20: mol_type = other DNA
ggctgaggcagaaaaaccgc

SEQ ID NO: 135902 - DNA, 20 bp, synthetic construct
  source 1..20: mol_type = other DNA
aggctgaggcagaaaaaccg

SEQ ID NO: 135903 - DNA, 20 bp, synthetic construct
  source 1..20: mol_type = other DNA
gaggctgaggcagaaaaacc

SEQ ID NO: 135904 - DNA, 20 bp, synthetic construct
  source 1..20: mol_type = other DNA
ggaggctgaggcagaaaaac

SEQ ID NO: 135905 - DNA, 20 bp, synthetic construct
  source 1..20: mol_type = other DNA
gggaggctgaggcagaaaaa

SEQ ID NO: 135906 - DNA, 20 bp, synthetic construct
  source 1..20: mol_type = other DNA
cgggaggctgaggcagaaaa

SEQ ID NO: 135907 - DNA, 20 bp, synthetic construct
  source 1..20: mol_type = other DNA
tcgggaggctgaggcagaaa

SEQ ID NO: 135908 - DNA, 20 bp, synthetic construct
  source 1..20: mol_type = other DNA
ctcgggaggctgaggcagaa

SEQ ID NO: 135909 - DNA, 20 bp, synthetic construct
  source 1..20: mol_type = other DNA
actcgggaggctgaggcaga

SEQ ID NO: 135910 - DNA, 20 bp, synthetic construct
  source 1..20: mol_type = other DNA
tactcgggaggctgaggcag

SEQ ID NO: 135911 - DNA, 20 bp, synthetic construct
  source 1..20: mol_type = other DNA
ctactcgggaggctgaggca

SEQ ID NO: 135912 - DNA, 20 bp, synthetic construct
  source 1..20: mol_type = other DNA
cctactcgggaggctgaggc

SEQ ID NO: 135913 - DNA, 20 bp, synthetic construct
  source 1..20: mol_type = other DNA
acctactcgggaggctgagg

SEQ ID NO: 135914 - DNA, 20 bp, synthetic construct
  source 1..20: mol_type = other DNA
cacctactcgggaggctgag

SEQ ID NO: 135915 - DNA, 20 bp, synthetic construct
  source 1..20: mol_type = other DNA
ccacctactcgggaggctga

SEQ ID NO: 135916 - DNA, 20 bp, synthetic construct
  source 1..20: mol_type = other DNA
cccacctactcgggaggctg

SEQ ID NO: 135917 - DNA, 20 bp, synthetic construct
  source 1..20: mol_type = other DNA
tcccacctactcgggaggct

SEQ ID NO: 135918 - DNA, 20 bp, synthetic construct
  source 1..20: mol_type = other DNA
gtcccacctactcgggaggc

SEQ ID NO: 135919 - DNA, 20 bp, synthetic construct
  source 1..20: mol_type = other DNA
agtcccacctactcgggagg

SEQ ID NO: 135920 - DNA, 20 bp, synthetic construct
  source 1..20: mol_type = other DNA
tagtcccacctactcgggag

SEQ ID NO: 135921 - DNA, 20 bp, synthetic construct
  source 1..20: mol_type = other DNA
gtagtcccacctactcggga

SEQ ID NO: 135922 - DNA, 20 bp, synthetic construct
  source 1..20: mol_type = other DNA
tgtagtcccacctactcggg

SEQ ID NO: 135923 - DNA, 20 bp, synthetic construct
  source 1..20: mol_type = other DNA
ctgtagtcccacctactcgg

SEQ ID NO: 135924 - DNA, 20 bp, synthetic construct
  source 1..20: mol_type = other DNA
cctgtagtcccacctactcg

SEQ ID NO: 135925 - DNA, 20 bp, synthetic construct
  source 1..20: mol_type = other DNA
acctgtagtcccacctactc

SEQ ID NO: 135926 - DNA, 20 bp, synthetic construct
  source 1..20: mol_type = other DNA
cacctgtagtcccacctact

SEQ ID NO: 135927 - DNA, 20 bp, synthetic construct
  source 1..20: mol_type = other DNA
acacctgtagtcccacctac

SEQ ID NO: 135928 - DNA, 20 bp, synthetic construct
  source 1..20: mol_type = other DNA
cacacctgtagtcccaccta

SEQ ID NO: 135929 - DNA, 20 bp, synthetic construct
  source 1..20: mol_type = other DNA
gcacacctgtagtcccacct

SEQ ID NO: 135930 - DNA, 20 bp, synthetic construct
  source 1..20: mol_type = other DNA
cgcacacctgtagtcccacc

SEQ ID NO: 135931 - DNA, 20 bp, synthetic construct
  source 1..20: mol_type = other DNA
gcgcacacctgtagtcccac

SEQ ID NO: 135932 - DNA, 20 bp, synthetic construct
  source 1..20: mol_type = other DNA
ggcgcacacctgtagtccca

SEQ ID NO: 135933 - DNA, 20 bp, synthetic construct
  source 1..20: mol_type = other DNA
tggcgcacacctgtagtccc

SEQ ID NO: 135934 - DNA, 20 bp, synthetic construct
  source 1..20: mol_type = other DNA
gtggcgcacacctgtagtcc

SEQ ID NO: 135935 - DNA, 20 bp, synthetic construct
  source 1..20: mol_type = other DNA
ggtggcgcacacctgtagtc

SEQ ID NO: 135936 - DNA, 20 bp, synthetic construct
  source 1..20: mol_type = other DNA
tggtggcgcacacctgtagt

SEQ ID NO: 135937 - DNA, 20 bp, synthetic construct
  source 1..20: mol_type = other DNA
gtggtggcgcacacctgtag

SEQ ID NO: 135938 - DNA, 20 bp, synthetic construct
  source 1..20: mol_type = other DNA
cgtggtggcgcacacctgta

SEQ ID NO: 135939 - DNA, 20 bp, synthetic construct
  source 1..20: mol_type = other DNA
tcgtggtggcgcacacctgt

SEQ ID NO: 135940 - DNA, 20 bp, synthetic construct
  source 1..20: mol_type = other DNA
gtcgtggtggcgcacacctg

SEQ ID NO: 135941 - DNA, 20 bp, synthetic construct
  source 1..20: mol_type = other DNA
ggtcgtggtggcgcacacct

SEQ ID NO: 135942 - DNA, 20 bp, synthetic construct
  source 1..20: mol_type = other DNA
cggtcgtggtggcgcacacc

SEQ ID NO: 135943 - DNA, 20 bp, synthetic construct
  source 1..20: mol_type = other DNA
ccggtcgtggtggcgcacac

SEQ ID NO: 135944 - DNA, 20 bp, synthetic construct
  source 1..20: mol_type = other DNA
gccggtcgtggtggcgcaca

SEQ ID NO: 135945 - DNA, 20 bp, synthetic construct
  source 1..20: mol_type = other DNA
ggccggtcgtggtggcgcac

SEQ ID NO: 135946 - DNA, 20 bp, synthetic construct
  source 1..20: mol_type = other DNA
tggccggtcgtggtggcgca

SEQ ID NO: 135947 - DNA, 20 bp, synthetic construct
  source 1..20: mol_type = other DNA
ttggccggtcgtggtggcgc

SEQ ID NO: 135948 - DNA, 20 bp, synthetic construct
  source 1..20: mol_type = other DNA
attggccggtcgtggtggcg

SEQ ID NO: 135949 - DNA, 20 bp, synthetic construct
  source 1..20: mol_type = other DNA
aattggccggtcgtggtggc

SEQ ID NO: 135950 - DNA, 20 bp, synthetic construct
  source 1..20: mol_type = other DNA
aaattggccggtcgtggtgg

SEQ ID NO: 135951 - DNA, 20 bp, synthetic construct
  source 1..20: mol_type = other DNA
aaaattggccggtcgtggtg

SEQ ID NO: 135952 - DNA, 20 bp, synthetic construct
  source 1..20: mol_type = other DNA
aaaaattggccggtcgtggt

SEQ ID NO: 135953 - DNA, 20 bp, synthetic construct
  source 1..20: mol_type = other DNA
caaaaattggccggtcgtgg

SEQ ID NO: 135954 - DNA, 20 bp, synthetic construct
  source 1..20: mol_type = other DNA
acaaaaattggccggtcgtg

SEQ ID NO: 135955 - DNA, 20 bp, synthetic construct
  source 1..20: mol_type = other DNA
tacaaaaattggccggtcgt

SEQ ID NO: 135956 - DNA, 20 bp, synthetic construct
  source 1..20: mol_type = other DNA
atacaaaaattggccggtcg

SEQ ID NO: 135957 - DNA, 20 bp, synthetic construct
  source 1..20: mol_type = other DNA
aatacaaaaattggccggtc

SEQ ID NO: 135958 - DNA, 20 bp, synthetic construct
  source 1..20: mol_type = other DNA
aaatacaaaaattggccggt

SEQ ID NO: 135959 - DNA, 20 bp, synthetic construct
  source 1..20: mol_type = other DNA
aaaatacaaaaattggccgg

SEQ ID NO: 135960 - DNA, 20 bp, synthetic construct
  source 1..20: mol_type = other DNA
aaaaatacaaaaattggccg

SEQ ID NO: 135961 - DNA, 20 bp, synthetic construct
  source 1..20: mol_type = other DNA
taaaaatacaaaaattggcc

SEQ ID NO: 135962 - DNA, 20 bp, synthetic construct
  source 1..20: mol_type = other DNA
ctaaaaatacaaaaattggc

SEQ ID NO: 135963 - DNA, 20 bp, synthetic construct
  source 1..20: mol_type = other DNA
actaaaaatacaaaaattgg

SEQ ID NO: 135964 - DNA, 20 bp, synthetic construct
  source 1..20: mol_type = other DNA
tactaaaaatacaaaaattg

SEQ ID NO: 135965 - DNA, 20 bp, synthetic construct
  source 1..20: mol_type = other DNA
ctactaaaaatacaaaaatt

SEQ ID NO: 135966 - DNA, 20 bp, synthetic construct
  source 1..20: mol_type = other DNA
tctactaaaaatacaaaaat

SEQ ID NO: 135967 - DNA, 20 bp, synthetic construct
  source 1..20: mol_type = other DNA
ctctactaaaaatacaaaaa

SEQ ID NO: 135968 - DNA, 20 bp, synthetic construct
  source 1..20: mol_type = other DNA
tctctactaaaaatacaaaa

SEQ ID NO: 135969 - DNA, 20 bp, synthetic construct
  source 1..20: mol_type = other DNA
gtctctactaaaaatacaaa

SEQ ID NO: 135970 - DNA, 20 bp, synthetic construct
  source 1..20: mol_type = other DNA
cgtctctactaaaaatacaa

SEQ ID NO: 135971 - DNA, 20 bp, synthetic construct
  source 1..20: mol_type = other DNA
ccgtctctactaaaaataca

SEQ ID NO: 135972 - DNA, 20 bp, synthetic construct
  source 1..20: mol_type = other DNA
cccgtctctactaaaaatac

SEQ ID NO: 135973 - DNA, 20 bp, synthetic construct
  source 1..20: mol_type = other DNA
ccccgtctctactaaaaata

SEQ ID NO: 135974 - DNA, 20 bp, synthetic construct
  source 1..20: mol_type = other DNA
accccgtctctactaaaaat

SEQ ID NO: 135975 - DNA, 20 bp, synthetic construct
  source 1..20: mol_type = other DNA
aaccccgtctctactaaaaa

SEQ ID NO: 135976 - DNA, 20 bp, synthetic construct
  source 1..20: mol_type = other DNA
aaaccccgtctctactaaaa

SEQ ID NO: 135977 - DNA, 20 bp, synthetic construct
  source 1..20: mol_type = other DNA
gaaaccccgtctctactaaa

SEQ ID NO: 135978 - DNA, 20 bp, synthetic construct
  source 1..20: mol_type = other DNA
tgaaaccccgtctctactaa

SEQ ID NO: 135979 - DNA, 20 bp, synthetic construct
  source 1..20: mol_type = other DNA
gtgaaaccccgtctctacta

SEQ ID NO: 135980 - DNA, 20 bp, synthetic construct
  source 1..20: mol_type = other DNA
ggtgaaaccccgtctctact

SEQ ID NO: 135981 - DNA, 20 bp, synthetic construct
  source 1..20: mol_type = other DNA
cggtgaaaccccgtctctac

SEQ ID NO: 135982 - DNA, 20 bp, synthetic construct
  source 1..20: mol_type = other DNA
acggtgaaaccccgtctcta

SEQ ID NO: 135983 - DNA, 20 bp, synthetic construct
  source 1..20: mol_type = other DNA
gacggtgaaaccccgtctct

SEQ ID NO: 135984 - DNA, 20 bp, synthetic construct
  source 1..20: mol_type = other DNA
agacggtgaaaccccgtctc

SEQ ID NO: 135985 - DNA, 20 bp, synthetic construct
  source 1..20: mol_type = other DNA
aagacggtgaaaccccgtct

SEQ ID NO: 135986 - DNA, 20 bp, synthetic construct
  source 1..20: mol_type = other DNA
caagacggtgaaaccccgtc

SEQ ID NO: 135987 - DNA, 20 bp, synthetic construct
  source 1..20: mol_type = other DNA
ccaagacggtgaaaccccgt

SEQ ID NO: 135988 - DNA, 20 bp, synthetic construct
  source 1..20: mol_type = other DNA
gccaagacggtgaaaccccg

SEQ ID NO: 135989 - DNA, 20 bp, synthetic construct
  source 1..20: mol_type = other DNA
ggccaagacggtgaaacccc

SEQ ID NO: 135990 - DNA, 20 bp, synthetic construct
  source 1..20: mol_type = other DNA
tggccaagacggtgaaaccc

SEQ ID NO: 135991 - DNA, 20 bp, synthetic construct
  source 1..20: mol_type = other DNA
ctggccaagacggtgaaacc

SEQ ID NO: 135992 - DNA, 20 bp, synthetic construct
  source 1..20: mol_type = other DNA
cctggccaagacggtgaaac

SEQ ID NO: 135993 - DNA, 20 bp, synthetic construct
  source 1..20: mol_type = other DNA
gcctggccaagacggtgaaa

SEQ ID NO: 135994 - DNA, 20 bp, synthetic construct
  source 1..20: mol_type = other DNA
agcctggccaagacggtgaa

SEQ ID NO: 135995 - DNA, 20 bp, synthetic construct
  source 1..20: mol_type = other DNA
cagcctggccaagacggtga

SEQ ID NO: 135996 - DNA, 20 bp, synthetic construct
  source 1..20: mol_type = other DNA
tcagcctggccaagacggtg

SEQ ID NO: 135997 - DNA, 20 bp, synthetic construct
  source 1..20: mol_type = other DNA
atcagcctggccaagacggt

SEQ ID NO: 135998 - DNA, 20 bp, synthetic construct
  source 1..20: mol_type = other DNA
gatcagcctggccaagacgg

SEQ ID NO: 135999 - DNA, 20 bp, synthetic construct
  source 1..20: mol_type = other DNA
agatcagcctggccaagacg

SEQ ID NO: 136000 - DNA, 20 bp, synthetic construct
  source 1..20: mol_type = other DNA
gagatcagcctggccaagac

SEQ ID NO: 136001 - DNA, 20 bp, synthetic construct
  source 1..20: mol_type = other DNA
cgagatcagcctggccaaga

SEQ ID NO: 136002 - DNA, 20 bp, synthetic construct
  source 1..20: mol_type = other DNA
tcgagatcagcctggccaag

SEQ ID NO: 136003 - DNA, 20 bp, synthetic construct
  source 1..20: mol_type = other DNA
ttcgagatcagcctggccaa

SEQ ID NO: 136004 - DNA, 20 bp, synthetic construct
  source 1..20: mol_type = other DNA
gttcgagatcagcctggcca

SEQ ID NO: 136005 - DNA, 20 bp, synthetic construct
  source 1..20: mol_type = other DNA
agttcgagatcagcctggcc

SEQ ID NO: 136006 - DNA, 20 bp, synthetic construct
  source 1..20: mol_type = other DNA
aagttcgagatcagcctggc

SEQ ID NO: 136007 - DNA, 20 bp, synthetic construct
  source 1..20: mol_type = other DNA
gaagttcgagatcagcctgg

SEQ ID NO: 136008 - DNA, 20 bp, synthetic construct
  source 1..20: mol_type = other DNA
agaagttcgagatcagcctg

SEQ ID NO: 136009 - DNA, 20 bp, synthetic construct
  source 1..20: mol_type = other DNA
cagaagttcgagatcagcct

SEQ ID NO: 136010 - DNA, 20 bp, synthetic construct
  source 1..20: mol_type = other DNA
tcagaagttcgagatcagcc

SEQ ID NO: 136011 - DNA, 20 bp, synthetic construct
  source 1..20: mol_type = other DNA
gtcagaagttcgagatcagc

SEQ ID NO: 136012 - DNA, 20 bp, synthetic construct
  source 1..20: mol_type = other DNA
ggtcagaagttcgagatcag

SEQ ID NO: 136013 - DNA, 20 bp, synthetic construct
  source 1..20: mol_type = other DNA
aggtcagaagttcgagatca

SEQ ID NO: 136014 - DNA, 20 bp, synthetic construct
  source 1..20: mol_type = other DNA
aaggtcagaagttcgagatc

SEQ ID NO: 136015 - DNA, 20 bp, synthetic construct
  source 1..20: mol_type = other DNA
caaggtcagaagttcgagat

SEQ ID NO: 136016 - DNA, 20 bp, synthetic construct
  source 1..20: mol_type = other DNA
acaaggtcagaagttcgaga

SEQ ID NO: 136017 - DNA, 20 bp, synthetic construct
  source 1..20: mol_type = other DNA
cacaaggtcagaagttcgag

SEQ ID NO: 136018 - DNA, 20 bp, synthetic construct
  source 1..20: mol_type = other DNA
tcacaaggtcagaagttcga

SEQ ID NO: 136019 - DNA, 20 bp, synthetic construct
  source 1..20: mol_type = other DNA
atcacaaggtcagaagttcg

SEQ ID NO: 136020 - DNA, 20 bp, synthetic construct
  source 1..20: mol_type = other DNA
aatcacaaggtcagaagttc

SEQ ID NO: 136021 - DNA, 20 bp, synthetic construct
  source 1..20: mol_type = other DNA
aaatcacaaggtcagaagtt

SEQ ID NO: 136022 - DNA, 20 bp, synthetic construct
  source 1..20: mol_type = other DNA
caaatcacaaggtcagaagt

SEQ ID NO: 136023 - DNA, 20 bp, synthetic construct
  source 1..20: mol_type = other DNA
acaaatcacaaggtcagaag

SEQ ID NO: 136024 - DNA, 20 bp, synthetic construct
  source 1..20: mol_type = other DNA
gacaaatcacaaggtcagaa

SEQ ID NO: 136025 - DNA, 20 bp, synthetic construct
  source 1..20: mol_type = other DNA
agacaaatcacaaggtcaga

SEQ ID NO: 136026 - DNA, 20 bp, synthetic construct
  source 1..20: mol_type = other DNA
cagacaaatcacaaggtcag

SEQ ID NO: 136027 - DNA, 20 bp, synthetic construct
  source 1..20: mol_type = other DNA
gcagacaaatcacaaggtca

SEQ ID NO: 136028 - DNA, 20 bp, synthetic construct
  source 1..20: mol_type = other DNA
ggcagacaaatcacaaggtc

SEQ ID NO: 136029 - DNA, 20 bp, synthetic construct
  source 1..20: mol_type = other DNA
aggcagacaaatcacaaggt

SEQ ID NO: 136030 - DNA, 20 bp, synthetic construct
  source 1..20: mol_type = other DNA
taggcagacaaatcacaagg

SEQ ID NO: 136031 - DNA, 20 bp, synthetic construct
  source 1..20: mol_type = other DNA
ctaggcagacaaatcacaag

SEQ ID NO: 136032 - DNA, 20 bp, synthetic construct
  source 1..20: mol_type = other DNA
cctaggcagacaaatcacaa

SEQ ID NO: 136033 - DNA, 20 bp, synthetic construct
  source 1..20: mol_type = other DNA
gcctaggcagacaaatcaca

SEQ ID NO: 136034 - DNA, 20 bp, synthetic construct
  source 1..20: mol_type = other DNA
ggcctaggcagacaaatcac

SEQ ID NO: 136035 - DNA, 20 bp, synthetic construct
  source 1..20: mol_type = other DNA
aggcctaggcagacaaatca

SEQ ID NO: 136036 - DNA, 20 bp, synthetic construct
  source 1..20: mol_type = other DNA
gaggcctaggcagacaaatc

SEQ ID NO: 136037 - DNA, 20 bp, synthetic construct
  source 1..20: mol_type = other DNA
ggaggcctaggcagacaaat

SEQ ID NO: 136038 - DNA, 20 bp, synthetic construct
  source 1..20: mol_type = other DNA
gggaggcctaggcagacaaa

SEQ ID NO: 136039 - DNA, 20 bp, synthetic construct
  source 1..20: mol_type = other DNA
tgggaggcctaggcagacaa

SEQ ID NO: 136040 - DNA, 20 bp, synthetic construct
  source 1..20: mol_type = other DNA
ttgggaggcctaggcagaca

SEQ ID NO: 136041 - DNA, 20 bp, synthetic construct
  source 1..20: mol_type = other DNA
tttgggaggcctaggcagac

SEQ ID NO: 136042 - DNA, 20 bp, synthetic construct
  source 1..20: mol_type = other DNA
ctttgggaggcctaggcaga

SEQ ID NO: 136043 - DNA, 20 bp, synthetic construct
  source 1..20: mol_type = other DNA
actttgggaggcctaggcag

SEQ ID NO: 136044 - DNA, 20 bp, synthetic construct
  source 1..20: mol_type = other DNA
cactttgggaggcctaggca

SEQ ID NO: 136045 - DNA, 20 bp, synthetic construct
  source 1..20: mol_type = other DNA
gcactttgggaggcctaggc

SEQ ID NO: 136046 - DNA, 20 bp, synthetic construct
  source 1..20: mol_type = other DNA
agcactttgggaggcctagg

SEQ ID NO: 136047 - DNA, 20 bp, synthetic construct
  source 1..20: mol_type = other DNA
cagcactttgggaggcctag

SEQ ID NO: 136048 - DNA, 20 bp, synthetic construct
  source 1..20: mol_type = other DNA
ccagcactttgggaggccta

SEQ ID NO: 136049 - DNA, 20 bp, synthetic construct
  source 1..20: mol_type = other DNA
cccagcactttgggaggcct

SEQ ID NO: 136050 - DNA, 20 bp, synthetic construct
  source 1..20: mol_type = other DNA
tcccagcactttgggaggcc

SEQ ID NO: 136051 - DNA, 20 bp, synthetic construct
  source 1..20: mol_type = other DNA
atcccagcactttgggaggc

SEQ ID NO: 136052 - DNA, 20 bp, synthetic construct
  source 1..20: mol_type = other DNA
aatcccagcactttgggagg

SEQ ID NO: 136053 - DNA, 20 bp, synthetic construct
  source 1..20: mol_type = other DNA
taatcccagcactttgggag

SEQ ID NO: 136054 - DNA, 20 bp, synthetic construct
  source 1..20: mol_type = other DNA
gtaatcccagcactttggga

SEQ ID NO: 136055 - DNA, 20 bp, synthetic construct
  source 1..20: mol_type = other DNA
tgtaatcccagcactttggg

SEQ ID NO: 136056 - DNA, 20 bp, synthetic construct
  source 1..20: mol_type = other DNA
ctgtaatcccagcactttgg

SEQ ID NO: 136057 - DNA, 20 bp, synthetic construct
  source 1..20: mol_type = other DNA
tctgtaatcccagcactttg

SEQ ID NO: 136058 - DNA, 20 bp, synthetic construct
  source 1..20: mol_type = other DNA
atctgtaatcccagcacttt

SEQ ID NO: 136059 - DNA, 20 bp, synthetic construct
  source 1..20: mol_type = other DNA
catctgtaatcccagcactt

SEQ ID NO: 136060 - DNA, 20 bp, synthetic construct
  source 1..20: mol_type = other DNA
acatctgtaatcccagcact

SEQ ID NO: 136061 - DNA, 20 bp, synthetic construct
  source 1..20: mol_type = other DNA
cacatctgtaatcccagcac

SEQ ID NO: 136062 - DNA, 20 bp, synthetic construct
  source 1..20: mol_type = other DNA
tcacatctgtaatcccagca

SEQ ID NO: 136063 - DNA, 20 bp, synthetic construct
  source 1..20: mol_type = other DNA
ctcacatctgtaatcccagc

SEQ ID NO: 136064 - DNA, 20 bp, synthetic construct
  source 1..20: mol_type = other DNA
gctcacatctgtaatcccag

SEQ ID NO: 136065 - DNA, 20 bp, synthetic construct
  source 1..20: mol_type = other DNA
ggctcacatctgtaatccca

SEQ ID NO: 136066 - DNA, 20 bp, synthetic construct
  source 1..20: mol_type = other DNA
tggctcacatctgtaatccc

SEQ ID NO: 136067 - DNA, 20 bp, synthetic construct
  source 1..20: mol_type = other DNA
gtggctcacatctgtaatcc

SEQ ID NO: 136068 - DNA, 20 bp, synthetic construct
  source 1..20: mol_type = other DNA
ggtggctcacatctgtaatc

SEQ ID NO: 136069 - DNA, 20 bp, synthetic construct
  source 1..20: mol_type = other DNA
tggtggctcacatctgtaat

SEQ ID NO: 136070 - DNA, 20 bp, synthetic construct
  source 1..20: mol_type = other DNA
gtggtggctcacatctgtaa

SEQ ID NO: 136071 - DNA, 20 bp, synthetic construct
  source 1..20: mol_type = other DNA
cgtggtggctcacatctgta

SEQ ID NO: 136072 - DNA, 20 bp, synthetic construct
  source 1..20: mol_type = other DNA
gcgtggtggctcacatctgt

SEQ ID NO: 136073 - DNA, 20 bp, synthetic construct
  source 1..20: mol_type = other DNA
ggcgtggtggctcacatctg

SEQ ID NO: 136074 - DNA, 20 bp, synthetic construct
  source 1..20: mol_type = other DNA
gggcgtggtggctcacatct

SEQ ID NO: 136075 - DNA, 20 bp, synthetic construct
  source 1..20: mol_type = other DNA
tgggcgtggtggctcacatc

SEQ ID NO: 136076 - DNA, 20 bp, synthetic construct
  source 1..20: mol_type = other DNA
ctgggcgtggtggctcacat

SEQ ID NO: 136077 - DNA, 20 bp, synthetic construct
  source 1..20: mol_type = other DNA
gctgggcgtggtggctcaca

SEQ ID NO: 136078 - DNA, 20 bp, synthetic construct
  source 1..20: mol_type = other DNA
ggctgggcgtggtggctcac

SEQ ID NO: 136079 - DNA, 20 bp, synthetic construct
  source 1..20: mol_type = other DNA
aggctgggcgtggtggctca

SEQ ID NO: 136080 - DNA, 20 bp, synthetic construct
  source 1..20: mol_type = other DNA
gaggctgggcgtggtggctc

SEQ ID NO: 136081 - DNA, 20 bp, synthetic construct
  source 1..20: mol_type = other DNA
tgaggctgggcgtggtggct

SEQ ID NO: 136082 - DNA, 20 bp, synthetic construct
  source 1..20: mol_type = other DNA
gtgaggctgggcgtggtggc

SEQ ID NO: 136083 - DNA, 20 bp, synthetic construct
  source 1..20: mol_type = other DNA
tgtgaggctgggcgtggtgg

SEQ ID NO: 136084 - DNA, 20 bp, synthetic construct
  source 1..20: mol_type = other DNA
atgtgaggctgggcgtggtg

SEQ ID NO: 136085 - DNA, 20 bp, synthetic construct
  source 1..20: mol_type = other DNA
gatgtgaggctgggcgtggt

SEQ ID NO: 136086 - DNA, 20 bp, synthetic construct
  source 1..20: mol_type = other DNA
agatgtgaggctgggcgtgg

SEQ ID NO: 136087 - DNA, 20 bp, synthetic construct
  source 1..20: mol_type = other DNA
tagatgtgaggctgggcgtg

SEQ ID NO: 136088 - DNA, 20 bp, synthetic construct
  source 1..20: mol_type = other DNA
gtagatgtgaggctgggcgt

SEQ ID NO: 136089 - DNA, 20 bp, synthetic construct
  source 1..20: mol_type = other DNA
agtagatgtgaggctgggcg

SEQ ID NO: 136090 - DNA, 20 bp, synthetic construct
  source 1..20: mol_type = other DNA
gagtagatgtgaggctgggc

SEQ ID NO: 136091 - DNA, 20 bp, synthetic construct
  source 1..20: mol_type = other DNA
agagtagatgtgaggctggg

SEQ ID NO: 136092 - DNA, 20 bp, synthetic construct
  source 1..20: mol_type = other DNA
aagagtagatgtgaggctgg

SEQ ID NO: 136093 - DNA, 20 bp, synthetic construct
  source 1..20: mol_type = other DNA
gaagagtagatgtgaggctg

SEQ ID NO: 136094 - DNA, 20 bp, synthetic construct
  source 1..20: mol_type = other DNA
agaagagtagatgtgaggct

SEQ ID NO: 136095 - DNA, 20 bp, synthetic construct
  source 1..20: mol_type = other DNA
tagaagagtagatgtgaggc

SEQ ID NO: 136096 - DNA, 20 bp, synthetic construct
  source 1..20: mol_type = other DNA
ttagaagagtagatgtgagg

SEQ ID NO: 136097 - DNA, 20 bp, synthetic construct
  source 1..20: mol_type = other DNA
attagaagagtagatgtgag

SEQ ID NO: 136098 - DNA, 20 bp, synthetic construct
  source 1..20: mol_type = other DNA
gattagaagagtagatgtga

SEQ ID NO: 136099 - DNA, 20 bp, synthetic construct
  source 1..20: mol_type = other DNA
ggattagaagagtagatgtg

SEQ ID NO: 136100 - DNA, 20 bp, synthetic construct
  source 1..20: mol_type = other DNA
tggattagaagagtagatgt

SEQ ID NO: 136101 - DNA, 20 bp, synthetic construct
  source 1..20: mol_type = other DNA
atggattagaagagtagatg

SEQ ID NO: 136102 - DNA, 20 bp, synthetic construct
  source 1..20: mol_type = other DNA
gatggattagaagagtagat

SEQ ID NO: 136103 - DNA, 20 bp, synthetic construct
  source 1..20: mol_type = other DNA
agatggattagaagagtaga

SEQ ID NO: 136104 - DNA, 20 bp, synthetic construct
  source 1..20: mol_type = other DNA
tagatggattagaagagtag

SEQ ID NO: 136105 - DNA, 20 bp, synthetic construct
  source 1..20: mol_type = other DNA
ttagatggattagaagagta

SEQ ID NO: 136106 - DNA, 20 bp, synthetic construct
  source 1..20: mol_type = other DNA
attagatggattagaagagt

SEQ ID NO: 136107 - DNA, 20 bp, synthetic construct
  source 1..20: mol_type = other DNA
aattagatggattagaagag

SEQ ID NO: 136108 - DNA, 20 bp, synthetic construct
  source 1..20: mol_type = other DNA
aaattagatggattagaaga

SEQ ID NO: 136109 - DNA, 20 bp, synthetic construct
  source 1..20: mol_type = other DNA
aaaattagatggattagaag

SEQ ID NO: 136110 - DNA, 20 bp, synthetic construct
  source 1..20: mol_type = other DNA
caaaattagatggattagaa

SEQ ID NO: 136111 - DNA, 20 bp, synthetic construct
  source 1..20: mol_type = other DNA
acaaaattagatggattaga

SEQ ID NO: 136112 - DNA, 20 bp, synthetic construct
  source 1..20: mol_type = other DNA
aacaaaattagatggattag

SEQ ID NO: 136113 - DNA, 20 bp, synthetic construct
  source 1..20: mol_type = other DNA
aaacaaaattagatggatta

SEQ ID NO: 136114 - DNA, 20 bp, synthetic construct
  source 1..20: mol_type = other DNA
aaaacaaaattagatggatt

SEQ ID NO: 136115 - DNA, 20 bp, synthetic construct
  source 1..20: mol_type = other DNA
taaaacaaaattagatggat

SEQ ID NO: 136116 - DNA, 20 bp, synthetic construct
  source 1..20: mol_type = other DNA
ataaaacaaaattagatgga

SEQ ID NO: 136117 - DNA, 20 bp, synthetic construct
  source 1..20: mol_type = other DNA
cataaaacaaaattagatgg

SEQ ID NO: 136118 - DNA, 20 bp, synthetic construct
  source 1..20: mol_type = other DNA
ccataaaacaaaattagatg

SEQ ID NO: 136119 - DNA, 20 bp, synthetic construct
  source 1..20: mol_type = other DNA
accataaaacaaaattagat

SEQ ID NO: 136120 - DNA, 20 bp, synthetic construct
  source 1..20: mol_type = other DNA
caccataaaacaaaattaga

SEQ ID NO: 136121 - DNA, 20 bp, synthetic construct
  source 1..20: mol_type = other DNA
tcaccataaaacaaaattag

SEQ ID NO: 136122 - DNA, 20 bp, synthetic construct
  source 1..20: mol_type = other DNA
atcaccataaaacaaaatta

SEQ ID NO: 136123 - DNA, 20 bp, synthetic construct
  source 1..20: mol_type = other DNA
catcaccataaaacaaaatt

SEQ ID NO: 136124 - DNA, 20 bp, synthetic construct
  source 1..20: mol_type = other DNA
gcatcaccataaaacaaaat

SEQ ID NO: 136125 - DNA, 20 bp, synthetic construct
  source 1..20: mol_type = other DNA
agcatcaccataaaacaaaa

SEQ ID NO: 136126 - DNA, 20 bp, synthetic construct
  source 1..20: mol_type = other DNA
aagcatcaccataaaacaaa

SEQ ID NO: 136127 - DNA, 20 bp, synthetic construct
  source 1..20: mol_type = other DNA
aaagcatcaccataaaacaa

SEQ ID NO: 136128 - DNA, 20 bp, synthetic construct
  source 1..20: mol_type = other DNA
aaaagcatcaccataaaaca

SEQ ID NO: 136129 - DNA, 20 bp, synthetic construct
  source 1..20: mol_type = other DNA
taaaagcatcaccataaaac

SEQ ID NO: 136130 - DNA, 20 bp, synthetic construct
  source 1..20: mol_type = other DNA
gtaaaagcatcaccataaaa

SEQ ID NO: 136131 - DNA, 20 bp, synthetic construct
  source 1..20: mol_type = other DNA
ggtaaaagcatcaccataaa

SEQ ID NO: 136132 - DNA, 20 bp, synthetic construct
  source 1..20: mol_type = other DNA
aggtaaaagcatcaccataa

SEQ ID NO: 136133 - DNA, 20 bp, synthetic construct
  source 1..20: mol_type = other DNA
aaggtaaaagcatcaccata

SEQ ID NO: 136134 - DNA, 20 bp, synthetic construct
  source 1..20: mol_type = other DNA
aaaggtaaaagcatcaccat

SEQ ID NO: 136135 - DNA, 20 bp, synthetic construct
  source 1..20: mol_type = other DNA
gaaaggtaaaagcatcacca

SEQ ID NO: 136136 - DNA, 20 bp, synthetic construct
  source 1..20: mol_type = other DNA
tgaaaggtaaaagcatcacc

SEQ ID NO: 136137 - DNA, 20 bp, synthetic construct
  source 1..20: mol_type = other DNA
ctgaaaggtaaaagcatcac

SEQ ID NO: 136138 - DNA, 20 bp, synthetic construct
  source 1..20: mol_type = other DNA
tctgaaaggtaaaagcatca

SEQ ID NO: 136139 - DNA, 20 bp, synthetic construct
  source 1..20: mol_type = other DNA
ttctgaaaggtaaaagcatc

SEQ ID NO: 136140 - DNA, 20 bp, synthetic construct
  source 1..20: mol_type = other DNA
tttctgaaaggtaaaagcat

SEQ ID NO: 136141 - DNA, 20 bp, synthetic construct
  source 1..20: mol_type = other DNA
gtttctgaaaggtaaaagca

SEQ ID NO: 136142 - DNA, 20 bp, synthetic construct
  source 1..20: mol_type = other DNA
tgtttctgaaaggtaaaagc

SEQ ID NO: 136143 - DNA, 20 bp, synthetic construct
  source 1..20: mol_type = other DNA
ctgtttctgaaaggtaaaag

SEQ ID NO: 136144 - DNA, 20 bp, synthetic construct
  source 1..20: mol_type = other DNA
actgtttctgaaaggtaaaa

SEQ ID NO: 136145 - DNA, 20 bp, synthetic construct
  source 1..20: mol_type = other DNA
tactgtttctgaaaggtaaa

SEQ ID NO: 136146 - DNA, 20 bp, synthetic construct
  source 1..20: mol_type = other DNA
ttactgtttctgaaaggtaa

SEQ ID NO: 136147 - DNA, 20 bp, synthetic construct
  source 1..20: mol_type = other DNA
attactgtttctgaaaggta

SEQ ID NO: 136148 - DNA, 20 bp, synthetic construct
  source 1..20: mol_type = other DNA
tattactgtttctgaaaggt

SEQ ID NO: 136149 - DNA, 20 bp, synthetic construct
  source 1..20: mol_type = other DNA
ttattactgtttctgaaagg

SEQ ID NO: 136150 - DNA, 20 bp, synthetic construct
  source 1..20: mol_type = other DNA
attattactgtttctgaaag

SEQ ID NO: 136151 - DNA, 20 bp, synthetic construct
  source 1..20: mol_type = other DNA
tattattactgtttctgaaa

SEQ ID NO: 136152 - DNA, 20 bp, synthetic construct
  source 1..20: mol_type = other DNA
gtattattactgtttctgaa

SEQ ID NO: 136153 - DNA, 20 bp, synthetic construct
  source 1..20: mol_type = other DNA
tgtattattactgtttctga

SEQ ID NO: 136154 - DNA, 20 bp, synthetic construct
  source 1..20: mol_type = other DNA
ttgtattattactgtttctg

SEQ ID NO: 136155 - DNA, 20 bp, synthetic construct
  source 1..20: mol_type = other DNA
gttgtattattactgtttct

SEQ ID NO: 136156 - DNA, 20 bp, synthetic construct
  source 1..20: mol_type = other DNA
agttgtattattactgtttc

SEQ ID NO: 136157 - DNA, 20 bp, synthetic construct
  source 1..20: mol_type = other DNA
aagttgtattattactgttt

SEQ ID NO: 136158 - DNA, 20 bp, synthetic construct
  source 1..20: mol_type = other DNA
aaagttgtattattactgtt

SEQ ID NO: 136159 - DNA, 20 bp, synthetic construct
  source 1..20: mol_type = other DNA
aaaagttgtattattactgt

SEQ ID NO: 136160 - DNA, 20 bp, synthetic construct
  source 1..20: mol_type = other DNA
gaaaagttgtattattactg

SEQ ID NO: 136161 - DNA, 20 bp, synthetic construct
  source 1..20: mol_type = other DNA
ggaaaagttgtattattact

SEQ ID NO: 136162 - DNA, 20 bp, synthetic construct
  source 1..20: mol_type = other DNA
cggaaaagttgtattattac

SEQ ID NO: 136163 - DNA, 20 bp, synthetic construct
  source 1..20: mol_type = other DNA
tcggaaaagttgtattatta

SEQ ID NO: 136164 - DNA, 20 bp, synthetic construct
  source 1..20: mol_type = other DNA
gtcggaaaagttgtattatt

SEQ ID NO: 136165 - DNA, 20 bp, synthetic construct
  source 1..20: mol_type = other DNA
agtcggaaaagttgtattat

SEQ ID NO: 136166 - DNA, 20 bp, synthetic construct
  source 1..20: mol_type = other DNA
tagtcggaaaagttgtatta

SEQ ID NO: 136167 - DNA, 20 bp, synthetic construct
  source 1..20: mol_type = other DNA
ttagtcggaaaagttgtatt

SEQ ID NO: 136168 - DNA, 20 bp, synthetic construct
  source 1..20: mol_type = other DNA
gttagtcggaaaagttgtat

SEQ ID NO: 136169 - DNA, 20 bp, synthetic construct
  source 1..20: mol_type = other DNA
agttagtcggaaaagttgta

SEQ ID NO: 136170 - DNA, 20 bp, synthetic construct
  source 1..20: mol_type = other DNA
tagttagtcggaaaagttgt

SEQ ID NO: 136171 - DNA, 20 bp, synthetic construct
  source 1..20: mol_type = other DNA
ctagttagtcggaaaagttg

SEQ ID NO: 136172 - DNA, 20 bp, synthetic construct
  source 1..20: mol_type = other DNA
tctagttagtcggaaaagtt

SEQ ID NO: 136173 - DNA, 20 bp, synthetic construct
  source 1..20: mol_type = other DNA
ctctagttagtcggaaaagt

SEQ ID NO: 136174 - DNA, 20 bp, synthetic construct
  source 1..20: mol_type = other DNA
gctctagttagtcggaaaag

SEQ ID NO: 136175 - DNA, 20 bp, synthetic construct
  source 1..20: mol_type = other DNA
ggctctagttagtcggaaaa

SEQ ID NO: 136176 - DNA, 20 bp, synthetic construct
  source 1..20: mol_type = other DNA
tggctctagttagtcggaaa

SEQ ID NO: 136177 - DNA, 20 bp, synthetic construct
  source 1..20: mol_type = other DNA
atggctctagttagtcggaa

SEQ ID NO: 136178 - DNA, 20 bp, synthetic construct
  source 1..20: mol_type = other DNA
aatggctctagttagtcgga

SEQ ID NO: 136179 - DNA, 20 bp, synthetic construct
  source 1..20: mol_type = other DNA
taatggctctagttagtcgg

SEQ ID NO: 136180 - DNA, 20 bp, synthetic construct
  source 1..20: mol_type = other DNA
ctaatggctctagttagtcg

SEQ ID NO: 136181 - DNA, 20 bp, synthetic construct
  source 1..20: mol_type = other DNA
cctaatggctctagttagtc

SEQ ID NO: 136182 - DNA, 20 bp, synthetic construct
  source 1..20: mol_type = other DNA
tcctaatggctctagttagt

SEQ ID NO: 136183 - DNA, 20 bp, synthetic construct
  source 1..20: mol_type = other DNA
ttcctaatggctctagttag

SEQ ID NO: 136184 - DNA, 20 bp, synthetic construct
  source 1..20: mol_type = other DNA
cttcctaatggctctagtta

SEQ ID NO: 136185 - DNA, 20 bp, synthetic construct
  source 1..20: mol_type = other DNA
tcttcctaatggctctagtt

SEQ ID NO: 136186 - DNA, 20 bp, synthetic construct
  source 1..20: mol_type = other DNA
ttcttcctaatggctctagt

SEQ ID NO: 136187 - DNA, 20 bp, synthetic construct
  source 1..20: mol_type = other DNA
attcttcctaatggctctag

SEQ ID NO: 136188 - DNA, 20 bp, synthetic construct
  source 1..20: mol_type = other DNA
aattcttcctaatggctcta

SEQ ID NO: 136189 - DNA, 20 bp, synthetic construct
  source 1..20: mol_type = other DNA
taattcttcctaatggctct

SEQ ID NO: 136190 - DNA, 20 bp, synthetic construct
  source 1..20: mol_type = other DNA
ctaattcttcctaatggctc

SEQ ID NO: 136191 - DNA, 20 bp, synthetic construct
  source 1..20: mol_type = other DNA
tctaattcttcctaatggct

SEQ ID NO: 136192 - DNA, 20 bp, synthetic construct
  source 1..20: mol_type = other DNA
atctaattcttcctaatggc

SEQ ID NO: 136193 - DNA, 20 bp, synthetic construct
  source 1..20: mol_type = other DNA
gatctaattcttcctaatgg

SEQ ID NO: 136194 - DNA, 20 bp, synthetic construct
  source 1..20: mol_type = other DNA
ggatctaattcttcctaatg

SEQ ID NO: 136195 - DNA, 20 bp, synthetic construct
  source 1..20: mol_type = other DNA
tggatctaattcttcctaat

SEQ ID NO: 136196 - DNA, 20 bp, synthetic construct
  source 1..20: mol_type = other DNA
ctggatctaattcttcctaa

SEQ ID NO: 136197 - DNA, 20 bp, synthetic construct
  source 1..20: mol_type = other DNA
tctggatctaattcttccta

SEQ ID NO: 136198 - DNA, 20 bp, synthetic construct
  source 1..20: mol_type = other DNA
ttctggatctaattcttcct

SEQ ID NO: 136199 - DNA, 20 bp, synthetic construct
  source 1..20: mol_type = other DNA
attctggatctaattcttcc

SEQ ID NO: 136200 - DNA, 20 bp, synthetic construct
  source 1..20: mol_type = other DNA
gattctggatctaattcttc

SEQ ID NO: 136201 - DNA, 20 bp, synthetic construct
  source 1..20: mol_type = other DNA
ggattctggatctaattctt

SEQ ID NO: 136202 - DNA, 20 bp, synthetic construct
  source 1..20: mol_type = other DNA
aggattctggatctaattct

SEQ ID NO: 136203 - DNA, 20 bp, synthetic construct
  source 1..20: mol_type = other DNA
aaggattctggatctaattc

SEQ ID NO: 136204 - DNA, 20 bp, synthetic construct
  source 1..20: mol_type = other DNA
aaaggattctggatctaatt

SEQ ID NO: 136205 - DNA, 20 bp, synthetic construct
  source 1..20: mol_type = other DNA
aaaaggattctggatctaat

SEQ ID NO: 136206 - DNA, 20 bp, synthetic construct
  source 1..20: mol_type = other DNA
aaaaaggattctggatctaa

SEQ ID NO: 136207 - DNA, 20 bp, synthetic construct
  source 1..20: mol_type = other DNA
aaaaaaggattctggatcta

SEQ ID NO: 136208 - DNA, 20 bp, synthetic construct
  source 1..20: mol_type = other DNA
caaaaaaggattctggatct

SEQ ID NO: 136209 - DNA, 20 bp, synthetic construct
  source 1..20: mol_type = other DNA
tcaaaaaaggattctggatc

SEQ ID NO: 136210 - DNA, 20 bp, synthetic construct
  source 1..20: mol_type = other DNA
atcaaaaaaggattctggat

SEQ ID NO: 136211 - DNA, 20 bp, synthetic construct
  source 1..20: mol_type = other DNA
aatcaaaaaaggattctgga

SEQ ID NO: 136212 - DNA, 20 bp, synthetic construct
  source 1..20: mol_type = other DNA
aaatcaaaaaaggattctgg

SEQ ID NO: 136213 - DNA, 20 bp, synthetic construct
  source 1..20: mol_type = other DNA
caaatcaaaaaaggattctg

SEQ ID NO: 136214 - DNA, 20 bp, synthetic construct
  source 1..20: mol_type = other DNA
acaaatcaaaaaaggattct

SEQ ID NO: 136215 - DNA, 20 bp, synthetic construct
  source 1..20: mol_type = other DNA
aacaaatcaaaaaaggattc

SEQ ID NO: 136216 - DNA, 20 bp, synthetic construct
  source 1..20: mol_type = other DNA
aaacaaatcaaaaaaggatt

SEQ ID NO: 136217 - DNA, 20 bp, synthetic construct
  source 1..20: mol_type = other DNA
aaaacaaatcaaaaaaggat

SEQ ID NO: 136218 - DNA, 20 bp, synthetic construct
  source 1..20: mol_type = other DNA
aaaaacaaatcaaaaaagga

SEQ ID NO: 136219 - DNA, 20 bp, synthetic construct
  source 1..20: mol_type = other DNA
caaaaacaaatcaaaaaagg

SEQ ID NO: 136220 - DNA, 20 bp, synthetic construct
  source 1..20: mol_type = other DNA
ccaaaaacaaatcaaaaaag

SEQ ID NO: 136221 - DNA, 20 bp, synthetic construct
  source 1..20: mol_type = other DNA
accaaaaacaaatcaaaaaa

SEQ ID NO: 136222 - DNA, 20 bp, synthetic construct
  source 1..20: mol_type = other DNA
taccaaaaacaaatcaaaaa

SEQ ID NO: 136223 - DNA, 20 bp, synthetic construct
  source 1..20: mol_type = other DNA
ctaccaaaaacaaatcaaaa

SEQ ID NO: 136224 - DNA, 20 bp, synthetic construct
  source 1..20: mol_type = other DNA
actaccaaaaacaaatcaaa

SEQ ID NO: 136225 - DNA, 20 bp, synthetic construct
  source 1..20: mol_type = other DNA
aactaccaaaaacaaatcaa

SEQ ID NO: 136226 - DNA, 20 bp, synthetic construct
  source 1..20: mol_type = other DNA
aaactaccaaaaacaaatca

SEQ ID NO: 136227 - DNA, 20 bp, synthetic construct
  source 1..20: mol_type = other DNA
taaactaccaaaaacaaatc

SEQ ID NO: 136228 - DNA, 20 bp, synthetic construct
  source 1..20: mol_type = other DNA
ttaaactaccaaaaacaaat

SEQ ID NO: 136229 - DNA, 20 bp, synthetic construct
  source 1..20: mol_type = other DNA
attaaactaccaaaaacaaa

SEQ ID NO: 136230 - DNA, 20 bp, synthetic construct
  source 1..20: mol_type = other DNA
cattaaactaccaaaaacaa

SEQ ID NO: 136231 - DNA, 20 bp, synthetic construct
  source 1..20: mol_type = other DNA
gcattaaactaccaaaaaca

SEQ ID NO: 136232 - DNA, 20 bp, synthetic construct
  source 1..20: mol_type = other DNA
tgcattaaactaccaaaaac

SEQ ID NO: 136233 - DNA, 20 bp, synthetic construct
  source 1..20: mol_type = other DNA
ctgcattaaactaccaaaaa

SEQ ID NO: 136234 - DNA, 20 bp, synthetic construct
  source 1..20: mol_type = other DNA
tctgcattaaactaccaaaa

SEQ ID NO: 136235 - DNA, 20 bp, synthetic construct
  source 1..20: mol_type = other DNA
atctgcattaaactaccaaa

SEQ ID NO: 136236 - DNA, 20 bp, synthetic construct
  source 1..20: mol_type = other DNA
tatctgcattaaactaccaa

SEQ ID NO: 136237 - DNA, 20 bp, synthetic construct
  source 1..20: mol_type = other DNA
ttatctgcattaaactacca

SEQ ID NO: 136238 - DNA, 20 bp, synthetic construct
  source 1..20: mol_type = other DNA
cttatctgcattaaactacc

SEQ ID NO: 136239 - DNA, 20 bp, synthetic construct
  source 1..20: mol_type = other DNA
acttatctgcattaaactac

SEQ ID NO: 136240 - DNA, 20 bp, synthetic construct
  source 1..20: mol_type = other DNA
tacttatctgcattaaacta

SEQ ID NO: 136241 - DNA, 20 bp, synthetic construct
  source 1..20: mol_type = other DNA
ttacttatctgcattaaact

SEQ ID NO: 136242 - DNA, 20 bp, synthetic construct
  source 1..20: mol_type = other DNA
cttacttatctgcattaaac

SEQ ID NO: 136243 - DNA, 20 bp, synthetic construct
  source 1..20: mol_type = other DNA
tcttacttatctgcattaaa

SEQ ID NO: 136244 - DNA, 20 bp, synthetic construct
  source 1..20: mol_type = other DNA
ttcttacttatctgcattaa

SEQ ID NO: 136245 - DNA, 20 bp, synthetic construct
  source 1..20: mol_type = other DNA
tttcttacttatctgcatta

SEQ ID NO: 136246 - DNA, 20 bp, synthetic construct
  source 1..20: mol_type = other DNA
ttttcttacttatctgcatt

SEQ ID NO: 136247 - DNA, 20 bp, synthetic construct
  source 1..20: mol_type = other DNA
attttcttacttatctgcat

SEQ ID NO: 136248 - DNA, 20 bp, synthetic construct
  source 1..20: mol_type = other DNA
tattttcttacttatctgca

SEQ ID NO: 136249 - DNA, 20 bp, synthetic construct
  source 1..20: mol_type = other DNA
atattttcttacttatctgc

SEQ ID NO: 136250 - DNA, 20 bp, synthetic construct
  source 1..20: mol_type = other DNA
tatattttcttacttatctg

SEQ ID NO: 136251 - DNA, 20 bp, synthetic construct
  source 1..20: mol_type = other DNA
ctatattttcttacttatct

SEQ ID NO: 136252 - DNA, 20 bp, synthetic construct
  source 1..20: mol_type = other DNA
actatattttcttacttatc

SEQ ID NO: 136253 - DNA, 20 bp, synthetic construct
  source 1..20: mol_type = other DNA
aactatattttcttacttat

SEQ ID NO: 136254 - DNA, 20 bp, synthetic construct
  source 1..20: mol_type = other DNA
taactatattttcttactta

SEQ ID NO: 136255 - DNA, 20 bp, synthetic construct
  source 1..20: mol_type = other DNA
ttaactatattttcttactt

SEQ ID NO: 136256 - DNA, 20 bp, synthetic construct
  source 1..20: mol_type = other DNA
cttaactatattttcttact

SEQ ID NO: 136257 - DNA, 20 bp, synthetic construct
  source 1..20: mol_type = other DNA
acttaactatattttcttac

SEQ ID NO: 136258 - DNA, 20 bp, synthetic construct
  source 1..20: mol_type = other DNA
aacttaactatattttctta

SEQ ID NO: 136259 - DNA, 20 bp, synthetic construct
  source 1..20: mol_type = other DNA
taacttaactatattttctt

SEQ ID NO: 136260 - DNA, 20 bp, synthetic construct
  source 1..20: mol_type = other DNA
ttaacttaactatattttct

SEQ ID NO: 136261 - DNA, 20 bp, synthetic construct
  source 1..20: mol_type = other DNA
tttaacttaactatattttc

SEQ ID NO: 136262 - DNA, 20 bp, synthetic construct
  source 1..20: mol_type = other DNA
ttttaacttaactatatttt

SEQ ID NO: 136263 - DNA, 20 bp, synthetic construct
  source 1..20: mol_type = other DNA
tttttaacttaactatattt

SEQ ID NO: 136264 - DNA, 20 bp, synthetic construct
  source 1..20: mol_type = other DNA
ttttttaacttaactatatt

SEQ ID NO: 136265 - DNA, 20 bp, synthetic construct
  source 1..20: mol_type = other DNA
tttttttaacttaactatat

SEQ ID NO: 136266 - DNA, 20 bp, synthetic construct
  source 1..20: mol_type = other DNA
ttttttttaacttaactata

SEQ ID NO: 136267 - DNA, 20 bp, synthetic construct
  source 1..20: mol_type = other DNA
tttttttttaacttaactat

SEQ ID NO: 136268 - DNA, 20 bp, synthetic construct
  source 1..20: mol_type = other DNA
ttttttttttaacttaacta

SEQ ID NO: 136269 - DNA, 20 bp, synthetic construct
  source 1..20: mol_type = other DNA
tttttttttttaacttaact

SEQ ID NO: 136270 - DNA, 20 bp, synthetic construct
  source 1..20: mol_type = other DNA
ttttttttttttaacttaac

SEQ ID NO: 136271 - DNA, 20 bp, synthetic construct
  source 1..20: mol_type = other DNA
tttttttttttttaacttaa

SEQ ID NO: 136272 - DNA, 20 bp, synthetic construct
  source 1..20: mol_type = other DNA
ttttttttttttttaactta

SEQ ID NO: 136273 - DNA, 20 bp, synthetic construct
  source 1..20: mol_type = other DNA
attttttttttttttaactt

SEQ ID NO: 136274 - DNA, 20 bp, synthetic construct
  source 1..20: mol_type = other DNA
cattttttttttttttaact

SEQ ID NO: 136275 - DNA, 20 bp, synthetic construct
  source 1..20: mol_type = other DNA
tcattttttttttttttaac

SEQ ID NO: 136276 - DNA, 20 bp, synthetic construct
  source 1..20: mol_type = other DNA
ttcattttttttttttttaa

SEQ ID NO: 136277 - DNA, 20 bp, synthetic construct
  source 1..20: mol_type = other DNA
tttcatttttttttttttta

SEQ ID NO: 136278 - DNA, 20 bp, synthetic construct
  source 1..20: mol_type = other DNA
ttttcatttttttttttttt

SEQ ID NO: 136279 - DNA, 20 bp, synthetic construct
  source 1..20: mol_type = other DNA
cttttcattttttttttttt

SEQ ID NO: 136280 - DNA, 20 bp, synthetic construct
  source 1..20: mol_type = other DNA
gcttttcatttttttttttt

SEQ ID NO: 136281 - DNA, 20 bp, synthetic construct
  source 1..20: mol_type = other DNA
tgcttttcattttttttttt

SEQ ID NO: 136282 - DNA, 20 bp, synthetic construct
  source 1..20: mol_type = other DNA
atgcttttcatttttttttt

SEQ ID NO: 136283 - DNA, 20 bp, synthetic construct
  source 1..20: mol_type = other DNA
gatgcttttcattttttttt

SEQ ID NO: 136284 - DNA, 20 bp, synthetic construct
  source 1..20: mol_type = other DNA
ggatgcttttcatttttttt

SEQ ID NO: 136285 - DNA, 20 bp, synthetic construct
  source 1..20: mol_type = other DNA
tggatgcttttcattttttt

SEQ ID NO: 136286 - DNA, 20 bp, synthetic construct
  source 1..20: mol_type = other DNA
atggatgcttttcatttttt

SEQ ID NO: 136287 - DNA, 20 bp, synthetic construct
  source 1..20: mol_type = other DNA
tatggatgcttttcattttt

SEQ ID NO: 136288 - DNA, 20 bp, synthetic construct
  source 1..20: mol_type = other DNA
ttatggatgcttttcatttt

SEQ ID NO: 136289 - DNA, 20 bp, synthetic construct
  source 1..20: mol_type = other DNA
attatggatgcttttcattt

SEQ ID NO: 136290 - DNA, 20 bp, synthetic construct
  source 1..20: mol_type = other DNA
gattatggatgcttttcatt

SEQ ID NO: 136291 - DNA, 20 bp, synthetic construct
  source 1..20: mol_type = other DNA
ggattatggatgcttttcat

SEQ ID NO: 136292 - DNA, 20 bp, synthetic construct
  source 1..20: mol_type = other DNA
gggattatggatgcttttca

SEQ ID NO: 136293 - DNA, 20 bp, synthetic construct
  source 1..20: mol_type = other DNA
agggattatggatgcttttc

SEQ ID NO: 136294 - DNA, 20 bp, synthetic construct
  source 1..20: mol_type = other DNA
gagggattatggatgctttt

SEQ ID NO: 136295 - DNA, 20 bp, synthetic construct
  source 1..20: mol_type = other DNA
ggagggattatggatgcttt

SEQ ID NO: 136296 - DNA, 20 bp, synthetic construct
  source 1..20: mol_type = other DNA
tggagggattatggatgctt

SEQ ID NO: 136297 - DNA, 20 bp, synthetic construct
  source 1..20: mol_type = other DNA
gtggagggattatggatgct

SEQ ID NO: 136298 - DNA, 20 bp, synthetic construct
  source 1..20: mol_type = other DNA
ggtggagggattatggatgc

SEQ ID NO: 136299 - DNA, 20 bp, synthetic construct
  source 1..20: mol_type = other DNA
aggtggagggattatggatg

SEQ ID NO: 136300 - DNA, 20 bp, synthetic construct
  source 1..20: mol_type = other DNA
caggtggagggattatggat

SEQ ID NO: 136301 - DNA, 20 bp, synthetic construct
  source 1..20: mol_type = other DNA
tcaggtggagggattatgga

SEQ ID NO: 136302 - DNA, 20 bp, synthetic construct
  source 1..20: mol_type = other DNA
gtcaggtggagggattatgg

SEQ ID NO: 136303 - DNA, 20 bp, synthetic construct
  source 1..20: mol_type = other DNA
tgtcaggtggagggattatg

SEQ ID NO: 136304 - DNA, 20 bp, synthetic construct
  source 1..20: mol_type = other DNA
ttgtcaggtggagggattat

SEQ ID NO: 136305 - DNA, 20 bp, synthetic construct
  source 1..20: mol_type = other DNA
gttgtcaggtggagggatta

SEQ ID NO: 136306 - DNA, 20 bp, synthetic construct
  source 1..20: mol_type = other DNA
agttgtcaggtggagggatt

SEQ ID NO: 136307 - DNA, 20 bp, synthetic construct
  source 1..20: mol_type = other DNA
cagttgtcaggtggagggat

SEQ ID NO: 136308 - DNA, 20 bp, synthetic construct
  source 1..20: mol_type = other DNA
gcagttgtcaggtggaggga

SEQ ID NO: 136309 - DNA, 20 bp, synthetic construct
  source 1..20: mol_type = other DNA
ggcagttgtcaggtggaggg

SEQ ID NO: 136310 - DNA, 20 bp, synthetic construct
  source 1..20: mol_type = other DNA
aggcagttgtcaggtggagg

SEQ ID NO: 136311 - DNA, 20 bp, synthetic construct
  source 1..20: mol_type = other DNA
aaggcagttgtcaggtggag

SEQ ID NO: 136312 - DNA, 20 bp, synthetic construct
  source 1..20: mol_type = other DNA
aaaggcagttgtcaggtgga

SEQ ID NO: 136313 - DNA, 20 bp, synthetic construct
  source 1..20: mol_type = other DNA
aaaaggcagttgtcaggtgg

SEQ ID NO: 136314 - DNA, 20 bp, synthetic construct
  source 1..20: mol_type = other DNA
taaaaggcagttgtcaggtg

SEQ ID NO: 136315 - DNA, 20 bp, synthetic construct
  source 1..20: mol_type = other DNA
ttaaaaggcagttgtcaggt

SEQ ID NO: 136316 - DNA, 20 bp, synthetic construct
  source 1..20: mol_type = other DNA
gttaaaaggcagttgtcagg

SEQ ID NO: 136317 - DNA, 20 bp, synthetic construct
  source 1..20: mol_type = other DNA
tgttaaaaggcagttgtcag

SEQ ID NO: 136318 - DNA, 20 bp, synthetic construct
  source 1..20: mol_type = other DNA
atgttaaaaggcagttgtca

SEQ ID NO: 136319 - DNA, 20 bp, synthetic construct
  source 1..20: mol_type = other DNA
aatgttaaaaggcagttgtc

SEQ ID NO: 136320 - DNA, 20 bp, synthetic construct
  source 1..20: mol_type = other DNA
aaatgttaaaaggcagttgt

SEQ ID NO: 136321 - DNA, 20 bp, synthetic construct
  source 1..20: mol_type = other DNA
aaaatgttaaaaggcagttg

SEQ ID NO: 136322 - DNA, 20 bp, synthetic construct
  source 1..20: mol_type = other DNA
caaaatgttaaaaggcagtt

SEQ ID NO: 136323 - DNA, 20 bp, synthetic construct
  source 1..20: mol_type = other DNA
tcaaaatgttaaaaggcagt

SEQ ID NO: 136324 - DNA, 20 bp, synthetic construct
  source 1..20: mol_type = other DNA
atcaaaatgttaaaaggcag

SEQ ID NO: 136325 - DNA, 20 bp, synthetic construct
  source 1..20: mol_type = other DNA
catcaaaatgttaaaaggca

SEQ ID NO: 136326 - DNA, 20 bp, synthetic construct
  source 1..20: mol_type = other DNA
acatcaaaatgttaaaaggc

SEQ ID NO: 136327 - DNA, 20 bp, synthetic construct
  source 1..20: mol_type = other DNA
cacatcaaaatgttaaaagg

SEQ ID NO: 136328 - DNA, 20 bp, synthetic construct
  source 1..20: mol_type = other DNA
acacatcaaaatgttaaaag

SEQ ID NO: 136329 - DNA, 20 bp, synthetic construct
  source 1..20: mol_type = other DNA
tacacatcaaaatgttaaaa

SEQ ID NO: 136330 - DNA, 20 bp, synthetic construct
  source 1..20: mol_type = other DNA
atacacatcaaaatgttaaa

SEQ ID NO: 136331 - DNA, 20 bp, synthetic construct
  source 1..20: mol_type = other DNA
gatacacatcaaaatgttaa

SEQ ID NO: 136332 - DNA, 20 bp, synthetic construct
  source 1..20: mol_type = other DNA
ggatacacatcaaaatgtta

SEQ ID NO: 136333 - DNA, 20 bp, synthetic construct
  source 1..20: mol_type = other DNA
aggatacacatcaaaatgtt

SEQ ID NO: 136334 - DNA, 20 bp, synthetic construct
  source 1..20: mol_type = other DNA
aaggatacacatcaaaatgt

SEQ ID NO: 136335 - DNA, 20 bp, synthetic construct
  source 1..20: mol_type = other DNA
gaaggatacacatcaaaatg

SEQ ID NO: 136336 - DNA, 20 bp, synthetic construct
  source 1..20: mol_type = other DNA
ggaaggatacacatcaaaat

SEQ ID NO: 136337 - DNA, 20 bp, synthetic construct
  source 1..20: mol_type = other DNA
tggaaggatacacatcaaaa

SEQ ID NO: 136338 - DNA, 20 bp, synthetic construct
  source 1..20: mol_type = other DNA
ctggaaggatacacatcaaa

SEQ ID NO: 136339 - DNA, 20 bp, synthetic construct
  source 1..20: mol_type = other DNA
cctggaaggatacacatcaa

SEQ ID NO: 136340 - DNA, 20 bp, synthetic construct
  source 1..20: mol_type = other DNA
acctggaaggatacacatca

SEQ ID NO: 136341 - DNA, 20 bp, synthetic construct
  source 1..20: mol_type = other DNA
cacctggaaggatacacatc

SEQ ID NO: 136342 - DNA, 20 bp, synthetic construct
  source 1..20: mol_type = other DNA
acacctggaaggatacacat

SEQ ID NO: 136343 - DNA, 20 bp, synthetic construct
  source 1..20: mol_type = other DNA
tacacctggaaggatacaca

SEQ ID NO: 136344 - DNA, 20 bp, synthetic construct
  source 1..20: mol_type = other DNA
atacacctggaaggatacac

SEQ ID NO: 136345 - DNA, 20 bp, synthetic construct
  source 1..20: mol_type = other DNA
aatacacctggaaggataca

SEQ ID NO: 136346 - DNA, 20 bp, synthetic construct
  source 1..20: mol_type = other DNA
aaatacacctggaaggatac

SEQ ID NO: 136347 - DNA, 20 bp, synthetic construct
  source 1..20: mol_type = other DNA
taaatacacctggaaggata

SEQ ID NO: 136348 - DNA, 20 bp, synthetic construct
  source 1..20: mol_type = other DNA
ttaaatacacctggaaggat

SEQ ID NO: 136349 - DNA, 20 bp, synthetic construct
  source 1..20: mol_type = other DNA
tttaaatacacctggaagga

SEQ ID NO: 136350 - DNA, 20 bp, synthetic construct
  source 1..20: mol_type = other DNA
atttaaatacacctggaagg

SEQ ID NO: 136351 - DNA, 20 bp, synthetic construct
  source 1..20: mol_type = other DNA
tatttaaatacacctggaag

SEQ ID NO: 136352 - DNA, 20 bp, synthetic construct
  source 1..20: mol_type = other DNA
gtatttaaatacacctggaa

SEQ ID NO: 136353 - DNA, 20 bp, synthetic construct
  source 1..20: mol_type = other DNA
tgtatttaaatacacctgga

SEQ ID NO: 136354 - DNA, 20 bp, synthetic construct
  source 1..20: mol_type = other DNA
gtgtatttaaatacacctgg

SEQ ID NO: 136355 - DNA, 20 bp, synthetic construct
  source 1..20: mol_type = other DNA
agtgtatttaaatacacctg

SEQ ID NO: 136356 - DNA, 20 bp, synthetic construct
  source 1..20: mol_type = other DNA
gagtgtatttaaatacacct

SEQ ID NO: 136357 - DNA, 20 bp, synthetic construct
  source 1..20: mol_type = other DNA
tgagtgtatttaaatacacc

SEQ ID NO: 136358 - DNA, 20 bp, synthetic construct
  source 1..20: mol_type = other DNA
ttgagtgtatttaaatacac

SEQ ID NO: 136359 - DNA, 20 bp, synthetic construct
  source 1..20: mol_type = other DNA
tttgagtgtatttaaataca

SEQ ID NO: 136360 - DNA, 20 bp, synthetic construct
  source 1..20: mol_type = other DNA
atttgagtgtatttaaatac

SEQ ID NO: 136361 - DNA, 20 bp, synthetic construct
  source 1..20: mol_type = other DNA
tatttgagtgtatttaaata

SEQ ID NO: 136362 - DNA, 20 bp, synthetic construct
  source 1..20: mol_type = other DNA
gtatttgagtgtatttaaat

SEQ ID NO: 136363 - DNA, 20 bp, synthetic construct
  source 1..20: mol_type = other DNA
ggtatttgagtgtatttaaa

SEQ ID NO: 136364 - DNA, 20 bp, synthetic construct
  source 1..20: mol_type = other DNA
gggtatttgagtgtatttaa

SEQ ID NO: 136365 - DNA, 20 bp, synthetic construct
  source 1..20: mol_type = other DNA
agggtatttgagtgtattta

SEQ ID NO: 136366 - DNA, 20 bp, synthetic construct
  source 1..20: mol_type = other DNA
tagggtatttgagtgtattt

SEQ ID NO: 136367 - DNA, 20 bp, synthetic construct
  source 1..20: mol_type = other DNA
gtagggtatttgagtgtatt

SEQ ID NO: 136368 - DNA, 20 bp, synthetic construct
  source 1..20: mol_type = other DNA
ggtagggtatttgagtgtat

SEQ ID NO: 136369 - DNA, 20 bp, synthetic construct
  source 1..20: mol_type = other DNA
gggtagggtatttgagtgta

SEQ ID NO: 136370 - DNA, 20 bp, synthetic construct
  source 1..20: mol_type = other DNA
ggggtagggtatttgagtgt

SEQ ID NO: 136371 - DNA, 20 bp, synthetic construct
  source 1..20: mol_type = other DNA
aggggtagggtatttgagtg

SEQ ID NO: 136372 - DNA, 20 bp, synthetic construct
  source 1..20: mol_type = other DNA
aaggggtagggtatttgagt

SEQ ID NO: 136373 - DNA, 20 bp, synthetic construct
  source 1..20: mol_type = other DNA
aaaggggtagggtatttgag

SEQ ID NO: 136374 - DNA, 20 bp, synthetic construct
  source 1..20: mol_type = other DNA
taaaggggtagggtatttga

SEQ ID NO: 136375 - DNA, 20 bp, synthetic construct
  source 1..20: mol_type = other DNA
ataaaggggtagggtatttg

SEQ ID NO: 136376 - DNA, 20 bp, synthetic construct
  source 1..20: mol_type = other DNA
cataaaggggtagggtattt

SEQ ID NO: 136377 - DNA, 20 bp, synthetic construct
  source 1..20: mol_type = other DNA
acataaaggggtagggtatt

SEQ ID NO: 136378 - DNA, 20 bp, synthetic construct
  source 1..20: mol_type = other DNA
tacataaaggggtagggtat

SEQ ID NO: 136379 - DNA, 20 bp, synthetic construct
  source 1..20: mol_type = other DNA
ctacataaaggggtagggta

SEQ ID NO: 136380 - DNA, 20 bp, synthetic construct
  source 1..20: mol_type = other DNA
tctacataaaggggtagggt

SEQ ID NO: 136381 - DNA, 20 bp, synthetic construct
  source 1..20: mol_type = other DNA
gtctacataaaggggtaggg

SEQ ID NO: 136382 - DNA, 20 bp, synthetic construct
  source 1..20: mol_type = other DNA
tgtctacataaaggggtagg

SEQ ID NO: 136383 - DNA, 20 bp, synthetic construct
  source 1..20: mol_type = other DNA
atgtctacataaaggggtag

SEQ ID NO: 136384 - DNA, 20 bp, synthetic construct
  source 1..20: mol_type = other DNA
catgtctacataaaggggta

SEQ ID NO: 136385 - DNA, 20 bp, synthetic construct
  source 1..20: mol_type = other DNA
acatgtctacataaaggggt

SEQ ID NO: 136386 - DNA, 20 bp, synthetic construct
  source 1..20: mol_type = other DNA
aacatgtctacataaagggg

SEQ ID NO: 136387 - DNA, 20 bp, synthetic construct
  source 1..20: mol_type = other DNA
aaacatgtctacataaaggg

SEQ ID NO: 136388 - DNA, 20 bp, synthetic construct
  source 1..20: mol_type = other DNA
aaaacatgtctacataaagg

SEQ ID NO: 136389 - DNA, 20 bp, synthetic construct
  source 1..20: mol_type = other DNA
taaaacatgtctacataaag

SEQ ID NO: 136390 - DNA, 20 bp, synthetic construct
  source 1..20: mol_type = other DNA
ttaaaacatgtctacataaa

SEQ ID NO: 136391 - DNA, 20 bp, synthetic construct
  source 1..20: mol_type = other DNA
attaaaacatgtctacataa

SEQ ID NO: 136392 - DNA, 20 bp, synthetic construct
  source 1..20: mol_type = other DNA
tattaaaacatgtctacata

SEQ ID NO: 136393 - DNA, 20 bp, synthetic construct
  source 1..20: mol_type = other DNA
ttattaaaacatgtctacat

SEQ ID NO: 136394 - DNA, 20 bp, synthetic construct
  source 1..20: mol_type = other DNA
cttattaaaacatgtctaca

SEQ ID NO: 136395 - DNA, 20 bp, synthetic construct
  source 1..20: mol_type = other DNA
tcttattaaaacatgtctac

SEQ ID NO: 136396 - DNA, 20 bp, synthetic construct
  source 1..20: mol_type = other DNA
ttcttattaaaacatgtcta

SEQ ID NO: 136397 - DNA, 20 bp, synthetic construct
  source 1..20: mol_type = other DNA
tttcttattaaaacatgtct

SEQ ID NO: 136398 - DNA, 20 bp, synthetic construct
  source 1..20: mol_type = other DNA
atttcttattaaaacatgtc

SEQ ID NO: 136399 - DNA, 20 bp, synthetic construct
  source 1..20: mol_type = other DNA
tatttcttattaaaacatgt

SEQ ID NO: 136400 - DNA, 20 bp, synthetic construct
  source 1..20: mol_type = other DNA
ttatttcttattaaaacatg

SEQ ID NO: 136401 - DNA, 20 bp, synthetic construct
  source 1..20: mol_type = other DNA
attatttcttattaaaacat

SEQ ID NO: 136402 - DNA, 20 bp, synthetic construct
  source 1..20: mol_type = other DNA
tattatttcttattaaaaca

SEQ ID NO: 136403 - DNA, 20 bp, synthetic construct
  source 1..20: mol_type = other DNA
atattatttcttattaaaac

SEQ ID NO: 136404 - DNA, 20 bp, synthetic construct
  source 1..20: mol_type = other DNA
aatattatttcttattaaaa

SEQ ID NO: 136405 - DNA, 20 bp, synthetic construct
  source 1..20: mol_type = other DNA
gaatattatttcttattaaa

SEQ ID NO: 136406 - DNA, 20 bp, synthetic construct
  source 1..20: mol_type = other DNA
tgaatattatttcttattaa

SEQ ID NO: 136407 - DNA, 20 bp, synthetic construct
  source 1..20: mol_type = other DNA
atgaatattatttcttatta

SEQ ID NO: 136408 - DNA, 20 bp, synthetic construct
  source 1..20: mol_type = other DNA
catgaatattatttcttatt

SEQ ID NO: 136409 - DNA, 20 bp, synthetic construct
  source 1..20: mol_type = other DNA
acatgaatattatttcttat

SEQ ID NO: 136410 - DNA, 20 bp, synthetic construct
  source 1..20: mol_type = other DNA
aacatgaatattatttctta

SEQ ID NO: 136411 - DNA, 20 bp, synthetic construct
  source 1..20: mol_type = other DNA
aaacatgaatattatttctt

SEQ ID NO: 136412 - DNA, 20 bp, synthetic construct
  source 1..20: mol_type = other DNA
taaacatgaatattatttct

SEQ ID NO: 136413 - DNA, 20 bp, synthetic construct
  source 1..20: mol_type = other DNA
ataaacatgaatattatttc

SEQ ID NO: 136414 - DNA, 20 bp, synthetic construct
  source 1..20: mol_type = other DNA
tataaacatgaatattattt

SEQ ID NO: 136415 - DNA, 20 bp, synthetic construct
  source 1..20: mol_type = other DNA
atataaacatgaatattatt

SEQ ID NO: 136416 - DNA, 20 bp, synthetic construct
  source 1..20: mol_type = other DNA
aatataaacatgaatattat

SEQ ID NO: 136417 - DNA, 20 bp, synthetic construct
  source 1..20: mol_type = other DNA
gaatataaacatgaatatta

SEQ ID NO: 136418 - DNA, 20 bp, synthetic construct
  source 1..20: mol_type = other DNA
agaatataaacatgaatatt

SEQ ID NO: 136419 - DNA, 20 bp, synthetic construct
  source 1..20: mol_type = other DNA
aagaatataaacatgaatat

SEQ ID NO: 136420 - DNA, 20 bp, synthetic construct
  source 1..20: mol_type = other DNA
caagaatataaacatgaata

SEQ ID NO: 136421 - DNA, 20 bp, synthetic construct
  source 1..20: mol_type = other DNA
gcaagaatataaacatgaat

SEQ ID NO: 136422 - DNA, 20 bp, synthetic construct
  source 1..20: mol_type = other DNA
agcaagaatataaacatgaa

SEQ ID NO: 136423 - DNA, 20 bp, synthetic construct
  source 1..20: mol_type = other DNA
tagcaagaatataaacatga

SEQ ID NO: 136424 - DNA, 20 bp, synthetic construct
  source 1..20: mol_type = other DNA
atagcaagaatataaacatg

SEQ ID NO: 136425 - DNA, 20 bp, synthetic construct
  source 1..20: mol_type = other DNA
catagcaagaatataaacat

SEQ ID NO: 136426 - DNA, 20 bp, synthetic construct
  source 1..20: mol_type = other DNA
tcatagcaagaatataaaca

SEQ ID NO: 136427 - DNA, 20 bp, synthetic construct
  source 1..20: mol_type = other DNA
atcatagcaagaatataaac

SEQ ID NO: 136428 - DNA, 20 bp, synthetic construct
  source 1..20: mol_type = other DNA
gatcatagcaagaatataaa

SEQ ID NO: 136429 - DNA, 20 bp, synthetic construct
  source 1..20: mol_type = other DNA
ggatcatagcaagaatataa

SEQ ID NO: 136430 - DNA, 20 bp, synthetic construct
  source 1..20: mol_type = other DNA
aggatcatagcaagaatata

SEQ ID NO: 136431 - DNA, 20 bp, synthetic construct
  source 1..20: mol_type = other DNA
taggatcatagcaagaatat

SEQ ID NO: 136432 - DNA, 20 bp, synthetic construct
  source 1..20: mol_type = other DNA
ttaggatcatagcaagaata

SEQ ID NO: 136433 - DNA, 20 bp, synthetic construct
  source 1..20: mol_type = other DNA
tttaggatcatagcaagaat

SEQ ID NO: 136434 - DNA, 20 bp, synthetic construct
  source 1..20: mol_type = other DNA
atttaggatcatagcaagaa

SEQ ID NO: 136435 - DNA, 20 bp, synthetic construct
  source 1..20: mol_type = other DNA
aatttaggatcatagcaaga

SEQ ID NO: 136436 - DNA, 20 bp, synthetic construct
  source 1..20: mol_type = other DNA
aaatttaggatcatagcaag

SEQ ID NO: 136437 - DNA, 20 bp, synthetic construct
  source 1..20: mol_type = other DNA
aaaatttaggatcatagcaa

SEQ ID NO: 136438 - DNA, 20 bp, synthetic construct
  source 1..20: mol_type = other DNA
aaaaatttaggatcatagca

SEQ ID NO: 136439 - DNA, 20 bp, synthetic construct
  source 1..20: mol_type = other DNA
caaaaatttaggatcatagc

SEQ ID NO: 136440 - DNA, 20 bp, synthetic construct
  source 1..20: mol_type = other DNA
ccaaaaatttaggatcatag

SEQ ID NO: 136441 - DNA, 20 bp, synthetic construct
  source 1..20: mol_type = other DNA
tccaaaaatttaggatcata

SEQ ID NO: 136442 - DNA, 20 bp, synthetic construct
  source 1..20: mol_type = other DNA
atccaaaaatttaggatcat

SEQ ID NO: 136443 - DNA, 20 bp, synthetic construct
  source 1..20: mol_type = other DNA
gatccaaaaatttaggatca

SEQ ID NO: 136444 - DNA, 20 bp, synthetic construct
  source 1..20: mol_type = other DNA
ggatccaaaaatttaggatc

SEQ ID NO: 136445 - DNA, 20 bp, synthetic construct
  source 1..20: mol_type = other DNA
tggatccaaaaatttaggat

SEQ ID NO: 136446 - DNA, 20 bp, synthetic construct
  source 1..20: mol_type = other DNA
atggatccaaaaatttagga

SEQ ID NO: 136447 - DNA, 20 bp, synthetic construct
  source 1..20: mol_type = other DNA
aatggatccaaaaatttagg

SEQ ID NO: 136448 - DNA, 20 bp, synthetic construct
  source 1..20: mol_type = other DNA
taatggatccaaaaatttag

SEQ ID NO: 136449 - DNA, 20 bp, synthetic construct
  source 1..20: mol_type = other DNA
gtaatggatccaaaaattta

SEQ ID NO: 136450 - DNA, 20 bp, synthetic construct
  source 1..20: mol_type = other DNA
agtaatggatccaaaaattt

SEQ ID NO: 136451 - DNA, 20 bp, synthetic construct
  source 1..20: mol_type = other DNA
tagtaatggatccaaaaatt

SEQ ID NO: 136452 - DNA, 20 bp, synthetic construct
  source 1..20: mol_type = other DNA
ctagtaatggatccaaaaat

SEQ ID NO: 136453 - DNA, 20 bp, synthetic construct
  source 1..20: mol_type = other DNA
tctagtaatggatccaaaaa

SEQ ID NO: 136454 - DNA, 20 bp, synthetic construct
  source 1..20: mol_type = other DNA
atctagtaatggatccaaaa

SEQ ID NO: 136455 - DNA, 20 bp, synthetic construct
  source 1..20: mol_type = other DNA
tatctagtaatggatccaaa

SEQ ID NO: 136456 - DNA, 20 bp, synthetic construct
  source 1..20: mol_type = other DNA
ttatctagtaatggatccaa

SEQ ID NO: 136457 - DNA, 20 bp, synthetic construct
  source 1..20: mol_type = other DNA
attatctagtaatggatcca

SEQ ID NO: 136458 - DNA, 20 bp, synthetic construct
  source 1..20: mol_type = other DNA
gattatctagtaatggatcc

SEQ ID NO: 136459 - DNA, 20 bp, synthetic construct
  source 1..20: mol_type = other DNA
agattatctagtaatggatc

SEQ ID NO: 136460 - DNA, 20 bp, synthetic construct
  source 1..20: mol_type = other DNA
aagattatctagtaatggat

SEQ ID NO: 136461 - DNA, 20 bp, synthetic construct
  source 1..20: mol_type = other DNA
aaagattatctagtaatgga

SEQ ID NO: 136462 - DNA, 20 bp, synthetic construct
  source 1..20: mol_type = other DNA
gaaagattatctagtaatgg

SEQ ID NO: 136463 - DNA, 20 bp, synthetic construct
  source 1..20: mol_type = other DNA
tgaaagattatctagtaatg

SEQ ID NO: 136464 - DNA, 20 bp, synthetic construct
  source 1..20: mol_type = other DNA
ctgaaagattatctagtaat

SEQ ID NO: 136465 - DNA, 20 bp, synthetic construct
  source 1..20: mol_type = other DNA
cctgaaagattatctagtaa

SEQ ID NO: 136466 - DNA, 20 bp, synthetic construct
  source 1..20: mol_type = other DNA
tcctgaaagattatctagta

SEQ ID NO: 136467 - DNA, 20 bp, synthetic construct
  source 1..20: mol_type = other DNA
atcctgaaagattatctagt

SEQ ID NO: 136468 - DNA, 20 bp, synthetic construct
  source 1..20: mol_type = other DNA
tatcctgaaagattatctag

SEQ ID NO: 136469 - DNA, 20 bp, synthetic construct
  source 1..20: mol_type = other DNA
ttatcctgaaagattatcta

SEQ ID NO: 136470 - DNA, 20 bp, synthetic construct
  source 1..20: mol_type = other DNA
attatcctgaaagattatct

SEQ ID NO: 136471 - DNA, 20 bp, synthetic construct
  source 1..20: mol_type = other DNA
cattatcctgaaagattatc

SEQ ID NO: 136472 - DNA, 20 bp, synthetic construct
  source 1..20: mol_type = other DNA
tcattatcctgaaagattat

SEQ ID NO: 136473 - DNA, 20 bp, synthetic construct
  source 1..20: mol_type = other DNA
gtcattatcctgaaagatta

SEQ ID NO: 136474 - DNA, 20 bp, synthetic construct
  source 1..20: mol_type = other DNA
tgtcattatcctgaaagatt

SEQ ID NO: 136475 - DNA, 20 bp, synthetic construct
  source 1..20: mol_type = other DNA
atgtcattatcctgaaagat

SEQ ID NO: 136476 - DNA, 20 bp, synthetic construct
  source 1..20: mol_type = other DNA
aatgtcattatcctgaaaga

SEQ ID NO: 136477 - DNA, 20 bp, synthetic construct
  source 1..20: mol_type = other DNA
aaatgtcattatcctgaaag

SEQ ID NO: 136478 - DNA, 20 bp, synthetic construct
  source 1..20: mol_type = other DNA
gaaatgtcattatcctgaaa

SEQ ID NO: 136479 - DNA, 20 bp, synthetic construct
  source 1..20: mol_type = other DNA
ggaaatgtcattatcctgaa

SEQ ID NO: 136480 - DNA, 20 bp, synthetic construct
  source 1..20: mol_type = other DNA
tggaaatgtcattatcctga

SEQ ID NO: 136481 - DNA, 20 bp, synthetic construct
  source 1..20: mol_type = other DNA
atggaaatgtcattatcctg

SEQ ID NO: 136482 - DNA, 20 bp, synthetic construct
  source 1..20: mol_type = other DNA
aatggaaatgtcattatcct

SEQ ID NO: 136483 - DNA, 20 bp, synthetic construct
  source 1..20: mol_type = other DNA
taatggaaatgtcattatcc

SEQ ID NO: 136484 - DNA, 20 bp, synthetic construct
  source 1..20: mol_type = other DNA
ctaatggaaatgtcattatc

SEQ ID NO: 136485 - DNA, 20 bp, synthetic construct
  source 1..20: mol_type = other DNA
actaatggaaatgtcattat

SEQ ID NO: 136486 - DNA, 20 bp, synthetic construct
  source 1..20: mol_type = other DNA
tactaatggaaatgtcatta

SEQ ID NO: 136487 - DNA, 20 bp, synthetic construct
  source 1..20: mol_type = other DNA
ttactaatggaaatgtcatt

SEQ ID NO: 136488 - DNA, 20 bp, synthetic construct
  source 1..20: mol_type = other DNA
attactaatggaaatgtcat

SEQ ID NO: 136489 - DNA, 20 bp, synthetic construct
  source 1..20: mol_type = other DNA
cattactaatggaaatgtca

SEQ ID NO: 136490 - DNA, 20 bp, synthetic construct
  source 1..20: mol_type = other DNA
acattactaatggaaatgtc

SEQ ID NO: 136491 - DNA, 20 bp, synthetic construct
  source 1..20: mol_type = other DNA
aacattactaatggaaatgt

SEQ ID NO: 136492 - DNA, 20 bp, synthetic construct
  source 1..20: mol_type = other DNA
aaacattactaatggaaatg

SEQ ID NO: 136493 - DNA, 20 bp, synthetic construct
  source 1..20: mol_type = other DNA
aaaacattactaatggaaat

SEQ ID NO: 136494 - DNA, 20 bp, synthetic construct
  source 1..20: mol_type = other DNA
aaaaacattactaatggaaa

SEQ ID NO: 136495 - DNA, 20 bp, synthetic construct
  source 1..20: mol_type = other DNA
caaaaacattactaatggaa

SEQ ID NO: 136496 - DNA, 20 bp, synthetic construct
  source 1..20: mol_type = other DNA
gcaaaaacattactaatgga

SEQ ID NO: 136497 - DNA, 20 bp, synthetic construct
  source 1..20: mol_type = other DNA
tgcaaaaacattactaatgg

SEQ ID NO: 136498 - DNA, 20 bp, synthetic construct
  source 1..20: mol_type = other DNA
ttgcaaaaacattactaatg

SEQ ID NO: 136499 - DNA, 20 bp, synthetic construct
  source 1..20: mol_type = other DNA
tttgcaaaaacattactaat

SEQ ID NO: 136500 - DNA, 20 bp, synthetic construct
  source 1..20: mol_type = other DNA
ttttgcaaaaacattactaa

SEQ ID NO: 136501 - DNA, 20 bp, synthetic construct
  source 1..20: mol_type = other DNA
attttgcaaaaacattacta

SEQ ID NO: 136502 - DNA, 20 bp, synthetic construct
  source 1..20: mol_type = other DNA
aattttgcaaaaacattact

SEQ ID NO: 136503 - DNA, 20 bp, synthetic construct
  source 1..20: mol_type = other DNA
caattttgcaaaaacattac

SEQ ID NO: 136504 - DNA, 20 bp, synthetic construct
  source 1..20: mol_type = other DNA
acaattttgcaaaaacatta

SEQ ID NO: 136505 - DNA, 20 bp, synthetic construct
  source 1..20: mol_type = other DNA
cacaattttgcaaaaacatt

SEQ ID NO: 136506 - DNA, 20 bp, synthetic construct
  source 1..20: mol_type = other DNA
acacaattttgcaaaaacat

SEQ ID NO: 136507 - DNA, 20 bp, synthetic construct
  source 1..20: mol_type = other DNA
cacacaattttgcaaaaaca

SEQ ID NO: 136508 - DNA, 20 bp, synthetic construct
  source 1..20: mol_type = other DNA
acacacaattttgcaaaaac

SEQ ID NO: 136509 - DNA, 20 bp, synthetic construct
  source 1..20: mol_type = other DNA
gacacacaattttgcaaaaa

SEQ ID NO: 136510 - DNA, 20 bp, synthetic construct
  source 1..20: mol_type = other DNA
agacacacaattttgcaaaa

SEQ ID NO: 136511 - DNA, 20 bp, synthetic construct
  source 1..20: mol_type = other DNA
tagacacacaattttgcaaa

SEQ ID NO: 136512 - DNA, 20 bp, synthetic construct
  source 1..20: mol_type = other DNA
atagacacacaattttgcaa

SEQ ID NO: 136513 - DNA, 20 bp, synthetic construct
  source 1..20: mol_type = other DNA
aatagacacacaattttgca

SEQ ID NO: 136514 - DNA, 20 bp, synthetic construct
  source 1..20: mol_type = other DNA
caatagacacacaattttgc

SEQ ID NO: 136515 - DNA, 20 bp, synthetic construct
  source 1..20: mol_type = other DNA
tcaatagacacacaattttg

SEQ ID NO: 136516 - DNA, 20 bp, synthetic construct
  source 1..20: mol_type = other DNA
ttcaatagacacacaatttt

SEQ ID NO: 136517 - DNA, 20 bp, synthetic construct
  source 1..20: mol_type = other DNA
attcaatagacacacaattt

SEQ ID NO: 136518 - DNA, 20 bp, synthetic construct
  source 1..20: mol_type = other DNA
aattcaatagacacacaatt

SEQ ID NO: 136519 - DNA, 20 bp, synthetic construct
  source 1..20: mol_type = other DNA
taattcaatagacacacaat

SEQ ID NO: 136520 - DNA, 20 bp, synthetic construct
  source 1..20: mol_type = other DNA
ttaattcaatagacacacaa

SEQ ID NO: 136521 - DNA, 20 bp, synthetic construct
  source 1..20: mol_type = other DNA
tttaattcaatagacacaca

SEQ ID NO: 136522 - DNA, 20 bp, synthetic construct
  source 1..20: mol_type = other DNA
gtttaattcaatagacacac

SEQ ID NO: 136523 - DNA, 20 bp, synthetic construct
  source 1..20: mol_type = other DNA
agtttaattcaatagacaca

SEQ ID NO: 136524 - DNA, 20 bp, synthetic construct
  source 1..20: mol_type = other DNA
aagtttaattcaatagacac

SEQ ID NO: 136525 - DNA, 20 bp, synthetic construct
  source 1..20: mol_type = other DNA
caagtttaattcaatagaca

SEQ ID NO: 136526 - DNA, 20 bp, synthetic construct
  source 1..20: mol_type = other DNA
acaagtttaattcaatagac

SEQ ID NO: 136527 - DNA, 20 bp, synthetic construct
  source 1..20: mol_type = other DNA
tacaagtttaattcaataga

SEQ ID NO: 136528 - DNA, 20 bp, synthetic construct
  source 1..20: mol_type = other DNA
ttacaagtttaattcaatag

SEQ ID NO: 136529 - DNA, 20 bp, synthetic construct
  source 1..20: mol_type = other DNA
tttacaagtttaattcaata

SEQ ID NO: 136530 - DNA, 20 bp, synthetic construct
  source 1..20: mol_type = other DNA
ttttacaagtttaattcaat

SEQ ID NO: 136531 - DNA, 20 bp, synthetic construct
  source 1..20: mol_type = other DNA
attttacaagtttaattcaa

SEQ ID NO: 136532 - DNA, 20 bp, synthetic construct
  source 1..20: mol_type = other DNA
tattttacaagtttaattca

SEQ ID NO: 136533 - DNA, 20 bp, synthetic construct
  source 1..20: mol_type = other DNA
ctattttacaagtttaattc

SEQ ID NO: 136534 - DNA, 20 bp, synthetic construct
  source 1..20: mol_type = other DNA
actattttacaagtttaatt

SEQ ID NO: 136535 - DNA, 20 bp, synthetic construct
  source 1..20: mol_type = other DNA
aactattttacaagtttaat

SEQ ID NO: 136536 - DNA, 20 bp, synthetic construct
  source 1..20: mol_type = other DNA
aaactattttacaagtttaa

SEQ ID NO: 136537 - DNA, 20 bp, synthetic construct
  source 1..20: mol_type = other DNA
aaaactattttacaagttta

SEQ ID NO: 136538 - DNA, 20 bp, synthetic construct
  source 1..20: mol_type = other DNA
taaaactattttacaagttt

SEQ ID NO: 136539 - DNA, 20 bp, synthetic construct
  source 1..20: mol_type = other DNA
ataaaactattttacaagtt

SEQ ID NO: 136540 - DNA, 20 bp, synthetic construct
  source 1..20: mol_type = other DNA
aataaaactattttacaagt

SEQ ID NO: 136541 - DNA, 20 bp, synthetic construct
  source 1..20: mol_type = other DNA
aaataaaactattttacaag

SEQ ID NO: 136542 - DNA, 20 bp, synthetic construct
  source 1..20: mol_type = other DNA
aaaataaaactattttacaa

SEQ ID NO: 136543 - DNA, 20 bp, synthetic construct
  source 1..20: mol_type = other DNA
caaaataaaactattttaca

SEQ ID NO: 136544 - DNA, 20 bp, synthetic construct
  source 1..20: mol_type = other DNA
ccaaaataaaactattttac

SEQ ID NO: 136545 - DNA, 20 bp, synthetic construct
  source 1..20: mol_type = other DNA
accaaaataaaactatttta

SEQ ID NO: 136546 - DNA, 20 bp, synthetic construct
  source 1..20: mol_type = other DNA
taccaaaataaaactatttt

SEQ ID NO: 136547 - DNA, 20 bp, synthetic construct
  source 1..20: mol_type = other DNA
gtaccaaaataaaactattt

SEQ ID NO: 136548 - DNA, 20 bp, synthetic construct
  source 1..20: mol_type = other DNA
tgtaccaaaataaaactatt

SEQ ID NO: 136549 - DNA, 20 bp, synthetic construct
  source 1..20: mol_type = other DNA
atgtaccaaaataaaactat

SEQ ID NO: 136550 - DNA, 20 bp, synthetic construct
  source 1..20: mol_type = other DNA
catgtaccaaaataaaacta

SEQ ID NO: 136551 - DNA, 20 bp, synthetic construct
  source 1..20: mol_type = other DNA
tcatgtaccaaaataaaact

SEQ ID NO: 136552 - DNA, 20 bp, synthetic construct
  source 1..20: mol_type = other DNA
atcatgtaccaaaataaaac

SEQ ID NO: 136553 - DNA, 20 bp, synthetic construct
  source 1..20: mol_type = other DNA
aatcatgtaccaaaataaaa

SEQ ID NO: 136554 - DNA, 20 bp, synthetic construct
  source 1..20: mol_type = other DNA
aaatcatgtaccaaaataaa

SEQ ID NO: 136555 - DNA, 20 bp, synthetic construct
  source 1..20: mol_type = other DNA
taaatcatgtaccaaaataa

SEQ ID NO: 136556 - DNA, 20 bp, synthetic construct
  source 1..20: mol_type = other DNA
ataaatcatgtaccaaaata

SEQ ID NO: 136557 - DNA, 20 bp, synthetic construct
  source 1..20: mol_type = other DNA
tataaatcatgtaccaaaat

SEQ ID NO: 136558 - DNA, 20 bp, synthetic construct
  source 1..20: mol_type = other DNA
atataaatcatgtaccaaaa

SEQ ID NO: 136559 - DNA, 20 bp, synthetic construct
  source 1..20: mol_type = other DNA
gatataaatcatgtaccaaa

SEQ ID NO: 136560 - DNA, 20 bp, synthetic construct
  source 1..20: mol_type = other DNA
tgatataaatcatgtaccaa

SEQ ID NO: 136561 - DNA, 20 bp, synthetic construct
  source 1..20: mol_type = other DNA
ttgatataaatcatgtacca

SEQ ID NO: 136562 - DNA, 20 bp, synthetic construct
  source 1..20: mol_type = other DNA
cttgatataaatcatgtacc

SEQ ID NO: 136563 - DNA, 20 bp, synthetic construct
  source 1..20: mol_type = other DNA
ccttgatataaatcatgtac

SEQ ID NO: 136564 - DNA, 20 bp, synthetic construct
  source 1..20: mol_type = other DNA
accttgatataaatcatgta

SEQ ID NO: 136565 - DNA, 20 bp, synthetic construct
  source 1..20: mol_type = other DNA
aaccttgatataaatcatgt

SEQ ID NO: 136566 - DNA, 20 bp, synthetic construct
  source 1..20: mol_type = other DNA
caaccttgatataaatcatg

SEQ ID NO: 136567 - DNA, 20 bp, synthetic construct
  source 1..20: mol_type = other DNA
acaaccttgatataaatcat

SEQ ID NO: 136568 - DNA, 20 bp, synthetic construct
  source 1..20: mol_type = other DNA
aacaaccttgatataaatca

SEQ ID NO: 136569 - DNA, 20 bp, synthetic construct
  source 1..20: mol_type = other DNA
gaacaaccttgatataaatc

SEQ ID NO: 136570 - DNA, 20 bp, synthetic construct
  source 1..20: mol_type = other DNA
tgaacaaccttgatataaat

SEQ ID NO: 136571 - DNA, 20 bp, synthetic construct
  source 1..20: mol_type = other DNA
ctgaacaaccttgatataaa

SEQ ID NO: 136572 - DNA, 20 bp, synthetic construct
  source 1..20: mol_type = other DNA
actgaacaaccttgatataa

SEQ ID NO: 136573 - DNA, 20 bp, synthetic construct
  source 1..20: mol_type = other DNA
tactgaacaaccttgatata

SEQ ID NO: 136574 - DNA, 20 bp, synthetic construct
  source 1..20: mol_type = other DNA
ctactgaacaaccttgatat

SEQ ID NO: 136575 - DNA, 20 bp, synthetic construct
  source 1..20: mol_type = other DNA
tctactgaacaaccttgata

SEQ ID NO: 136576 - DNA, 20 bp, synthetic construct
  source 1..20: mol_type = other DNA
ttctactgaacaaccttgat

SEQ ID NO: 136577 - DNA, 20 bp, synthetic construct
  source 1..20: mol_type = other DNA
attctactgaacaaccttga

SEQ ID NO: 136578 - DNA, 20 bp, synthetic construct
  source 1..20: mol_type = other DNA
cattctactgaacaaccttg

SEQ ID NO: 136579 - DNA, 20 bp, synthetic construct
  source 1..20: mol_type = other DNA
gcattctactgaacaacctt

SEQ ID NO: 136580 - DNA, 20 bp, synthetic construct
  source 1..20: mol_type = other DNA
ggcattctactgaacaacct

SEQ ID NO: 136581 - DNA, 20 bp, synthetic construct
  source 1..20: mol_type = other DNA
tggcattctactgaacaacc

SEQ ID NO: 136582 - DNA, 20 bp, synthetic construct
  source 1..20: mol_type = other DNA
atggcattctactgaacaac

SEQ ID NO: 136583 - DNA, 20 bp, synthetic construct
  source 1..20: mol_type = other DNA
catggcattctactgaacaa

SEQ ID NO: 136584 - DNA, 20 bp, synthetic construct
  source 1..20: mol_type = other DNA
acatggcattctactgaaca

SEQ ID NO: 136585 - DNA, 20 bp, synthetic construct
  source 1..20: mol_type = other DNA
aacatggcattctactgaac

SEQ ID NO: 136586 - DNA, 20 bp, synthetic construct
  source 1..20: mol_type = other DNA
caacatggcattctactgaa

SEQ ID NO: 136587 - DNA, 20 bp, synthetic construct
  source 1..20: mol_type = other DNA
ccaacatggcattctactga

SEQ ID NO: 136588 - DNA, 20 bp, synthetic construct
  source 1..20: mol_type = other DNA
accaacatggcattctactg

SEQ ID NO: 136589 - DNA, 20 bp, synthetic construct
  source 1..20: mol_type = other DNA
caccaacatggcattctact

SEQ ID NO: 136590 - DNA, 20 bp, synthetic construct
  source 1..20: mol_type = other DNA
acaccaacatggcattctac

SEQ ID NO: 136591 - DNA, 20 bp, synthetic construct
  source 1..20: mol_type = other DNA
aacaccaacatggcattcta

SEQ ID NO: 136592 - DNA, 20 bp, synthetic construct
  source 1..20: mol_type = other DNA
aaacaccaacatggcattct

SEQ ID NO: 136593 - DNA, 20 bp, synthetic construct
  source 1..20: mol_type = other DNA
aaaacaccaacatggcattc

SEQ ID NO: 136594 - DNA, 20 bp, synthetic construct
  source 1..20: mol_type = other DNA
aaaaacaccaacatggcatt

SEQ ID NO: 136595 - DNA, 20 bp, synthetic construct
  source 1..20: mol_type = other DNA
taaaaacaccaacatggcat

SEQ ID NO: 136596 - DNA, 20 bp, synthetic construct
  source 1..20: mol_type = other DNA
ataaaaacaccaacatggca

SEQ ID NO: 136597 - DNA, 20 bp, synthetic construct
  source 1..20: mol_type = other DNA
aataaaaacaccaacatggc

SEQ ID NO: 136598 - DNA, 20 bp, synthetic construct
  source 1..20: mol_type = other DNA
taataaaaacaccaacatgg

SEQ ID NO: 136599 - DNA, 20 bp, synthetic construct
  source 1..20: mol_type = other DNA
ctaataaaaacaccaacatg

SEQ ID NO: 136600 - DNA, 20 bp, synthetic construct
  source 1..20: mol_type = other DNA
tctaataaaaacaccaacat

SEQ ID NO: 136601 - DNA, 20 bp, synthetic construct
  source 1..20: mol_type = other DNA
atctaataaaaacaccaaca

SEQ ID NO: 136602 - DNA, 20 bp, synthetic construct
  source 1..20: mol_type = other DNA
tatctaataaaaacaccaac

SEQ ID NO: 136603 - DNA, 20 bp, synthetic construct
  source 1..20: mol_type = other DNA
ttatctaataaaaacaccaa

SEQ ID NO: 136604 - DNA, 20 bp, synthetic construct
  source 1..20: mol_type = other DNA
attatctaataaaaacacca

SEQ ID NO: 136605 - DNA, 20 bp, synthetic construct
  source 1..20: mol_type = other DNA
cattatctaataaaaacacc

SEQ ID NO: 136606 - DNA, 20 bp, synthetic construct
  source 1..20: mol_type = other DNA
tcattatctaataaaaacac

SEQ ID NO: 136607 - DNA, 20 bp, synthetic construct
  source 1..20: mol_type = other DNA
atcattatctaataaaaaca

SEQ ID NO: 136608 - DNA, 20 bp, synthetic construct
  source 1..20: mol_type = other DNA
aatcattatctaataaaaac

SEQ ID NO: 136609 - DNA, 20 bp, synthetic construct
  source 1..20: mol_type = other DNA
aaatcattatctaataaaaa

SEQ ID NO: 136610 - DNA, 20 bp, synthetic construct
  source 1..20: mol_type = other DNA
aaaatcattatctaataaaa

SEQ ID NO: 136611 - DNA, 20 bp, synthetic construct
  source 1..20: mol_type = other DNA
taaaatcattatctaataaa

SEQ ID NO: 136612 - DNA, 20 bp, synthetic construct
  source 1..20: mol_type = other DNA
ataaaatcattatctaataa

SEQ ID NO: 136613 - DNA, 20 bp, synthetic construct
  source 1..20: mol_type = other DNA
aataaaatcattatctaata

SEQ ID NO: 136614 - DNA, 20 bp, synthetic construct
  source 1..20: mol_type = other DNA
gaataaaatcattatctaat

SEQ ID NO: 136615 - DNA, 20 bp, synthetic construct
  source 1..20: mol_type = other DNA
ggaataaaatcattatctaa

SEQ ID NO: 136616 - DNA, 20 bp, synthetic construct
  source 1..20: mol_type = other DNA
aggaataaaatcattatcta

SEQ ID NO: 136617 - DNA, 20 bp, synthetic construct
  source 1..20: mol_type = other DNA
aaggaataaaatcattatct

SEQ ID NO: 136618 - DNA, 20 bp, synthetic construct
  source 1..20: mol_type = other DNA
aaaggaataaaatcattatc

SEQ ID NO: 136619 - DNA, 20 bp, synthetic construct
  source 1..20: mol_type = other DNA
aaaaggaataaaatcattat

SEQ ID NO: 136620 - DNA, 20 bp, synthetic construct
  source 1..20: mol_type = other DNA
taaaaggaataaaatcatta

SEQ ID NO: 136621 - DNA, 20 bp, synthetic construct
  source 1..20: mol_type = other DNA
gtaaaaggaataaaatcatt

SEQ ID NO: 136622 - DNA, 20 bp, synthetic construct
  source 1..20: mol_type = other DNA
agtaaaaggaataaaatcat

SEQ ID NO: 136623 - DNA, 20 bp, synthetic construct
  source 1..20: mol_type = other DNA
aagtaaaaggaataaaatca

SEQ ID NO: 136624 - DNA, 20 bp, synthetic construct
  source 1..20: mol_type = other DNA
aaagtaaaaggaataaaatc

SEQ ID NO: 136625 - DNA, 20 bp, synthetic construct
  source 1..20: mol_type = other DNA
aaaagtaaaaggaataaaat

SEQ ID NO: 136626 - DNA, 20 bp, synthetic construct
  source 1..20: mol_type = other DNA
taaaagtaaaaggaataaaa

SEQ ID NO: 136627 - DNA, 20 bp, synthetic construct
  source 1..20: mol_type = other DNA
ttaaaagtaaaaggaataaa

SEQ ID NO: 136628 - DNA, 20 bp, synthetic construct
  source 1..20: mol_type = other DNA
cttaaaagtaaaaggaataa

SEQ ID NO: 136629 - DNA, 20 bp, synthetic construct
  source 1..20: mol_type = other DNA
gcttaaaagtaaaaggaata

SEQ ID NO: 136630 - DNA, 20 bp, synthetic construct
  source 1..20: mol_type = other DNA
tgcttaaaagtaaaaggaat

SEQ ID NO: 136631 - DNA, 20 bp, synthetic construct
  source 1..20: mol_type = other DNA
ttgcttaaaagtaaaaggaa

SEQ ID NO: 136632 - DNA, 20 bp, synthetic construct
  source 1..20: mol_type = other DNA
cttgcttaaaagtaaaagga

SEQ ID NO: 136633 - DNA, 20 bp, synthetic construct
  source 1..20: mol_type = other DNA
acttgcttaaaagtaaaagg

SEQ ID NO: 136634 - DNA, 20 bp, synthetic construct
  source 1..20: mol_type = other DNA
gacttgcttaaaagtaaaag

SEQ ID NO: 136635 - DNA, 20 bp, synthetic construct
  source 1..20: mol_type = other DNA
tgacttgcttaaaagtaaaa

SEQ ID NO: 136636 - DNA, 20 bp, synthetic construct
  source 1..20: mol_type = other DNA
ctgacttgcttaaaagtaaa

SEQ ID NO: 136637 - DNA, 20 bp, synthetic construct
  source 1..20: mol_type = other DNA
gctgacttgcttaaaagtaa

SEQ ID NO: 136638 - DNA, 20 bp, synthetic construct
  source 1..20: mol_type = other DNA
tgctgacttgcttaaaagta

SEQ ID NO: 136639 - DNA, 20 bp, synthetic construct
  source 1..20: mol_type = other DNA
atgctgacttgcttaaaagt

SEQ ID NO: 136640 - DNA, 20 bp, synthetic construct
  source 1..20: mol_type = other DNA
catgctgacttgcttaaaag

SEQ ID NO: 136641 - DNA, 20 bp, synthetic construct
  source 1..20: mol_type = other DNA
tcatgctgacttgcttaaaa

SEQ ID NO: 136642 - DNA, 20 bp, synthetic construct
  source 1..20: mol_type = other DNA
gtcatgctgacttgcttaaa

SEQ ID NO: 136643 - DNA, 20 bp, synthetic construct
  source 1..20: mol_type = other DNA
tgtcatgctgacttgcttaa

SEQ ID NO: 136644 - DNA, 20 bp, synthetic construct
  source 1..20: mol_type = other DNA
ttgtcatgctgacttgctta

SEQ ID NO: 136645 - DNA, 20 bp, synthetic construct
  source 1..20: mol_type = other DNA
gttgtcatgctgacttgctt

SEQ ID NO: 136646 - DNA, 20 bp, synthetic construct
  source 1..20: mol_type = other DNA
agttgtcatgctgacttgct

SEQ ID NO: 136647 - DNA, 20 bp, synthetic construct
  source 1..20: mol_type = other DNA
aagttgtcatgctgacttgc

SEQ ID NO: 136648 - DNA, 20 bp, synthetic construct
  source 1..20: mol_type = other DNA
caagttgtcatgctgacttg

SEQ ID NO: 136649 - DNA, 20 bp, synthetic construct
  source 1..20: mol_type = other DNA
tcaagttgtcatgctgactt

SEQ ID NO: 136650 - DNA, 20 bp, synthetic construct
  source 1..20: mol_type = other DNA
gtcaagttgtcatgctgact

SEQ ID NO: 136651 - DNA, 20 bp, synthetic construct
  source 1..20: mol_type = other DNA
tgtcaagttgtcatgctgac

SEQ ID NO: 136652 - DNA, 20 bp, synthetic construct
  source 1..20: mol_type = other DNA
gtgtcaagttgtcatgctga

SEQ ID NO: 136653 - DNA, 20 bp, synthetic construct
  source 1..20: mol_type = other DNA
ggtgtcaagttgtcatgctg

SEQ ID NO: 136654 - DNA, 20 bp, synthetic construct
  source 1..20: mol_type = other DNA
aggtgtcaagttgtcatgct

SEQ ID NO: 136655 - DNA, 20 bp, synthetic construct
  source 1..20: mol_type = other DNA
taggtgtcaagttgtcatgc

SEQ ID NO: 136656 - DNA, 20 bp, synthetic construct
  source 1..20: mol_type = other DNA
ttaggtgtcaagttgtcatg

SEQ ID NO: 136657 - DNA, 20 bp, synthetic construct
  source 1..20: mol_type = other DNA
cttaggtgtcaagttgtcat

SEQ ID NO: 136658 - DNA, 20 bp, synthetic construct
  source 1..20: mol_type = other DNA
acttaggtgtcaagttgtca

SEQ ID NO: 136659 - DNA, 20 bp, synthetic construct
  source 1..20: mol_type = other DNA
tacttaggtgtcaagttgtc

SEQ ID NO: 136660 - DNA, 20 bp, synthetic construct
  source 1..20: mol_type = other DNA
gtacttaggtgtcaagttgt

SEQ ID NO: 136661 - DNA, 20 bp, synthetic construct
  source 1..20: mol_type = other DNA
tgtacttaggtgtcaagttg

SEQ ID NO: 136662 - DNA, 20 bp, synthetic construct
  source 1..20: mol_type = other DNA
ctgtacttaggtgtcaagtt

SEQ ID NO: 136663 - DNA, 20 bp, synthetic construct
  source 1..20: mol_type = other DNA
tctgtacttaggtgtcaagt

SEQ ID NO: 136664 - DNA, 20 bp, synthetic construct
  source 1..20: mol_type = other DNA
ttctgtacttaggtgtcaag

SEQ ID NO: 136665 - DNA, 20 bp, synthetic construct
  source 1..20: mol_type = other DNA
cttctgtacttaggtgtcaa

SEQ ID NO: 136666 - DNA, 20 bp, synthetic construct
  source 1..20: mol_type = other DNA
tcttctgtacttaggtgtca

SEQ ID NO: 136667 - DNA, 20 bp, synthetic construct
  source 1..20: mol_type = other DNA
ttcttctgtacttaggtgtc

SEQ ID NO: 136668 - DNA, 20 bp, synthetic construct
  source 1..20: mol_type = other DNA
gttcttctgtacttaggtgt

SEQ ID NO: 136669 - DNA, 20 bp, synthetic construct
  source 1..20: mol_type = other DNA
tgttcttctgtacttaggtg

SEQ ID NO: 136670 - DNA, 20 bp, synthetic construct
  source 1..20: mol_type = other DNA
ctgttcttctgtacttaggt

SEQ ID NO: 136671 - DNA, 20 bp, synthetic construct
  source 1..20: mol_type = other DNA
actgttcttctgtacttagg

SEQ ID NO: 136672 - DNA, 20 bp, synthetic construct
  source 1..20: mol_type = other DNA
cactgttcttctgtacttag

SEQ ID NO: 136673 - DNA, 20 bp, synthetic construct
  source 1..20: mol_type = other DNA
acactgttcttctgtactta

SEQ ID NO: 136674 - DNA, 20 bp, synthetic construct
  source 1..20: mol_type = other DNA
gacactgttcttctgtactt

SEQ ID NO: 136675 - DNA, 20 bp, synthetic construct
  source 1..20: mol_type = other DNA
agacactgttcttctgtact

SEQ ID NO: 136676 - DNA, 20 bp, synthetic construct
  source 1..20: mol_type = other DNA
aagacactgttcttctgtac

SEQ ID NO: 136677 - DNA, 20 bp, synthetic construct
  source 1..20: mol_type = other DNA
gaagacactgttcttctgta

SEQ ID NO: 136678 - DNA, 20 bp, synthetic construct
  source 1..20: mol_type = other DNA
ggaagacactgttcttctgt

SEQ ID NO: 136679 - DNA, 20 bp, synthetic construct
  source 1..20: mol_type = other DNA
cggaagacactgttcttctg

SEQ ID NO: 136680 - DNA, 20 bp, synthetic construct
  source 1..20: mol_type = other DNA
ccggaagacactgttcttct

SEQ ID NO: 136681 - DNA, 20 bp, synthetic construct
  source 1..20: mol_type = other DNA
accggaagacactgttcttc

SEQ ID NO: 136682 - DNA, 20 bp, synthetic construct
  source 1..20: mol_type = other DNA
aaccggaagacactgttctt

SEQ ID NO: 136683 - DNA, 20 bp, synthetic construct
  source 1..20: mol_type = other DNA
aaaccggaagacactgttct

SEQ ID NO: 136684 - DNA, 20 bp, synthetic construct
  source 1..20: mol_type = other DNA
taaaccggaagacactgttc

SEQ ID NO: 136685 - DNA, 20 bp, synthetic construct
  source 1..20: mol_type = other DNA
ctaaaccggaagacactgtt

SEQ ID NO: 136686 - DNA, 20 bp, synthetic construct
  source 1..20: mol_type = other DNA
actaaaccggaagacactgt

SEQ ID NO: 136687 - DNA, 20 bp, synthetic construct
  source 1..20: mol_type = other DNA
gactaaaccggaagacactg

SEQ ID NO: 136688 - DNA, 20 bp, synthetic construct
  source 1..20: mol_type = other DNA
ggactaaaccggaagacact

SEQ ID NO: 136689 - DNA, 20 bp, synthetic construct
  source 1..20: mol_type = other DNA
aggactaaaccggaagacac

SEQ ID NO: 136690 - DNA, 20 bp, synthetic construct
  source 1..20: mol_type = other DNA
aaggactaaaccggaagaca

SEQ ID NO: 136691 - DNA, 20 bp, synthetic construct
  source 1..20: mol_type = other DNA
aaaggactaaaccggaagac

SEQ ID NO: 136692 - DNA, 20 bp, synthetic construct
  source 1..20: mol_type = other DNA
gaaaggactaaaccggaaga

SEQ ID NO: 136693 - DNA, 20 bp, synthetic construct
  source 1..20: mol_type = other DNA
agaaaggactaaaccggaag

SEQ ID NO: 136694 - DNA, 20 bp, synthetic construct
  source 1..20: mol_type = other DNA
aagaaaggactaaaccggaa

SEQ ID NO: 136695 - DNA, 20 bp, synthetic construct
  source 1..20: mol_type = other DNA
aaagaaaggactaaaccgga

SEQ ID NO: 136696 - DNA, 20 bp, synthetic construct
  source 1..20: mol_type = other DNA
aaaagaaaggactaaaccgg

SEQ ID NO: 136697 - DNA, 20 bp, synthetic construct
  source 1..20: mol_type = other DNA
taaaagaaaggactaaaccg

SEQ ID NO: 136698 - DNA, 20 bp, synthetic construct
  source 1..20: mol_type = other DNA
ttaaaagaaaggactaaacc

SEQ ID NO: 136699 - DNA, 20 bp, synthetic construct
  source 1..20: mol_type = other DNA
tttaaaagaaaggactaaac

SEQ ID NO: 136700 - DNA, 20 bp, synthetic construct
  source 1..20: mol_type = other DNA
ttttaaaagaaaggactaaa

SEQ ID NO: 136701 - DNA, 20 bp, synthetic construct
  source 1..20: mol_type = other DNA
attttaaaagaaaggactaa

SEQ ID NO: 136702 - DNA, 20 bp, synthetic construct
  source 1..20: mol_type = other DNA
aattttaaaagaaaggacta

SEQ ID NO: 136703 - DNA, 20 bp, synthetic construct
  source 1..20: mol_type = other DNA
gaattttaaaagaaaggact

SEQ ID NO: 136704 - DNA, 20 bp, synthetic construct
  source 1..20: mol_type = other DNA
agaattttaaaagaaaggac

SEQ ID NO: 136705 - DNA, 20 bp, synthetic construct
  source 1..20: mol_type = other DNA
cagaattttaaaagaaagga

SEQ ID NO: 136706 - DNA, 20 bp, synthetic construct
  source 1..20: mol_type = other DNA
acagaattttaaaagaaagg

SEQ ID NO: 136707 - DNA, 20 bp, synthetic construct
  source 1..20: mol_type = other DNA
tacagaattttaaaagaaag

SEQ ID NO: 136708 - DNA, 20 bp, synthetic construct
  source 1..20: mol_type = other DNA
ctacagaattttaaaagaaa

SEQ ID NO: 136709 - DNA, 20 bp, synthetic construct
  source 1..20: mol_type = other DNA
gctacagaattttaaaagaa

SEQ ID NO: 136710 - DNA, 20 bp, synthetic construct
  source 1..20: mol_type = other DNA
tgctacagaattttaaaaga

SEQ ID NO: 136711 - DNA, 20 bp, synthetic construct
  source 1..20: mol_type = other DNA
ctgctacagaattttaaaag

SEQ ID NO: 136712 - DNA, 20 bp, synthetic construct
  source 1..20: mol_type = other DNA
actgctacagaattttaaaa

SEQ ID NO: 136713 - DNA, 20 bp, synthetic construct
  source 1..20: mol_type = other DNA
cactgctacagaattttaaa

SEQ ID NO: 136714 - DNA, 20 bp, synthetic construct
  source 1..20: mol_type = other DNA
acactgctacagaattttaa

SEQ ID NO: 136715 - DNA, 20 bp, synthetic construct
  source 1..20: mol_type = other DNA
aacactgctacagaatttta

SEQ ID NO: 136716 - DNA, 20 bp, synthetic construct
  source 1..20: mol_type = other DNA
aaacactgctacagaatttt

SEQ ID NO: 136717 - DNA, 20 bp, synthetic construct
  source 1..20: mol_type = other DNA
taaacactgctacagaattt

SEQ ID NO: 136718 - DNA, 20 bp, synthetic construct
  source 1..20: mol_type = other DNA
ttaaacactgctacagaatt

SEQ ID NO: 136719 - DNA, 20 bp, synthetic construct
  source 1..20: mol_type = other DNA
tttaaacactgctacagaat

SEQ ID NO: 136720 - DNA, 20 bp, synthetic construct
  source 1..20: mol_type = other DNA
ctttaaacactgctacagaa

SEQ ID NO: 136721 - DNA, 20 bp, synthetic construct
  source 1..20: mol_type = other DNA
actttaaacactgctacaga

SEQ ID NO: 136722 - DNA, 20 bp, synthetic construct
  source 1..20: mol_type = other DNA
cactttaaacactgctacag

SEQ ID NO: 136723 - DNA, 20 bp, synthetic construct
  source 1..20: mol_type = other DNA
gcactttaaacactgctaca

SEQ ID NO: 136724 - DNA, 20 bp, synthetic construct
  source 1..20: mol_type = other DNA
agcactttaaacactgctac

SEQ ID NO: 136725 - DNA, 20 bp, synthetic construct
  source 1..20: mol_type = other DNA
aagcactttaaacactgcta

SEQ ID NO: 136726 - DNA, 20 bp, synthetic construct
  source 1..20: mol_type = other DNA
caagcactttaaacactgct

SEQ ID NO: 136727 - DNA, 20 bp, synthetic construct
  source 1..20: mol_type = other DNA
acaagcactttaaacactgc

SEQ ID NO: 136728 - DNA, 20 bp, synthetic construct
  source 1..20: mol_type = other DNA
gacaagcactttaaacactg

SEQ ID NO: 136729 - DNA, 20 bp, synthetic construct
  source 1..20: mol_type = other DNA
tgacaagcactttaaacact

SEQ ID NO: 136730 - DNA, 20 bp, synthetic construct
  source 1..20: mol_type = other DNA
atgacaagcactttaaacac

SEQ ID NO: 136731 - DNA, 20 bp, synthetic construct
  source 1..20: mol_type = other DNA
gatgacaagcactttaaaca

SEQ ID NO: 136732 - DNA, 20 bp, synthetic construct
  source 1..20: mol_type = other DNA
agatgacaagcactttaaac

SEQ ID NO: 136733 - DNA, 20 bp, synthetic construct
  source 1..20: mol_type = other DNA
gagatgacaagcactttaaa

SEQ ID NO: 136734 - DNA, 20 bp, synthetic construct
  source 1..20: mol_type = other DNA
agagatgacaagcactttaa

SEQ ID NO: 136735 - DNA, 20 bp, synthetic construct
  source 1..20: mol_type = other DNA
aagagatgacaagcacttta

SEQ ID NO: 136736 - DNA, 20 bp, synthetic construct
  source 1..20: mol_type = other DNA
taagagatgacaagcacttt

SEQ ID NO: 136737 - DNA, 20 bp, synthetic construct
  source 1..20: mol_type = other DNA
ataagagatgacaagcactt

SEQ ID NO: 136738 - DNA, 20 bp, synthetic construct
  source 1..20: mol_type = other DNA
cataagagatgacaagcact

SEQ ID NO: 136739 - DNA, 20 bp, synthetic construct
  source 1..20: mol_type = other DNA
tcataagagatgacaagcac

SEQ ID NO: 136740 - DNA, 20 bp, synthetic construct
  source 1..20: mol_type = other DNA
ttcataagagatgacaagca

SEQ ID NO: 136741 - DNA, 20 bp, synthetic construct
  source 1..20: mol_type = other DNA
tttcataagagatgacaagc

SEQ ID NO: 136742 - DNA, 20 bp, synthetic construct
  source 1..20: mol_type = other DNA
ttttcataagagatgacaag

SEQ ID NO: 136743 - DNA, 20 bp, synthetic construct
  source 1..20: mol_type = other DNA
attttcataagagatgacaa

SEQ ID NO: 136744 - DNA, 20 bp, synthetic construct
  source 1..20: mol_type = other DNA
cattttcataagagatgaca

SEQ ID NO: 136745 - DNA, 20 bp, synthetic construct
  source 1..20: mol_type = other DNA
tcattttcataagagatgac

SEQ ID NO: 136746 - DNA, 20 bp, synthetic construct
  source 1..20: mol_type = other DNA
ttcattttcataagagatga

SEQ ID NO: 136747 - DNA, 20 bp, synthetic construct
  source 1..20: mol_type = other DNA
attcattttcataagagatg

SEQ ID NO: 136748 - DNA, 20 bp, synthetic construct
  source 1..20: mol_type = other DNA
aattcattttcataagagat

SEQ ID NO: 136749 - DNA, 20 bp, synthetic construct
  source 1..20: mol_type = other DNA
taattcattttcataagaga

SEQ ID NO: 136750 - DNA, 20 bp, synthetic construct
  source 1..20: mol_type = other DNA
ataattcattttcataagag

SEQ ID NO: 136751 - DNA, 20 bp, synthetic construct
  source 1..20: mol_type = other DNA
cataattcattttcataaga

SEQ ID NO: 136752 - DNA, 20 bp, synthetic construct
  source 1..20: mol_type = other DNA
gcataattcattttcataag

SEQ ID NO: 136753 - DNA, 20 bp, synthetic construct
  source 1..20: mol_type = other DNA
tgcataattcattttcataa

SEQ ID NO: 136754 - DNA, 20 bp, synthetic construct
  source 1..20: mol_type = other DNA
atgcataattcattttcata

SEQ ID NO: 136755 - DNA, 20 bp, synthetic construct
  source 1..20: mol_type = other DNA
catgcataattcattttcat

SEQ ID NO: 136756 - DNA, 20 bp, synthetic construct
  source 1..20: mol_type = other DNA
tcatgcataattcattttca

SEQ ID NO: 136757 - DNA, 20 bp, synthetic construct
  source 1..20: mol_type = other DNA
ttcatgcataattcattttc

SEQ ID NO: 136758 - DNA, 20 bp, synthetic construct
  source 1..20: mol_type = other DNA
attcatgcataattcatttt

SEQ ID NO: 136759 - DNA, 20 bp, synthetic construct
  source 1..20: mol_type = other DNA
tattcatgcataattcattt

SEQ ID NO: 136760 - DNA, 20 bp, synthetic construct
  source 1..20: mol_type = other DNA
gtattcatgcataattcatt

SEQ ID NO: 136761 - DNA, 20 bp, synthetic construct
  source 1..20: mol_type = other DNA
tgtattcatgcataattcat

SEQ ID NO: 136762 - DNA, 20 bp, synthetic construct
  source 1..20: mol_type = other DNA
ttgtattcatgcataattca

SEQ ID NO: 136763 - DNA, 20 bp, synthetic construct
  source 1..20: mol_type = other DNA
tttgtattcatgcataattc

SEQ ID NO: 136764 - DNA, 20 bp, synthetic construct
  source 1..20: mol_type = other DNA
ttttgtattcatgcataatt

SEQ ID NO: 136765 - DNA, 20 bp, synthetic construct
  source 1..20: mol_type = other DNA
tttttgtattcatgcataat

SEQ ID NO: 136766 - DNA, 20 bp, synthetic construct
  source 1..20: mol_type = other DNA
ctttttgtattcatgcataa

SEQ ID NO: 136767 - DNA, 20 bp, synthetic construct
  source 1..20: mol_type = other DNA
tctttttgtattcatgcata

SEQ ID NO: 136768 - DNA, 20 bp, synthetic construct
  source 1..20: mol_type = other DNA
ttctttttgtattcatgcat

SEQ ID NO: 136769 - DNA, 20 bp, synthetic construct
  source 1..20: mol_type = other DNA
tttctttttgtattcatgca

SEQ ID NO: 136770 - DNA, 20 bp, synthetic construct
  source 1..20: mol_type = other DNA
atttctttttgtattcatgc

SEQ ID NO: 136771 - DNA, 20 bp, synthetic construct
  source 1..20: mol_type = other DNA
aatttctttttgtattcatg

SEQ ID NO: 136772 - DNA, 20 bp, synthetic construct
  source 1..20: mol_type = other DNA
taatttctttttgtattcat

SEQ ID NO: 136773 - DNA, 20 bp, synthetic construct
  source 1..20: mol_type = other DNA
gtaatttctttttgtattca

SEQ ID NO: 136774 - DNA, 20 bp, synthetic construct
  source 1..20: mol_type = other DNA
agtaatttctttttgtattc

SEQ ID NO: 136775 - DNA, 20 bp, synthetic construct
  source 1..20: mol_type = other DNA
tagtaatttctttttgtatt

SEQ ID NO: 136776 - DNA, 20 bp, synthetic construct
  source 1..20: mol_type = other DNA
ttagtaatttctttttgtat

SEQ ID NO: 136777 - DNA, 20 bp, synthetic construct
  source 1..20: mol_type = other DNA
attagtaatttctttttgta

SEQ ID NO: 136778 - DNA, 20 bp, synthetic construct
  source 1..20: mol_type = other DNA
tattagtaatttctttttgt

SEQ ID NO: 136779 - DNA, 20 bp, synthetic construct
  source 1..20: mol_type = other DNA
atattagtaatttctttttg

SEQ ID NO: 136780 - DNA, 20 bp, synthetic construct
  source 1..20: mol_type = other DNA
catattagtaatttcttttt

SEQ ID NO: 136781 - DNA, 20 bp, synthetic construct
  source 1..20: mol_type = other DNA
acatattagtaatttctttt

SEQ ID NO: 136782 - DNA, 20 bp, synthetic construct
  source 1..20: mol_type = other DNA
gacatattagtaatttcttt

SEQ ID NO: 136783 - DNA, 20 bp, synthetic construct
  source 1..20: mol_type = other DNA
tgacatattagtaatttctt

SEQ ID NO: 136784 - DNA, 20 bp, synthetic construct
  source 1..20: mol_type = other DNA
ttgacatattagtaatttct

SEQ ID NO: 136785 - DNA, 20 bp, synthetic construct
  source 1..20: mol_type = other DNA
gttgacatattagtaatttc

SEQ ID NO: 136786 - DNA, 20 bp, synthetic construct
  source 1..20: mol_type = other DNA
ggttgacatattagtaattt

SEQ ID NO: 136787 - DNA, 20 bp, synthetic construct
  source 1..20: mol_type = other DNA
aggttgacatattagtaatt

SEQ ID NO: 136788 - DNA, 20 bp, synthetic construct
  source 1..20: mol_type = other DNA
aaggttgacatattagtaat

SEQ ID NO: 136789 - DNA, 20 bp, synthetic construct
  source 1..20: mol_type = other DNA
aaaggttgacatattagtaa

SEQ ID NO: 136790 - DNA, 20 bp, synthetic construct
  source 1..20: mol_type = other DNA
gaaaggttgacatattagta

SEQ ID NO: 136791 - DNA, 20 bp, synthetic construct
  source 1..20: mol_type = other DNA
ggaaaggttgacatattagt

SEQ ID NO: 136792 - DNA, 20 bp, synthetic construct
  source 1..20: mol_type = other DNA
tggaaaggttgacatattag

SEQ ID NO: 136793 - DNA, 20 bp, synthetic construct
  source 1..20: mol_type = other DNA
ctggaaaggttgacatatta

SEQ ID NO: 136794 - DNA, 20 bp, synthetic construct
  source 1..20: mol_type = other DNA
tctggaaaggttgacatatt

SEQ ID NO: 136795 - DNA, 20 bp, synthetic construct
  source 1..20: mol_type = other DNA
ttctggaaaggttgacatat

SEQ ID NO: 136796 - DNA, 20 bp, synthetic construct
  source 1..20: mol_type = other DNA
tttctggaaaggttgacata

SEQ ID NO: 136797 - DNA, 20 bp, synthetic construct
  source 1..20: mol_type = other DNA
ttttctggaaaggttgacat

SEQ ID NO: 136798 - DNA, 20 bp, synthetic construct
  source 1..20: mol_type = other DNA
attttctggaaaggttgaca

SEQ ID NO: 136799 - DNA, 20 bp, synthetic construct
  source 1..20: mol_type = other DNA
aattttctggaaaggttgac

SEQ ID NO: 136800 - DNA, 20 bp, synthetic construct
  source 1..20: mol_type = other DNA
aaattttctggaaaggttga

SEQ ID NO: 136801 - DNA, 20 bp, synthetic construct
  source 1..20: mol_type = other DNA
caaattttctggaaaggttg

SEQ ID NO: 136802 - DNA, 20 bp, synthetic construct
  source 1..20: mol_type = other DNA
ccaaattttctggaaaggtt

SEQ ID NO: 136803 - DNA, 20 bp, synthetic construct
  source 1..20: mol_type = other DNA
tccaaattttctggaaaggt

SEQ ID NO: 136804 - DNA, 20 bp, synthetic construct
  source 1..20: mol_type = other DNA
ttccaaattttctggaaagg

SEQ ID NO: 136805 - DNA, 20 bp, synthetic construct
  source 1..20: mol_type = other DNA
tttccaaattttctggaaag

SEQ ID NO: 136806 - DNA, 20 bp, synthetic construct
  source 1..20: mol_type = other DNA
ttttccaaattttctggaaa

SEQ ID NO: 136807 - DNA, 20 bp, synthetic construct
  source 1..20: mol_type = other DNA
attttccaaattttctggaa

SEQ ID NO: 136808 - DNA, 20 bp, synthetic construct
  source 1..20: mol_type = other DNA
cattttccaaattttctgga

SEQ ID NO: 136809 - DNA, 20 bp, synthetic construct
  source 1..20: mol_type = other DNA
gcattttccaaattttctgg

SEQ ID NO: 136810 - DNA, 20 bp, synthetic construct
  source 1..20: mol_type = other DNA
tgcattttccaaattttctg

SEQ ID NO: 136811 - DNA, 20 bp, synthetic construct
  source 1..20: mol_type = other DNA
gtgcattttccaaattttct

SEQ ID NO: 136812 - DNA, 20 bp, synthetic construct
  source 1..20: mol_type = other DNA
tgtgcattttccaaattttc

SEQ ID NO: 136813 - DNA, 20 bp, synthetic construct
  source 1..20: mol_type = other DNA
gtgtgcattttccaaatttt

SEQ ID NO: 136814 - DNA, 20 bp, synthetic construct
  source 1..20: mol_type = other DNA
ggtgtgcattttccaaattt

SEQ ID NO: 136815 - DNA, 20 bp, synthetic construct
  source 1..20: mol_type = other DNA
aggtgtgcattttccaaatt

SEQ ID NO: 136816 - DNA, 20 bp, synthetic construct
  source 1..20: mol_type = other DNA
gaggtgtgcattttccaaat

SEQ ID NO: 136817 - DNA, 20 bp, synthetic construct
  source 1..20: mol_type = other DNA
tgaggtgtgcattttccaaa

SEQ ID NO: 136818 - DNA, 20 bp, synthetic construct
  source 1..20: mol_type = other DNA
ttgaggtgtgcattttccaa

SEQ ID NO: 136819 - DNA, 20 bp, synthetic construct
  source 1..20: mol_type = other DNA
tttgaggtgtgcattttcca

SEQ ID NO: 136820 - DNA, 20 bp, synthetic construct
  source 1..20: mol_type = other DNA
ttttgaggtgtgcattttcc

SEQ ID NO: 136821 - DNA, 20 bp, synthetic construct
  source 1..20: mol_type = other DNA
cttttgaggtgtgcattttc

SEQ ID NO: 136822 - DNA, 20 bp, synthetic construct
  source 1..20: mol_type = other DNA
ccttttgaggtgtgcatttt

SEQ ID NO: 136823 - DNA, 20 bp, synthetic construct
  source 1..20: mol_type = other DNA
gccttttgaggtgtgcattt

SEQ ID NO: 136824 - DNA, 20 bp, synthetic construct
  source 1..20: mol_type = other DNA
agccttttgaggtgtgcatt

SEQ ID NO: 136825 - DNA, 20 bp, synthetic construct
  source 1..20: mol_type = other DNA
tagccttttgaggtgtgcat

SEQ ID NO: 136826 - DNA, 20 bp, synthetic construct
  source 1..20: mol_type = other DNA
ttagccttttgaggtgtgca

SEQ ID NO: 136827 - DNA, 20 bp, synthetic construct
  source 1..20: mol_type = other DNA
attagccttttgaggtgtgc

SEQ ID NO: 136828 - DNA, 20 bp, synthetic construct
  source 1..20: mol_type = other DNA
aattagccttttgaggtgtg

SEQ ID NO: 136829 - DNA, 20 bp, synthetic construct
  source 1..20: mol_type = other DNA
aaattagccttttgaggtgt

SEQ ID NO: 136830 - DNA, 20 bp, synthetic construct
  source 1..20: mol_type = other DNA
taaattagccttttgaggtg

SEQ ID NO: 136831 - DNA, 20 bp, synthetic construct
  source 1..20: mol_type = other DNA
gtaaattagccttttgaggt

SEQ ID NO: 136832 - DNA, 20 bp, synthetic construct
  source 1..20: mol_type = other DNA
ggtaaattagccttttgagg

SEQ ID NO: 136833 - DNA, 20 bp, synthetic construct
  source 1..20: mol_type = other DNA
aggtaaattagccttttgag

SEQ ID NO: 136834 - DNA, 20 bp, synthetic construct
  source 1..20: mol_type = other DNA
aaggtaaattagccttttga

SEQ ID NO: 136835 - DNA, 20 bp, synthetic construct
  source 1..20: mol_type = other DNA
aaaggtaaattagccttttg

SEQ ID NO: 136836 - DNA, 20 bp, synthetic construct
  source 1..20: mol_type = other DNA
gaaaggtaaattagcctttt

SEQ ID NO: 136837 - DNA, 20 bp, synthetic construct
  source 1..20: mol_type = other DNA
agaaaggtaaattagccttt

SEQ ID NO: 136838 - DNA, 20 bp, synthetic construct
  source 1..20: mol_type = other DNA
tagaaaggtaaattagcctt

SEQ ID NO: 136839 - DNA, 20 bp, synthetic construct
  source 1..20: mol_type = other DNA
atagaaaggtaaattagcct

SEQ ID NO: 136840 - DNA, 20 bp, synthetic construct
  source 1..20: mol_type = other DNA
aatagaaaggtaaattagcc

SEQ ID NO: 136841 - DNA, 20 bp, synthetic construct
  source 1..20: mol_type = other DNA
aaatagaaaggtaaattagc

SEQ ID NO: 136842 - DNA, 20 bp, synthetic construct
  source 1..20: mol_type = other DNA
gaaatagaaaggtaaattag

SEQ ID NO: 136843 - DNA, 20 bp, synthetic construct
  source 1..20: mol_type = other DNA
ggaaatagaaaggtaaatta

SEQ ID NO: 136844 - DNA, 20 bp, synthetic construct
  source 1..20: mol_type = other DNA
gggaaatagaaaggtaaatt

SEQ ID NO: 136845 - DNA, 20 bp, synthetic construct
  source 1..20: mol_type = other DNA
tgggaaatagaaaggtaaat

SEQ ID NO: 136846 - DNA, 20 bp, synthetic construct
  source 1..20: mol_type = other DNA
ttgggaaatagaaaggtaaa

SEQ ID NO: 136847 - DNA, 20 bp, synthetic construct
  source 1..20: mol_type = other DNA
tttgggaaatagaaaggtaa

SEQ ID NO: 136848 - DNA, 20 bp, synthetic construct
  source 1..20: mol_type = other DNA
atttgggaaatagaaaggta

SEQ ID NO: 136849 - DNA, 20 bp, synthetic construct
  source 1..20: mol_type = other DNA
aatttgggaaatagaaaggt

SEQ ID NO: 136850 - DNA, 20 bp, synthetic construct
  source 1..20: mol_type = other DNA
gaatttgggaaatagaaagg

SEQ ID NO: 136851 - DNA, 20 bp, synthetic construct
  source 1..20: mol_type = other DNA
tgaatttgggaaatagaaag

SEQ ID NO: 136852 - DNA, 20 bp, synthetic construct
  source 1..20: mol_type = other DNA
ctgaatttgggaaatagaaa

SEQ ID NO: 136853 - DNA, 20 bp, synthetic construct
  source 1..20: mol_type = other DNA
gctgaatttgggaaatagaa

SEQ ID NO: 136854 - DNA, 20 bp, synthetic construct
  source 1..20: mol_type = other DNA
tgctgaatttgggaaataga

SEQ ID NO: 136855 - DNA, 20 bp, synthetic construct
  source 1..20: mol_type = other DNA
atgctgaatttgggaaatag

SEQ ID NO: 136856 - DNA, 20 bp, synthetic construct
  source 1..20: mol_type = other DNA
catgctgaatttgggaaata

SEQ ID NO: 136857 - DNA, 20 bp, synthetic construct
  source 1..20: mol_type = other DNA
acatgctgaatttgggaaat

SEQ ID NO: 136858 - DNA, 20 bp, synthetic construct
  source 1..20: mol_type = other DNA
gacatgctgaatttgggaaa

SEQ ID NO: 136859 - DNA, 20 bp, synthetic construct
  source 1..20: mol_type = other DNA
ggacatgctgaatttgggaa

SEQ ID NO: 136860 - DNA, 20 bp, synthetic construct
  source 1..20: mol_type = other DNA
gggacatgctgaatttggga

SEQ ID NO: 136861 - DNA, 20 bp, synthetic construct
  source 1..20: mol_type = other DNA
tgggacatgctgaatttggg

SEQ ID NO: 136862 - DNA, 20 bp, synthetic construct
  source 1..20: mol_type = other DNA
ttgggacatgctgaatttgg

SEQ ID NO: 136863 - DNA, 20 bp, synthetic construct
  source 1..20: mol_type = other DNA
tttgggacatgctgaatttg

SEQ ID NO: 136864 - DNA, 20 bp, synthetic construct
  source 1..20: mol_type = other DNA
atttgggacatgctgaattt

SEQ ID NO: 136865 - DNA, 20 bp, synthetic construct
  source 1..20: mol_type = other DNA
aatttgggacatgctgaatt

SEQ ID NO: 136866 - DNA, 20 bp, synthetic construct
  source 1..20: mol_type = other DNA
taatttgggacatgctgaat

SEQ ID NO: 136867 - DNA, 20 bp, synthetic construct
  source 1..20: mol_type = other DNA
gtaatttgggacatgctgaa

SEQ ID NO: 136868 - DNA, 20 bp, synthetic construct
  source 1..20: mol_type = other DNA
ggtaatttgggacatgctga

SEQ ID NO: 136869 - DNA, 20 bp, synthetic construct
  source 1..20: mol_type = other DNA
tggtaatttgggacatgctg

SEQ ID NO: 136870 - DNA, 20 bp, synthetic construct
  source 1..20: mol_type = other DNA
atggtaatttgggacatgct

SEQ ID NO: 136871 - DNA, 20 bp, synthetic construct
  source 1..20: mol_type = other DNA
tatggtaatttgggacatgc

SEQ ID NO: 136872 - DNA, 20 bp, synthetic construct
  source 1..20: mol_type = other DNA
gtatggtaatttgggacatg

SEQ ID NO: 136873 - DNA, 20 bp, synthetic construct
  source 1..20: mol_type = other DNA
tgtatggtaatttgggacat

SEQ ID NO: 136874 - DNA, 20 bp, synthetic construct
  source 1..20: mol_type = other DNA
ttgtatggtaatttgggaca

SEQ ID NO: 136875 - DNA, 20 bp, synthetic construct
  source 1..20: mol_type = other DNA
gttgtatggtaatttgggac

SEQ ID NO: 136876 - DNA, 20 bp, synthetic construct
  source 1..20: mol_type = other DNA
tgttgtatggtaatttggga

SEQ ID NO: 136877 - DNA, 20 bp, synthetic construct
  source 1..20: mol_type = other DNA
ttgttgtatggtaatttggg

SEQ ID NO: 136878 - DNA, 20 bp, synthetic construct
  source 1..20: mol_type = other DNA
cttgttgtatggtaatttgg

SEQ ID NO: 136879 - DNA, 20 bp, synthetic construct
  source 1..20: mol_type = other DNA
ccttgttgtatggtaatttg

SEQ ID NO: 136880 - DNA, 20 bp, synthetic construct
  source 1..20: mol_type = other DNA
tccttgttgtatggtaattt

SEQ ID NO: 136881 - DNA, 20 bp, synthetic construct
  source 1..20: mol_type = other DNA
ctccttgttgtatggtaatt

SEQ ID NO: 136882 - DNA, 20 bp, synthetic construct
  source 1..20: mol_type = other DNA
tctccttgttgtatggtaat

SEQ ID NO: 136883 - DNA, 20 bp, synthetic construct
  source 1..20: mol_type = other DNA
gtctccttgttgtatggtaa

SEQ ID NO: 136884 - DNA, 20 bp, synthetic construct
  source 1..20: mol_type = other DNA
tgtctccttgttgtatggta

SEQ ID NO: 136885 - DNA, 20 bp, synthetic construct
  source 1..20: mol_type = other DNA
ttgtctccttgttgtatggt

SEQ ID NO: 136886 - DNA, 20 bp, synthetic construct
  source 1..20: mol_type = other DNA
cttgtctccttgttgtatgg

SEQ ID NO: 136887 - DNA, 20 bp, synthetic construct
  source 1..20: mol_type = other DNA
gcttgtctccttgttgtatg

SEQ ID NO: 136888 - DNA, 20 bp, synthetic construct
  source 1..20: mol_type = other DNA
ggcttgtctccttgttgtat

SEQ ID NO: 136889 - DNA, 20 bp, synthetic construct
  source 1..20: mol_type = other DNA
gggcttgtctccttgttgta

SEQ ID NO: 136890 - DNA, 20 bp, synthetic construct
  source 1..20: mol_type = other DNA
agggcttgtctccttgttgt

SEQ ID NO: 136891 - DNA, 20 bp, synthetic construct
  source 1..20: mol_type = other DNA
aagggcttgtctccttgttg

SEQ ID NO: 136892 - DNA, 20 bp, synthetic construct
  source 1..20: mol_type = other DNA
gaagggcttgtctccttgtt

SEQ ID NO: 136893 - DNA, 20 bp, synthetic construct
  source 1..20: mol_type = other DNA
agaagggcttgtctccttgt

SEQ ID NO: 136894 - DNA, 20 bp, synthetic construct
  source 1..20: mol_type = other DNA
aagaagggcttgtctccttg

SEQ ID NO: 136895 - DNA, 20 bp, synthetic construct
  source 1..20: mol_type = other DNA
aaagaagggcttgtctcctt

SEQ ID NO: 136896 - DNA, 20 bp, synthetic construct
  source 1..20: mol_type = other DNA
gaaagaagggcttgtctcct

SEQ ID NO: 136897 - DNA, 20 bp, synthetic construct
  source 1..20: mol_type = other DNA
agaaagaagggcttgtctcc

SEQ ID NO: 136898 - DNA, 20 bp, synthetic construct
  source 1..20: mol_type = other DNA
tagaaagaagggcttgtctc

SEQ ID NO: 136899 - DNA, 20 bp, synthetic construct
  source 1..20: mol_type = other DNA
gtagaaagaagggcttgtct

SEQ ID NO: 136900 - DNA, 20 bp, synthetic construct
  source 1..20: mol_type = other DNA
agtagaaagaagggcttgtc

SEQ ID NO: 136901 - DNA, 20 bp, synthetic construct
  source 1..20: mol_type = other DNA
aagtagaaagaagggcttgt

SEQ ID NO: 136902 - DNA, 20 bp, synthetic construct
  source 1..20: mol_type = other DNA
aaagtagaaagaagggcttg

SEQ ID NO: 136903 - DNA, 20 bp, synthetic construct
  source 1..20: mol_type = other DNA
caaagtagaaagaagggctt

SEQ ID NO: 136904 - DNA, 20 bp, synthetic construct
  source 1..20: mol_type = other DNA
gcaaagtagaaagaagggct

SEQ ID NO: 136905 - DNA, 20 bp, synthetic construct
  source 1..20: mol_type = other DNA
ggcaaagtagaaagaagggc

SEQ ID NO: 136906 - DNA, 20 bp, synthetic construct
  source 1..20: mol_type = other DNA
tggcaaagtagaaagaaggg

SEQ ID NO: 136907 - DNA, 20 bp, synthetic construct
  source 1..20: mol_type = other DNA
ctggcaaagtagaaagaagg

SEQ ID NO: 136908 - DNA, 20 bp, synthetic construct
  source 1..20: mol_type = other DNA
actggcaaagtagaaagaag

SEQ ID NO: 136909 - DNA, 20 bp, synthetic construct
  source 1..20: mol_type = other DNA
cactggcaaagtagaaagaa

SEQ ID NO: 136910 - DNA, 20 bp, synthetic construct
  source 1..20: mol_type = other DNA
tcactggcaaagtagaaaga

SEQ ID NO: 136911 - DNA, 20 bp, synthetic construct
  source 1..20: mol_type = other DNA
ctcactggcaaagtagaaag

SEQ ID NO: 136912 - DNA, 20 bp, synthetic construct
  source 1..20: mol_type = other DNA
actcactggcaaagtagaaa

SEQ ID NO: 136913 - DNA, 20 bp, synthetic construct
  source 1..20: mol_type = other DNA
aactcactggcaaagtagaa

SEQ ID NO: 136914 - DNA, 20 bp, synthetic construct
  source 1..20: mol_type = other DNA
caactcactggcaaagtaga

SEQ ID NO: 136915 - DNA, 20 bp, synthetic construct
  source 1..20: mol_type = other DNA
ccaactcactggcaaagtag

SEQ ID NO: 136916 - DNA, 20 bp, synthetic construct
  source 1..20: mol_type = other DNA
cccaactcactggcaaagta

SEQ ID NO: 136917 - DNA, 20 bp, synthetic construct
  source 1..20: mol_type = other DNA
acccaactcactggcaaagt

SEQ ID NO: 136918 - DNA, 20 bp, synthetic construct
  source 1..20: mol_type = other DNA
aacccaactcactggcaaag

SEQ ID NO: 136919 - DNA, 20 bp, synthetic construct
  source 1..20: mol_type = other DNA
aaacccaactcactggcaaa

SEQ ID NO: 136920 - DNA, 20 bp, synthetic construct
  source 1..20: mol_type = other DNA
aaaacccaactcactggcaa

SEQ ID NO: 136921 - DNA, 20 bp, synthetic construct
  source 1..20: mol_type = other DNA
aaaaacccaactcactggca

SEQ ID NO: 136922 - DNA, 20 bp, synthetic construct
  source 1..20: mol_type = other DNA
aaaaaacccaactcactggc

SEQ ID NO: 136923 - DNA, 20 bp, synthetic construct
  source 1..20: mol_type = other DNA
taaaaaacccaactcactgg

SEQ ID NO: 136924 - DNA, 20 bp, synthetic construct
  source 1..20: mol_type = other DNA
ataaaaaacccaactcactg

SEQ ID NO: 136925 - DNA, 20 bp, synthetic construct
  source 1..20: mol_type = other DNA
tataaaaaacccaactcact

SEQ ID NO: 136926 - DNA, 20 bp, synthetic construct
  source 1..20: mol_type = other DNA
gtataaaaaacccaactcac

SEQ ID NO: 136927 - DNA, 20 bp, synthetic construct
  source 1..20: mol_type = other DNA
agtataaaaaacccaactca

SEQ ID NO: 136928 - DNA, 20 bp, synthetic construct
  source 1..20: mol_type = other DNA
tagtataaaaaacccaactc

SEQ ID NO: 136929 - DNA, 20 bp, synthetic construct
  source 1..20: mol_type = other DNA
ttagtataaaaaacccaact

SEQ ID NO: 136930 - DNA, 20 bp, synthetic construct
  source 1..20: mol_type = other DNA
attagtataaaaaacccaac

SEQ ID NO: 136931 - DNA, 20 bp, synthetic construct
  source 1..20: mol_type = other DNA
aattagtataaaaaacccaa

SEQ ID NO: 136932 - DNA, 20 bp, synthetic construct
  source 1..20: mol_type = other DNA
aaattagtataaaaaaccca

SEQ ID NO: 136933 - DNA, 20 bp, synthetic construct
  source 1..20: mol_type = other DNA
aaaattagtataaaaaaccc

SEQ ID NO: 136934 - DNA, 20 bp, synthetic construct
  source 1..20: mol_type = other DNA
aaaaattagtataaaaaacc

SEQ ID NO: 136935 - DNA, 20 bp, synthetic construct
  source 1..20: mol_type = other DNA
taaaaattagtataaaaaac

SEQ ID NO: 136936 - DNA, 20 bp, synthetic construct
  source 1..20: mol_type = other DNA
ttaaaaattagtataaaaaa

SEQ ID NO: 136937 - DNA, 20 bp, synthetic construct
  source 1..20: mol_type = other DNA
attaaaaattagtataaaaa

SEQ ID NO: 136938 - DNA, 20 bp, synthetic construct
  source 1..20: mol_type = other DNA
aattaaaaattagtataaaa

SEQ ID NO: 136939 - DNA, 20 bp, synthetic construct
  source 1..20: mol_type = other DNA
caattaaaaattagtataaa

SEQ ID NO: 136940 - DNA, 20 bp, synthetic construct
  source 1..20: mol_type = other DNA
acaattaaaaattagtataa

SEQ ID NO: 136941 - DNA, 20 bp, synthetic construct
  source 1..20: mol_type = other DNA
tacaattaaaaattagtata

SEQ ID NO: 136942 - DNA, 20 bp, synthetic construct
  source 1..20: mol_type = other DNA
gtacaattaaaaattagtat

SEQ ID NO: 136943 - DNA, 20 bp, synthetic construct
  source 1..20: mol_type = other DNA
tgtacaattaaaaattagta

SEQ ID NO: 136944 - DNA, 20 bp, synthetic construct
  source 1..20: mol_type = other DNA
ctgtacaattaaaaattagt

SEQ ID NO: 136945 - DNA, 20 bp, synthetic construct
  source 1..20: mol_type = other DNA
actgtacaattaaaaattag

SEQ ID NO: 136946 - DNA, 20 bp, synthetic construct
  source 1..20: mol_type = other DNA
tactgtacaattaaaaatta

SEQ ID NO: 136947 - DNA, 20 bp, synthetic construct
  source 1..20: mol_type = other DNA
ttactgtacaattaaaaatt

SEQ ID NO: 136948 - DNA, 20 bp, synthetic construct
  source 1..20: mol_type = other DNA
tttactgtacaattaaaaat

SEQ ID NO: 136949 - DNA, 20 bp, synthetic construct
  source 1..20: mol_type = other DNA
ttttactgtacaattaaaaa

SEQ ID NO: 136950 - DNA, 20 bp, synthetic construct
  source 1..20: mol_type = other DNA
gttttactgtacaattaaaa

SEQ ID NO: 136951 - DNA, 20 bp, synthetic construct
  source 1..20: mol_type = other DNA
tgttttactgtacaattaaa

SEQ ID NO: 136952 - DNA, 20 bp, synthetic construct
  source 1..20: mol_type = other DNA
gtgttttactgtacaattaa

SEQ ID NO: 136953 - DNA, 20 bp, synthetic construct
  source 1..20: mol_type = other DNA
agtgttttactgtacaatta

SEQ ID NO: 136954 - DNA, 20 bp, synthetic construct
  source 1..20: mol_type = other DNA
aagtgttttactgtacaatt

SEQ ID NO: 136955 - DNA, 20 bp, synthetic construct
  source 1..20: mol_type = other DNA
aaagtgttttactgtacaat

SEQ ID NO: 136956 - DNA, 20 bp, synthetic construct
  source 1..20: mol_type = other DNA
aaaagtgttttactgtacaa

SEQ ID NO: 136957 - DNA, 20 bp, synthetic construct
  source 1..20: mol_type = other DNA
aaaaagtgttttactgtaca

SEQ ID NO: 136958 - DNA, 20 bp, synthetic construct
  source 1..20: mol_type = other DNA
taaaaagtgttttactgtac

SEQ ID NO: 136959 - DNA, 20 bp, synthetic construct
  source 1..20: mol_type = other DNA
ttaaaaagtgttttactgta

SEQ ID NO: 136960 - DNA, 20 bp, synthetic construct
  source 1..20: mol_type = other DNA
tttaaaaagtgttttactgt

SEQ ID NO: 136961 - DNA, 20 bp, synthetic construct
  source 1..20: mol_type = other DNA
ctttaaaaagtgttttactg

SEQ ID NO: 136962 - DNA, 20 bp, synthetic construct
  source 1..20: mol_type = other DNA
cctttaaaaagtgttttact

SEQ ID NO: 136963 - DNA, 20 bp, synthetic construct
  source 1..20: mol_type = other DNA
tcctttaaaaagtgttttac

SEQ ID NO: 136964 - DNA, 20 bp, synthetic construct
  source 1..20: mol_type = other DNA
atcctttaaaaagtgtttta

SEQ ID NO: 136965 - DNA, 20 bp, synthetic construct
  source 1..20: mol_type = other DNA
tatcctttaaaaagtgtttt

SEQ ID NO: 136966 - DNA, 20 bp, synthetic construct
  source 1..20: mol_type = other DNA
gtatcctttaaaaagtgttt

SEQ ID NO: 136967 - DNA, 20 bp, synthetic construct
  source 1..20: mol_type = other DNA
tgtatcctttaaaaagtgtt

SEQ ID NO: 136968 - DNA, 20 bp, synthetic construct
  source 1..20: mol_type = other DNA
atgtatcctttaaaaagtgt

SEQ ID NO: 136969 - DNA, 20 bp, synthetic construct
  source 1..20: mol_type = other DNA
catgtatcctttaaaaagtg

SEQ ID NO: 136970 - DNA, 20 bp, synthetic construct
  source 1..20: mol_type = other DNA
acatgtatcctttaaaaagt

SEQ ID NO: 136971 - DNA, 20 bp, synthetic construct
  source 1..20: mol_type = other DNA
aacatgtatcctttaaaaag

SEQ ID NO: 136972 - DNA, 20 bp, synthetic construct
  source 1..20: mol_type = other DNA
taacatgtatcctttaaaaa

SEQ ID NO: 136973 - DNA, 20 bp, synthetic construct
  source 1..20: mol_type = other DNA
ttaacatgtatcctttaaaa

SEQ ID NO: 136974 - DNA, 20 bp, synthetic construct
  source 1..20: mol_type = other DNA
cttaacatgtatcctttaaa

SEQ ID NO: 136975 - DNA, 20 bp, synthetic construct
  source 1..20: mol_type = other DNA
ccttaacatgtatcctttaa

SEQ ID NO: 136976 - DNA, 20 bp, synthetic construct
  source 1..20: mol_type = other DNA
cccttaacatgtatccttta

SEQ ID NO: 136977 - DNA, 20 bp, synthetic construct
  source 1..20: mol_type = other DNA
tcccttaacatgtatccttt

SEQ ID NO: 136978 - DNA, 20 bp, synthetic construct
  source 1..20: mol_type = other DNA
ctcccttaacatgtatcctt

SEQ ID NO: 136979 - DNA, 20 bp, synthetic construct
  source 1..20: mol_type = other DNA
actcccttaacatgtatcct

SEQ ID NO: 136980 - DNA, 20 bp, synthetic construct
  source 1..20: mol_type = other DNA
tactcccttaacatgtatcc

SEQ ID NO: 136981 - DNA, 20 bp, synthetic construct
  source 1..20: mol_type = other DNA
ctactcccttaacatgtatc

SEQ ID NO: 136982 - DNA, 20 bp, synthetic construct
  source 1..20: mol_type = other DNA
tctactcccttaacatgtat

SEQ ID NO: 136983 - DNA, 20 bp, synthetic construct
  source 1..20: mol_type = other DNA
gtctactcccttaacatgta

SEQ ID NO: 136984 - DNA, 20 bp, synthetic construct
  source 1..20: mol_type = other DNA
agtctactcccttaacatgt

SEQ ID NO: 136985 - DNA, 20 bp, synthetic construct
  source 1..20: mol_type = other DNA
aagtctactcccttaacatg

SEQ ID NO: 136986 - DNA, 20 bp, synthetic construct
  source 1..20: mol_type = other DNA
caagtctactcccttaacat

SEQ ID NO: 136987 - DNA, 20 bp, synthetic construct
  source 1..20: mol_type = other DNA
acaagtctactcccttaaca

SEQ ID NO: 136988 - DNA, 20 bp, synthetic construct
  source 1..20: mol_type = other DNA
aacaagtctactcccttaac

SEQ ID NO: 136989 - DNA, 20 bp, synthetic construct
  source 1..20: mol_type = other DNA
caacaagtctactcccttaa

SEQ ID NO: 136990 - DNA, 20 bp, synthetic construct
  source 1..20: mol_type = other DNA
tcaacaagtctactccctta

SEQ ID NO: 136991 - DNA, 20 bp, synthetic construct
  source 1..20: mol_type = other DNA
ttcaacaagtctactccctt

SEQ ID NO: 136992 - DNA, 20 bp, synthetic construct
  source 1..20: mol_type = other DNA
gttcaacaagtctactccct

SEQ ID NO: 136993 - DNA, 20 bp, synthetic construct
  source 1..20: mol_type = other DNA
tgttcaacaagtctactccc

SEQ ID NO: 136994 - DNA, 20 bp, synthetic construct
  source 1..20: mol_type = other DNA
ttgttcaacaagtctactcc

SEQ ID NO: 136995 - DNA, 20 bp, synthetic construct
  source 1..20: mol_type = other DNA
attgttcaacaagtctactc

SEQ ID NO: 136996 - DNA, 20 bp, synthetic construct
  source 1..20: mol_type = other DNA
tattgttcaacaagtctact

SEQ ID NO: 136997 - DNA, 20 bp, synthetic construct
  source 1..20: mol_type = other DNA
atattgttcaacaagtctac

SEQ ID NO: 136998 - DNA, 20 bp, synthetic construct
  source 1..20: mol_type = other DNA
aatattgttcaacaagtcta

SEQ ID NO: 136999 - DNA, 20 bp, synthetic construct
  source 1..20: mol_type = other DNA
aaatattgttcaacaagtct

SEQ ID NO: 137000 - DNA, 20 bp, synthetic construct
  source 1..20: mol_type = other DNA
aaaatattgttcaacaagtc

SEQ ID NO: 137001 - DNA, 20 bp, synthetic construct
  source 1..20: mol_type = other DNA
gaaaatattgttcaacaagt

SEQ ID NO: 137002 - DNA, 20 bp, synthetic construct
  source 1..20: mol_type = other DNA
ggaaaatattgttcaacaag

SEQ ID NO: 137003 - DNA, 20 bp, synthetic construct
  source 1..20: mol_type = other DNA
aggaaaatattgttcaacaa

SEQ ID NO: 137004 - DNA, 20 bp, synthetic construct
  source 1..20: mol_type = other DNA
aaggaaaatattgttcaaca

SEQ ID NO: 137005 - DNA, 20 bp, synthetic construct
  source 1..20: mol_type = other DNA
caaggaaaatattgttcaac

SEQ ID NO: 137006 - DNA, 20 bp, synthetic construct
  source 1..20: mol_type = other DNA
acaaggaaaatattgttcaa

SEQ ID NO: 137007 - DNA, 20 bp, synthetic construct
  source 1..20: mol_type = other DNA
cacaaggaaaatattgttca

SEQ ID NO: 137008 - DNA, 20 bp, synthetic construct
  source 1..20: mol_type = other DNA
gcacaaggaaaatattgttc

SEQ ID NO: 137009 - DNA, 20 bp, synthetic construct
  source 1..20: mol_type = other DNA
ggcacaaggaaaatattgtt

SEQ ID NO: 137010 - DNA, 20 bp, synthetic construct
  source 1..20: mol_type = other DNA
tggcacaaggaaaatattgt

SEQ ID NO: 137011 - DNA, 20 bp, synthetic construct
  source 1..20: mol_type = other DNA
ctggcacaaggaaaatattg

SEQ ID NO: 137012 - DNA, 20 bp, synthetic construct
  source 1..20: mol_type = other DNA
actggcacaaggaaaatatt

SEQ ID NO: 137013 - DNA, 20 bp, synthetic construct
  source 1..20: mol_type = other DNA
gactggcacaaggaaaatat

SEQ ID NO: 137014 - DNA, 20 bp, synthetic construct
  source 1..20: mol_type = other DNA
tgactggcacaaggaaaata

SEQ ID NO: 137015 - DNA, 20 bp, synthetic construct
  source 1..20: mol_type = other DNA
ttgactggcacaaggaaaat

SEQ ID NO: 137016 - DNA, 20 bp, synthetic construct
  source 1..20: mol_type = other DNA
tttgactggcacaaggaaaa

SEQ ID NO: 137017 - DNA, 20 bp, synthetic construct
  source 1..20: mol_type = other DNA
atttgactggcacaaggaaa

SEQ ID NO: 137018 - DNA, 20 bp, synthetic construct
  source 1..20: mol_type = other DNA
aatttgactggcacaaggaa

SEQ ID NO: 137019 - DNA, 20 bp, synthetic construct
  source 1..20: mol_type = other DNA
taatttgactggcacaagga

SEQ ID NO: 137020 - DNA, 20 bp, synthetic construct
  source 1..20: mol_type = other DNA
ataatttgactggcacaagg

SEQ ID NO: 137021 - DNA, 20 bp, synthetic construct
  source 1..20: mol_type = other DNA
aataatttgactggcacaag

SEQ ID NO: 137022 - DNA, 20 bp, synthetic construct
  source 1..20: mol_type = other DNA
caataatttgactggcacaa

SEQ ID NO: 137023 - DNA, 20 bp, synthetic construct
  source 1..20: mol_type = other DNA
tcaataatttgactggcaca

SEQ ID NO: 137024 - DNA, 20 bp, synthetic construct
  source 1..20: mol_type = other DNA
ttcaataatttgactggcac

SEQ ID NO: 137025 - DNA, 20 bp, synthetic construct
  source 1..20: mol_type = other DNA
tttcaataatttgactggca

SEQ ID NO: 137026 - DNA, 20 bp, synthetic construct
  source 1..20: mol_type = other DNA
ctttcaataatttgactggc

SEQ ID NO: 137027 - DNA, 20 bp, synthetic construct
  source 1..20: mol_type = other DNA
actttcaataatttgactgg

SEQ ID NO: 137028 - DNA, 20 bp, synthetic construct
  source 1..20: mol_type = other DNA
tactttcaataatttgactg

SEQ ID NO: 137029 - DNA, 20 bp, synthetic construct
  source 1..20: mol_type = other DNA
gtactttcaataatttgact

SEQ ID NO: 137030 - DNA, 20 bp, synthetic construct
  source 1..20: mol_type = other DNA
agtactttcaataatttgac

SEQ ID NO: 137031 - DNA, 20 bp, synthetic construct
  source 1..20: mol_type = other DNA
aagtactttcaataatttga

SEQ ID NO: 137032 - DNA, 20 bp, synthetic construct
  source 1..20: mol_type = other DNA
taagtactttcaataatttg

SEQ ID NO: 137033 - DNA, 20 bp, synthetic construct
  source 1..20: mol_type = other DNA
ataagtactttcaataattt

SEQ ID NO: 137034 - DNA, 20 bp, synthetic construct
  source 1..20: mol_type = other DNA
tataagtactttcaataatt

SEQ ID NO: 137035 - DNA, 20 bp, synthetic construct
  source 1..20: mol_type = other DNA
atataagtactttcaataat

SEQ ID NO: 137036 - DNA, 20 bp, synthetic construct
  source 1..20: mol_type = other DNA
tatataagtactttcaataa

SEQ ID NO: 137037 - DNA, 20 bp, synthetic construct
  source 1..20: mol_type = other DNA
atatataagtactttcaata

SEQ ID NO: 137038 - DNA, 20 bp, synthetic construct
  source 1..20: mol_type = other DNA
tatatataagtactttcaat

SEQ ID NO: 137039 - DNA, 20 bp, synthetic construct
  source 1..20: mol_type = other DNA
atatatataagtactttcaa

SEQ ID NO: 137040 - DNA, 20 bp, synthetic construct
  source 1..20: mol_type = other DNA
tatatatataagtactttca

SEQ ID NO: 137041 - DNA, 20 bp, synthetic construct
  source 1..20: mol_type = other DNA
ttatatatataagtactttc

SEQ ID NO: 137042 - DNA, 20 bp, synthetic construct
  source 1..20: mol_type = other DNA
tttatatatataagtacttt

SEQ ID NO: 137043 - DNA, 20 bp, synthetic construct
  source 1..20: mol_type = other DNA
atttatatatataagtactt

SEQ ID NO: 137044 - DNA, 20 bp, synthetic construct
  source 1..20: mol_type = other DNA
tatttatatatataagtact

SEQ ID NO: 137045 - DNA, 20 bp, synthetic construct
  source 1..20: mol_type = other DNA
ttatttatatatataagtac

SEQ ID NO: 137046 - DNA, 20 bp, synthetic construct
  source 1..20: mol_type = other DNA
attatttatatatataagta

SEQ ID NO: 137047 - DNA, 20 bp, synthetic construct
  source 1..20: mol_type = other DNA
aattatttatatatataagt

SEQ ID NO: 137048 - DNA, 20 bp, synthetic construct
  source 1..20: mol_type = other DNA
gaattatttatatatataag

SEQ ID NO: 137049 - DNA, 20 bp, synthetic construct
  source 1..20: mol_type = other DNA
tgaattatttatatatataa

SEQ ID NO: 137050 - DNA, 20 bp, synthetic construct
  source 1..20: mol_type = other DNA
ctgaattatttatatatata

SEQ ID NO: 137051 - DNA, 20 bp, synthetic construct
  source 1..20: mol_type = other DNA
actgaattatttatatatat

SEQ ID NO: 137052 - DNA, 20 bp, synthetic construct
  source 1..20: mol_type = other DNA
aactgaattatttatatata

SEQ ID NO: 137053 - DNA, 20 bp, synthetic construct
  source 1..20: mol_type = other DNA
aaactgaattatttatatat

SEQ ID NO: 137054 - DNA, 20 bp, synthetic construct
  source 1..20: mol_type = other DNA
aaaactgaattatttatata

SEQ ID NO: 137055 - DNA, 20 bp, synthetic construct
  source 1..20: mol_type = other DNA
aaaaactgaattatttatat

SEQ ID NO: 137056 - DNA, 20 bp, synthetic construct
  source 1..20: mol_type = other DNA
taaaaactgaattatttata

SEQ ID NO: 137057 - DNA, 20 bp, synthetic construct
  source 1..20: mol_type = other DNA
ttaaaaactgaattatttat

SEQ ID NO: 137058 - DNA, 20 bp, synthetic construct
  source 1..20: mol_type = other DNA
tttaaaaactgaattattta

SEQ ID NO: 137059 - DNA, 20 bp, synthetic construct
  source 1..20: mol_type = other DNA
ttttaaaaactgaattattt

SEQ ID NO: 137060 - DNA, 20 bp, synthetic construct
  source 1..20: mol_type = other DNA
attttaaaaactgaattatt

SEQ ID NO: 137061 - DNA, 20 bp, synthetic construct
  source 1..20: mol_type = other DNA
cattttaaaaactgaattat

SEQ ID NO: 137062 - DNA, 20 bp, synthetic construct
  source 1..20: mol_type = other DNA
ccattttaaaaactgaatta

SEQ ID NO: 137063 - DNA, 20 bp, synthetic construct
  source 1..20: mol_type = other DNA
tccattttaaaaactgaatt

SEQ ID NO: 137064 - DNA, 20 bp, synthetic construct
  source 1..20: mol_type = other DNA
ttccattttaaaaactgaat

SEQ ID NO: 137065 - DNA, 20 bp, synthetic construct
  source 1..20: mol_type = other DNA
tttccattttaaaaactgaa

SEQ ID NO: 137066 - DNA, 20 bp, synthetic construct
  source 1..20: mol_type = other DNA
atttccattttaaaaactga

SEQ ID NO: 137067 - DNA, 20 bp, synthetic construct
  source 1..20: mol_type = other DNA
tatttccattttaaaaactg

SEQ ID NO: 137068 - DNA, 20 bp, synthetic construct
  source 1..20: mol_type = other DNA
gtatttccattttaaaaact

SEQ ID NO: 137069 - DNA, 20 bp, synthetic construct
  source 1..20: mol_type = other DNA
ggtatttccattttaaaaac

SEQ ID NO: 137070 - DNA, 20 bp, synthetic construct
  source 1..20: mol_type = other DNA
gggtatttccattttaaaaa

SEQ ID NO: 137071 - DNA, 20 bp, synthetic construct
  source 1..20: mol_type = other DNA
tgggtatttccattttaaaa

SEQ ID NO: 137072 - DNA, 20 bp, synthetic construct
  source 1..20: mol_type = other DNA
ttgggtatttccattttaaa

SEQ ID NO: 137073 - DNA, 20 bp, synthetic construct
  source 1..20: mol_type = other DNA
attgggtatttccattttaa

SEQ ID NO: 137074 - DNA, 20 bp, synthetic construct
  source 1..20: mol_type = other DNA
aattgggtatttccatttta

SEQ ID NO: 137075 - DNA, 20 bp, synthetic construct
  source 1..20: mol_type = other DNA
aaattgggtatttccatttt

SEQ ID NO: 137076 - DNA, 20 bp, synthetic construct
  source 1..20: mol_type = other DNA
taaattgggtatttccattt

SEQ ID NO: 137077 - DNA, 20 bp, synthetic construct
  source 1..20: mol_type = other DNA
ttaaattgggtatttccatt

SEQ ID NO: 137078 - DNA, 20 bp, synthetic construct
  source 1..20: mol_type = other DNA
cttaaattgggtatttccat

SEQ ID NO: 137079 - DNA, 20 bp, synthetic construct
  source 1..20: mol_type = other DNA
tcttaaattgggtatttcca

SEQ ID NO: 137080 - DNA, 20 bp, synthetic construct
  source 1..20: mol_type = other DNA
ttcttaaattgggtatttcc

SEQ ID NO: 137081 - DNA, 20 bp, synthetic construct
  source 1..20: mol_type = other DNA
cttcttaaattgggtatttc

SEQ ID NO: 137082 - DNA, 20 bp, synthetic construct
  source 1..20: mol_type = other DNA
ccttcttaaattgggtattt

SEQ ID NO: 137083 - DNA, 20 bp, synthetic construct
  source 1..20: mol_type = other DNA
gccttcttaaattgggtatt

SEQ ID NO: 137084 - DNA, 20 bp, synthetic construct
  source 1..20: mol_type = other DNA
agccttcttaaattgggtat

SEQ ID NO: 137085 - DNA, 20 bp, synthetic construct
  source 1..20: mol_type = other DNA
cagccttcttaaattgggta

SEQ ID NO: 137086 - DNA, 20 bp, synthetic construct
  source 1..20: mol_type = other DNA
ccagccttcttaaattgggt

SEQ ID NO: 137087 - DNA, 20 bp, synthetic construct
  source 1..20: mol_type = other DNA
tccagccttcttaaattggg

SEQ ID NO: 137088 - DNA, 20 bp, synthetic construct
  source 1..20: mol_type = other DNA
ctccagccttcttaaattgg

SEQ ID NO: 137089 - DNA, 20 bp, synthetic construct
  source 1..20: mol_type = other DNA
actccagccttcttaaattg

SEQ ID NO: 137090 - DNA, 20 bp, synthetic construct
  source 1..20: mol_type = other DNA
aactccagccttcttaaatt

SEQ ID NO: 137091 - DNA, 20 bp, synthetic construct
  source 1..20: mol_type = other DNA
taactccagccttcttaaat

SEQ ID NO: 137092 - DNA, 20 bp, synthetic construct
  source 1..20: mol_type = other DNA
ttaactccagccttcttaaa

SEQ ID NO: 137093 - DNA, 20 bp, synthetic construct
  source 1..20: mol_type = other DNA
attaactccagccttcttaa

SEQ ID NO: 137094 - DNA, 20 bp, synthetic construct
  source 1..20: mol_type = other DNA
cattaactccagccttctta

SEQ ID NO: 137095 - DNA, 20 bp, synthetic construct
  source 1..20: mol_type = other DNA
tcattaactccagccttctt

SEQ ID NO: 137096 - DNA, 20 bp, synthetic construct
  source 1..20: mol_type = other DNA
ttcattaactccagccttct

SEQ ID NO: 137097 - DNA, 20 bp, synthetic construct
  source 1..20: mol_type = other DNA
tttcattaactccagccttc

SEQ ID NO: 137098 - DNA, 20 bp, synthetic construct
  source 1..20: mol_type = other DNA
ttttcattaactccagcctt

SEQ ID NO: 137099 - DNA, 20 bp, synthetic construct
  source 1..20: mol_type = other DNA
tttttcattaactccagcct

SEQ ID NO: 137100 - DNA, 20 bp, synthetic construct
  source 1..20: mol_type = other DNA
atttttcattaactccagcc

SEQ ID NO: 137101 - DNA, 20 bp, synthetic construct
  source 1..20: mol_type = other DNA
catttttcattaactccagc

SEQ ID NO: 137102 - DNA, 20 bp, synthetic construct
  source 1..20: mol_type = other DNA
ccatttttcattaactccag

SEQ ID NO: 137103 - DNA, 20 bp, synthetic construct
  source 1..20: mol_type = other DNA
tccatttttcattaactcca

SEQ ID NO: 137104 - DNA, 20 bp, synthetic construct
  source 1..20: mol_type = other DNA
ctccatttttcattaactcc

SEQ ID NO: 137105 - DNA, 20 bp, synthetic construct
  source 1..20: mol_type = other DNA
actccatttttcattaactc

SEQ ID NO: 137106 - DNA, 20 bp, synthetic construct
  source 1..20: mol_type = other DNA
aactccatttttcattaact

SEQ ID NO: 137107 - DNA, 20 bp, synthetic construct
  source 1..20: mol_type = other DNA
caactccatttttcattaac

SEQ ID NO: 137108 - DNA, 20 bp, synthetic construct
  source 1..20: mol_type = other DNA
acaactccatttttcattaa

SEQ ID NO: 137109 - DNA, 20 bp, synthetic construct
  source 1..20: mol_type = other DNA
aacaactccatttttcatta

SEQ ID NO: 137110 - DNA, 20 bp, synthetic construct
  source 1..20: mol_type = other DNA
aaacaactccatttttcatt

SEQ ID NO: 137111 - DNA, 20 bp, synthetic construct
  source 1..20: mol_type = other DNA
gaaacaactccatttttcat

SEQ ID NO: 137112 - DNA, 20 bp, synthetic construct
  source 1..20: mol_type = other DNA
tgaaacaactccatttttca

SEQ ID NO: 137113 - DNA, 20 bp, synthetic construct
  source 1..20: mol_type = other DNA
ctgaaacaactccatttttc

SEQ ID NO: 137114 - DNA, 20 bp, synthetic construct
  source 1..20: mol_type = other DNA
tctgaaacaactccattttt

SEQ ID NO: 137115 - DNA, 20 bp, synthetic construct
  source 1..20: mol_type = other DNA
ttctgaaacaactccatttt

SEQ ID NO: 137116 - DNA, 20 bp, synthetic construct
  source 1..20: mol_type = other DNA
tttctgaaacaactccattt

SEQ ID NO: 137117 - DNA, 20 bp, synthetic construct
  source 1..20: mol_type = other DNA
atttctgaaacaactccatt

SEQ ID NO: 137118 - DNA, 20 bp, synthetic construct
  source 1..20: mol_type = other DNA
gatttctgaaacaactccat

SEQ ID NO: 137119 - DNA, 20 bp, synthetic construct
  source 1..20: mol_type = other DNA
tgatttctgaaacaactcca

SEQ ID NO: 137120 - DNA, 20 bp, synthetic construct
  source 1..20: mol_type = other DNA
ttgatttctgaaacaactcc

SEQ ID NO: 137121 - DNA, 20 bp, synthetic construct
  source 1..20: mol_type = other DNA
attgatttctgaaacaactc

SEQ ID NO: 137122 - DNA, 20 bp, synthetic construct
  source 1..20: mol_type = other DNA
aattgatttctgaaacaact

SEQ ID NO: 137123 - DNA, 20 bp, synthetic construct
  source 1..20: mol_type = other DNA
aaattgatttctgaaacaac

SEQ ID NO: 137124 - DNA, 20 bp, synthetic construct
  source 1..20: mol_type = other DNA
aaaattgatttctgaaacaa

SEQ ID NO: 137125 - DNA, 20 bp, synthetic construct
  source 1..20: mol_type = other DNA
aaaaattgatttctgaaaca

SEQ ID NO: 137126 - DNA, 20 bp, synthetic construct
  source 1..20: mol_type = other DNA
caaaaattgatttctgaaac

SEQ ID NO: 137127 - DNA, 20 bp, synthetic construct
  source 1..20: mol_type = other DNA
gcaaaaattgatttctgaaa

SEQ ID NO: 137128 - DNA, 20 bp, synthetic construct
  source 1..20: mol_type = other DNA
tgcaaaaattgatttctgaa

SEQ ID NO: 137129 - DNA, 20 bp, synthetic construct
  source 1..20: mol_type = other DNA
atgcaaaaattgatttctga

SEQ ID NO: 137130 - DNA, 20 bp, synthetic construct
  source 1..20: mol_type = other DNA
tatgcaaaaattgatttctg

SEQ ID NO: 137131 - DNA, 20 bp, synthetic construct
  source 1..20: mol_type = other DNA
gtatgcaaaaattgatttct

SEQ ID NO: 137132 - DNA, 20 bp, synthetic construct
  source 1..20: mol_type = other DNA
ggtatgcaaaaattgatttc

SEQ ID NO: 137133 - DNA, 20 bp, synthetic construct
  source 1..20: mol_type = other DNA
tggtatgcaaaaattgattt

SEQ ID NO: 137134 - DNA, 20 bp, synthetic construct
  source 1..20: mol_type = other DNA
ttggtatgcaaaaattgatt

SEQ ID NO: 137135 - DNA, 20 bp, synthetic construct
  source 1..20: mol_type = other DNA
cttggtatgcaaaaattgat

SEQ ID NO: 137136 - DNA, 20 bp, synthetic construct
  source 1..20: mol_type = other DNA
gcttggtatgcaaaaattga

SEQ ID NO: 137137 - DNA, 20 bp, synthetic construct
  source 1..20: mol_type = other DNA
tgcttggtatgcaaaaattg

SEQ ID NO: 137138 - DNA, 20 bp, synthetic construct
  source 1..20: mol_type = other DNA
ttgcttggtatgcaaaaatt

SEQ ID NO: 137139 - DNA, 20 bp, synthetic construct
  source 1..20: mol_type = other DNA
tttgcttggtatgcaaaaat

SEQ ID NO: 137140 - DNA, 20 bp, synthetic construct
  source 1..20: mol_type = other DNA
atttgcttggtatgcaaaaa

SEQ ID NO: 137141 - DNA, 20 bp, synthetic construct
  source 1..20: mol_type = other DNA
catttgcttggtatgcaaaa

SEQ ID NO: 137142 - DNA, 20 bp, synthetic construct
  source 1..20: mol_type = other DNA
acatttgcttggtatgcaaa

SEQ ID NO: 137143 - DNA, 20 bp, synthetic construct
  source 1..20: mol_type = other DNA
cacatttgcttggtatgcaa

SEQ ID NO: 137144 - DNA, 20 bp, synthetic construct
  source 1..20: mol_type = other DNA
tcacatttgcttggtatgca

SEQ ID NO: 137145 - DNA, 20 bp, synthetic construct
  source 1..20: mol_type = other DNA
gtcacatttgcttggtatgc

SEQ ID NO: 137146 - DNA, 20 bp, synthetic construct
  source 1..20: mol_type = other DNA
agtcacatttgcttggtatg

SEQ ID NO: 137147 - DNA, 20 bp, synthetic construct
  source 1..20: mol_type = other DNA
cagtcacatttgcttggtat

SEQ ID NO: 137148 - DNA, 20 bp, synthetic construct
  source 1..20: mol_type = other DNA
ccagtcacatttgcttggta

SEQ ID NO: 137149 - DNA, 20 bp, synthetic construct
  source 1..20: mol_type = other DNA
cccagtcacatttgcttggt

SEQ ID NO: 137150 - DNA, 20 bp, synthetic construct
  source 1..20: mol_type = other DNA
tcccagtcacatttgcttgg

SEQ ID NO: 137151 - DNA, 20 bp, synthetic construct
  source 1..20: mol_type = other DNA
ttcccagtcacatttgcttg

SEQ ID NO: 137152 - DNA, 20 bp, synthetic construct
  source 1..20: mol_type = other DNA
tttcccagtcacatttgctt

SEQ ID NO: 137153 - DNA, 20 bp, synthetic construct
  source 1..20: mol_type = other DNA
atttcccagtcacatttgct

SEQ ID NO: 137154 - DNA, 20 bp, synthetic construct
  source 1..20: mol_type = other DNA
catttcccagtcacatttgc

SEQ ID NO: 137155 - DNA, 20 bp, synthetic construct
  source 1..20: mol_type = other DNA
gcatttcccagtcacatttg

SEQ ID NO: 137156 - DNA, 20 bp, synthetic construct
  source 1..20: mol_type = other DNA
ggcatttcccagtcacattt

SEQ ID NO: 137157 - DNA, 20 bp, synthetic construct
  source 1..20: mol_type = other DNA
aggcatttcccagtcacatt

SEQ ID NO: 137158 - DNA, 20 bp, synthetic construct
  source 1..20: mol_type = other DNA
taggcatttcccagtcacat

SEQ ID NO: 137159 - DNA, 20 bp, synthetic construct
  source 1..20: mol_type = other DNA
ttaggcatttcccagtcaca

SEQ ID NO: 137160 - DNA, 20 bp, synthetic construct
  source 1..20: mol_type = other DNA
attaggcatttcccagtcac

SEQ ID NO: 137161 - DNA, 20 bp, synthetic construct
  source 1..20: mol_type = other DNA
tattaggcatttcccagtca

SEQ ID NO: 137162 - DNA, 20 bp, synthetic construct
  source 1..20: mol_type = other DNA
atattaggcatttcccagtc

SEQ ID NO: 137163 - DNA, 20 bp, synthetic construct
  source 1..20: mol_type = other DNA
aatattaggcatttcccagt

SEQ ID NO: 137164 - DNA, 20 bp, synthetic construct
  source 1..20: mol_type = other DNA
aaatattaggcatttcccag

SEQ ID NO: 137165 - DNA, 20 bp, synthetic construct
  source 1..20: mol_type = other DNA
aaaatattaggcatttccca

SEQ ID NO: 137166 - DNA, 20 bp, synthetic construct
  source 1..20: mol_type = other DNA
gaaaatattaggcatttccc

SEQ ID NO: 137167 - DNA, 20 bp, synthetic construct
  source 1..20: mol_type = other DNA
ggaaaatattaggcatttcc

SEQ ID NO: 137168 - DNA, 20 bp, synthetic construct
  source 1..20: mol_type = other DNA
aggaaaatattaggcatttc

SEQ ID NO: 137169 - DNA, 20 bp, synthetic construct
  source 1..20: mol_type = other DNA
aaggaaaatattaggcattt

SEQ ID NO: 137170 - DNA, 20 bp, synthetic construct
  source 1..20: mol_type = other DNA
caaggaaaatattaggcatt

SEQ ID NO: 137171 - DNA, 20 bp, synthetic construct
  source 1..20: mol_type = other DNA
acaaggaaaatattaggcat

SEQ ID NO: 137172 - DNA, 20 bp, synthetic construct
  source 1..20: mol_type = other DNA
aacaaggaaaatattaggca

SEQ ID NO: 137173 - DNA, 20 bp, synthetic construct
  source 1..20: mol_type = other DNA
taacaaggaaaatattaggc

SEQ ID NO: 137174 - DNA, 20 bp, synthetic construct
  source 1..20: mol_type = other DNA
ctaacaaggaaaatattagg

SEQ ID NO: 137175 - DNA, 20 bp, synthetic construct
  source 1..20: mol_type = other DNA
tctaacaaggaaaatattag

SEQ ID NO: 137176 - DNA, 20 bp, synthetic construct
  source 1..20: mol_type = other DNA
ctctaacaaggaaaatatta

SEQ ID NO: 137177 - DNA, 20 bp, synthetic construct
  source 1..20: mol_type = other DNA
tctctaacaaggaaaatatt

SEQ ID NO: 137178 - DNA, 20 bp, synthetic construct
  source 1..20: mol_type = other DNA
ttctctaacaaggaaaatat

SEQ ID NO: 137179 - DNA, 20 bp, synthetic construct
  source 1..20: mol_type = other DNA
tttctctaacaaggaaaata

SEQ ID NO: 137180 - DNA, 20 bp, synthetic construct
  source 1..20: mol_type = other DNA
gtttctctaacaaggaaaat

SEQ ID NO: 137181 - DNA, 20 bp, synthetic construct
  source 1..20: mol_type = other DNA
agtttctctaacaaggaaaa

SEQ ID NO: 137182 - DNA, 20 bp, synthetic construct
  source 1..20: mol_type = other DNA
aagtttctctaacaaggaaa

SEQ ID NO: 137183 - DNA, 20 bp, synthetic construct
  source 1..20: mol_type = other DNA
gaagtttctctaacaaggaa

SEQ ID NO: 137184 - DNA, 20 bp, synthetic construct
  source 1..20: mol_type = other DNA
ggaagtttctctaacaagga

SEQ ID NO: 137185 - DNA, 20 bp, synthetic construct
  source 1..20: mol_type = other DNA
aggaagtttctctaacaagg

SEQ ID NO: 137186 - DNA, 20 bp, synthetic construct
  source 1..20: mol_type = other DNA
taggaagtttctctaacaag

SEQ ID NO: 137187 - DNA, 20 bp, synthetic construct
  source 1..20: mol_type = other DNA
ttaggaagtttctctaacaa

SEQ ID NO: 137188 - DNA, 20 bp, synthetic construct
  source 1..20: mol_type = other DNA
tttaggaagtttctctaaca

SEQ ID NO: 137189 - DNA, 20 bp, synthetic construct
  source 1..20: mol_type = other DNA
gtttaggaagtttctctaac

SEQ ID NO: 137190 - DNA, 20 bp, synthetic construct
  source 1..20: mol_type = other DNA
tgtttaggaagtttctctaa

SEQ ID NO: 137191 - DNA, 20 bp, synthetic construct
  source 1..20: mol_type = other DNA
ctgtttaggaagtttctcta

SEQ ID NO: 137192 - DNA, 20 bp, synthetic construct
  source 1..20: mol_type = other DNA
gctgtttaggaagtttctct

SEQ ID NO: 137193 - DNA, 20 bp, synthetic construct
  source 1..20: mol_type = other DNA
agctgtttaggaagtttctc

SEQ ID NO: 137194 - DNA, 20 bp, synthetic construct
  source 1..20: mol_type = other DNA
aagctgtttaggaagtttct

SEQ ID NO: 137195 - DNA, 20 bp, synthetic construct
  source 1..20: mol_type = other DNA
aaagctgtttaggaagtttc

SEQ ID NO: 137196 - DNA, 20 bp, synthetic construct
  source 1..20: mol_type = other DNA
taaagctgtttaggaagttt

SEQ ID NO: 137197 - DNA, 20 bp, synthetic construct
  source 1..20: mol_type = other DNA
ataaagctgtttaggaagtt

SEQ ID NO: 137198 - DNA, 20 bp, synthetic construct
  source 1..20: mol_type = other DNA
tataaagctgtttaggaagt

SEQ ID NO: 137199 - DNA, 20 bp, synthetic construct
  source 1..20: mol_type = other DNA
gtataaagctgtttaggaag

SEQ ID NO: 137200 - DNA, 20 bp, synthetic construct
  source 1..20: mol_type = other DNA
tgtataaagctgtttaggaa

SEQ ID NO: 137201 - DNA, 20 bp, synthetic construct
  source 1..20: mol_type = other DNA
gtgtataaagctgtttagga

SEQ ID NO: 137202 - DNA, 20 bp, synthetic construct
  source 1..20: mol_type = other DNA
tgtgtataaagctgtttagg

SEQ ID NO: 137203 - DNA, 20 bp, synthetic construct
  source 1..20: mol_type = other DNA
gtgtgtataaagctgtttag

SEQ ID NO: 137204 - DNA, 20 bp, synthetic construct
  source 1..20: mol_type = other DNA
tgtgtgtataaagctgttta

SEQ ID NO: 137205 - DNA, 20 bp, synthetic construct
  source 1..20: mol_type = other DNA
gtgtgtgtataaagctgttt

SEQ ID NO: 137206 - DNA, 20 bp, synthetic construct
  source 1..20: mol_type = other DNA
tgtgtgtgtataaagctgtt

SEQ ID NO: 137207 - DNA, 20 bp, synthetic construct
  source 1..20: mol_type = other DNA
gtgtgtgtgtataaagctgt

SEQ ID NO: 137208 - DNA, 20 bp, synthetic construct
  source 1..20: mol_type = other DNA
tgtgtgtgtgtataaagctg

SEQ ID NO: 137209 - DNA, 20 bp, synthetic construct
  source 1..20: mol_type = other DNA
gtgtgtgtgtgtataaagct

SEQ ID NO: 137210 - DNA, 20 bp, synthetic construct
  source 1..20: mol_type = other DNA
tgtgtgtgtgtgtataaagc

SEQ ID NO: 137211 - DNA, 20 bp, synthetic construct
  source 1..20: mol_type = other DNA
gtgtgtgtgtgtgtataaag

SEQ ID NO: 137212 - DNA, 20 bp, synthetic construct
  source 1..20: mol_type = other DNA
tgtgtgtgtgtgtgtataaa

SEQ ID NO: 137213 - DNA, 20 bp, synthetic construct
  source 1..20: mol_type = other DNA
gtgtgtgtgtgtgtgtataa

SEQ ID NO: 137214 - DNA, 20 bp, synthetic construct
  source 1..20: mol_type = other DNA
tgtgtgtgtgtgtgtgtata

SEQ ID NO: 137215 - DNA, 20 bp, synthetic construct
  source 1..20: mol_type = other DNA
gtgtgtgtgtgtgtgtgtat

SEQ ID NO: 137216 - DNA, 20 bp, synthetic construct
  source 1..20: mol_type = other DNA
tgtgtgtgtgtgtgtgtgta

SEQ ID NO: 137217 - DNA, 20 bp, synthetic construct
  source 1..20: mol_type = other DNA
gtgtgtgtgtgtgtgtgtgt

SEQ ID NO: 137218 - DNA, 20 bp, synthetic construct
  source 1..20: mol_type = other DNA
tgtgtgtgtgtgtgtgtgtg

SEQ ID NO: 137219 - DNA, 20 bp, synthetic construct
  source 1..20: mol_type = other DNA
gtgtgtgtgtgtgtgtgtgt

SEQ ID NO: 137220 - DNA, 20 bp, synthetic construct
  source 1..20: mol_type = other DNA
tgtgtgtgtgtgtgtgtgtg

SEQ ID NO: 137221 - DNA, 20 bp, synthetic construct
  source 1..20: mol_type = other DNA
gtgtgtgtgtgtgtgtgtgt

SEQ ID NO: 137222 - DNA, 20 bp, synthetic construct
  source 1..20: mol_type = other DNA
tgtgtgtgtgtgtgtgtgtg

SEQ ID NO: 137223 - DNA, 20 bp, synthetic construct
  source 1..20: mol_type = other DNA
gtgtgtgtgtgtgtgtgtgt

SEQ ID NO: 137224 - DNA, 20 bp, synthetic construct
  source 1..20: mol_type = other DNA
tgtgtgtgtgtgtgtgtgtg

SEQ ID NO: 137225 - DNA, 20 bp, synthetic construct
  source 1..20: mol_type = other DNA
gtgtgtgtgtgtgtgtgtgt

SEQ ID NO: 137226 - DNA, 20 bp, synthetic construct
  source 1..20: mol_type = other DNA
tgtgtgtgtgtgtgtgtgtg

SEQ ID NO: 137227 - DNA, 20 bp, synthetic construct
  source 1..20: mol_type = other DNA
gtgtgtgtgtgtgtgtgtgt

SEQ ID NO: 137228 - DNA, 20 bp, synthetic construct
  source 1..20: mol_type = other DNA
tgtgtgtgtgtgtgtgtgtg

SEQ ID NO: 137229 - DNA, 20 bp, synthetic construct
  source 1..20: mol_type = other DNA
gtgtgtgtgtgtgtgtgtgt

SEQ ID NO: 137230 - DNA, 20 bp, synthetic construct
  source 1..20: mol_type = other DNA
tgtgtgtgtgtgtgtgtgtg

SEQ ID NO: 137231 - DNA, 20 bp, synthetic construct
  source 1..20: mol_type = other DNA
gtgtgtgtgtgtgtgtgtgt

SEQ ID NO: 137232 - DNA, 20 bp, synthetic construct
  source 1..20: mol_type = other DNA
tgtgtgtgtgtgtgtgtgtg

SEQ ID NO: 137233 - DNA, 20 bp, synthetic construct
  source 1..20: mol_type = other DNA
ttgtgtgtgtgtgtgtgtgt

SEQ ID NO: 137234 - DNA, 20 bp, synthetic construct
  source 1..20: mol_type = other DNA
tttgtgtgtgtgtgtgtgtg

SEQ ID NO: 137235 - DNA, 20 bp, synthetic construct
  source 1..20: mol_type = other DNA
gtttgtgtgtgtgtgtgtgt

SEQ ID NO: 137236 - DNA, 20 bp, synthetic construct
  source 1..20: mol_type = other DNA
tgtttgtgtgtgtgtgtgtg

SEQ ID NO: 137237 - DNA, 20 bp, synthetic construct
  source 1..20: mol_type = other DNA
gtgtttgtgtgtgtgtgtgt

SEQ ID NO: 137238 - DNA, 20 bp, synthetic construct
  source 1..20: mol_type = other DNA
tgtgtttgtgtgtgtgtgtg

SEQ ID NO: 137239 - DNA, 20 bp, synthetic construct
  source 1..20: mol_type = other DNA
gtgtgtttgtgtgtgtgtgt

SEQ ID NO: 137240 - DNA, 20 bp, synthetic construct
  source 1..20: mol_type = other DNA
tgtgtgtttgtgtgtgtgtg

SEQ ID NO: 137241 - DNA, 20 bp, synthetic construct
  source 1..20: mol_type = other DNA
gtgtgtgtttgtgtgtgtgt

SEQ ID NO: 137242 - DNA, 20 bp, synthetic construct
  source 1..20: mol_type = other DNA
tgtgtgtgtttgtgtgtgtg

SEQ ID NO: 137243 - DNA, 20 bp, synthetic construct
  source 1..20: mol_type = other DNA
gtgtgtgtgtttgtgtgtgt

SEQ ID NO: 137244 - DNA, 20 bp, synthetic construct
  source 1..20: mol_type = other DNA
ggtgtgtgtgtttgtgtgtg

SEQ ID NO: 137245 - DNA, 20 bp, synthetic construct
  source 1..20: mol_type = other DNA
gggtgtgtgtgtttgtgtgt

SEQ ID NO: 137246 - DNA, 20 bp, synthetic construct
  source 1..20: mol_type = other DNA
tgggtgtgtgtgtttgtgtg

SEQ ID NO: 137247 - DNA, 20 bp, synthetic construct
  source 1..20: mol_type = other DNA
ttgggtgtgtgtgtttgtgt

SEQ ID NO: 137248 - DNA, 20 bp, synthetic construct
  source 1..20: mol_type = other DNA
cttgggtgtgtgtgtttgtg

SEQ ID NO: 137249 - DNA, 20 bp, synthetic construct
  source 1..20: mol_type = other DNA
gcttgggtgtgtgtgtttgt

SEQ ID NO: 137250 - DNA, 20 bp, synthetic construct
  source 1..20: mol_type = other DNA
ggcttgggtgtgtgtgtttg

SEQ ID NO: 137251 - DNA, 20 bp, synthetic construct
  source 1..20: mol_type = other DNA
tggcttgggtgtgtgtgttt

SEQ ID NO: 137252 - DNA, 20 bp, synthetic construct
  source 1..20: mol_type = other DNA
gtggcttgggtgtgtgtgtt

SEQ ID NO: 137253 - DNA, 20 bp, synthetic construct
  source 1..20: mol_type = other DNA
tgtggcttgggtgtgtgtgt

SEQ ID NO: 137254 - DNA, 20 bp, synthetic construct
  source 1..20: mol_type = other DNA
ttgtggcttgggtgtgtgtg

SEQ ID NO: 137255 - DNA, 20 bp, synthetic construct
  source 1..20: mol_type = other DNA
cttgtggcttgggtgtgtgt

SEQ ID NO: 137256 - DNA, 20 bp, synthetic construct
  source 1..20: mol_type = other DNA
gcttgtggcttgggtgtgtg

SEQ ID NO: 137257 - DNA, 20 bp, synthetic construct
  source 1..20: mol_type = other DNA
agcttgtggcttgggtgtgt

SEQ ID NO: 137258 - DNA, 20 bp, synthetic construct
  source 1..20: mol_type = other DNA
aagcttgtggcttgggtgtg

SEQ ID NO: 137259 - DNA, 20 bp, synthetic construct
  source 1..20: mol_type = other DNA
caagcttgtggcttgggtgt

SEQ ID NO: 137260 - DNA, 20 bp, synthetic construct
  source 1..20: mol_type = other DNA
ccaagcttgtggcttgggtg

SEQ ID NO: 137261 - DNA, 20 bp, synthetic construct
  source 1..20: mol_type = other DNA
accaagcttgtggcttgggt

SEQ ID NO: 137262 - DNA, 20 bp, synthetic construct
  source 1..20: mol_type = other DNA
taccaagcttgtggcttggg

SEQ ID NO: 137263 - DNA, 20 bp, synthetic construct
  source 1..20: mol_type = other DNA
ataccaagcttgtggcttgg

SEQ ID NO: 137264 - DNA, 20 bp, synthetic construct
  source 1..20: mol_type = other DNA
tataccaagcttgtggcttg

SEQ ID NO: 137265 - DNA, 20 bp, synthetic construct
  source 1..20: mol_type = other DNA
ttataccaagcttgtggctt

SEQ ID NO: 137266 - DNA, 20 bp, synthetic construct
  source 1..20: mol_type = other DNA
tttataccaagcttgtggct

SEQ ID NO: 137267 - DNA, 20 bp, synthetic construct
  source 1..20: mol_type = other DNA
atttataccaagcttgtggc

SEQ ID NO: 137268 - DNA, 20 bp, synthetic construct
  source 1..20: mol_type = other DNA
aatttataccaagcttgtgg

SEQ ID NO: 137269 - DNA, 20 bp, synthetic construct
  source 1..20: mol_type = other DNA
aaatttataccaagcttgtg

SEQ ID NO: 137270 - DNA, 20 bp, synthetic construct
  source 1..20: mol_type = other DNA
taaatttataccaagcttgt

SEQ ID NO: 137271 - DNA, 20 bp, synthetic construct
  source 1..20: mol_type = other DNA
ttaaatttataccaagcttg

SEQ ID NO: 137272 - DNA, 20 bp, synthetic construct
  source 1..20: mol_type = other DNA
tttaaatttataccaagctt

SEQ ID NO: 137273 - DNA, 20 bp, synthetic construct
  source 1..20: mol_type = other DNA
ttttaaatttataccaagct

SEQ ID NO: 137274 - DNA, 20 bp, synthetic construct
  source 1..20: mol_type = other DNA
attttaaatttataccaagc

SEQ ID NO: 137275 - DNA, 20 bp, synthetic construct
  source 1..20: mol_type = other DNA
cattttaaatttataccaag

SEQ ID NO: 137276 - DNA, 20 bp, synthetic construct
  source 1..20: mol_type = other DNA
acattttaaatttataccaa

SEQ ID NO: 137277 - DNA, 20 bp, synthetic construct
  source 1..20: mol_type = other DNA
aacattttaaatttatacca

SEQ ID NO: 137278 - DNA, 20 bp, synthetic construct
  source 1..20: mol_type = other DNA
aaacattttaaatttatacc

SEQ ID NO: 137279 - DNA, 20 bp, synthetic construct
  source 1..20: mol_type = other DNA
taaacattttaaatttatac

SEQ ID NO: 137280 - DNA, 20 bp, synthetic construct
  source 1..20: mol_type = other DNA
ataaacattttaaatttata

SEQ ID NO: 137281 - DNA, 20 bp, synthetic construct
  source 1..20: mol_type = other DNA
aataaacattttaaatttat

SEQ ID NO: 137282 - DNA, 20 bp, synthetic construct
  source 1..20: mol_type = other DNA
aaataaacattttaaattta

SEQ ID NO: 137283 - DNA, 20 bp, synthetic construct
  source 1..20: mol_type = other DNA
taaataaacattttaaattt

SEQ ID NO: 137284 - DNA, 20 bp, synthetic construct
  source 1..20: mol_type = other DNA
ataaataaacattttaaatt

SEQ ID NO: 137285 - DNA, 20 bp, synthetic construct
  source 1..20: mol_type = other DNA
tataaataaacattttaaat

SEQ ID NO: 137286 - DNA, 20 bp, synthetic construct
  source 1..20: mol_type = other DNA
gtataaataaacattttaaa

SEQ ID NO: 137287 - DNA, 20 bp, synthetic construct
  source 1..20: mol_type = other DNA
tgtataaataaacattttaa

SEQ ID NO: 137288 - DNA, 20 bp, synthetic construct
  source 1..20: mol_type = other DNA
gtgtataaataaacatttta

SEQ ID NO: 137289 - DNA, 20 bp, synthetic construct
  source 1..20: mol_type = other DNA
tgtgtataaataaacatttt

SEQ ID NO: 137290 - DNA, 20 bp, synthetic construct
  source 1..20: mol_type = other DNA
gtgtgtataaataaacattt

SEQ ID NO: 137291 - DNA, 20 bp, synthetic construct
  source 1..20: mol_type = other DNA
tgtgtgtataaataaacatt

SEQ ID NO: 137292 - DNA, 20 bp, synthetic construct
  source 1..20: mol_type = other DNA
gtgtgtgtataaataaacat

SEQ ID NO: 137293 - DNA, 20 bp, synthetic construct
  source 1..20: mol_type = other DNA
tgtgtgtgtataaataaaca

SEQ ID NO: 137294 - DNA, 20 bp, synthetic construct
  source 1..20: mol_type = other DNA
gtgtgtgtgtataaataaac

SEQ ID NO: 137295 - DNA, 20 bp, synthetic construct
  source 1..20: mol_type = other DNA
tgtgtgtgtgtataaataaa

SEQ ID NO: 137296 - DNA, 20 bp, synthetic construct
  source 1..20: mol_type = other DNA
gtgtgtgtgtgtataaataa

SEQ ID NO: 137297 - DNA, 20 bp, synthetic construct
  source 1..20: mol_type = other DNA
tgtgtgtgtgtgtataaata

SEQ ID NO: 137298 - DNA, 20 bp, synthetic construct
  source 1..20: mol_type = other DNA
gtgtgtgtgtgtgtataaat

SEQ ID NO: 137299 - DNA, 20 bp, synthetic construct
  source 1..20: mol_type = other DNA
tgtgtgtgtgtgtgtataaa

SEQ ID NO: 137300 - DNA, 20 bp, synthetic construct
  source 1..20: mol_type = other DNA
gtgtgtgtgtgtgtgtataa

SEQ ID NO: 137301 - DNA, 20 bp, synthetic construct
  source 1..20: mol_type = other DNA
tgtgtgtgtgtgtgtgtata

SEQ ID NO: 137302 - DNA, 20 bp, synthetic construct
  source 1..20: mol_type = other DNA
gtgtgtgtgtgtgtgtgtat

SEQ ID NO: 137303 - DNA, 20 bp, synthetic construct
  source 1..20: mol_type = other DNA
tgtgtgtgtgtgtgtgtgta

SEQ ID NO: 137304 - DNA, 20 bp, synthetic construct
  source 1..20: mol_type = other DNA
gtgtgtgtgtgtgtgtgtgt

SEQ ID NO: 137305 - DNA, 20 bp, synthetic construct
  source 1..20: mol_type = other DNA
tgtgtgtgtgtgtgtgtgtg

SEQ ID NO: 137306 - DNA, 20 bp, synthetic construct
  source 1..20: mol_type = other DNA
gtgtgtgtgtgtgtgtgtgt

SEQ ID NO: 137307 - DNA, 20 bp, synthetic construct
  source 1..20: mol_type = other DNA
tgtgtgtgtgtgtgtgtgtg

SEQ ID NO: 137308 - DNA, 20 bp, synthetic construct
  source 1..20: mol_type = other DNA
gtgtgtgtgtgtgtgtgtgt

SEQ ID NO: 137309 - DNA, 20 bp, synthetic construct
  source 1..20: mol_type = other DNA
tgtgtgtgtgtgtgtgtgtg

SEQ ID NO: 137310 - DNA, 20 bp, synthetic construct
  source 1..20: mol_type = other DNA
gtgtgtgtgtgtgtgtgtgt

SEQ ID NO: 137311 - DNA, 20 bp, synthetic construct
  source 1..20: mol_type = other DNA
tgtgtgtgtgtgtgtgtgtg

SEQ ID NO: 137312 - DNA, 20 bp, synthetic construct
  source 1..20: mol_type = other DNA
gtgtgtgtgtgtgtgtgtgt

SEQ ID NO: 137313 - DNA, 20 bp, synthetic construct
  source 1..20: mol_type = other DNA
tgtgtgtgtgtgtgtgtgtg

SEQ ID NO: 137314 - DNA, 20 bp, synthetic construct
  source 1..20: mol_type = other DNA
gtgtgtgtgtgtgtgtgtgt

SEQ ID NO: 137315 - DNA, 20 bp, synthetic construct
  source 1..20: mol_type = other DNA
tgtgtgtgtgtgtgtgtgtg

SEQ ID NO: 137316 - DNA, 20 bp, synthetic construct
  source 1..20: mol_type = other DNA
gtgtgtgtgtgtgtgtgtgt

SEQ ID NO: 137317 - DNA, 20 bp, synthetic construct
  source 1..20: mol_type = other DNA
tgtgtgtgtgtgtgtgtgtg

SEQ ID NO: 137318 - DNA, 20 bp, synthetic construct
  source 1..20: mol_type = other DNA
gtgtgtgtgtgtgtgtgtgt

SEQ ID NO: 137319 - DNA, 20 bp, synthetic construct
  source 1..20: mol_type = other DNA
tgtgtgtgtgtgtgtgtgtg

SEQ ID NO: 137320 - DNA, 20 bp, synthetic construct
  source 1..20: mol_type = other DNA
gtgtgtgtgtgtgtgtgtgt

SEQ ID NO: 137321 - DNA, 20 bp, synthetic construct
  source 1..20: mol_type = other DNA
ggtgtgtgtgtgtgtgtgtg

SEQ ID NO: 137322 - DNA, 20 bp, synthetic construct
  source 1..20: mol_type = other DNA
gggtgtgtgtgtgtgtgtgt

SEQ ID NO: 137323 - DNA, 20 bp, synthetic construct
  source 1..20: mol_type = other DNA
ggggtgtgtgtgtgtgtgtg

SEQ ID NO: 137324 - DNA, 20 bp, synthetic construct
  source 1..20: mol_type = other DNA
tggggtgtgtgtgtgtgtgt

SEQ ID NO: 137325 - DNA, 20 bp, synthetic construct
  source 1..20: mol_type = other DNA
ttggggtgtgtgtgtgtgtg

SEQ ID NO: 137326 - DNA, 20 bp, synthetic construct
  source 1..20: mol_type = other DNA
cttggggtgtgtgtgtgtgt

SEQ ID NO: 137327 - DNA, 20 bp, synthetic construct
  source 1..20: mol_type = other DNA
gcttggggtgtgtgtgtgtg

SEQ ID NO: 137328 - DNA, 20 bp, synthetic construct
  source 1..20: mol_type = other DNA
ggcttggggtgtgtgtgtgt

SEQ ID NO: 137329 - DNA, 20 bp, synthetic construct
  source 1..20: mol_type = other DNA
tggcttggggtgtgtgtgtg

SEQ ID NO: 137330 - DNA, 20 bp, synthetic construct
  source 1..20: mol_type = other DNA
gtggcttggggtgtgtgtgt

SEQ ID NO: 137331 - DNA, 20 bp, synthetic construct
  source 1..20: mol_type = other DNA
tgtggcttggggtgtgtgtg

SEQ ID NO: 137332 - DNA, 20 bp, synthetic construct
  source 1..20: mol_type = other DNA
ttgtggcttggggtgtgtgt

SEQ ID NO: 137333 - DNA, 20 bp, synthetic construct
  source 1..20: mol_type = other DNA
cttgtggcttggggtgtgtg

SEQ ID NO: 137334 - DNA, 20 bp, synthetic construct
  source 1..20: mol_type = other DNA
gcttgtggcttggggtgtgt

SEQ ID NO: 137335 - DNA, 20 bp, synthetic construct
  source 1..20: mol_type = other DNA
agcttgtggcttggggtgtg

SEQ ID NO: 137336 - DNA, 20 bp, synthetic construct
  source 1..20: mol_type = other DNA
aagcttgtggcttggggtgt

SEQ ID NO: 137337 - DNA, 20 bp, synthetic construct
  source 1..20: mol_type = other DNA
caagcttgtggcttggggtg

SEQ ID NO: 137338 - DNA, 20 bp, synthetic construct
  source 1..20: mol_type = other DNA
ccaagcttgtggcttggggt

SEQ ID NO: 137339 - DNA, 20 bp, synthetic construct
  source 1..20: mol_type = other DNA
accaagcttgtggcttgggg

SEQ ID NO: 137340 - DNA, 20 bp, synthetic construct
  source 1..20: mol_type = other DNA
taccaagcttgtggcttggg

SEQ ID NO: 137341 - DNA, 20 bp, synthetic construct
  source 1..20: mol_type = other DNA
ataccaagcttgtggcttgg

SEQ ID NO: 137342 - DNA, 20 bp, synthetic construct
  source 1..20: mol_type = other DNA
tataccaagcttgtggcttg

SEQ ID NO: 137343 - DNA, 20 bp, synthetic construct
  source 1..20: mol_type = other DNA
ttataccaagcttgtggctt

SEQ ID NO: 137344 - DNA, 20 bp, synthetic construct
  source 1..20: mol_type = other DNA
tttataccaagcttgtggct

SEQ ID NO: 137345 - DNA, 20 bp, synthetic construct
  source 1..20: mol_type = other DNA
gtttataccaagcttgtggc

SEQ ID NO: 137346 - DNA, 20 bp, synthetic construct
  source 1..20: mol_type = other DNA
agtttataccaagcttgtgg

SEQ ID NO: 137347 - DNA, 20 bp, synthetic construct
  source 1..20: mol_type = other DNA
aagtttataccaagcttgtg

SEQ ID NO: 137348 - DNA, 20 bp, synthetic construct
  source 1..20: mol_type = other DNA
taagtttataccaagcttgt

SEQ ID NO: 137349 - DNA, 20 bp, synthetic construct
  source 1..20: mol_type = other DNA
ttaagtttataccaagcttg

SEQ ID NO: 137350 - DNA, 20 bp, synthetic construct
  source 1..20: mol_type = other DNA
tttaagtttataccaagctt

SEQ ID NO: 137351 - DNA, 20 bp, synthetic construct
  source 1..20: mol_type = other DNA
ttttaagtttataccaagct

SEQ ID NO: 137352 - DNA, 20 bp, synthetic construct
  source 1..20: mol_type = other DNA
attttaagtttataccaagc

SEQ ID NO: 137353 - DNA, 20 bp, synthetic construct
  source 1..20: mol_type = other DNA
cattttaagtttataccaag

SEQ ID NO: 137354 - DNA, 20 bp, synthetic construct
  source 1..20: mol_type = other DNA
acattttaagtttataccaa

SEQ ID NO: 137355 - DNA, 20 bp, synthetic construct
  source 1..20: mol_type = other DNA
aacattttaagtttatacca

SEQ ID NO: 137356 - DNA, 20 bp, synthetic construct
  source 1..20: mol_type = other DNA
aaacattttaagtttatacc

SEQ ID NO: 137357 - DNA, 20 bp, synthetic construct
  source 1..20: mol_type = other DNA
taaacattttaagtttatac

SEQ ID NO: 137358 - DNA, 20 bp, synthetic construct
  source 1..20: mol_type = other DNA
ataaacattttaagtttata

SEQ ID NO: 137359 - DNA, 20 bp, synthetic construct
  source 1..20: mol_type = other DNA
aataaacattttaagtttat

SEQ ID NO: 137360 - DNA, 20 bp, synthetic construct
  source 1..20: mol_type = other DNA
aaataaacattttaagttta

SEQ ID NO: 137361 - DNA, 20 bp, synthetic construct
  source 1..20: mol_type = other DNA
taaataaacattttaagttt

SEQ ID NO: 137362 - DNA, 20 bp, synthetic construct
  source 1..20: mol_type = other DNA
ataaataaacattttaagtt

SEQ ID NO: 137363 - DNA, 20 bp, synthetic construct
  source 1..20: mol_type = other DNA
tataaataaacattttaagt

SEQ ID NO: 137364 - DNA, 20 bp, synthetic construct
  source 1..20: mol_type = other DNA
atataaataaacattttaag

SEQ ID NO: 137365 - DNA, 20 bp, synthetic construct
  source 1..20: mol_type = other DNA
aatataaataaacattttaa

SEQ ID NO: 137366 - DNA, 20 bp, synthetic construct
  source 1..20: mol_type = other DNA
gaatataaataaacatttta

SEQ ID NO: 137367 - DNA, 20 bp, synthetic construct
  source 1..20: mol_type = other DNA
agaatataaataaacatttt

SEQ ID NO: 137368 - DNA, 20 bp, synthetic construct
  source 1..20: mol_type = other DNA
cagaatataaataaacattt

SEQ ID NO: 137369 - DNA, 20 bp, synthetic construct
  source 1..20: mol_type = other DNA
tcagaatataaataaacatt

SEQ ID NO: 137370 - DNA, 20 bp, synthetic construct
  source 1..20: mol_type = other DNA
atcagaatataaataaacat

SEQ ID NO: 137371 - DNA, 20 bp, synthetic construct
  source 1..20: mol_type = other DNA
tatcagaatataaataaaca

SEQ ID NO: 137372 - DNA, 20 bp, synthetic construct
  source 1..20: mol_type = other DNA
ttatcagaatataaataaac

SEQ ID NO: 137373 - DNA, 20 bp, synthetic construct
  source 1..20: mol_type = other DNA
cttatcagaatataaataaa

SEQ ID NO: 137374 - DNA, 20 bp, synthetic construct
  source 1..20: mol_type = other DNA
tcttatcagaatataaataa

SEQ ID NO: 137375 - DNA, 20 bp, synthetic construct
  source 1..20: mol_type = other DNA
atcttatcagaatataaata

SEQ ID NO: 137376 - DNA, 20 bp, synthetic construct
  source 1..20: mol_type = other DNA
catcttatcagaatataaat

SEQ ID NO: 137377 - DNA, 20 bp, synthetic construct
  source 1..20: mol_type = other DNA
tcatcttatcagaatataaa

SEQ ID NO: 137378 - DNA, 20 bp, synthetic construct
  source 1..20: mol_type = other DNA
ttcatcttatcagaatataa

SEQ ID NO: 137379 - DNA, 20 bp, synthetic construct
  source 1..20: mol_type = other DNA
tttcatcttatcagaatata

SEQ ID NO: 137380 - DNA, 20 bp, synthetic construct
  source 1..20: mol_type = other DNA
atttcatcttatcagaatat

SEQ ID NO: 137381 - DNA, 20 bp, synthetic construct
  source 1..20: mol_type = other DNA
aatttcatcttatcagaata

SEQ ID NO: 137382 - DNA, 20 bp, synthetic construct
  source 1..20: mol_type = other DNA
aaatttcatcttatcagaat

SEQ ID NO: 137383 - DNA, 20 bp, synthetic construct
  source 1..20: mol_type = other DNA
taaatttcatcttatcagaa

SEQ ID NO: 137384 - DNA, 20 bp, synthetic construct
  source 1..20: mol_type = other DNA
ataaatttcatcttatcaga

SEQ ID NO: 137385 - DNA, 20 bp, synthetic construct
  source 1..20: mol_type = other DNA
cataaatttcatcttatcag

SEQ ID NO: 137386 - DNA, 20 bp, synthetic construct
  source 1..20: mol_type = other DNA
gcataaatttcatcttatca

SEQ ID NO: 137387 - DNA, 20 bp, synthetic construct
  source 1..20: mol_type = other DNA
ggcataaatttcatcttatc

SEQ ID NO: 137388 - DNA, 20 bp, synthetic construct
  source 1..20: mol_type = other DNA
aggcataaatttcatcttat

SEQ ID NO: 137389 - DNA, 20 bp, synthetic construct
  source 1..20: mol_type = other DNA
taggcataaatttcatctta

SEQ ID NO: 137390 - DNA, 20 bp, synthetic construct
  source 1..20: mol_type = other DNA
gtaggcataaatttcatctt

SEQ ID NO: 137391 - DNA, 20 bp, synthetic construct
  source 1..20: mol_type = other DNA
ggtaggcataaatttcatct

SEQ ID NO: 137392 - DNA, 20 bp, synthetic construct
  source 1..20: mol_type = other DNA
tggtaggcataaatttcatc

SEQ ID NO: 137393 - DNA, 20 bp, synthetic construct
  source 1..20: mol_type = other DNA
ctggtaggcataaatttcat

SEQ ID NO: 137394 - DNA, 20 bp, synthetic construct
  source 1..20: mol_type = other DNA
cctggtaggcataaatttca

SEQ ID NO: 137395 - DNA, 20 bp, synthetic construct
  source 1..20: mol_type = other DNA
tcctggtaggcataaatttc

SEQ ID NO: 137396 - DNA, 20 bp, synthetic construct
  source 1..20: mol_type = other DNA
atcctggtaggcataaattt

SEQ ID NO: 137397 - DNA, 20 bp, synthetic construct
  source 1..20: mol_type = other DNA
aatcctggtaggcataaatt

SEQ ID NO: 137398 - DNA, 20 bp, synthetic construct
  source 1..20: mol_type = other DNA
aaatcctggtaggcataaat

SEQ ID NO: 137399 - DNA, 20 bp, synthetic construct
  source 1..20: mol_type = other DNA
aaaatcctggtaggcataaa

SEQ ID NO: 137400 - DNA, 20 bp, synthetic construct
  source 1..20: mol_type = other DNA
aaaaatcctggtaggcataa

SEQ ID NO: 137401 - DNA, 20 bp, synthetic construct
  source 1..20: mol_type = other DNA
taaaaatcctggtaggcata

SEQ ID NO: 137402 - DNA, 20 bp, synthetic construct
  source 1..20: mol_type = other DNA
ttaaaaatcctggtaggcat

SEQ ID NO: 137403 - DNA, 20 bp, synthetic construct
  source 1..20: mol_type = other DNA
attaaaaatcctggtaggca

SEQ ID NO: 137404 - DNA, 20 bp, synthetic construct
  source 1..20: mol_type = other DNA
aattaaaaatcctggtaggc

SEQ ID NO: 137405 - DNA, 20 bp, synthetic construct
  source 1..20: mol_type = other DNA
caattaaaaatcctggtagg

SEQ ID NO: 137406 - DNA, 20 bp, synthetic construct
  source 1..20: mol_type = other DNA
tcaattaaaaatcctggtag

SEQ ID NO: 137407 - DNA, 20 bp, synthetic construct
  source 1..20: mol_type = other DNA
ttcaattaaaaatcctggta

SEQ ID NO: 137408 - DNA, 20 bp, synthetic construct
  source 1..20: mol_type = other DNA
attcaattaaaaatcctggt

SEQ ID NO: 137409 - DNA, 20 bp, synthetic construct
  source 1..20: mol_type = other DNA
tattcaattaaaaatcctgg

SEQ ID NO: 137410 - DNA, 20 bp, synthetic construct
  source 1..20: mol_type = other DNA
ctattcaattaaaaatcctg

SEQ ID NO: 137411 - DNA, 20 bp, synthetic construct
  source 1..20: mol_type = other DNA
cctattcaattaaaaatcct

SEQ ID NO: 137412 - DNA, 20 bp, synthetic construct
  source 1..20: mol_type = other DNA
tcctattcaattaaaaatcc

SEQ ID NO: 137413 - DNA, 20 bp, synthetic construct
  source 1..20: mol_type = other DNA
atcctattcaattaaaaatc

SEQ ID NO: 137414 - DNA, 20 bp, synthetic construct
  source 1..20: mol_type = other DNA
aatcctattcaattaaaaat

SEQ ID NO: 137415 - DNA, 20 bp, synthetic construct
  source 1..20: mol_type = other DNA
caatcctattcaattaaaaa

SEQ ID NO: 137416 - DNA, 20 bp, synthetic construct
  source 1..20: mol_type = other DNA
tcaatcctattcaattaaaa

SEQ ID NO: 137417 - DNA, 20 bp, synthetic construct
  source 1..20: mol_type = other DNA
atcaatcctattcaattaaa

SEQ ID NO: 137418 - DNA, 20 bp, synthetic construct
  source 1..20: mol_type = other DNA
catcaatcctattcaattaa

SEQ ID NO: 137419 - DNA, 20 bp, synthetic construct
  source 1..20: mol_type = other DNA
tcatcaatcctattcaatta

SEQ ID NO: 137420 - DNA, 20 bp, synthetic construct
  source 1..20: mol_type = other DNA
ttcatcaatcctattcaatt

SEQ ID NO: 137421 - DNA, 20 bp, synthetic construct
  source 1..20: mol_type = other DNA
tttcatcaatcctattcaat

SEQ ID NO: 137422 - DNA, 20 bp, synthetic construct
  source 1..20: mol_type = other DNA
atttcatcaatcctattcaa

SEQ ID NO: 137423 - DNA, 20 bp, synthetic construct
  source 1..20: mol_type = other DNA
tatttcatcaatcctattca

SEQ ID NO: 137424 - DNA, 20 bp, synthetic construct
  source 1..20: mol_type = other DNA
gtatttcatcaatcctattc

SEQ ID NO: 137425 - DNA, 20 bp, synthetic construct
  source 1..20: mol_type = other DNA
agtatttcatcaatcctatt

SEQ ID NO: 137426 - DNA, 20 bp, synthetic construct
  source 1..20: mol_type = other DNA
tagtatttcatcaatcctat

SEQ ID NO: 137427 - DNA, 20 bp, synthetic construct
  source 1..20: mol_type = other DNA
ttagtatttcatcaatccta

SEQ ID NO: 137428 - DNA, 20 bp, synthetic construct
  source 1..20: mol_type = other DNA
cttagtatttcatcaatcct

SEQ ID NO: 137429 - DNA, 20 bp, synthetic construct
  source 1..20: mol_type = other DNA
ccttagtatttcatcaatcc

SEQ ID NO: 137430 - DNA, 20 bp, synthetic construct
  source 1..20: mol_type = other DNA
cccttagtatttcatcaatc

SEQ ID NO: 137431 - DNA, 20 bp, synthetic construct
  source 1..20: mol_type = other DNA
tcccttagtatttcatcaat

SEQ ID NO: 137432 - DNA, 20 bp, synthetic construct
  source 1..20: mol_type = other DNA
ttcccttagtatttcatcaa

SEQ ID NO: 137433 - DNA, 20 bp, synthetic construct
  source 1..20: mol_type = other DNA
tttcccttagtatttcatca

SEQ ID NO: 137434 - DNA, 20 bp, synthetic construct
  source 1..20: mol_type = other DNA
ttttcccttagtatttcatc

SEQ ID NO: 137435 - DNA, 20 bp, synthetic construct
  source 1..20: mol_type = other DNA
tttttcccttagtatttcat

SEQ ID NO: 137436 - DNA, 20 bp, synthetic construct
  source 1..20: mol_type = other DNA
gtttttcccttagtatttca

SEQ ID NO: 137437 - DNA, 20 bp, synthetic construct
  source 1..20: mol_type = other DNA
agtttttcccttagtatttc

SEQ ID NO: 137438 - DNA, 20 bp, synthetic construct
  source 1..20: mol_type = other DNA
aagtttttcccttagtattt

SEQ ID NO: 137439 - DNA, 20 bp, synthetic construct
  source 1..20: mol_type = other DNA
aaagtttttcccttagtatt

SEQ ID NO: 137440 - DNA, 20 bp, synthetic construct
  source 1..20: mol_type = other DNA
aaaagtttttcccttagtat

SEQ ID NO: 137441 - DNA, 20 bp, synthetic construct
  source 1..20: mol_type = other DNA
gaaaagtttttcccttagta

SEQ ID NO: 137442 - DNA, 20 bp, synthetic construct
  source 1..20: mol_type = other DNA
tgaaaagtttttcccttagt

SEQ ID NO: 137443 - DNA, 20 bp, synthetic construct
  source 1..20: mol_type = other DNA
ctgaaaagtttttcccttag

SEQ ID NO: 137444 - DNA, 20 bp, synthetic construct
  source 1..20: mol_type = other DNA
actgaaaagtttttccctta

SEQ ID NO: 137445 - DNA, 20 bp, synthetic construct
  source 1..20: mol_type = other DNA
gactgaaaagtttttccctt

SEQ ID NO: 137446 - DNA, 20 bp, synthetic construct
  source 1..20: mol_type = other DNA
ggactgaaaagtttttccct

SEQ ID NO: 137447 - DNA, 20 bp, synthetic construct
  source 1..20: mol_type = other DNA
aggactgaaaagtttttccc

SEQ ID NO: 137448 - DNA, 20 bp, synthetic construct
  source 1..20: mol_type = other DNA
caggactgaaaagtttttcc

SEQ ID NO: 137449 - DNA, 20 bp, synthetic construct
  source 1..20: mol_type = other DNA
acaggactgaaaagtttttc

SEQ ID NO: 137450 - DNA, 20 bp, synthetic construct
  source 1..20: mol_type = other DNA
cacaggactgaaaagttttt

SEQ ID NO: 137451 - DNA, 20 bp, synthetic construct
  source 1..20: mol_type = other DNA
gcacaggactgaaaagtttt

SEQ ID NO: 137452 - DNA, 20 bp, synthetic construct
  source 1..20: mol_type = other DNA
tgcacaggactgaaaagttt

SEQ ID NO: 137453 - DNA, 20 bp, synthetic construct
  source 1..20: mol_type = other DNA
atgcacaggactgaaaagtt

SEQ ID NO: 137454 - DNA, 20 bp, synthetic construct
  source 1..20: mol_type = other DNA
catgcacaggactgaaaagt

SEQ ID NO: 137455 - DNA, 20 bp, synthetic construct
  source 1..20: mol_type = other DNA
ccatgcacaggactgaaaag

SEQ ID NO: 137456 - DNA, 20 bp, synthetic construct
  source 1..20: mol_type = other DNA
gccatgcacaggactgaaaa

SEQ ID NO: 137457 - DNA, 20 bp, synthetic construct
  source 1..20: mol_type = other DNA
agccatgcacaggactgaaa

SEQ ID NO: 137458 - DNA, 20 bp, synthetic construct
  source 1..20: mol_type = other DNA
tagccatgcacaggactgaa

SEQ ID NO: 137459 - DNA, 20 bp, synthetic construct
  source 1..20: mol_type = other DNA
ttagccatgcacaggactga

SEQ ID NO: 137460 - DNA, 20 bp, synthetic construct
  source 1..20: mol_type = other DNA
tttagccatgcacaggactg

SEQ ID NO: 137461 - DNA, 20 bp, synthetic construct
  source 1..20: mol_type = other DNA
ctttagccatgcacaggact

SEQ ID NO: 137462 - DNA, 20 bp, synthetic construct
  source 1..20: mol_type = other DNA
cctttagccatgcacaggac

SEQ ID NO: 137463 - DNA, 20 bp, synthetic construct
  source 1..20: mol_type = other DNA
acctttagccatgcacagga

SEQ ID NO: 137464 - DNA, 20 bp, synthetic construct
  source 1..20: mol_type = other DNA
aacctttagccatgcacagg

SEQ ID NO: 137465 - DNA, 20 bp, synthetic construct
  source 1..20: mol_type = other DNA
aaacctttagccatgcacag

SEQ ID NO: 137466 - DNA, 20 bp, synthetic construct
  source 1..20: mol_type = other DNA
taaacctttagccatgcaca

SEQ ID NO: 137467 - DNA, 20 bp, synthetic construct
  source 1..20: mol_type = other DNA
ttaaacctttagccatgcac

SEQ ID NO: 137468 - DNA, 20 bp, synthetic construct
  source 1..20: mol_type = other DNA
tttaaacctttagccatgca

SEQ ID NO: 137469 - DNA, 20 bp, synthetic construct
  source 1..20: mol_type = other DNA
ttttaaacctttagccatgc

SEQ ID NO: 137470 - DNA, 20 bp, synthetic construct
  source 1..20: mol_type = other DNA
attttaaacctttagccatg

SEQ ID NO: 137471 - DNA, 20 bp, synthetic construct
  source 1..20: mol_type = other DNA
tattttaaacctttagccat

SEQ ID NO: 137472 - DNA, 20 bp, synthetic construct
  source 1..20: mol_type = other DNA
gtattttaaacctttagcca

SEQ ID NO: 137473 - DNA, 20 bp, synthetic construct
  source 1..20: mol_type = other DNA
agtattttaaacctttagcc

SEQ ID NO: 137474 - DNA, 20 bp, synthetic construct
  source 1..20: mol_type = other DNA
gagtattttaaacctttagc

SEQ ID NO: 137475 - DNA, 20 bp, synthetic construct
  source 1..20: mol_type = other DNA
tgagtattttaaacctttag

SEQ ID NO: 137476 - DNA, 20 bp, synthetic construct
  source 1..20: mol_type = other DNA
ctgagtattttaaaccttta

SEQ ID NO: 137477 - DNA, 20 bp, synthetic construct
  source 1..20: mol_type = other DNA
cctgagtattttaaaccttt

SEQ ID NO: 137478 - DNA, 20 bp, synthetic construct
  source 1..20: mol_type = other DNA
tcctgagtattttaaacctt

SEQ ID NO: 137479 - DNA, 20 bp, synthetic construct
  source 1..20: mol_type = other DNA
ttcctgagtattttaaacct

SEQ ID NO: 137480 - DNA, 20 bp, synthetic construct
  source 1..20: mol_type = other DNA
cttcctgagtattttaaacc

SEQ ID NO: 137481 - DNA, 20 bp, synthetic construct
  source 1..20: mol_type = other DNA
ccttcctgagtattttaaac

SEQ ID NO: 137482 - DNA, 20 bp, synthetic construct
  source 1..20: mol_type = other DNA
cccttcctgagtattttaaa

SEQ ID NO: 137483 - DNA, 20 bp, synthetic construct
  source 1..20: mol_type = other DNA
gcccttcctgagtattttaa

SEQ ID NO: 137484 - DNA, 20 bp, synthetic construct
  source 1..20: mol_type = other DNA
ggcccttcctgagtatttta

SEQ ID NO: 137485 - DNA, 20 bp, synthetic construct
  source 1..20: mol_type = other DNA
tggcccttcctgagtatttt

SEQ ID NO: 137486 - DNA, 20 bp, synthetic construct
  source 1..20: mol_type = other DNA
ctggcccttcctgagtattt

SEQ ID NO: 137487 - DNA, 20 bp, synthetic construct
  source 1..20: mol_type = other DNA
cctggcccttcctgagtatt

SEQ ID NO: 137488 - DNA, 20 bp, synthetic construct
  source 1..20: mol_type = other DNA
gcctggcccttcctgagtat

SEQ ID NO: 137489 - DNA, 20 bp, synthetic construct
  source 1..20: mol_type = other DNA
tgcctggcccttcctgagta

SEQ ID NO: 137490 - DNA, 20 bp, synthetic construct
  source 1..20: mol_type = other DNA
gtgcctggcccttcctgagt

SEQ ID NO: 137491 - DNA, 20 bp, synthetic construct
  source 1..20: mol_type = other DNA
cgtgcctggcccttcctgag

SEQ ID NO: 137492 - DNA, 20 bp, synthetic construct
  source 1..20: mol_type = other DNA
ccgtgcctggcccttcctga

SEQ ID NO: 137493 - DNA, 20 bp, synthetic construct
  source 1..20: mol_type = other DNA
accgtgcctggcccttcctg

SEQ ID NO: 137494 - DNA, 20 bp, synthetic construct
  source 1..20: mol_type = other DNA
caccgtgcctggcccttcct

SEQ ID NO: 137495 - DNA, 20 bp, synthetic construct
  source 1..20: mol_type = other DNA
ccaccgtgcctggcccttcc

SEQ ID NO: 137496 - DNA, 20 bp, synthetic construct
  source 1..20: mol_type = other DNA
gccaccgtgcctggcccttc

SEQ ID NO: 137497 - DNA, 20 bp, synthetic construct
  source 1..20: mol_type = other DNA
agccaccgtgcctggccctt

SEQ ID NO: 137498 - DNA, 20 bp, synthetic construct
  source 1..20: mol_type = other DNA
gagccaccgtgcctggccct

SEQ ID NO: 137499 - DNA, 20 bp, synthetic construct
  source 1..20: mol_type = other DNA
tgagccaccgtgcctggccc

SEQ ID NO: 137500 - DNA, 20 bp, synthetic construct
  source 1..20: mol_type = other DNA
gtgagccaccgtgcctggcc

SEQ ID NO: 137501 - DNA, 20 bp, synthetic construct
  source 1..20: mol_type = other DNA
tgtgagccaccgtgcctggc

SEQ ID NO: 137502 - DNA, 20 bp, synthetic construct
  source 1..20: mol_type = other DNA
gtgtgagccaccgtgcctgg

SEQ ID NO: 137503 - DNA, 20 bp, synthetic construct
  source 1..20: mol_type = other DNA
ggtgtgagccaccgtgcctg

SEQ ID NO: 137504 - DNA, 20 bp, synthetic construct
  source 1..20: mol_type = other DNA
aggtgtgagccaccgtgcct

SEQ ID NO: 137505 - DNA, 20 bp, synthetic construct
  source 1..20: mol_type = other DNA
caggtgtgagccaccgtgcc

SEQ ID NO: 137506 - DNA, 20 bp, synthetic construct
  source 1..20: mol_type = other DNA
acaggtgtgagccaccgtgc

SEQ ID NO: 137507 - DNA, 20 bp, synthetic construct
  source 1..20: mol_type = other DNA
tacaggtgtgagccaccgtg

SEQ ID NO: 137508 - DNA, 20 bp, synthetic construct
  source 1..20: mol_type = other DNA
ttacaggtgtgagccaccgt

SEQ ID NO: 137509 - DNA, 20 bp, synthetic construct
  source 1..20: mol_type = other DNA
attacaggtgtgagccaccg

SEQ ID NO: 137510 - DNA, 20 bp, synthetic construct
  source 1..20: mol_type = other DNA
gattacaggtgtgagccacc

SEQ ID NO: 137511 - DNA, 20 bp, synthetic construct
  source 1..20: mol_type = other DNA
ggattacaggtgtgagccac

SEQ ID NO: 137512 - DNA, 20 bp, synthetic construct
  source 1..20: mol_type = other DNA
gggattacaggtgtgagcca

SEQ ID NO: 137513 - DNA, 20 bp, synthetic construct
  source 1..20: mol_type = other DNA
tgggattacaggtgtgagcc

SEQ ID NO: 137514 - DNA, 20 bp, synthetic construct
  source 1..20: mol_type = other DNA
ctgggattacaggtgtgagc

SEQ ID NO: 137515 - DNA, 20 bp, synthetic construct
  source 1..20: mol_type = other DNA
actgggattacaggtgtgag

SEQ ID NO: 137516 - DNA, 20 bp, synthetic construct
  source 1..20: mol_type = other DNA
cactgggattacaggtgtga

SEQ ID NO: 137517 - DNA, 20 bp, synthetic construct
  source 1..20: mol_type = other DNA
gcactgggattacaggtgtg

SEQ ID NO: 137518 - DNA, 20 bp, synthetic construct
  source 1..20: mol_type = other DNA
agcactgggattacaggtgt

SEQ ID NO: 137519 - DNA, 20 bp, synthetic construct
  source 1..20: mol_type = other DNA
aagcactgggattacaggtg

SEQ ID NO: 137520 - DNA, 20 bp, synthetic construct
  source 1..20: mol_type = other DNA
aaagcactgggattacaggt

SEQ ID NO: 137521 - DNA, 20 bp, synthetic construct
  source 1..20: mol_type = other DNA
caaagcactgggattacagg

SEQ ID NO: 137522 - DNA, 20 bp, synthetic construct
  source 1..20: mol_type = other DNA
ccaaagcactgggattacag

SEQ ID NO: 137523 - DNA, 20 bp, synthetic construct
  source 1..20: mol_type = other DNA
cccaaagcactgggattaca

SEQ ID NO: 137524 - DNA, 20 bp, synthetic construct
  source 1..20: mol_type = other DNA
tcccaaagcactgggattac

SEQ ID NO: 137525 - DNA, 20 bp, synthetic construct
  source 1..20: mol_type = other DNA
ctcccaaagcactgggatta

SEQ ID NO: 137526 - DNA, 20 bp, synthetic construct
  source 1..20: mol_type = other DNA
cctcccaaagcactgggatt

SEQ ID NO: 137527 - DNA, 20 bp, synthetic construct
  source 1..20: mol_type = other DNA
gcctcccaaagcactgggat

SEQ ID NO: 137528 - DNA, 20 bp, synthetic construct
  source 1..20: mol_type = other DNA
agcctcccaaagcactggga

SEQ ID NO: 137529 - DNA, 20 bp, synthetic construct
  source 1..20: mol_type = other DNA
cagcctcccaaagcactggg

SEQ ID NO: 137530 - DNA, 20 bp, synthetic construct
  source 1..20: mol_type = other DNA
tcagcctcccaaagcactgg

SEQ ID NO: 137531 - DNA, 20 bp, synthetic construct
  source 1..20: mol_type = other DNA
ctcagcctcccaaagcactg

SEQ ID NO: 137532 - DNA, 20 bp, synthetic construct
  source 1..20: mol_type = other DNA
cctcagcctcccaaagcact

SEQ ID NO: 137533 - DNA, 20 bp, synthetic construct
  source 1..20: mol_type = other DNA
gcctcagcctcccaaagcac

SEQ ID NO: 137534 - DNA, 20 bp, synthetic construct
  source 1..20: mol_type = other DNA
cgcctcagcctcccaaagca

SEQ ID NO: 137535 - DNA, 20 bp, synthetic construct
  source 1..20: mol_type = other DNA
ccgcctcagcctcccaaagc

SEQ ID NO: 137536 - DNA, 20 bp, synthetic construct
  source 1..20: mol_type = other DNA
cccgcctcagcctcccaaag

SEQ ID NO: 137537 - DNA, 20 bp, synthetic construct
  source 1..20: mol_type = other DNA
acccgcctcagcctcccaaa

SEQ ID NO: 137538 - DNA, 20 bp, synthetic construct
  source 1..20: mol_type = other DNA
cacccgcctcagcctcccaa

SEQ ID NO: 137539 - DNA, 20 bp, synthetic construct
  source 1..20: mol_type = other DNA
ccacccgcctcagcctccca

SEQ ID NO: 137540 - DNA, 20 bp, synthetic construct
  source 1..20: mol_type = other DNA
tccacccgcctcagcctccc

SEQ ID NO: 137541 - DNA, 20 bp, synthetic construct
  source 1..20: mol_type = other DNA
atccacccgcctcagcctcc

SEQ ID NO: 137542 - DNA, 20 bp, synthetic construct
  source 1..20: mol_type = other DNA
gatccacccgcctcagcctc

SEQ ID NO: 137543 - DNA, 20 bp, synthetic construct
  source 1..20: mol_type = other DNA
tgatccacccgcctcagcct

SEQ ID NO: 137544 - DNA, 20 bp, synthetic construct
  source 1..20: mol_type = other DNA
atgatccacccgcctcagcc

SEQ ID NO: 137545 - DNA, 20 bp, synthetic construct
  source 1..20: mol_type = other DNA
gatgatccacccgcctcagc

SEQ ID NO: 137546 - DNA, 20 bp, synthetic construct
  source 1..20: mol_type = other DNA
agatgatccacccgcctcag

SEQ ID NO: 137547 - DNA, 20 bp, synthetic construct
  source 1..20: mol_type = other DNA
cagatgatccacccgcctca

SEQ ID NO: 137548 - DNA, 20 bp, synthetic construct
  source 1..20: mol_type = other DNA
tcagatgatccacccgcctc

SEQ ID NO: 137549 - DNA, 20 bp, synthetic construct
  source 1..20: mol_type = other DNA
ctcagatgatccacccgcct

SEQ ID NO: 137550 - DNA, 20 bp, synthetic construct
  source 1..20: mol_type = other DNA
cctcagatgatccacccgcc

SEQ ID NO: 137551 - DNA, 20 bp, synthetic construct
  source 1..20: mol_type = other DNA
acctcagatgatccacccgc

SEQ ID NO: 137552 - DNA, 20 bp, synthetic construct
  source 1..20: mol_type = other DNA
gacctcagatgatccacccg

SEQ ID NO: 137553 - DNA, 20 bp, synthetic construct
  source 1..20: mol_type = other DNA
tgacctcagatgatccaccc

SEQ ID NO: 137554 - DNA, 20 bp, synthetic construct
  source 1..20: mol_type = other DNA
ctgacctcagatgatccacc

SEQ ID NO: 137555 - DNA, 20 bp, synthetic construct
  source 1..20: mol_type = other DNA
gctgacctcagatgatccac

SEQ ID NO: 137556 - DNA, 20 bp, synthetic construct
  source 1..20: mol_type = other DNA
tgctgacctcagatgatcca

SEQ ID NO: 137557 - DNA, 20 bp, synthetic construct
  source 1..20: mol_type = other DNA
ctgctgacctcagatgatcc

SEQ ID NO: 137558 - DNA, 20 bp, synthetic construct
  source 1..20: mol_type = other DNA
actgctgacctcagatgatc

SEQ ID NO: 137559 - DNA, 20 bp, synthetic construct
  source 1..20: mol_type = other DNA
aactgctgacctcagatgat

SEQ ID NO: 137560 - DNA, 20 bp, synthetic construct
  source 1..20: mol_type = other DNA
gaactgctgacctcagatga

SEQ ID NO: 137561 - DNA, 20 bp, synthetic construct
  source 1..20: mol_type = other DNA
tgaactgctgacctcagatg

SEQ ID NO: 137562 - DNA, 20 bp, synthetic construct
  source 1..20: mol_type = other DNA
ttgaactgctgacctcagat

SEQ ID NO: 137563 - DNA, 20 bp, synthetic construct
  source 1..20: mol_type = other DNA
cttgaactgctgacctcaga

SEQ ID NO: 137564 - DNA, 20 bp, synthetic construct
  source 1..20: mol_type = other DNA
tcttgaactgctgacctcag

SEQ ID NO: 137565 - DNA, 20 bp, synthetic construct
  source 1..20: mol_type = other DNA
gtcttgaactgctgacctca

SEQ ID NO: 137566 - DNA, 20 bp, synthetic construct
  source 1..20: mol_type = other DNA
ggtcttgaactgctgacctc

SEQ ID NO: 137567 - DNA, 20 bp, synthetic construct
  source 1..20: mol_type = other DNA
tggtcttgaactgctgacct

SEQ ID NO: 137568 - DNA, 20 bp, synthetic construct
  source 1..20: mol_type = other DNA
ctggtcttgaactgctgacc

SEQ ID NO: 137569 - DNA, 20 bp, synthetic construct
  source 1..20: mol_type = other DNA
gctggtcttgaactgctgac

SEQ ID NO: 137570 - DNA, 20 bp, synthetic construct
  source 1..20: mol_type = other DNA
ggctggtcttgaactgctga

SEQ ID NO: 137571 - DNA, 20 bp, synthetic construct
  source 1..20: mol_type = other DNA
aggctggtcttgaactgctg

SEQ ID NO: 137572 - DNA, 20 bp, synthetic construct
  source 1..20: mol_type = other DNA
taggctggtcttgaactgct

SEQ ID NO: 137573 - DNA, 20 bp, synthetic construct
  source 1..20: mol_type = other DNA
ctaggctggtcttgaactgc

SEQ ID NO: 137574 - DNA, 20 bp, synthetic construct
  source 1..20: mol_type = other DNA
gctaggctggtcttgaactg

SEQ ID NO: 137575 - DNA, 20 bp, synthetic construct
  source 1..20: mol_type = other DNA
ggctaggctggtcttgaact

SEQ ID NO: 137576 - DNA, 20 bp, synthetic construct
  source 1..20: mol_type = other DNA
tggctaggctggtcttgaac

SEQ ID NO: 137577 - DNA, 20 bp, synthetic construct
  source 1..20: mol_type = other DNA
ttggctaggctggtcttgaa

SEQ ID NO: 137578 - DNA, 20 bp, synthetic construct
  source 1..20: mol_type = other DNA
gttggctaggctggtcttga

SEQ ID NO: 137579 - DNA, 20 bp, synthetic construct
  source 1..20: mol_type = other DNA
tgttggctaggctggtcttg

SEQ ID NO: 137580 - DNA, 20 bp, synthetic construct
  source 1..20: mol_type = other DNA
atgttggctaggctggtctt

SEQ ID NO: 137581 - DNA, 20 bp, synthetic construct
  source 1..20: mol_type = other DNA
catgttggctaggctggtct

SEQ ID NO: 137582 - DNA, 20 bp, synthetic construct
  source 1..20: mol_type = other DNA
ccatgttggctaggctggtc

SEQ ID NO: 137583 - DNA, 20 bp, synthetic construct
  source 1..20: mol_type = other DNA
accatgttggctaggctggt

SEQ ID NO: 137584 - DNA, 20 bp, synthetic construct
  source 1..20: mol_type = other DNA
taccatgttggctaggctgg

SEQ ID NO: 137585 - DNA, 20 bp, synthetic construct
  source 1..20: mol_type = other DNA
ttaccatgttggctaggctg

SEQ ID NO: 137586 - DNA, 20 bp, synthetic construct
  source 1..20: mol_type = other DNA
tttaccatgttggctaggct

SEQ ID NO: 137587 - DNA, 20 bp, synthetic construct
  source 1..20: mol_type = other DNA
ttttaccatgttggctaggc

SEQ ID NO: 137588 - DNA, 20 bp, synthetic construct
  source 1..20: mol_type = other DNA
gttttaccatgttggctagg

SEQ ID NO: 137589 - DNA, 20 bp, synthetic construct
  source 1..20: mol_type = other DNA
agttttaccatgttggctag

SEQ ID NO: 137590 - DNA, 20 bp, synthetic construct
  source 1..20: mol_type = other DNA
gagttttaccatgttggcta

SEQ ID NO: 137591 - DNA, 20 bp, synthetic construct
  source 1..20: mol_type = other DNA
ggagttttaccatgttggct

SEQ ID NO: 137592 - DNA, 20 bp, synthetic construct
  source 1..20: mol_type = other DNA
tggagttttaccatgttggc

SEQ ID NO: 137593 - DNA, 20 bp, synthetic construct
  source 1..20: mol_type = other DNA
atggagttttaccatgttgg

SEQ ID NO: 137594 - DNA, 20 bp, synthetic construct
  source 1..20: mol_type = other DNA
gatggagttttaccatgttg

SEQ ID NO: 137595 - DNA, 20 bp, synthetic construct
  source 1..20: mol_type = other DNA
agatggagttttaccatgtt

SEQ ID NO: 137596 - DNA, 20 bp, synthetic construct
  source 1..20: mol_type = other DNA
gagatggagttttaccatgt

SEQ ID NO: 137597 - DNA, 20 bp, synthetic construct
  source 1..20: mol_type = other DNA
agagatggagttttaccatg

SEQ ID NO: 137598 - DNA, 20 bp, synthetic construct
  source 1..20: mol_type = other DNA
tagagatggagttttaccat

SEQ ID NO: 137599 - DNA, 20 bp, synthetic construct
  source 1..20: mol_type = other DNA
gtagagatggagttttacca

SEQ ID NO: 137600 - DNA, 20 bp, synthetic construct
  source 1..20: mol_type = other DNA
agtagagatggagttttacc

SEQ ID NO: 137601 - DNA, 20 bp, synthetic construct
  source 1..20: mol_type = other DNA
tagtagagatggagttttac

SEQ ID NO: 137602 - DNA, 20 bp, synthetic construct
  source 1..20: mol_type = other DNA
ttagtagagatggagtttta

SEQ ID NO: 137603 - DNA, 20 bp, synthetic construct
  source 1..20: mol_type = other DNA
tttagtagagatggagtttt

SEQ ID NO: 137604 - DNA, 20 bp, synthetic construct
  source 1..20: mol_type = other DNA
ttttagtagagatggagttt

SEQ ID NO: 137605 - DNA, 20 bp, synthetic construct
  source 1..20: mol_type = other DNA
tttttagtagagatggagtt

SEQ ID NO: 137606 - DNA, 20 bp, synthetic construct
  source 1..20: mol_type = other DNA
ttttttagtagagatggagt

SEQ ID NO: 137607 - DNA, 20 bp, synthetic construct
  source 1..20: mol_type = other DNA
attttttagtagagatggag

SEQ ID NO: 137608 - DNA, 20 bp, synthetic construct
  source 1..20: mol_type = other DNA
tattttttagtagagatgga

SEQ ID NO: 137609 - DNA, 20 bp, synthetic construct
  source 1..20: mol_type = other DNA
gtattttttagtagagatgg

SEQ ID NO: 137610 - DNA, 20 bp, synthetic construct
  source 1..20: mol_type = other DNA
tgtattttttagtagagatg

SEQ ID NO: 137611 - DNA, 20 bp, synthetic construct
  source 1..20: mol_type = other DNA
ttgtattttttagtagagat

SEQ ID NO: 137612 - DNA, 20 bp, synthetic construct
  source 1..20: mol_type = other DNA
tttgtattttttagtagaga

SEQ ID NO: 137613 - DNA, 20 bp, synthetic construct
  source 1..20: mol_type = other DNA
ttttgtattttttagtagag

SEQ ID NO: 137614 - DNA, 20 bp, synthetic construct
  source 1..20: mol_type = other DNA
tttttgtattttttagtaga

SEQ ID NO: 137615 - DNA, 20 bp, synthetic construct
  source 1..20: mol_type = other DNA
atttttgtattttttagtag

SEQ ID NO: 137616 - DNA, 20 bp, synthetic construct
  source 1..20: mol_type = other DNA
gatttttgtattttttagta

SEQ ID NO: 137617 - DNA, 20 bp, synthetic construct
  source 1..20: mol_type = other DNA
tgatttttgtattttttagt

SEQ ID NO: 137618 - DNA, 20 bp, synthetic construct
  source 1..20: mol_type = other DNA
ctgatttttgtattttttag

SEQ ID NO: 137619 - DNA, 20 bp, synthetic construct
  source 1..20: mol_type = other DNA
gctgatttttgtatttttta

SEQ ID NO: 137620 - DNA, 20 bp, synthetic construct
  source 1..20: mol_type = other DNA
ggctgatttttgtatttttt

SEQ ID NO: 137621 - DNA, 20 bp, synthetic construct
  source 1..20: mol_type = other DNA
tggctgatttttgtattttt

SEQ ID NO: 137622 - DNA, 20 bp, synthetic construct
  source 1..20: mol_type = other DNA
atggctgatttttgtatttt

SEQ ID NO: 137623 - DNA, 20 bp, synthetic construct
  source 1..20: mol_type = other DNA
catggctgatttttgtattt

SEQ ID NO: 137624 - DNA, 20 bp, synthetic construct
  source 1..20: mol_type = other DNA
gcatggctgatttttgtatt

SEQ ID NO: 137625 - DNA, 20 bp, synthetic construct
  source 1..20: mol_type = other DNA
tgcatggctgatttttgtat

SEQ ID NO: 137626 - DNA, 20 bp, synthetic construct
  source 1..20: mol_type = other DNA
atgcatggctgatttttgta

SEQ ID NO: 137627 - DNA, 20 bp, synthetic construct
  source 1..20: mol_type = other DNA
catgcatggctgatttttgt

SEQ ID NO: 137628 - DNA, 20 bp, synthetic construct
  source 1..20: mol_type = other DNA
gcatgcatggctgatttttg

SEQ ID NO: 137629 - DNA, 20 bp, synthetic construct
  source 1..20: mol_type = other DNA
agcatgcatggctgattttt

SEQ ID NO: 137630 - DNA, 20 bp, synthetic construct
  source 1..20: mol_type = other DNA
cagcatgcatggctgatttt

SEQ ID NO: 137631 - DNA, 20 bp, synthetic construct
  source 1..20: mol_type = other DNA
ccagcatgcatggctgattt

SEQ ID NO: 137632 - DNA, 20 bp, synthetic construct
  source 1..20: mol_type = other DNA
gccagcatgcatggctgatt

SEQ ID NO: 137633 - DNA, 20 bp, synthetic construct
  source 1..20: mol_type = other DNA
tgccagcatgcatggctgat

SEQ ID NO: 137634 - DNA, 20 bp, synthetic construct
  source 1..20: mol_type = other DNA
atgccagcatgcatggctga

SEQ ID NO: 137635 - DNA, 20 bp, synthetic construct
  source 1..20: mol_type = other DNA
catgccagcatgcatggctg

SEQ ID NO: 137636 - DNA, 20 bp, synthetic construct
  source 1..20: mol_type = other DNA
gcatgccagcatgcatggct

SEQ ID NO: 137637 - DNA, 20 bp, synthetic construct
  source 1..20: mol_type = other DNA
cgcatgccagcatgcatggc

SEQ ID NO: 137638 - DNA, 20 bp, synthetic construct
  source 1..20: mol_type = other DNA
gcgcatgccagcatgcatgg

SEQ ID NO: 137639 - DNA, 20 bp, synthetic construct
  source 1..20: mol_type = other DNA
ggcgcatgccagcatgcatg

SEQ ID NO: 137640 - DNA, 20 bp, synthetic construct
  source 1..20: mol_type = other DNA
aggcgcatgccagcatgcat

SEQ ID NO: 137641 - DNA, 20 bp, synthetic construct
  source 1..20: mol_type = other DNA
taggcgcatgccagcatgca

SEQ ID NO: 137642 - DNA, 20 bp, synthetic construct
  source 1..20: mol_type = other DNA
ataggcgcatgccagcatgc

SEQ ID NO: 137643 - DNA, 20 bp, synthetic construct
  source 1..20: mol_type = other DNA
tataggcgcatgccagcatg

SEQ ID NO: 137644 - DNA, 20 bp, synthetic construct
  source 1..20: mol_type = other DNA
ttataggcgcatgccagcat

SEQ ID NO: 137645 - DNA, 20 bp, synthetic construct
  source 1..20: mol_type = other DNA
attataggcgcatgccagca

SEQ ID NO: 137646 - DNA, 20 bp, synthetic construct
  source 1..20: mol_type = other DNA
gattataggcgcatgccagc

SEQ ID NO: 137647 - DNA, 20 bp, synthetic construct
  source 1..20: mol_type = other DNA
agattataggcgcatgccag

SEQ ID NO: 137648 - DNA, 20 bp, synthetic construct
  source 1..20: mol_type = other DNA
gagattataggcgcatgcca

SEQ ID NO: 137649 - DNA, 20 bp, synthetic construct
  source 1..20: mol_type = other DNA
tgagattataggcgcatgcc

SEQ ID NO: 137650 - DNA, 20 bp, synthetic construct
  source 1..20: mol_type = other DNA
ctgagattataggcgcatgc

SEQ ID NO: 137651 - DNA, 20 bp, synthetic construct
  source 1..20: mol_type = other DNA
gctgagattataggcgcatg

SEQ ID NO: 137652 - DNA, 20 bp, synthetic construct
  source 1..20: mol_type = other DNA
agctgagattataggcgcat

SEQ ID NO: 137653 - DNA, 20 bp, synthetic construct
  source 1..20: mol_type = other DNA
tagctgagattataggcgca

SEQ ID NO: 137654 - DNA, 20 bp, synthetic construct
  source 1..20: mol_type = other DNA
gtagctgagattataggcgc

SEQ ID NO: 137655 - DNA, 20 bp, synthetic construct
  source 1..20: mol_type = other DNA
agtagctgagattataggcg

SEQ ID NO: 137656 - DNA, 20 bp, synthetic construct
  source 1..20: mol_type = other DNA
tagtagctgagattataggc

SEQ ID NO: 137657 - DNA, 20 bp, synthetic construct
  source 1..20: mol_type = other DNA
ctagtagctgagattatagg

SEQ ID NO: 137658 - DNA, 20 bp, synthetic construct
  source 1..20: mol_type = other DNA
cctagtagctgagattatag

SEQ ID NO: 137659 - DNA, 20 bp, synthetic construct
  source 1..20: mol_type = other DNA
ccctagtagctgagattata

SEQ ID NO: 137660 - DNA, 20 bp, synthetic construct
  source 1..20: mol_type = other DNA
tccctagtagctgagattat

SEQ ID NO: 137661 - DNA, 20 bp, synthetic construct
  source 1..20: mol_type = other DNA
ctccctagtagctgagatta

SEQ ID NO: 137662 - DNA, 20 bp, synthetic construct
  source 1..20: mol_type = other DNA
cctccctagtagctgagatt

SEQ ID NO: 137663 - DNA, 20 bp, synthetic construct
  source 1..20: mol_type = other DNA
gcctccctagtagctgagat

SEQ ID NO: 137664 - DNA, 20 bp, synthetic construct
  source 1..20: mol_type = other DNA
agcctccctagtagctgaga

SEQ ID NO: 137665 - DNA, 20 bp, synthetic construct
  source 1..20: mol_type = other DNA
cagcctccctagtagctgag

SEQ ID NO: 137666 - DNA, 20 bp, synthetic construct
  source 1..20: mol_type = other DNA
tcagcctccctagtagctga

SEQ ID NO: 137667 - DNA, 20 bp, synthetic construct
  source 1..20: mol_type = other DNA
ctcagcctccctagtagctg

SEQ ID NO: 137668 - DNA, 20 bp, synthetic construct
  source 1..20: mol_type = other DNA
tctcagcctccctagtagct

SEQ ID NO: 137669 - DNA, 20 bp, synthetic construct
  source 1..20: mol_type = other DNA
gtctcagcctccctagtagc

SEQ ID NO: 137670 - DNA, 20 bp, synthetic construct
  source 1..20: mol_type = other DNA
tgtctcagcctccctagtag

SEQ ID NO: 137671 - DNA, 20 bp, synthetic construct
  source 1..20: mol_type = other DNA
ctgtctcagcctccctagta

SEQ ID NO: 137672 - DNA, 20 bp, synthetic construct
  source 1..20: mol_type = other DNA
cctgtctcagcctccctagt

SEQ ID NO: 137673 - DNA, 20 bp, synthetic construct
  source 1..20: mol_type = other DNA
tcctgtctcagcctccctag

SEQ ID NO: 137674 - DNA, 20 bp, synthetic construct
  source 1..20: mol_type = other DNA
ctcctgtctcagcctcccta

SEQ ID NO: 137675 - DNA, 20 bp, synthetic construct
  source 1..20: mol_type = other DNA
tctcctgtctcagcctccct

SEQ ID NO: 137676 - DNA, 20 bp, synthetic construct
  source 1..20: mol_type = other DNA
ttctcctgtctcagcctccc

SEQ ID NO: 137677 - DNA, 20 bp, synthetic construct
  source 1..20: mol_type = other DNA
attctcctgtctcagcctcc

SEQ ID NO: 137678 - DNA, 20 bp, synthetic construct
  source 1..20: mol_type = other DNA
aattctcctgtctcagcctc

SEQ ID NO: 137679 - DNA, 20 bp, synthetic construct
  source 1..20: mol_type = other DNA
caattctcctgtctcagcct

SEQ ID NO: 137680 - DNA, 20 bp, synthetic construct
  source 1..20: mol_type = other DNA
gcaattctcctgtctcagcc

SEQ ID NO: 137681 - DNA, 20 bp, synthetic construct
  source 1..20: mol_type = other DNA
agcaattctcctgtctcagc

SEQ ID NO: 137682 - DNA, 20 bp, synthetic construct
  source 1..20: mol_type = other DNA
aagcaattctcctgtctcag

SEQ ID NO: 137683 - DNA, 20 bp, synthetic construct
  source 1..20: mol_type = other DNA
caagcaattctcctgtctca

SEQ ID NO: 137684 - DNA, 20 bp, synthetic construct
  source 1..20: mol_type = other DNA
tcaagcaattctcctgtctc

SEQ ID NO: 137685 - DNA, 20 bp, synthetic construct
  source 1..20: mol_type = other DNA
ttcaagcaattctcctgtct

SEQ ID NO: 137686 - DNA, 20 bp, synthetic construct
  source 1..20: mol_type = other DNA
gttcaagcaattctcctgtc

SEQ ID NO: 137687 - DNA, 20 bp, synthetic construct
  source 1..20: mol_type = other DNA
agttcaagcaattctcctgt

SEQ ID NO: 137688 - DNA, 20 bp, synthetic construct
  source 1..20: mol_type = other DNA
aagttcaagcaattctcctg

SEQ ID NO: 137689 - DNA, 20 bp, synthetic construct
  source 1..20: mol_type = other DNA
caagttcaagcaattctcct

SEQ ID NO: 137690 - DNA, 20 bp, synthetic construct
  source 1..20: mol_type = other DNA
ccaagttcaagcaattctcc

SEQ ID NO: 137691 - DNA, 20 bp, synthetic construct
  source 1..20: mol_type = other DNA
cccaagttcaagcaattctc

SEQ ID NO: 137692 - DNA, 20 bp, synthetic construct
  source 1..20: mol_type = other DNA
tcccaagttcaagcaattct

SEQ ID NO: 137693 - DNA, 20 bp, synthetic construct
  source 1..20: mol_type = other DNA
ctcccaagttcaagcaattc

SEQ ID NO: 137694 - DNA, 20 bp, synthetic construct
  source 1..20: mol_type = other DNA
cctcccaagttcaagcaatt

SEQ ID NO: 137695 - DNA, 20 bp, synthetic construct
  source 1..20: mol_type = other DNA
gcctcccaagttcaagcaat

SEQ ID NO: 137696 - DNA, 20 bp, synthetic construct
  source 1..20: mol_type = other DNA
tgcctcccaagttcaagcaa

SEQ ID NO: 137697 - DNA, 20 bp, synthetic construct
  source 1..20: mol_type = other DNA
ctgcctcccaagttcaagca

SEQ ID NO: 137698 - DNA, 20 bp, synthetic construct
  source 1..20: mol_type = other DNA
tctgcctcccaagttcaagc

SEQ ID NO: 137699 - DNA, 20 bp, synthetic construct
  source 1..20: mol_type = other DNA
ctctgcctcccaagttcaag

SEQ ID NO: 137700 - DNA, 20 bp, synthetic construct
  source 1..20: mol_type = other DNA
cctctgcctcccaagttcaa

SEQ ID NO: 137701 - DNA, 20 bp, synthetic construct
  source 1..20: mol_type = other DNA
acctctgcctcccaagttca

SEQ ID NO: 137702 - DNA, 20 bp, synthetic construct
  source 1..20: mol_type = other DNA
aacctctgcctcccaagttc

SEQ ID NO: 137703 - DNA, 20 bp, synthetic construct
  source 1..20: mol_type = other DNA
caacctctgcctcccaagtt

SEQ ID NO: 137704 - DNA, 20 bp, synthetic construct
  source 1..20: mol_type = other DNA
gcaacctctgcctcccaagt

SEQ ID NO: 137705 - DNA, 20 bp, synthetic construct
  source 1..20: mol_type = other DNA
tgcaacctctgcctcccaag

SEQ ID NO: 137706 - DNA, 20 bp, synthetic construct
  source 1..20: mol_type = other DNA
ctgcaacctctgcctcccaa

SEQ ID NO: 137707 - DNA, 20 bp, synthetic construct
  source 1..20: mol_type = other DNA
actgcaacctctgcctccca

SEQ ID NO: 137708 - DNA, 20 bp, synthetic construct
  source 1..20: mol_type = other DNA
cactgcaacctctgcctccc

SEQ ID NO: 137709 - DNA, 20 bp, synthetic construct
  source 1..20: mol_type = other DNA
tcactgcaacctctgcctcc

SEQ ID NO: 137710 - DNA, 20 bp, synthetic construct
  source 1..20: mol_type = other DNA
ctcactgcaacctctgcctc

SEQ ID NO: 137711 - DNA, 20 bp, synthetic construct
  source 1..20: mol_type = other DNA
gctcactgcaacctctgcct

SEQ ID NO: 137712 - DNA, 20 bp, synthetic construct
  source 1..20: mol_type = other DNA
ggctcactgcaacctctgcc

SEQ ID NO: 137713 - DNA, 20 bp, synthetic construct
  source 1..20: mol_type = other DNA
cggctcactgcaacctctgc

SEQ ID NO: 137714 - DNA, 20 bp, synthetic construct
  source 1..20: mol_type = other DNA
tcggctcactgcaacctctg

SEQ ID NO: 137715 - DNA, 20 bp, synthetic construct
  source 1..20: mol_type = other DNA
ttcggctcactgcaacctct

SEQ ID NO: 137716 - DNA, 20 bp, synthetic construct
  source 1..20: mol_type = other DNA
cttcggctcactgcaacctc

SEQ ID NO: 137717 - DNA, 20 bp, synthetic construct
  source 1..20: mol_type = other DNA
acttcggctcactgcaacct

SEQ ID NO: 137718 - DNA, 20 bp, synthetic construct
  source 1..20: mol_type = other DNA
gacttcggctcactgcaacc

SEQ ID NO: 137719 - DNA, 20 bp, synthetic construct
  source 1..20: mol_type = other DNA
cgacttcggctcactgcaac

SEQ ID NO: 137720 - DNA, 20 bp, synthetic construct
  source 1..20: mol_type = other DNA
acgacttcggctcactgcaa

SEQ ID NO: 137721 - DNA, 20 bp, synthetic construct
  source 1..20: mol_type = other DNA
cacgacttcggctcactgca

SEQ ID NO: 137722 - DNA, 20 bp, synthetic construct
  source 1..20: mol_type = other DNA
gcacgacttcggctcactgc

SEQ ID NO: 137723 - DNA, 20 bp, synthetic construct
  source 1..20: mol_type = other DNA
ggcacgacttcggctcactg

SEQ ID NO: 137724 - DNA, 20 bp, synthetic construct
  source 1..20: mol_type = other DNA
tggcacgacttcggctcact

SEQ ID NO: 137725 - DNA, 20 bp, synthetic construct
  source 1..20: mol_type = other DNA
gtggcacgacttcggctcac

SEQ ID NO: 137726 - DNA, 20 bp, synthetic construct
  source 1..20: mol_type = other DNA
agtggcacgacttcggctca

SEQ ID NO: 137727 - DNA, 20 bp, synthetic construct
  source 1..20: mol_type = other DNA
gagtggcacgacttcggctc

SEQ ID NO: 137728 - DNA, 20 bp, synthetic construct
  source 1..20: mol_type = other DNA
ggagtggcacgacttcggct

SEQ ID NO: 137729 - DNA, 20 bp, synthetic construct
  source 1..20: mol_type = other DNA
tggagtggcacgacttcggc

SEQ ID NO: 137730 - DNA, 20 bp, synthetic construct
  source 1..20: mol_type = other DNA
gtggagtggcacgacttcgg

SEQ ID NO: 137731 - DNA, 20 bp, synthetic construct
  source 1..20: mol_type = other DNA
agtggagtggcacgacttcg

SEQ ID NO: 137732 - DNA, 20 bp, synthetic construct
  source 1..20: mol_type = other DNA
gagtggagtggcacgacttc

SEQ ID NO: 137733 - DNA, 20 bp, synthetic construct
  source 1..20: mol_type = other DNA
ggagtggagtggcacgactt

SEQ ID NO: 137734 - DNA, 20 bp, synthetic construct
  source 1..20: mol_type = other DNA
tggagtggagtggcacgact

SEQ ID NO: 137735 - DNA, 20 bp, synthetic construct
  source 1..20: mol_type = other DNA
ctggagtggagtggcacgac

SEQ ID NO: 137736 - DNA, 20 bp, synthetic construct
  source 1..20: mol_type = other DNA
gctggagtggagtggcacga

SEQ ID NO: 137737 - DNA, 20 bp, synthetic construct
  source 1..20: mol_type = other DNA
ggctggagtggagtggcacg

SEQ ID NO: 137738 - DNA, 20 bp, synthetic construct
  source 1..20: mol_type = other DNA
aggctggagtggagtggcac

SEQ ID NO: 137739 - DNA, 20 bp, synthetic construct
  source 1..20: mol_type = other DNA
caggctggagtggagtggca

SEQ ID NO: 137740 - DNA, 20 bp, synthetic construct
  source 1..20: mol_type = other DNA
ccaggctggagtggagtggc

SEQ ID NO: 137741 - DNA, 20 bp, synthetic construct
  source 1..20: mol_type = other DNA
cccaggctggagtggagtgg

SEQ ID NO: 137742 - DNA, 20 bp, synthetic construct
  source 1..20: mol_type = other DNA
acccaggctggagtggagtg

SEQ ID NO: 137743 - DNA, 20 bp, synthetic construct
  source 1..20: mol_type = other DNA
cacccaggctggagtggagt

SEQ ID NO: 137744 - DNA, 20 bp, synthetic construct
  source 1..20: mol_type = other DNA
ccacccaggctggagtggag

SEQ ID NO: 137745 - DNA, 20 bp, synthetic construct
  source 1..20: mol_type = other DNA
gccacccaggctggagtgga

SEQ ID NO: 137746 - DNA, 20 bp, synthetic construct
  source 1..20: mol_type = other DNA
tgccacccaggctggagtgg

SEQ ID NO: 137747 - DNA, 20 bp, synthetic construct
  source 1..20: mol_type = other DNA
ctgccacccaggctggagtg

SEQ ID NO: 137748 - DNA, 20 bp, synthetic construct
  source 1..20: mol_type = other DNA
tctgccacccaggctggagt

SEQ ID NO: 137749 - DNA, 20 bp, synthetic construct
  source 1..20: mol_type = other DNA
ctctgccacccaggctggag

SEQ ID NO: 137750 - DNA, 20 bp, synthetic construct
  source 1..20: mol_type = other DNA
gctctgccacccaggctgga

SEQ ID NO: 137751 - DNA, 20 bp, synthetic construct
  source 1..20: mol_type = other DNA
cgctctgccacccaggctgg

SEQ ID NO: 137752 - DNA, 20 bp, synthetic construct
  source 1..20: mol_type = other DNA
tcgctctgccacccaggctg

SEQ ID NO: 137753 - DNA, 20 bp, synthetic construct
  source 1..20: mol_type = other DNA
ttcgctctgccacccaggct

SEQ ID NO: 137754 - DNA, 20 bp, synthetic construct
  source 1..20: mol_type = other DNA
tttcgctctgccacccaggc

SEQ ID NO: 137755 - DNA, 20 bp, synthetic construct
  source 1..20: mol_type = other DNA
atttcgctctgccacccagg

SEQ ID NO: 137756 - DNA, 20 bp, synthetic construct
  source 1..20: mol_type = other DNA
aatttcgctctgccacccag

SEQ ID NO: 137757 - DNA, 20 bp, synthetic construct
  source 1..20: mol_type = other DNA
gaatttcgctctgccaccca

SEQ ID NO: 137758 - DNA, 20 bp, synthetic construct
  source 1..20: mol_type = other DNA
agaatttcgctctgccaccc

SEQ ID NO: 137759 - DNA, 20 bp, synthetic construct
  source 1..20: mol_type = other DNA
cagaatttcgctctgccacc

SEQ ID NO: 137760 - DNA, 20 bp, synthetic construct
  source 1..20: mol_type = other DNA
acagaatttcgctctgccac

SEQ ID NO: 137761 - DNA, 20 bp, synthetic construct
  source 1..20: mol_type = other DNA
gacagaatttcgctctgcca

SEQ ID NO: 137762 - DNA, 20 bp, synthetic construct
  source 1..20: mol_type = other DNA
agacagaatttcgctctgcc

SEQ ID NO: 137763 - DNA, 20 bp, synthetic construct
  source 1..20: mol_type = other DNA
gagacagaatttcgctctgc

SEQ ID NO: 137764 - DNA, 20 bp, synthetic construct
  source 1..20: mol_type = other DNA
tgagacagaatttcgctctg

SEQ ID NO: 137765 - DNA, 20 bp, synthetic construct
  source 1..20: mol_type = other DNA
ttgagacagaatttcgctct

SEQ ID NO: 137766 - DNA, 20 bp, synthetic construct
  source 1..20: mol_type = other DNA
tttgagacagaatttcgctc

SEQ ID NO: 137767 - DNA, 20 bp, synthetic construct
  source 1..20: mol_type = other DNA
ttttgagacagaatttcgct

SEQ ID NO: 137768 - DNA, 20 bp, synthetic construct
  source 1..20: mol_type = other DNA
tttttgagacagaatttcgc

SEQ ID NO: 137769 - DNA, 20 bp, synthetic construct
  source 1..20: mol_type = other DNA
ttttttgagacagaatttcg

SEQ ID NO: 137770 - DNA, 20 bp, synthetic construct
  source 1..20: mol_type = other DNA
attttttgagacagaatttc

SEQ ID NO: 137771 - DNA, 20 bp, synthetic construct
  source 1..20: mol_type = other DNA
tattttttgagacagaattt

SEQ ID NO: 137772 - DNA, 20 bp, synthetic construct
  source 1..20: mol_type = other DNA
ttattttttgagacagaatt

SEQ ID NO: 137773 - DNA, 20 bp, synthetic construct
  source 1..20: mol_type = other DNA
tttattttttgagacagaat

SEQ ID NO: 137774 - DNA, 20 bp, synthetic construct
  source 1..20: mol_type = other DNA
ttttattttttgagacagaa

SEQ ID NO: 137775 - DNA, 20 bp, synthetic construct
  source 1..20: mol_type = other DNA
attttattttttgagacaga

SEQ ID NO: 137776 - DNA, 20 bp, synthetic construct
  source 1..20: mol_type = other DNA
tattttattttttgagacag

SEQ ID NO: 137777 - DNA, 20 bp, synthetic construct
  source 1..20: mol_type = other DNA
atattttattttttgagaca

SEQ ID NO: 137778 - DNA, 20 bp, synthetic construct
  source 1..20: mol_type = other DNA
aatattttattttttgagac

SEQ ID NO: 137779 - DNA, 20 bp, synthetic construct
  source 1..20: mol_type = other DNA
gaatattttattttttgaga

SEQ ID NO: 137780 - DNA, 20 bp, synthetic construct
  source 1..20: mol_type = other DNA
tgaatattttattttttgag

SEQ ID NO: 137781 - DNA, 20 bp, synthetic construct
  source 1..20: mol_type = other DNA
ctgaatattttattttttga

SEQ ID NO: 137782 - DNA, 20 bp, synthetic construct
  source 1..20: mol_type = other DNA
cctgaatattttattttttg

SEQ ID NO: 137783 - DNA, 20 bp, synthetic construct
  source 1..20: mol_type = other DNA
tcctgaatattttatttttt

SEQ ID NO: 137784 - DNA, 20 bp, synthetic construct
  source 1..20: mol_type = other DNA
ttcctgaatattttattttt

SEQ ID NO: 137785 - DNA, 20 bp, synthetic construct
  source 1..20: mol_type = other DNA
cttcctgaatattttatttt

SEQ ID NO: 137786 - DNA, 20 bp, synthetic construct
  source 1..20: mol_type = other DNA
gcttcctgaatattttattt

SEQ ID NO: 137787 - DNA, 20 bp, synthetic construct
  source 1..20: mol_type = other DNA
tgcttcctgaatattttatt

SEQ ID NO: 137788 - DNA, 20 bp, synthetic construct
  source 1..20: mol_type = other DNA
ctgcttcctgaatattttat

SEQ ID NO: 137789 - DNA, 20 bp, synthetic construct
  source 1..20: mol_type = other DNA
tctgcttcctgaatatttta

SEQ ID NO: 137790 - DNA, 20 bp, synthetic construct
  source 1..20: mol_type = other DNA
gtctgcttcctgaatatttt

SEQ ID NO: 137791 - DNA, 20 bp, synthetic construct
  source 1..20: mol_type = other DNA
ggtctgcttcctgaatattt

SEQ ID NO: 137792 - DNA, 20 bp, synthetic construct
  source 1..20: mol_type = other DNA
gggtctgcttcctgaatatt

SEQ ID NO: 137793 - DNA, 20 bp, synthetic construct
  source 1..20: mol_type = other DNA
ggggtctgcttcctgaatat

SEQ ID NO: 137794 - DNA, 20 bp, synthetic construct
  source 1..20: mol_type = other DNA
aggggtctgcttcctgaata

SEQ ID NO: 137795 - DNA, 20 bp, synthetic construct
  source 1..20: mol_type = other DNA
gaggggtctgcttcctgaat

SEQ ID NO: 137796 - DNA, 20 bp, synthetic construct
  source 1..20: mol_type = other DNA
tgaggggtctgcttcctgaa

SEQ ID NO: 137797 - DNA, 20 bp, synthetic construct
  source 1..20: mol_type = other DNA
ctgaggggtctgcttcctga

SEQ ID NO: 137798 - DNA, 20 bp, synthetic construct
  source 1..20: mol_type = other DNA
cctgaggggtctgcttcctg

SEQ ID NO: 137799 - DNA, 20 bp, synthetic construct
  source 1..20: mol_type = other DNA
tcctgaggggtctgcttcct

SEQ ID NO: 137800 - DNA, 20 bp, synthetic construct
  source 1..20: mol_type = other DNA
atcctgaggggtctgcttcc

SEQ ID NO: 137801 - DNA, 20 bp, synthetic construct
  source 1..20: mol_type = other DNA
tatcctgaggggtctgcttc

SEQ ID NO: 137802 - DNA, 20 bp, synthetic construct
  source 1..20: mol_type = other DNA
atatcctgaggggtctgctt

SEQ ID NO: 137803 - DNA, 20 bp, synthetic construct
  source 1..20: mol_type = other DNA
gatatcctgaggggtctgct

SEQ ID NO: 137804 - DNA, 20 bp, synthetic construct
  source 1..20: mol_type = other DNA
agatatcctgaggggtctgc

SEQ ID NO: 137805 - DNA, 20 bp, synthetic construct
  source 1..20: mol_type = other DNA
aagatatcctgaggggtctg

SEQ ID NO: 137806 - DNA, 20 bp, synthetic construct
  source 1..20: mol_type = other DNA
caagatatcctgaggggtct

SEQ ID NO: 137807 - DNA, 20 bp, synthetic construct
  source 1..20: mol_type = other DNA
tcaagatatcctgaggggtc

SEQ ID NO: 137808 - DNA, 20 bp, synthetic construct
  source 1..20: mol_type = other DNA
ctcaagatatcctgaggggt

SEQ ID NO: 137809 - DNA, 20 bp, synthetic construct
  source 1..20: mol_type = other DNA
gctcaagatatcctgagggg

SEQ ID NO: 137810 - DNA, 20 bp, synthetic construct
  source 1..20: mol_type = other DNA
agctcaagatatcctgaggg

SEQ ID NO: 137811 - DNA, 20 bp, synthetic construct
  source 1..20: mol_type = other DNA
aagctcaagatatcctgagg

SEQ ID NO: 137812 - DNA, 20 bp, synthetic construct
  source 1..20: mol_type = other DNA
taagctcaagatatcctgag

SEQ ID NO: 137813 - DNA, 20 bp, synthetic construct
  source 1..20: mol_type = other DNA
ttaagctcaagatatcctga

SEQ ID NO: 137814 - DNA, 20 bp, synthetic construct
  source 1..20: mol_type = other DNA
cttaagctcaagatatcctg

SEQ ID NO: 137815 - DNA, 20 bp, synthetic construct
  source 1..20: mol_type = other DNA
gcttaagctcaagatatcct

SEQ ID NO: 137816 - DNA, 20 bp, synthetic construct
  source 1..20: mol_type = other DNA
tgcttaagctcaagatatcc

SEQ ID NO: 137817 - DNA, 20 bp, synthetic construct
  source 1..20: mol_type = other DNA
ttgcttaagctcaagatatc

SEQ ID NO: 137818 - DNA, 20 bp, synthetic construct
  source 1..20: mol_type = other DNA
cttgcttaagctcaagatat

SEQ ID NO: 137819 - DNA, 20 bp, synthetic construct
  source 1..20: mol_type = other DNA
tcttgcttaagctcaagata

SEQ ID NO: 137820 - DNA, 20 bp, synthetic construct
  source 1..20: mol_type = other DNA
ctcttgcttaagctcaagat

SEQ ID NO: 137821 - DNA, 20 bp, synthetic construct
  source 1..20: mol_type = other DNA
tctcttgcttaagctcaaga

SEQ ID NO: 137822 - DNA, 20 bp, synthetic construct
  source 1..20: mol_type = other DNA
atctcttgcttaagctcaag

SEQ ID NO: 137823 - DNA, 20 bp, synthetic construct
  source 1..20: mol_type = other DNA
gatctcttgcttaagctcaa

SEQ ID NO: 137824 - DNA, 20 bp, synthetic construct
  source 1..20: mol_type = other DNA
tgatctcttgcttaagctca

SEQ ID NO: 137825 - DNA, 20 bp, synthetic construct
  source 1..20: mol_type = other DNA
atgatctcttgcttaagctc

SEQ ID NO: 137826 - DNA, 20 bp, synthetic construct
  source 1..20: mol_type = other DNA
catgatctcttgcttaagct

SEQ ID NO: 137827 - DNA, 20 bp, synthetic construct
  source 1..20: mol_type = other DNA
tcatgatctcttgcttaagc

SEQ ID NO: 137828 - DNA, 20 bp, synthetic construct
  source 1..20: mol_type = other DNA
gtcatgatctcttgcttaag

SEQ ID NO: 137829 - DNA, 20 bp, synthetic construct
  source 1..20: mol_type = other DNA
ggtcatgatctcttgcttaa

SEQ ID NO: 137830 - DNA, 20 bp, synthetic construct
  source 1..20: mol_type = other DNA
aggtcatgatctcttgctta

SEQ ID NO: 137831 - DNA, 20 bp, synthetic construct
  source 1..20: mol_type = other DNA
gaggtcatgatctcttgctt

SEQ ID NO: 137832 - DNA, 20 bp, synthetic construct
  source 1..20: mol_type = other DNA
agaggtcatgatctcttgct

SEQ ID NO: 137833 - DNA, 20 bp, synthetic construct
  source 1..20: mol_type = other DNA
gagaggtcatgatctcttgc

SEQ ID NO: 137834 - DNA, 20 bp, synthetic construct
  source 1..20: mol_type = other DNA
tgagaggtcatgatctcttg

SEQ ID NO: 137835 - DNA, 20 bp, synthetic construct
  source 1..20: mol_type = other DNA
ctgagaggtcatgatctctt

SEQ ID NO: 137836 - DNA, 20 bp, synthetic construct
  source 1..20: mol_type = other DNA
cctgagaggtcatgatctct

SEQ ID NO: 137837 - DNA, 20 bp, synthetic construct
  source 1..20: mol_type = other DNA
acctgagaggtcatgatctc

SEQ ID NO: 137838 - DNA, 20 bp, synthetic construct
  source 1..20: mol_type = other DNA
gacctgagaggtcatgatct

SEQ ID NO: 137839 - DNA, 20 bp, synthetic construct
  source 1..20: mol_type = other DNA
tgacctgagaggtcatgatc

SEQ ID NO: 137840 - DNA, 20 bp, synthetic construct
  source 1..20: mol_type = other DNA
atgacctgagaggtcatgat

SEQ ID NO: 137841 - DNA, 20 bp, synthetic construct
  source 1..20: mol_type = other DNA
aatgacctgagaggtcatga

SEQ ID NO: 137842 - DNA, 20 bp, synthetic construct
  source 1..20: mol_type = other DNA
taatgacctgagaggtcatg

SEQ ID NO: 137843 - DNA, 20 bp, synthetic construct
  source 1..20: mol_type = other DNA
ataatgacctgagaggtcat

SEQ ID NO: 137844 - DNA, 20 bp, synthetic construct
  source 1..20: mol_type = other DNA
gataatgacctgagaggtca

SEQ ID NO: 137845 - DNA, 20 bp, synthetic construct
  source 1..20: mol_type = other DNA
agataatgacctgagaggtc

SEQ ID NO: 137846 - DNA, 20 bp, synthetic construct
  source 1..20: mol_type = other DNA
aagataatgacctgagaggt

SEQ ID NO: 137847 - DNA, 20 bp, synthetic construct
  source 1..20: mol_type = other DNA
caagataatgacctgagagg

SEQ ID NO: 137848 - DNA, 20 bp, synthetic construct
  source 1..20: mol_type = other DNA
ccaagataatgacctgagag

SEQ ID NO: 137849 - DNA, 20 bp, synthetic construct
  source 1..20: mol_type = other DNA
tccaagataatgacctgaga

SEQ ID NO: 137850 - DNA, 20 bp, synthetic construct
  source 1..20: mol_type = other DNA
gtccaagataatgacctgag

SEQ ID NO: 137851 - DNA, 20 bp, synthetic construct
  source 1..20: mol_type = other DNA
tgtccaagataatgacctga

SEQ ID NO: 137852 - DNA, 20 bp, synthetic construct
  source 1..20: mol_type = other DNA
ctgtccaagataatgacctg

SEQ ID NO: 137853 - DNA, 20 bp, synthetic construct
  source 1..20: mol_type = other DNA
gctgtccaagataatgacct

SEQ ID NO: 137854 - DNA, 20 bp, synthetic construct
  source 1..20: mol_type = other DNA
tgctgtccaagataatgacc

SEQ ID NO: 137855 - DNA, 20 bp, synthetic construct
  source 1..20: mol_type = other DNA
gtgctgtccaagataatgac

SEQ ID NO: 137856 - DNA, 20 bp, synthetic construct
  source 1..20: mol_type = other DNA
tgtgctgtccaagataatga

SEQ ID NO: 137857 - DNA, 20 bp, synthetic construct
  source 1..20: mol_type = other DNA
ctgtgctgtccaagataatg

SEQ ID NO: 137858 - DNA, 20 bp, synthetic construct
  source 1..20: mol_type = other DNA
cctgtgctgtccaagataat

SEQ ID NO: 137859 - DNA, 20 bp, synthetic construct
  source 1..20: mol_type = other DNA
acctgtgctgtccaagataa

SEQ ID NO: 137860 - DNA, 20 bp, synthetic construct
  source 1..20: mol_type = other DNA
gacctgtgctgtccaagata

SEQ ID NO: 137861 - DNA, 20 bp, synthetic construct
  source 1..20: mol_type = other DNA
ggacctgtgctgtccaagat

SEQ ID NO: 137862 - DNA, 20 bp, synthetic construct
  source 1..20: mol_type = other DNA
gggacctgtgctgtccaaga

SEQ ID NO: 137863 - DNA, 20 bp, synthetic construct
  source 1..20: mol_type = other DNA
ggggacctgtgctgtccaag

SEQ ID NO: 137864 - DNA, 20 bp, synthetic construct
  source 1..20: mol_type = other DNA
aggggacctgtgctgtccaa

SEQ ID NO: 137865 - DNA, 20 bp, synthetic construct
  source 1..20: mol_type = other DNA
gaggggacctgtgctgtcca

SEQ ID NO: 137866 - DNA, 20 bp, synthetic construct
  source 1..20: mol_type = other DNA
agaggggacctgtgctgtcc

SEQ ID NO: 137867 - DNA, 20 bp, synthetic construct
  source 1..20: mol_type = other DNA
gagaggggacctgtgctgtc

SEQ ID NO: 137868 - DNA, 20 bp, synthetic construct
  source 1..20: mol_type = other DNA
ggagaggggacctgtgctgt

SEQ ID NO: 137869 - DNA, 20 bp, synthetic construct
  source 1..20: mol_type = other DNA
gggagaggggacctgtgctg

SEQ ID NO: 137870 - DNA, 20 bp, synthetic construct
  source 1..20: mol_type = other DNA
ggggagaggggacctgtgct

SEQ ID NO: 137871 - DNA, 20 bp, synthetic construct
  source 1..20: mol_type = other DNA
tggggagaggggacctgtgc

SEQ ID NO: 137872 - DNA, 20 bp, synthetic construct
  source 1..20: mol_type = other DNA
gtggggagaggggacctgtg

SEQ ID NO: 137873 - DNA, 20 bp, synthetic construct
  source 1..20: mol_type = other DNA
ggtggggagaggggacctgt

SEQ ID NO: 137874 - DNA, 20 bp, synthetic construct
  source 1..20: mol_type = other DNA
aggtggggagaggggacctg

SEQ ID NO: 137875 - DNA, 20 bp, synthetic construct
  source 1..20: mol_type = other DNA
caggtggggagaggggacct

SEQ ID NO: 137876 - DNA, 20 bp, synthetic construct
  source 1..20: mol_type = other DNA
ccaggtggggagaggggacc

SEQ ID NO: 137877 - DNA, 20 bp, synthetic construct
  source 1..20: mol_type = other DNA
gccaggtggggagaggggac

SEQ ID NO: 137878 - DNA, 20 bp, synthetic construct
  source 1..20: mol_type = other DNA
tgccaggtggggagagggga

SEQ ID NO: 137879 - DNA, 20 bp, synthetic construct
  source 1..20: mol_type = other DNA
ttgccaggtggggagagggg

SEQ ID NO: 137880 - DNA, 20 bp, synthetic construct
  source 1..20: mol_type = other DNA
tttgccaggtggggagaggg

SEQ ID NO: 137881 - DNA, 20 bp, synthetic construct
  source 1..20: mol_type = other DNA
ttttgccaggtggggagagg

SEQ ID NO: 137882 - DNA, 20 bp, synthetic construct
  source 1..20: mol_type = other DNA
tttttgccaggtggggagag

SEQ ID NO: 137883 - DNA, 20 bp, synthetic construct
  source 1..20: mol_type = other DNA
ctttttgccaggtggggaga

SEQ ID NO: 137884 - DNA, 20 bp, synthetic construct
  source 1..20: mol_type = other DNA
actttttgccaggtggggag

SEQ ID NO: 137885 - DNA, 20 bp, synthetic construct
  source 1..20: mol_type = other DNA
tactttttgccaggtgggga

SEQ ID NO: 137886 - DNA, 20 bp, synthetic construct
  source 1..20: mol_type = other DNA
gtactttttgccaggtgggg

SEQ ID NO: 137887 - DNA, 20 bp, synthetic construct
  source 1..20: mol_type = other DNA
tgtactttttgccaggtggg

SEQ ID NO: 137888 - DNA, 20 bp, synthetic construct
  source 1..20: mol_type = other DNA
ctgtactttttgccaggtgg

SEQ ID NO: 137889 - DNA, 20 bp, synthetic construct
  source 1..20: mol_type = other DNA
tctgtactttttgccaggtg

SEQ ID NO: 137890 - DNA, 20 bp, synthetic construct
  source 1..20: mol_type = other DNA
ttctgtactttttgccaggt

SEQ ID NO: 137891 - DNA, 20 bp, synthetic construct
  source 1..20: mol_type = other DNA
tttctgtactttttgccagg

SEQ ID NO: 137892 - DNA, 20 bp, synthetic construct
  source 1..20: mol_type = other DNA
atttctgtactttttgccag

SEQ ID NO: 137893 - DNA, 20 bp, synthetic construct
  source 1..20: mol_type = other DNA
tatttctgtactttttgcca

SEQ ID NO: 137894 - DNA, 20 bp, synthetic construct
  source 1..20: mol_type = other DNA
ctatttctgtactttttgcc

SEQ ID NO: 137895 - DNA, 20 bp, synthetic construct
  source 1..20: mol_type = other DNA
actatttctgtactttttgc

SEQ ID NO: 137896 - DNA, 20 bp, synthetic construct
  source 1..20: mol_type = other DNA
aactatttctgtactttttg

SEQ ID NO: 137897 - DNA, 20 bp, synthetic construct
  source 1..20: mol_type = other DNA
caactatttctgtacttttt

SEQ ID NO: 137898 - DNA, 20 bp, synthetic construct
  source 1..20: mol_type = other DNA
gcaactatttctgtactttt

SEQ ID NO: 137899 - DNA, 20 bp, synthetic construct
  source 1..20: mol_type = other DNA
agcaactatttctgtacttt

SEQ ID NO: 137900 - DNA, 20 bp, synthetic construct
  source 1..20: mol_type = other DNA
gagcaactatttctgtactt

SEQ ID NO: 137901 - DNA, 20 bp, synthetic construct
  source 1..20: mol_type = other DNA
ggagcaactatttctgtact

SEQ ID NO: 137902 - DNA, 20 bp, synthetic construct
  source 1..20: mol_type = other DNA
aggagcaactatttctgtac

SEQ ID NO: 137903 - DNA, 20 bp, synthetic construct
  source 1..20: mol_type = other DNA
aaggagcaactatttctgta

SEQ ID NO: 137904 - DNA, 20 bp, synthetic construct
  source 1..20: mol_type = other DNA
gaaggagcaactatttctgt

SEQ ID NO: 137905 - DNA, 20 bp, synthetic construct
  source 1..20: mol_type = other DNA
tgaaggagcaactatttctg

SEQ ID NO: 137906 - DNA, 20 bp, synthetic construct
  source 1..20: mol_type = other DNA
atgaaggagcaactatttct

SEQ ID NO: 137907 - DNA, 20 bp, synthetic construct
  source 1..20: mol_type = other DNA
catgaaggagcaactatttc

SEQ ID NO: 137908 - DNA, 20 bp, synthetic construct
  source 1..20: mol_type = other DNA
ccatgaaggagcaactattt

SEQ ID NO: 137909 - DNA, 20 bp, synthetic construct
  source 1..20: mol_type = other DNA
tccatgaaggagcaactatt

SEQ ID NO: 137910 - DNA, 20 bp, synthetic construct
  source 1..20: mol_type = other DNA
ctccatgaaggagcaactat

SEQ ID NO: 137911 - DNA, 20 bp, synthetic construct
  source 1..20: mol_type = other DNA
tctccatgaaggagcaacta

SEQ ID NO: 137912 - DNA, 20 bp, synthetic construct
  source 1..20: mol_type = other DNA
ttctccatgaaggagcaact

SEQ ID NO: 137913 - DNA, 20 bp, synthetic construct
  source 1..20: mol_type = other DNA
tttctccatgaaggagcaac

SEQ ID NO: 137914 - DNA, 20 bp, synthetic construct
  source 1..20: mol_type = other DNA
ctttctccatgaaggagcaa

SEQ ID NO: 137915 - DNA, 20 bp, synthetic construct
  source 1..20: mol_type = other DNA
actttctccatgaaggagca

SEQ ID NO: 137916 - DNA, 20 bp, synthetic construct
  source 1..20: mol_type = other DNA
gactttctccatgaaggagc

SEQ ID NO: 137917 - DNA, 20 bp, synthetic construct
  source 1..20: mol_type = other DNA
agactttctccatgaaggag

SEQ ID NO: 137918 - DNA, 20 bp, synthetic construct
  source 1..20: mol_type = other DNA
cagactttctccatgaagga

SEQ ID NO: 137919 - DNA, 20 bp, synthetic construct
  source 1..20: mol_type = other DNA
ccagactttctccatgaagg

SEQ ID NO: 137920 - DNA, 20 bp, synthetic construct
  source 1..20: mol_type = other DNA
cccagactttctccatgaag

SEQ ID NO: 137921 - DNA, 20 bp, synthetic construct
  source 1..20: mol_type = other DNA
gcccagactttctccatgaa

SEQ ID NO: 137922 - DNA, 20 bp, synthetic construct
  source 1..20: mol_type = other DNA
tgcccagactttctccatga

SEQ ID NO: 137923 - DNA, 20 bp, synthetic construct
  source 1..20: mol_type = other DNA
ctgcccagactttctccatg

SEQ ID NO: 137924 - DNA, 20 bp, synthetic construct
  source 1..20: mol_type = other DNA
tctgcccagactttctccat

SEQ ID NO: 137925 - DNA, 20 bp, synthetic construct
  source 1..20: mol_type = other DNA
ctctgcccagactttctcca

SEQ ID NO: 137926 - DNA, 20 bp, synthetic construct
  source 1..20: mol_type = other DNA
gctctgcccagactttctcc

SEQ ID NO: 137927 - DNA, 20 bp, synthetic construct
  source 1..20: mol_type = other DNA
agctctgcccagactttctc

SEQ ID NO: 137928 - DNA, 20 bp, synthetic construct
  source 1..20: mol_type = other DNA
aagctctgcccagactttct

SEQ ID NO: 137929 - DNA, 20 bp, synthetic construct
  source 1..20: mol_type = other DNA
aaagctctgcccagactttc

SEQ ID NO: 137930 - DNA, 20 bp, synthetic construct
  source 1..20: mol_type = other DNA
gaaagctctgcccagacttt

SEQ ID NO: 137931 - DNA, 20 bp, synthetic construct
  source 1..20: mol_type = other DNA
agaaagctctgcccagactt

SEQ ID NO: 137932 - DNA, 20 bp, synthetic construct
  source 1..20: mol_type = other DNA
aagaaagctctgcccagact

SEQ ID NO: 137933 - DNA, 20 bp, synthetic construct
  source 1..20: mol_type = other DNA
gaagaaagctctgcccagac

SEQ ID NO: 137934 - DNA, 20 bp, synthetic construct
  source 1..20: mol_type = other DNA
agaagaaagctctgcccaga

SEQ ID NO: 137935 - DNA, 20 bp, synthetic construct
  source 1..20: mol_type = other DNA
cagaagaaagctctgcccag

SEQ ID NO: 137936 - DNA, 20 bp, synthetic construct
  source 1..20: mol_type = other DNA
ccagaagaaagctctgccca

SEQ ID NO: 137937 - DNA, 20 bp, synthetic construct
  source 1..20: mol_type = other DNA
tccagaagaaagctctgccc

SEQ ID NO: 137938 - DNA, 20 bp, synthetic construct
  source 1..20: mol_type = other DNA
ttccagaagaaagctctgcc

SEQ ID NO: 137939 - DNA, 20 bp, synthetic construct
  source 1..20: mol_type = other DNA
tttccagaagaaagctctgc

SEQ ID NO: 137940 - DNA, 20 bp, synthetic construct
  source 1..20: mol_type = other DNA
atttccagaagaaagctctg

SEQ ID NO: 137941 - DNA, 20 bp, synthetic construct
  source 1..20: mol_type = other DNA
catttccagaagaaagctct

SEQ ID NO: 137942 - DNA, 20 bp, synthetic construct
  source 1..20: mol_type = other DNA
tcatttccagaagaaagctc

SEQ ID NO: 137943 - DNA, 20 bp, synthetic construct
  source 1..20: mol_type = other DNA
ttcatttccagaagaaagct

SEQ ID NO: 137944 - DNA, 20 bp, synthetic construct
  source 1..20: mol_type = other DNA
gttcatttccagaagaaagc

SEQ ID NO: 137945 - DNA, 20 bp, synthetic construct
  source 1..20: mol_type = other DNA
agttcatttccagaagaaag

SEQ ID NO: 137946 - DNA, 20 bp, synthetic construct
  source 1..20: mol_type = other DNA
aagttcatttccagaagaaa

SEQ ID NO: 137947 - DNA, 20 bp, synthetic construct
  source 1..20: mol_type = other DNA
aaagttcatttccagaagaa

SEQ ID NO: 137948 - DNA, 20 bp, synthetic construct
  source 1..20: mol_type = other DNA
aaaagttcatttccagaaga

SEQ ID NO: 137949 - DNA, 20 bp, synthetic construct
  source 1..20: mol_type = other DNA
taaaagttcatttccagaag

SEQ ID NO: 137950 - DNA, 20 bp, synthetic construct
  source 1..20: mol_type = other DNA
ttaaaagttcatttccagaa

SEQ ID NO: 137951 - DNA, 20 bp, synthetic construct
  source 1..20: mol_type = other DNA
cttaaaagttcatttccaga

SEQ ID NO: 137952 - DNA, 20 bp, synthetic construct
  source 1..20: mol_type = other DNA
ccttaaaagttcatttccag

SEQ ID NO: 137953 - DNA, 20 bp, synthetic construct
  source 1..20: mol_type = other DNA
accttaaaagttcatttcca

SEQ ID NO: 137954 - DNA, 20 bp, synthetic construct
  source 1..20: mol_type = other DNA
taccttaaaagttcatttcc

SEQ ID NO: 137955 - DNA, 20 bp, synthetic construct
  source 1..20: mol_type = other DNA
gtaccttaaaagttcatttc

SEQ ID NO: 137956 - DNA, 20 bp, synthetic construct
  source 1..20: mol_type = other DNA
tgtaccttaaaagttcattt

SEQ ID NO: 137957 - DNA, 20 bp, synthetic construct
  source 1..20: mol_type = other DNA
atgtaccttaaaagttcatt

SEQ ID NO: 137958 - DNA, 20 bp, synthetic construct
  source 1..20: mol_type = other DNA
aatgtaccttaaaagttcat

SEQ ID NO: 137959 - DNA, 20 bp, synthetic construct
  source 1..20: mol_type = other DNA
aaatgtaccttaaaagttca

SEQ ID NO: 137960 - DNA, 20 bp, synthetic construct
  source 1..20: mol_type = other DNA
aaaatgtaccttaaaagttc

SEQ ID NO: 137961 - DNA, 20 bp, synthetic construct
  source 1..20: mol_type = other DNA
aaaaatgtaccttaaaagtt

SEQ ID NO: 137962 - DNA, 20 bp, synthetic construct
  source 1..20: mol_type = other DNA
gaaaaatgtaccttaaaagt

SEQ ID NO: 137963 - DNA, 20 bp, synthetic construct
  source 1..20: mol_type = other DNA
ggaaaaatgtaccttaaaag

SEQ ID NO: 137964 - DNA, 20 bp, synthetic construct
  source 1..20: mol_type = other DNA
aggaaaaatgtaccttaaaa

SEQ ID NO: 137965 - DNA, 20 bp, synthetic construct
  source 1..20: mol_type = other DNA
taggaaaaatgtaccttaaa

SEQ ID NO: 137966 - DNA, 20 bp, synthetic construct
  source 1..20: mol_type = other DNA
ataggaaaaatgtaccttaa

SEQ ID NO: 137967 - DNA, 20 bp, synthetic construct
  source 1..20: mol_type = other DNA
aataggaaaaatgtacctta

SEQ ID NO: 137968 - DNA, 20 bp, synthetic construct
  source 1..20: mol_type = other DNA
aaataggaaaaatgtacctt

SEQ ID NO: 137969 - DNA, 20 bp, synthetic construct
  source 1..20: mol_type = other DNA
caaataggaaaaatgtacct

SEQ ID NO: 137970 - DNA, 20 bp, synthetic construct
  source 1..20: mol_type = other DNA
acaaataggaaaaatgtacc

SEQ ID NO: 137971 - DNA, 20 bp, synthetic construct
  source 1..20: mol_type = other DNA
tacaaataggaaaaatgtac

SEQ ID NO: 137972 - DNA, 20 bp, synthetic construct
  source 1..20: mol_type = other DNA
ctacaaataggaaaaatgta

SEQ ID NO: 137973 - DNA, 20 bp, synthetic construct
  source 1..20: mol_type = other DNA
cctacaaataggaaaaatgt

SEQ ID NO: 137974 - DNA, 20 bp, synthetic construct
  source 1..20: mol_type = other DNA
ccctacaaataggaaaaatg

SEQ ID NO: 137975 - DNA, 20 bp, synthetic construct
  source 1..20: mol_type = other DNA
gccctacaaataggaaaaat

SEQ ID NO: 137976 - DNA, 20 bp, synthetic construct
  source 1..20: mol_type = other DNA
tgccctacaaataggaaaaa

SEQ ID NO: 137977 - DNA, 20 bp, synthetic construct
  source 1..20: mol_type = other DNA
ttgccctacaaataggaaaa

SEQ ID NO: 137978 - DNA, 20 bp, synthetic construct
  source 1..20: mol_type = other DNA
attgccctacaaataggaaa

SEQ ID NO: 137979 - DNA, 20 bp, synthetic construct
  source 1..20: mol_type = other DNA
aattgccctacaaataggaa

SEQ ID NO: 137980 - DNA, 20 bp, synthetic construct
  source 1..20: mol_type = other DNA
aaattgccctacaaatagga

SEQ ID NO: 137981 - DNA, 20 bp, synthetic construct
  source 1..20: mol_type = other DNA
caaattgccctacaaatagg

SEQ ID NO: 137982 - DNA, 20 bp, synthetic construct
  source 1..20: mol_type = other DNA
acaaattgccctacaaatag

SEQ ID NO: 137983 - DNA, 20 bp, synthetic construct
  source 1..20: mol_type = other DNA
tacaaattgccctacaaata

SEQ ID NO: 137984 - DNA, 20 bp, synthetic construct
  source 1..20: mol_type = other DNA
ttacaaattgccctacaaat

SEQ ID NO: 137985 - DNA, 20 bp, synthetic construct
  source 1..20: mol_type = other DNA
tttacaaattgccctacaaa

SEQ ID NO: 137986 - DNA, 20 bp, synthetic construct
  source 1..20: mol_type = other DNA
ttttacaaattgccctacaa

SEQ ID NO: 137987 - DNA, 20 bp, synthetic construct
  source 1..20: mol_type = other DNA
tttttacaaattgccctaca

SEQ ID NO: 137988 - DNA, 20 bp, synthetic construct
  source 1..20: mol_type = other DNA
atttttacaaattgccctac

SEQ ID NO: 137989 - DNA, 20 bp, synthetic construct
  source 1..20: mol_type = other DNA
tatttttacaaattgcccta

SEQ ID NO: 137990 - DNA, 20 bp, synthetic construct
  source 1..20: mol_type = other DNA
ttatttttacaaattgccct

SEQ ID NO: 137991 - DNA, 20 bp, synthetic construct
  source 1..20: mol_type = other DNA
cttatttttacaaattgccc

SEQ ID NO: 137992 - DNA, 20 bp, synthetic construct
  source 1..20: mol_type = other DNA
ccttatttttacaaattgcc

SEQ ID NO: 137993 - DNA, 20 bp, synthetic construct
  source 1..20: mol_type = other DNA
cccttatttttacaaattgc

SEQ ID NO: 137994 - DNA, 20 bp, synthetic construct
  source 1..20: mol_type = other DNA
gcccttatttttacaaattg

SEQ ID NO: 137995 - DNA, 20 bp, synthetic construct
  source 1..20: mol_type = other DNA
ggcccttatttttacaaatt

SEQ ID NO: 137996 - DNA, 20 bp, synthetic construct
  source 1..20: mol_type = other DNA
cggcccttatttttacaaat

SEQ ID NO: 137997 - DNA, 20 bp, synthetic construct
  source 1..20: mol_type = other DNA
ccggcccttatttttacaaa

SEQ ID NO: 137998 - DNA, 20 bp, synthetic construct
  source 1..20: mol_type = other DNA
tccggcccttatttttacaa

SEQ ID NO: 137999 - DNA, 20 bp, synthetic construct
  source 1..20: mol_type = other DNA
gtccggcccttatttttaca

SEQ ID NO: 138000 - DNA, 20 bp, synthetic construct
  source 1..20: mol_type = other DNA
cgtccggcccttatttttac

SEQ ID NO: 138001 - DNA, 20 bp, synthetic construct
  source 1..20: mol_type = other DNA
acgtccggcccttattttta

SEQ ID NO: 138002 - DNA, 20 bp, synthetic construct
  source 1..20: mol_type = other DNA
cacgtccggcccttattttt

SEQ ID NO: 138003 - DNA, 20 bp, synthetic construct
  source 1..20: mol_type = other DNA
ccacgtccggcccttatttt

SEQ ID NO: 138004 - DNA, 20 bp, synthetic construct
  source 1..20: mol_type = other DNA
accacgtccggcccttattt

SEQ ID NO: 138005 - DNA, 20 bp, synthetic construct
  source 1..20: mol_type = other DNA
caccacgtccggcccttatt

SEQ ID NO: 138006 - DNA, 20 bp, synthetic construct
  source 1..20: mol_type = other DNA
ccaccacgtccggcccttat

SEQ ID NO: 138007 - DNA, 20 bp, synthetic construct
  source 1..20: mol_type = other DNA
gccaccacgtccggccctta

SEQ ID NO: 138008 - DNA, 20 bp, synthetic construct
  source 1..20: mol_type = other DNA
agccaccacgtccggccctt

SEQ ID NO: 138009 - DNA, 20 bp, synthetic construct
  source 1..20: mol_type = other DNA
gagccaccacgtccggccct

SEQ ID NO: 138010 - DNA, 20 bp, synthetic construct
  source 1..20: mol_type = other DNA
tgagccaccacgtccggccc

SEQ ID NO: 138011 - DNA, 20 bp, synthetic construct
  source 1..20: mol_type = other DNA
gtgagccaccacgtccggcc

SEQ ID NO: 138012 - DNA, 20 bp, synthetic construct
  source 1..20: mol_type = other DNA
cgtgagccaccacgtccggc

SEQ ID NO: 138013 - DNA, 20 bp, synthetic construct
  source 1..20: mol_type = other DNA
gcgtgagccaccacgtccgg

SEQ ID NO: 138014 - DNA, 20 bp, synthetic construct
  source 1..20: mol_type = other DNA
ggcgtgagccaccacgtccg

SEQ ID NO: 138015 - DNA, 20 bp, synthetic construct
  source 1..20: mol_type = other DNA
aggcgtgagccaccacgtcc

SEQ ID NO: 138016 - DNA, 20 bp, synthetic construct
  source 1..20: mol_type = other DNA
caggcgtgagccaccacgtc

SEQ ID NO: 138017 - DNA, 20 bp, synthetic construct
  source 1..20: mol_type = other DNA
acaggcgtgagccaccacgt

SEQ ID NO: 138018 - DNA, 20 bp, synthetic construct
  source 1..20: mol_type = other DNA
tacaggcgtgagccaccacg

SEQ ID NO: 138019 - DNA, 20 bp, synthetic construct
  source 1..20: mol_type = other DNA
ttacaggcgtgagccaccac

SEQ ID NO: 138020 - DNA, 20 bp, synthetic construct
  source 1..20: mol_type = other DNA
attacaggcgtgagccacca

SEQ ID NO: 138021 - DNA, 20 bp, synthetic construct
  source 1..20: mol_type = other DNA
gattacaggcgtgagccacc

SEQ ID NO: 138022 - DNA, 20 bp, synthetic construct
  source 1..20: mol_type = other DNA
ggattacaggcgtgagccac

SEQ ID NO: 138023 - DNA, 20 bp, synthetic construct
  source 1..20: mol_type = other DNA
gggattacaggcgtgagcca

SEQ ID NO: 138024 - DNA, 20 bp, synthetic construct
  source 1..20: mol_type = other DNA
tgggattacaggcgtgagcc

SEQ ID NO: 138025 - DNA, 20 bp, synthetic construct
  source 1..20: mol_type = other DNA
ctgggattacaggcgtgagc

SEQ ID NO: 138026 - DNA, 20 bp, synthetic construct
  source 1..20: mol_type = other DNA
actgggattacaggcgtgag

SEQ ID NO: 138027 - DNA, 20 bp, synthetic construct
  source 1..20: mol_type = other DNA
tactgggattacaggcgtga

SEQ ID NO: 138028 - DNA, 20 bp, synthetic construct
  source 1..20: mol_type = other DNA
gtactgggattacaggcgtg

SEQ ID NO: 138029 - DNA, 20 bp, synthetic construct
  source 1..20: mol_type = other DNA
agtactgggattacaggcgt

SEQ ID NO: 138030 - DNA, 20 bp, synthetic construct
  source 1..20: mol_type = other DNA
aagtactgggattacaggcg

SEQ ID NO: 138031 - DNA, 20 bp, synthetic construct
  source 1..20: mol_type = other DNA
aaagtactgggattacaggc

SEQ ID NO: 138032 - DNA, 20 bp, synthetic construct
  source 1..20: mol_type = other DNA
caaagtactgggattacagg

SEQ ID NO: 138033 - DNA, 20 bp, synthetic construct
  source 1..20: mol_type = other DNA
ccaaagtactgggattacag

SEQ ID NO: 138034 - DNA, 20 bp, synthetic construct
  source 1..20: mol_type = other DNA
cccaaagtactgggattaca

SEQ ID NO: 138035 - DNA, 20 bp, synthetic construct
  source 1..20: mol_type = other DNA
tcccaaagtactgggattac

SEQ ID NO: 138036 - DNA, 20 bp, synthetic construct
  source 1..20: mol_type = other DNA
ctcccaaagtactgggatta

SEQ ID NO: 138037 - DNA, 20 bp, synthetic construct
  source 1..20: mol_type = other DNA
cctcccaaagtactgggatt

SEQ ID NO: 138038 - DNA, 20 bp, synthetic construct
  source 1..20: mol_type = other DNA
gcctcccaaagtactgggat

SEQ ID NO: 138039 - DNA, 20 bp, synthetic construct
  source 1..20: mol_type = other DNA
ggcctcccaaagtactggga

SEQ ID NO: 138040 - DNA, 20 bp, synthetic construct
  source 1..20: mol_type = other DNA
cggcctcccaaagtactggg

SEQ ID NO: 138041 - DNA, 20 bp, synthetic construct
  source 1..20: mol_type = other DNA
tcggcctcccaaagtactgg

SEQ ID NO: 138042 - DNA, 20 bp, synthetic construct
  source 1..20: mol_type = other DNA
ctcggcctcccaaagtactg

SEQ ID NO: 138043 - DNA, 20 bp, synthetic construct
  source 1..20: mol_type = other DNA
cctcggcctcccaaagtact

SEQ ID NO: 138044 - DNA, 20 bp, synthetic construct
  source 1..20: mol_type = other DNA
acctcggcctcccaaagtac

SEQ ID NO: 138045 - DNA, 20 bp, synthetic construct
  source 1..20: mol_type = other DNA
cacctcggcctcccaaagta

SEQ ID NO: 138046 - DNA, 20 bp, synthetic construct
  source 1..20: mol_type = other DNA
ccacctcggcctcccaaagt

SEQ ID NO: 138047 - DNA, 20 bp, synthetic construct
  source 1..20: mol_type = other DNA
cccacctcggcctcccaaag

SEQ ID NO: 138048 - DNA, 20 bp, synthetic construct
  source 1..20: mol_type = other DNA
acccacctcggcctcccaaa

SEQ ID NO: 138049 - DNA, 20 bp, synthetic construct
  source 1..20: mol_type = other DNA
cacccacctcggcctcccaa

SEQ ID NO: 138050 - DNA, 20 bp, synthetic construct
  source 1..20: mol_type = other DNA
ccacccacctcggcctccca

SEQ ID NO: 138051 - DNA, 20 bp, synthetic construct
  source 1..20: mol_type = other DNA
tccacccacctcggcctccc

SEQ ID NO: 138052 - DNA, 20 bp, synthetic construct
  source 1..20: mol_type = other DNA
atccacccacctcggcctcc

SEQ ID NO: 138053 - DNA, 20 bp, synthetic construct
  source 1..20: mol_type = other DNA
aatccacccacctcggcctc

SEQ ID NO: 138054 - DNA, 20 bp, synthetic construct
  source 1..20: mol_type = other DNA
caatccacccacctcggcct

SEQ ID NO: 138055 - DNA, 20 bp, synthetic construct
  source 1..20: mol_type = other DNA
gcaatccacccacctcggcc

SEQ ID NO: 138056 - DNA, 20 bp, synthetic construct
  source 1..20: mol_type = other DNA
agcaatccacccacctcggc

SEQ ID NO: 138057 - DNA, 20 bp, synthetic construct
  source 1..20: mol_type = other DNA
aagcaatccacccacctcgg

SEQ ID NO: 138058 - DNA, 20 bp, synthetic construct
  source 1..20: mol_type = other DNA
caagcaatccacccacctcg

SEQ ID NO: 138059 - DNA, 20 bp, synthetic construct
  source 1..20: mol_type = other DNA
tcaagcaatccacccacctc

SEQ ID NO: 138060 - DNA, 20 bp, synthetic construct
  source 1..20: mol_type = other DNA
ctcaagcaatccacccacct

SEQ ID NO: 138061 - DNA, 20 bp, synthetic construct
  source 1..20: mol_type = other DNA
cctcaagcaatccacccacc

SEQ ID NO: 138062 - DNA, 20 bp, synthetic construct
  source 1..20: mol_type = other DNA
gcctcaagcaatccacccac

SEQ ID NO: 138063 - DNA, 20 bp, synthetic construct
  source 1..20: mol_type = other DNA
ggcctcaagcaatccaccca

SEQ ID NO: 138064 - DNA, 20 bp, synthetic construct
  source 1..20: mol_type = other DNA
tggcctcaagcaatccaccc

SEQ ID NO: 138065 - DNA, 20 bp, synthetic construct
  source 1..20: mol_type = other DNA
ctggcctcaagcaatccacc

SEQ ID NO: 138066 - DNA, 20 bp, synthetic construct
  source 1..20: mol_type = other DNA
cctggcctcaagcaatccac

SEQ ID NO: 138067 - DNA, 20 bp, synthetic construct
  source 1..20: mol_type = other DNA
tcctggcctcaagcaatcca

SEQ ID NO: 138068 - DNA, 20 bp, synthetic construct
  source 1..20: mol_type = other DNA
ctcctggcctcaagcaatcc

SEQ ID NO: 138069 - DNA, 20 bp, synthetic construct
  source 1..20: mol_type = other DNA
actcctggcctcaagcaatc

SEQ ID NO: 138070 - DNA, 20 bp, synthetic construct
  source 1..20: mol_type = other DNA
aactcctggcctcaagcaat

SEQ ID NO: 138071 - DNA, 20 bp, synthetic construct
  source 1..20: mol_type = other DNA
gaactcctggcctcaagcaa

SEQ ID NO: 138072 - DNA, 20 bp, synthetic construct
  source 1..20: mol_type = other DNA
cgaactcctggcctcaagca

SEQ ID NO: 138073 - DNA, 20 bp, synthetic construct
  source 1..20: mol_type = other DNA
tcgaactcctggcctcaagc

SEQ ID NO: 138074 - DNA, 20 bp, synthetic construct
  source 1..20: mol_type = other DNA
ctcgaactcctggcctcaag

SEQ ID NO: 138075 - DNA, 20 bp, synthetic construct
  source 1..20: mol_type = other DNA
tctcgaactcctggcctcaa

SEQ ID NO: 138076 - DNA, 20 bp, synthetic construct
  source 1..20: mol_type = other DNA
ttctcgaactcctggcctca

SEQ ID NO: 138077 - DNA, 20 bp, synthetic construct
  source 1..20: mol_type = other DNA
gttctcgaactcctggcctc

SEQ ID NO: 138078 - DNA, 20 bp, synthetic construct
  source 1..20: mol_type = other DNA
tgttctcgaactcctggcct

SEQ ID NO: 138079 - DNA, 20 bp, synthetic construct
  source 1..20: mol_type = other DNA
ctgttctcgaactcctggcc

SEQ ID NO: 138080 - DNA, 20 bp, synthetic construct
  source 1..20: mol_type = other DNA
gctgttctcgaactcctggc

SEQ ID NO: 138081 - DNA, 20 bp, synthetic construct
  source 1..20: mol_type = other DNA
ggctgttctcgaactcctgg

SEQ ID NO: 138082 - DNA, 20 bp, synthetic construct
  source 1..20: mol_type = other DNA
aggctgttctcgaactcctg

SEQ ID NO: 138083 - DNA, 20 bp, synthetic construct
  source 1..20: mol_type = other DNA
caggctgttctcgaactcct

SEQ ID NO: 138084 - DNA, 20 bp, synthetic construct
  source 1..20: mol_type = other DNA
ccaggctgttctcgaactcc

SEQ ID NO: 138085 - DNA, 20 bp, synthetic construct
  source 1..20: mol_type = other DNA
gccaggctgttctcgaactc

SEQ ID NO: 138086 - DNA, 20 bp, synthetic construct
  source 1..20: mol_type = other DNA
ggccaggctgttctcgaact

SEQ ID NO: 138087 - DNA, 20 bp, synthetic construct
  source 1..20: mol_type = other DNA
tggccaggctgttctcgaac

SEQ ID NO: 138088 - DNA, 20 bp, synthetic construct
  source 1..20: mol_type = other DNA
ttggccaggctgttctcgaa

SEQ ID NO: 138089 - DNA, 20 bp, synthetic construct
  source 1..20: mol_type = other DNA
gttggccaggctgttctcga

SEQ ID NO: 138090 - DNA, 20 bp, synthetic construct
  source 1..20: mol_type = other DNA
tgttggccaggctgttctcg

SEQ ID NO: 138091 - DNA, 20 bp, synthetic construct
  source 1..20: mol_type = other DNA
atgttggccaggctgttctc

SEQ ID NO: 138092 - DNA, 20 bp, synthetic construct
  source 1..20: mol_type = other DNA
catgttggccaggctgttct

SEQ ID NO: 138093 - DNA, 20 bp, synthetic construct
  source 1..20: mol_type = other DNA
ccatgttggccaggctgttc

SEQ ID NO: 138094 - DNA, 20 bp, synthetic construct
  source 1..20: mol_type = other DNA
accatgttggccaggctgtt

SEQ ID NO: 138095 - DNA, 20 bp, synthetic construct
  source 1..20: mol_type = other DNA
caccatgttggccaggctgt

SEQ ID NO: 138096 - DNA, 20 bp, synthetic construct
  source 1..20: mol_type = other DNA
tcaccatgttggccaggctg

SEQ ID NO: 138097 - DNA, 20 bp, synthetic construct
  source 1..20: mol_type = other DNA
ttcaccatgttggccaggct

SEQ ID NO: 138098 - DNA, 20 bp, synthetic construct
  source 1..20: mol_type = other DNA
tttcaccatgttggccaggc

SEQ ID NO: 138099 - DNA, 20 bp, synthetic construct
  source 1..20: mol_type = other DNA
gtttcaccatgttggccagg

SEQ ID NO: 138100 - DNA, 20 bp, synthetic construct
  source 1..20: mol_type = other DNA
ggtttcaccatgttggccag

SEQ ID NO: 138101 - DNA, 20 bp, synthetic construct
  source 1..20: mol_type = other DNA
gggtttcaccatgttggcca

SEQ ID NO: 138102 - DNA, 20 bp, synthetic construct
  source 1..20: mol_type = other DNA
agggtttcaccatgttggcc

SEQ ID NO: 138103 - DNA, 20 bp, synthetic construct
  source 1..20: mol_type = other DNA
tagggtttcaccatgttggc

SEQ ID NO: 138104 - DNA, 20 bp, synthetic construct
  source 1..20: mol_type = other DNA
atagggtttcaccatgttgg

SEQ ID NO: 138105 - DNA, 20 bp, synthetic construct
  source 1..20: mol_type = other DNA
gatagggtttcaccatgttg

SEQ ID NO: 138106 - DNA, 20 bp, synthetic construct
  source 1..20: mol_type = other DNA
agatagggtttcaccatgtt

SEQ ID NO: 138107 - DNA, 20 bp, synthetic construct
  source 1..20: mol_type = other DNA
gagatagggtttcaccatgt

SEQ ID NO: 138108 - DNA, 20 bp, synthetic construct
  source 1..20: mol_type = other DNA
agagatagggtttcaccatg

SEQ ID NO: 138109 - DNA, 20 bp, synthetic construct
  source 1..20: mol_type = other DNA
tagagatagggtttcaccat

SEQ ID NO: 138110 - DNA, 20 bp, synthetic construct
  source 1..20: mol_type = other DNA
gtagagatagggtttcacca

SEQ ID NO: 138111 - DNA, 20 bp, synthetic construct
  source 1..20: mol_type = other DNA
ggtagagatagggtttcacc

SEQ ID NO: 138112 - DNA, 20 bp, synthetic construct
  source 1..20: mol_type = other DNA
tggtagagatagggtttcac

SEQ ID NO: 138113 - DNA, 20 bp, synthetic construct
  source 1..20: mol_type = other DNA
ttggtagagatagggtttca

SEQ ID NO: 138114 - DNA, 20 bp, synthetic construct
  source 1..20: mol_type = other DNA
tttggtagagatagggtttc

SEQ ID NO: 138115 - DNA, 20 bp, synthetic construct
  source 1..20: mol_type = other DNA
ctttggtagagatagggttt

SEQ ID NO: 138116 - DNA, 20 bp, synthetic construct
  source 1..20: mol_type = other DNA
gctttggtagagatagggtt

SEQ ID NO: 138117 - DNA, 20 bp, synthetic construct
  source 1..20: mol_type = other DNA
tgctttggtagagatagggt

SEQ ID NO: 138118 - DNA, 20 bp, synthetic construct
  source 1..20: mol_type = other DNA
atgctttggtagagataggg

SEQ ID NO: 138119 - DNA, 20 bp, synthetic construct
  source 1..20: mol_type = other DNA
catgctttggtagagatagg

SEQ ID NO: 138120 - DNA, 20 bp, synthetic construct
  source 1..20: mol_type = other DNA
ccatgctttggtagagatag

SEQ ID NO: 138121 - DNA, 20 bp, synthetic construct
  source 1..20: mol_type = other DNA
accatgctttggtagagata

SEQ ID NO: 138122 - DNA, 20 bp, synthetic construct
  source 1..20: mol_type = other DNA
caccatgctttggtagagat

SEQ ID NO: 138123 - DNA, 20 bp, synthetic construct
  source 1..20: mol_type = other DNA
ccaccatgctttggtagaga

SEQ ID NO: 138124 - DNA, 20 bp, synthetic construct
  source 1..20: mol_type = other DNA
gccaccatgctttggtagag

SEQ ID NO: 138125 - DNA, 20 bp, synthetic construct
  source 1..20: mol_type = other DNA
tgccaccatgctttggtaga

SEQ ID NO: 138126 - DNA, 20 bp, synthetic construct
  source 1..20: mol_type = other DNA
gtgccaccatgctttggtag

SEQ ID NO: 138127 - DNA, 20 bp, synthetic construct
  source 1..20: mol_type = other DNA
cgtgccaccatgctttggta

SEQ ID NO: 138128 - DNA, 20 bp, synthetic construct
  source 1..20: mol_type = other DNA
gcgtgccaccatgctttggt

SEQ ID NO: 138129 - DNA, 20 bp, synthetic construct
  source 1..20: mol_type = other DNA
tgcgtgccaccatgctttgg

SEQ ID NO: 138130 - DNA, 20 bp, synthetic construct
  source 1..20: mol_type = other DNA
gtgcgtgccaccatgctttg

SEQ ID NO: 138131 - DNA, 20 bp, synthetic construct
  source 1..20: mol_type = other DNA
ggtgcgtgccaccatgcttt

SEQ ID NO: 138132 - DNA, 20 bp, synthetic construct
  source 1..20: mol_type = other DNA
aggtgcgtgccaccatgctt

SEQ ID NO: 138133 - DNA, 20 bp, synthetic construct
  source 1..20: mol_type = other DNA
caggtgcgtgccaccatgct

SEQ ID NO: 138134 - DNA, 20 bp, synthetic construct
  source 1..20: mol_type = other DNA
acaggtgcgtgccaccatgc

SEQ ID NO: 138135 - DNA, 20 bp, synthetic construct
  source 1..20: mol_type = other DNA
tacaggtgcgtgccaccatg

SEQ ID NO: 138136 - DNA, 20 bp, synthetic construct
  source 1..20: mol_type = other DNA
ctacaggtgcgtgccaccat

SEQ ID NO: 138137 - DNA, 20 bp, synthetic construct
  source 1..20: mol_type = other DNA
actacaggtgcgtgccacca

SEQ ID NO: 138138 - DNA, 20 bp, synthetic construct
  source 1..20: mol_type = other DNA
gactacaggtgcgtgccacc

SEQ ID NO: 138139 - DNA, 20 bp, synthetic construct
  source 1..20: mol_type = other DNA
ggactacaggtgcgtgccac

SEQ ID NO: 138140 - DNA, 20 bp, synthetic construct
  source 1..20: mol_type = other DNA
gggactacaggtgcgtgcca

SEQ ID NO: 138141 - DNA, 20 bp, synthetic construct
  source 1..20: mol_type = other DNA
tgggactacaggtgcgtgcc

SEQ ID NO: 138142 - DNA, 20 bp, synthetic construct
  source 1..20: mol_type = other DNA
ctgggactacaggtgcgtgc

SEQ ID NO: 138143 - DNA, 20 bp, synthetic construct
  source 1..20: mol_type = other DNA
gctgggactacaggtgcgtg

SEQ ID NO: 138144 - DNA, 20 bp, synthetic construct
  source 1..20: mol_type = other DNA
agctgggactacaggtgcgt

SEQ ID NO: 138145 - DNA, 20 bp, synthetic construct
  source 1..20: mol_type = other DNA
tagctgggactacaggtgcg

SEQ ID NO: 138146 - DNA, 20 bp, synthetic construct
  source 1..20: mol_type = other DNA
gtagctgggactacaggtgc

SEQ ID NO: 138147 - DNA, 20 bp, synthetic construct
  source 1..20: mol_type = other DNA
agtagctgggactacaggtg

SEQ ID NO: 138148 - DNA, 20 bp, synthetic construct
  source 1..20: mol_type = other DNA
aagtagctgggactacaggt

SEQ ID NO: 138149 - DNA, 20 bp, synthetic construct
  source 1..20: mol_type = other DNA
caagtagctgggactacagg

SEQ ID NO: 138150 - DNA, 20 bp, synthetic construct
  source 1..20: mol_type = other DNA
ccaagtagctgggactacag

SEQ ID NO: 138151 - DNA, 20 bp, synthetic construct
  source 1..20: mol_type = other DNA
cccaagtagctgggactaca

SEQ ID NO: 138152 - DNA, 20 bp, synthetic construct
  source 1..20: mol_type = other DNA
tcccaagtagctgggactac

SEQ ID NO: 138153 - DNA, 20 bp, synthetic construct
  source 1..20: mol_type = other DNA
ctcccaagtagctgggacta

SEQ ID NO: 138154 - DNA, 20 bp, synthetic construct
  source 1..20: mol_type = other DNA
cctcccaagtagctgggact

SEQ ID NO: 138155 - DNA, 20 bp, synthetic construct
  source 1..20: mol_type = other DNA
gcctcccaagtagctgggac

SEQ ID NO: 138156 - DNA, 20 bp, synthetic construct
  source 1..20: mol_type = other DNA
cgcctcccaagtagctggga

SEQ ID NO: 138157 - DNA, 20 bp, synthetic construct
  source 1..20: mol_type = other DNA
ccgcctcccaagtagctggg

SEQ ID NO: 138158 - DNA, 20 bp, synthetic construct
  source 1..20: mol_type = other DNA
tccgcctcccaagtagctgg

SEQ ID NO: 138159 - DNA, 20 bp, synthetic construct
  source 1..20: mol_type = other DNA
ctccgcctcccaagtagctg

SEQ ID NO: 138160 - DNA, 20 bp, synthetic construct
  source 1..20: mol_type = other DNA
cctccgcctcccaagtagct

SEQ ID NO: 138161 - DNA, 20 bp, synthetic construct
  source 1..20: mol_type = other DNA
gcctccgcctcccaagtagc

SEQ ID NO: 138162 - DNA, 20 bp, synthetic construct
  source 1..20: mol_type = other DNA
tgcctccgcctcccaagtag

SEQ ID NO: 138163 - DNA, 20 bp, synthetic construct
  source 1..20: mol_type = other DNA
gtgcctccgcctcccaagta

SEQ ID NO: 138164 - DNA, 20 bp, synthetic construct
  source 1..20: mol_type = other DNA
tgtgcctccgcctcccaagt

SEQ ID NO: 138165 - DNA, 20 bp, synthetic construct
  source 1..20: mol_type = other DNA
ttgtgcctccgcctcccaag

SEQ ID NO: 138166 - DNA, 20 bp, synthetic construct
  source 1..20: mol_type = other DNA
cttgtgcctccgcctcccaa

SEQ ID NO: 138167 - DNA, 20 bp, synthetic construct
  source 1..20: mol_type = other DNA
tcttgtgcctccgcctccca

SEQ ID NO: 138168 - DNA, 20 bp, synthetic construct
  source 1..20: mol_type = other DNA
ctcttgtgcctccgcctccc

SEQ ID NO: 138169 - DNA, 20 bp, synthetic construct
  source 1..20: mol_type = other DNA
actcttgtgcctccgcctcc

SEQ ID NO: 138170 - DNA, 20 bp, synthetic construct
  source 1..20: mol_type = other DNA
aactcttgtgcctccgcctc

SEQ ID NO: 138171 - DNA, 20 bp, synthetic construct
  source 1..20: mol_type = other DNA
gaactcttgtgcctccgcct

SEQ ID NO: 138172 - DNA, 20 bp, synthetic construct
  source 1..20: mol_type = other DNA
ggaactcttgtgcctccgcc

SEQ ID NO: 138173 - DNA, 20 bp, synthetic construct
  source 1..20: mol_type = other DNA
tggaactcttgtgcctccgc

SEQ ID NO: 138174 - DNA, 20 bp, synthetic construct
  source 1..20: mol_type = other DNA
atggaactcttgtgcctccg

SEQ ID NO: 138175 - DNA, 20 bp, synthetic construct
  source 1..20: mol_type = other DNA
catggaactcttgtgcctcc

SEQ ID NO: 138176 - DNA, 20 bp, synthetic construct
  source 1..20: mol_type = other DNA
tcatggaactcttgtgcctc

SEQ ID NO: 138177 - DNA, 20 bp, synthetic construct
  source 1..20: mol_type = other DNA
ttcatggaactcttgtgcct

SEQ ID NO: 138178 - DNA, 20 bp, synthetic construct
  source 1..20: mol_type = other DNA
gttcatggaactcttgtgcc

SEQ ID NO: 138179 - DNA, 20 bp, synthetic construct
  source 1..20: mol_type = other DNA
ggttcatggaactcttgtgc

SEQ ID NO: 138180 - DNA, 20 bp, synthetic construct
  source 1..20: mol_type = other DNA
gggttcatggaactcttgtg

SEQ ID NO: 138181 - DNA, 20 bp, synthetic construct
  source 1..20: mol_type = other DNA
agggttcatggaactcttgt

SEQ ID NO: 138182 - DNA, 20 bp, synthetic construct
  source 1..20: mol_type = other DNA
cagggttcatggaactcttg

SEQ ID NO: 138183 - DNA, 20 bp, synthetic construct
  source 1..20: mol_type = other DNA
ccagggttcatggaactctt

SEQ ID NO: 138184 - DNA, 20 bp, synthetic construct
  source 1..20: mol_type = other DNA
tccagggttcatggaactct

SEQ ID NO: 138185 - DNA, 20 bp, synthetic construct
  source 1..20: mol_type = other DNA
ctccagggttcatggaactc

SEQ ID NO: 138186 - DNA, 20 bp, synthetic construct
  source 1..20: mol_type = other DNA
cctccagggttcatggaact

SEQ ID NO: 138187 - DNA, 20 bp, synthetic construct
  source 1..20: mol_type = other DNA
acctccagggttcatggaac

SEQ ID NO: 138188 - DNA, 20 bp, synthetic construct
  source 1..20: mol_type = other DNA
cacctccagggttcatggaa

SEQ ID NO: 138189 - DNA, 20 bp, synthetic construct
  source 1..20: mol_type = other DNA
ccacctccagggttcatgga

SEQ ID NO: 138190 - DNA, 20 bp, synthetic construct
  source 1..20: mol_type = other DNA
tccacctccagggttcatgg

SEQ ID NO: 138191 - DNA, 20 bp, synthetic construct
  source 1..20: mol_type = other DNA
ctccacctccagggttcatg

SEQ ID NO: 138192 - DNA, 20 bp, synthetic construct
  source 1..20: mol_type = other DNA
cctccacctccagggttcat

SEQ ID NO: 138193 - DNA, 20 bp, synthetic construct
  source 1..20: mol_type = other DNA
acctccacctccagggttca

SEQ ID NO: 138194 - DNA, 20 bp, synthetic construct
  source 1..20: mol_type = other DNA
aacctccacctccagggttc

SEQ ID NO: 138195 - DNA, 20 bp, synthetic construct
  source 1..20: mol_type = other DNA
caacctccacctccagggtt

SEQ ID NO: 138196 - DNA, 20 bp, synthetic construct
  source 1..20: mol_type = other DNA
gcaacctccacctccagggt

SEQ ID NO: 138197 - DNA, 20 bp, synthetic construct
  source 1..20: mol_type = other DNA
tgcaacctccacctccaggg

SEQ ID NO: 138198 - DNA, 20 bp, synthetic construct
  source 1..20: mol_type = other DNA
ctgcaacctccacctccagg

SEQ ID NO: 138199 - DNA, 20 bp, synthetic construct
  source 1..20: mol_type = other DNA
actgcaacctccacctccag

SEQ ID NO: 138200 - DNA, 20 bp, synthetic construct
  source 1..20: mol_type = other DNA
cactgcaacctccacctcca

SEQ ID NO: 138201 - DNA, 20 bp, synthetic construct
  source 1..20: mol_type = other DNA
tcactgcaacctccacctcc

SEQ ID NO: 138202 - DNA, 20 bp, synthetic construct
  source 1..20: mol_type = other DNA
ctcactgcaacctccacctc

SEQ ID NO: 138203 - DNA, 20 bp, synthetic construct
  source 1..20: mol_type = other DNA
gctcactgcaacctccacct

SEQ ID NO: 138204 - DNA, 20 bp, synthetic construct
  source 1..20: mol_type = other DNA
agctcactgcaacctccacc

SEQ ID NO: 138205 - DNA, 20 bp, synthetic construct
  source 1..20: mol_type = other DNA
cagctcactgcaacctccac

SEQ ID NO: 138206 - DNA, 20 bp, synthetic construct
  source 1..20: mol_type = other DNA
tcagctcactgcaacctcca

SEQ ID NO: 138207 - DNA, 20 bp, synthetic construct
  source 1..20: mol_type = other DNA
ctcagctcactgcaacctcc

SEQ ID NO: 138208 - DNA, 20 bp, synthetic construct
  source 1..20: mol_type = other DNA
tctcagctcactgcaacctc

SEQ ID NO: 138209 - DNA, 20 bp, synthetic construct
  source 1..20: mol_type = other DNA
atctcagctcactgcaacct

SEQ ID NO: 138210 - DNA, 20 bp, synthetic construct
  source 1..20: mol_type = other DNA
aatctcagctcactgcaacc

SEQ ID NO: 138211 - DNA, 20 bp, synthetic construct
  source 1..20: mol_type = other DNA
caatctcagctcactgcaac

SEQ ID NO: 138212 - DNA, 20 bp, synthetic construct
  source 1..20: mol_type = other DNA
acaatctcagctcactgcaa

SEQ ID NO: 138213 - DNA, 20 bp, synthetic construct
  source 1..20: mol_type = other DNA
tacaatctcagctcactgca

SEQ ID NO: 138214 - DNA, 20 bp, synthetic construct
  source 1..20: mol_type = other DNA
gtacaatctcagctcactgc

SEQ ID NO: 138215 - DNA, 20 bp, synthetic construct
  source 1..20: mol_type = other DNA
ggtacaatctcagctcactg

SEQ ID NO: 138216 - DNA, 20 bp, synthetic construct
  source 1..20: mol_type = other DNA
tggtacaatctcagctcact

SEQ ID NO: 138217 - DNA, 20 bp, synthetic construct
  source 1..20: mol_type = other DNA
gtggtacaatctcagctcac

SEQ ID NO: 138218 - DNA, 20 bp, synthetic construct
  source 1..20: mol_type = other DNA
agtggtacaatctcagctca

SEQ ID NO: 138219 - DNA, 20 bp, synthetic construct
  source 1..20: mol_type = other DNA
cagtggtacaatctcagctc

SEQ ID NO: 138220 - DNA, 20 bp, synthetic construct
  source 1..20: mol_type = other DNA
gcagtggtacaatctcagct

SEQ ID NO: 138221 - DNA, 20 bp, synthetic construct
  source 1..20: mol_type = other DNA
tgcagtggtacaatctcagc

SEQ ID NO: 138222 - DNA, 20 bp, synthetic construct
  source 1..20: mol_type = other DNA
gtgcagtggtacaatctcag

SEQ ID NO: 138223 - DNA, 20 bp, synthetic construct
  source 1..20: mol_type = other DNA
agtgcagtggtacaatctca

SEQ ID NO: 138224 - DNA, 20 bp, synthetic construct
  source 1..20: mol_type = other DNA
gagtgcagtggtacaatctc

SEQ ID NO: 138225 - DNA, 20 bp, synthetic construct
  source 1..20: mol_type = other DNA
tgagtgcagtggtacaatct

SEQ ID NO: 138226 - DNA, 20 bp, synthetic construct
  source 1..20: mol_type = other DNA
ctgagtgcagtggtacaatc

SEQ ID NO: 138227 - DNA, 20 bp, synthetic construct
  source 1..20: mol_type = other DNA
cctgagtgcagtggtacaat

SEQ ID NO: 138228 - DNA, 20 bp, synthetic construct
  source 1..20: mol_type = other DNA
gcctgagtgcagtggtacaa

SEQ ID NO: 138229 - DNA, 20 bp, synthetic construct
  source 1..20: mol_type = other DNA
ggcctgagtgcagtggtaca

SEQ ID NO: 138230 - DNA, 20 bp, synthetic construct
  source 1..20: mol_type = other DNA
aggcctgagtgcagtggtac

SEQ ID NO: 138231 - DNA, 20 bp, synthetic construct
  source 1..20: mol_type = other DNA
caggcctgagtgcagtggta

SEQ ID NO: 138232 - DNA, 20 bp, synthetic construct
  source 1..20: mol_type = other DNA
ccaggcctgagtgcagtggt

SEQ ID NO: 138233 - DNA, 20 bp, synthetic construct
  source 1..20: mol_type = other DNA
cccaggcctgagtgcagtgg

SEQ ID NO: 138234 - DNA, 20 bp, synthetic construct
  source 1..20: mol_type = other DNA
gcccaggcctgagtgcagtg

SEQ ID NO: 138235 - DNA, 20 bp, synthetic construct
  source 1..20: mol_type = other DNA
tgcccaggcctgagtgcagt

SEQ ID NO: 138236 - DNA, 20 bp, synthetic construct
  source 1..20: mol_type = other DNA
ttgcccaggcctgagtgcag

SEQ ID NO: 138237 - DNA, 20 bp, synthetic construct
  source 1..20: mol_type = other DNA
gttgcccaggcctgagtgca

SEQ ID NO: 138238 - DNA, 20 bp, synthetic construct
  source 1..20: mol_type = other DNA
tgttgcccaggcctgagtgc

SEQ ID NO: 138239 - DNA, 20 bp, synthetic construct
  source 1..20: mol_type = other DNA
ctgttgcccaggcctgagtg

SEQ ID NO: 138240 - DNA, 20 bp, synthetic construct
  source 1..20: mol_type = other DNA
tctgttgcccaggcctgagt

SEQ ID NO: 138241 - DNA, 20 bp, synthetic construct
  source 1..20: mol_type = other DNA
ctctgttgcccaggcctgag

SEQ ID NO: 138242 - DNA, 20 bp, synthetic construct
  source 1..20: mol_type = other DNA
tctctgttgcccaggcctga

SEQ ID NO: 138243 - DNA, 20 bp, synthetic construct
  source 1..20: mol_type = other DNA
ctctctgttgcccaggcctg

SEQ ID NO: 138244 - DNA, 20 bp, synthetic construct
  source 1..20: mol_type = other DNA
tctctctgttgcccaggcct

SEQ ID NO: 138245 - DNA, 20 bp, synthetic construct
  source 1..20: mol_type = other DNA
ctctctctgttgcccaggcc

SEQ ID NO: 138246 - DNA, 20 bp, synthetic construct
  source 1..20: mol_type = other DNA
tctctctctgttgcccaggc

SEQ ID NO: 138247 - DNA, 20 bp, synthetic construct
  source 1..20: mol_type = other DNA
gtctctctctgttgcccagg

SEQ ID NO: 138248 - DNA, 20 bp, synthetic construct
  source 1..20: mol_type = other DNA
agtctctctctgttgcccag

SEQ ID NO: 138249 - DNA, 20 bp, synthetic construct
  source 1..20: mol_type = other DNA
gagtctctctctgttgccca

SEQ ID NO: 138250 - DNA, 20 bp, synthetic construct
  source 1..20: mol_type = other DNA
agagtctctctctgttgccc

SEQ ID NO: 138251 - DNA, 20 bp, synthetic construct
  source 1..20: mol_type = other DNA
cagagtctctctctgttgcc

SEQ ID NO: 138252 - DNA, 20 bp, synthetic construct
  source 1..20: mol_type = other DNA
acagagtctctctctgttgc

SEQ ID NO: 138253 - DNA, 20 bp, synthetic construct
  source 1..20: mol_type = other DNA
gacagagtctctctctgttg

SEQ ID NO: 138254 - DNA, 20 bp, synthetic construct
  source 1..20: mol_type = other DNA
agacagagtctctctctgtt

SEQ ID NO: 138255 - DNA, 20 bp, synthetic construct
  source 1..20: mol_type = other DNA
gagacagagtctctctctgt

SEQ ID NO: 138256 - DNA, 20 bp, synthetic construct
  source 1..20: mol_type = other DNA
tgagacagagtctctctctg

SEQ ID NO: 138257 - DNA, 20 bp, synthetic construct
  source 1..20: mol_type = other DNA
ttgagacagagtctctctct

SEQ ID NO: 138258 - DNA, 20 bp, synthetic construct
  source 1..20: mol_type = other DNA
tttgagacagagtctctctc

SEQ ID NO: 138259 - DNA, 20 bp, synthetic construct
  source 1..20: mol_type = other DNA
ttttgagacagagtctctct

SEQ ID NO: 138260 - DNA, 20 bp, synthetic construct
  source 1..20: mol_type = other DNA
attttgagacagagtctctc

SEQ ID NO: 138261 - DNA, 20 bp, synthetic construct
  source 1..20: mol_type = other DNA
tattttgagacagagtctct

SEQ ID NO: 138262 - DNA, 20 bp, synthetic construct
  source 1..20: mol_type = other DNA
ttattttgagacagagtctc

SEQ ID NO: 138263 - DNA, 20 bp, synthetic construct
  source 1..20: mol_type = other DNA
tttattttgagacagagtct

SEQ ID NO: 138264 - DNA, 20 bp, synthetic construct
  source 1..20: mol_type = other DNA
ttttattttgagacagagtc

SEQ ID NO: 138265 - DNA, 20 bp, synthetic construct
  source 1..20: mol_type = other DNA
tttttattttgagacagagt

SEQ ID NO: 138266 - DNA, 20 bp, synthetic construct
  source 1..20: mol_type = other DNA
ttttttattttgagacagag

SEQ ID NO: 138267 - DNA, 20 bp, synthetic construct
  source 1..20: mol_type = other DNA
attttttattttgagacaga

SEQ ID NO: 138268 - DNA, 20 bp, synthetic construct
  source 1..20: mol_type = other DNA
tattttttattttgagacag

SEQ ID NO: 138269 - DNA, 20 bp, synthetic construct
  source 1..20: mol_type = other DNA
ttattttttattttgagaca

SEQ ID NO: 138270 - DNA, 20 bp, synthetic construct
  source 1..20: mol_type = other DNA
tttattttttattttgagac

SEQ ID NO: 138271 - DNA, 20 bp, synthetic construct
  source 1..20: mol_type = other DNA
ttttattttttattttgaga

SEQ ID NO: 138272 - DNA, 20 bp, synthetic construct
  source 1..20: mol_type = other DNA
tttttattttttattttgag

SEQ ID NO: 138273 - DNA, 20 bp, synthetic construct
  source 1..20: mol_type = other DNA
atttttattttttattttga

SEQ ID NO: 138274 - DNA, 20 bp, synthetic construct
  source 1..20: mol_type = other DNA
tatttttattttttattttg

SEQ ID NO: 138275 - DNA, 20 bp, synthetic construct
  source 1..20: mol_type = other DNA
ttatttttattttttatttt

SEQ ID NO: 138276 - DNA, 20 bp, synthetic construct
  source 1..20: mol_type = other DNA
cttatttttattttttattt

SEQ ID NO: 138277 - DNA, 20 bp, synthetic construct
  source 1..20: mol_type = other DNA
ccttatttttattttttatt

SEQ ID NO: 138278 - DNA, 20 bp, synthetic construct
  source 1..20: mol_type = other DNA
gccttatttttattttttat

SEQ ID NO: 138279 - DNA, 20 bp, synthetic construct
  source 1..20: mol_type = other DNA
agccttatttttatttttta

SEQ ID NO: 138280 - DNA, 20 bp, synthetic construct
  source 1..20: mol_type = other DNA
tagccttatttttatttttt

SEQ ID NO: 138281 - DNA, 20 bp, synthetic construct
  source 1..20: mol_type = other DNA
ctagccttatttttattttt

SEQ ID NO: 138282 - DNA, 20 bp, synthetic construct
  source 1..20: mol_type = other DNA
actagccttatttttatttt

SEQ ID NO: 138283 - DNA, 20 bp, synthetic construct
  source 1..20: mol_type = other DNA
gactagccttatttttattt

SEQ ID NO: 138284 - DNA, 20 bp, synthetic construct
  source 1..20: mol_type = other DNA
agactagccttatttttatt

SEQ ID NO: 138285 - DNA, 20 bp, synthetic construct
  source 1..20: mol_type = other DNA
aagactagccttatttttat

SEQ ID NO: 138286 - DNA, 20 bp, synthetic construct
  source 1..20: mol_type = other DNA
caagactagccttattttta

SEQ ID NO: 138287 - DNA, 20 bp, synthetic construct
  source 1..20: mol_type = other DNA
ccaagactagccttattttt

SEQ ID NO: 138288 - DNA, 20 bp, synthetic construct
  source 1..20: mol_type = other DNA
tccaagactagccttatttt

SEQ ID NO: 138289 - DNA, 20 bp, synthetic construct
  source 1..20: mol_type = other DNA
gtccaagactagccttattt

SEQ ID NO: 138290 - DNA, 20 bp, synthetic construct
  source 1..20: mol_type = other DNA
agtccaagactagccttatt

SEQ ID NO: 138291 - DNA, 20 bp, synthetic construct
  source 1..20: mol_type = other DNA
aagtccaagactagccttat

SEQ ID NO: 138292 - DNA, 20 bp, synthetic construct
  source 1..20: mol_type = other DNA
aaagtccaagactagcctta

SEQ ID NO: 138293 - DNA, 20 bp, synthetic construct
  source 1..20: mol_type = other DNA
caaagtccaagactagcctt

SEQ ID NO: 138294 - DNA, 20 bp, synthetic construct
  source 1..20: mol_type = other DNA
ccaaagtccaagactagcct

SEQ ID NO: 138295 - DNA, 20 bp, synthetic construct
  source 1..20: mol_type = other DNA
accaaagtccaagactagcc

SEQ ID NO: 138296 - DNA, 20 bp, synthetic construct
  source 1..20: mol_type = other DNA
taccaaagtccaagactagc

SEQ ID NO: 138297 - DNA, 20 bp, synthetic construct
  source 1..20: mol_type = other DNA
ataccaaagtccaagactag

SEQ ID NO: 138298 - DNA, 20 bp, synthetic construct
  source 1..20: mol_type = other DNA
aataccaaagtccaagacta

SEQ ID NO: 138299 - DNA, 20 bp, synthetic construct
  source 1..20: mol_type = other DNA
aaataccaaagtccaagact

SEQ ID NO: 138300 - DNA, 20 bp, synthetic construct
  source 1..20: mol_type = other DNA
taaataccaaagtccaagac

SEQ ID NO: 138301 - DNA, 20 bp, synthetic construct
  source 1..20: mol_type = other DNA
ttaaataccaaagtccaaga

SEQ ID NO: 138302 - DNA, 20 bp, synthetic construct
  source 1..20: mol_type = other DNA
tttaaataccaaagtccaag

SEQ ID NO: 138303 - DNA, 20 bp, synthetic construct
  source 1..20: mol_type = other DNA
atttaaataccaaagtccaa

SEQ ID NO: 138304 - DNA, 20 bp, synthetic construct
  source 1..20: mol_type = other DNA
tatttaaataccaaagtcca

SEQ ID NO: 138305 - DNA, 20 bp, synthetic construct
  source 1..20: mol_type = other DNA
ctatttaaataccaaagtcc

SEQ ID NO: 138306 - DNA, 20 bp, synthetic construct
  source 1..20: mol_type = other DNA
cctatttaaataccaaagtc

SEQ ID NO: 138307 - DNA, 20 bp, synthetic construct
  source 1..20: mol_type = other DNA
tcctatttaaataccaaagt

SEQ ID NO: 138308 - DNA, 20 bp, synthetic construct
  source 1..20: mol_type = other DNA
ttcctatttaaataccaaag

SEQ ID NO: 138309 - DNA, 20 bp, synthetic construct
  source 1..20: mol_type = other DNA
cttcctatttaaataccaaa

SEQ ID NO: 138310 - DNA, 20 bp, synthetic construct
  source 1..20: mol_type = other DNA
ccttcctatttaaataccaa

SEQ ID NO: 138311 - DNA, 20 bp, synthetic construct
  source 1..20: mol_type = other DNA
tccttcctatttaaatacca

SEQ ID NO: 138312 - DNA, 20 bp, synthetic construct
  source 1..20: mol_type = other DNA
ctccttcctatttaaatacc

SEQ ID NO: 138313 - DNA, 20 bp, synthetic construct
  source 1..20: mol_type = other DNA
actccttcctatttaaatac

SEQ ID NO: 138314 - DNA, 20 bp, synthetic construct
  source 1..20: mol_type = other DNA
tactccttcctatttaaata

SEQ ID NO: 138315 - DNA, 20 bp, synthetic construct
  source 1..20: mol_type = other DNA
gtactccttcctatttaaat

SEQ ID NO: 138316 - DNA, 20 bp, synthetic construct
  source 1..20: mol_type = other DNA
agtactccttcctatttaaa

SEQ ID NO: 138317 - DNA, 20 bp, synthetic construct
  source 1..20: mol_type = other DNA
tagtactccttcctatttaa

SEQ ID NO: 138318 - DNA, 20 bp, synthetic construct
  source 1..20: mol_type = other DNA
ttagtactccttcctattta

SEQ ID NO: 138319 - DNA, 20 bp, synthetic construct
  source 1..20: mol_type = other DNA
attagtactccttcctattt

SEQ ID NO: 138320 - DNA, 20 bp, synthetic construct
  source 1..20: mol_type = other DNA
tattagtactccttcctatt

SEQ ID NO: 138321 - DNA, 20 bp, synthetic construct
  source 1..20: mol_type = other DNA
atattagtactccttcctat

SEQ ID NO: 138322 - DNA, 20 bp, synthetic construct
  source 1..20: mol_type = other DNA
aatattagtactccttccta

SEQ ID NO: 138323 - DNA, 20 bp, synthetic construct
  source 1..20: mol_type = other DNA
aaatattagtactccttcct

SEQ ID NO: 138324 - DNA, 20 bp, synthetic construct
  source 1..20: mol_type = other DNA
caaatattagtactccttcc

SEQ ID NO: 138325 - DNA, 20 bp, synthetic construct
  source 1..20: mol_type = other DNA
acaaatattagtactccttc

SEQ ID NO: 138326 - DNA, 20 bp, synthetic construct
  source 1..20: mol_type = other DNA
tacaaatattagtactcctt

SEQ ID NO: 138327 - DNA, 20 bp, synthetic construct
  source 1..20: mol_type = other DNA
ctacaaatattagtactcct

SEQ ID NO: 138328 - DNA, 20 bp, synthetic construct
  source 1..20: mol_type = other DNA
tctacaaatattagtactcc

SEQ ID NO: 138329 - DNA, 20 bp, synthetic construct
  source 1..20: mol_type = other DNA
ttctacaaatattagtactc

SEQ ID NO: 138330 - DNA, 20 bp, synthetic construct
  source 1..20: mol_type = other DNA
tttctacaaatattagtact

SEQ ID NO: 138331 - DNA, 20 bp, synthetic construct
  source 1..20: mol_type = other DNA
atttctacaaatattagtac

SEQ ID NO: 138332 - DNA, 20 bp, synthetic construct
  source 1..20: mol_type = other DNA
gatttctacaaatattagta

SEQ ID NO: 138333 - DNA, 20 bp, synthetic construct
  source 1..20: mol_type = other DNA
ggatttctacaaatattagt

SEQ ID NO: 138334 - DNA, 20 bp, synthetic construct
  source 1..20: mol_type = other DNA
aggatttctacaaatattag

SEQ ID NO: 138335 - DNA, 20 bp, synthetic construct
  source 1..20: mol_type = other DNA
aaggatttctacaaatatta

SEQ ID NO: 138336 - DNA, 20 bp, synthetic construct
  source 1..20: mol_type = other DNA
aaaggatttctacaaatatt

SEQ ID NO: 138337 - DNA, 20 bp, synthetic construct
  source 1..20: mol_type = other DNA
taaaggatttctacaaatat

SEQ ID NO: 138338 - DNA, 20 bp, synthetic construct
  source 1..20: mol_type = other DNA
ctaaaggatttctacaaata

SEQ ID NO: 138339 - DNA, 20 bp, synthetic construct
  source 1..20: mol_type = other DNA
tctaaaggatttctacaaat

SEQ ID NO: 138340 - DNA, 20 bp, synthetic construct
  source 1..20: mol_type = other DNA
ttctaaaggatttctacaaa

SEQ ID NO: 138341 - DNA, 20 bp, synthetic construct
  source 1..20: mol_type = other DNA
tttctaaaggatttctacaa

SEQ ID NO: 138342 - DNA, 20 bp, synthetic construct
  source 1..20: mol_type = other DNA
atttctaaaggatttctaca

SEQ ID NO: 138343 - DNA, 20 bp, synthetic construct
  source 1..20: mol_type = other DNA
aatttctaaaggatttctac

SEQ ID NO: 138344 - DNA, 20 bp, synthetic construct
  source 1..20: mol_type = other DNA
aaatttctaaaggatttcta

SEQ ID NO: 138345 - DNA, 20 bp, synthetic construct
  source 1..20: mol_type = other DNA
caaatttctaaaggatttct

SEQ ID NO: 138346 - DNA, 20 bp, synthetic construct
  source 1..20: mol_type = other DNA
acaaatttctaaaggatttc

SEQ ID NO: 138347 - DNA, 20 bp, synthetic construct
  source 1..20: mol_type = other DNA
cacaaatttctaaaggattt

SEQ ID NO: 138348 - DNA, 20 bp, synthetic construct
  source 1..20: mol_type = other DNA
gcacaaatttctaaaggatt

SEQ ID NO: 138349 - DNA, 20 bp, synthetic construct
  source 1..20: mol_type = other DNA
ggcacaaatttctaaaggat

SEQ ID NO: 138350 - DNA, 20 bp, synthetic construct
  source 1..20: mol_type = other DNA
tggcacaaatttctaaagga

SEQ ID NO: 138351 - DNA, 20 bp, synthetic construct
  source 1..20: mol_type = other DNA
atggcacaaatttctaaagg

SEQ ID NO: 138352 - DNA, 20 bp, synthetic construct
  source 1..20: mol_type = other DNA
aatggcacaaatttctaaag

SEQ ID NO: 138353 - DNA, 20 bp, synthetic construct
  source 1..20: mol_type = other DNA
taatggcacaaatttctaaa

SEQ ID NO: 138354 - DNA, 20 bp, synthetic construct
  source 1..20: mol_type = other DNA
ttaatggcacaaatttctaa

SEQ ID NO: 138355 - DNA, 20 bp, synthetic construct
  source 1..20: mol_type = other DNA
attaatggcacaaatttcta

SEQ ID NO: 138356 - DNA, 20 bp, synthetic construct
  source 1..20: mol_type = other DNA
tattaatggcacaaatttct

SEQ ID NO: 138357 - DNA, 20 bp, synthetic construct
  source 1..20: mol_type = other DNA
atattaatggcacaaatttc

SEQ ID NO: 138358 - DNA, 20 bp, synthetic construct
  source 1..20: mol_type = other DNA
aatattaatggcacaaattt

SEQ ID NO: 138359 - DNA, 20 bp, synthetic construct
  source 1..20: mol_type = other DNA
caatattaatggcacaaatt

SEQ ID NO: 138360 - DNA, 20 bp, synthetic construct
  source 1..20: mol_type = other DNA
acaatattaatggcacaaat

SEQ ID NO: 138361 - DNA, 20 bp, synthetic construct
  source 1..20: mol_type = other DNA
gacaatattaatggcacaaa

SEQ ID NO: 138362 - DNA, 20 bp, synthetic construct
  source 1..20: mol_type = other DNA
tgacaatattaatggcacaa

SEQ ID NO: 138363 - DNA, 20 bp, synthetic construct
  source 1..20: mol_type = other DNA
gtgacaatattaatggcaca

SEQ ID NO: 138364 - DNA, 20 bp, synthetic construct
  source 1..20: mol_type = other DNA
ggtgacaatattaatggcac

SEQ ID NO: 138365 - DNA, 20 bp, synthetic construct
  source 1..20: mol_type = other DNA
aggtgacaatattaatggca

SEQ ID NO: 138366 - DNA, 20 bp, synthetic construct
  source 1..20: mol_type = other DNA
aaggtgacaatattaatggc

SEQ ID NO: 138367 - DNA, 20 bp, synthetic construct
  source 1..20: mol_type = other DNA
caaggtgacaatattaatgg

SEQ ID NO: 138368 - DNA, 20 bp, synthetic construct
  source 1..20: mol_type = other DNA
acaaggtgacaatattaatg

SEQ ID NO: 138369 - DNA, 20 bp, synthetic construct
  source 1..20: mol_type = other DNA
tacaaggtgacaatattaat

SEQ ID NO: 138370 - DNA, 20 bp, synthetic construct
  source 1..20: mol_type = other DNA
atacaaggtgacaatattaa

SEQ ID NO: 138371 - DNA, 20 bp, synthetic construct
  source 1..20: mol_type = other DNA
catacaaggtgacaatatta

SEQ ID NO: 138372 - DNA, 20 bp, synthetic construct
  source 1..20: mol_type = other DNA
tcatacaaggtgacaatatt

SEQ ID NO: 138373 - DNA, 20 bp, synthetic construct
  source 1..20: mol_type = other DNA
ttcatacaaggtgacaatat

SEQ ID NO: 138374 - DNA, 20 bp, synthetic construct
  source 1..20: mol_type = other DNA
tttcatacaaggtgacaata

SEQ ID NO: 138375 - DNA, 20 bp, synthetic construct
  source 1..20: mol_type = other DNA
atttcatacaaggtgacaat

SEQ ID NO: 138376 - DNA, 20 bp, synthetic construct
  source 1..20: mol_type = other DNA
catttcatacaaggtgacaa

SEQ ID NO: 138377 - DNA, 20 bp, synthetic construct
  source 1..20: mol_type = other DNA
acatttcatacaaggtgaca

SEQ ID NO: 138378 - DNA, 20 bp, synthetic construct
  source 1..20: mol_type = other DNA
aacatttcatacaaggtgac

SEQ ID NO: 138379 - DNA, 20 bp, synthetic construct
  source 1..20: mol_type = other DNA
caacatttcatacaaggtga

SEQ ID NO: 138380 - DNA, 20 bp, synthetic construct
  source 1..20: mol_type = other DNA
acaacatttcatacaaggtg

SEQ ID NO: 138381 - DNA, 20 bp, synthetic construct
  source 1..20: mol_type = other DNA
cacaacatttcatacaaggt

SEQ ID NO: 138382 - DNA, 20 bp, synthetic construct
  source 1..20: mol_type = other DNA
acacaacatttcatacaagg

SEQ ID NO: 138383 - DNA, 20 bp, synthetic construct
  source 1..20: mol_type = other DNA
aacacaacatttcatacaag

SEQ ID NO: 138384 - DNA, 20 bp, synthetic construct
  source 1..20: mol_type = other DNA
gaacacaacatttcatacaa

SEQ ID NO: 138385 - DNA, 20 bp, synthetic construct
  source 1..20: mol_type = other DNA
agaacacaacatttcataca

SEQ ID NO: 138386 - DNA, 20 bp, synthetic construct
  source 1..20: mol_type = other DNA
tagaacacaacatttcatac

SEQ ID NO: 138387 - DNA, 20 bp, synthetic construct
  source 1..20: mol_type = other DNA
ctagaacacaacatttcata

SEQ ID NO: 138388 - DNA, 20 bp, synthetic construct
  source 1..20: mol_type = other DNA
tctagaacacaacatttcat

SEQ ID NO: 138389 - DNA, 20 bp, synthetic construct
  source 1..20: mol_type = other DNA
ctctagaacacaacatttca

SEQ ID NO: 138390 - DNA, 20 bp, synthetic construct
  source 1..20: mol_type = other DNA
cctctagaacacaacatttc

SEQ ID NO: 138391 - DNA, 20 bp, synthetic construct
  source 1..20: mol_type = other DNA
tcctctagaacacaacattt

SEQ ID NO: 138392 - DNA, 20 bp, synthetic construct
  source 1..20: mol_type = other DNA
atcctctagaacacaacatt

SEQ ID NO: 138393 - DNA, 20 bp, synthetic construct
  source 1..20: mol_type = other DNA
tatcctctagaacacaacat

SEQ ID NO: 138394 - DNA, 20 bp, synthetic construct
  source 1..20: mol_type = other DNA
atatcctctagaacacaaca

SEQ ID NO: 138395 - DNA, 20 bp, synthetic construct
  source 1..20: mol_type = other DNA
aatatcctctagaacacaac

SEQ ID NO: 138396 - DNA, 20 bp, synthetic construct
  source 1..20: mol_type = other DNA
taatatcctctagaacacaa

SEQ ID NO: 138397 - DNA, 20 bp, synthetic construct
  source 1..20: mol_type = other DNA
ttaatatcctctagaacaca

SEQ ID NO: 138398 - DNA, 20 bp, synthetic construct
  source 1..20: mol_type = other DNA
cttaatatcctctagaacac

SEQ ID NO: 138399 - DNA, 20 bp, synthetic construct
  source 1..20: mol_type = other DNA
ccttaatatcctctagaaca

SEQ ID NO: 138400 - DNA, 20 bp, synthetic construct
  source 1..20: mol_type = other DNA
tccttaatatcctctagaac

SEQ ID NO: 138401 - DNA, 20 bp, synthetic construct
  source 1..20: mol_type = other DNA
atccttaatatcctctagaa

SEQ ID NO: 138402 - DNA, 20 bp, synthetic construct
  source 1..20: mol_type = other DNA
aatccttaatatcctctaga

SEQ ID NO: 138403 - DNA, 20 bp, synthetic construct
  source 1..20: mol_type = other DNA
gaatccttaatatcctctag

SEQ ID NO: 138404 - DNA, 20 bp, synthetic construct
  source 1..20: mol_type = other DNA
tgaatccttaatatcctcta

SEQ ID NO: 138405 - DNA, 20 bp, synthetic construct
  source 1..20: mol_type = other DNA
ttgaatccttaatatcctct

SEQ ID NO: 138406 - DNA, 20 bp, synthetic construct
  source 1..20: mol_type = other DNA
tttgaatccttaatatcctc

SEQ ID NO: 138407 - DNA, 20 bp, synthetic construct
  source 1..20: mol_type = other DNA
atttgaatccttaatatcct

SEQ ID NO: 138408 - DNA, 20 bp, synthetic construct
  source 1..20: mol_type = other DNA
aatttgaatccttaatatcc

SEQ ID NO: 138409 - DNA, 20 bp, synthetic construct
  source 1..20: mol_type = other DNA
aaatttgaatccttaatatc

SEQ ID NO: 138410 - DNA, 20 bp, synthetic construct
  source 1..20: mol_type = other DNA
aaaatttgaatccttaatat

SEQ ID NO: 138411 - DNA, 20 bp, synthetic construct
  source 1..20: mol_type = other DNA
taaaatttgaatccttaata

SEQ ID NO: 138412 - DNA, 20 bp, synthetic construct
  source 1..20: mol_type = other DNA
ataaaatttgaatccttaat

SEQ ID NO: 138413 - DNA, 20 bp, synthetic construct
  source 1..20: mol_type = other DNA
cataaaatttgaatccttaa

SEQ ID NO: 138414 - DNA, 20 bp, synthetic construct
  source 1..20: mol_type = other DNA
acataaaatttgaatcctta

SEQ ID NO: 138415 - DNA, 20 bp, synthetic construct
  source 1..20: mol_type = other DNA
aacataaaatttgaatcctt

SEQ ID NO: 138416 - DNA, 20 bp, synthetic construct
  source 1..20: mol_type = other DNA
taacataaaatttgaatcct

SEQ ID NO: 138417 - DNA, 20 bp, synthetic construct
  source 1..20: mol_type = other DNA
ctaacataaaatttgaatcc

SEQ ID NO: 138418 - DNA, 20 bp, synthetic construct
  source 1..20: mol_type = other DNA
cctaacataaaatttgaatc

SEQ ID NO: 138419 - DNA, 20 bp, synthetic construct
  source 1..20: mol_type = other DNA
gcctaacataaaatttgaat

SEQ ID NO: 138420 - DNA, 20 bp, synthetic construct
  source 1..20: mol_type = other DNA
tgcctaacataaaatttgaa

SEQ ID NO: 138421 - DNA, 20 bp, synthetic construct
  source 1..20: mol_type = other DNA
gtgcctaacataaaatttga

SEQ ID NO: 138422 - DNA, 20 bp, synthetic construct
  source 1..20: mol_type = other DNA
tgtgcctaacataaaatttg

SEQ ID NO: 138423 - DNA, 20 bp, synthetic construct
  source 1..20: mol_type = other DNA
atgtgcctaacataaaattt

SEQ ID NO: 138424 - DNA, 20 bp, synthetic construct
  source 1..20: mol_type = other DNA
aatgtgcctaacataaaatt

SEQ ID NO: 138425 - DNA, 20 bp, synthetic construct
  source 1..20: mol_type = other DNA
aaatgtgcctaacataaaat

SEQ ID NO: 138426 - DNA, 20 bp, synthetic construct
  source 1..20: mol_type = other DNA
aaaatgtgcctaacataaaa

SEQ ID NO: 138427 - DNA, 20 bp, synthetic construct
  source 1..20: mol_type = other DNA
caaaatgtgcctaacataaa

SEQ ID NO: 138428 - DNA, 20 bp, synthetic construct
  source 1..20: mol_type = other DNA
tcaaaatgtgcctaacataa

SEQ ID NO: 138429 - DNA, 20 bp, synthetic construct
  source 1..20: mol_type = other DNA
ctcaaaatgtgcctaacata

SEQ ID NO: 138430 - DNA, 20 bp, synthetic construct
  source 1..20: mol_type = other DNA
actcaaaatgtgcctaacat

SEQ ID NO: 138431 - DNA, 20 bp, synthetic construct
  source 1..20: mol_type = other DNA
aactcaaaatgtgcctaaca

SEQ ID NO: 138432 - DNA, 20 bp, synthetic construct
  source 1..20: mol_type = other DNA
taactcaaaatgtgcctaac

SEQ ID NO: 138433 - DNA, 20 bp, synthetic construct
  source 1..20: mol_type = other DNA
ataactcaaaatgtgcctaa

SEQ ID NO: 138434 - DNA, 20 bp, synthetic construct
  source 1..20: mol_type = other DNA
aataactcaaaatgtgccta

SEQ ID NO: 138435 - DNA, 20 bp, synthetic construct
  source 1..20: mol_type = other DNA
aaataactcaaaatgtgcct

SEQ ID NO: 138436 - DNA, 20 bp, synthetic construct
  source 1..20: mol_type = other DNA
aaaataactcaaaatgtgcc

SEQ ID NO: 138437 - DNA, 20 bp, synthetic construct
  source 1..20: mol_type = other DNA
caaaataactcaaaatgtgc

SEQ ID NO: 138438 - DNA, 20 bp, synthetic construct
  source 1..20: mol_type = other DNA
ccaaaataactcaaaatgtg

SEQ ID NO: 138439 - DNA, 20 bp, synthetic construct
  source 1..20: mol_type = other DNA
cccaaaataactcaaaatgt

SEQ ID NO: 138440 - DNA, 20 bp, synthetic construct
  source 1..20: mol_type = other DNA
ccccaaaataactcaaaatg

SEQ ID NO: 138441 - DNA, 20 bp, synthetic construct
  source 1..20: mol_type = other DNA
accccaaaataactcaaaat

SEQ ID NO: 138442 - DNA, 20 bp, synthetic construct
  source 1..20: mol_type = other DNA
caccccaaaataactcaaaa

SEQ ID NO: 138443 - DNA, 20 bp, synthetic construct
  source 1..20: mol_type = other DNA
tcaccccaaaataactcaaa

SEQ ID NO: 138444 - DNA, 20 bp, synthetic construct
  source 1..20: mol_type = other DNA
gtcaccccaaaataactcaa

SEQ ID NO: 138445 - DNA, 20 bp, synthetic construct
  source 1..20: mol_type = other DNA
agtcaccccaaaataactca

SEQ ID NO: 138446 - DNA, 20 bp, synthetic construct
  source 1..20: mol_type = other DNA
gagtcaccccaaaataactc

SEQ ID NO: 138447 - DNA, 20 bp, synthetic construct
  source 1..20: mol_type = other DNA
tgagtcaccccaaaataact

SEQ ID NO: 138448 - DNA, 20 bp, synthetic construct
  source 1..20: mol_type = other DNA
ttgagtcaccccaaaataac

SEQ ID NO: 138449 - DNA, 20 bp, synthetic construct
  source 1..20: mol_type = other DNA
attgagtcaccccaaaataa

SEQ ID NO: 138450 - DNA, 20 bp, synthetic construct
  source 1..20: mol_type = other DNA
cattgagtcaccccaaaata

SEQ ID NO: 138451 - DNA, 20 bp, synthetic construct
  source 1..20: mol_type = other DNA
acattgagtcaccccaaaat

SEQ ID NO: 138452 - DNA, 20 bp, synthetic construct
  source 1..20: mol_type = other DNA
gacattgagtcaccccaaaa

SEQ ID NO: 138453 - DNA, 20 bp, synthetic construct
  source 1..20: mol_type = other DNA
agacattgagtcaccccaaa

SEQ ID NO: 138454 - DNA, 20 bp, synthetic construct
  source 1..20: mol_type = other DNA
cagacattgagtcaccccaa

SEQ ID NO: 138455 - DNA, 20 bp, synthetic construct
  source 1..20: mol_type = other DNA
tcagacattgagtcacccca

SEQ ID NO: 138456 - DNA, 20 bp, synthetic construct
  source 1..20: mol_type = other DNA
gtcagacattgagtcacccc

SEQ ID NO: 138457 - DNA, 20 bp, synthetic construct
  source 1..20: mol_type = other DNA
agtcagacattgagtcaccc

SEQ ID NO: 138458 - DNA, 20 bp, synthetic construct
  source 1..20: mol_type = other DNA
gagtcagacattgagtcacc

SEQ ID NO: 138459 - DNA, 20 bp, synthetic construct
  source 1..20: mol_type = other DNA
agagtcagacattgagtcac

SEQ ID NO: 138460 - DNA, 20 bp, synthetic construct
  source 1..20: mol_type = other DNA
tagagtcagacattgagtca

SEQ ID NO: 138461 - DNA, 20 bp, synthetic construct
  source 1..20: mol_type = other DNA
gtagagtcagacattgagtc

SEQ ID NO: 138462 - DNA, 20 bp, synthetic construct
  source 1..20: mol_type = other DNA
agtagagtcagacattgagt

SEQ ID NO: 138463 - DNA, 20 bp, synthetic construct
  source 1..20: mol_type = other DNA
tagtagagtcagacattgag

SEQ ID NO: 138464 - DNA, 20 bp, synthetic construct
  source 1..20: mol_type = other DNA
ttagtagagtcagacattga

SEQ ID NO: 138465 - DNA, 20 bp, synthetic construct
  source 1..20: mol_type = other DNA
tttagtagagtcagacattg

SEQ ID NO: 138466 - DNA, 20 bp, synthetic construct
  source 1..20: mol_type = other DNA
atttagtagagtcagacatt

SEQ ID NO: 138467 - DNA, 20 bp, synthetic construct
  source 1..20: mol_type = other DNA
catttagtagagtcagacat

SEQ ID NO: 138468 - DNA, 20 bp, synthetic construct
  source 1..20: mol_type = other DNA
gcatttagtagagtcagaca

SEQ ID NO: 138469 - DNA, 20 bp, synthetic construct
  source 1..20: mol_type = other DNA
ggcatttagtagagtcagac

SEQ ID NO: 138470 - DNA, 20 bp, synthetic construct
  source 1..20: mol_type = other DNA
tggcatttagtagagtcaga

SEQ ID NO: 138471 - DNA, 20 bp, synthetic construct
  source 1..20: mol_type = other DNA
atggcatttagtagagtcag

SEQ ID NO: 138472 - DNA, 20 bp, synthetic construct
  source 1..20: mol_type = other DNA
tatggcatttagtagagtca

SEQ ID NO: 138473 - DNA, 20 bp, synthetic construct
  source 1..20: mol_type = other DNA
atatggcatttagtagagtc

SEQ ID NO: 138474 - DNA, 20 bp, synthetic construct
  source 1..20: mol_type = other DNA
aatatggcatttagtagagt

SEQ ID NO: 138475 - DNA, 20 bp, synthetic construct
  source 1..20: mol_type = other DNA
taatatggcatttagtagag

SEQ ID NO: 138476 - DNA, 20 bp, synthetic construct
  source 1..20: mol_type = other DNA
ctaatatggcatttagtaga

SEQ ID NO: 138477 - DNA, 20 bp, synthetic construct
  source 1..20: mol_type = other DNA
gctaatatggcatttagtag

SEQ ID NO: 138478 - DNA, 20 bp, synthetic construct
  source 1..20: mol_type = other DNA
tgctaatatggcatttagta

SEQ ID NO: 138479 - DNA, 20 bp, synthetic construct
  source 1..20: mol_type = other DNA
atgctaatatggcatttagt

SEQ ID NO: 138480 - DNA, 20 bp, synthetic construct
  source 1..20: mol_type = other DNA
aatgctaatatggcatttag

SEQ ID NO: 138481 - DNA, 20 bp, synthetic construct
  source 1..20: mol_type = other DNA
aaatgctaatatggcattta

SEQ ID NO: 138482 - DNA, 20 bp, synthetic construct
  source 1..20: mol_type = other DNA
taaatgctaatatggcattt

SEQ ID NO: 138483 - DNA, 20 bp, synthetic construct
  source 1..20: mol_type = other DNA
ttaaatgctaatatggcatt

SEQ ID NO: 138484 - DNA, 20 bp, synthetic construct
  source 1..20: mol_type = other DNA
tttaaatgctaatatggcat

SEQ ID NO: 138485 - DNA, 20 bp, synthetic construct
  source 1..20: mol_type = other DNA
ttttaaatgctaatatggca

SEQ ID NO: 138486 - DNA, 20 bp, synthetic construct
  source 1..20: mol_type = other DNA
attttaaatgctaatatggc

SEQ ID NO: 138487 - DNA, 20 bp, synthetic construct
  source 1..20: mol_type = other DNA
cattttaaatgctaatatgg

SEQ ID NO: 138488 - DNA, 20 bp, synthetic construct
  source 1..20: mol_type = other DNA
gcattttaaatgctaatatg

SEQ ID NO: 138489 - DNA, 20 bp, synthetic construct
  source 1..20: mol_type = other DNA
tgcattttaaatgctaatat

SEQ ID NO: 138490 - DNA, 20 bp, synthetic construct
  source 1..20: mol_type = other DNA
atgcattttaaatgctaata

SEQ ID NO: 138491 - DNA, 20 bp, synthetic construct
  source 1..20: mol_type = other DNA
aatgcattttaaatgctaat

SEQ ID NO: 138492 - DNA, 20 bp, synthetic construct
  source 1..20: mol_type = other DNA
aaatgcattttaaatgctaa

SEQ ID NO: 138493 - DNA, 20 bp, synthetic construct
  source 1..20: mol_type = other DNA
caaatgcattttaaatgcta

SEQ ID NO: 138494 - DNA, 20 bp, synthetic construct
  source 1..20: mol_type = other DNA
tcaaatgcattttaaatgct

SEQ ID NO: 138495 - DNA, 20 bp, synthetic construct
  source 1..20: mol_type = other DNA
gtcaaatgcattttaaatgc

SEQ ID NO: 138496 - DNA, 20 bp, synthetic construct
  source 1..20: mol_type = other DNA
ggtcaaatgcattttaaatg

SEQ ID NO: 138497 - DNA, 20 bp, synthetic construct
  source 1..20: mol_type = other DNA
aggtcaaatgcattttaaat

SEQ ID NO: 138498 - DNA, 20 bp, synthetic construct
  source 1..20: mol_type = other DNA
aaggtcaaatgcattttaaa

SEQ ID NO: 138499 - DNA, 20 bp, synthetic construct
  source 1..20: mol_type = other DNA
taaggtcaaatgcattttaa

SEQ ID NO: 138500 - DNA, 20 bp, synthetic construct
  source 1..20: mol_type = other DNA
ttaaggtcaaatgcatttta

SEQ ID NO: 138501 - DNA, 20 bp, synthetic construct
  source 1..20: mol_type = other DNA
tttaaggtcaaatgcatttt

SEQ ID NO: 138502 - DNA, 20 bp, synthetic construct
  source 1..20: mol_type = other DNA
atttaaggtcaaatgcattt

SEQ ID NO: 138503 - DNA, 20 bp, synthetic construct
  source 1..20: mol_type = other DNA
gatttaaggtcaaatgcatt

SEQ ID NO: 138504 - DNA, 20 bp, synthetic construct
  source 1..20: mol_type = other DNA
agatttaaggtcaaatgcat

SEQ ID NO: 138505 - DNA, 20 bp, synthetic construct
  source 1..20: mol_type = other DNA
aagatttaaggtcaaatgca

SEQ ID NO: 138506 - DNA, 20 bp, synthetic construct
  source 1..20: mol_type = other DNA
aaagatttaaggtcaaatgc

SEQ ID NO: 138507 - DNA, 20 bp, synthetic construct
  source 1..20: mol_type = other DNA
caaagatttaaggtcaaatg

SEQ ID NO: 138508 - DNA, 20 bp, synthetic construct
  source 1..20: mol_type = other DNA
acaaagatttaaggtcaaat

SEQ ID NO: 138509 - DNA, 20 bp, synthetic construct
  source 1..20: mol_type = other DNA
aacaaagatttaaggtcaaa

SEQ ID NO: 138510 - DNA, 20 bp, synthetic construct
  source 1..20: mol_type = other DNA
taacaaagatttaaggtcaa

SEQ ID NO: 138511 - DNA, 20 bp, synthetic construct
  source 1..20: mol_type = other DNA
ttaacaaagatttaaggtca

SEQ ID NO: 138512 - DNA, 20 bp, synthetic construct
  source 1..20: mol_type = other DNA
attaacaaagatttaaggtc

SEQ ID NO: 138513 - DNA, 20 bp, synthetic construct
  source 1..20: mol_type = other DNA
aattaacaaagatttaaggt

SEQ ID NO: 138514 - DNA, 20 bp, synthetic construct
  source 1..20: mol_type = other DNA
taattaacaaagatttaagg

SEQ ID NO: 138515 - DNA, 20 bp, synthetic construct
  source 1..20: mol_type = other DNA
ataattaacaaagatttaag

SEQ ID NO: 138516 - DNA, 20 bp, synthetic construct
  source 1..20: mol_type = other DNA
cataattaacaaagatttaa

SEQ ID NO: 138517 - DNA, 20 bp, synthetic construct
  source 1..20: mol_type = other DNA
gcataattaacaaagattta

SEQ ID NO: 138518 - DNA, 20 bp, synthetic construct
  source 1..20: mol_type = other DNA
ggcataattaacaaagattt

SEQ ID NO: 138519 - DNA, 20 bp, synthetic construct
  source 1..20: mol_type = other DNA
tggcataattaacaaagatt

SEQ ID NO: 138520 - DNA, 20 bp, synthetic construct
  source 1..20: mol_type = other DNA
atggcataattaacaaagat

SEQ ID NO: 138521 - DNA, 20 bp, synthetic construct
  source 1..20: mol_type = other DNA
catggcataattaacaaaga

SEQ ID NO: 138522 - DNA, 20 bp, synthetic construct
  source 1..20: mol_type = other DNA
tcatggcataattaacaaag

SEQ ID NO: 138523 - DNA, 20 bp, synthetic construct
  source 1..20: mol_type = other DNA
gtcatggcataattaacaaa

SEQ ID NO: 138524 - DNA, 20 bp, synthetic construct
  source 1..20: mol_type = other DNA
agtcatggcataattaacaa

SEQ ID NO: 138525 - DNA, 20 bp, synthetic construct
  source 1..20: mol_type = other DNA
aagtcatggcataattaaca

SEQ ID NO: 138526 - DNA, 20 bp, synthetic construct
  source 1..20: mol_type = other DNA
caagtcatggcataattaac

SEQ ID NO: 138527 - DNA, 20 bp, synthetic construct
  source 1..20: mol_type = other DNA
ccaagtcatggcataattaa

SEQ ID NO: 138528 - DNA, 20 bp, synthetic construct
  source 1..20: mol_type = other DNA
accaagtcatggcataatta

SEQ ID NO: 138529 - DNA, 20 bp, synthetic construct
  source 1..20: mol_type = other DNA
taccaagtcatggcataatt

SEQ ID NO: 138530 - DNA, 20 bp, synthetic construct
  source 1..20: mol_type = other DNA
ataccaagtcatggcataat

SEQ ID NO: 138531 - DNA, 20 bp, synthetic construct
  source 1..20: mol_type = other DNA
gataccaagtcatggcataa

SEQ ID NO: 138532 - DNA, 20 bp, synthetic construct
  source 1..20: mol_type = other DNA
ggataccaagtcatggcata

SEQ ID NO: 138533 - DNA, 20 bp, synthetic construct
  source 1..20: mol_type = other DNA
tggataccaagtcatggcat

SEQ ID NO: 138534 - DNA, 20 bp, synthetic construct
  source 1..20: mol_type = other DNA
ttggataccaagtcatggca

SEQ ID NO: 138535 - DNA, 20 bp, synthetic construct
  source 1..20: mol_type = other DNA
tttggataccaagtcatggc

SEQ ID NO: 138536 - DNA, 20 bp, synthetic construct
  source 1..20: mol_type = other DNA
ttttggataccaagtcatgg

SEQ ID NO: 138537 - DNA, 20 bp, synthetic construct
  source 1..20: mol_type = other DNA
tttttggataccaagtcatg

SEQ ID NO: 138538 - DNA, 20 bp, synthetic construct
  source 1..20: mol_type = other DNA
atttttggataccaagtcat

SEQ ID NO: 138539 - DNA, 20 bp, synthetic construct
  source 1..20: mol_type = other DNA
tatttttggataccaagtca

SEQ ID NO: 138540 - DNA, 20 bp, synthetic construct
  source 1..20: mol_type = other DNA
ttatttttggataccaagtc

SEQ ID NO: 138541 - DNA, 20 bp, synthetic construct
  source 1..20: mol_type = other DNA
cttatttttggataccaagt

SEQ ID NO: 138542 - DNA, 20 bp, synthetic construct
  source 1..20: mol_type = other DNA
gcttatttttggataccaag

SEQ ID NO: 138543 - DNA, 20 bp, synthetic construct
  source 1..20: mol_type = other DNA
agcttatttttggataccaa

SEQ ID NO: 138544 - DNA, 20 bp, synthetic construct
  source 1..20: mol_type = other DNA
cagcttatttttggatacca

SEQ ID NO: 138545 - DNA, 20 bp, synthetic construct
  source 1..20: mol_type = other DNA
tcagcttatttttggatacc

SEQ ID NO: 138546 - DNA, 20 bp, synthetic construct
  source 1..20: mol_type = other DNA
atcagcttatttttggatac

SEQ ID NO: 138547 - DNA, 20 bp, synthetic construct
  source 1..20: mol_type = other DNA
tatcagcttatttttggata

SEQ ID NO: 138548 - DNA, 20 bp, synthetic construct
  source 1..20: mol_type = other DNA
gtatcagcttatttttggat

SEQ ID NO: 138549 - DNA, 20 bp, synthetic construct
  source 1..20: mol_type = other DNA
tgtatcagcttatttttgga

SEQ ID NO: 138550 - DNA, 20 bp, synthetic construct
  source 1..20: mol_type = other DNA
atgtatcagcttatttttgg

SEQ ID NO: 138551 - DNA, 20 bp, synthetic construct
  source 1..20: mol_type = other DNA
tatgtatcagcttatttttg

SEQ ID NO: 138552 - DNA, 20 bp, synthetic construct
  source 1..20: mol_type = other DNA
gtatgtatcagcttattttt

SEQ ID NO: 138553 - DNA, 20 bp, synthetic construct
  source 1..20: mol_type = other DNA
tgtatgtatcagcttatttt

SEQ ID NO: 138554 - DNA, 20 bp, synthetic construct
  source 1..20: mol_type = other DNA
atgtatgtatcagcttattt

SEQ ID NO: 138555 - DNA, 20 bp, synthetic construct
  source 1..20: mol_type = other DNA
tatgtatgtatcagcttatt

SEQ ID NO: 138556 - DNA, 20 bp, synthetic construct
  source 1..20: mol_type = other DNA
gtatgtatgtatcagcttat

SEQ ID NO: 138557 - DNA, 20 bp, synthetic construct
  source 1..20: mol_type = other DNA
tgtatgtatgtatcagctta

SEQ ID NO: 138558 - DNA, 20 bp, synthetic construct
  source 1..20: mol_type = other DNA
atgtatgtatgtatcagctt

SEQ ID NO: 138559 - DNA, 20 bp, synthetic construct
  source 1..20: mol_type = other DNA
tatgtatgtatgtatcagct

SEQ ID NO: 138560 - DNA, 20 bp, synthetic construct
  source 1..20: mol_type = other DNA
gtatgtatgtatgtatcagc

SEQ ID NO: 138561 - DNA, 20 bp, synthetic construct
  source 1..20: mol_type = other DNA
tgtatgtatgtatgtatcag

SEQ ID NO: 138562 - DNA, 20 bp, synthetic construct
  source 1..20: mol_type = other DNA
atgtatgtatgtatgtatca

SEQ ID NO: 138563 - DNA, 20 bp, synthetic construct
  source 1..20: mol_type = other DNA
tatgtatgtatgtatgtatc

SEQ ID NO: 138564 - DNA, 20 bp, synthetic construct
  source 1..20: mol_type = other DNA
atatgtatgtatgtatgtat

SEQ ID NO: 138565 - DNA, 20 bp, synthetic construct
  source 1..20: mol_type = other DNA
tatatgtatgtatgtatgta

SEQ ID NO: 138566 - DNA, 20 bp, synthetic construct
  source 1..20: mol_type = other DNA
atatatgtatgtatgtatgt

SEQ ID NO: 138567 - DNA, 20 bp, synthetic construct
  source 1..20: mol_type = other DNA
catatatgtatgtatgtatg

SEQ ID NO: 138568 - DNA, 20 bp, synthetic construct
  source 1..20: mol_type = other DNA
acatatatgtatgtatgtat

SEQ ID NO: 138569 - DNA, 20 bp, synthetic construct
  source 1..20: mol_type = other DNA
cacatatatgtatgtatgta

SEQ ID NO: 138570 - DNA, 20 bp, synthetic construct
  source 1..20: mol_type = other DNA
acacatatatgtatgtatgt

SEQ ID NO: 138571 - DNA, 20 bp, synthetic construct
  source 1..20: mol_type = other DNA
cacacatatatgtatgtatg

SEQ ID NO: 138572 - DNA, 20 bp, synthetic construct
  source 1..20: mol_type = other DNA
acacacatatatgtatgtat

SEQ ID NO: 138573 - DNA, 20 bp, synthetic construct
  source 1..20: mol_type = other DNA
cacacacatatatgtatgta

SEQ ID NO: 138574 - DNA, 20 bp, synthetic construct
  source 1..20: mol_type = other DNA
acacacacatatatgtatgt

SEQ ID NO: 138575 - DNA, 20 bp, synthetic construct
  source 1..20: mol_type = other DNA
cacacacacatatatgtatg

SEQ ID NO: 138576 - DNA, 20 bp, synthetic construct
  source 1..20: mol_type = other DNA
acacacacacatatatgtat

SEQ ID NO: 138577 - DNA, 20 bp, synthetic construct
  source 1..20: mol_type = other DNA
cacacacacacatatatgta

SEQ ID NO: 138578 - DNA, 20 bp, synthetic construct
  source 1..20: mol_type = other DNA
acacacacacacatatatgt

SEQ ID NO: 138579 - DNA, 20 bp, synthetic construct
  source 1..20: mol_type = other DNA
cacacacacacacatatatg

SEQ ID NO: 138580 - DNA, 20 bp, synthetic construct
  source 1..20: mol_type = other DNA
acacacacacacacatatat

SEQ ID NO: 138581 - DNA, 20 bp, synthetic construct
  source 1..20: mol_type = other DNA
cacacacacacacacatata

SEQ ID NO: 138582 - DNA, 20 bp, synthetic construct
  source 1..20: mol_type = other DNA
acacacacacacacacatat

SEQ ID NO: 138583 - DNA, 20 bp, synthetic construct
  source 1..20: mol_type = other DNA
cacacacacacacacacata

SEQ ID NO: 138584 - DNA, 20 bp, synthetic construct
  source 1..20: mol_type = other DNA
acacacacacacacacacat

SEQ ID NO: 138585 - DNA, 20 bp, synthetic construct
  source 1..20: mol_type = other DNA
cacacacacacacacacaca

SEQ ID NO: 138586 - DNA, 20 bp, synthetic construct
  source 1..20: mol_type = other DNA
acacacacacacacacacac

SEQ ID NO: 138587 - DNA, 20 bp, synthetic construct
  source 1..20: mol_type = other DNA
cacacacacacacacacaca

SEQ ID NO: 138588 - DNA, 20 bp, synthetic construct
  source 1..20: mol_type = other DNA
acacacacacacacacacac

SEQ ID NO: 138589 - DNA, 20 bp, synthetic construct
  source 1..20: mol_type = other DNA
cacacacacacacacacaca

SEQ ID NO: 138590 - DNA, 20 bp, synthetic construct
  source 1..20: mol_type = other DNA
acacacacacacacacacac

SEQ ID NO: 138591 - DNA, 20 bp, synthetic construct
  source 1..20: mol_type = other DNA
tacacacacacacacacaca

SEQ ID NO: 138592 - DNA, 20 bp, synthetic construct
  source 1..20: mol_type = other DNA
atacacacacacacacacac

SEQ ID NO: 138593 - DNA, 20 bp, synthetic construct
  source 1..20: mol_type = other DNA
tatacacacacacacacaca

SEQ ID NO: 138594 - DNA, 20 bp, synthetic construct
  source 1..20: mol_type = other DNA
atatacacacacacacacac

SEQ ID NO: 138595 - DNA, 20 bp, synthetic construct
  source 1..20: mol_type = other DNA
tatatacacacacacacaca

SEQ ID NO: 138596 - DNA, 20 bp, synthetic construct
  source 1..20: mol_type = other DNA
atatatacacacacacacac

SEQ ID NO: 138597 - DNA, 20 bp, synthetic construct
  source 1..20: mol_type = other DNA
tatatatacacacacacaca

SEQ ID NO: 138598 - DNA, 20 bp, synthetic construct
  source 1..20: mol_type = other DNA
atatatatacacacacacac

SEQ ID NO: 138599 - DNA, 20 bp, synthetic construct
  source 1..20: mol_type = other DNA
tatatatatacacacacaca

SEQ ID NO: 138600 - DNA, 20 bp, synthetic construct
  source 1..20: mol_type = other DNA
atatatatatacacacacac

SEQ ID NO: 138601 - DNA, 20 bp, synthetic construct
  source 1..20: mol_type = other DNA
tatatatatatacacacaca

SEQ ID NO: 138602 - DNA, 20 bp, synthetic construct
  source 1..20: mol_type = other DNA
atatatatatatacacacac

SEQ ID NO: 138603 - DNA, 20 bp, synthetic construct
  source 1..20: mol_type = other DNA
tatatatatatatacacaca

SEQ ID NO: 138604 - DNA, 20 bp, synthetic construct
  source 1..20: mol_type = other DNA
atatatatatatatacacac

SEQ ID NO: 138605 - DNA, 20 bp, synthetic construct
  source 1..20: mol_type = other DNA
catatatatatatatacaca

SEQ ID NO: 138606 - DNA, 20 bp, synthetic construct
  source 1..20: mol_type = other DNA
acatatatatatatatacac

SEQ ID NO: 138607 - DNA, 20 bp, synthetic construct
  source 1..20: mol_type = other DNA
tacatatatatatatataca

SEQ ID NO: 138608 - DNA, 20 bp, synthetic construct
  source 1..20: mol_type = other DNA
atacatatatatatatatac

SEQ ID NO: 138609 - DNA, 20 bp, synthetic construct
  source 1..20: mol_type = other DNA
catacatatatatatatata

SEQ ID NO: 138610 - DNA, 20 bp, synthetic construct
  source 1..20: mol_type = other DNA
acatacatatatatatatat

SEQ ID NO: 138611 - DNA, 20 bp, synthetic construct
  source 1..20: mol_type = other DNA
cacatacatatatatatata

SEQ ID NO: 138612 - DNA, 20 bp, synthetic construct
  source 1..20: mol_type = other DNA
acacatacatatatatatat

SEQ ID NO: 138613 - DNA, 20 bp, synthetic construct
  source 1..20: mol_type = other DNA
cacacatacatatatatata

SEQ ID NO: 138614 - DNA, 20 bp, synthetic construct
  source 1..20: mol_type = other DNA
acacacatacatatatatat

SEQ ID NO: 138615 - DNA, 20 bp, synthetic construct
  source 1..20: mol_type = other DNA
tacacacatacatatatata

SEQ ID NO: 138616 - DNA, 20 bp, synthetic construct
  source 1..20: mol_type = other DNA
atacacacatacatatatat

SEQ ID NO: 138617 - DNA, 20 bp, synthetic construct
  source 1..20: mol_type = other DNA
tatacacacatacatatata

SEQ ID NO: 138618 - DNA, 20 bp, synthetic construct
  source 1..20: mol_type = other DNA
atatacacacatacatatat

SEQ ID NO: 138619 - DNA, 20 bp, synthetic construct
  source 1..20: mol_type = other DNA
tatatacacacatacatata

SEQ ID NO: 138620 - DNA, 20 bp, synthetic construct
  source 1..20: mol_type = other DNA
atatatacacacatacatat

SEQ ID NO: 138621 - DNA, 20 bp, synthetic construct
  source 1..20: mol_type = other DNA
tatatatacacacatacata

SEQ ID NO: 138622 - DNA, 20 bp, synthetic construct
  source 1..20: mol_type = other DNA
ttatatatacacacatacat

SEQ ID NO: 138623 - DNA, 20 bp, synthetic construct
  source 1..20: mol_type = other DNA
attatatatacacacataca

SEQ ID NO: 138624 - DNA, 20 bp, synthetic construct
  source 1..20: mol_type = other DNA
aattatatatacacacatac

SEQ ID NO: 138625 - DNA, 20 bp, synthetic construct
  source 1..20: mol_type = other DNA
aaattatatatacacacata

SEQ ID NO: 138626 - DNA, 20 bp, synthetic construct
  source 1..20: mol_type = other DNA
taaattatatatacacacat

SEQ ID NO: 138627 - DNA, 20 bp, synthetic construct
  source 1..20: mol_type = other DNA
ataaattatatatacacaca

SEQ ID NO: 138628 - DNA, 20 bp, synthetic construct
  source 1..20: mol_type = other DNA
aataaattatatatacacac

SEQ ID NO: 138629 - DNA, 20 bp, synthetic construct
  source 1..20: mol_type = other DNA
aaataaattatatatacaca

SEQ ID NO: 138630 - DNA, 20 bp, synthetic construct
  source 1..20: mol_type = other DNA
caaataaattatatatacac

SEQ ID NO: 138631 - DNA, 20 bp, synthetic construct
  source 1..20: mol_type = other DNA
ccaaataaattatatataca

SEQ ID NO: 138632 - DNA, 20 bp, synthetic construct
  source 1..20: mol_type = other DNA
accaaataaattatatatac

SEQ ID NO: 138633 - DNA, 20 bp, synthetic construct
  source 1..20: mol_type = other DNA
caccaaataaattatatata

SEQ ID NO: 138634 - DNA, 20 bp, synthetic construct
  source 1..20: mol_type = other DNA
gcaccaaataaattatatat

SEQ ID NO: 138635 - DNA, 20 bp, synthetic construct
  source 1..20: mol_type = other DNA
agcaccaaataaattatata

SEQ ID NO: 138636 - DNA, 20 bp, synthetic construct
  source 1..20: mol_type = other DNA
tagcaccaaataaattatat

SEQ ID NO: 138637 - DNA, 20 bp, synthetic construct
  source 1..20: mol_type = other DNA
ctagcaccaaataaattata

SEQ ID NO: 138638 - DNA, 20 bp, synthetic construct
  source 1..20: mol_type = other DNA
cctagcaccaaataaattat

SEQ ID NO: 138639 - DNA, 20 bp, synthetic construct
  source 1..20: mol_type = other DNA
tcctagcaccaaataaatta

SEQ ID NO: 138640 - DNA, 20 bp, synthetic construct
  source 1..20: mol_type = other DNA
ttcctagcaccaaataaatt

SEQ ID NO: 138641 - DNA, 20 bp, synthetic construct
  source 1..20: mol_type = other DNA
tttcctagcaccaaataaat

SEQ ID NO: 138642 - DNA, 20 bp, synthetic construct
  source 1..20: mol_type = other DNA
atttcctagcaccaaataaa

SEQ ID NO: 138643 - DNA, 20 bp, synthetic construct
  source 1..20: mol_type = other DNA
catttcctagcaccaaataa

SEQ ID NO: 138644 - DNA, 20 bp, synthetic construct
  source 1..20: mol_type = other DNA
acatttcctagcaccaaata

SEQ ID NO: 138645 - DNA, 20 bp, synthetic construct
  source 1..20: mol_type = other DNA
aacatttcctagcaccaaat

SEQ ID NO: 138646 - DNA, 20 bp, synthetic construct
  source 1..20: mol_type = other DNA
taacatttcctagcaccaaa

SEQ ID NO: 138647 - DNA, 20 bp, synthetic construct
  source 1..20: mol_type = other DNA
ttaacatttcctagcaccaa

SEQ ID NO: 138648 - DNA, 20 bp, synthetic construct
  source 1..20: mol_type = other DNA
tttaacatttcctagcacca

SEQ ID NO: 138649 - DNA, 20 bp, synthetic construct
  source 1..20: mol_type = other DNA
atttaacatttcctagcacc

SEQ ID NO: 138650 - DNA, 20 bp, synthetic construct
  source 1..20: mol_type = other DNA
aatttaacatttcctagcac

SEQ ID NO: 138651 - DNA, 20 bp, synthetic construct
  source 1..20: mol_type = other DNA
aaatttaacatttcctagca

SEQ ID NO: 138652 - DNA, 20 bp, synthetic construct
  source 1..20: mol_type = other DNA
taaatttaacatttcctagc

SEQ ID NO: 138653 - DNA, 20 bp, synthetic construct
  source 1..20: mol_type = other DNA
ttaaatttaacatttcctag

SEQ ID NO: 138654 - DNA, 20 bp, synthetic construct
  source 1..20: mol_type = other DNA
attaaatttaacatttccta

SEQ ID NO: 138655 - DNA, 20 bp, synthetic construct
  source 1..20: mol_type = other DNA
gattaaatttaacatttcct

SEQ ID NO: 138656 - DNA, 20 bp, synthetic construct
  source 1..20: mol_type = other DNA
ggattaaatttaacatttcc

SEQ ID NO: 138657 - DNA, 20 bp, synthetic construct
  source 1..20: mol_type = other DNA
aggattaaatttaacatttc

SEQ ID NO: 138658 - DNA, 20 bp, synthetic construct
  source 1..20: mol_type = other DNA
aaggattaaatttaacattt

SEQ ID NO: 138659 - DNA, 20 bp, synthetic construct
  source 1..20: mol_type = other DNA
aaaggattaaatttaacatt

SEQ ID NO: 138660 - DNA, 20 bp, synthetic construct
  source 1..20: mol_type = other DNA
taaaggattaaatttaacat

SEQ ID NO: 138661 - DNA, 20 bp, synthetic construct
  source 1..20: mol_type = other DNA
ttaaaggattaaatttaaca

SEQ ID NO: 138662 - DNA, 20 bp, synthetic construct
  source 1..20: mol_type = other DNA
attaaaggattaaatttaac

SEQ ID NO: 138663 - DNA, 20 bp, synthetic construct
  source 1..20: mol_type = other DNA
tattaaaggattaaatttaa

SEQ ID NO: 138664 - DNA, 20 bp, synthetic construct
  source 1..20: mol_type = other DNA
ctattaaaggattaaattta

SEQ ID NO: 138665 - DNA, 20 bp, synthetic construct
  source 1..20: mol_type = other DNA
tctattaaaggattaaattt

SEQ ID NO: 138666 - DNA, 20 bp, synthetic construct
  source 1..20: mol_type = other DNA
atctattaaaggattaaatt

SEQ ID NO: 138667 - DNA, 20 bp, synthetic construct
  source 1..20: mol_type = other DNA
catctattaaaggattaaat

SEQ ID NO: 138668 - DNA, 20 bp, synthetic construct
  source 1..20: mol_type = other DNA
gcatctattaaaggattaaa

SEQ ID NO: 138669 - DNA, 20 bp, synthetic construct
  source 1..20: mol_type = other DNA
agcatctattaaaggattaa

SEQ ID NO: 138670 - DNA, 20 bp, synthetic construct
  source 1..20: mol_type = other DNA
gagcatctattaaaggatta

SEQ ID NO: 138671 - DNA, 20 bp, synthetic construct
  source 1..20: mol_type = other DNA
agagcatctattaaaggatt

SEQ ID NO: 138672 - DNA, 20 bp, synthetic construct
  source 1..20: mol_type = other DNA
aagagcatctattaaaggat

SEQ ID NO: 138673 - DNA, 20 bp, synthetic construct
  source 1..20: mol_type = other DNA
aaagagcatctattaaagga

SEQ ID NO: 138674 - DNA, 20 bp, synthetic construct
  source 1..20: mol_type = other DNA
taaagagcatctattaaagg

SEQ ID NO: 138675 - DNA, 20 bp, synthetic construct
  source 1..20: mol_type = other DNA
ttaaagagcatctattaaag

SEQ ID NO: 138676 - DNA, 20 bp, synthetic construct
  source 1..20: mol_type = other DNA
tttaaagagcatctattaaa

SEQ ID NO: 138677 - DNA, 20 bp, synthetic construct
  source 1..20: mol_type = other DNA
ttttaaagagcatctattaa

SEQ ID NO: 138678 - DNA, 20 bp, synthetic construct
  source 1..20: mol_type = other DNA
tttttaaagagcatctatta

SEQ ID NO: 138679 - DNA, 20 bp, synthetic construct
  source 1..20: mol_type = other DNA
ctttttaaagagcatctatt

SEQ ID NO: 138680 - DNA, 20 bp, synthetic construct
  source 1..20: mol_type = other DNA
cctttttaaagagcatctat

SEQ ID NO: 138681 - DNA, 20 bp, synthetic construct
  source 1..20: mol_type = other DNA
tcctttttaaagagcatcta

SEQ ID NO: 138682 - DNA, 20 bp, synthetic construct
  source 1..20: mol_type = other DNA
ctcctttttaaagagcatct

SEQ ID NO: 138683 - DNA, 20 bp, synthetic construct
  source 1..20: mol_type = other DNA
actcctttttaaagagcatc

SEQ ID NO: 138684 - DNA, 20 bp, synthetic construct
  source 1..20: mol_type = other DNA
gactcctttttaaagagcat

SEQ ID NO: 138685 - DNA, 20 bp, synthetic construct
  source 1..20: mol_type = other DNA
agactcctttttaaagagca

SEQ ID NO: 138686 - DNA, 20 bp, synthetic construct
  source 1..20: mol_type = other DNA
aagactcctttttaaagagc

SEQ ID NO: 138687 - DNA, 20 bp, synthetic construct
  source 1..20: mol_type = other DNA
caagactcctttttaaagag

SEQ ID NO: 138688 - DNA, 20 bp, synthetic construct
  source 1..20: mol_type = other DNA
gcaagactcctttttaaaga

SEQ ID NO: 138689 - DNA, 20 bp, synthetic construct
  source 1..20: mol_type = other DNA
agcaagactcctttttaaag

SEQ ID NO: 138690 - DNA, 20 bp, synthetic construct
  source 1..20: mol_type = other DNA
cagcaagactcctttttaaa

SEQ ID NO: 138691 - DNA, 20 bp, synthetic construct
  source 1..20: mol_type = other DNA
acagcaagactcctttttaa

SEQ ID NO: 138692 - DNA, 20 bp, synthetic construct
  source 1..20: mol_type = other DNA
tacagcaagactccttttta

SEQ ID NO: 138693 - DNA, 20 bp, synthetic construct
  source 1..20: mol_type = other DNA
atacagcaagactccttttt

SEQ ID NO: 138694 - DNA, 20 bp, synthetic construct
  source 1..20: mol_type = other DNA
catacagcaagactcctttt

SEQ ID NO: 138695 - DNA, 20 bp, synthetic construct
  source 1..20: mol_type = other DNA
acatacagcaagactccttt

SEQ ID NO: 138696 - DNA, 20 bp, synthetic construct
  source 1..20: mol_type = other DNA
tacatacagcaagactcctt

SEQ ID NO: 138697 - DNA, 20 bp, synthetic construct
  source 1..20: mol_type = other DNA
atacatacagcaagactcct

SEQ ID NO: 138698 - DNA, 20 bp, synthetic construct
  source 1..20: mol_type = other DNA
tatacatacagcaagactcc

SEQ ID NO: 138699 - DNA, 20 bp, synthetic construct
  source 1..20: mol_type = other DNA
atatacatacagcaagactc

SEQ ID NO: 138700 - DNA, 20 bp, synthetic construct
  source 1..20: mol_type = other DNA
tatatacatacagcaagact

SEQ ID NO: 138701 - DNA, 20 bp, synthetic construct
  source 1..20: mol_type = other DNA
gtatatacatacagcaagac

SEQ ID NO: 138702 - DNA, 20 bp, synthetic construct
  source 1..20: mol_type = other DNA
agtatatacatacagcaaga

SEQ ID NO: 138703 - DNA, 20 bp, synthetic construct
  source 1..20: mol_type = other DNA
tagtatatacatacagcaag

SEQ ID NO: 138704 - DNA, 20 bp, synthetic construct
  source 1..20: mol_type = other DNA
atagtatatacatacagcaa

SEQ ID NO: 138705 - DNA, 20 bp, synthetic construct
  source 1..20: mol_type = other DNA
aatagtatatacatacagca

SEQ ID NO: 138706 - DNA, 20 bp, synthetic construct
  source 1..20: mol_type = other DNA
taatagtatatacatacagc

SEQ ID NO: 138707 - DNA, 20 bp, synthetic construct
  source 1..20: mol_type = other DNA
ttaatagtatatacatacag

SEQ ID NO: 138708 - DNA, 20 bp, synthetic construct
  source 1..20: mol_type = other DNA
tttaatagtatatacataca

SEQ ID NO: 138709 - DNA, 20 bp, synthetic construct
  source 1..20: mol_type = other DNA
ctttaatagtatatacatac

SEQ ID NO: 138710 - DNA, 20 bp, synthetic construct
  source 1..20: mol_type = other DNA
cctttaatagtatatacata

SEQ ID NO: 138711 - DNA, 20 bp, synthetic construct
  source 1..20: mol_type = other DNA
ccctttaatagtatatacat

SEQ ID NO: 138712 - DNA, 20 bp, synthetic construct
  source 1..20: mol_type = other DNA
cccctttaatagtatataca

SEQ ID NO: 138713 - DNA, 20 bp, synthetic construct
  source 1..20: mol_type = other DNA
tcccctttaatagtatatac

SEQ ID NO: 138714 - DNA, 20 bp, synthetic construct
  source 1..20: mol_type = other DNA
ttcccctttaatagtatata

SEQ ID NO: 138715 - DNA, 20 bp, synthetic construct
  source 1..20: mol_type = other DNA
tttcccctttaatagtatat

SEQ ID NO: 138716 - DNA, 20 bp, synthetic construct
  source 1..20: mol_type = other DNA
gtttcccctttaatagtata

SEQ ID NO: 138717 - DNA, 20 bp, synthetic construct
  source 1..20: mol_type = other DNA
agtttcccctttaatagtat

SEQ ID NO: 138718 - DNA, 20 bp, synthetic construct
  source 1..20: mol_type = other DNA
tagtttcccctttaatagta

SEQ ID NO: 138719 - DNA, 20 bp, synthetic construct
  source 1..20: mol_type = other DNA
atagtttcccctttaatagt

SEQ ID NO: 138720 - DNA, 20 bp, synthetic construct
  source 1..20: mol_type = other DNA
catagtttcccctttaatag

SEQ ID NO: 138721 - DNA, 20 bp, synthetic construct
  source 1..20: mol_type = other DNA
acatagtttcccctttaata

SEQ ID NO: 138722 - DNA, 20 bp, synthetic construct
  source 1..20: mol_type = other DNA
gacatagtttcccctttaat

SEQ ID NO: 138723 - DNA, 20 bp, synthetic construct
  source 1..20: mol_type = other DNA
agacatagtttcccctttaa

SEQ ID NO: 138724 - DNA, 20 bp, synthetic construct
  source 1..20: mol_type = other DNA
cagacatagtttccccttta

SEQ ID NO: 138725 - DNA, 20 bp, synthetic construct
  source 1..20: mol_type = other DNA
acagacatagtttccccttt

SEQ ID NO: 138726 - DNA, 20 bp, synthetic construct
  source 1..20: mol_type = other DNA
cacagacatagtttcccctt

SEQ ID NO: 138727 - DNA, 20 bp, synthetic construct
  source 1..20: mol_type = other DNA
tcacagacatagtttcccct

SEQ ID NO: 138728 - DNA, 20 bp, synthetic construct
  source 1..20: mol_type = other DNA
atcacagacatagtttcccc

SEQ ID NO: 138729 - DNA, 20 bp, synthetic construct
  source 1..20: mol_type = other DNA
aatcacagacatagtttccc

SEQ ID NO: 138730 - DNA, 20 bp, synthetic construct
  source 1..20: mol_type = other DNA
caatcacagacatagtttcc

SEQ ID NO: 138731 - DNA, 20 bp, synthetic construct
  source 1..20: mol_type = other DNA
acaatcacagacatagtttc

SEQ ID NO: 138732 - DNA, 20 bp, synthetic construct
  source 1..20: mol_type = other DNA
tacaatcacagacatagttt

SEQ ID NO: 138733 - DNA, 20 bp, synthetic construct
  source 1..20: mol_type = other DNA
ctacaatcacagacatagtt

SEQ ID NO: 138734 - DNA, 20 bp, synthetic construct
  source 1..20: mol_type = other DNA
actacaatcacagacatagt

SEQ ID NO: 138735 - DNA, 20 bp, synthetic construct
  source 1..20: mol_type = other DNA
cactacaatcacagacatag

SEQ ID NO: 138736 - DNA, 20 bp, synthetic construct
  source 1..20: mol_type = other DNA
acactacaatcacagacata

SEQ ID NO: 138737 - DNA, 20 bp, synthetic construct
  source 1..20: mol_type = other DNA
cacactacaatcacagacat

SEQ ID NO: 138738 - DNA, 20 bp, synthetic construct
  source 1..20: mol_type = other DNA
acacactacaatcacagaca

SEQ ID NO: 138739 - DNA, 20 bp, synthetic construct
  source 1..20: mol_type = other DNA
tacacactacaatcacagac

SEQ ID NO: 138740 - DNA, 20 bp, synthetic construct
  source 1..20: mol_type = other DNA
ttacacactacaatcacaga

SEQ ID NO: 138741 - DNA, 20 bp, synthetic construct
  source 1..20: mol_type = other DNA
tttacacactacaatcacag

SEQ ID NO: 138742 - DNA, 20 bp, synthetic construct
  source 1..20: mol_type = other DNA
ttttacacactacaatcaca

SEQ ID NO: 138743 - DNA, 20 bp, synthetic construct
  source 1..20: mol_type = other DNA
cttttacacactacaatcac

SEQ ID NO: 138744 - DNA, 20 bp, synthetic construct
  source 1..20: mol_type = other DNA
tcttttacacactacaatca

SEQ ID NO: 138745 - DNA, 20 bp, synthetic construct
  source 1..20: mol_type = other DNA
atcttttacacactacaatc

SEQ ID NO: 138746 - DNA, 20 bp, synthetic construct
  source 1..20: mol_type = other DNA
tatcttttacacactacaat

SEQ ID NO: 138747 - DNA, 20 bp, synthetic construct
  source 1..20: mol_type = other DNA
ctatcttttacacactacaa

SEQ ID NO: 138748 - DNA, 20 bp, synthetic construct
  source 1..20: mol_type = other DNA
actatcttttacacactaca

SEQ ID NO: 138749 - DNA, 20 bp, synthetic construct
  source 1..20: mol_type = other DNA
tactatcttttacacactac

SEQ ID NO: 138750 - DNA, 20 bp, synthetic construct
  source 1..20: mol_type = other DNA
ctactatcttttacacacta

SEQ ID NO: 138751 - DNA, 20 bp, synthetic construct
  source 1..20: mol_type = other DNA
cctactatcttttacacact

SEQ ID NO: 138752 - DNA, 20 bp, synthetic construct
  source 1..20: mol_type = other DNA
acctactatcttttacacac

SEQ ID NO: 138753 - DNA, 20 bp, synthetic construct
  source 1..20: mol_type = other DNA
cacctactatcttttacaca

SEQ ID NO: 138754 - DNA, 20 bp, synthetic construct
  source 1..20: mol_type = other DNA
tcacctactatcttttacac

SEQ ID NO: 138755 - DNA, 20 bp, synthetic construct
  source 1..20: mol_type = other DNA
atcacctactatcttttaca

SEQ ID NO: 138756 - DNA, 20 bp, synthetic construct
  source 1..20: mol_type = other DNA
aatcacctactatcttttac

SEQ ID NO: 138757 - DNA, 20 bp, synthetic construct
  source 1..20: mol_type = other DNA
aaatcacctactatctttta

SEQ ID NO: 138758 - DNA, 20 bp, synthetic construct
  source 1..20: mol_type = other DNA
aaaatcacctactatctttt

SEQ ID NO: 138759 - DNA, 20 bp, synthetic construct
  source 1..20: mol_type = other DNA
taaaatcacctactatcttt

SEQ ID NO: 138760 - DNA, 20 bp, synthetic construct
  source 1..20: mol_type = other DNA
ataaaatcacctactatctt

SEQ ID NO: 138761 - DNA, 20 bp, synthetic construct
  source 1..20: mol_type = other DNA
aataaaatcacctactatct

SEQ ID NO: 138762 - DNA, 20 bp, synthetic construct
  source 1..20: mol_type = other DNA
taataaaatcacctactatc

SEQ ID NO: 138763 - DNA, 20 bp, synthetic construct
  source 1..20: mol_type = other DNA
ataataaaatcacctactat

SEQ ID NO: 138764 - DNA, 20 bp, synthetic construct
  source 1..20: mol_type = other DNA
cataataaaatcacctacta

SEQ ID NO: 138765 - DNA, 20 bp, synthetic construct
  source 1..20: mol_type = other DNA
acataataaaatcacctact

SEQ ID NO: 138766 - DNA, 20 bp, synthetic construct
  source 1..20: mol_type = other DNA
tacataataaaatcacctac

SEQ ID NO: 138767 - DNA, 20 bp, synthetic construct
  source 1..20: mol_type = other DNA
gtacataataaaatcaccta

SEQ ID NO: 138768 - DNA, 20 bp, synthetic construct
  source 1..20: mol_type = other DNA
agtacataataaaatcacct

SEQ ID NO: 138769 - DNA, 20 bp, synthetic construct
  source 1..20: mol_type = other DNA
gagtacataataaaatcacc

SEQ ID NO: 138770 - DNA, 20 bp, synthetic construct
  source 1..20: mol_type = other DNA
tgagtacataataaaatcac

SEQ ID NO: 138771 - DNA, 20 bp, synthetic construct
  source 1..20: mol_type = other DNA
ttgagtacataataaaatca

SEQ ID NO: 138772 - DNA, 20 bp, synthetic construct
  source 1..20: mol_type = other DNA
attgagtacataataaaatc

SEQ ID NO: 138773 - DNA, 20 bp, synthetic construct
  source 1..20: mol_type = other DNA
aattgagtacataataaaat

SEQ ID NO: 138774 - DNA, 20 bp, synthetic construct
  source 1..20: mol_type = other DNA
aaattgagtacataataaaa

SEQ ID NO: 138775 - DNA, 20 bp, synthetic construct
  source 1..20: mol_type = other DNA
caaattgagtacataataaa

SEQ ID NO: 138776 - DNA, 20 bp, synthetic construct
  source 1..20: mol_type = other DNA
tcaaattgagtacataataa

SEQ ID NO: 138777 - DNA, 20 bp, synthetic construct
  source 1..20: mol_type = other DNA
ctcaaattgagtacataata

SEQ ID NO: 138778 - DNA, 20 bp, synthetic construct
  source 1..20: mol_type = other DNA
cctcaaattgagtacataat

SEQ ID NO: 138779 - DNA, 20 bp, synthetic construct
  source 1..20: mol_type = other DNA
acctcaaattgagtacataa

SEQ ID NO: 138780 - DNA, 20 bp, synthetic construct
  source 1..20: mol_type = other DNA
gacctcaaattgagtacata

SEQ ID NO: 138781 - DNA, 20 bp, synthetic construct
  source 1..20: mol_type = other DNA
agacctcaaattgagtacat

SEQ ID NO: 138782 - DNA, 20 bp, synthetic construct
  source 1..20: mol_type = other DNA
gagacctcaaattgagtaca

SEQ ID NO: 138783 - DNA, 20 bp, synthetic construct
  source 1..20: mol_type = other DNA
tgagacctcaaattgagtac

SEQ ID NO: 138784 - DNA, 20 bp, synthetic construct
  source 1..20: mol_type = other DNA
ttgagacctcaaattgagta

SEQ ID NO: 138785 - DNA, 20 bp, synthetic construct
  source 1..20: mol_type = other DNA
tttgagacctcaaattgagt

SEQ ID NO: 138786 - DNA, 20 bp, synthetic construct
  source 1..20: mol_type = other DNA
atttgagacctcaaattgag

SEQ ID NO: 138787 - DNA, 20 bp, synthetic construct
  source 1..20: mol_type = other DNA
catttgagacctcaaattga

SEQ ID NO: 138788 - DNA, 20 bp, synthetic construct
  source 1..20: mol_type = other DNA
acatttgagacctcaaattg

SEQ ID NO: 138789 - DNA, 20 bp, synthetic construct
  source 1..20: mol_type = other DNA
tacatttgagacctcaaatt

SEQ ID NO: 138790 - DNA, 20 bp, synthetic construct
  source 1..20: mol_type = other DNA
ctacatttgagacctcaaat

SEQ ID NO: 138791 - DNA, 20 bp, synthetic construct
  source 1..20: mol_type = other DNA
actacatttgagacctcaaa

SEQ ID NO: 138792 - DNA, 20 bp, synthetic construct
  source 1..20: mol_type = other DNA
aactacatttgagacctcaa

SEQ ID NO: 138793 - DNA, 20 bp, synthetic construct
  source 1..20: mol_type = other DNA
taactacatttgagacctca

SEQ ID NO: 138794 - DNA, 20 bp, synthetic construct
  source 1..20: mol_type = other DNA
ataactacatttgagacctc

SEQ ID NO: 138795 - DNA, 20 bp, synthetic construct
  source 1..20: mol_type = other DNA
gataactacatttgagacct

SEQ ID NO: 138796 - DNA, 20 bp, synthetic construct
  source 1..20: mol_type = other DNA
ggataactacatttgagacc

SEQ ID NO: 138797 - DNA, 20 bp, synthetic construct
  source 1..20: mol_type = other DNA
aggataactacatttgagac

SEQ ID NO: 138798 - DNA, 20 bp, synthetic construct
  source 1..20: mol_type = other DNA
gaggataactacatttgaga

SEQ ID NO: 138799 - DNA, 20 bp, synthetic construct
  source 1..20: mol_type = other DNA
tgaggataactacatttgag

SEQ ID NO: 138800 - DNA, 20 bp, synthetic construct
  source 1..20: mol_type = other DNA
gtgaggataactacatttga

SEQ ID NO: 138801 - DNA, 20 bp, synthetic construct
  source 1..20: mol_type = other DNA
ggtgaggataactacatttg

SEQ ID NO: 138802 - DNA, 20 bp, synthetic construct
  source 1..20: mol_type = other DNA
tggtgaggataactacattt

SEQ ID NO: 138803 - DNA, 20 bp, synthetic construct
  source 1..20: mol_type = other DNA
atggtgaggataactacatt

SEQ ID NO: 138804 - DNA, 20 bp, synthetic construct
  source 1..20: mol_type = other DNA
gatggtgaggataactacat

SEQ ID NO: 138805 - DNA, 20 bp, synthetic construct
  source 1..20: mol_type = other DNA
agatggtgaggataactaca

SEQ ID NO: 138806 - DNA, 20 bp, synthetic construct
  source 1..20: mol_type = other DNA
aagatggtgaggataactac

SEQ ID NO: 138807 - DNA, 20 bp, synthetic construct
  source 1..20: mol_type = other DNA
taagatggtgaggataacta

SEQ ID NO: 138808 - DNA, 20 bp, synthetic construct
  source 1..20: mol_type = other DNA
gtaagatggtgaggataact

SEQ ID NO: 138809 - DNA, 20 bp, synthetic construct
  source 1..20: mol_type = other DNA
agtaagatggtgaggataac

SEQ ID NO: 138810 - DNA, 20 bp, synthetic construct
  source 1..20: mol_type = other DNA
cagtaagatggtgaggataa

SEQ ID NO: 138811 - DNA, 20 bp, synthetic construct
  source 1..20: mol_type = other DNA
acagtaagatggtgaggata

SEQ ID NO: 138812 - DNA, 20 bp, synthetic construct
  source 1..20: mol_type = other DNA
gacagtaagatggtgaggat

SEQ ID NO: 138813 - DNA, 20 bp, synthetic construct
  source 1..20: mol_type = other DNA
agacagtaagatggtgagga

SEQ ID NO: 138814 - DNA, 20 bp, synthetic construct
  source 1..20: mol_type = other DNA
gagacagtaagatggtgagg

SEQ ID NO: 138815 - DNA, 20 bp, synthetic construct
  source 1..20: mol_type = other DNA
agagacagtaagatggtgag

SEQ ID NO: 138816 - DNA, 20 bp, synthetic construct
  source 1..20: mol_type = other DNA
cagagacagtaagatggtga

SEQ ID NO: 138817 - DNA, 20 bp, synthetic construct
  source 1..20: mol_type = other DNA
acagagacagtaagatggtg

SEQ ID NO: 138818 - DNA, 20 bp, synthetic construct
  source 1..20: mol_type = other DNA
aacagagacagtaagatggt

SEQ ID NO: 138819 - DNA, 20 bp, synthetic construct
  source 1..20: mol_type = other DNA
taacagagacagtaagatgg

SEQ ID NO: 138820 - DNA, 20 bp, synthetic construct
  source 1..20: mol_type = other DNA
ctaacagagacagtaagatg

SEQ ID NO: 138821 - DNA, 20 bp, synthetic construct
  source 1..20: mol_type = other DNA
actaacagagacagtaagat

SEQ ID NO: 138822 - DNA, 20 bp, synthetic construct
  source 1..20: mol_type = other DNA
tactaacagagacagtaaga

SEQ ID NO: 138823 - DNA, 20 bp, synthetic construct
  source 1..20: mol_type = other DNA
ctactaacagagacagtaag

SEQ ID NO: 138824 - DNA, 20 bp, synthetic construct
  source 1..20: mol_type = other DNA
actactaacagagacagtaa

SEQ ID NO: 138825 - DNA, 20 bp, synthetic construct
  source 1..20: mol_type = other DNA
aactactaacagagacagta

SEQ ID NO: 138826 - DNA, 20 bp, synthetic construct
  source 1..20: mol_type = other DNA
aaactactaacagagacagt

SEQ ID NO: 138827 - DNA, 20 bp, synthetic construct
  source 1..20: mol_type = other DNA
caaactactaacagagacag

SEQ ID NO: 138828 - DNA, 20 bp, synthetic construct
  source 1..20: mol_type = other DNA
ccaaactactaacagagaca

SEQ ID NO: 138829 - DNA, 20 bp, synthetic construct
  source 1..20: mol_type = other DNA
accaaactactaacagagac

SEQ ID NO: 138830 - DNA, 20 bp, synthetic construct
  source 1..20: mol_type = other DNA
caccaaactactaacagaga

SEQ ID NO: 138831 - DNA, 20 bp, synthetic construct
  source 1..20: mol_type = other DNA
acaccaaactactaacagag

SEQ ID NO: 138832 - DNA, 20 bp, synthetic construct
  source 1..20: mol_type = other DNA
aacaccaaactactaacaga

SEQ ID NO: 138833 - DNA, 20 bp, synthetic construct
  source 1..20: mol_type = other DNA
caacaccaaactactaacag

SEQ ID NO: 138834 - DNA, 20 bp, synthetic construct
  source 1..20: mol_type = other DNA
acaacaccaaactactaaca

SEQ ID NO: 138835 - DNA, 20 bp, synthetic construct
  source 1..20: mol_type = other DNA
aacaacaccaaactactaac

SEQ ID NO: 138836 - DNA, 20 bp, synthetic construct
  source 1..20: mol_type = other DNA
aaacaacaccaaactactaa

SEQ ID NO: 138837 - DNA, 20 bp, synthetic construct
  source 1..20: mol_type = other DNA
aaaacaacaccaaactacta

SEQ ID NO: 138838 - DNA, 20 bp, synthetic construct
  source 1..20: mol_type = other DNA
gaaaacaacaccaaactact

SEQ ID NO: 138839 - DNA, 20 bp, synthetic construct
  source 1..20: mol_type = other DNA
ggaaaacaacaccaaactac

SEQ ID NO: 138840 - DNA, 20 bp, synthetic construct
  source 1..20: mol_type = other DNA
aggaaaacaacaccaaacta

SEQ ID NO: 138841 - DNA, 20 bp, synthetic construct
  source 1..20: mol_type = other DNA
caggaaaacaacaccaaact

SEQ ID NO: 138842 - DNA, 20 bp, synthetic construct
  source 1..20: mol_type = other DNA
ccaggaaaacaacaccaaac

SEQ ID NO: 138843 - DNA, 20 bp, synthetic construct
  source 1..20: mol_type = other DNA
accaggaaaacaacaccaaa

SEQ ID NO: 138844 - DNA, 20 bp, synthetic construct
  source 1..20: mol_type = other DNA
taccaggaaaacaacaccaa

SEQ ID NO: 138845 - DNA, 20 bp, synthetic construct
  source 1..20: mol_type = other DNA
ttaccaggaaaacaacacca

SEQ ID NO: 138846 - DNA, 20 bp, synthetic construct
  source 1..20: mol_type = other DNA
cttaccaggaaaacaacacc

SEQ ID NO: 138847 - DNA, 20 bp, synthetic construct
  source 1..20: mol_type = other DNA
acttaccaggaaaacaacac

SEQ ID NO: 138848 - DNA, 20 bp, synthetic construct
  source 1..20: mol_type = other DNA
tacttaccaggaaaacaaca

SEQ ID NO: 138849 - DNA, 20 bp, synthetic construct
  source 1..20: mol_type = other DNA
ctacttaccaggaaaacaac

SEQ ID NO: 138850 - DNA, 20 bp, synthetic construct
  source 1..20: mol_type = other DNA
gctacttaccaggaaaacaa

SEQ ID NO: 138851 - DNA, 20 bp, synthetic construct
  source 1..20: mol_type = other DNA
agctacttaccaggaaaaca

SEQ ID NO: 138852 - DNA, 20 bp, synthetic construct
  source 1..20: mol_type = other DNA
tagctacttaccaggaaaac

SEQ ID NO: 138853 - DNA, 20 bp, synthetic construct
  source 1..20: mol_type = other DNA
ttagctacttaccaggaaaa

SEQ ID NO: 138854 - DNA, 20 bp, synthetic construct
  source 1..20: mol_type = other DNA
cttagctacttaccaggaaa

SEQ ID NO: 138855 - DNA, 20 bp, synthetic construct
  source 1..20: mol_type = other DNA
ccttagctacttaccaggaa

SEQ ID NO: 138856 - DNA, 20 bp, synthetic construct
  source 1..20: mol_type = other DNA
accttagctacttaccagga

SEQ ID NO: 138857 - DNA, 20 bp, synthetic construct
  source 1..20: mol_type = other DNA
gaccttagctacttaccagg

SEQ ID NO: 138858 - DNA, 20 bp, synthetic construct
  source 1..20: mol_type = other DNA
ggaccttagctacttaccag

SEQ ID NO: 138859 - DNA, 20 bp, synthetic construct
  source 1..20: mol_type = other DNA
aggaccttagctacttacca

SEQ ID NO: 138860 - DNA, 20 bp, synthetic construct
  source 1..20: mol_type = other DNA
aaggaccttagctacttacc

SEQ ID NO: 138861 - DNA, 20 bp, synthetic construct
  source 1..20: mol_type = other DNA
taaggaccttagctacttac

SEQ ID NO: 138862 - DNA, 20 bp, synthetic construct
  source 1..20: mol_type = other DNA
ttaaggaccttagctactta

SEQ ID NO: 138863 - DNA, 20 bp, synthetic construct
  source 1..20: mol_type = other DNA
attaaggaccttagctactt

SEQ ID NO: 138864 - DNA, 20 bp, synthetic construct
  source 1..20: mol_type = other DNA
gattaaggaccttagctact

SEQ ID NO: 138865 - DNA, 20 bp, synthetic construct
  source 1..20: mol_type = other DNA
tgattaaggaccttagctac

SEQ ID NO: 138866 - DNA, 20 bp, synthetic construct
  source 1..20: mol_type = other DNA
atgattaaggaccttagcta

SEQ ID NO: 138867 - DNA, 20 bp, synthetic construct
  source 1..20: mol_type = other DNA
aatgattaaggaccttagct

SEQ ID NO: 138868 - DNA, 20 bp, synthetic construct
  source 1..20: mol_type = other DNA
taatgattaaggaccttagc

SEQ ID NO: 138869 - DNA, 20 bp, synthetic construct
  source 1..20: mol_type = other DNA
ttaatgattaaggaccttag

SEQ ID NO: 138870 - DNA, 20 bp, synthetic construct
  source 1..20: mol_type = other DNA
gttaatgattaaggacctta

SEQ ID NO: 138871 - DNA, 20 bp, synthetic construct
  source 1..20: mol_type = other DNA
tgttaatgattaaggacctt

SEQ ID NO: 138872 - DNA, 20 bp, synthetic construct
  source 1..20: mol_type = other DNA
gtgttaatgattaaggacct

SEQ ID NO: 138873 - DNA, 20 bp, synthetic construct
  source 1..20: mol_type = other DNA
ggtgttaatgattaaggacc

SEQ ID NO: 138874 - DNA, 20 bp, synthetic construct
  source 1..20: mol_type = other DNA
aggtgttaatgattaaggac

SEQ ID NO: 138875 - DNA, 20 bp, synthetic construct
  source 1..20: mol_type = other DNA
taggtgttaatgattaagga

SEQ ID NO: 138876 - DNA, 20 bp, synthetic construct
  source 1..20: mol_type = other DNA
ttaggtgttaatgattaagg

SEQ ID NO: 138877 - DNA, 20 bp, synthetic construct
  source 1..20: mol_type = other DNA
cttaggtgttaatgattaag

SEQ ID NO: 138878 - DNA, 20 bp, synthetic construct
  source 1..20: mol_type = other DNA
gcttaggtgttaatgattaa

SEQ ID NO: 138879 - DNA, 20 bp, synthetic construct
  source 1..20: mol_type = other DNA
ggcttaggtgttaatgatta

SEQ ID NO: 138880 - DNA, 20 bp, synthetic construct
  source 1..20: mol_type = other DNA
aggcttaggtgttaatgatt

SEQ ID NO: 138881 - DNA, 20 bp, synthetic construct
  source 1..20: mol_type = other DNA
aaggcttaggtgttaatgat

SEQ ID NO: 138882 - DNA, 20 bp, synthetic construct
  source 1..20: mol_type = other DNA
taaggcttaggtgttaatga

SEQ ID NO: 138883 - DNA, 20 bp, synthetic construct
  source 1..20: mol_type = other DNA
ttaaggcttaggtgttaatg

SEQ ID NO: 138884 - DNA, 20 bp, synthetic construct
  source 1..20: mol_type = other DNA
attaaggcttaggtgttaat

SEQ ID NO: 138885 - DNA, 20 bp, synthetic construct
  source 1..20: mol_type = other DNA
aattaaggcttaggtgttaa

SEQ ID NO: 138886 - DNA, 20 bp, synthetic construct
  source 1..20: mol_type = other DNA
caattaaggcttaggtgtta

SEQ ID NO: 138887 - DNA, 20 bp, synthetic construct
  source 1..20: mol_type = other DNA
gcaattaaggcttaggtgtt

SEQ ID NO: 138888 - DNA, 20 bp, synthetic construct
  source 1..20: mol_type = other DNA
ggcaattaaggcttaggtgt

SEQ ID NO: 138889 - DNA, 20 bp, synthetic construct
  source 1..20: mol_type = other DNA
aggcaattaaggcttaggtg

SEQ ID NO: 138890 - DNA, 20 bp, synthetic construct
  source 1..20: mol_type = other DNA
aaggcaattaaggcttaggt

SEQ ID NO: 138891 - DNA, 20 bp, synthetic construct
  source 1..20: mol_type = other DNA
taaggcaattaaggcttagg

SEQ ID NO: 138892 - DNA, 20 bp, synthetic construct
  source 1..20: mol_type = other DNA
ctaaggcaattaaggcttag

SEQ ID NO: 138893 - DNA, 20 bp, synthetic construct
  source 1..20: mol_type = other DNA
gctaaggcaattaaggctta

SEQ ID NO: 138894 - DNA, 20 bp, synthetic construct
  source 1..20: mol_type = other DNA
tgctaaggcaattaaggctt

SEQ ID NO: 138895 - DNA, 20 bp, synthetic construct
  source 1..20: mol_type = other DNA
gtgctaaggcaattaaggct

SEQ ID NO: 138896 - DNA, 20 bp, synthetic construct
  source 1..20: mol_type = other DNA
tgtgctaaggcaattaaggc

SEQ ID NO: 138897 - DNA, 20 bp, synthetic construct
  source 1..20: mol_type = other DNA
ttgtgctaaggcaattaagg

SEQ ID NO: 138898 - DNA, 20 bp, synthetic construct
  source 1..20: mol_type = other DNA
gttgtgctaaggcaattaag

SEQ ID NO: 138899 - DNA, 20 bp, synthetic construct
  source 1..20: mol_type = other DNA
agttgtgctaaggcaattaa

SEQ ID NO: 138900 - DNA, 20 bp, synthetic construct
  source 1..20: mol_type = other DNA
aagttgtgctaaggcaatta

SEQ ID NO: 138901 - DNA, 20 bp, synthetic construct
  source 1..20: mol_type = other DNA
gaagttgtgctaaggcaatt

SEQ ID NO: 138902 - DNA, 20 bp, synthetic construct
  source 1..20: mol_type = other DNA
ggaagttgtgctaaggcaat

SEQ ID NO: 138903 - DNA, 20 bp, synthetic construct
  source 1..20: mol_type = other DNA
gggaagttgtgctaaggcaa

SEQ ID NO: 138904 - DNA, 20 bp, synthetic construct
  source 1..20: mol_type = other DNA
ggggaagttgtgctaaggca

SEQ ID NO: 138905 - DNA, 20 bp, synthetic construct
  source 1..20: mol_type = other DNA
aggggaagttgtgctaaggc

SEQ ID NO: 138906 - DNA, 20 bp, synthetic construct
  source 1..20: mol_type = other DNA
taggggaagttgtgctaagg

SEQ ID NO: 138907 - DNA, 20 bp, synthetic construct
  source 1..20: mol_type = other DNA
ttaggggaagttgtgctaag

SEQ ID NO: 138908 - DNA, 20 bp, synthetic construct
  source 1..20: mol_type = other DNA
tttaggggaagttgtgctaa

SEQ ID NO: 138909 - DNA, 20 bp, synthetic construct
  source 1..20: mol_type = other DNA
ttttaggggaagttgtgcta

SEQ ID NO: 138910 - DNA, 20 bp, synthetic construct
  source 1..20: mol_type = other DNA
cttttaggggaagttgtgct

SEQ ID NO: 138911 - DNA, 20 bp, synthetic construct
  source 1..20: mol_type = other DNA
ccttttaggggaagttgtgc

SEQ ID NO: 138912 - DNA, 20 bp, synthetic construct
  source 1..20: mol_type = other DNA
cccttttaggggaagttgtg

SEQ ID NO: 138913 - DNA, 20 bp, synthetic construct
  source 1..20: mol_type = other DNA
tcccttttaggggaagttgt

SEQ ID NO: 138914 - DNA, 20 bp, synthetic construct
  source 1..20: mol_type = other DNA
ctcccttttaggggaagttg

SEQ ID NO: 138915 - DNA, 20 bp, synthetic construct
  source 1..20: mol_type = other DNA
actcccttttaggggaagtt

SEQ ID NO: 138916 - DNA, 20 bp, synthetic construct
  source 1..20: mol_type = other DNA
tactcccttttaggggaagt

SEQ ID NO: 138917 - DNA, 20 bp, synthetic construct
  source 1..20: mol_type = other DNA
atactcccttttaggggaag

SEQ ID NO: 138918 - DNA, 20 bp, synthetic construct
  source 1..20: mol_type = other DNA
gatactcccttttaggggaa

SEQ ID NO: 138919 - DNA, 20 bp, synthetic construct
  source 1..20: mol_type = other DNA
tgatactcccttttagggga

SEQ ID NO: 138920 - DNA, 20 bp, synthetic construct
  source 1..20: mol_type = other DNA
ctgatactcccttttagggg

SEQ ID NO: 138921 - DNA, 20 bp, synthetic construct
  source 1..20: mol_type = other DNA
actgatactcccttttaggg

SEQ ID NO: 138922 - DNA, 20 bp, synthetic construct
  source 1..20: mol_type = other DNA
tactgatactcccttttagg

SEQ ID NO: 138923 - DNA, 20 bp, synthetic construct
  source 1..20: mol_type = other DNA
gtactgatactcccttttag

SEQ ID NO: 138924 - DNA, 20 bp, synthetic construct
  source 1..20: mol_type = other DNA
agtactgatactccctttta

SEQ ID NO: 138925 - DNA, 20 bp, synthetic construct
  source 1..20: mol_type = other DNA
aagtactgatactccctttt

SEQ ID NO: 138926 - DNA, 20 bp, synthetic construct
  source 1..20: mol_type = other DNA
aaagtactgatactcccttt

SEQ ID NO: 138927 - DNA, 20 bp, synthetic construct
  source 1..20: mol_type = other DNA
aaaagtactgatactccctt

SEQ ID NO: 138928 - DNA, 20 bp, synthetic construct
  source 1..20: mol_type = other DNA
aaaaagtactgatactccct

SEQ ID NO: 138929 - DNA, 20 bp, synthetic construct
  source 1..20: mol_type = other DNA
taaaaagtactgatactccc

SEQ ID NO: 138930 - DNA, 20 bp, synthetic construct
  source 1..20: mol_type = other DNA
ttaaaaagtactgatactcc

SEQ ID NO: 138931 - DNA, 20 bp, synthetic construct
  source 1..20: mol_type = other DNA
tttaaaaagtactgatactc

SEQ ID NO: 138932 - DNA, 20 bp, synthetic construct
  source 1..20: mol_type = other DNA
ttttaaaaagtactgatact

SEQ ID NO: 138933 - DNA, 20 bp, synthetic construct
  source 1..20: mol_type = other DNA
cttttaaaaagtactgatac

SEQ ID NO: 138934 - DNA, 20 bp, synthetic construct
  source 1..20: mol_type = other DNA
tcttttaaaaagtactgata

SEQ ID NO: 138935 - DNA, 20 bp, synthetic construct
  source 1..20: mol_type = other DNA
ttcttttaaaaagtactgat

SEQ ID NO: 138936 - DNA, 20 bp, synthetic construct
  source 1..20: mol_type = other DNA
tttcttttaaaaagtactga

SEQ ID NO: 138937 - DNA, 20 bp, synthetic construct
  source 1..20: mol_type = other DNA
gtttcttttaaaaagtactg

SEQ ID NO: 138938 - DNA, 20 bp, synthetic construct
  source 1..20: mol_type = other DNA
agtttcttttaaaaagtact

SEQ ID NO: 138939 - DNA, 20 bp, synthetic construct
  source 1..20: mol_type = other DNA
tagtttcttttaaaaagtac

SEQ ID NO: 138940 - DNA, 20 bp, synthetic construct
  source 1..20: mol_type = other DNA
ttagtttcttttaaaaagta

SEQ ID NO: 138941 - DNA, 20 bp, synthetic construct
  source 1..20: mol_type = other DNA
gttagtttcttttaaaaagt

SEQ ID NO: 138942 - DNA, 20 bp, synthetic construct
  source 1..20: mol_type = other DNA
tgttagtttcttttaaaaag

SEQ ID NO: 138943 - DNA, 20 bp, synthetic construct
  source 1..20: mol_type = other DNA
ctgttagtttcttttaaaaa

SEQ ID NO: 138944 - DNA, 20 bp, synthetic construct
  source 1..20: mol_type = other DNA
actgttagtttcttttaaaa

SEQ ID NO: 138945 - DNA, 20 bp, synthetic construct
  source 1..20: mol_type = other DNA
aactgttagtttcttttaaa

SEQ ID NO: 138946 - DNA, 20 bp, synthetic construct
  source 1..20: mol_type = other DNA
caactgttagtttcttttaa

SEQ ID NO: 138947 - DNA, 20 bp, synthetic construct
  source 1..20: mol_type = other DNA
ccaactgttagtttctttta

SEQ ID NO: 138948 - DNA, 20 bp, synthetic construct
  source 1..20: mol_type = other DNA
cccaactgttagtttctttt

SEQ ID NO: 138949 - DNA, 20 bp, synthetic construct
  source 1..20: mol_type = other DNA
gcccaactgttagtttcttt

SEQ ID NO: 138950 - DNA, 20 bp, synthetic construct
  source 1..20: mol_type = other DNA
agcccaactgttagtttctt

SEQ ID NO: 138951 - DNA, 20 bp, synthetic construct
  source 1..20: mol_type = other DNA
cagcccaactgttagtttct

SEQ ID NO: 138952 - DNA, 20 bp, synthetic construct
  source 1..20: mol_type = other DNA
gcagcccaactgttagtttc

SEQ ID NO: 138953 - DNA, 20 bp, synthetic construct
  source 1..20: mol_type = other DNA
agcagcccaactgttagttt

SEQ ID NO: 138954 - DNA, 20 bp, synthetic construct
  source 1..20: mol_type = other DNA
tagcagcccaactgttagtt

SEQ ID NO: 138955 - DNA, 20 bp, synthetic construct
  source 1..20: mol_type = other DNA
ttagcagcccaactgttagt

SEQ ID NO: 138956 - DNA, 20 bp, synthetic construct
  source 1..20: mol_type = other DNA
attagcagcccaactgttag

SEQ ID NO: 138957 - DNA, 20 bp, synthetic construct
  source 1..20: mol_type = other DNA
aattagcagcccaactgtta

SEQ ID NO: 138958 - DNA, 20 bp, synthetic construct
  source 1..20: mol_type = other DNA
aaattagcagcccaactgtt

SEQ ID NO: 138959 - DNA, 20 bp, synthetic construct
  source 1..20: mol_type = other DNA
taaattagcagcccaactgt

SEQ ID NO: 138960 - DNA, 20 bp, synthetic construct
  source 1..20: mol_type = other DNA
ttaaattagcagcccaactg

SEQ ID NO: 138961 - DNA, 20 bp, synthetic construct
  source 1..20: mol_type = other DNA
attaaattagcagcccaact

SEQ ID NO: 138962 - DNA, 20 bp, synthetic construct
  source 1..20: mol_type = other DNA
gattaaattagcagcccaac

SEQ ID NO: 138963 - DNA, 20 bp, synthetic construct
  source 1..20: mol_type = other DNA
agattaaattagcagcccaa

SEQ ID NO: 138964 - DNA, 20 bp, synthetic construct
  source 1..20: mol_type = other DNA
cagattaaattagcagccca

SEQ ID NO: 138965 - DNA, 20 bp, synthetic construct
  source 1..20: mol_type = other DNA
gcagattaaattagcagccc

SEQ ID NO: 138966 - DNA, 20 bp, synthetic construct
  source 1..20: mol_type = other DNA
agcagattaaattagcagcc

SEQ ID NO: 138967 - DNA, 20 bp, synthetic construct
  source 1..20: mol_type = other DNA
cagcagattaaattagcagc

SEQ ID NO: 138968 - DNA, 20 bp, synthetic construct
  source 1..20: mol_type = other DNA
gcagcagattaaattagcag

SEQ ID NO: 138969 - DNA, 20 bp, synthetic construct
  source 1..20: mol_type = other DNA
agcagcagattaaattagca

SEQ ID NO: 138970 - DNA, 20 bp, synthetic construct
  source 1..20: mol_type = other DNA
aagcagcagattaaattagc

SEQ ID NO: 138971 - DNA, 20 bp, synthetic construct
  source 1..20: mol_type = other DNA
gaagcagcagattaaattag

SEQ ID NO: 138972 - DNA, 20 bp, synthetic construct
  source 1..20: mol_type = other DNA
tgaagcagcagattaaatta

SEQ ID NO: 138973 - DNA, 20 bp, synthetic construct
  source 1..20: mol_type = other DNA
atgaagcagcagattaaatt

SEQ ID NO: 138974 - DNA, 20 bp, synthetic construct
  source 1..20: mol_type = other DNA
aatgaagcagcagattaaat

SEQ ID NO: 138975 - DNA, 20 bp, synthetic construct
  source 1..20: mol_type = other DNA
aaatgaagcagcagattaaa

SEQ ID NO: 138976 - DNA, 20 bp, synthetic construct
  source 1..20: mol_type = other DNA
gaaatgaagcagcagattaa

SEQ ID NO: 138977 - DNA, 20 bp, synthetic construct
  source 1..20: mol_type = other DNA
ggaaatgaagcagcagatta

SEQ ID NO: 138978 - DNA, 20 bp, synthetic construct
  source 1..20: mol_type = other DNA
gggaaatgaagcagcagatt

SEQ ID NO: 138979 - DNA, 20 bp, synthetic construct
  source 1..20: mol_type = other DNA
ggggaaatgaagcagcagat

SEQ ID NO: 138980 - DNA, 20 bp, synthetic construct
  source 1..20: mol_type = other DNA
gggggaaatgaagcagcaga

SEQ ID NO: 138981 - DNA, 20 bp, synthetic construct
  source 1..20: mol_type = other DNA
agggggaaatgaagcagcag

SEQ ID NO: 138982 - DNA, 20 bp, synthetic construct
  source 1..20: mol_type = other DNA
cagggggaaatgaagcagca

SEQ ID NO: 138983 - DNA, 20 bp, synthetic construct
  source 1..20: mol_type = other DNA
acagggggaaatgaagcagc

SEQ ID NO: 138984 - DNA, 20 bp, synthetic construct
  source 1..20: mol_type = other DNA
aacagggggaaatgaagcag

SEQ ID NO: 138985 - DNA, 20 bp, synthetic construct
  source 1..20: mol_type = other DNA
gaacagggggaaatgaagca

SEQ ID NO: 138986 - DNA, 20 bp, synthetic construct
  source 1..20: mol_type = other DNA
agaacagggggaaatgaagc

SEQ ID NO: 138987 - DNA, 20 bp, synthetic construct
  source 1..20: mol_type = other DNA
tagaacagggggaaatgaag

SEQ ID NO: 138988 - DNA, 20 bp, synthetic construct
  source 1..20: mol_type = other DNA
ttagaacagggggaaatgaa

SEQ ID NO: 138989 - DNA, 20 bp, synthetic construct
  source 1..20: mol_type = other DNA
cttagaacagggggaaatga

SEQ ID NO: 138990 - DNA, 20 bp, synthetic construct
  source 1..20: mol_type = other DNA
gcttagaacagggggaaatg

SEQ ID NO: 138991 - DNA, 20 bp, synthetic construct
  source 1..20: mol_type = other DNA
ggcttagaacagggggaaat

SEQ ID NO: 138992 - DNA, 20 bp, synthetic construct
  source 1..20: mol_type = other DNA
tggcttagaacagggggaaa

SEQ ID NO: 138993 - DNA, 20 bp, synthetic construct
  source 1..20: mol_type = other DNA
atggcttagaacagggggaa

SEQ ID NO: 138994 - DNA, 20 bp, synthetic construct
  source 1..20: mol_type = other DNA
aatggcttagaacaggggga

SEQ ID NO: 138995 - DNA, 20 bp, synthetic construct
  source 1..20: mol_type = other DNA
aaatggcttagaacaggggg

SEQ ID NO: 138996 - DNA, 20 bp, synthetic construct
  source 1..20: mol_type = other DNA
aaaatggcttagaacagggg

SEQ ID NO: 138997 - DNA, 20 bp, synthetic construct
  source 1..20: mol_type = other DNA
taaaatggcttagaacaggg

SEQ ID NO: 138998 - DNA, 20 bp, synthetic construct
  source 1..20: mol_type = other DNA
ataaaatggcttagaacagg

SEQ ID NO: 138999 - DNA, 20 bp, synthetic construct
  source 1..20: mol_type = other DNA
cataaaatggcttagaacag

SEQ ID NO: 139000 - DNA, 20 bp, synthetic construct
  source 1..20: mol_type = other DNA
tcataaaatggcttagaaca

SEQ ID NO: 139001 - DNA, 20 bp, synthetic construct
  source 1..20: mol_type = other DNA
atcataaaatggcttagaac

SEQ ID NO: 139002 - DNA, 20 bp, synthetic construct
  source 1..20: mol_type = other DNA
catcataaaatggcttagaa

SEQ ID NO: 139003 - DNA, 20 bp, synthetic construct
  source 1..20: mol_type = other DNA
ccatcataaaatggcttaga

SEQ ID NO: 139004 - DNA, 20 bp, synthetic construct
  source 1..20: mol_type = other DNA
accatcataaaatggcttag

SEQ ID NO: 139005 - DNA, 20 bp, synthetic construct
  source 1..20: mol_type = other DNA
aaccatcataaaatggctta

SEQ ID NO: 139006 - DNA, 20 bp, synthetic construct
  source 1..20: mol_type = other DNA
aaaccatcataaaatggctt

SEQ ID NO: 139007 - DNA, 20 bp, synthetic construct
  source 1..20: mol_type = other DNA
caaaccatcataaaatggct

SEQ ID NO: 139008 - DNA, 20 bp, synthetic construct
  source 1..20: mol_type = other DNA
ccaaaccatcataaaatggc

SEQ ID NO: 139009 - DNA, 20 bp, synthetic construct
  source 1..20: mol_type = other DNA
accaaaccatcataaaatgg

SEQ ID NO: 139010 - DNA, 20 bp, synthetic construct
  source 1..20: mol_type = other DNA
gaccaaaccatcataaaatg

SEQ ID NO: 139011 - DNA, 20 bp, synthetic construct
  source 1..20: mol_type = other DNA
tgaccaaaccatcataaaat

SEQ ID NO: 139012 - DNA, 20 bp, synthetic construct
  source 1..20: mol_type = other DNA
ttgaccaaaccatcataaaa

SEQ ID NO: 139013 - DNA, 20 bp, synthetic construct
  source 1..20: mol_type = other DNA
cttgaccaaaccatcataaa

SEQ ID NO: 139014 - DNA, 20 bp, synthetic construct
  source 1..20: mol_type = other DNA
acttgaccaaaccatcataa

SEQ ID NO: 139015 - DNA, 20 bp, synthetic construct
  source 1..20: mol_type = other DNA
aacttgaccaaaccatcata

SEQ ID NO: 139016 - DNA, 20 bp, synthetic construct
  source 1..20: mol_type = other DNA
caacttgaccaaaccatcat

SEQ ID NO: 139017 - DNA, 20 bp, synthetic construct
  source 1..20: mol_type = other DNA
gcaacttgaccaaaccatca

SEQ ID NO: 139018 - DNA, 20 bp, synthetic construct
  source 1..20: mol_type = other DNA
ggcaacttgaccaaaccatc

SEQ ID NO: 139019 - DNA, 20 bp, synthetic construct
  source 1..20: mol_type = other DNA
aggcaacttgaccaaaccat

SEQ ID NO: 139020 - DNA, 20 bp, synthetic construct
  source 1..20: mol_type = other DNA
aaggcaacttgaccaaacca

SEQ ID NO: 139021 - DNA, 20 bp, synthetic construct
  source 1..20: mol_type = other DNA
aaaggcaacttgaccaaacc

SEQ ID NO: 139022 - DNA, 20 bp, synthetic construct
  source 1..20: mol_type = other DNA
aaaaggcaacttgaccaaac

SEQ ID NO: 139023 - DNA, 20 bp, synthetic construct
  source 1..20: mol_type = other DNA
taaaaggcaacttgaccaaa

SEQ ID NO: 139024 - DNA, 20 bp, synthetic construct
  source 1..20: mol_type = other DNA
ataaaaggcaacttgaccaa

SEQ ID NO: 139025 - DNA, 20 bp, synthetic construct
  source 1..20: mol_type = other DNA
aataaaaggcaacttgacca

SEQ ID NO: 139026 - DNA, 20 bp, synthetic construct
  source 1..20: mol_type = other DNA
gaataaaaggcaacttgacc

SEQ ID NO: 139027 - DNA, 20 bp, synthetic construct
  source 1..20: mol_type = other DNA
ggaataaaaggcaacttgac

SEQ ID NO: 139028 - DNA, 20 bp, synthetic construct
  source 1..20: mol_type = other DNA
gggaataaaaggcaacttga

SEQ ID NO: 139029 - DNA, 20 bp, synthetic construct
  source 1..20: mol_type = other DNA
ggggaataaaaggcaacttg

SEQ ID NO: 139030 - DNA, 20 bp, synthetic construct
  source 1..20: mol_type = other DNA
aggggaataaaaggcaactt

SEQ ID NO: 139031 - DNA, 20 bp, synthetic construct
  source 1..20: mol_type = other DNA
aaggggaataaaaggcaact

SEQ ID NO: 139032 - DNA, 20 bp, synthetic construct
  source 1..20: mol_type = other DNA
aaaggggaataaaaggcaac

SEQ ID NO: 139033 - DNA, 20 bp, synthetic construct
  source 1..20: mol_type = other DNA
aaaaggggaataaaaggcaa

SEQ ID NO: 139034 - DNA, 20 bp, synthetic construct
  source 1..20: mol_type = other DNA
taaaaggggaataaaaggca

SEQ ID NO: 139035 - DNA, 20 bp, synthetic construct
  source 1..20: mol_type = other DNA
ctaaaaggggaataaaaggc

SEQ ID NO: 139036 - DNA, 20 bp, synthetic construct
  source 1..20: mol_type = other DNA
tctaaaaggggaataaaagg

SEQ ID NO: 139037 - DNA, 20 bp, synthetic construct
  source 1..20: mol_type = other DNA
ctctaaaaggggaataaaag

SEQ ID NO: 139038 - DNA, 20 bp, synthetic construct
  source 1..20: mol_type = other DNA
actctaaaaggggaataaaa

SEQ ID NO: 139039 - DNA, 20 bp, synthetic construct
  source 1..20: mol_type = other DNA
aactctaaaaggggaataaa

SEQ ID NO: 139040 - DNA, 20 bp, synthetic construct
  source 1..20: mol_type = other DNA
aaactctaaaaggggaataa

SEQ ID NO: 139041 - DNA, 20 bp, synthetic construct
  source 1..20: mol_type = other DNA
aaaactctaaaaggggaata

SEQ ID NO: 139042 - DNA, 20 bp, synthetic construct
  source 1..20: mol_type = other DNA
gaaaactctaaaaggggaat

SEQ ID NO: 139043 - DNA, 20 bp, synthetic construct
  source 1..20: mol_type = other DNA
tgaaaactctaaaaggggaa

SEQ ID NO: 139044 - DNA, 20 bp, synthetic construct
  source 1..20: mol_type = other DNA
ttgaaaactctaaaagggga

SEQ ID NO: 139045 - DNA, 20 bp, synthetic construct
  source 1..20: mol_type = other DNA
gttgaaaactctaaaagggg

SEQ ID NO: 139046 - DNA, 20 bp, synthetic construct
  source 1..20: mol_type = other DNA
agttgaaaactctaaaaggg

SEQ ID NO: 139047 - DNA, 20 bp, synthetic construct
  source 1..20: mol_type = other DNA
aagttgaaaactctaaaagg

SEQ ID NO: 139048 - DNA, 20 bp, synthetic construct
  source 1..20: mol_type = other DNA
aaagttgaaaactctaaaag

SEQ ID NO: 139049 - DNA, 20 bp, synthetic construct
  source 1..20: mol_type = other DNA
gaaagttgaaaactctaaaa

SEQ ID NO: 139050 - DNA, 20 bp, synthetic construct
  source 1..20: mol_type = other DNA
ggaaagttgaaaactctaaa

SEQ ID NO: 139051 - DNA, 20 bp, synthetic construct
  source 1..20: mol_type = other DNA
aggaaagttgaaaactctaa

SEQ ID NO: 139052 - DNA, 20 bp, synthetic construct
  source 1..20: mol_type = other DNA
aaggaaagttgaaaactcta

SEQ ID NO: 139053 - DNA, 20 bp, synthetic construct
  source 1..20: mol_type = other DNA
gaaggaaagttgaaaactct

SEQ ID NO: 139054 - DNA, 20 bp, synthetic construct
  source 1..20: mol_type = other DNA
tgaaggaaagttgaaaactc

SEQ ID NO: 139055 - DNA, 20 bp, synthetic construct
  source 1..20: mol_type = other DNA
gtgaaggaaagttgaaaact

SEQ ID NO: 139056 - DNA, 20 bp, synthetic construct
  source 1..20: mol_type = other DNA
agtgaaggaaagttgaaaac

SEQ ID NO: 139057 - DNA, 20 bp, synthetic construct
  source 1..20: mol_type = other DNA
aagtgaaggaaagttgaaaa

SEQ ID NO: 139058 - DNA, 20 bp, synthetic construct
  source 1..20: mol_type = other DNA
gaagtgaaggaaagttgaaa

SEQ ID NO: 139059 - DNA, 20 bp, synthetic construct
  source 1..20: mol_type = other DNA
ggaagtgaaggaaagttgaa

SEQ ID NO: 139060 - DNA, 20 bp, synthetic construct
  source 1..20: mol_type = other DNA
gggaagtgaaggaaagttga

SEQ ID NO: 139061 - DNA, 20 bp, synthetic construct
  source 1..20: mol_type = other DNA
agggaagtgaaggaaagttg

SEQ ID NO: 139062 - DNA, 20 bp, synthetic construct
  source 1..20: mol_type = other DNA
aagggaagtgaaggaaagtt

SEQ ID NO: 139063 - DNA, 20 bp, synthetic construct
  source 1..20: mol_type = other DNA
aaagggaagtgaaggaaagt

SEQ ID NO: 139064 - DNA, 20 bp, synthetic construct
  source 1..20: mol_type = other DNA
aaaagggaagtgaaggaaag

SEQ ID NO: 139065 - DNA, 20 bp, synthetic construct
  source 1..20: mol_type = other DNA
aaaaagggaagtgaaggaaa

SEQ ID NO: 139066 - DNA, 20 bp, synthetic construct
  source 1..20: mol_type = other DNA
gaaaaagggaagtgaaggaa

SEQ ID NO: 139067 - DNA, 20 bp, synthetic construct
  source 1..20: mol_type = other DNA
agaaaaagggaagtgaagga

SEQ ID NO: 139068 - DNA, 20 bp, synthetic construct
  source 1..20: mol_type = other DNA
cagaaaaagggaagtgaagg

SEQ ID NO: 139069 - DNA, 20 bp, synthetic construct
  source 1..20: mol_type = other DNA
tcagaaaaagggaagtgaag

SEQ ID NO: 139070 - DNA, 20 bp, synthetic construct
  source 1..20: mol_type = other DNA
ttcagaaaaagggaagtgaa

SEQ ID NO: 139071 - DNA, 20 bp, synthetic construct
  source 1..20: mol_type = other DNA
attcagaaaaagggaagtga

SEQ ID NO: 139072 - DNA, 20 bp, synthetic construct
  source 1..20: mol_type = other DNA
aattcagaaaaagggaagtg

SEQ ID NO: 139073 - DNA, 20 bp, synthetic construct
  source 1..20: mol_type = other DNA
aaattcagaaaaagggaagt

SEQ ID NO: 139074 - DNA, 20 bp, synthetic construct
  source 1..20: mol_type = other DNA
taaattcagaaaaagggaag

SEQ ID NO: 139075 - DNA, 20 bp, synthetic construct
  source 1..20: mol_type = other DNA
ttaaattcagaaaaagggaa

SEQ ID NO: 139076 - DNA, 20 bp, synthetic construct
  source 1..20: mol_type = other DNA
gttaaattcagaaaaaggga

SEQ ID NO: 139077 - DNA, 20 bp, synthetic construct
  source 1..20: mol_type = other DNA
tgttaaattcagaaaaaggg

SEQ ID NO: 139078 - DNA, 20 bp, synthetic construct
  source 1..20: mol_type = other DNA
atgttaaattcagaaaaagg

SEQ ID NO: 139079 - DNA, 20 bp, synthetic construct
  source 1..20: mol_type = other DNA
gatgttaaattcagaaaaag

SEQ ID NO: 139080 - DNA, 20 bp, synthetic construct
  source 1..20: mol_type = other DNA
tgatgttaaattcagaaaaa

SEQ ID NO: 139081 - DNA, 20 bp, synthetic construct
  source 1..20: mol_type = other DNA
ctgatgttaaattcagaaaa

SEQ ID NO: 139082 - DNA, 20 bp, synthetic construct
  source 1..20: mol_type = other DNA
tctgatgttaaattcagaaa

SEQ ID NO: 139083 - DNA, 20 bp, synthetic construct
  source 1..20: mol_type = other DNA
atctgatgttaaattcagaa

SEQ ID NO: 139084 - DNA, 20 bp, synthetic construct
  source 1..20: mol_type = other DNA
aatctgatgttaaattcaga

SEQ ID NO: 139085 - DNA, 20 bp, synthetic construct
  source 1..20: mol_type = other DNA
aaatctgatgttaaattcag

SEQ ID NO: 139086 - DNA, 20 bp, synthetic construct
  source 1..20: mol_type = other DNA
taaatctgatgttaaattca

SEQ ID NO: 139087 - DNA, 20 bp, synthetic construct
  source 1..20: mol_type = other DNA
gtaaatctgatgttaaattc

SEQ ID NO: 139088 - DNA, 20 bp, synthetic construct
  source 1..20: mol_type = other DNA
tgtaaatctgatgttaaatt

SEQ ID NO: 139089 - DNA, 20 bp, synthetic construct
  source 1..20: mol_type = other DNA
ttgtaaatctgatgttaaat

SEQ ID NO: 139090 - DNA, 20 bp, synthetic construct
  source 1..20: mol_type = other DNA
cttgtaaatctgatgttaaa

SEQ ID NO: 139091 - DNA, 20 bp, synthetic construct
  source 1..20: mol_type = other DNA
acttgtaaatctgatgttaa

SEQ ID NO: 139092 - DNA, 20 bp, synthetic construct
  source 1..20: mol_type = other DNA
aacttgtaaatctgatgtta

SEQ ID NO: 139093 - DNA, 20 bp, synthetic construct
  source 1..20: mol_type = other DNA
caacttgtaaatctgatgtt

SEQ ID NO: 139094 - DNA, 20 bp, synthetic construct
  source 1..20: mol_type = other DNA
ccaacttgtaaatctgatgt

SEQ ID NO: 139095 - DNA, 20 bp, synthetic construct
  source 1..20: mol_type = other DNA
tccaacttgtaaatctgatg

SEQ ID NO: 139096 - DNA, 20 bp, synthetic construct
  source 1..20: mol_type = other DNA
ttccaacttgtaaatctgat

SEQ ID NO: 139097 - DNA, 20 bp, synthetic construct
  source 1..20: mol_type = other DNA
cttccaacttgtaaatctga

SEQ ID NO: 139098 - DNA, 20 bp, synthetic construct
  source 1..20: mol_type = other DNA
tcttccaacttgtaaatctg

SEQ ID NO: 139099 - DNA, 20 bp, synthetic construct
  source 1..20: mol_type = other DNA
atcttccaacttgtaaatct

SEQ ID NO: 139100 - DNA, 20 bp, synthetic construct
  source 1..20: mol_type = other DNA
aatcttccaacttgtaaatc

SEQ ID NO: 139101 - DNA, 20 bp, synthetic construct
  source 1..20: mol_type = other DNA
aaatcttccaacttgtaaat

SEQ ID NO: 139102 - DNA, 20 bp, synthetic construct
  source 1..20: mol_type = other DNA
aaaatcttccaacttgtaaa

SEQ ID NO: 139103 - DNA, 20 bp, synthetic construct
  source 1..20: mol_type = other DNA
caaaatcttccaacttgtaa

SEQ ID NO: 139104 - DNA, 20 bp, synthetic construct
  source 1..20: mol_type = other DNA
acaaaatcttccaacttgta

SEQ ID NO: 139105 - DNA, 20 bp, synthetic construct
  source 1..20: mol_type = other DNA
aacaaaatcttccaacttgt

SEQ ID NO: 139106 - DNA, 20 bp, synthetic construct
  source 1..20: mol_type = other DNA
aaacaaaatcttccaacttg

SEQ ID NO: 139107 - DNA, 20 bp, synthetic construct
  source 1..20: mol_type = other DNA
aaaacaaaatcttccaactt

SEQ ID NO: 139108 - DNA, 20 bp, synthetic construct
  source 1..20: mol_type = other DNA
caaaacaaaatcttccaact

SEQ ID NO: 139109 - DNA, 20 bp, synthetic construct
  source 1..20: mol_type = other DNA
acaaaacaaaatcttccaac

SEQ ID NO: 139110 - DNA, 20 bp, synthetic construct
  source 1..20: mol_type = other DNA
aacaaaacaaaatcttccaa

SEQ ID NO: 139111 - DNA, 20 bp, synthetic construct
  source 1..20: mol_type = other DNA
aaacaaaacaaaatcttcca

SEQ ID NO: 139112 - DNA, 20 bp, synthetic construct
  source 1..20: mol_type = other DNA
aaaacaaaacaaaatcttcc

SEQ ID NO: 139113 - DNA, 20 bp, synthetic construct
  source 1..20: mol_type = other DNA
taaaacaaaacaaaatcttc

SEQ ID NO: 139114 - DNA, 20 bp, synthetic construct
  source 1..20: mol_type = other DNA
ataaaacaaaacaaaatctt

SEQ ID NO: 139115 - DNA, 20 bp, synthetic construct
  source 1..20: mol_type = other DNA
tataaaacaaaacaaaatct

SEQ ID NO: 139116 - DNA, 20 bp, synthetic construct
  source 1..20: mol_type = other DNA
ttataaaacaaaacaaaatc

SEQ ID NO: 139117 - DNA, 20 bp, synthetic construct
  source 1..20: mol_type = other DNA
cttataaaacaaaacaaaat

SEQ ID NO: 139118 - DNA, 20 bp, synthetic construct
  source 1..20: mol_type = other DNA
acttataaaacaaaacaaaa

SEQ ID NO: 139119 - DNA, 20 bp, synthetic construct
  source 1..20: mol_type = other DNA
aacttataaaacaaaacaaa

SEQ ID NO: 139120 - DNA, 20 bp, synthetic construct
  source 1..20: mol_type = other DNA
aaacttataaaacaaaacaa

SEQ ID NO: 139121 - DNA, 20 bp, synthetic construct
  source 1..20: mol_type = other DNA
aaaacttataaaacaaaaca

SEQ ID NO: 139122 - DNA, 20 bp, synthetic construct
  source 1..20: mol_type = other DNA
caaaacttataaaacaaaac

SEQ ID NO: 139123 - DNA, 20 bp, synthetic construct
  source 1..20: mol_type = other DNA
gcaaaacttataaaacaaaa

SEQ ID NO: 139124 - DNA, 20 bp, synthetic construct
  source 1..20: mol_type = other DNA
tgcaaaacttataaaacaaa

SEQ ID NO: 139125 - DNA, 20 bp, synthetic construct
  source 1..20: mol_type = other DNA
ttgcaaaacttataaaacaa

SEQ ID NO: 139126 - DNA, 20 bp, synthetic construct
  source 1..20: mol_type = other DNA
attgcaaaacttataaaaca

SEQ ID NO: 139127 - DNA, 20 bp, synthetic construct
  source 1..20: mol_type = other DNA
cattgcaaaacttataaaac

SEQ ID NO: 139128 - DNA, 20 bp, synthetic construct
  source 1..20: mol_type = other DNA
gcattgcaaaacttataaaa

SEQ ID NO: 139129 - DNA, 20 bp, synthetic construct
  source 1..20: mol_type = other DNA
agcattgcaaaacttataaa

SEQ ID NO: 139130 - DNA, 20 bp, synthetic construct
  source 1..20: mol_type = other DNA
cagcattgcaaaacttataa

SEQ ID NO: 139131 - DNA, 20 bp, synthetic construct
  source 1..20: mol_type = other DNA
ccagcattgcaaaacttata

SEQ ID NO: 139132 - DNA, 20 bp, synthetic construct
  source 1..20: mol_type = other DNA
accagcattgcaaaacttat

SEQ ID NO: 139133 - DNA, 20 bp, synthetic construct
  source 1..20: mol_type = other DNA
caccagcattgcaaaactta

SEQ ID NO: 139134 - DNA, 20 bp, synthetic construct
  source 1..20: mol_type = other DNA
tcaccagcattgcaaaactt

SEQ ID NO: 139135 - DNA, 20 bp, synthetic construct
  source 1..20: mol_type = other DNA
atcaccagcattgcaaaact

SEQ ID NO: 139136 - DNA, 20 bp, synthetic construct
  source 1..20: mol_type = other DNA
gatcaccagcattgcaaaac

SEQ ID NO: 139137 - DNA, 20 bp, synthetic construct
  source 1..20: mol_type = other DNA
agatcaccagcattgcaaaa

SEQ ID NO: 139138 - DNA, 20 bp, synthetic construct
  source 1..20: mol_type = other DNA
gagatcaccagcattgcaaa

SEQ ID NO: 139139 - DNA, 20 bp, synthetic construct
  source 1..20: mol_type = other DNA
agagatcaccagcattgcaa

SEQ ID NO: 139140 - DNA, 20 bp, synthetic construct
  source 1..20: mol_type = other DNA
aagagatcaccagcattgca

SEQ ID NO: 139141 - DNA, 20 bp, synthetic construct
  source 1..20: mol_type = other DNA
taagagatcaccagcattgc

SEQ ID NO: 139142 - DNA, 20 bp, synthetic construct
  source 1..20: mol_type = other DNA
ataagagatcaccagcattg

SEQ ID NO: 139143 - DNA, 20 bp, synthetic construct
  source 1..20: mol_type = other DNA
cataagagatcaccagcatt

SEQ ID NO: 139144 - DNA, 20 bp, synthetic construct
  source 1..20: mol_type = other DNA
tcataagagatcaccagcat

SEQ ID NO: 139145 - DNA, 20 bp, synthetic construct
  source 1..20: mol_type = other DNA
gtcataagagatcaccagca

SEQ ID NO: 139146 - DNA, 20 bp, synthetic construct
  source 1..20: mol_type = other DNA
agtcataagagatcaccagc

SEQ ID NO: 139147 - DNA, 20 bp, synthetic construct
  source 1..20: mol_type = other DNA
aagtcataagagatcaccag

SEQ ID NO: 139148 - DNA, 20 bp, synthetic construct
  source 1..20: mol_type = other DNA
caagtcataagagatcacca

SEQ ID NO: 139149 - DNA, 20 bp, synthetic construct
  source 1..20: mol_type = other DNA
acaagtcataagagatcacc

SEQ ID NO: 139150 - DNA, 20 bp, synthetic construct
  source 1..20: mol_type = other DNA
cacaagtcataagagatcac

SEQ ID NO: 139151 - DNA, 20 bp, synthetic construct
  source 1..20: mol_type = other DNA
gcacaagtcataagagatca

SEQ ID NO: 139152 - DNA, 20 bp, synthetic construct
  source 1..20: mol_type = other DNA
tgcacaagtcataagagatc

SEQ ID NO: 139153 - DNA, 20 bp, synthetic construct
  source 1..20: mol_type = other DNA
atgcacaagtcataagagat

SEQ ID NO: 139154 - DNA, 20 bp, synthetic construct
  source 1..20: mol_type = other DNA
gatgcacaagtcataagaga

SEQ ID NO: 139155 - DNA, 20 bp, synthetic construct
  source 1..20: mol_type = other DNA
ggatgcacaagtcataagag

SEQ ID NO: 139156 - DNA, 20 bp, synthetic construct
  source 1..20: mol_type = other DNA
tggatgcacaagtcataaga

SEQ ID NO: 139157 - DNA, 20 bp, synthetic construct
  source 1..20: mol_type = other DNA
ttggatgcacaagtcataag

SEQ ID NO: 139158 - DNA, 20 bp, synthetic construct
  source 1..20: mol_type = other DNA
tttggatgcacaagtcataa

SEQ ID NO: 139159 - DNA, 20 bp, synthetic construct
  source 1..20: mol_type = other DNA
ctttggatgcacaagtcata

SEQ ID NO: 139160 - DNA, 20 bp, synthetic construct
  source 1..20: mol_type = other DNA
actttggatgcacaagtcat

SEQ ID NO: 139161 - DNA, 20 bp, synthetic construct
  source 1..20: mol_type = other DNA
gactttggatgcacaagtca

SEQ ID NO: 139162 - DNA, 20 bp, synthetic construct
  source 1..20: mol_type = other DNA
tgactttggatgcacaagtc

SEQ ID NO: 139163 - DNA, 20 bp, synthetic construct
  source 1..20: mol_type = other DNA
ttgactttggatgcacaagt

SEQ ID NO: 139164 - DNA, 20 bp, synthetic construct
  source 1..20: mol_type = other DNA
tttgactttggatgcacaag

SEQ ID NO: 139165 - DNA, 20 bp, synthetic construct
  source 1..20: mol_type = other DNA
ttttgactttggatgcacaa

SEQ ID NO: 139166 - DNA, 20 bp, synthetic construct
  source 1..20: mol_type = other DNA
attttgactttggatgcaca

SEQ ID NO: 139167 - DNA, 20 bp, synthetic construct
  source 1..20: mol_type = other DNA
cattttgactttggatgcac

SEQ ID NO: 139168 - DNA, 20 bp, synthetic construct
  source 1..20: mol_type = other DNA
tcattttgactttggatgca

SEQ ID NO: 139169 - DNA, 20 bp, synthetic construct
  source 1..20: mol_type = other DNA
gtcattttgactttggatgc

SEQ ID NO: 139170 - DNA, 20 bp, synthetic construct
  source 1..20: mol_type = other DNA
tgtcattttgactttggatg

SEQ ID NO: 139171 - DNA, 20 bp, synthetic construct
  source 1..20: mol_type = other DNA
ttgtcattttgactttggat

SEQ ID NO: 139172 - DNA, 20 bp, synthetic construct
  source 1..20: mol_type = other DNA
tttgtcattttgactttgga

SEQ ID NO: 139173 - DNA, 20 bp, synthetic construct
  source 1..20: mol_type = other DNA
ttttgtcattttgactttgg

SEQ ID NO: 139174 - DNA, 20 bp, synthetic construct
  source 1..20: mol_type = other DNA
gttttgtcattttgactttg

SEQ ID NO: 139175 - DNA, 20 bp, synthetic construct
  source 1..20: mol_type = other DNA
ggttttgtcattttgacttt

SEQ ID NO: 139176 - DNA, 20 bp, synthetic construct
  source 1..20: mol_type = other DNA
aggttttgtcattttgactt

SEQ ID NO: 139177 - DNA, 20 bp, synthetic construct
  source 1..20: mol_type = other DNA
taggttttgtcattttgact

SEQ ID NO: 139178 - DNA, 20 bp, synthetic construct
  source 1..20: mol_type = other DNA
ctaggttttgtcattttgac

SEQ ID NO: 139179 - DNA, 20 bp, synthetic construct
  source 1..20: mol_type = other DNA
actaggttttgtcattttga

SEQ ID NO: 139180 - DNA, 20 bp, synthetic construct
  source 1..20: mol_type = other DNA
aactaggttttgtcattttg

SEQ ID NO: 139181 - DNA, 20 bp, synthetic construct
  source 1..20: mol_type = other DNA
taactaggttttgtcatttt

SEQ ID NO: 139182 - DNA, 20 bp, synthetic construct
  source 1..20: mol_type = other DNA
gtaactaggttttgtcattt

SEQ ID NO: 139183 - DNA, 20 bp, synthetic construct
  source 1..20: mol_type = other DNA
tgtaactaggttttgtcatt

SEQ ID NO: 139184 - DNA, 20 bp, synthetic construct
  source 1..20: mol_type = other DNA
ttgtaactaggttttgtcat

SEQ ID NO: 139185 - DNA, 20 bp, synthetic construct
  source 1..20: mol_type = other DNA
tttgtaactaggttttgtca

SEQ ID NO: 139186 - DNA, 20 bp, synthetic construct
  source 1..20: mol_type = other DNA
atttgtaactaggttttgtc

SEQ ID NO: 139187 - DNA, 20 bp, synthetic construct
  source 1..20: mol_type = other DNA
aatttgtaactaggttttgt

SEQ ID NO: 139188 - DNA, 20 bp, synthetic construct
  source 1..20: mol_type = other DNA
taatttgtaactaggttttg

SEQ ID NO: 139189 - DNA, 20 bp, synthetic construct
  source 1..20: mol_type = other DNA
ttaatttgtaactaggtttt

SEQ ID NO: 139190 - DNA, 20 bp, synthetic construct
  source 1..20: mol_type = other DNA
tttaatttgtaactaggttt

SEQ ID NO: 139191 - DNA, 20 bp, synthetic construct
  source 1..20: mol_type = other DNA
gtttaatttgtaactaggtt

SEQ ID NO: 139192 - DNA, 20 bp, synthetic construct
  source 1..20: mol_type = other DNA
tgtttaatttgtaactaggt

SEQ ID NO: 139193 - DNA, 20 bp, synthetic construct
  source 1..20: mol_type = other DNA
gtgtttaatttgtaactagg

SEQ ID NO: 139194 - DNA, 20 bp, synthetic construct
  source 1..20: mol_type = other DNA
tgtgtttaatttgtaactag

SEQ ID NO: 139195 - DNA, 20 bp, synthetic construct
  source 1..20: mol_type = other DNA
gtgtgtttaatttgtaacta

SEQ ID NO: 139196 - DNA, 20 bp, synthetic construct
  source 1..20: mol_type = other DNA
tgtgtgtttaatttgtaact

SEQ ID NO: 139197 - DNA, 20 bp, synthetic construct
  source 1..20: mol_type = other DNA
ctgtgtgtttaatttgtaac

SEQ ID NO: 139198 - DNA, 20 bp, synthetic construct
  source 1..20: mol_type = other DNA
gctgtgtgtttaatttgtaa

SEQ ID NO: 139199 - DNA, 20 bp, synthetic construct
  source 1..20: mol_type = other DNA
agctgtgtgtttaatttgta

SEQ ID NO: 139200 - DNA, 20 bp, synthetic construct
  source 1..20: mol_type = other DNA
aagctgtgtgtttaatttgt

SEQ ID NO: 139201 - DNA, 20 bp, synthetic construct
  source 1..20: mol_type = other DNA
aaagctgtgtgtttaatttg

SEQ ID NO: 139202 - DNA, 20 bp, synthetic construct
  source 1..20: mol_type = other DNA
gaaagctgtgtgtttaattt

SEQ ID NO: 139203 - DNA, 20 bp, synthetic construct
  source 1..20: mol_type = other DNA
agaaagctgtgtgtttaatt

SEQ ID NO: 139204 - DNA, 20 bp, synthetic construct
  source 1..20: mol_type = other DNA
cagaaagctgtgtgtttaat

SEQ ID NO: 139205 - DNA, 20 bp, synthetic construct
  source 1..20: mol_type = other DNA
acagaaagctgtgtgtttaa

SEQ ID NO: 139206 - DNA, 20 bp, synthetic construct
  source 1..20: mol_type = other DNA
tacagaaagctgtgtgttta

SEQ ID NO: 139207 - DNA, 20 bp, synthetic construct
  source 1..20: mol_type = other DNA
gtacagaaagctgtgtgttt

SEQ ID NO: 139208 - DNA, 20 bp, synthetic construct
  source 1..20: mol_type = other DNA
agtacagaaagctgtgtgtt

SEQ ID NO: 139209 - DNA, 20 bp, synthetic construct
  source 1..20: mol_type = other DNA
aagtacagaaagctgtgtgt

SEQ ID NO: 139210 - DNA, 20 bp, synthetic construct
  source 1..20: mol_type = other DNA
taagtacagaaagctgtgtg

SEQ ID NO: 139211 - DNA, 20 bp, synthetic construct
  source 1..20: mol_type = other DNA
ttaagtacagaaagctgtgt

SEQ ID NO: 139212 - DNA, 20 bp, synthetic construct
  source 1..20: mol_type = other DNA
attaagtacagaaagctgtg

SEQ ID NO: 139213 - DNA, 20 bp, synthetic construct
  source 1..20: mol_type = other DNA
aattaagtacagaaagctgt

SEQ ID NO: 139214 - DNA, 20 bp, synthetic construct
  source 1..20: mol_type = other DNA
aaattaagtacagaaagctg

SEQ ID NO: 139215 - DNA, 20 bp, synthetic construct
  source 1..20: mol_type = other DNA
caaattaagtacagaaagct

SEQ ID NO: 139216 - DNA, 20 bp, synthetic construct
  source 1..20: mol_type = other DNA
gcaaattaagtacagaaagc

SEQ ID NO: 139217 - DNA, 20 bp, synthetic construct
  source 1..20: mol_type = other DNA
agcaaattaagtacagaaag

SEQ ID NO: 139218 - DNA, 20 bp, synthetic construct
  source 1..20: mol_type = other DNA
aagcaaattaagtacagaaa

SEQ ID NO: 139219 - DNA, 20 bp, synthetic construct
  source 1..20: mol_type = other DNA
gaagcaaattaagtacagaa

SEQ ID NO: 139220 - DNA, 20 bp, synthetic construct
  source 1..20: mol_type = other DNA
tgaagcaaattaagtacaga

SEQ ID NO: 139221 - DNA, 20 bp, synthetic construct
  source 1..20: mol_type = other DNA
ctgaagcaaattaagtacag

SEQ ID NO: 139222 - DNA, 20 bp, synthetic construct
  source 1..20: mol_type = other DNA
actgaagcaaattaagtaca

SEQ ID NO: 139223 - DNA, 20 bp, synthetic construct
  source 1..20: mol_type = other DNA
cactgaagcaaattaagtac

SEQ ID NO: 139224 - DNA, 20 bp, synthetic construct
  source 1..20: mol_type = other DNA
tcactgaagcaaattaagta

SEQ ID NO: 139225 - DNA, 20 bp, synthetic construct
  source 1..20: mol_type = other DNA
ctcactgaagcaaattaagt

SEQ ID NO: 139226 - DNA, 20 bp, synthetic construct
  source 1..20: mol_type = other DNA
tctcactgaagcaaattaag

SEQ ID NO: 139227 - DNA, 20 bp, synthetic construct
  source 1..20: mol_type = other DNA
atctcactgaagcaaattaa

SEQ ID NO: 139228 - DNA, 20 bp, synthetic construct
  source 1..20: mol_type = other DNA
gatctcactgaagcaaatta

SEQ ID NO: 139229 - DNA, 20 bp, synthetic construct
  source 1..20: mol_type = other DNA
tgatctcactgaagcaaatt

SEQ ID NO: 139230 - DNA, 20 bp, synthetic construct
  source 1..20: mol_type = other DNA
gtgatctcactgaagcaaat

SEQ ID NO: 139231 - DNA, 20 bp, synthetic construct
  source 1..20: mol_type = other DNA
tgtgatctcactgaagcaaa

SEQ ID NO: 139232 - DNA, 20 bp, synthetic construct
  source 1..20: mol_type = other DNA
ctgtgatctcactgaagcaa

SEQ ID NO: 139233 - DNA, 20 bp, synthetic construct
  source 1..20: mol_type = other DNA
gctgtgatctcactgaagca

SEQ ID NO: 139234 - DNA, 20 bp, synthetic construct
  source 1..20: mol_type = other DNA
agctgtgatctcactgaagc

SEQ ID NO: 139235 - DNA, 20 bp, synthetic construct
  source 1..20: mol_type = other DNA
cagctgtgatctcactgaag

SEQ ID NO: 139236 - DNA, 20 bp, synthetic construct
  source 1..20: mol_type = other DNA
tcagctgtgatctcactgaa

SEQ ID NO: 139237 - DNA, 20 bp, synthetic construct
  source 1..20: mol_type = other DNA
ctcagctgtgatctcactga

SEQ ID NO: 139238 - DNA, 20 bp, synthetic construct
  source 1..20: mol_type = other DNA
cctcagctgtgatctcactg

SEQ ID NO: 139239 - DNA, 20 bp, synthetic construct
  source 1..20: mol_type = other DNA
tcctcagctgtgatctcact

SEQ ID NO: 139240 - DNA, 20 bp, synthetic construct
  source 1..20: mol_type = other DNA
ttcctcagctgtgatctcac

SEQ ID NO: 139241 - DNA, 20 bp, synthetic construct
  source 1..20: mol_type = other DNA
tttcctcagctgtgatctca

SEQ ID NO: 139242 - DNA, 20 bp, synthetic construct
  source 1..20: mol_type = other DNA
gtttcctcagctgtgatctc

SEQ ID NO: 139243 - DNA, 20 bp, synthetic construct
  source 1..20: mol_type = other DNA
agtttcctcagctgtgatct

SEQ ID NO: 139244 - DNA, 20 bp, synthetic construct
  source 1..20: mol_type = other DNA
tagtttcctcagctgtgatc

SEQ ID NO: 139245 - DNA, 20 bp, synthetic construct
  source 1..20: mol_type = other DNA
ctagtttcctcagctgtgat

SEQ ID NO: 139246 - DNA, 20 bp, synthetic construct
  source 1..20: mol_type = other DNA
actagtttcctcagctgtga

SEQ ID NO: 139247 - DNA, 20 bp, synthetic construct
  source 1..20: mol_type = other DNA
aactagtttcctcagctgtg

SEQ ID NO: 139248 - DNA, 20 bp, synthetic construct
  source 1..20: mol_type = other DNA
gaactagtttcctcagctgt

SEQ ID NO: 139249 - DNA, 20 bp, synthetic construct
  source 1..20: mol_type = other DNA
agaactagtttcctcagctg

SEQ ID NO: 139250 - DNA, 20 bp, synthetic construct
  source 1..20: mol_type = other DNA
cagaactagtttcctcagct

SEQ ID NO: 139251 - DNA, 20 bp, synthetic construct
  source 1..20: mol_type = other DNA
ccagaactagtttcctcagc

SEQ ID NO: 139252 - DNA, 20 bp, synthetic construct
  source 1..20: mol_type = other DNA
tccagaactagtttcctcag

SEQ ID NO: 139253 - DNA, 20 bp, synthetic construct
  source 1..20: mol_type = other DNA
ttccagaactagtttcctca

SEQ ID NO: 139254 - DNA, 20 bp, synthetic construct
  source 1..20: mol_type = other DNA
attccagaactagtttcctc

SEQ ID NO: 139255 - DNA, 20 bp, synthetic construct
  source 1..20: mol_type = other DNA
cattccagaactagtttcct

SEQ ID NO: 139256 - DNA, 20 bp, synthetic construct
  source 1..20: mol_type = other DNA
acattccagaactagtttcc

SEQ ID NO: 139257 - DNA, 20 bp, synthetic construct
  source 1..20: mol_type = other DNA
cacattccagaactagtttc

SEQ ID NO: 139258 - DNA, 20 bp, synthetic construct
  source 1..20: mol_type = other DNA
ccacattccagaactagttt

SEQ ID NO: 139259 - DNA, 20 bp, synthetic construct
  source 1..20: mol_type = other DNA
accacattccagaactagtt

SEQ ID NO: 139260 - DNA, 20 bp, synthetic construct
  source 1..20: mol_type = other DNA
aaccacattccagaactagt

SEQ ID NO: 139261 - DNA, 20 bp, synthetic construct
  source 1..20: mol_type = other DNA
taaccacattccagaactag

SEQ ID NO: 139262 - DNA, 20 bp, synthetic construct
  source 1..20: mol_type = other DNA
ctaaccacattccagaacta

SEQ ID NO: 139263 - DNA, 20 bp, synthetic construct
  source 1..20: mol_type = other DNA
actaaccacattccagaact

SEQ ID NO: 139264 - DNA, 20 bp, synthetic construct
  source 1..20: mol_type = other DNA
cactaaccacattccagaac

SEQ ID NO: 139265 - DNA, 20 bp, synthetic construct
  source 1..20: mol_type = other DNA
acactaaccacattccagaa

SEQ ID NO: 139266 - DNA, 20 bp, synthetic construct
  source 1..20: mol_type = other DNA
aacactaaccacattccaga

SEQ ID NO: 139267 - DNA, 20 bp, synthetic construct
  source 1..20: mol_type = other DNA
taacactaaccacattccag

SEQ ID NO: 139268 - DNA, 20 bp, synthetic construct
  source 1..20: mol_type = other DNA
ataacactaaccacattcca

SEQ ID NO: 139269 - DNA, 20 bp, synthetic construct
  source 1..20: mol_type = other DNA
aataacactaaccacattcc

SEQ ID NO: 139270 - DNA, 20 bp, synthetic construct
  source 1..20: mol_type = other DNA
taataacactaaccacattc

SEQ ID NO: 139271 - DNA, 20 bp, synthetic construct
  source 1..20: mol_type = other DNA
ttaataacactaaccacatt

SEQ ID NO: 139272 - DNA, 20 bp, synthetic construct
  source 1..20: mol_type = other DNA
cttaataacactaaccacat

SEQ ID NO: 139273 - DNA, 20 bp, synthetic construct
  source 1..20: mol_type = other DNA
ccttaataacactaaccaca

SEQ ID NO: 139274 - DNA, 20 bp, synthetic construct
  source 1..20: mol_type = other DNA
tccttaataacactaaccac

SEQ ID NO: 139275 - DNA, 20 bp, synthetic construct
  source 1..20: mol_type = other DNA
atccttaataacactaacca

SEQ ID NO: 139276 - DNA, 20 bp, synthetic construct
  source 1..20: mol_type = other DNA
aatccttaataacactaacc

SEQ ID NO: 139277 - DNA, 20 bp, synthetic construct
  source 1..20: mol_type = other DNA
aaatccttaataacactaac

SEQ ID NO: 139278 - DNA, 20 bp, synthetic construct
  source 1..20: mol_type = other DNA
aaaatccttaataacactaa

SEQ ID NO: 139279 - DNA, 20 bp, synthetic construct
  source 1..20: mol_type = other DNA
aaaaatccttaataacacta

SEQ ID NO: 139280 - DNA, 20 bp, synthetic construct
  source 1..20: mol_type = other DNA
caaaaatccttaataacact

SEQ ID NO: 139281 - DNA, 20 bp, synthetic construct
  source 1..20: mol_type = other DNA
tcaaaaatccttaataacac

SEQ ID NO: 139282 - DNA, 20 bp, synthetic construct
  source 1..20: mol_type = other DNA
gtcaaaaatccttaataaca

SEQ ID NO: 139283 - DNA, 20 bp, synthetic construct
  source 1..20: mol_type = other DNA
agtcaaaaatccttaataac

SEQ ID NO: 139284 - DNA, 20 bp, synthetic construct
  source 1..20: mol_type = other DNA
cagtcaaaaatccttaataa

SEQ ID NO: 139285 - DNA, 20 bp, synthetic construct
  source 1..20: mol_type = other DNA
tcagtcaaaaatccttaata

SEQ ID NO: 139286 - DNA, 20 bp, synthetic construct
  source 1..20: mol_type = other DNA
atcagtcaaaaatccttaat

SEQ ID NO: 139287 - DNA, 20 bp, synthetic construct
  source 1..20: mol_type = other DNA
gatcagtcaaaaatccttaa

SEQ ID NO: 139288 - DNA, 20 bp, synthetic construct
  source 1..20: mol_type = other DNA
tgatcagtcaaaaatcctta

SEQ ID NO: 139289 - DNA, 20 bp, synthetic construct
  source 1..20: mol_type = other DNA
atgatcagtcaaaaatcctt

SEQ ID NO: 139290 - DNA, 20 bp, synthetic construct
  source 1..20: mol_type = other DNA
tatgatcagtcaaaaatcct

SEQ ID NO: 139291 - DNA, 20 bp, synthetic construct
  source 1..20: mol_type = other DNA
atatgatcagtcaaaaatcc

SEQ ID NO: 139292 - DNA, 20 bp, synthetic construct
  source 1..20: mol_type = other DNA
catatgatcagtcaaaaatc

SEQ ID NO: 139293 - DNA, 20 bp, synthetic construct
  source 1..20: mol_type = other DNA
acatatgatcagtcaaaaat

SEQ ID NO: 139294 - DNA, 20 bp, synthetic construct
  source 1..20: mol_type = other DNA
aacatatgatcagtcaaaaa

SEQ ID NO: 139295 - DNA, 20 bp, synthetic construct
  source 1..20: mol_type = other DNA
aaacatatgatcagtcaaaa

SEQ ID NO: 139296 - DNA, 20 bp, synthetic construct
  source 1..20: mol_type = other DNA
taaacatatgatcagtcaaa

SEQ ID NO: 139297 - DNA, 20 bp, synthetic construct
  source 1..20: mol_type = other DNA
ctaaacatatgatcagtcaa

SEQ ID NO: 139298 - DNA, 20 bp, synthetic construct
  source 1..20: mol_type = other DNA
tctaaacatatgatcagtca

SEQ ID NO: 139299 - DNA, 20 bp, synthetic construct
  source 1..20: mol_type = other DNA
ttctaaacatatgatcagtc

SEQ ID NO: 139300 - DNA, 20 bp, synthetic construct
  source 1..20: mol_type = other DNA
attctaaacatatgatcagt

SEQ ID NO: 139301 - DNA, 20 bp, synthetic construct
  source 1..20: mol_type = other DNA
gattctaaacatatgatcag

SEQ ID NO: 139302 - DNA, 20 bp, synthetic construct
  source 1..20: mol_type = other DNA
agattctaaacatatgatca

SEQ ID NO: 139303 - DNA, 20 bp, synthetic construct
  source 1..20: mol_type = other DNA
aagattctaaacatatgatc

SEQ ID NO: 139304 - DNA, 20 bp, synthetic construct
  source 1..20: mol_type = other DNA
taagattctaaacatatgat

SEQ ID NO: 139305 - DNA, 20 bp, synthetic construct
  source 1..20: mol_type = other DNA
ttaagattctaaacatatga

SEQ ID NO: 139306 - DNA, 20 bp, synthetic construct
  source 1..20: mol_type = other DNA
tttaagattctaaacatatg

SEQ ID NO: 139307 - DNA, 20 bp, synthetic construct
  source 1..20: mol_type = other DNA
atttaagattctaaacatat

SEQ ID NO: 139308 - DNA, 20 bp, synthetic construct
  source 1..20: mol_type = other DNA
tatttaagattctaaacata

SEQ ID NO: 139309 - DNA, 20 bp, synthetic construct
  source 1..20: mol_type = other DNA
atatttaagattctaaacat

SEQ ID NO: 139310 - DNA, 20 bp, synthetic construct
  source 1..20: mol_type = other DNA
aatatttaagattctaaaca

SEQ ID NO: 139311 - DNA, 20 bp, synthetic construct
  source 1..20: mol_type = other DNA
aaatatttaagattctaaac

SEQ ID NO: 139312 - DNA, 20 bp, synthetic construct
  source 1..20: mol_type = other DNA
taaatatttaagattctaaa

SEQ ID NO: 139313 - DNA, 20 bp, synthetic construct
  source 1..20: mol_type = other DNA
ataaatatttaagattctaa

SEQ ID NO: 139314 - DNA, 20 bp, synthetic construct
  source 1..20: mol_type = other DNA
cataaatatttaagattcta

SEQ ID NO: 139315 - DNA, 20 bp, synthetic construct
  source 1..20: mol_type = other DNA
acataaatatttaagattct

SEQ ID NO: 139316 - DNA, 20 bp, synthetic construct
  source 1..20: mol_type = other DNA
gacataaatatttaagattc

SEQ ID NO: 139317 - DNA, 20 bp, synthetic construct
  source 1..20: mol_type = other DNA
tgacataaatatttaagatt

SEQ ID NO: 139318 - DNA, 20 bp, synthetic construct
  source 1..20: mol_type = other DNA
ttgacataaatatttaagat

SEQ ID NO: 139319 - DNA, 20 bp, synthetic construct
  source 1..20: mol_type = other DNA
cttgacataaatatttaaga

SEQ ID NO: 139320 - DNA, 20 bp, synthetic construct
  source 1..20: mol_type = other DNA
ccttgacataaatatttaag

SEQ ID NO: 139321 - DNA, 20 bp, synthetic construct
  source 1..20: mol_type = other DNA
tccttgacataaatatttaa

SEQ ID NO: 139322 - DNA, 20 bp, synthetic construct
  source 1..20: mol_type = other DNA
ttccttgacataaatattta

SEQ ID NO: 139323 - DNA, 20 bp, synthetic construct
  source 1..20: mol_type = other DNA
gttccttgacataaatattt

SEQ ID NO: 139324 - DNA, 20 bp, synthetic construct
  source 1..20: mol_type = other DNA
tgttccttgacataaatatt

SEQ ID NO: 139325 - DNA, 20 bp, synthetic construct
  source 1..20: mol_type = other DNA
gtgttccttgacataaatat

SEQ ID NO: 139326 - DNA, 20 bp, synthetic construct
  source 1..20: mol_type = other DNA
agtgttccttgacataaata

SEQ ID NO: 139327 - DNA, 20 bp, synthetic construct
  source 1..20: mol_type = other DNA
cagtgttccttgacataaat

SEQ ID NO: 139328 - DNA, 20 bp, synthetic construct
  source 1..20: mol_type = other DNA
tcagtgttccttgacataaa

SEQ ID NO: 139329 - DNA, 20 bp, synthetic construct
  source 1..20: mol_type = other DNA
ctcagtgttccttgacataa

SEQ ID NO: 139330 - DNA, 20 bp, synthetic construct
  source 1..20: mol_type = other DNA
actcagtgttccttgacata

SEQ ID NO: 139331 - DNA, 20 bp, synthetic construct
  source 1..20: mol_type = other DNA
cactcagtgttccttgacat

SEQ ID NO: 139332 - DNA, 20 bp, synthetic construct
  source 1..20: mol_type = other DNA
ccactcagtgttccttgaca

SEQ ID NO: 139333 - DNA, 20 bp, synthetic construct
  source 1..20: mol_type = other DNA
cccactcagtgttccttgac

SEQ ID NO: 139334 - DNA, 20 bp, synthetic construct
  source 1..20: mol_type = other DNA
tcccactcagtgttccttga

SEQ ID NO: 139335 - DNA, 20 bp, synthetic construct
  source 1..20: mol_type = other DNA
ttcccactcagtgttccttg

SEQ ID NO: 139336 - DNA, 20 bp, synthetic construct
  source 1..20: mol_type = other DNA
tttcccactcagtgttcctt

SEQ ID NO: 139337 - DNA, 20 bp, synthetic construct
  source 1..20: mol_type = other DNA
gtttcccactcagtgttcct

SEQ ID NO: 139338 - DNA, 20 bp, synthetic construct
  source 1..20: mol_type = other DNA
agtttcccactcagtgttcc

SEQ ID NO: 139339 - DNA, 20 bp, synthetic construct
  source 1..20: mol_type = other DNA
aagtttcccactcagtgttc

SEQ ID NO: 139340 - DNA, 20 bp, synthetic construct
  source 1..20: mol_type = other DNA
gaagtttcccactcagtgtt

SEQ ID NO: 139341 - DNA, 20 bp, synthetic construct
  source 1..20: mol_type = other DNA
agaagtttcccactcagtgt

SEQ ID NO: 139342 - DNA, 20 bp, synthetic construct
  source 1..20: mol_type = other DNA
cagaagtttcccactcagtg

SEQ ID NO: 139343 - DNA, 20 bp, synthetic construct
  source 1..20: mol_type = other DNA
ccagaagtttcccactcagt

SEQ ID NO: 139344 - DNA, 20 bp, synthetic construct
  source 1..20: mol_type = other DNA
tccagaagtttcccactcag

SEQ ID NO: 139345 - DNA, 20 bp, synthetic construct
  source 1..20: mol_type = other DNA
gtccagaagtttcccactca

SEQ ID NO: 139346 - DNA, 20 bp, synthetic construct
  source 1..20: mol_type = other DNA
agtccagaagtttcccactc

SEQ ID NO: 139347 - DNA, 20 bp, synthetic construct
  source 1..20: mol_type = other DNA
tagtccagaagtttcccact

SEQ ID NO: 139348 - DNA, 20 bp, synthetic construct
  source 1..20: mol_type = other DNA
ctagtccagaagtttcccac

SEQ ID NO: 139349 - DNA, 20 bp, synthetic construct
  source 1..20: mol_type = other DNA
cctagtccagaagtttccca

SEQ ID NO: 139350 - DNA, 20 bp, synthetic construct
  source 1..20: mol_type = other DNA
acctagtccagaagtttccc

SEQ ID NO: 139351 - DNA, 20 bp, synthetic construct
  source 1..20: mol_type = other DNA
gacctagtccagaagtttcc

SEQ ID NO: 139352 - DNA, 20 bp, synthetic construct
  source 1..20: mol_type = other DNA
agacctagtccagaagtttc

SEQ ID NO: 139353 - DNA, 20 bp, synthetic construct
  source 1..20: mol_type = other DNA
cagacctagtccagaagttt

SEQ ID NO: 139354 - DNA, 20 bp, synthetic construct
  source 1..20: mol_type = other DNA
ccagacctagtccagaagtt

SEQ ID NO: 139355 - DNA, 20 bp, synthetic construct
  source 1..20: mol_type = other DNA
tccagacctagtccagaagt

SEQ ID NO: 139356 - DNA, 20 bp, synthetic construct
  source 1..20: mol_type = other DNA
gtccagacctagtccagaag

SEQ ID NO: 139357 - DNA, 20 bp, synthetic construct
  source 1..20: mol_type = other DNA
ggtccagacctagtccagaa

SEQ ID NO: 139358 - DNA, 20 bp, synthetic construct
  source 1..20: mol_type = other DNA
tggtccagacctagtccaga

SEQ ID NO: 139359 - DNA, 20 bp, synthetic construct
  source 1..20: mol_type = other DNA
ttggtccagacctagtccag

SEQ ID NO: 139360 - DNA, 20 bp, synthetic construct
  source 1..20: mol_type = other DNA
tttggtccagacctagtcca

SEQ ID NO: 139361 - DNA, 20 bp, synthetic construct
  source 1..20: mol_type = other DNA
ctttggtccagacctagtcc

SEQ ID NO: 139362 - DNA, 20 bp, synthetic construct
  source 1..20: mol_type = other DNA
tctttggtccagacctagtc

SEQ ID NO: 139363 - DNA, 20 bp, synthetic construct
  source 1..20: mol_type = other DNA
ttctttggtccagacctagt

SEQ ID NO: 139364 - DNA, 20 bp, synthetic construct
  source 1..20: mol_type = other DNA
cttctttggtccagacctag

SEQ ID NO: 139365 - DNA, 20 bp, synthetic construct
  source 1..20: mol_type = other DNA
gcttctttggtccagaccta

SEQ ID NO: 139366 - DNA, 20 bp, synthetic construct
  source 1..20: mol_type = other DNA
tgcttctttggtccagacct

SEQ ID NO: 139367 - DNA, 20 bp, synthetic construct
  source 1..20: mol_type = other DNA
atgcttctttggtccagacc

SEQ ID NO: 139368 - DNA, 20 bp, synthetic construct
  source 1..20: mol_type = other DNA
tatgcttctttggtccagac

SEQ ID NO: 139369 - DNA, 20 bp, synthetic construct
  source 1..20: mol_type = other DNA
atatgcttctttggtccaga

SEQ ID NO: 139370 - DNA, 20 bp, synthetic construct
  source 1..20: mol_type = other DNA
catatgcttctttggtccag

SEQ ID NO: 139371 - DNA, 20 bp, synthetic construct
  source 1..20: mol_type = other DNA
acatatgcttctttggtcca

SEQ ID NO: 139372 - DNA, 20 bp, synthetic construct
  source 1..20: mol_type = other DNA
gacatatgcttctttggtcc

SEQ ID NO: 139373 - DNA, 20 bp, synthetic construct
  source 1..20: mol_type = other DNA
agacatatgcttctttggtc

SEQ ID NO: 139374 - DNA, 20 bp, synthetic construct
  source 1..20: mol_type = other DNA
aagacatatgcttctttggt

SEQ ID NO: 139375 - DNA, 20 bp, synthetic construct
  source 1..20: mol_type = other DNA
aaagacatatgcttctttgg

SEQ ID NO: 139376 - DNA, 20 bp, synthetic construct
  source 1..20: mol_type = other DNA
caaagacatatgcttctttg

SEQ ID NO: 139377 - DNA, 20 bp, synthetic construct
  source 1..20: mol_type = other DNA
tcaaagacatatgcttcttt

SEQ ID NO: 139378 - DNA, 20 bp, synthetic construct
  source 1..20: mol_type = other DNA
atcaaagacatatgcttctt

SEQ ID NO: 139379 - DNA, 20 bp, synthetic construct
  source 1..20: mol_type = other DNA
aatcaaagacatatgcttct

SEQ ID NO: 139380 - DNA, 20 bp, synthetic construct
  source 1..20: mol_type = other DNA
taatcaaagacatatgcttc

SEQ ID NO: 139381 - DNA, 20 bp, synthetic construct
  source 1..20: mol_type = other DNA
ataatcaaagacatatgctt

SEQ ID NO: 139382 - DNA, 20 bp, synthetic construct
  source 1..20: mol_type = other DNA
gataatcaaagacatatgct

SEQ ID NO: 139383 - DNA, 20 bp, synthetic construct
  source 1..20: mol_type = other DNA
agataatcaaagacatatgc

SEQ ID NO: 139384 - DNA, 20 bp, synthetic construct
  source 1..20: mol_type = other DNA
aagataatcaaagacatatg

SEQ ID NO: 139385 - DNA, 20 bp, synthetic construct
  source 1..20: mol_type = other DNA
aaagataatcaaagacatat

SEQ ID NO: 139386 - DNA, 20 bp, synthetic construct
  source 1..20: mol_type = other DNA
taaagataatcaaagacata

SEQ ID NO: 139387 - DNA, 20 bp, synthetic construct
  source 1..20: mol_type = other DNA
ttaaagataatcaaagacat

SEQ ID NO: 139388 - DNA, 20 bp, synthetic construct
  source 1..20: mol_type = other DNA
attaaagataatcaaagaca

SEQ ID NO: 139389 - DNA, 20 bp, synthetic construct
  source 1..20: mol_type = other DNA
gattaaagataatcaaagac

SEQ ID NO: 139390 - DNA, 20 bp, synthetic construct
  source 1..20: mol_type = other DNA
agattaaagataatcaaaga

SEQ ID NO: 139391 - DNA, 20 bp, synthetic construct
  source 1..20: mol_type = other DNA
tagattaaagataatcaaag

SEQ ID NO: 139392 - DNA, 20 bp, synthetic construct
  source 1..20: mol_type = other DNA
ttagattaaagataatcaaa

SEQ ID NO: 139393 - DNA, 20 bp, synthetic construct
  source 1..20: mol_type = other DNA
tttagattaaagataatcaa

SEQ ID NO: 139394 - DNA, 20 bp, synthetic construct
  source 1..20: mol_type = other DNA
ttttagattaaagataatca

SEQ ID NO: 139395 - DNA, 20 bp, synthetic construct
  source 1..20: mol_type = other DNA
cttttagattaaagataatc

SEQ ID NO: 139396 - DNA, 20 bp, synthetic construct
  source 1..20: mol_type = other DNA
tcttttagattaaagataat

SEQ ID NO: 139397 - DNA, 20 bp, synthetic construct
  source 1..20: mol_type = other DNA
atcttttagattaaagataa

SEQ ID NO: 139398 - DNA, 20 bp, synthetic construct
  source 1..20: mol_type = other DNA
aatcttttagattaaagata

SEQ ID NO: 139399 - DNA, 20 bp, synthetic construct
  source 1..20: mol_type = other DNA
aaatcttttagattaaagat

SEQ ID NO: 139400 - DNA, 20 bp, synthetic construct
  source 1..20: mol_type = other DNA
aaaatcttttagattaaaga

SEQ ID NO: 139401 - DNA, 20 bp, synthetic construct
  source 1..20: mol_type = other DNA
taaaatcttttagattaaag

SEQ ID NO: 139402 - DNA, 20 bp, synthetic construct
  source 1..20: mol_type = other DNA
ataaaatcttttagattaaa

SEQ ID NO: 139403 - DNA, 20 bp, synthetic construct
  source 1..20: mol_type = other DNA
cataaaatcttttagattaa

SEQ ID NO: 139404 - DNA, 20 bp, synthetic construct
  source 1..20: mol_type = other DNA
tcataaaatcttttagatta

SEQ ID NO: 139405 - DNA, 20 bp, synthetic construct
  source 1..20: mol_type = other DNA
ttcataaaatcttttagatt

SEQ ID NO: 139406 - DNA, 20 bp, synthetic construct
  source 1..20: mol_type = other DNA
cttcataaaatcttttagat

SEQ ID NO: 139407 - DNA, 20 bp, synthetic construct
  source 1..20: mol_type = other DNA
tcttcataaaatcttttaga

SEQ ID NO: 139408 - DNA, 20 bp, synthetic construct
  source 1..20: mol_type = other DNA
gtcttcataaaatcttttag

SEQ ID NO: 139409 - DNA, 20 bp, synthetic construct
  source 1..20: mol_type = other DNA
agtcttcataaaatctttta

SEQ ID NO: 139410 - DNA, 20 bp, synthetic construct
  source 1..20: mol_type = other DNA
tagtcttcataaaatctttt

SEQ ID NO: 139411 - DNA, 20 bp, synthetic construct
  source 1..20: mol_type = other DNA
ttagtcttcataaaatcttt

SEQ ID NO: 139412 - DNA, 20 bp, synthetic construct
  source 1..20: mol_type = other DNA
tttagtcttcataaaatctt

SEQ ID NO: 139413 - DNA, 20 bp, synthetic construct
  source 1..20: mol_type = other DNA
ctttagtcttcataaaatct

SEQ ID NO: 139414 - DNA, 20 bp, synthetic construct
  source 1..20: mol_type = other DNA
actttagtcttcataaaatc

SEQ ID NO: 139415 - DNA, 20 bp, synthetic construct
  source 1..20: mol_type = other DNA
aactttagtcttcataaaat

SEQ ID NO: 139416 - DNA, 20 bp, synthetic construct
  source 1..20: mol_type = other DNA
aaactttagtcttcataaaa

SEQ ID NO: 139417 - DNA, 20 bp, synthetic construct
  source 1..20: mol_type = other DNA
aaaactttagtcttcataaa

SEQ ID NO: 139418 - DNA, 20 bp, synthetic construct
  source 1..20: mol_type = other DNA
taaaactttagtcttcataa

SEQ ID NO: 139419 - DNA, 20 bp, synthetic construct
  source 1..20: mol_type = other DNA
ataaaactttagtcttcata

SEQ ID NO: 139420 - DNA, 20 bp, synthetic construct
  source 1..20: mol_type = other DNA
tataaaactttagtcttcat

SEQ ID NO: 139421 - DNA, 20 bp, synthetic construct
  source 1..20: mol_type = other DNA
ttataaaactttagtcttca

SEQ ID NO: 139422 - DNA, 20 bp, synthetic construct
  source 1..20: mol_type = other DNA
tttataaaactttagtcttc

SEQ ID NO: 139423 - DNA, 20 bp, synthetic construct
  source 1..20: mol_type = other DNA
atttataaaactttagtctt

SEQ ID NO: 139424 - DNA, 20 bp, synthetic construct
  source 1..20: mol_type = other DNA
tatttataaaactttagtct

SEQ ID NO: 139425 - DNA, 20 bp, synthetic construct
  source 1..20: mol_type = other DNA
ctatttataaaactttagtc

SEQ ID NO: 139426 - DNA, 20 bp, synthetic construct
  source 1..20: mol_type = other DNA
tctatttataaaactttagt

SEQ ID NO: 139427 - DNA, 20 bp, synthetic construct
  source 1..20: mol_type = other DNA
ttctatttataaaactttag

SEQ ID NO: 139428 - DNA, 20 bp, synthetic construct
  source 1..20: mol_type = other DNA
cttctatttataaaacttta

SEQ ID NO: 139429 - DNA, 20 bp, synthetic construct
  source 1..20: mol_type = other DNA
acttctatttataaaacttt

SEQ ID NO: 139430 - DNA, 20 bp, synthetic construct
  source 1..20: mol_type = other DNA
aacttctatttataaaactt

SEQ ID NO: 139431 - DNA, 20 bp, synthetic construct
  source 1..20: mol_type = other DNA
aaacttctatttataaaact

SEQ ID NO: 139432 - DNA, 20 bp, synthetic construct
  source 1..20: mol_type = other DNA
taaacttctatttataaaac

SEQ ID NO: 139433 - DNA, 20 bp, synthetic construct
  source 1..20: mol_type = other DNA
ttaaacttctatttataaaa

SEQ ID NO: 139434 - DNA, 20 bp, synthetic construct
  source 1..20: mol_type = other DNA
gttaaacttctatttataaa

SEQ ID NO: 139435 - DNA, 20 bp, synthetic construct
  source 1..20: mol_type = other DNA
agttaaacttctatttataa

SEQ ID NO: 139436 - DNA, 20 bp, synthetic construct
  source 1..20: mol_type = other DNA
cagttaaacttctatttata

SEQ ID NO: 139437 - DNA, 20 bp, synthetic construct
  source 1..20: mol_type = other DNA
tcagttaaacttctatttat

SEQ ID NO: 139438 - DNA, 20 bp, synthetic construct
  source 1..20: mol_type = other DNA
atcagttaaacttctattta

SEQ ID NO: 139439 - DNA, 20 bp, synthetic construct
  source 1..20: mol_type = other DNA
catcagttaaacttctattt

SEQ ID NO: 139440 - DNA, 20 bp, synthetic construct
  source 1..20: mol_type = other DNA
tcatcagttaaacttctatt

SEQ ID NO: 139441 - DNA, 20 bp, synthetic construct
  source 1..20: mol_type = other DNA
ttcatcagttaaacttctat

SEQ ID NO: 139442 - DNA, 20 bp, synthetic construct
  source 1..20: mol_type = other DNA
attcatcagttaaacttcta

SEQ ID NO: 139443 - DNA, 20 bp, synthetic construct
  source 1..20: mol_type = other DNA
tattcatcagttaaacttct

SEQ ID NO: 139444 - DNA, 20 bp, synthetic construct
  source 1..20: mol_type = other DNA
ttattcatcagttaaacttc

SEQ ID NO: 139445 - DNA, 20 bp, synthetic construct
  source 1..20: mol_type = other DNA
tttattcatcagttaaactt

SEQ ID NO: 139446 - DNA, 20 bp, synthetic construct
  source 1..20: mol_type = other DNA
atttattcatcagttaaact

SEQ ID NO: 139447 - DNA, 20 bp, synthetic construct
  source 1..20: mol_type = other DNA
gatttattcatcagttaaac

SEQ ID NO: 139448 - DNA, 20 bp, synthetic construct
  source 1..20: mol_type = other DNA
tgatttattcatcagttaaa

SEQ ID NO: 139449 - DNA, 20 bp, synthetic construct
  source 1..20: mol_type = other DNA
ctgatttattcatcagttaa

SEQ ID NO: 139450 - DNA, 20 bp, synthetic construct
  source 1..20: mol_type = other DNA
actgatttattcatcagtta

SEQ ID NO: 139451 - DNA, 20 bp, synthetic construct
  source 1..20: mol_type = other DNA
tactgatttattcatcagtt

SEQ ID NO: 139452 - DNA, 20 bp, synthetic construct
  source 1..20: mol_type = other DNA
atactgatttattcatcagt

SEQ ID NO: 139453 - DNA, 20 bp, synthetic construct
  source 1..20: mol_type = other DNA
aatactgatttattcatcag

SEQ ID NO: 139454 - DNA, 20 bp, synthetic construct
  source 1..20: mol_type = other DNA
taatactgatttattcatca

SEQ ID NO: 139455 - DNA, 20 bp, synthetic construct
  source 1..20: mol_type = other DNA
gtaatactgatttattcatc

SEQ ID NO: 139456 - DNA, 20 bp, synthetic construct
  source 1..20: mol_type = other DNA
tgtaatactgatttattcat

SEQ ID NO: 139457 - DNA, 20 bp, synthetic construct
  source 1..20: mol_type = other DNA
ttgtaatactgatttattca

SEQ ID NO: 139458 - DNA, 20 bp, synthetic construct
  source 1..20: mol_type = other DNA
tttgtaatactgatttattc

SEQ ID NO: 139459 - DNA, 20 bp, synthetic construct
  source 1..20: mol_type = other DNA
atttgtaatactgatttatt

SEQ ID NO: 139460 - DNA, 20 bp, synthetic construct
  source 1..20: mol_type = other DNA
tatttgtaatactgatttat

SEQ ID NO: 139461 - DNA, 20 bp, synthetic construct
  source 1..20: mol_type = other DNA
ttatttgtaatactgattta

SEQ ID NO: 139462 - DNA, 20 bp, synthetic construct
  source 1..20: mol_type = other DNA
tttatttgtaatactgattt

SEQ ID NO: 139463 - DNA, 20 bp, synthetic construct
  source 1..20: mol_type = other DNA
ttttatttgtaatactgatt

SEQ ID NO: 139464 - DNA, 20 bp, synthetic construct
  source 1..20: mol_type = other DNA
attttatttgtaatactgat

SEQ ID NO: 139465 - DNA, 20 bp, synthetic construct
  source 1..20: mol_type = other DNA
aattttatttgtaatactga

SEQ ID NO: 139466 - DNA, 20 bp, synthetic construct
  source 1..20: mol_type = other DNA
taattttatttgtaatactg

SEQ ID NO: 139467 - DNA, 20 bp, synthetic construct
  source 1..20: mol_type = other DNA
ttaattttatttgtaatact

SEQ ID NO: 139468 - DNA, 20 bp, synthetic construct
  source 1..20: mol_type = other DNA
gttaattttatttgtaatac

SEQ ID NO: 139469 - DNA, 20 bp, synthetic construct
  source 1..20: mol_type = other DNA
agttaattttatttgtaata

SEQ ID NO: 139470 - DNA, 20 bp, synthetic construct
  source 1..20: mol_type = other DNA
aagttaattttatttgtaat

SEQ ID NO: 139471 - DNA, 20 bp, synthetic construct
  source 1..20: mol_type = other DNA
aaagttaattttatttgtaa

SEQ ID NO: 139472 - DNA, 20 bp, synthetic construct
  source 1..20: mol_type = other DNA
taaagttaattttatttgta

SEQ ID NO: 139473 - DNA, 20 bp, synthetic construct
  source 1..20: mol_type = other DNA
ataaagttaattttatttgt

SEQ ID NO: 139474 - DNA, 20 bp, synthetic construct
  source 1..20: mol_type = other DNA
aataaagttaattttatttg

SEQ ID NO: 139475 - DNA, 20 bp, synthetic construct
  source 1..20: mol_type = other DNA
aaataaagttaattttattt

SEQ ID NO: 139476 - DNA, 20 bp, synthetic construct
  source 1..20: mol_type = other DNA
aaaataaagttaattttatt

SEQ ID NO: 139477 - DNA, 20 bp, synthetic construct
  source 1..20: mol_type = other DNA
aaaaataaagttaattttat

SEQ ID NO: 139478 - DNA, 20 bp, synthetic construct
  source 1..20: mol_type = other DNA
taaaaataaagttaatttta

SEQ ID NO: 139479 - DNA, 20 bp, synthetic construct
  source 1..20: mol_type = other DNA
ttaaaaataaagttaatttt

SEQ ID NO: 139480 - DNA, 20 bp, synthetic construct
  source 1..20: mol_type = other DNA
gttaaaaataaagttaattt

SEQ ID NO: 139481 - DNA, 20 bp, synthetic construct
  source 1..20: mol_type = other DNA
ggttaaaaataaagttaatt

SEQ ID NO: 139482 - DNA, 20 bp, synthetic construct
  source 1..20: mol_type = other DNA
aggttaaaaataaagttaat

SEQ ID NO: 139483 - DNA, 20 bp, synthetic construct
  source 1..20: mol_type = other DNA
gaggttaaaaataaagttaa

SEQ ID NO: 139484 - DNA, 20 bp, synthetic construct
  source 1..20: mol_type = other DNA
agaggttaaaaataaagtta

SEQ ID NO: 139485 - DNA, 20 bp, synthetic construct
  source 1..20: mol_type = other DNA
gagaggttaaaaataaagtt

SEQ ID NO: 139486 - DNA, 20 bp, synthetic construct
  source 1..20: mol_type = other DNA
agagaggttaaaaataaagt

SEQ ID NO: 139487 - DNA, 20 bp, synthetic construct
  source 1..20: mol_type = other DNA
cagagaggttaaaaataaag

SEQ ID NO: 139488 - DNA, 20 bp, synthetic construct
  source 1..20: mol_type = other DNA
ccagagaggttaaaaataaa

SEQ ID NO: 139489 - DNA, 20 bp, synthetic construct
  source 1..20: mol_type = other DNA
cccagagaggttaaaaataa

SEQ ID NO: 139490 - DNA, 20 bp, synthetic construct
  source 1..20: mol_type = other DNA
tcccagagaggttaaaaata

SEQ ID NO: 139491 - DNA, 20 bp, synthetic construct
  source 1..20: mol_type = other DNA
atcccagagaggttaaaaat

SEQ ID NO: 139492 - DNA, 20 bp, synthetic construct
  source 1..20: mol_type = other DNA
gatcccagagaggttaaaaa

SEQ ID NO: 139493 - DNA, 20 bp, synthetic construct
  source 1..20: mol_type = other DNA
agatcccagagaggttaaaa

SEQ ID NO: 139494 - DNA, 20 bp, synthetic construct
  source 1..20: mol_type = other DNA
aagatcccagagaggttaaa

SEQ ID NO: 139495 - DNA, 20 bp, synthetic construct
  source 1..20: mol_type = other DNA
aaagatcccagagaggttaa

SEQ ID NO: 139496 - DNA, 20 bp, synthetic construct
  source 1..20: mol_type = other DNA
taaagatcccagagaggtta

SEQ ID NO: 139497 - DNA, 20 bp, synthetic construct
  source 1..20: mol_type = other DNA
ctaaagatcccagagaggtt

SEQ ID NO: 139498 - DNA, 20 bp, synthetic construct
  source 1..20: mol_type = other DNA
gctaaagatcccagagaggt

SEQ ID NO: 139499 - DNA, 20 bp, synthetic construct
  source 1..20: mol_type = other DNA
ggctaaagatcccagagagg

SEQ ID NO: 139500 - DNA, 20 bp, synthetic construct
  source 1..20: mol_type = other DNA
tggctaaagatcccagagag

SEQ ID NO: 139501 - DNA, 20 bp, synthetic construct
  source 1..20: mol_type = other DNA
ctggctaaagatcccagaga

SEQ ID NO: 139502 - DNA, 20 bp, synthetic construct
  source 1..20: mol_type = other DNA
tctggctaaagatcccagag

SEQ ID NO: 139503 - DNA, 20 bp, synthetic construct
  source 1..20: mol_type = other DNA
ttctggctaaagatcccaga

SEQ ID NO: 139504 - DNA, 20 bp, synthetic construct
  source 1..20: mol_type = other DNA
attctggctaaagatcccag

SEQ ID NO: 139505 - DNA, 20 bp, synthetic construct
  source 1..20: mol_type = other DNA
cattctggctaaagatccca

SEQ ID NO: 139506 - DNA, 20 bp, synthetic construct
  source 1..20: mol_type = other DNA
tcattctggctaaagatccc

SEQ ID NO: 139507 - DNA, 20 bp, synthetic construct
  source 1..20: mol_type = other DNA
ctcattctggctaaagatcc

SEQ ID NO: 139508 - DNA, 20 bp, synthetic construct
  source 1..20: mol_type = other DNA
gctcattctggctaaagatc

SEQ ID NO: 139509 - DNA, 20 bp, synthetic construct
  source 1..20: mol_type = other DNA
tgctcattctggctaaagat

SEQ ID NO: 139510 - DNA, 20 bp, synthetic construct
  source 1..20: mol_type = other DNA
atgctcattctggctaaaga

SEQ ID NO: 139511 - DNA, 20 bp, synthetic construct
  source 1..20: mol_type = other DNA
tatgctcattctggctaaag

SEQ ID NO: 139512 - DNA, 20 bp, synthetic construct
  source 1..20: mol_type = other DNA
atatgctcattctggctaaa

SEQ ID NO: 139513 - DNA, 20 bp, synthetic construct
  source 1..20: mol_type = other DNA
tatatgctcattctggctaa

SEQ ID NO: 139514 - DNA, 20 bp, synthetic construct
  source 1..20: mol_type = other DNA
atatatgctcattctggcta

SEQ ID NO: 139515 - DNA, 20 bp, synthetic construct
  source 1..20: mol_type = other DNA
tatatatgctcattctggct

SEQ ID NO: 139516 - DNA, 20 bp, synthetic construct
  source 1..20: mol_type = other DNA
ttatatatgctcattctggc

SEQ ID NO: 139517 - DNA, 20 bp, synthetic construct
  source 1..20: mol_type = other DNA
gttatatatgctcattctgg

SEQ ID NO: 139518 - DNA, 20 bp, synthetic construct
  source 1..20: mol_type = other DNA
tgttatatatgctcattctg

SEQ ID NO: 139519 - DNA, 20 bp, synthetic construct
  source 1..20: mol_type = other DNA
ttgttatatatgctcattct

SEQ ID NO: 139520 - DNA, 20 bp, synthetic construct
  source 1..20: mol_type = other DNA
tttgttatatatgctcattc

SEQ ID NO: 139521 - DNA, 20 bp, synthetic construct
  source 1..20: mol_type = other DNA
ttttgttatatatgctcatt

SEQ ID NO: 139522 - DNA, 20 bp, synthetic construct
  source 1..20: mol_type = other DNA
cttttgttatatatgctcat

SEQ ID NO: 139523 - DNA, 20 bp, synthetic construct
  source 1..20: mol_type = other DNA
gcttttgttatatatgctca

SEQ ID NO: 139524 - DNA, 20 bp, synthetic construct
  source 1..20: mol_type = other DNA
tgcttttgttatatatgctc

SEQ ID NO: 139525 - DNA, 20 bp, synthetic construct
  source 1..20: mol_type = other DNA
ctgcttttgttatatatgct

SEQ ID NO: 139526 - DNA, 20 bp, synthetic construct
  source 1..20: mol_type = other DNA
actgcttttgttatatatgc

SEQ ID NO: 139527 - DNA, 20 bp, synthetic construct
  source 1..20: mol_type = other DNA
cactgcttttgttatatatg

SEQ ID NO: 139528 - DNA, 20 bp, synthetic construct
  source 1..20: mol_type = other DNA
tcactgcttttgttatatat

SEQ ID NO: 139529 - DNA, 20 bp, synthetic construct
  source 1..20: mol_type = other DNA
ttcactgcttttgttatata

SEQ ID NO: 139530 - DNA, 20 bp, synthetic construct
  source 1..20: mol_type = other DNA
tttcactgcttttgttatat

SEQ ID NO: 139531 - DNA, 20 bp, synthetic construct
  source 1..20: mol_type = other DNA
atttcactgcttttgttata

SEQ ID NO: 139532 - DNA, 20 bp, synthetic construct
  source 1..20: mol_type = other DNA
tatttcactgcttttgttat

SEQ ID NO: 139533 - DNA, 20 bp, synthetic construct
  source 1..20: mol_type = other DNA
ttatttcactgcttttgtta

SEQ ID NO: 139534 - DNA, 20 bp, synthetic construct
  source 1..20: mol_type = other DNA
attatttcactgcttttgtt

SEQ ID NO: 139535 - DNA, 20 bp, synthetic construct
  source 1..20: mol_type = other DNA
tattatttcactgcttttgt

SEQ ID NO: 139536 - DNA, 20 bp, synthetic construct
  source 1..20: mol_type = other DNA
atattatttcactgcttttg

SEQ ID NO: 139537 - DNA, 20 bp, synthetic construct
  source 1..20: mol_type = other DNA
catattatttcactgctttt

SEQ ID NO: 139538 - DNA, 20 bp, synthetic construct
  source 1..20: mol_type = other DNA
acatattatttcactgcttt

SEQ ID NO: 139539 - DNA, 20 bp, synthetic construct
  source 1..20: mol_type = other DNA
cacatattatttcactgctt

SEQ ID NO: 139540 - DNA, 20 bp, synthetic construct
  source 1..20: mol_type = other DNA
acacatattatttcactgct

SEQ ID NO: 139541 - DNA, 20 bp, synthetic construct
  source 1..20: mol_type = other DNA
cacacatattatttcactgc

SEQ ID NO: 139542 - DNA, 20 bp, synthetic construct
  source 1..20: mol_type = other DNA
ccacacatattatttcactg

SEQ ID NO: 139543 - DNA, 20 bp, synthetic construct
  source 1..20: mol_type = other DNA
cccacacatattatttcact

SEQ ID NO: 139544 - DNA, 20 bp, synthetic construct
  source 1..20: mol_type = other DNA
acccacacatattatttcac

SEQ ID NO: 139545 - DNA, 20 bp, synthetic construct
  source 1..20: mol_type = other DNA
gacccacacatattatttca

SEQ ID NO: 139546 - DNA, 20 bp, synthetic construct
  source 1..20: mol_type = other DNA
tgacccacacatattatttc

SEQ ID NO: 139547 - DNA, 20 bp, synthetic construct
  source 1..20: mol_type = other DNA
ctgacccacacatattattt

SEQ ID NO: 139548 - DNA, 20 bp, synthetic construct
  source 1..20: mol_type = other DNA
tctgacccacacatattatt

SEQ ID NO: 139549 - DNA, 20 bp, synthetic construct
  source 1..20: mol_type = other DNA
ttctgacccacacatattat

SEQ ID NO: 139550 - DNA, 20 bp, synthetic construct
  source 1..20: mol_type = other DNA
gttctgacccacacatatta

SEQ ID NO: 139551 - DNA, 20 bp, synthetic construct
  source 1..20: mol_type = other DNA
ggttctgacccacacatatt

SEQ ID NO: 139552 - DNA, 20 bp, synthetic construct
  source 1..20: mol_type = other DNA
gggttctgacccacacatat

SEQ ID NO: 139553 - DNA, 20 bp, synthetic construct
  source 1..20: mol_type = other DNA
tgggttctgacccacacata

SEQ ID NO: 139554 - DNA, 20 bp, synthetic construct
  source 1..20: mol_type = other DNA
gtgggttctgacccacacat

SEQ ID NO: 139555 - DNA, 20 bp, synthetic construct
  source 1..20: mol_type = other DNA
agtgggttctgacccacaca

SEQ ID NO: 139556 - DNA, 20 bp, synthetic construct
  source 1..20: mol_type = other DNA
cagtgggttctgacccacac

SEQ ID NO: 139557 - DNA, 20 bp, synthetic construct
  source 1..20: mol_type = other DNA
gcagtgggttctgacccaca

SEQ ID NO: 139558 - DNA, 20 bp, synthetic construct
  source 1..20: mol_type = other DNA
ggcagtgggttctgacccac

SEQ ID NO: 139559 - DNA, 20 bp, synthetic construct
  source 1..20: mol_type = other DNA
gggcagtgggttctgaccca

SEQ ID NO: 139560 - DNA, 20 bp, synthetic construct
  source 1..20: mol_type = other DNA
agggcagtgggttctgaccc

SEQ ID NO: 139561 - DNA, 20 bp, synthetic construct
  source 1..20: mol_type = other DNA
aagggcagtgggttctgacc

SEQ ID NO: 139562 - DNA, 20 bp, synthetic construct
  source 1..20: mol_type = other DNA
gaagggcagtgggttctgac

SEQ ID NO: 139563 - DNA, 20 bp, synthetic construct
  source 1..20: mol_type = other DNA
ggaagggcagtgggttctga

SEQ ID NO: 139564 - DNA, 20 bp, synthetic construct
  source 1..20: mol_type = other DNA
gggaagggcagtgggttctg

SEQ ID NO: 139565 - DNA, 20 bp, synthetic construct
  source 1..20: mol_type = other DNA
tgggaagggcagtgggttct

SEQ ID NO: 139566 - DNA, 20 bp, synthetic construct
  source 1..20: mol_type = other DNA
gtgggaagggcagtgggttc

SEQ ID NO: 139567 - DNA, 20 bp, synthetic construct
  source 1..20: mol_type = other DNA
agtgggaagggcagtgggtt

SEQ ID NO: 139568 - DNA, 20 bp, synthetic construct
  source 1..20: mol_type = other DNA
gagtgggaagggcagtgggt

SEQ ID NO: 139569 - DNA, 20 bp, synthetic construct
  source 1..20: mol_type = other DNA
ggagtgggaagggcagtggg

SEQ ID NO: 139570 - DNA, 20 bp, synthetic construct
  source 1..20: mol_type = other DNA
tggagtgggaagggcagtgg

SEQ ID NO: 139571 - DNA, 20 bp, synthetic construct
  source 1..20: mol_type = other DNA
gtggagtgggaagggcagtg

SEQ ID NO: 139572 - DNA, 20 bp, synthetic construct
  source 1..20: mol_type = other DNA
agtggagtgggaagggcagt

SEQ ID NO: 139573 - DNA, 20 bp, synthetic construct
  source 1..20: mol_type = other DNA
gagtggagtgggaagggcag

SEQ ID NO: 139574 - DNA, 20 bp, synthetic construct
  source 1..20: mol_type = other DNA
agagtggagtgggaagggca

SEQ ID NO: 139575 - DNA, 20 bp, synthetic construct
  source 1..20: mol_type = other DNA
gagagtggagtgggaagggc

SEQ ID NO: 139576 - DNA, 20 bp, synthetic construct
  source 1..20: mol_type = other DNA
ggagagtggagtgggaaggg

SEQ ID NO: 139577 - DNA, 20 bp, synthetic construct
  source 1..20: mol_type = other DNA
aggagagtggagtgggaagg

SEQ ID NO: 139578 - DNA, 20 bp, synthetic construct
  source 1..20: mol_type = other DNA
aaggagagtggagtgggaag

SEQ ID NO: 139579 - DNA, 20 bp, synthetic construct
  source 1..20: mol_type = other DNA
aaaggagagtggagtgggaa

SEQ ID NO: 139580 - DNA, 20 bp, synthetic construct
  source 1..20: mol_type = other DNA
aaaaggagagtggagtggga

SEQ ID NO: 139581 - DNA, 20 bp, synthetic construct
  source 1..20: mol_type = other DNA
gaaaaggagagtggagtggg

SEQ ID NO: 139582 - DNA, 20 bp, synthetic construct
  source 1..20: mol_type = other DNA
ggaaaaggagagtggagtgg

SEQ ID NO: 139583 - DNA, 20 bp, synthetic construct
  source 1..20: mol_type = other DNA
gggaaaaggagagtggagtg

SEQ ID NO: 139584 - DNA, 20 bp, synthetic construct
  source 1..20: mol_type = other DNA
agggaaaaggagagtggagt

SEQ ID NO: 139585 - DNA, 20 bp, synthetic construct
  source 1..20: mol_type = other DNA
cagggaaaaggagagtggag

SEQ ID NO: 139586 - DNA, 20 bp, synthetic construct
  source 1..20: mol_type = other DNA
tcagggaaaaggagagtgga

SEQ ID NO: 139587 - DNA, 20 bp, synthetic construct
  source 1..20: mol_type = other DNA
atcagggaaaaggagagtgg

SEQ ID NO: 139588 - DNA, 20 bp, synthetic construct
  source 1..20: mol_type = other DNA
aatcagggaaaaggagagtg

SEQ ID NO: 139589 - DNA, 20 bp, synthetic construct
  source 1..20: mol_type = other DNA
gaatcagggaaaaggagagt

SEQ ID NO: 139590 - DNA, 20 bp, synthetic construct
  source 1..20: mol_type = other DNA
agaatcagggaaaaggagag

SEQ ID NO: 139591 - DNA, 20 bp, synthetic construct
  source 1..20: mol_type = other DNA
gagaatcagggaaaaggaga

SEQ ID NO: 139592 - DNA, 20 bp, synthetic construct
  source 1..20: mol_type = other DNA
ggagaatcagggaaaaggag

SEQ ID NO: 139593 - DNA, 20 bp, synthetic construct
  source 1..20: mol_type = other DNA
aggagaatcagggaaaagga

SEQ ID NO: 139594 - DNA, 20 bp, synthetic construct
  source 1..20: mol_type = other DNA
caggagaatcagggaaaagg

SEQ ID NO: 139595 - DNA, 20 bp, synthetic construct
  source 1..20: mol_type = other DNA
acaggagaatcagggaaaag

SEQ ID NO: 139596 - DNA, 20 bp, synthetic construct
  source 1..20: mol_type = other DNA
cacaggagaatcagggaaaa

SEQ ID NO: 139597 - DNA, 20 bp, synthetic construct
  source 1..20: mol_type = other DNA
acacaggagaatcagggaaa

SEQ ID NO: 139598 - DNA, 20 bp, synthetic construct
  source 1..20: mol_type = other DNA
aacacaggagaatcagggaa

SEQ ID NO: 139599 - DNA, 20 bp, synthetic construct
  source 1..20: mol_type = other DNA
aaacacaggagaatcaggga

SEQ ID NO: 139600 - DNA, 20 bp, synthetic construct
  source 1..20: mol_type = other DNA
aaaacacaggagaatcaggg

SEQ ID NO: 139601 - DNA, 20 bp, synthetic construct
  source 1..20: mol_type = other DNA
aaaaacacaggagaatcagg

SEQ ID NO: 139602 - DNA, 20 bp, synthetic construct
  source 1..20: mol_type = other DNA
aaaaaacacaggagaatcag

SEQ ID NO: 139603 - DNA, 20 bp, synthetic construct
  source 1..20: mol_type = other DNA
gaaaaaacacaggagaatca

SEQ ID NO: 139604 - DNA, 20 bp, synthetic construct
  source 1..20: mol_type = other DNA
ggaaaaaacacaggagaatc

SEQ ID NO: 139605 - DNA, 20 bp, synthetic construct
  source 1..20: mol_type = other DNA
aggaaaaaacacaggagaat

SEQ ID NO: 139606 - DNA, 20 bp, synthetic construct
  source 1..20: mol_type = other DNA
aaggaaaaaacacaggagaa

SEQ ID NO: 139607 - DNA, 20 bp, synthetic construct
  source 1..20: mol_type = other DNA
gaaggaaaaaacacaggaga

SEQ ID NO: 139608 - DNA, 20 bp, synthetic construct
  source 1..20: mol_type = other DNA
agaaggaaaaaacacaggag

SEQ ID NO: 139609 - DNA, 20 bp, synthetic construct
  source 1..20: mol_type = other DNA
aagaaggaaaaaacacagga

SEQ ID NO: 139610 - DNA, 20 bp, synthetic construct
  source 1..20: mol_type = other DNA
aaagaaggaaaaaacacagg

SEQ ID NO: 139611 - DNA, 20 bp, synthetic construct
  source 1..20: mol_type = other DNA
taaagaaggaaaaaacacag

SEQ ID NO: 139612 - DNA, 20 bp, synthetic construct
  source 1..20: mol_type = other DNA
gtaaagaaggaaaaaacaca

SEQ ID NO: 139613 - DNA, 20 bp, synthetic construct
  source 1..20: mol_type = other DNA
ggtaaagaaggaaaaaacac

SEQ ID NO: 139614 - DNA, 20 bp, synthetic construct
  source 1..20: mol_type = other DNA
aggtaaagaaggaaaaaaca

SEQ ID NO: 139615 - DNA, 20 bp, synthetic construct
  source 1..20: mol_type = other DNA
aaggtaaagaaggaaaaaac

SEQ ID NO: 139616 - DNA, 20 bp, synthetic construct
  source 1..20: mol_type = other DNA
taaggtaaagaaggaaaaaa

SEQ ID NO: 139617 - DNA, 20 bp, synthetic construct
  source 1..20: mol_type = other DNA
ataaggtaaagaaggaaaaa

SEQ ID NO: 139618 - DNA, 20 bp, synthetic construct
  source 1..20: mol_type = other DNA
gataaggtaaagaaggaaaa

SEQ ID NO: 139619 - DNA, 20 bp, synthetic construct
  source 1..20: mol_type = other DNA
agataaggtaaagaaggaaa

SEQ ID NO: 139620 - DNA, 20 bp, synthetic construct
  source 1..20: mol_type = other DNA
aagataaggtaaagaaggaa

SEQ ID NO: 139621 - DNA, 20 bp, synthetic construct
  source 1..20: mol_type = other DNA
caagataaggtaaagaagga

SEQ ID NO: 139622 - DNA, 20 bp, synthetic construct
  source 1..20: mol_type = other DNA
ccaagataaggtaaagaagg

SEQ ID NO: 139623 - DNA, 20 bp, synthetic construct
  source 1..20: mol_type = other DNA
accaagataaggtaaagaag

SEQ ID NO: 139624 - DNA, 20 bp, synthetic construct
  source 1..20: mol_type = other DNA
aaccaagataaggtaaagaa

SEQ ID NO: 139625 - DNA, 20 bp, synthetic construct
  source 1..20: mol_type = other DNA
gaaccaagataaggtaaaga

SEQ ID NO: 139626 - DNA, 20 bp, synthetic construct
  source 1..20: mol_type = other DNA
ggaaccaagataaggtaaag

SEQ ID NO: 139627 - DNA, 20 bp, synthetic construct
  source 1..20: mol_type = other DNA
aggaaccaagataaggtaaa

SEQ ID NO: 139628 - DNA, 20 bp, synthetic construct
  source 1..20: mol_type = other DNA
aaggaaccaagataaggtaa

SEQ ID NO: 139629 - DNA, 20 bp, synthetic construct
  source 1..20: mol_type = other DNA
aaaggaaccaagataaggta

SEQ ID NO: 139630 - DNA, 20 bp, synthetic construct
  source 1..20: mol_type = other DNA
aaaaggaaccaagataaggt

SEQ ID NO: 139631 - DNA, 20 bp, synthetic construct
  source 1..20: mol_type = other DNA
aaaaaggaaccaagataagg

SEQ ID NO: 139632 - DNA, 20 bp, synthetic construct
  source 1..20: mol_type = other DNA
aaaaaaggaaccaagataag

SEQ ID NO: 139633 - DNA, 20 bp, synthetic construct
  source 1..20: mol_type = other DNA
aaaaaaaggaaccaagataa

SEQ ID NO: 139634 - DNA, 20 bp, synthetic construct
  source 1..20: mol_type = other DNA
aaaaaaaaggaaccaagata

SEQ ID NO: 139635 - DNA, 20 bp, synthetic construct
  source 1..20: mol_type = other DNA
aaaaaaaaaggaaccaagat

SEQ ID NO: 139636 - DNA, 20 bp, synthetic construct
  source 1..20: mol_type = other DNA
aaaaaaaaaaggaaccaaga

SEQ ID NO: 139637 - DNA, 20 bp, synthetic construct
  source 1..20: mol_type = other DNA
aaaaaaaaaaaggaaccaag

SEQ ID NO: 139638 - DNA, 20 bp, synthetic construct
  source 1..20: mol_type = other DNA
aaaaaaaaaaaaggaaccaa

SEQ ID NO: 139639 - DNA, 20 bp, synthetic construct
  source 1..20: mol_type = other DNA
aaaaaaaaaaaaaggaacca

SEQ ID NO: 139640 - DNA, 20 bp, synthetic construct
  source 1..20: mol_type = other DNA
aaaaaaaaaaaaaaggaacc

SEQ ID NO: 139641 - DNA, 20 bp, synthetic construct
  source 1..20: mol_type = other DNA
aaaaaaaaaaaaaaaggaac

SEQ ID NO: 139642 - DNA, 20 bp, synthetic construct
  source 1..20: mol_type = other DNA
gaaaaaaaaaaaaaaaggaa

SEQ ID NO: 139643 - DNA, 20 bp, synthetic construct
  source 1..20: mol_type = other DNA
agaaaaaaaaaaaaaaagga

SEQ ID NO: 139644 - DNA, 20 bp, synthetic construct
  source 1..20: mol_type = other DNA
aagaaaaaaaaaaaaaaagg

SEQ ID NO: 139645 - DNA, 20 bp, synthetic construct
  source 1..20: mol_type = other DNA
aaagaaaaaaaaaaaaaaag

SEQ ID NO: 139646 - DNA, 20 bp, synthetic construct
  source 1..20: mol_type = other DNA
aaaagaaaaaaaaaaaaaaa

SEQ ID NO: 139647 - DNA, 20 bp, synthetic construct
  source 1..20: mol_type = other DNA
caaaagaaaaaaaaaaaaaa

SEQ ID NO: 139648 - DNA, 20 bp, synthetic construct
  source 1..20: mol_type = other DNA
tcaaaagaaaaaaaaaaaaa

SEQ ID NO: 139649 - DNA, 20 bp, synthetic construct
  source 1..20: mol_type = other DNA
ctcaaaagaaaaaaaaaaaa

SEQ ID NO: 139650 - DNA, 20 bp, synthetic construct
  source 1..20: mol_type = other DNA
tctcaaaagaaaaaaaaaaa

SEQ ID NO: 139651 - DNA, 20 bp, synthetic construct
  source 1..20: mol_type = other DNA
atctcaaaagaaaaaaaaaa

SEQ ID NO: 139652 - DNA, 20 bp, synthetic construct
  source 1..20: mol_type = other DNA
catctcaaaagaaaaaaaaa

SEQ ID NO: 139653 - DNA, 20 bp, synthetic construct
  source 1..20: mol_type = other DNA
ccatctcaaaagaaaaaaaa

SEQ ID NO: 139654 - DNA, 20 bp, synthetic construct
  source 1..20: mol_type = other DNA
tccatctcaaaagaaaaaaa

SEQ ID NO: 139655 - DNA, 20 bp, synthetic construct
  source 1..20: mol_type = other DNA
ctccatctcaaaagaaaaaa

SEQ ID NO: 139656 - DNA, 20 bp, synthetic construct
  source 1..20: mol_type = other DNA
actccatctcaaaagaaaaa

SEQ ID NO: 139657 - DNA, 20 bp, synthetic construct
  source 1..20: mol_type = other DNA
gactccatctcaaaagaaaa

SEQ ID NO: 139658 - DNA, 20 bp, synthetic construct
  source 1..20: mol_type = other DNA
agactccatctcaaaagaaa

SEQ ID NO: 139659 - DNA, 20 bp, synthetic construct
  source 1..20: mol_type = other DNA
gagactccatctcaaaagaa

SEQ ID NO: 139660 - DNA, 20 bp, synthetic construct
  source 1..20: mol_type = other DNA
tgagactccatctcaaaaga

SEQ ID NO: 139661 - DNA, 20 bp, synthetic construct
  source 1..20: mol_type = other DNA
gtgagactccatctcaaaag

SEQ ID NO: 139662 - DNA, 20 bp, synthetic construct
  source 1..20: mol_type = other DNA
agtgagactccatctcaaaa

SEQ ID NO: 139663 - DNA, 20 bp, synthetic construct
  source 1..20: mol_type = other DNA
gagtgagactccatctcaaa

SEQ ID NO: 139664 - DNA, 20 bp, synthetic construct
  source 1..20: mol_type = other DNA
agagtgagactccatctcaa

SEQ ID NO: 139665 - DNA, 20 bp, synthetic construct
  source 1..20: mol_type = other DNA
cagagtgagactccatctca

SEQ ID NO: 139666 - DNA, 20 bp, synthetic construct
  source 1..20: mol_type = other DNA
acagagtgagactccatctc

SEQ ID NO: 139667 - DNA, 20 bp, synthetic construct
  source 1..20: mol_type = other DNA
gacagagtgagactccatct

SEQ ID NO: 139668 - DNA, 20 bp, synthetic construct
  source 1..20: mol_type = other DNA
cgacagagtgagactccatc

SEQ ID NO: 139669 - DNA, 20 bp, synthetic construct
  source 1..20: mol_type = other DNA
acgacagagtgagactccat

SEQ ID NO: 139670 - DNA, 20 bp, synthetic construct
  source 1..20: mol_type = other DNA
gacgacagagtgagactcca

SEQ ID NO: 139671 - DNA, 20 bp, synthetic construct
  source 1..20: mol_type = other DNA
ggacgacagagtgagactcc

SEQ ID NO: 139672 - DNA, 20 bp, synthetic construct
  source 1..20: mol_type = other DNA
tggacgacagagtgagactc

SEQ ID NO: 139673 - DNA, 20 bp, synthetic construct
  source 1..20: mol_type = other DNA
ctggacgacagagtgagact

SEQ ID NO: 139674 - DNA, 20 bp, synthetic construct
  source 1..20: mol_type = other DNA
cctggacgacagagtgagac

SEQ ID NO: 139675 - DNA, 20 bp, synthetic construct
  source 1..20: mol_type = other DNA
gcctggacgacagagtgaga

SEQ ID NO: 139676 - DNA, 20 bp, synthetic construct
  source 1..20: mol_type = other DNA
agcctggacgacagagtgag

SEQ ID NO: 139677 - DNA, 20 bp, synthetic construct
  source 1..20: mol_type = other DNA
cagcctggacgacagagtga

SEQ ID NO: 139678 - DNA, 20 bp, synthetic construct
  source 1..20: mol_type = other DNA
ccagcctggacgacagagtg

SEQ ID NO: 139679 - DNA, 20 bp, synthetic construct
  source 1..20: mol_type = other DNA
tccagcctggacgacagagt

SEQ ID NO: 139680 - DNA, 20 bp, synthetic construct
  source 1..20: mol_type = other DNA
ctccagcctggacgacagag

SEQ ID NO: 139681 - DNA, 20 bp, synthetic construct
  source 1..20: mol_type = other DNA
actccagcctggacgacaga

SEQ ID NO: 139682 - DNA, 20 bp, synthetic construct
  source 1..20: mol_type = other DNA
cactccagcctggacgacag

SEQ ID NO: 139683 - DNA, 20 bp, synthetic construct
  source 1..20: mol_type = other DNA
gcactccagcctggacgaca

SEQ ID NO: 139684 - DNA, 20 bp, synthetic construct
  source 1..20: mol_type = other DNA
tgcactccagcctggacgac

SEQ ID NO: 139685 - DNA, 20 bp, synthetic construct
  source 1..20: mol_type = other DNA
ctgcactccagcctggacga

SEQ ID NO: 139686 - DNA, 20 bp, synthetic construct
  source 1..20: mol_type = other DNA
actgcactccagcctggacg

SEQ ID NO: 139687 - DNA, 20 bp, synthetic construct
  source 1..20: mol_type = other DNA
cactgcactccagcctggac

SEQ ID NO: 139688 - DNA, 20 bp, synthetic construct
  source 1..20: mol_type = other DNA
ccactgcactccagcctgga

SEQ ID NO: 139689 - DNA, 20 bp, synthetic construct
  source 1..20: mol_type = other DNA
accactgcactccagcctgg

SEQ ID NO: 139690 - DNA, 20 bp, synthetic construct
  source 1..20: mol_type = other DNA
caccactgcactccagcctg

SEQ ID NO: 139691 - DNA, 20 bp, synthetic construct
  source 1..20: mol_type = other DNA
gcaccactgcactccagcct

SEQ ID NO: 139692 - DNA, 20 bp, synthetic construct
  source 1..20: mol_type = other DNA
cgcaccactgcactccagcc

SEQ ID NO: 139693 - DNA, 20 bp, synthetic construct
  source 1..20: mol_type = other DNA
tcgcaccactgcactccagc

SEQ ID NO: 139694 - DNA, 20 bp, synthetic construct
  source 1..20: mol_type = other DNA
atcgcaccactgcactccag

SEQ ID NO: 139695 - DNA, 20 bp, synthetic construct
  source 1..20: mol_type = other DNA
gatcgcaccactgcactcca

SEQ ID NO: 139696 - DNA, 20 bp, synthetic construct
  source 1..20: mol_type = other DNA
agatcgcaccactgcactcc

SEQ ID NO: 139697 - DNA, 20 bp, synthetic construct
  source 1..20: mol_type = other DNA
gagatcgcaccactgcactc

SEQ ID NO: 139698 - DNA, 20 bp, synthetic construct
  source 1..20: mol_type = other DNA
cgagatcgcaccactgcact

SEQ ID NO: 139699 - DNA, 20 bp, synthetic construct
  source 1..20: mol_type = other DNA
ccgagatcgcaccactgcac

SEQ ID NO: 139700 - DNA, 20 bp, synthetic construct
  source 1..20: mol_type = other DNA
gccgagatcgcaccactgca

SEQ ID NO: 139701 - DNA, 20 bp, synthetic construct
  source 1..20: mol_type = other DNA
agccgagatcgcaccactgc

SEQ ID NO: 139702 - DNA, 20 bp, synthetic construct
  source 1..20: mol_type = other DNA
gagccgagatcgcaccactg

SEQ ID NO: 139703 - DNA, 20 bp, synthetic construct
  source 1..20: mol_type = other DNA
tgagccgagatcgcaccact

SEQ ID NO: 139704 - DNA, 20 bp, synthetic construct
  source 1..20: mol_type = other DNA
gtgagccgagatcgcaccac

SEQ ID NO: 139705 - DNA, 20 bp, synthetic construct
  source 1..20: mol_type = other DNA
agtgagccgagatcgcacca

SEQ ID NO: 139706 - DNA, 20 bp, synthetic construct
  source 1..20: mol_type = other DNA
cagtgagccgagatcgcacc

SEQ ID NO: 139707 - DNA, 20 bp, synthetic construct
  source 1..20: mol_type = other DNA
gcagtgagccgagatcgcac

SEQ ID NO: 139708 - DNA, 20 bp, synthetic construct
  source 1..20: mol_type = other DNA
tgcagtgagccgagatcgca

SEQ ID NO: 139709 - DNA, 20 bp, synthetic construct
  source 1..20: mol_type = other DNA
ttgcagtgagccgagatcgc

SEQ ID NO: 139710 - DNA, 20 bp, synthetic construct
  source 1..20: mol_type = other DNA
gttgcagtgagccgagatcg

SEQ ID NO: 139711 - DNA, 20 bp, synthetic construct
  source 1..20: mol_type = other DNA
ggttgcagtgagccgagatc

SEQ ID NO: 139712 - DNA, 20 bp, synthetic construct
  source 1..20: mol_type = other DNA
aggttgcagtgagccgagat

SEQ ID NO: 139713 - DNA, 20 bp, synthetic construct
  source 1..20: mol_type = other DNA
gaggttgcagtgagccgaga

SEQ ID NO: 139714 - DNA, 20 bp, synthetic construct
  source 1..20: mol_type = other DNA
ggaggttgcagtgagccgag

SEQ ID NO: 139715 - DNA, 20 bp, synthetic construct
  source 1..20: mol_type = other DNA
cggaggttgcagtgagccga

SEQ ID NO: 139716 - DNA, 20 bp, synthetic construct
  source 1..20: mol_type = other DNA
gcggaggttgcagtgagccg

SEQ ID NO: 139717 - DNA, 20 bp, synthetic construct
  source 1..20: mol_type = other DNA
ggcggaggttgcagtgagcc

SEQ ID NO: 139718 - DNA, 20 bp, synthetic construct
  source 1..20: mol_type = other DNA
aggcggaggttgcagtgagc

SEQ ID NO: 139719 - DNA, 20 bp, synthetic construct
  source 1..20: mol_type = other DNA
gaggcggaggttgcagtgag

SEQ ID NO: 139720 - DNA, 20 bp, synthetic construct
  source 1..20: mol_type = other DNA
ggaggcggaggttgcagtga

SEQ ID NO: 139721 - DNA, 20 bp, synthetic construct
  source 1..20: mol_type = other DNA
aggaggcggaggttgcagtg

SEQ ID NO: 139722 - DNA, 20 bp, synthetic construct
  source 1..20: mol_type = other DNA
taggaggcggaggttgcagt

SEQ ID NO: 139723 - DNA, 20 bp, synthetic construct
  source 1..20: mol_type = other DNA
ctaggaggcggaggttgcag

SEQ ID NO: 139724 - DNA, 20 bp, synthetic construct
  source 1..20: mol_type = other DNA
cctaggaggcggaggttgca

SEQ ID NO: 139725 - DNA, 20 bp, synthetic construct
  source 1..20: mol_type = other DNA
acctaggaggcggaggttgc

SEQ ID NO: 139726 - DNA, 20 bp, synthetic construct
  source 1..20: mol_type = other DNA
aacctaggaggcggaggttg

SEQ ID NO: 139727 - DNA, 20 bp, synthetic construct
  source 1..20: mol_type = other DNA
gaacctaggaggcggaggtt

SEQ ID NO: 139728 - DNA, 20 bp, synthetic construct
  source 1..20: mol_type = other DNA
tgaacctaggaggcggaggt

SEQ ID NO: 139729 - DNA, 20 bp, synthetic construct
  source 1..20: mol_type = other DNA
ttgaacctaggaggcggagg

SEQ ID NO: 139730 - DNA, 20 bp, synthetic construct
  source 1..20: mol_type = other DNA
cttgaacctaggaggcggag

SEQ ID NO: 139731 - DNA, 20 bp, synthetic construct
  source 1..20: mol_type = other DNA
gcttgaacctaggaggcgga

SEQ ID NO: 139732 - DNA, 20 bp, synthetic construct
  source 1..20: mol_type = other DNA
tgcttgaacctaggaggcgg

SEQ ID NO: 139733 - DNA, 20 bp, synthetic construct
  source 1..20: mol_type = other DNA
ttgcttgaacctaggaggcg

SEQ ID NO: 139734 - DNA, 20 bp, synthetic construct
  source 1..20: mol_type = other DNA
attgcttgaacctaggaggc

SEQ ID NO: 139735 - DNA, 20 bp, synthetic construct
  source 1..20: mol_type = other DNA
aattgcttgaacctaggagg

SEQ ID NO: 139736 - DNA, 20 bp, synthetic construct
  source 1..20: mol_type = other DNA
gaattgcttgaacctaggag

SEQ ID NO: 139737 - DNA, 20 bp, synthetic construct
  source 1..20: mol_type = other DNA
agaattgcttgaacctagga

SEQ ID NO: 139738 - DNA, 20 bp, synthetic construct
  source 1..20: mol_type = other DNA
gagaattgcttgaacctagg

SEQ ID NO: 139739 - DNA, 20 bp, synthetic construct
  source 1..20: mol_type = other DNA
agagaattgcttgaacctag

SEQ ID NO: 139740 - DNA, 20 bp, synthetic construct
  source 1..20: mol_type = other DNA
cagagaattgcttgaaccta

SEQ ID NO: 139741 - DNA, 20 bp, synthetic construct
  source 1..20: mol_type = other DNA
gcagagaattgcttgaacct

SEQ ID NO: 139742 - DNA, 20 bp, synthetic construct
  source 1..20: mol_type = other DNA
ggcagagaattgcttgaacc

SEQ ID NO: 139743 - DNA, 20 bp, synthetic construct
  source 1..20: mol_type = other DNA
aggcagagaattgcttgaac

SEQ ID NO: 139744 - DNA, 20 bp, synthetic construct
  source 1..20: mol_type = other DNA
gaggcagagaattgcttgaa

SEQ ID NO: 139745 - DNA, 20 bp, synthetic construct
  source 1..20: mol_type = other DNA
tgaggcagagaattgcttga

SEQ ID NO: 139746 - DNA, 20 bp, synthetic construct
  source 1..20: mol_type = other DNA
ctgaggcagagaattgcttg

SEQ ID NO: 139747 - DNA, 20 bp, synthetic construct
  source 1..20: mol_type = other DNA
gctgaggcagagaattgctt

SEQ ID NO: 139748 - DNA, 20 bp, synthetic construct
  source 1..20: mol_type = other DNA
agctgaggcagagaattgct

SEQ ID NO: 139749 - DNA, 20 bp, synthetic construct
  source 1..20: mol_type = other DNA
aagctgaggcagagaattgc

SEQ ID NO: 139750 - DNA, 20 bp, synthetic construct
  source 1..20: mol_type = other DNA
gaagctgaggcagagaattg

SEQ ID NO: 139751 - DNA, 20 bp, synthetic construct
  source 1..20: mol_type = other DNA
ggaagctgaggcagagaatt

SEQ ID NO: 139752 - DNA, 20 bp, synthetic construct
  source 1..20: mol_type = other DNA
tggaagctgaggcagagaat

SEQ ID NO: 139753 - DNA, 20 bp, synthetic construct
  source 1..20: mol_type = other DNA
ctggaagctgaggcagagaa

SEQ ID NO: 139754 - DNA, 20 bp, synthetic construct
  source 1..20: mol_type = other DNA
tctggaagctgaggcagaga

SEQ ID NO: 139755 - DNA, 20 bp, synthetic construct
  source 1..20: mol_type = other DNA
ctctggaagctgaggcagag

SEQ ID NO: 139756 - DNA, 20 bp, synthetic construct
  source 1..20: mol_type = other DNA
actctggaagctgaggcaga

SEQ ID NO: 139757 - DNA, 20 bp, synthetic construct
  source 1..20: mol_type = other DNA
tactctggaagctgaggcag

SEQ ID NO: 139758 - DNA, 20 bp, synthetic construct
  source 1..20: mol_type = other DNA
ctactctggaagctgaggca

SEQ ID NO: 139759 - DNA, 20 bp, synthetic construct
  source 1..20: mol_type = other DNA
gctactctggaagctgaggc

SEQ ID NO: 139760 - DNA, 20 bp, synthetic construct
  source 1..20: mol_type = other DNA
agctactctggaagctgagg

SEQ ID NO: 139761 - DNA, 20 bp, synthetic construct
  source 1..20: mol_type = other DNA
cagctactctggaagctgag

SEQ ID NO: 139762 - DNA, 20 bp, synthetic construct
  source 1..20: mol_type = other DNA
ccagctactctggaagctga

SEQ ID NO: 139763 - DNA, 20 bp, synthetic construct
  source 1..20: mol_type = other DNA
cccagctactctggaagctg

SEQ ID NO: 139764 - DNA, 20 bp, synthetic construct
  source 1..20: mol_type = other DNA
tcccagctactctggaagct

SEQ ID NO: 139765 - DNA, 20 bp, synthetic construct
  source 1..20: mol_type = other DNA
atcccagctactctggaagc

SEQ ID NO: 139766 - DNA, 20 bp, synthetic construct
  source 1..20: mol_type = other DNA
aatcccagctactctggaag

SEQ ID NO: 139767 - DNA, 20 bp, synthetic construct
  source 1..20: mol_type = other DNA
taatcccagctactctggaa

SEQ ID NO: 139768 - DNA, 20 bp, synthetic construct
  source 1..20: mol_type = other DNA
gtaatcccagctactctgga

SEQ ID NO: 139769 - DNA, 20 bp, synthetic construct
  source 1..20: mol_type = other DNA
tgtaatcccagctactctgg

SEQ ID NO: 139770 - DNA, 20 bp, synthetic construct
  source 1..20: mol_type = other DNA
ctgtaatcccagctactctg

SEQ ID NO: 139771 - DNA, 20 bp, synthetic construct
  source 1..20: mol_type = other DNA
cctgtaatcccagctactct

SEQ ID NO: 139772 - DNA, 20 bp, synthetic construct
  source 1..20: mol_type = other DNA
gcctgtaatcccagctactc

SEQ ID NO: 139773 - DNA, 20 bp, synthetic construct
  source 1..20: mol_type = other DNA
cgcctgtaatcccagctact

SEQ ID NO: 139774 - DNA, 20 bp, synthetic construct
  source 1..20: mol_type = other DNA
gcgcctgtaatcccagctac

SEQ ID NO: 139775 - DNA, 20 bp, synthetic construct
  source 1..20: mol_type = other DNA
ggcgcctgtaatcccagcta

SEQ ID NO: 139776 - DNA, 20 bp, synthetic construct
  source 1..20: mol_type = other DNA
aggcgcctgtaatcccagct

SEQ ID NO: 139777 - DNA, 20 bp, synthetic construct
  source 1..20: mol_type = other DNA
caggcgcctgtaatcccagc

SEQ ID NO: 139778 - DNA, 20 bp, synthetic construct
  source 1..20: mol_type = other DNA
gcaggcgcctgtaatcccag

SEQ ID NO: 139779 - DNA, 20 bp, synthetic construct
  source 1..20: mol_type = other DNA
agcaggcgcctgtaatccca

SEQ ID NO: 139780 - DNA, 20 bp, synthetic construct
  source 1..20: mol_type = other DNA
cagcaggcgcctgtaatccc

SEQ ID NO: 139781 - DNA, 20 bp, synthetic construct
  source 1..20: mol_type = other DNA
gcagcaggcgcctgtaatcc

SEQ ID NO: 139782 - DNA, 20 bp, synthetic construct
  source 1..20: mol_type = other DNA
ggcagcaggcgcctgtaatc

SEQ ID NO: 139783 - DNA, 20 bp, synthetic construct
  source 1..20: mol_type = other DNA
tggcagcaggcgcctgtaat

SEQ ID NO: 139784 - DNA, 20 bp, synthetic construct
  source 1..20: mol_type = other DNA
gtggcagcaggcgcctgtaa

SEQ ID NO: 139785 - DNA, 20 bp, synthetic construct
  source 1..20: mol_type = other DNA
tgtggcagcaggcgcctgta

SEQ ID NO: 139786 - DNA, 20 bp, synthetic construct
  source 1..20: mol_type = other DNA
gtgtggcagcaggcgcctgt

SEQ ID NO: 139787 - DNA, 20 bp, synthetic construct
  source 1..20: mol_type = other DNA
ggtgtggcagcaggcgcctg

SEQ ID NO: 139788 - DNA, 20 bp, synthetic construct
  source 1..20: mol_type = other DNA
gggtgtggcagcaggcgcct

SEQ ID NO: 139789 - DNA, 20 bp, synthetic construct
  source 1..20: mol_type = other DNA
tgggtgtggcagcaggcgcc

SEQ ID NO: 139790 - DNA, 20 bp, synthetic construct
  source 1..20: mol_type = other DNA
ctgggtgtggcagcaggcgc

SEQ ID NO: 139791 - DNA, 20 bp, synthetic construct
  source 1..20: mol_type = other DNA
gctgggtgtggcagcaggcg

SEQ ID NO: 139792 - DNA, 20 bp, synthetic construct
  source 1..20: mol_type = other DNA
agctgggtgtggcagcaggc

SEQ ID NO: 139793 - DNA, 20 bp, synthetic construct
  source 1..20: mol_type = other DNA
tagctgggtgtggcagcagg

SEQ ID NO: 139794 - DNA, 20 bp, synthetic construct
  source 1..20: mol_type = other DNA
ttagctgggtgtggcagcag

SEQ ID NO: 139795 - DNA, 20 bp, synthetic construct
  source 1..20: mol_type = other DNA
attagctgggtgtggcagca

SEQ ID NO: 139796 - DNA, 20 bp, synthetic construct
  source 1..20: mol_type = other DNA
aattagctgggtgtggcagc

SEQ ID NO: 139797 - DNA, 20 bp, synthetic construct
  source 1..20: mol_type = other DNA
aaattagctgggtgtggcag

SEQ ID NO: 139798 - DNA, 20 bp, synthetic construct
  source 1..20: mol_type = other DNA
aaaattagctgggtgtggca

SEQ ID NO: 139799 - DNA, 20 bp, synthetic construct
  source 1..20: mol_type = other DNA
aaaaattagctgggtgtggc

SEQ ID NO: 139800 - DNA, 20 bp, synthetic construct
  source 1..20: mol_type = other DNA
aaaaaattagctgggtgtgg

SEQ ID NO: 139801 - DNA, 20 bp, synthetic construct
  source 1..20: mol_type = other DNA
aaaaaaattagctgggtgtg

SEQ ID NO: 139802 - DNA, 20 bp, synthetic construct
  source 1..20: mol_type = other DNA
aaaaaaaattagctgggtgt

SEQ ID NO: 139803 - DNA, 20 bp, synthetic construct
  source 1..20: mol_type = other DNA
caaaaaaaattagctgggtg

SEQ ID NO: 139804 - DNA, 20 bp, synthetic construct
  source 1..20: mol_type = other DNA
acaaaaaaaattagctgggt

SEQ ID NO: 139805 - DNA, 20 bp, synthetic construct
  source 1..20: mol_type = other DNA
tacaaaaaaaattagctggg

SEQ ID NO: 139806 - DNA, 20 bp, synthetic construct
  source 1..20: mol_type = other DNA
atacaaaaaaaattagctgg

SEQ ID NO: 139807 - DNA, 20 bp, synthetic construct
  source 1..20: mol_type = other DNA
aatacaaaaaaaattagctg

SEQ ID NO: 139808 - DNA, 20 bp, synthetic construct
  source 1..20: mol_type = other DNA
aaatacaaaaaaaattagct

SEQ ID NO: 139809 - DNA, 20 bp, synthetic construct
  source 1..20: mol_type = other DNA
aaaatacaaaaaaaattagc

SEQ ID NO: 139810 - DNA, 20 bp, synthetic construct
  source 1..20: mol_type = other DNA
aaaaatacaaaaaaaattag

SEQ ID NO: 139811 - DNA, 20 bp, synthetic construct
  source 1..20: mol_type = other DNA
taaaaatacaaaaaaaatta

SEQ ID NO: 139812 - DNA, 20 bp, synthetic construct
  source 1..20: mol_type = other DNA
ctaaaaatacaaaaaaaatt

SEQ ID NO: 139813 - DNA, 20 bp, synthetic construct
  source 1..20: mol_type = other DNA
actaaaaatacaaaaaaaat

SEQ ID NO: 139814 - DNA, 20 bp, synthetic construct
  source 1..20: mol_type = other DNA
tactaaaaatacaaaaaaaa

SEQ ID NO: 139815 - DNA, 20 bp, synthetic construct
  source 1..20: mol_type = other DNA
ctactaaaaatacaaaaaaa

SEQ ID NO: 139816 - DNA, 20 bp, synthetic construct
  source 1..20: mol_type = other DNA
tctactaaaaatacaaaaaa

SEQ ID NO: 139817 - DNA, 20 bp, synthetic construct
  source 1..20: mol_type = other DNA
ctctactaaaaatacaaaaa

SEQ ID NO: 139818 - DNA, 20 bp, synthetic construct
  source 1..20: mol_type = other DNA
tctctactaaaaatacaaaa

SEQ ID NO: 139819 - DNA, 20 bp, synthetic construct
  source 1..20: mol_type = other DNA
gtctctactaaaaatacaaa

SEQ ID NO: 139820 - DNA, 20 bp, synthetic construct
  source 1..20: mol_type = other DNA
tgtctctactaaaaatacaa

SEQ ID NO: 139821 - DNA, 20 bp, synthetic construct
  source 1..20: mol_type = other DNA
ctgtctctactaaaaataca

SEQ ID NO: 139822 - DNA, 20 bp, synthetic construct
  source 1..20: mol_type = other DNA
cctgtctctactaaaaatac

SEQ ID NO: 139823 - DNA, 20 bp, synthetic construct
  source 1..20: mol_type = other DNA
ccctgtctctactaaaaata

SEQ ID NO: 139824 - DNA, 20 bp, synthetic construct
  source 1..20: mol_type = other DNA
accctgtctctactaaaaat

SEQ ID NO: 139825 - DNA, 20 bp, synthetic construct
  source 1..20: mol_type = other DNA
aaccctgtctctactaaaaa

SEQ ID NO: 139826 - DNA, 20 bp, synthetic construct
  source 1..20: mol_type = other DNA
aaaccctgtctctactaaaa

SEQ ID NO: 139827 - DNA, 20 bp, synthetic construct
  source 1..20: mol_type = other DNA
gaaaccctgtctctactaaa

SEQ ID NO: 139828 - DNA, 20 bp, synthetic construct
  source 1..20: mol_type = other DNA
tgaaaccctgtctctactaa

SEQ ID NO: 139829 - DNA, 20 bp, synthetic construct
  source 1..20: mol_type = other DNA
gtgaaaccctgtctctacta

SEQ ID NO: 139830 - DNA, 20 bp, synthetic construct
  source 1..20: mol_type = other DNA
ggtgaaaccctgtctctact

SEQ ID NO: 139831 - DNA, 20 bp, synthetic construct
  source 1..20: mol_type = other DNA
tggtgaaaccctgtctctac

SEQ ID NO: 139832 - DNA, 20 bp, synthetic construct
  source 1..20: mol_type = other DNA
atggtgaaaccctgtctcta

SEQ ID NO: 139833 - DNA, 20 bp, synthetic construct
  source 1..20: mol_type = other DNA
gatggtgaaaccctgtctct

SEQ ID NO: 139834 - DNA, 20 bp, synthetic construct
  source 1..20: mol_type = other DNA
agatggtgaaaccctgtctc

SEQ ID NO: 139835 - DNA, 20 bp, synthetic construct
  source 1..20: mol_type = other DNA
aagatggtgaaaccctgtct

SEQ ID NO: 139836 - DNA, 20 bp, synthetic construct
  source 1..20: mol_type = other DNA
caagatggtgaaaccctgtc

SEQ ID NO: 139837 - DNA, 20 bp, synthetic construct
  source 1..20: mol_type = other DNA
ccaagatggtgaaaccctgt

SEQ ID NO: 139838 - DNA, 20 bp, synthetic construct
  source 1..20: mol_type = other DNA
gccaagatggtgaaaccctg

SEQ ID NO: 139839 - DNA, 20 bp, synthetic construct
  source 1..20: mol_type = other DNA
ggccaagatggtgaaaccct

SEQ ID NO: 139840 - DNA, 20 bp, synthetic construct
  source 1..20: mol_type = other DNA
tggccaagatggtgaaaccc

SEQ ID NO: 139841 - DNA, 20 bp, synthetic construct
  source 1..20: mol_type = other DNA
ctggccaagatggtgaaacc

SEQ ID NO: 139842 - DNA, 20 bp, synthetic construct
  source 1..20: mol_type = other DNA
cctggccaagatggtgaaac

SEQ ID NO: 139843 - DNA, 20 bp, synthetic construct
  source 1..20: mol_type = other DNA
gcctggccaagatggtgaaa

SEQ ID NO: 139844 - DNA, 20 bp, synthetic construct
  source 1..20: mol_type = other DNA
agcctggccaagatggtgaa

SEQ ID NO: 139845 - DNA, 20 bp, synthetic construct
  source 1..20: mol_type = other DNA
cagcctggccaagatggtga

SEQ ID NO: 139846 - DNA, 20 bp, synthetic construct
  source 1..20: mol_type = other DNA
ccagcctggccaagatggtg

SEQ ID NO: 139847 - DNA, 20 bp, synthetic construct
  source 1..20: mol_type = other DNA
accagcctggccaagatggt

SEQ ID NO: 139848 - DNA, 20 bp, synthetic construct
  source 1..20: mol_type = other DNA
gaccagcctggccaagatgg

SEQ ID NO: 139849 - DNA, 20 bp, synthetic construct
  source 1..20: mol_type = other DNA
agaccagcctggccaagatg

SEQ ID NO: 139850 - DNA, 20 bp, synthetic construct
  source 1..20: mol_type = other DNA
aagaccagcctggccaagat

SEQ ID NO: 139851 - DNA, 20 bp, synthetic construct
  source 1..20: mol_type = other DNA
caagaccagcctggccaaga

SEQ ID NO: 139852 - DNA, 20 bp, synthetic construct
  source 1..20: mol_type = other DNA
tcaagaccagcctggccaag

SEQ ID NO: 139853 - DNA, 20 bp, synthetic construct
  source 1..20: mol_type = other DNA
ttcaagaccagcctggccaa

SEQ ID NO: 139854 - DNA, 20 bp, synthetic construct
  source 1..20: mol_type = other DNA
gttcaagaccagcctggcca

SEQ ID NO: 139855 - DNA, 20 bp, synthetic construct
  source 1..20: mol_type = other DNA
agttcaagaccagcctggcc

SEQ ID NO: 139856 - DNA, 20 bp, synthetic construct
  source 1..20: mol_type = other DNA
gagttcaagaccagcctggc

SEQ ID NO: 139857 - DNA, 20 bp, synthetic construct
  source 1..20: mol_type = other DNA
ggagttcaagaccagcctgg

SEQ ID NO: 139858 - DNA, 20 bp, synthetic construct
  source 1..20: mol_type = other DNA
aggagttcaagaccagcctg

SEQ ID NO: 139859 - DNA, 20 bp, synthetic construct
  source 1..20: mol_type = other DNA
caggagttcaagaccagcct

SEQ ID NO: 139860 - DNA, 20 bp, synthetic construct
  source 1..20: mol_type = other DNA
tcaggagttcaagaccagcc

SEQ ID NO: 139861 - DNA, 20 bp, synthetic construct
  source 1..20: mol_type = other DNA
gtcaggagttcaagaccagc

SEQ ID NO: 139862 - DNA, 20 bp, synthetic construct
  source 1..20: mol_type = other DNA
ggtcaggagttcaagaccag

SEQ ID NO: 139863 - DNA, 20 bp, synthetic construct
  source 1..20: mol_type = other DNA
aggtcaggagttcaagacca

SEQ ID NO: 139864 - DNA, 20 bp, synthetic construct
  source 1..20: mol_type = other DNA
gaggtcaggagttcaagacc

SEQ ID NO: 139865 - DNA, 20 bp, synthetic construct
  source 1..20: mol_type = other DNA
cgaggtcaggagttcaagac

SEQ ID NO: 139866 - DNA, 20 bp, synthetic construct
  source 1..20: mol_type = other DNA
acgaggtcaggagttcaaga

SEQ ID NO: 139867 - DNA, 20 bp, synthetic construct
  source 1..20: mol_type = other DNA
cacgaggtcaggagttcaag

SEQ ID NO: 139868 - DNA, 20 bp, synthetic construct
  source 1..20: mol_type = other DNA
tcacgaggtcaggagttcaa

SEQ ID NO: 139869 - DNA, 20 bp, synthetic construct
  source 1..20: mol_type = other DNA
atcacgaggtcaggagttca

SEQ ID NO: 139870 - DNA, 20 bp, synthetic construct
  source 1..20: mol_type = other DNA
gatcacgaggtcaggagttc

SEQ ID NO: 139871 - DNA, 20 bp, synthetic construct
  source 1..20: mol_type = other DNA
tgatcacgaggtcaggagtt

SEQ ID NO: 139872 - DNA, 20 bp, synthetic construct
  source 1..20: mol_type = other DNA
gtgatcacgaggtcaggagt

SEQ ID NO: 139873 - DNA, 20 bp, synthetic construct
  source 1..20: mol_type = other DNA
ggtgatcacgaggtcaggag

SEQ ID NO: 139874 - DNA, 20 bp, synthetic construct
  source 1..20: mol_type = other DNA
aggtgatcacgaggtcagga

SEQ ID NO: 139875 - DNA, 20 bp, synthetic construct
  source 1..20: mol_type = other DNA
taggtgatcacgaggtcagg

SEQ ID NO: 139876 - DNA, 20 bp, synthetic construct
  source 1..20: mol_type = other DNA
gtaggtgatcacgaggtcag

SEQ ID NO: 139877 - DNA, 20 bp, synthetic construct
  source 1..20: mol_type = other DNA
ggtaggtgatcacgaggtca

SEQ ID NO: 139878 - DNA, 20 bp, synthetic construct
  source 1..20: mol_type = other DNA
aggtaggtgatcacgaggtc

SEQ ID NO: 139879 - DNA, 20 bp, synthetic construct
  source 1..20: mol_type = other DNA
gaggtaggtgatcacgaggt

SEQ ID NO: 139880 - DNA, 20 bp, synthetic construct
  source 1..20: mol_type = other DNA
cgaggtaggtgatcacgagg

SEQ ID NO: 139881 - DNA, 20 bp, synthetic construct
  source 1..20: mol_type = other DNA
ccgaggtaggtgatcacgag

SEQ ID NO: 139882 - DNA, 20 bp, synthetic construct
  source 1..20: mol_type = other DNA
gccgaggtaggtgatcacga

SEQ ID NO: 139883 - DNA, 20 bp, synthetic construct
  source 1..20: mol_type = other DNA
ggccgaggtaggtgatcacg

SEQ ID NO: 139884 - DNA, 20 bp, synthetic construct
  source 1..20: mol_type = other DNA
gggccgaggtaggtgatcac

SEQ ID NO: 139885 - DNA, 20 bp, synthetic construct
  source 1..20: mol_type = other DNA
ggggccgaggtaggtgatca

SEQ ID NO: 139886 - DNA, 20 bp, synthetic construct
  source 1..20: mol_type = other DNA
aggggccgaggtaggtgatc

SEQ ID NO: 139887 - DNA, 20 bp, synthetic construct
  source 1..20: mol_type = other DNA
caggggccgaggtaggtgat

SEQ ID NO: 139888 - DNA, 20 bp, synthetic construct
  source 1..20: mol_type = other DNA
ccaggggccgaggtaggtga

SEQ ID NO: 139889 - DNA, 20 bp, synthetic construct
  source 1..20: mol_type = other DNA
accaggggccgaggtaggtg

SEQ ID NO: 139890 - DNA, 20 bp, synthetic construct
  source 1..20: mol_type = other DNA
aaccaggggccgaggtaggt

SEQ ID NO: 139891 - DNA, 20 bp, synthetic construct
  source 1..20: mol_type = other DNA
gaaccaggggccgaggtagg

SEQ ID NO: 139892 - DNA, 20 bp, synthetic construct
  source 1..20: mol_type = other DNA
ggaaccaggggccgaggtag

SEQ ID NO: 139893 - DNA, 20 bp, synthetic construct
  source 1..20: mol_type = other DNA
aggaaccaggggccgaggta

SEQ ID NO: 139894 - DNA, 20 bp, synthetic construct
  source 1..20: mol_type = other DNA
aaggaaccaggggccgaggt

SEQ ID NO: 139895 - DNA, 20 bp, synthetic construct
  source 1..20: mol_type = other DNA
aaaggaaccaggggccgagg

SEQ ID NO: 139896 - DNA, 20 bp, synthetic construct
  source 1..20: mol_type = other DNA
aaaaggaaccaggggccgag

SEQ ID NO: 139897 - DNA, 20 bp, synthetic construct
  source 1..20: mol_type = other DNA
aaaaaggaaccaggggccga

SEQ ID NO: 139898 - DNA, 20 bp, synthetic construct
  source 1..20: mol_type = other DNA
aaaaaaggaaccaggggccg

SEQ ID NO: 139899 - DNA, 20 bp, synthetic construct
  source 1..20: mol_type = other DNA
caaaaaaggaaccaggggcc

SEQ ID NO: 139900 - DNA, 20 bp, synthetic construct
  source 1..20: mol_type = other DNA
acaaaaaaggaaccaggggc

SEQ ID NO: 139901 - DNA, 20 bp, synthetic construct
  source 1..20: mol_type = other DNA
gacaaaaaaggaaccagggg

SEQ ID NO: 139902 - DNA, 20 bp, synthetic construct
  source 1..20: mol_type = other DNA
agacaaaaaaggaaccaggg

SEQ ID NO: 139903 - DNA, 20 bp, synthetic construct
  source 1..20: mol_type = other DNA
gagacaaaaaaggaaccagg

SEQ ID NO: 139904 - DNA, 20 bp, synthetic construct
  source 1..20: mol_type = other DNA
agagacaaaaaaggaaccag

SEQ ID NO: 139905 - DNA, 20 bp, synthetic construct
  source 1..20: mol_type = other DNA
gagagacaaaaaaggaacca

SEQ ID NO: 139906 - DNA, 20 bp, synthetic construct
  source 1..20: mol_type = other DNA
agagagacaaaaaaggaacc

SEQ ID NO: 139907 - DNA, 20 bp, synthetic construct
  source 1..20: mol_type = other DNA
aagagagacaaaaaaggaac

SEQ ID NO: 139908 - DNA, 20 bp, synthetic construct
  source 1..20: mol_type = other DNA
caagagagacaaaaaaggaa

SEQ ID NO: 139909 - DNA, 20 bp, synthetic construct
  source 1..20: mol_type = other DNA
acaagagagacaaaaaagga

SEQ ID NO: 139910 - DNA, 20 bp, synthetic construct
  source 1..20: mol_type = other DNA
gacaagagagacaaaaaagg

SEQ ID NO: 139911 - DNA, 20 bp, synthetic construct
  source 1..20: mol_type = other DNA
agacaagagagacaaaaaag

SEQ ID NO: 139912 - DNA, 20 bp, synthetic construct
  source 1..20: mol_type = other DNA
aagacaagagagacaaaaaa

SEQ ID NO: 139913 - DNA, 20 bp, synthetic construct
  source 1..20: mol_type = other DNA
gaagacaagagagacaaaaa

SEQ ID NO: 139914 - DNA, 20 bp, synthetic construct
  source 1..20: mol_type = other DNA
ggaagacaagagagacaaaa

SEQ ID NO: 139915 - DNA, 20 bp, synthetic construct
  source 1..20: mol_type = other DNA
tggaagacaagagagacaaa

SEQ ID NO: 139916 - DNA, 20 bp, synthetic construct
  source 1..20: mol_type = other DNA
ttggaagacaagagagacaa

SEQ ID NO: 139917 - DNA, 20 bp, synthetic construct
  source 1..20: mol_type = other DNA
cttggaagacaagagagaca

SEQ ID NO: 139918 - DNA, 20 bp, synthetic construct
  source 1..20: mol_type = other DNA
gcttggaagacaagagagac

SEQ ID NO: 139919 - DNA, 20 bp, synthetic construct
  source 1..20: mol_type = other DNA
agcttggaagacaagagaga

SEQ ID NO: 139920 - DNA, 20 bp, synthetic construct
  source 1..20: mol_type = other DNA
tagcttggaagacaagagag

SEQ ID NO: 139921 - DNA, 20 bp, synthetic construct
  source 1..20: mol_type = other DNA
atagcttggaagacaagaga

SEQ ID NO: 139922 - DNA, 20 bp, synthetic construct
  source 1..20: mol_type = other DNA
aatagcttggaagacaagag

SEQ ID NO: 139923 - DNA, 20 bp, synthetic construct
  source 1..20: mol_type = other DNA
aaatagcttggaagacaaga

SEQ ID NO: 139924 - DNA, 20 bp, synthetic construct
  source 1..20: mol_type = other DNA
aaaatagcttggaagacaag

SEQ ID NO: 139925 - DNA, 20 bp, synthetic construct
  source 1..20: mol_type = other DNA
aaaaatagcttggaagacaa

SEQ ID NO: 139926 - DNA, 20 bp, synthetic construct
  source 1..20: mol_type = other DNA
aaaaaatagcttggaagaca

SEQ ID NO: 139927 - DNA, 20 bp, synthetic construct
  source 1..20: mol_type = other DNA
aaaaaaatagcttggaagac

SEQ ID NO: 139928 - DNA, 20 bp, synthetic construct
  source 1..20: mol_type = other DNA
gaaaaaaatagcttggaaga

SEQ ID NO: 139929 - DNA, 20 bp, synthetic construct
  source 1..20: mol_type = other DNA
ggaaaaaaatagcttggaag

SEQ ID NO: 139930 - DNA, 20 bp, synthetic construct
  source 1..20: mol_type = other DNA
aggaaaaaaatagcttggaa

SEQ ID NO: 139931 - DNA, 20 bp, synthetic construct
  source 1..20: mol_type = other DNA
aaggaaaaaaatagcttgga

SEQ ID NO: 139932 - DNA, 20 bp, synthetic construct
  source 1..20: mol_type = other DNA
caaggaaaaaaatagcttgg

SEQ ID NO: 139933 - DNA, 20 bp, synthetic construct
  source 1..20: mol_type = other DNA
ccaaggaaaaaaatagcttg

SEQ ID NO: 139934 - DNA, 20 bp, synthetic construct
  source 1..20: mol_type = other DNA
gccaaggaaaaaaatagctt

SEQ ID NO: 139935 - DNA, 20 bp, synthetic construct
  source 1..20: mol_type = other DNA
agccaaggaaaaaaatagct

SEQ ID NO: 139936 - DNA, 20 bp, synthetic construct
  source 1..20: mol_type = other DNA
aagccaaggaaaaaaatagc

SEQ ID NO: 139937 - DNA, 20 bp, synthetic construct
  source 1..20: mol_type = other DNA
aaagccaaggaaaaaaatag

SEQ ID NO: 139938 - DNA, 20 bp, synthetic construct
  source 1..20: mol_type = other DNA
aaaagccaaggaaaaaaata

SEQ ID NO: 139939 - DNA, 20 bp, synthetic construct
  source 1..20: mol_type = other DNA
taaaagccaaggaaaaaaat

SEQ ID NO: 139940 - DNA, 20 bp, synthetic construct
  source 1..20: mol_type = other DNA
ttaaaagccaaggaaaaaaa

SEQ ID NO: 139941 - DNA, 20 bp, synthetic construct
  source 1..20: mol_type = other DNA
tttaaaagccaaggaaaaaa

SEQ ID NO: 139942 - DNA, 20 bp, synthetic construct
  source 1..20: mol_type = other DNA
atttaaaagccaaggaaaaa

SEQ ID NO: 139943 - DNA, 20 bp, synthetic construct
  source 1..20: mol_type = other DNA
aatttaaaagccaaggaaaa

SEQ ID NO: 139944 - DNA, 20 bp, synthetic construct
  source 1..20: mol_type = other DNA
aaatttaaaagccaaggaaa

SEQ ID NO: 139945 - DNA, 20 bp, synthetic construct
  source 1..20: mol_type = other DNA
aaaatttaaaagccaaggaa

SEQ ID NO: 139946 - DNA, 20 bp, synthetic construct
  source 1..20: mol_type = other DNA
gaaaatttaaaagccaagga

SEQ ID NO: 139947 - DNA, 20 bp, synthetic construct
  source 1..20: mol_type = other DNA
agaaaatttaaaagccaagg

SEQ ID NO: 139948 - DNA, 20 bp, synthetic construct
  source 1..20: mol_type = other DNA
aagaaaatttaaaagccaag

SEQ ID NO: 139949 - DNA, 20 bp, synthetic construct
  source 1..20: mol_type = other DNA
gaagaaaatttaaaagccaa

SEQ ID NO: 139950 - DNA, 20 bp, synthetic construct
  source 1..20: mol_type = other DNA
ggaagaaaatttaaaagcca

SEQ ID NO: 139951 - DNA, 20 bp, synthetic construct
  source 1..20: mol_type = other DNA
aggaagaaaatttaaaagcc

SEQ ID NO: 139952 - DNA, 20 bp, synthetic construct
  source 1..20: mol_type = other DNA
taggaagaaaatttaaaagc

SEQ ID NO: 139953 - DNA, 20 bp, synthetic construct
  source 1..20: mol_type = other DNA
gtaggaagaaaatttaaaag

SEQ ID NO: 139954 - DNA, 20 bp, synthetic construct
  source 1..20: mol_type = other DNA
ggtaggaagaaaatttaaaa

SEQ ID NO: 139955 - DNA, 20 bp, synthetic construct
  source 1..20: mol_type = other DNA
gggtaggaagaaaatttaaa

SEQ ID NO: 139956 - DNA, 20 bp, synthetic construct
  source 1..20: mol_type = other DNA
agggtaggaagaaaatttaa

SEQ ID NO: 139957 - DNA, 20 bp, synthetic construct
  source 1..20: mol_type = other DNA
cagggtaggaagaaaattta

SEQ ID NO: 139958 - DNA, 20 bp, synthetic construct
  source 1..20: mol_type = other DNA
gcagggtaggaagaaaattt

SEQ ID NO: 139959 - DNA, 20 bp, synthetic construct
  source 1..20: mol_type = other DNA
agcagggtaggaagaaaatt

SEQ ID NO: 139960 - DNA, 20 bp, synthetic construct
  source 1..20: mol_type = other DNA
aagcagggtaggaagaaaat

SEQ ID NO: 139961 - DNA, 20 bp, synthetic construct
  source 1..20: mol_type = other DNA
aaagcagggtaggaagaaaa

SEQ ID NO: 139962 - DNA, 20 bp, synthetic construct
  source 1..20: mol_type = other DNA
caaagcagggtaggaagaaa

SEQ ID NO: 139963 - DNA, 20 bp, synthetic construct
  source 1..20: mol_type = other DNA
acaaagcagggtaggaagaa

SEQ ID NO: 139964 - DNA, 20 bp, synthetic construct
  source 1..20: mol_type = other DNA
cacaaagcagggtaggaaga

SEQ ID NO: 139965 - DNA, 20 bp, synthetic construct
  source 1..20: mol_type = other DNA
acacaaagcagggtaggaag

SEQ ID NO: 139966 - DNA, 20 bp, synthetic construct
  source 1..20: mol_type = other DNA
gacacaaagcagggtaggaa

SEQ ID NO: 139967 - DNA, 20 bp, synthetic construct
  source 1..20: mol_type = other DNA
tgacacaaagcagggtagga

SEQ ID NO: 139968 - DNA, 20 bp, synthetic construct
  source 1..20: mol_type = other DNA
gtgacacaaagcagggtagg

SEQ ID NO: 139969 - DNA, 20 bp, synthetic construct
  source 1..20: mol_type = other DNA
agtgacacaaagcagggtag

SEQ ID NO: 139970 - DNA, 20 bp, synthetic construct
  source 1..20: mol_type = other DNA
cagtgacacaaagcagggta

SEQ ID NO: 139971 - DNA, 20 bp, synthetic construct
  source 1..20: mol_type = other DNA
acagtgacacaaagcagggt

SEQ ID NO: 139972 - DNA, 20 bp, synthetic construct
  source 1..20: mol_type = other DNA
gacagtgacacaaagcaggg

SEQ ID NO: 139973 - DNA, 20 bp, synthetic construct
  source 1..20: mol_type = other DNA
tgacagtgacacaaagcagg

SEQ ID NO: 139974 - DNA, 20 bp, synthetic construct
  source 1..20: mol_type = other DNA
gtgacagtgacacaaagcag

SEQ ID NO: 139975 - DNA, 20 bp, synthetic construct
  source 1..20: mol_type = other DNA
agtgacagtgacacaaagca

SEQ ID NO: 139976 - DNA, 20 bp, synthetic construct
  source 1..20: mol_type = other DNA
aagtgacagtgacacaaagc

SEQ ID NO: 139977 - DNA, 20 bp, synthetic construct
  source 1..20: mol_type = other DNA
taagtgacagtgacacaaag

SEQ ID NO: 139978 - DNA, 20 bp, synthetic construct
  source 1..20: mol_type = other DNA
ttaagtgacagtgacacaaa

SEQ ID NO: 139979 - DNA, 20 bp, synthetic construct
  source 1..20: mol_type = other DNA
gttaagtgacagtgacacaa

SEQ ID NO: 139980 - DNA, 20 bp, synthetic construct
  source 1..20: mol_type = other DNA
agttaagtgacagtgacaca

SEQ ID NO: 139981 - DNA, 20 bp, synthetic construct
  source 1..20: mol_type = other DNA
cagttaagtgacagtgacac

SEQ ID NO: 139982 - DNA, 20 bp, synthetic construct
  source 1..20: mol_type = other DNA
ccagttaagtgacagtgaca

SEQ ID NO: 139983 - DNA, 20 bp, synthetic construct
  source 1..20: mol_type = other DNA
gccagttaagtgacagtgac

SEQ ID NO: 139984 - DNA, 20 bp, synthetic construct
  source 1..20: mol_type = other DNA
ggccagttaagtgacagtga

SEQ ID NO: 139985 - DNA, 20 bp, synthetic construct
  source 1..20: mol_type = other DNA
aggccagttaagtgacagtg

SEQ ID NO: 139986 - DNA, 20 bp, synthetic construct
  source 1..20: mol_type = other DNA
taggccagttaagtgacagt

SEQ ID NO: 139987 - DNA, 20 bp, synthetic construct
  source 1..20: mol_type = other DNA
ataggccagttaagtgacag

SEQ ID NO: 139988 - DNA, 20 bp, synthetic construct
  source 1..20: mol_type = other DNA
gataggccagttaagtgaca

SEQ ID NO: 139989 - DNA, 20 bp, synthetic construct
  source 1..20: mol_type = other DNA
tgataggccagttaagtgac

SEQ ID NO: 139990 - DNA, 20 bp, synthetic construct
  source 1..20: mol_type = other DNA
ttgataggccagttaagtga

SEQ ID NO: 139991 - DNA, 20 bp, synthetic construct
  source 1..20: mol_type = other DNA
cttgataggccagttaagtg

SEQ ID NO: 139992 - DNA, 20 bp, synthetic construct
  source 1..20: mol_type = other DNA
ccttgataggccagttaagt

SEQ ID NO: 139993 - DNA, 20 bp, synthetic construct
  source 1..20: mol_type = other DNA
tccttgataggccagttaag

SEQ ID NO: 139994 - DNA, 20 bp, synthetic construct
  source 1..20: mol_type = other DNA
ttccttgataggccagttaa

SEQ ID NO: 139995 - DNA, 20 bp, synthetic construct
  source 1..20: mol_type = other DNA
gttccttgataggccagtta

SEQ ID NO: 139996 - DNA, 20 bp, synthetic construct
  source 1..20: mol_type = other DNA
ggttccttgataggccagtt

SEQ ID NO: 139997 - DNA, 20 bp, synthetic construct
  source 1..20: mol_type = other DNA
cggttccttgataggccagt

SEQ ID NO: 139998 - DNA, 20 bp, synthetic construct
  source 1..20: mol_type = other DNA
tcggttccttgataggccag

SEQ ID NO: 139999 - DNA, 20 bp, synthetic construct
  source 1..20: mol_type = other DNA
ttcggttccttgataggcca

SEQ ID NO: 140000 - DNA, 20 bp, synthetic construct
  source 1..20: mol_type = other DNA
gttcggttccttgataggcc

SEQ ID NO: 140001 - DNA, 20 bp, synthetic construct
  source 1..20: mol_type = other DNA
agttcggttccttgataggc

SEQ ID NO: 140002 - DNA, 20 bp, synthetic construct
  source 1..20: mol_type = other DNA
cagttcggttccttgatagg

SEQ ID NO: 140003 - DNA, 20 bp, synthetic construct
  source 1..20: mol_type = other DNA
acagttcggttccttgatag

SEQ ID NO: 140004 - DNA, 20 bp, synthetic construct
  source 1..20: mol_type = other DNA
tacagttcggttccttgata

SEQ ID NO: 140005 - DNA, 20 bp, synthetic construct
  source 1..20: mol_type = other DNA
atacagttcggttccttgat

SEQ ID NO: 140006 - DNA, 20 bp, synthetic construct
  source 1..20: mol_type = other DNA
aatacagttcggttccttga

SEQ ID NO: 140007 - DNA, 20 bp, synthetic construct
  source 1..20: mol_type = other DNA
aaatacagttcggttccttg

SEQ ID NO: 140008 - DNA, 20 bp, synthetic construct
  source 1..20: mol_type = other DNA
aaaatacagttcggttcctt

SEQ ID NO: 140009 - DNA, 20 bp, synthetic construct
  source 1..20: mol_type = other DNA
aaaaatacagttcggttcct

SEQ ID NO: 140010 - DNA, 20 bp, synthetic construct
  source 1..20: mol_type = other DNA
caaaaatacagttcggttcc

SEQ ID NO: 140011 - DNA, 20 bp, synthetic construct
  source 1..20: mol_type = other DNA
acaaaaatacagttcggttc

SEQ ID NO: 140012 - DNA, 20 bp, synthetic construct
  source 1..20: mol_type = other DNA
aacaaaaatacagttcggtt

SEQ ID NO: 140013 - DNA, 20 bp, synthetic construct
  source 1..20: mol_type = other DNA
taacaaaaatacagttcggt

SEQ ID NO: 140014 - DNA, 20 bp, synthetic construct
  source 1..20: mol_type = other DNA
gtaacaaaaatacagttcgg

SEQ ID NO: 140015 - DNA, 20 bp, synthetic construct
  source 1..20: mol_type = other DNA
agtaacaaaaatacagttcg

SEQ ID NO: 140016 - DNA, 20 bp, synthetic construct
  source 1..20: mol_type = other DNA
tagtaacaaaaatacagttc

SEQ ID NO: 140017 - DNA, 20 bp, synthetic construct
  source 1..20: mol_type = other DNA
ctagtaacaaaaatacagtt

SEQ ID NO: 140018 - DNA, 20 bp, synthetic construct
  source 1..20: mol_type = other DNA
actagtaacaaaaatacagt

SEQ ID NO: 140019 - DNA, 20 bp, synthetic construct
  source 1..20: mol_type = other DNA
tactagtaacaaaaatacag

SEQ ID NO: 140020 - DNA, 20 bp, synthetic construct
  source 1..20: mol_type = other DNA
atactagtaacaaaaataca

SEQ ID NO: 140021 - DNA, 20 bp, synthetic construct
  source 1..20: mol_type = other DNA
aatactagtaacaaaaatac

SEQ ID NO: 140022 - DNA, 20 bp, synthetic construct
  source 1..20: mol_type = other DNA
caatactagtaacaaaaata

SEQ ID NO: 140023 - DNA, 20 bp, synthetic construct
  source 1..20: mol_type = other DNA
tcaatactagtaacaaaaat

SEQ ID NO: 140024 - DNA, 20 bp, synthetic construct
  source 1..20: mol_type = other DNA
atcaatactagtaacaaaaa

SEQ ID NO: 140025 - DNA, 20 bp, synthetic construct
  source 1..20: mol_type = other DNA
aatcaatactagtaacaaaa

SEQ ID NO: 140026 - DNA, 20 bp, synthetic construct
  source 1..20: mol_type = other DNA
aaatcaatactagtaacaaa

SEQ ID NO: 140027 - DNA, 20 bp, synthetic construct
  source 1..20: mol_type = other DNA
taaatcaatactagtaacaa

SEQ ID NO: 140028 - DNA, 20 bp, synthetic construct
  source 1..20: mol_type = other DNA
ttaaatcaatactagtaaca

SEQ ID NO: 140029 - DNA, 20 bp, synthetic construct
  source 1..20: mol_type = other DNA
tttaaatcaatactagtaac

SEQ ID NO: 140030 - DNA, 20 bp, synthetic construct
  source 1..20: mol_type = other DNA
ctttaaatcaatactagtaa

SEQ ID NO: 140031 - DNA, 20 bp, synthetic construct
  source 1..20: mol_type = other DNA
actttaaatcaatactagta

SEQ ID NO: 140032 - DNA, 20 bp, synthetic construct
  source 1..20: mol_type = other DNA
tactttaaatcaatactagt

SEQ ID NO: 140033 - DNA, 20 bp, synthetic construct
  source 1..20: mol_type = other DNA
atactttaaatcaatactag

SEQ ID NO: 140034 - DNA, 20 bp, synthetic construct
  source 1..20: mol_type = other DNA
tatactttaaatcaatacta

SEQ ID NO: 140035 - DNA, 20 bp, synthetic construct
  source 1..20: mol_type = other DNA
ttatactttaaatcaatact

SEQ ID NO: 140036 - DNA, 20 bp, synthetic construct
  source 1..20: mol_type = other DNA
cttatactttaaatcaatac

SEQ ID NO: 140037 - DNA, 20 bp, synthetic construct
  source 1..20: mol_type = other DNA
acttatactttaaatcaata

SEQ ID NO: 140038 - DNA, 20 bp, synthetic construct
  source 1..20: mol_type = other DNA
aacttatactttaaatcaat

SEQ ID NO: 140039 - DNA, 20 bp, synthetic construct
  source 1..20: mol_type = other DNA
aaacttatactttaaatcaa

SEQ ID NO: 140040 - DNA, 20 bp, synthetic construct
  source 1..20: mol_type = other DNA
gaaacttatactttaaatca

SEQ ID NO: 140041 - DNA, 20 bp, synthetic construct
  source 1..20: mol_type = other DNA
tgaaacttatactttaaatc

SEQ ID NO: 140042 - DNA, 20 bp, synthetic construct
  source 1..20: mol_type = other DNA
gtgaaacttatactttaaat

SEQ ID NO: 140043 - DNA, 20 bp, synthetic construct
  source 1..20: mol_type = other DNA
tgtgaaacttatactttaaa

SEQ ID NO: 140044 - DNA, 20 bp, synthetic construct
  source 1..20: mol_type = other DNA
atgtgaaacttatactttaa

SEQ ID NO: 140045 - DNA, 20 bp, synthetic construct
  source 1..20: mol_type = other DNA
aatgtgaaacttatacttta

SEQ ID NO: 140046 - DNA, 20 bp, synthetic construct
  source 1..20: mol_type = other DNA
aaatgtgaaacttatacttt

SEQ ID NO: 140047 - DNA, 20 bp, synthetic construct
  source 1..20: mol_type = other DNA
gaaatgtgaaacttatactt

SEQ ID NO: 140048 - DNA, 20 bp, synthetic construct
  source 1..20: mol_type = other DNA
agaaatgtgaaacttatact

SEQ ID NO: 140049 - DNA, 20 bp, synthetic construct
  source 1..20: mol_type = other DNA
gagaaatgtgaaacttatac

SEQ ID NO: 140050 - DNA, 20 bp, synthetic construct
  source 1..20: mol_type = other DNA
ggagaaatgtgaaacttata

SEQ ID NO: 140051 - DNA, 20 bp, synthetic construct
  source 1..20: mol_type = other DNA
gggagaaatgtgaaacttat

SEQ ID NO: 140052 - DNA, 20 bp, synthetic construct
  source 1..20: mol_type = other DNA
tgggagaaatgtgaaactta

SEQ ID NO: 140053 - DNA, 20 bp, synthetic construct
  source 1..20: mol_type = other DNA
ttgggagaaatgtgaaactt

SEQ ID NO: 140054 - DNA, 20 bp, synthetic construct
  source 1..20: mol_type = other DNA
attgggagaaatgtgaaact

SEQ ID NO: 140055 - DNA, 20 bp, synthetic construct
  source 1..20: mol_type = other DNA
aattgggagaaatgtgaaac

SEQ ID NO: 140056 - DNA, 20 bp, synthetic construct
  source 1..20: mol_type = other DNA
aaattgggagaaatgtgaaa

SEQ ID NO: 140057 - DNA, 20 bp, synthetic construct
  source 1..20: mol_type = other DNA
taaattgggagaaatgtgaa

SEQ ID NO: 140058 - DNA, 20 bp, synthetic construct
  source 1..20: mol_type = other DNA
ataaattgggagaaatgtga

SEQ ID NO: 140059 - DNA, 20 bp, synthetic construct
  source 1..20: mol_type = other DNA
aataaattgggagaaatgtg

SEQ ID NO: 140060 - DNA, 20 bp, synthetic construct
  source 1..20: mol_type = other DNA
taataaattgggagaaatgt

SEQ ID NO: 140061 - DNA, 20 bp, synthetic construct
  source 1..20: mol_type = other DNA
ataataaattgggagaaatg

SEQ ID NO: 140062 - DNA, 20 bp, synthetic construct
  source 1..20: mol_type = other DNA
aataataaattgggagaaat

SEQ ID NO: 140063 - DNA, 20 bp, synthetic construct
  source 1..20: mol_type = other DNA
taataataaattgggagaaa

SEQ ID NO: 140064 - DNA, 20 bp, synthetic construct
  source 1..20: mol_type = other DNA
ataataataaattgggagaa

SEQ ID NO: 140065 - DNA, 20 bp, synthetic construct
  source 1..20: mol_type = other DNA
aataataataaattgggaga

SEQ ID NO: 140066 - DNA, 20 bp, synthetic construct
  source 1..20: mol_type = other DNA
taataataataaattgggag

SEQ ID NO: 140067 - DNA, 20 bp, synthetic construct
  source 1..20: mol_type = other DNA
ataataataataaattggga

SEQ ID NO: 140068 - DNA, 20 bp, synthetic construct
  source 1..20: mol_type = other DNA
aataataataataaattggg

SEQ ID NO: 140069 - DNA, 20 bp, synthetic construct
  source 1..20: mol_type = other DNA
aaataataataataaattgg

SEQ ID NO: 140070 - DNA, 20 bp, synthetic construct
  source 1..20: mol_type = other DNA
taaataataataataaattg

SEQ ID NO: 140071 - DNA, 20 bp, synthetic construct
  source 1..20: mol_type = other DNA
ataaataataataataaatt

SEQ ID NO: 140072 - DNA, 20 bp, synthetic construct
  source 1..20: mol_type = other DNA
aataaataataataataaat

SEQ ID NO: 140073 - DNA, 20 bp, synthetic construct
  source 1..20: mol_type = other DNA
aaataaataataataataaa

SEQ ID NO: 140074 - DNA, 20 bp, synthetic construct
  source 1..20: mol_type = other DNA
taaataaataataataataa

SEQ ID NO: 140075 - DNA, 20 bp, synthetic construct
  source 1..20: mol_type = other DNA
ataaataaataataataata

SEQ ID NO: 140076 - DNA, 20 bp, synthetic construct
  source 1..20: mol_type = other DNA
aataaataaataataataat

SEQ ID NO: 140077 - DNA, 20 bp, synthetic construct
  source 1..20: mol_type = other DNA
aaataaataaataataataa

SEQ ID NO: 140078 - DNA, 20 bp, synthetic construct
  source 1..20: mol_type = other DNA
taaataaataaataataata

SEQ ID NO: 140079 - DNA, 20 bp, synthetic construct
  source 1..20: mol_type = other DNA
ataaataaataaataataat

SEQ ID NO: 140080 - DNA, 20 bp, synthetic construct
  source 1..20: mol_type = other DNA
aataaataaataaataataa

SEQ ID NO: 140081 - DNA, 20 bp, synthetic construct
  source 1..20: mol_type = other DNA
aaataaataaataaataata

SEQ ID NO: 140082 - DNA, 20 bp, synthetic construct
  source 1..20: mol_type = other DNA
caaataaataaataaataat

SEQ ID NO: 140083 - DNA, 20 bp, synthetic construct
  source 1..20: mol_type = other DNA
acaaataaataaataaataa

SEQ ID NO: 140084 - DNA, 20 bp, synthetic construct
  source 1..20: mol_type = other DNA
aacaaataaataaataaata

SEQ ID NO: 140085 - DNA, 20 bp, synthetic construct
  source 1..20: mol_type = other DNA
aaacaaataaataaataaat

SEQ ID NO: 140086 - DNA, 20 bp, synthetic construct
  source 1..20: mol_type = other DNA
taaacaaataaataaataaa

SEQ ID NO: 140087 - DNA, 20 bp, synthetic construct
  source 1..20: mol_type = other DNA
ataaacaaataaataaataa

SEQ ID NO: 140088 - DNA, 20 bp, synthetic construct
  source 1..20: mol_type = other DNA
aataaacaaataaataaata

SEQ ID NO: 140089 - DNA, 20 bp, synthetic construct
  source 1..20: mol_type = other DNA
aaataaacaaataaataaat

SEQ ID NO: 140090 - DNA, 20 bp, synthetic construct
  source 1..20: mol_type = other DNA
aaaataaacaaataaataaa

SEQ ID NO: 140091 - DNA, 20 bp, synthetic construct
  source 1..20: mol_type = other DNA
taaaataaacaaataaataa

SEQ ID NO: 140092 - DNA, 20 bp, synthetic construct
  source 1..20: mol_type = other DNA
ataaaataaacaaataaata

SEQ ID NO: 140093 - DNA, 20 bp, synthetic construct
  source 1..20: mol_type = other DNA
aataaaataaacaaataaat

SEQ ID NO: 140094 - DNA, 20 bp, synthetic construct
  source 1..20: mol_type = other DNA
aaataaaataaacaaataaa

SEQ ID NO: 140095 - DNA, 20 bp, synthetic construct
  source 1..20: mol_type = other DNA
aaaataaaataaacaaataa

SEQ ID NO: 140096 - DNA, 20 bp, synthetic construct
  source 1..20: mol_type = other DNA
aaaaataaaataaacaaata

SEQ ID NO: 140097 - DNA, 20 bp, synthetic construct
  source 1..20: mol_type = other DNA
aaaaaataaaataaacaaat

SEQ ID NO: 140098 - DNA, 20 bp, synthetic construct
  source 1..20: mol_type = other DNA
caaaaaataaaataaacaaa

SEQ ID NO: 140099 - DNA, 20 bp, synthetic construct
  source 1..20: mol_type = other DNA
tcaaaaaataaaataaacaa

SEQ ID NO: 140100 - DNA, 20 bp, synthetic construct
  source 1..20: mol_type = other DNA
ctcaaaaaataaaataaaca

SEQ ID NO: 140101 - DNA, 20 bp, synthetic construct
  source 1..20: mol_type = other DNA
tctcaaaaaataaaataaac

SEQ ID NO: 140102 - DNA, 20 bp, synthetic construct
  source 1..20: mol_type = other DNA
gtctcaaaaaataaaataaa

SEQ ID NO: 140103 - DNA, 20 bp, synthetic construct
  source 1..20: mol_type = other DNA
cgtctcaaaaaataaaataa

SEQ ID NO: 140104 - DNA, 20 bp, synthetic construct
  source 1..20: mol_type = other DNA
ccgtctcaaaaaataaaata

SEQ ID NO: 140105 - DNA, 20 bp, synthetic construct
  source 1..20: mol_type = other DNA
tccgtctcaaaaaataaaat

SEQ ID NO: 140106 - DNA, 20 bp, synthetic construct
  source 1..20: mol_type = other DNA
ctccgtctcaaaaaataaaa

SEQ ID NO: 140107 - DNA, 20 bp, synthetic construct
  source 1..20: mol_type = other DNA
actccgtctcaaaaaataaa

SEQ ID NO: 140108 - DNA, 20 bp, synthetic construct
  source 1..20: mol_type = other DNA
aactccgtctcaaaaaataa

SEQ ID NO: 140109 - DNA, 20 bp, synthetic construct
  source 1..20: mol_type = other DNA
aaactccgtctcaaaaaata

SEQ ID NO: 140110 - DNA, 20 bp, synthetic construct
  source 1..20: mol_type = other DNA
gaaactccgtctcaaaaaat

SEQ ID NO: 140111 - DNA, 20 bp, synthetic construct
  source 1..20: mol_type = other DNA
cgaaactccgtctcaaaaaa

SEQ ID NO: 140112 - DNA, 20 bp, synthetic construct
  source 1..20: mol_type = other DNA
gcgaaactccgtctcaaaaa

SEQ ID NO: 140113 - DNA, 20 bp, synthetic construct
  source 1..20: mol_type = other DNA
agcgaaactccgtctcaaaa

SEQ ID NO: 140114 - DNA, 20 bp, synthetic construct
  source 1..20: mol_type = other DNA
gagcgaaactccgtctcaaa

SEQ ID NO: 140115 - DNA, 20 bp, synthetic construct
  source 1..20: mol_type = other DNA
agagcgaaactccgtctcaa

SEQ ID NO: 140116 - DNA, 20 bp, synthetic construct
  source 1..20: mol_type = other DNA
aagagcgaaactccgtctca

SEQ ID NO: 140117 - DNA, 20 bp, synthetic construct
  source 1..20: mol_type = other DNA
caagagcgaaactccgtctc

SEQ ID NO: 140118 - DNA, 20 bp, synthetic construct
  source 1..20: mol_type = other DNA
acaagagcgaaactccgtct

SEQ ID NO: 140119 - DNA, 20 bp, synthetic construct
  source 1..20: mol_type = other DNA
aacaagagcgaaactccgtc

SEQ ID NO: 140120 - DNA, 20 bp, synthetic construct
  source 1..20: mol_type = other DNA
caacaagagcgaaactccgt

SEQ ID NO: 140121 - DNA, 20 bp, synthetic construct
  source 1..20: mol_type = other DNA
gcaacaagagcgaaactccg

SEQ ID NO: 140122 - DNA, 20 bp, synthetic construct
  source 1..20: mol_type = other DNA
ggcaacaagagcgaaactcc

SEQ ID NO: 140123 - DNA, 20 bp, synthetic construct
  source 1..20: mol_type = other DNA
gggcaacaagagcgaaactc

SEQ ID NO: 140124 - DNA, 20 bp, synthetic construct
  source 1..20: mol_type = other DNA
tgggcaacaagagcgaaact

SEQ ID NO: 140125 - DNA, 20 bp, synthetic construct
  source 1..20: mol_type = other DNA
ttgggcaacaagagcgaaac

SEQ ID NO: 140126 - DNA, 20 bp, synthetic construct
  source 1..20: mol_type = other DNA
cttgggcaacaagagcgaaa

SEQ ID NO: 140127 - DNA, 20 bp, synthetic construct
  source 1..20: mol_type = other DNA
gcttgggcaacaagagcgaa

SEQ ID NO: 140128 - DNA, 20 bp, synthetic construct
  source 1..20: mol_type = other DNA
agcttgggcaacaagagcga

SEQ ID NO: 140129 - DNA, 20 bp, synthetic construct
  source 1..20: mol_type = other DNA
cagcttgggcaacaagagcg

SEQ ID NO: 140130 - DNA, 20 bp, synthetic construct
  source 1..20: mol_type = other DNA
ccagcttgggcaacaagagc

SEQ ID NO: 140131 - DNA, 20 bp, synthetic construct
  source 1..20: mol_type = other DNA
tccagcttgggcaacaagag

SEQ ID NO: 140132 - DNA, 20 bp, synthetic construct
  source 1..20: mol_type = other DNA
ctccagcttgggcaacaaga

SEQ ID NO: 140133 - DNA, 20 bp, synthetic construct
  source 1..20: mol_type = other DNA
actccagcttgggcaacaag

SEQ ID NO: 140134 - DNA, 20 bp, synthetic construct
  source 1..20: mol_type = other DNA
cactccagcttgggcaacaa

SEQ ID NO: 140135 - DNA, 20 bp, synthetic construct
  source 1..20: mol_type = other DNA
gcactccagcttgggcaaca

SEQ ID NO: 140136 - DNA, 20 bp, synthetic construct
  source 1..20: mol_type = other DNA
tgcactccagcttgggcaac

SEQ ID NO: 140137 - DNA, 20 bp, synthetic construct
  source 1..20: mol_type = other DNA
ttgcactccagcttgggcaa

SEQ ID NO: 140138 - DNA, 20 bp, synthetic construct
  source 1..20: mol_type = other DNA
attgcactccagcttgggca

SEQ ID NO: 140139 - DNA, 20 bp, synthetic construct
  source 1..20: mol_type = other DNA
cattgcactccagcttgggc

SEQ ID NO: 140140 - DNA, 20 bp, synthetic construct
  source 1..20: mol_type = other DNA
ccattgcactccagcttggg

SEQ ID NO: 140141 - DNA, 20 bp, synthetic construct
  source 1..20: mol_type = other DNA
accattgcactccagcttgg

SEQ ID NO: 140142 - DNA, 20 bp, synthetic construct
  source 1..20: mol_type = other DNA
caccattgcactccagcttg

SEQ ID NO: 140143 - DNA, 20 bp, synthetic construct
  source 1..20: mol_type = other DNA
acaccattgcactccagctt

SEQ ID NO: 140144 - DNA, 20 bp, synthetic construct
  source 1..20: mol_type = other DNA
cacaccattgcactccagct

SEQ ID NO: 140145 - DNA, 20 bp, synthetic construct
  source 1..20: mol_type = other DNA
tcacaccattgcactccagc

SEQ ID NO: 140146 - DNA, 20 bp, synthetic construct
  source 1..20: mol_type = other DNA
atcacaccattgcactccag

SEQ ID NO: 140147 - DNA, 20 bp, synthetic construct
  source 1..20: mol_type = other DNA
catcacaccattgcactcca

SEQ ID NO: 140148 - DNA, 20 bp, synthetic construct
  source 1..20: mol_type = other DNA
acatcacaccattgcactcc

SEQ ID NO: 140149 - DNA, 20 bp, synthetic construct
  source 1..20: mol_type = other DNA
gacatcacaccattgcactc

SEQ ID NO: 140150 - DNA, 20 bp, synthetic construct
  source 1..20: mol_type = other DNA
cgacatcacaccattgcact

SEQ ID NO: 140151 - DNA, 20 bp, synthetic construct
  source 1..20: mol_type = other DNA
ccgacatcacaccattgcac

SEQ ID NO: 140152 - DNA, 20 bp, synthetic construct
  source 1..20: mol_type = other DNA
accgacatcacaccattgca

SEQ ID NO: 140153 - DNA, 20 bp, synthetic construct
  source 1..20: mol_type = other DNA
aaccgacatcacaccattgc

SEQ ID NO: 140154 - DNA, 20 bp, synthetic construct
  source 1..20: mol_type = other DNA
gaaccgacatcacaccattg

SEQ ID NO: 140155 - DNA, 20 bp, synthetic construct
  source 1..20: mol_type = other DNA
tgaaccgacatcacaccatt

SEQ ID NO: 140156 - DNA, 20 bp, synthetic construct
  source 1..20: mol_type = other DNA
gtgaaccgacatcacaccat

SEQ ID NO: 140157 - DNA, 20 bp, synthetic construct
  source 1..20: mol_type = other DNA
agtgaaccgacatcacacca

SEQ ID NO: 140158 - DNA, 20 bp, synthetic construct
  source 1..20: mol_type = other DNA
cagtgaaccgacatcacacc

SEQ ID NO: 140159 - DNA, 20 bp, synthetic construct
  source 1..20: mol_type = other DNA
gcagtgaaccgacatcacac

SEQ ID NO: 140160 - DNA, 20 bp, synthetic construct
  source 1..20: mol_type = other DNA
tgcagtgaaccgacatcaca

SEQ ID NO: 140161 - DNA, 20 bp, synthetic construct
  source 1..20: mol_type = other DNA
ttgcagtgaaccgacatcac

SEQ ID NO: 140162 - DNA, 20 bp, synthetic construct
  source 1..20: mol_type = other DNA
gttgcagtgaaccgacatca

SEQ ID NO: 140163 - DNA, 20 bp, synthetic construct
  source 1..20: mol_type = other DNA
ggttgcagtgaaccgacatc

SEQ ID NO: 140164 - DNA, 20 bp, synthetic construct
  source 1..20: mol_type = other DNA
aggttgcagtgaaccgacat

SEQ ID NO: 140165 - DNA, 20 bp, synthetic construct
  source 1..20: mol_type = other DNA
gaggttgcagtgaaccgaca

SEQ ID NO: 140166 - DNA, 20 bp, synthetic construct
  source 1..20: mol_type = other DNA
ggaggttgcagtgaaccgac

SEQ ID NO: 140167 - DNA, 20 bp, synthetic construct
  source 1..20: mol_type = other DNA
tggaggttgcagtgaaccga

SEQ ID NO: 140168 - DNA, 20 bp, synthetic construct
  source 1..20: mol_type = other DNA
gtggaggttgcagtgaaccg

SEQ ID NO: 140169 - DNA, 20 bp, synthetic construct
  source 1..20: mol_type = other DNA
ggtggaggttgcagtgaacc

SEQ ID NO: 140170 - DNA, 20 bp, synthetic construct
  source 1..20: mol_type = other DNA
aggtggaggttgcagtgaac

SEQ ID NO: 140171 - DNA, 20 bp, synthetic construct
  source 1..20: mol_type = other DNA
gaggtggaggttgcagtgaa

SEQ ID NO: 140172 - DNA, 20 bp, synthetic construct
  source 1..20: mol_type = other DNA
ggaggtggaggttgcagtga

SEQ ID NO: 140173 - DNA, 20 bp, synthetic construct
  source 1..20: mol_type = other DNA
gggaggtggaggttgcagtg

SEQ ID NO: 140174 - DNA, 20 bp, synthetic construct
  source 1..20: mol_type = other DNA
cgggaggtggaggttgcagt

SEQ ID NO: 140175 - DNA, 20 bp, synthetic construct
  source 1..20: mol_type = other DNA
ccgggaggtggaggttgcag

SEQ ID NO: 140176 - DNA, 20 bp, synthetic construct
  source 1..20: mol_type = other DNA
cccgggaggtggaggttgca

SEQ ID NO: 140177 - DNA, 20 bp, synthetic construct
  source 1..20: mol_type = other DNA
acccgggaggtggaggttgc

SEQ ID NO: 140178 - DNA, 20 bp, synthetic construct
  source 1..20: mol_type = other DNA
aacccgggaggtggaggttg

SEQ ID NO: 140179 - DNA, 20 bp, synthetic construct
  source 1..20: mol_type = other DNA
gaacccgggaggtggaggtt

SEQ ID NO: 140180 - DNA, 20 bp, synthetic construct
  source 1..20: mol_type = other DNA
tgaacccgggaggtggaggt

SEQ ID NO: 140181 - DNA, 20 bp, synthetic construct
  source 1..20: mol_type = other DNA
ttgaacccgggaggtggagg

SEQ ID NO: 140182 - DNA, 20 bp, synthetic construct
  source 1..20: mol_type = other DNA
cttgaacccgggaggtggag

SEQ ID NO: 140183 - DNA, 20 bp, synthetic construct
  source 1..20: mol_type = other DNA
gcttgaacccgggaggtgga

SEQ ID NO: 140184 - DNA, 20 bp, synthetic construct
  source 1..20: mol_type = other DNA
agcttgaacccgggaggtgg

SEQ ID NO: 140185 - DNA, 20 bp, synthetic construct
  source 1..20: mol_type = other DNA
tagcttgaacccgggaggtg

SEQ ID NO: 140186 - DNA, 20 bp, synthetic construct
  source 1..20: mol_type = other DNA
atagcttgaacccgggaggt

SEQ ID NO: 140187 - DNA, 20 bp, synthetic construct
  source 1..20: mol_type = other DNA
aatagcttgaacccgggagg

SEQ ID NO: 140188 - DNA, 20 bp, synthetic construct
  source 1..20: mol_type = other DNA
gaatagcttgaacccgggag

SEQ ID NO: 140189 - DNA, 20 bp, synthetic construct
  source 1..20: mol_type = other DNA
agaatagcttgaacccggga

SEQ ID NO: 140190 - DNA, 20 bp, synthetic construct
  source 1..20: mol_type = other DNA
gagaatagcttgaacccggg

SEQ ID NO: 140191 - DNA, 20 bp, synthetic construct
  source 1..20: mol_type = other DNA
ggagaatagcttgaacccgg

SEQ ID NO: 140192 - DNA, 20 bp, synthetic construct
  source 1..20: mol_type = other DNA
aggagaatagcttgaacccg

SEQ ID NO: 140193 - DNA, 20 bp, synthetic construct
  source 1..20: mol_type = other DNA
aaggagaatagcttgaaccc

SEQ ID NO: 140194 - DNA, 20 bp, synthetic construct
  source 1..20: mol_type = other DNA
gaaggagaatagcttgaacc

SEQ ID NO: 140195 - DNA, 20 bp, synthetic construct
  source 1..20: mol_type = other DNA
ggaaggagaatagcttgaac

SEQ ID NO: 140196 - DNA, 20 bp, synthetic construct
  source 1..20: mol_type = other DNA
gggaaggagaatagcttgaa

SEQ ID NO: 140197 - DNA, 20 bp, synthetic construct
  source 1..20: mol_type = other DNA
ggggaaggagaatagcttga

SEQ ID NO: 140198 - DNA, 20 bp, synthetic construct
  source 1..20: mol_type = other DNA
tggggaaggagaatagcttg

SEQ ID NO: 140199 - DNA, 20 bp, synthetic construct
  source 1..20: mol_type = other DNA
gtggggaaggagaatagctt

SEQ ID NO: 140200 - DNA, 20 bp, synthetic construct
  source 1..20: mol_type = other DNA
agtggggaaggagaatagct

SEQ ID NO: 140201 - DNA, 20 bp, synthetic construct
  source 1..20: mol_type = other DNA
gagtggggaaggagaatagc

SEQ ID NO: 140202 - DNA, 20 bp, synthetic construct
  source 1..20: mol_type = other DNA
agagtggggaaggagaatag

SEQ ID NO: 140203 - DNA, 20 bp, synthetic construct
  source 1..20: mol_type = other DNA
gagagtggggaaggagaata

SEQ ID NO: 140204 - DNA, 20 bp, synthetic construct
  source 1..20: mol_type = other DNA
ggagagtggggaaggagaat

SEQ ID NO: 140205 - DNA, 20 bp, synthetic construct
  source 1..20: mol_type = other DNA
gggagagtggggaaggagaa

SEQ ID NO: 140206 - DNA, 20 bp, synthetic construct
  source 1..20: mol_type = other DNA
agggagagtggggaaggaga

SEQ ID NO: 140207 - DNA, 20 bp, synthetic construct
  source 1..20: mol_type = other DNA
tagggagagtggggaaggag

SEQ ID NO: 140208 - DNA, 20 bp, synthetic construct
  source 1..20: mol_type = other DNA
ctagggagagtggggaagga

SEQ ID NO: 140209 - DNA, 20 bp, synthetic construct
  source 1..20: mol_type = other DNA
actagggagagtggggaagg

SEQ ID NO: 140210 - DNA, 20 bp, synthetic construct
  source 1..20: mol_type = other DNA
tactagggagagtggggaag

SEQ ID NO: 140211 - DNA, 20 bp, synthetic construct
  source 1..20: mol_type = other DNA
ctactagggagagtggggaa

SEQ ID NO: 140212 - DNA, 20 bp, synthetic construct
  source 1..20: mol_type = other DNA
gctactagggagagtgggga

SEQ ID NO: 140213 - DNA, 20 bp, synthetic construct
  source 1..20: mol_type = other DNA
agctactagggagagtgggg

SEQ ID NO: 140214 - DNA, 20 bp, synthetic construct
  source 1..20: mol_type = other DNA
cagctactagggagagtggg

SEQ ID NO: 140215 - DNA, 20 bp, synthetic construct
  source 1..20: mol_type = other DNA
acagctactagggagagtgg

SEQ ID NO: 140216 - DNA, 20 bp, synthetic construct
  source 1..20: mol_type = other DNA
cacagctactagggagagtg

SEQ ID NO: 140217 - DNA, 20 bp, synthetic construct
  source 1..20: mol_type = other DNA
tcacagctactagggagagt

SEQ ID NO: 140218 - DNA, 20 bp, synthetic construct
  source 1..20: mol_type = other DNA
atcacagctactagggagag

SEQ ID NO: 140219 - DNA, 20 bp, synthetic construct
  source 1..20: mol_type = other DNA
aatcacagctactagggaga

SEQ ID NO: 140220 - DNA, 20 bp, synthetic construct
  source 1..20: mol_type = other DNA
taatcacagctactagggag

SEQ ID NO: 140221 - DNA, 20 bp, synthetic construct
  source 1..20: mol_type = other DNA
gtaatcacagctactaggga

SEQ ID NO: 140222 - DNA, 20 bp, synthetic construct
  source 1..20: mol_type = other DNA
tgtaatcacagctactaggg

SEQ ID NO: 140223 - DNA, 20 bp, synthetic construct
  source 1..20: mol_type = other DNA
ctgtaatcacagctactagg

SEQ ID NO: 140224 - DNA, 20 bp, synthetic construct
  source 1..20: mol_type = other DNA
cctgtaatcacagctactag

SEQ ID NO: 140225 - DNA, 20 bp, synthetic construct
  source 1..20: mol_type = other DNA
acctgtaatcacagctacta

SEQ ID NO: 140226 - DNA, 20 bp, synthetic construct
  source 1..20: mol_type = other DNA
cacctgtaatcacagctact

SEQ ID NO: 140227 - DNA, 20 bp, synthetic construct
  source 1..20: mol_type = other DNA
gcacctgtaatcacagctac

SEQ ID NO: 140228 - DNA, 20 bp, synthetic construct
  source 1..20: mol_type = other DNA
ggcacctgtaatcacagcta

SEQ ID NO: 140229 - DNA, 20 bp, synthetic construct
  source 1..20: mol_type = other DNA
aggcacctgtaatcacagct

SEQ ID NO: 140230 - DNA, 20 bp, synthetic construct
  source 1..20: mol_type = other DNA
caggcacctgtaatcacagc

SEQ ID NO: 140231 - DNA, 20 bp, synthetic construct
  source 1..20: mol_type = other DNA
gcaggcacctgtaatcacag

SEQ ID NO: 140232 - DNA, 20 bp, synthetic construct
  source 1..20: mol_type = other DNA
ggcaggcacctgtaatcaca

SEQ ID NO: 140233 - DNA, 20 bp, synthetic construct
  source 1..20: mol_type = other DNA
tggcaggcacctgtaatcac

SEQ ID NO: 140234 - DNA, 20 bp, synthetic construct
  source 1..20: mol_type = other DNA
gtggcaggcacctgtaatca

SEQ ID NO: 140235 - DNA, 20 bp, synthetic construct
  source 1..20: mol_type = other DNA
ggtggcaggcacctgtaatc

SEQ ID NO: 140236 - DNA, 20 bp, synthetic construct
  source 1..20: mol_type = other DNA
tggtggcaggcacctgtaat

SEQ ID NO: 140237 - DNA, 20 bp, synthetic construct
  source 1..20: mol_type = other DNA
gtggtggcaggcacctgtaa

SEQ ID NO: 140238 - DNA, 20 bp, synthetic construct
  source 1..20: mol_type = other DNA
cgtggtggcaggcacctgta

SEQ ID NO: 140239 - DNA, 20 bp, synthetic construct
  source 1..20: mol_type = other DNA
gcgtggtggcaggcacctgt

SEQ ID NO: 140240 - DNA, 20 bp, synthetic construct
  source 1..20: mol_type = other DNA
ggcgtggtggcaggcacctg

SEQ ID NO: 140241 - DNA, 20 bp, synthetic construct
  source 1..20: mol_type = other DNA
gggcgtggtggcaggcacct

SEQ ID NO: 140242 - DNA, 20 bp, synthetic construct
  source 1..20: mol_type = other DNA
tgggcgtggtggcaggcacc

SEQ ID NO: 140243 - DNA, 20 bp, synthetic construct
  source 1..20: mol_type = other DNA
ctgggcgtggtggcaggcac

SEQ ID NO: 140244 - DNA, 20 bp, synthetic construct
  source 1..20: mol_type = other DNA
gctgggcgtggtggcaggca

SEQ ID NO: 140245 - DNA, 20 bp, synthetic construct
  source 1..20: mol_type = other DNA
agctgggcgtggtggcaggc

SEQ ID NO: 140246 - DNA, 20 bp, synthetic construct
  source 1..20: mol_type = other DNA
tagctgggcgtggtggcagg

SEQ ID NO: 140247 - DNA, 20 bp, synthetic construct
  source 1..20: mol_type = other DNA
ttagctgggcgtggtggcag

SEQ ID NO: 140248 - DNA, 20 bp, synthetic construct
  source 1..20: mol_type = other DNA
attagctgggcgtggtggca

SEQ ID NO: 140249 - DNA, 20 bp, synthetic construct
  source 1..20: mol_type = other DNA
aattagctgggcgtggtggc

SEQ ID NO: 140250 - DNA, 20 bp, synthetic construct
  source 1..20: mol_type = other DNA
aaattagctgggcgtggtgg

SEQ ID NO: 140251 - DNA, 20 bp, synthetic construct
  source 1..20: mol_type = other DNA
aaaattagctgggcgtggtg

SEQ ID NO: 140252 - DNA, 20 bp, synthetic construct
  source 1..20: mol_type = other DNA
aaaaattagctgggcgtggt

SEQ ID NO: 140253 - DNA, 20 bp, synthetic construct
  source 1..20: mol_type = other DNA
caaaaattagctgggcgtgg

SEQ ID NO: 140254 - DNA, 20 bp, synthetic construct
  source 1..20: mol_type = other DNA
acaaaaattagctgggcgtg

SEQ ID NO: 140255 - DNA, 20 bp, synthetic construct
  source 1..20: mol_type = other DNA
tacaaaaattagctgggcgt

SEQ ID NO: 140256 - DNA, 20 bp, synthetic construct
  source 1..20: mol_type = other DNA
atacaaaaattagctgggcg

SEQ ID NO: 140257 - DNA, 20 bp, synthetic construct
  source 1..20: mol_type = other DNA
aatacaaaaattagctgggc

SEQ ID NO: 140258 - DNA, 20 bp, synthetic construct
  source 1..20: mol_type = other DNA
aaatacaaaaattagctggg

SEQ ID NO: 140259 - DNA, 20 bp, synthetic construct
  source 1..20: mol_type = other DNA
aaaatacaaaaattagctgg

SEQ ID NO: 140260 - DNA, 20 bp, synthetic construct
  source 1..20: mol_type = other DNA
aaaaatacaaaaattagctg

SEQ ID NO: 140261 - DNA, 20 bp, synthetic construct
  source 1..20: mol_type = other DNA
taaaaatacaaaaattagct

SEQ ID NO: 140262 - DNA, 20 bp, synthetic construct
  source 1..20: mol_type = other DNA
ctaaaaatacaaaaattagc

SEQ ID NO: 140263 - DNA, 20 bp, synthetic construct
  source 1..20: mol_type = other DNA
actaaaaatacaaaaattag

SEQ ID NO: 140264 - DNA, 20 bp, synthetic construct
  source 1..20: mol_type = other DNA
tactaaaaatacaaaaatta

SEQ ID NO: 140265 - DNA, 20 bp, synthetic construct
  source 1..20: mol_type = other DNA
ctactaaaaatacaaaaatt

SEQ ID NO: 140266 - DNA, 20 bp, synthetic construct
  source 1..20: mol_type = other DNA
tctactaaaaatacaaaaat

SEQ ID NO: 140267 - DNA, 20 bp, synthetic construct
  source 1..20: mol_type = other DNA
ctctactaaaaatacaaaaa

SEQ ID NO: 140268 - DNA, 20 bp, synthetic construct
  source 1..20: mol_type = other DNA
tctctactaaaaatacaaaa

SEQ ID NO: 140269 - DNA, 20 bp, synthetic construct
  source 1..20: mol_type = other DNA
gtctctactaaaaatacaaa

SEQ ID NO: 140270 - DNA, 20 bp, synthetic construct
  source 1..20: mol_type = other DNA
tgtctctactaaaaatacaa

SEQ ID NO: 140271 - DNA, 20 bp, synthetic construct
  source 1..20: mol_type = other DNA
ctgtctctactaaaaataca

SEQ ID NO: 140272 - DNA, 20 bp, synthetic construct
  source 1..20: mol_type = other DNA
cctgtctctactaaaaatac

SEQ ID NO: 140273 - DNA, 20 bp, synthetic construct
  source 1..20: mol_type = other DNA
ccctgtctctactaaaaata

SEQ ID NO: 140274 - DNA, 20 bp, synthetic construct
  source 1..20: mol_type = other DNA
accctgtctctactaaaaat

SEQ ID NO: 140275 - DNA, 20 bp, synthetic construct
  source 1..20: mol_type = other DNA
aaccctgtctctactaaaaa

SEQ ID NO: 140276 - DNA, 20 bp, synthetic construct
  source 1..20: mol_type = other DNA
aaaccctgtctctactaaaa

SEQ ID NO: 140277 - DNA, 20 bp, synthetic construct
  source 1..20: mol_type = other DNA
gaaaccctgtctctactaaa

SEQ ID NO: 140278 - DNA, 20 bp, synthetic construct
  source 1..20: mol_type = other DNA
cgaaaccctgtctctactaa

SEQ ID NO: 140279 - DNA, 20 bp, synthetic construct
  source 1..20: mol_type = other DNA
gcgaaaccctgtctctacta

SEQ ID NO: 140280 - DNA, 20 bp, synthetic construct
  source 1..20: mol_type = other DNA
ggcgaaaccctgtctctact

SEQ ID NO: 140281 - DNA, 20 bp, synthetic construct
  source 1..20: mol_type = other DNA
cggcgaaaccctgtctctac

SEQ ID NO: 140282 - DNA, 20 bp, synthetic construct
  source 1..20: mol_type = other DNA
acggcgaaaccctgtctcta

SEQ ID NO: 140283 - DNA, 20 bp, synthetic construct
  source 1..20: mol_type = other DNA
cacggcgaaaccctgtctct

SEQ ID NO: 140284 - DNA, 20 bp, synthetic construct
  source 1..20: mol_type = other DNA
acacggcgaaaccctgtctc

SEQ ID NO: 140285 - DNA, 20 bp, synthetic construct
  source 1..20: mol_type = other DNA
aacacggcgaaaccctgtct

SEQ ID NO: 140286 - DNA, 20 bp, synthetic construct
  source 1..20: mol_type = other DNA
caacacggcgaaaccctgtc

SEQ ID NO: 140287 - DNA, 20 bp, synthetic construct
  source 1..20: mol_type = other DNA
ccaacacggcgaaaccctgt

SEQ ID NO: 140288 - DNA, 20 bp, synthetic construct
  source 1..20: mol_type = other DNA
gccaacacggcgaaaccctg

SEQ ID NO: 140289 - DNA, 20 bp, synthetic construct
  source 1..20: mol_type = other DNA
ggccaacacggcgaaaccct

SEQ ID NO: 140290 - DNA, 20 bp, synthetic construct
  source 1..20: mol_type = other DNA
tggccaacacggcgaaaccc

SEQ ID NO: 140291 - DNA, 20 bp, synthetic construct
  source 1..20: mol_type = other DNA
ttggccaacacggcgaaacc

SEQ ID NO: 140292 - DNA, 20 bp, synthetic construct
  source 1..20: mol_type = other DNA
cttggccaacacggcgaaac

SEQ ID NO: 140293 - DNA, 20 bp, synthetic construct
  source 1..20: mol_type = other DNA
gcttggccaacacggcgaaa

SEQ ID NO: 140294 - DNA, 20 bp, synthetic construct
  source 1..20: mol_type = other DNA
agcttggccaacacggcgaa

SEQ ID NO: 140295 - DNA, 20 bp, synthetic construct
  source 1..20: mol_type = other DNA
cagcttggccaacacggcga

SEQ ID NO: 140296 - DNA, 20 bp, synthetic construct
  source 1..20: mol_type = other DNA
ccagcttggccaacacggcg

SEQ ID NO: 140297 - DNA, 20 bp, synthetic construct
  source 1..20: mol_type = other DNA
accagcttggccaacacggc

SEQ ID NO: 140298 - DNA, 20 bp, synthetic construct
  source 1..20: mol_type = other DNA
gaccagcttggccaacacgg

SEQ ID NO: 140299 - DNA, 20 bp, synthetic construct
  source 1..20: mol_type = other DNA
agaccagcttggccaacacg

SEQ ID NO: 140300 - DNA, 20 bp, synthetic construct
  source 1..20: mol_type = other DNA
gagaccagcttggccaacac

SEQ ID NO: 140301 - DNA, 20 bp, synthetic construct
  source 1..20: mol_type = other DNA
cgagaccagcttggccaaca

SEQ ID NO: 140302 - DNA, 20 bp, synthetic construct
  source 1..20: mol_type = other DNA
tcgagaccagcttggccaac

SEQ ID NO: 140303 - DNA, 20 bp, synthetic construct
  source 1..20: mol_type = other DNA
ttcgagaccagcttggccaa

SEQ ID NO: 140304 - DNA, 20 bp, synthetic construct
  source 1..20: mol_type = other DNA
gttcgagaccagcttggcca

SEQ ID NO: 140305 - DNA, 20 bp, synthetic construct
  source 1..20: mol_type = other DNA
agttcgagaccagcttggcc

SEQ ID NO: 140306 - DNA, 20 bp, synthetic construct
  source 1..20: mol_type = other DNA
gagttcgagaccagcttggc

SEQ ID NO: 140307 - DNA, 20 bp, synthetic construct
  source 1..20: mol_type = other DNA
ggagttcgagaccagcttgg

SEQ ID NO: 140308 - DNA, 20 bp, synthetic construct
  source 1..20: mol_type = other DNA
aggagttcgagaccagcttg

SEQ ID NO: 140309 - DNA, 20 bp, synthetic construct
  source 1..20: mol_type = other DNA
taggagttcgagaccagctt

SEQ ID NO: 140310 - DNA, 20 bp, synthetic construct
  source 1..20: mol_type = other DNA
ttaggagttcgagaccagct

SEQ ID NO: 140311 - DNA, 20 bp, synthetic construct
  source 1..20: mol_type = other DNA
gttaggagttcgagaccagc

SEQ ID NO: 140312 - DNA, 20 bp, synthetic construct
  source 1..20: mol_type = other DNA
ggttaggagttcgagaccag

SEQ ID NO: 140313 - DNA, 20 bp, synthetic construct
  source 1..20: mol_type = other DNA
aggttaggagttcgagacca

SEQ ID NO: 140314 - DNA, 20 bp, synthetic construct
  source 1..20: mol_type = other DNA
gaggttaggagttcgagacc

SEQ ID NO: 140315 - DNA, 20 bp, synthetic construct
  source 1..20: mol_type = other DNA
tgaggttaggagttcgagac

SEQ ID NO: 140316 - DNA, 20 bp, synthetic construct
  source 1..20: mol_type = other DNA
ctgaggttaggagttcgaga

SEQ ID NO: 140317 - DNA, 20 bp, synthetic construct
  source 1..20: mol_type = other DNA
cctgaggttaggagttcgag

SEQ ID NO: 140318 - DNA, 20 bp, synthetic construct
  source 1..20: mol_type = other DNA
acctgaggttaggagttcga

SEQ ID NO: 140319 - DNA, 20 bp, synthetic construct
  source 1..20: mol_type = other DNA
cacctgaggttaggagttcg

SEQ ID NO: 140320 - DNA, 20 bp, synthetic construct
  source 1..20: mol_type = other DNA
tcacctgaggttaggagttc

SEQ ID NO: 140321 - DNA, 20 bp, synthetic construct
  source 1..20: mol_type = other DNA
atcacctgaggttaggagtt

SEQ ID NO: 140322 - DNA, 20 bp, synthetic construct
  source 1..20: mol_type = other DNA
gatcacctgaggttaggagt

SEQ ID NO: 140323 - DNA, 20 bp, synthetic construct
  source 1..20: mol_type = other DNA
ggatcacctgaggttaggag

SEQ ID NO: 140324 - DNA, 20 bp, synthetic construct
  source 1..20: mol_type = other DNA
cggatcacctgaggttagga

SEQ ID NO: 140325 - DNA, 20 bp, synthetic construct
  source 1..20: mol_type = other DNA
gcggatcacctgaggttagg

SEQ ID NO: 140326 - DNA, 20 bp, synthetic construct
  source 1..20: mol_type = other DNA
ggcggatcacctgaggttag

SEQ ID NO: 140327 - DNA, 20 bp, synthetic construct
  source 1..20: mol_type = other DNA
gggcggatcacctgaggtta

SEQ ID NO: 140328 - DNA, 20 bp, synthetic construct
  source 1..20: mol_type = other DNA
cgggcggatcacctgaggtt

SEQ ID NO: 140329 - DNA, 20 bp, synthetic construct
  source 1..20: mol_type = other DNA
gcgggcggatcacctgaggt

SEQ ID NO: 140330 - DNA, 20 bp, synthetic construct
  source 1..20: mol_type = other DNA
ggcgggcggatcacctgagg

SEQ ID NO: 140331 - DNA, 20 bp, synthetic construct
  source 1..20: mol_type = other DNA
aggcgggcggatcacctgag

SEQ ID NO: 140332 - DNA, 20 bp, synthetic construct
  source 1..20: mol_type = other DNA
gaggcgggcggatcacctga

SEQ ID NO: 140333 - DNA, 20 bp, synthetic construct
  source 1..20: mol_type = other DNA
cgaggcgggcggatcacctg

SEQ ID NO: 140334 - DNA, 20 bp, synthetic construct
  source 1..20: mol_type = other DNA
ccgaggcgggcggatcacct

SEQ ID NO: 140335 - DNA, 20 bp, synthetic construct
  source 1..20: mol_type = other DNA
gccgaggcgggcggatcacc

SEQ ID NO: 140336 - DNA, 20 bp, synthetic construct
  source 1..20: mol_type = other DNA
ggccgaggcgggcggatcac

SEQ ID NO: 140337 - DNA, 20 bp, synthetic construct
  source 1..20: mol_type = other DNA
aggccgaggcgggcggatca

SEQ ID NO: 140338 - DNA, 20 bp, synthetic construct
  source 1..20: mol_type = other DNA
gaggccgaggcgggcggatc

SEQ ID NO: 140339 - DNA, 20 bp, synthetic construct
  source 1..20: mol_type = other DNA
ggaggccgaggcgggcggat

SEQ ID NO: 140340 - DNA, 20 bp, synthetic construct
  source 1..20: mol_type = other DNA
gggaggccgaggcgggcgga

SEQ ID NO: 140341 - DNA, 20 bp, synthetic construct
  source 1..20: mol_type = other DNA
tgggaggccgaggcgggcgg

SEQ ID NO: 140342 - DNA, 20 bp, synthetic construct
  source 1..20: mol_type = other DNA
ttgggaggccgaggcgggcg

SEQ ID NO: 140343 - DNA, 20 bp, synthetic construct
  source 1..20: mol_type = other DNA
tttgggaggccgaggcgggc

SEQ ID NO: 140344 - DNA, 20 bp, synthetic construct
  source 1..20: mol_type = other DNA
ttttgggaggccgaggcggg

SEQ ID NO: 140345 - DNA, 20 bp, synthetic construct
  source 1..20: mol_type = other DNA
attttgggaggccgaggcgg

SEQ ID NO: 140346 - DNA, 20 bp, synthetic construct
  source 1..20: mol_type = other DNA
cattttgggaggccgaggcg

SEQ ID NO: 140347 - DNA, 20 bp, synthetic construct
  source 1..20: mol_type = other DNA
gcattttgggaggccgaggc

SEQ ID NO: 140348 - DNA, 20 bp, synthetic construct
  source 1..20: mol_type = other DNA
agcattttgggaggccgagg

SEQ ID NO: 140349 - DNA, 20 bp, synthetic construct
  source 1..20: mol_type = other DNA
cagcattttgggaggccgag

SEQ ID NO: 140350 - DNA, 20 bp, synthetic construct
  source 1..20: mol_type = other DNA
ccagcattttgggaggccga

SEQ ID NO: 140351 - DNA, 20 bp, synthetic construct
  source 1..20: mol_type = other DNA
cccagcattttgggaggccg

SEQ ID NO: 140352 - DNA, 20 bp, synthetic construct
  source 1..20: mol_type = other DNA
tcccagcattttgggaggcc

SEQ ID NO: 140353 - DNA, 20 bp, synthetic construct
  source 1..20: mol_type = other DNA
atcccagcattttgggaggc

SEQ ID NO: 140354 - DNA, 20 bp, synthetic construct
  source 1..20: mol_type = other DNA
aatcccagcattttgggagg

SEQ ID NO: 140355 - DNA, 20 bp, synthetic construct
  source 1..20: mol_type = other DNA
taatcccagcattttgggag

SEQ ID NO: 140356 - DNA, 20 bp, synthetic construct
  source 1..20: mol_type = other DNA
gtaatcccagcattttggga

SEQ ID NO: 140357 - DNA, 20 bp, synthetic construct
  source 1..20: mol_type = other DNA
tgtaatcccagcattttggg

SEQ ID NO: 140358 - DNA, 20 bp, synthetic construct
  source 1..20: mol_type = other DNA
ttgtaatcccagcattttgg

SEQ ID NO: 140359 - DNA, 20 bp, synthetic construct
  source 1..20: mol_type = other DNA
cttgtaatcccagcattttg

SEQ ID NO: 140360 - DNA, 20 bp, synthetic construct
  source 1..20: mol_type = other DNA
gcttgtaatcccagcatttt

SEQ ID NO: 140361 - DNA, 20 bp, synthetic construct
  source 1..20: mol_type = other DNA
cgcttgtaatcccagcattt

SEQ ID NO: 140362 - DNA, 20 bp, synthetic construct
  source 1..20: mol_type = other DNA
acgcttgtaatcccagcatt

SEQ ID NO: 140363 - DNA, 20 bp, synthetic construct
  source 1..20: mol_type = other DNA
cacgcttgtaatcccagcat

SEQ ID NO: 140364 - DNA, 20 bp, synthetic construct
  source 1..20: mol_type = other DNA
tcacgcttgtaatcccagca

SEQ ID NO: 140365 - DNA, 20 bp, synthetic construct
  source 1..20: mol_type = other DNA
ctcacgcttgtaatcccagc

SEQ ID NO: 140366 - DNA, 20 bp, synthetic construct
  source 1..20: mol_type = other DNA
gctcacgcttgtaatcccag

SEQ ID NO: 140367 - DNA, 20 bp, synthetic construct
  source 1..20: mol_type = other DNA
ggctcacgcttgtaatccca

SEQ ID NO: 140368 - DNA, 20 bp, synthetic construct
  source 1..20: mol_type = other DNA
tggctcacgcttgtaatccc

SEQ ID NO: 140369 - DNA, 20 bp, synthetic construct
  source 1..20: mol_type = other DNA
gtggctcacgcttgtaatcc

SEQ ID NO: 140370 - DNA, 20 bp, synthetic construct
  source 1..20: mol_type = other DNA
ggtggctcacgcttgtaatc

SEQ ID NO: 140371 - DNA, 20 bp, synthetic construct
  source 1..20: mol_type = other DNA
cggtggctcacgcttgtaat

SEQ ID NO: 140372 - DNA, 20 bp, synthetic construct
  source 1..20: mol_type = other DNA
acggtggctcacgcttgtaa

SEQ ID NO: 140373 - DNA, 20 bp, synthetic construct
  source 1..20: mol_type = other DNA
cacggtggctcacgcttgta

SEQ ID NO: 140374 - DNA, 20 bp, synthetic construct
  source 1..20: mol_type = other DNA
gcacggtggctcacgcttgt

SEQ ID NO: 140375 - DNA, 20 bp, synthetic construct
  source 1..20: mol_type = other DNA
ggcacggtggctcacgcttg

SEQ ID NO: 140376 - DNA, 20 bp, synthetic construct
  source 1..20: mol_type = other DNA
gggcacggtggctcacgctt

SEQ ID NO: 140377 - DNA, 20 bp, synthetic construct
  source 1..20: mol_type = other DNA
cgggcacggtggctcacgct

SEQ ID NO: 140378 - DNA, 20 bp, synthetic construct
  source 1..20: mol_type = other DNA
ccgggcacggtggctcacgc

SEQ ID NO: 140379 - DNA, 20 bp, synthetic construct
  source 1..20: mol_type = other DNA
gccgggcacggtggctcacg

SEQ ID NO: 140380 - DNA, 20 bp, synthetic construct
  source 1..20: mol_type = other DNA
agccgggcacggtggctcac

SEQ ID NO: 140381 - DNA, 20 bp, synthetic construct
  source 1..20: mol_type = other DNA
gagccgggcacggtggctca

SEQ ID NO: 140382 - DNA, 20 bp, synthetic construct
  source 1..20: mol_type = other DNA
ggagccgggcacggtggctc

SEQ ID NO: 140383 - DNA, 20 bp, synthetic construct
  source 1..20: mol_type = other DNA
tggagccgggcacggtggct

SEQ ID NO: 140384 - DNA, 20 bp, synthetic construct
  source 1..20: mol_type = other DNA
atggagccgggcacggtggc

SEQ ID NO: 140385 - DNA, 20 bp, synthetic construct
  source 1..20: mol_type = other DNA
aatggagccgggcacggtgg

SEQ ID NO: 140386 - DNA, 20 bp, synthetic construct
  source 1..20: mol_type = other DNA
aaatggagccgggcacggtg

SEQ ID NO: 140387 - DNA, 20 bp, synthetic construct
  source 1..20: mol_type = other DNA
gaaatggagccgggcacggt

SEQ ID NO: 140388 - DNA, 20 bp, synthetic construct
  source 1..20: mol_type = other DNA
agaaatggagccgggcacgg

SEQ ID NO: 140389 - DNA, 20 bp, synthetic construct
  source 1..20: mol_type = other DNA
gagaaatggagccgggcacg

SEQ ID NO: 140390 - DNA, 20 bp, synthetic construct
  source 1..20: mol_type = other DNA
ggagaaatggagccgggcac

SEQ ID NO: 140391 - DNA, 20 bp, synthetic construct
  source 1..20: mol_type = other DNA
gggagaaatggagccgggca

SEQ ID NO: 140392 - DNA, 20 bp, synthetic construct
  source 1..20: mol_type = other DNA
tgggagaaatggagccgggc

SEQ ID NO: 140393 - DNA, 20 bp, synthetic construct
  source 1..20: mol_type = other DNA
ttgggagaaatggagccggg

SEQ ID NO: 140394 - DNA, 20 bp, synthetic construct
  source 1..20: mol_type = other DNA
attgggagaaatggagccgg

SEQ ID NO: 140395 - DNA, 20 bp, synthetic construct
  source 1..20: mol_type = other DNA
aattgggagaaatggagccg

SEQ ID NO: 140396 - DNA, 20 bp, synthetic construct
  source 1..20: mol_type = other DNA
aaattgggagaaatggagcc

SEQ ID NO: 140397 - DNA, 20 bp, synthetic construct
  source 1..20: mol_type = other DNA
gaaattgggagaaatggagc

SEQ ID NO: 140398 - DNA, 20 bp, synthetic construct
  source 1..20: mol_type = other DNA
tgaaattgggagaaatggag

SEQ ID NO: 140399 - DNA, 20 bp, synthetic construct
  source 1..20: mol_type = other DNA
ttgaaattgggagaaatgga

SEQ ID NO: 140400 - DNA, 20 bp, synthetic construct
  source 1..20: mol_type = other DNA
tttgaaattgggagaaatgg

SEQ ID NO: 140401 - DNA, 20 bp, synthetic construct
  source 1..20: mol_type = other DNA
atttgaaattgggagaaatg

SEQ ID NO: 140402 - DNA, 20 bp, synthetic construct
  source 1..20: mol_type = other DNA
aatttgaaattgggagaaat

SEQ ID NO: 140403 - DNA, 20 bp, synthetic construct
  source 1..20: mol_type = other DNA
gaatttgaaattgggagaaa

SEQ ID NO: 140404 - DNA, 20 bp, synthetic construct
  source 1..20: mol_type = other DNA
tgaatttgaaattgggagaa

SEQ ID NO: 140405 - DNA, 20 bp, synthetic construct
  source 1..20: mol_type = other DNA
ttgaatttgaaattgggaga

SEQ ID NO: 140406 - DNA, 20 bp, synthetic construct
  source 1..20: mol_type = other DNA
cttgaatttgaaattgggag

SEQ ID NO: 140407 - DNA, 20 bp, synthetic construct
  source 1..20: mol_type = other DNA
ccttgaatttgaaattggga

SEQ ID NO: 140408 - DNA, 20 bp, synthetic construct
  source 1..20: mol_type = other DNA
tccttgaatttgaaattggg

SEQ ID NO: 140409 - DNA, 20 bp, synthetic construct
  source 1..20: mol_type = other DNA
ctccttgaatttgaaattgg

SEQ ID NO: 140410 - DNA, 20 bp, synthetic construct
  source 1..20: mol_type = other DNA
cctccttgaatttgaaattg

SEQ ID NO: 140411 - DNA, 20 bp, synthetic construct
  source 1..20: mol_type = other DNA
tcctccttgaatttgaaatt

SEQ ID NO: 140412 - DNA, 20 bp, synthetic construct
  source 1..20: mol_type = other DNA
ttcctccttgaatttgaaat

SEQ ID NO: 140413 - DNA, 20 bp, synthetic construct
  source 1..20: mol_type = other DNA
tttcctccttgaatttgaaa

SEQ ID NO: 140414 - DNA, 20 bp, synthetic construct
  source 1..20: mol_type = other DNA
ttttcctccttgaatttgaa

SEQ ID NO: 140415 - DNA, 20 bp, synthetic construct
  source 1..20: mol_type = other DNA
cttttcctccttgaatttga

SEQ ID NO: 140416 - DNA, 20 bp, synthetic construct
  source 1..20: mol_type = other DNA
tcttttcctccttgaatttg

SEQ ID NO: 140417 - DNA, 20 bp, synthetic construct
  source 1..20: mol_type = other DNA
ttcttttcctccttgaattt

SEQ ID NO: 140418 - DNA, 20 bp, synthetic construct
  source 1..20: mol_type = other DNA
attcttttcctccttgaatt

SEQ ID NO: 140419 - DNA, 20 bp, synthetic construct
  source 1..20: mol_type = other DNA
aattcttttcctccttgaat

SEQ ID NO: 140420 - DNA, 20 bp, synthetic construct
  source 1..20: mol_type = other DNA
gaattcttttcctccttgaa

SEQ ID NO: 140421 - DNA, 20 bp, synthetic construct
  source 1..20: mol_type = other DNA
ggaattcttttcctccttga

SEQ ID NO: 140422 - DNA, 20 bp, synthetic construct
  source 1..20: mol_type = other DNA
aggaattcttttcctccttg

SEQ ID NO: 140423 - DNA, 20 bp, synthetic construct
  source 1..20: mol_type = other DNA
caggaattcttttcctcctt

SEQ ID NO: 140424 - DNA, 20 bp, synthetic construct
  source 1..20: mol_type = other DNA
tcaggaattcttttcctcct

SEQ ID NO: 140425 - DNA, 20 bp, synthetic construct
  source 1..20: mol_type = other DNA
atcaggaattcttttcctcc

SEQ ID NO: 140426 - DNA, 20 bp, synthetic construct
  source 1..20: mol_type = other DNA
aatcaggaattcttttcctc

SEQ ID NO: 140427 - DNA, 20 bp, synthetic construct
  source 1..20: mol_type = other DNA
taatcaggaattcttttcct

SEQ ID NO: 140428 - DNA, 20 bp, synthetic construct
  source 1..20: mol_type = other DNA
ttaatcaggaattcttttcc

SEQ ID NO: 140429 - DNA, 20 bp, synthetic construct
  source 1..20: mol_type = other DNA
cttaatcaggaattcttttc

SEQ ID NO: 140430 - DNA, 20 bp, synthetic construct
  source 1..20: mol_type = other DNA
ccttaatcaggaattctttt

SEQ ID NO: 140431 - DNA, 20 bp, synthetic construct
  source 1..20: mol_type = other DNA
accttaatcaggaattcttt

SEQ ID NO: 140432 - DNA, 20 bp, synthetic construct
  source 1..20: mol_type = other DNA
taccttaatcaggaattctt

SEQ ID NO: 140433 - DNA, 20 bp, synthetic construct
  source 1..20: mol_type = other DNA
gtaccttaatcaggaattct

SEQ ID NO: 140434 - DNA, 20 bp, synthetic construct
  source 1..20: mol_type = other DNA
agtaccttaatcaggaattc

SEQ ID NO: 140435 - DNA, 20 bp, synthetic construct
  source 1..20: mol_type = other DNA
aagtaccttaatcaggaatt

SEQ ID NO: 140436 - DNA, 20 bp, synthetic construct
  source 1..20: mol_type = other DNA
gaagtaccttaatcaggaat

SEQ ID NO: 140437 - DNA, 20 bp, synthetic construct
  source 1..20: mol_type = other DNA
agaagtaccttaatcaggaa

SEQ ID NO: 140438 - DNA, 20 bp, synthetic construct
  source 1..20: mol_type = other DNA
aagaagtaccttaatcagga

SEQ ID NO: 140439 - DNA, 20 bp, synthetic construct
  source 1..20: mol_type = other DNA
aaagaagtaccttaatcagg

SEQ ID NO: 140440 - DNA, 20 bp, synthetic construct
  source 1..20: mol_type = other DNA
gaaagaagtaccttaatcag

SEQ ID NO: 140441 - DNA, 20 bp, synthetic construct
  source 1..20: mol_type = other DNA
tgaaagaagtaccttaatca

SEQ ID NO: 140442 - DNA, 20 bp, synthetic construct
  source 1..20: mol_type = other DNA
ctgaaagaagtaccttaatc

SEQ ID NO: 140443 - DNA, 20 bp, synthetic construct
  source 1..20: mol_type = other DNA
tctgaaagaagtaccttaat

SEQ ID NO: 140444 - DNA, 20 bp, synthetic construct
  source 1..20: mol_type = other DNA
atctgaaagaagtaccttaa

SEQ ID NO: 140445 - DNA, 20 bp, synthetic construct
  source 1..20: mol_type = other DNA
gatctgaaagaagtacctta

SEQ ID NO: 140446 - DNA, 20 bp, synthetic construct
  source 1..20: mol_type = other DNA
agatctgaaagaagtacctt

SEQ ID NO: 140447 - DNA, 20 bp, synthetic construct
  source 1..20: mol_type = other DNA
aagatctgaaagaagtacct

SEQ ID NO: 140448 - DNA, 20 bp, synthetic construct
  source 1..20: mol_type = other DNA
aaagatctgaaagaagtacc

SEQ ID NO: 140449 - DNA, 20 bp, synthetic construct
  source 1..20: mol_type = other DNA
aaaagatctgaaagaagtac

SEQ ID NO: 140450 - DNA, 20 bp, synthetic construct
  source 1..20: mol_type = other DNA
caaaagatctgaaagaagta

SEQ ID NO: 140451 - DNA, 20 bp, synthetic construct
  source 1..20: mol_type = other DNA
tcaaaagatctgaaagaagt

SEQ ID NO: 140452 - DNA, 20 bp, synthetic construct
  source 1..20: mol_type = other DNA
ctcaaaagatctgaaagaag

SEQ ID NO: 140453 - DNA, 20 bp, synthetic construct
  source 1..20: mol_type = other DNA
gctcaaaagatctgaaagaa

SEQ ID NO: 140454 - DNA, 20 bp, synthetic construct
  source 1..20: mol_type = other DNA
agctcaaaagatctgaaaga

SEQ ID NO: 140455 - DNA, 20 bp, synthetic construct
  source 1..20: mol_type = other DNA
tagctcaaaagatctgaaag

SEQ ID NO: 140456 - DNA, 20 bp, synthetic construct
  source 1..20: mol_type = other DNA
ctagctcaaaagatctgaaa

SEQ ID NO: 140457 - DNA, 20 bp, synthetic construct
  source 1..20: mol_type = other DNA
tctagctcaaaagatctgaa

SEQ ID NO: 140458 - DNA, 20 bp, synthetic construct
  source 1..20: mol_type = other DNA
ttctagctcaaaagatctga

SEQ ID NO: 140459 - DNA, 20 bp, synthetic construct
  source 1..20: mol_type = other DNA
gttctagctcaaaagatctg

SEQ ID NO: 140460 - DNA, 20 bp, synthetic construct
  source 1..20: mol_type = other DNA
tgttctagctcaaaagatct

SEQ ID NO: 140461 - DNA, 20 bp, synthetic construct
  source 1..20: mol_type = other DNA
ttgttctagctcaaaagatc

SEQ ID NO: 140462 - DNA, 20 bp, synthetic construct
  source 1..20: mol_type = other DNA
tttgttctagctcaaaagat

SEQ ID NO: 140463 - DNA, 20 bp, synthetic construct
  source 1..20: mol_type = other DNA
ttttgttctagctcaaaaga

SEQ ID NO: 140464 - DNA, 20 bp, synthetic construct
  source 1..20: mol_type = other DNA
tttttgttctagctcaaaag

SEQ ID NO: 140465 - DNA, 20 bp, synthetic construct
  source 1..20: mol_type = other DNA
ttttttgttctagctcaaaa

SEQ ID NO: 140466 - DNA, 20 bp, synthetic construct
  source 1..20: mol_type = other DNA
tttttttgttctagctcaaa

SEQ ID NO: 140467 - DNA, 20 bp, synthetic construct
  source 1..20: mol_type = other DNA
gtttttttgttctagctcaa

SEQ ID NO: 140468 - DNA, 20 bp, synthetic construct
  source 1..20: mol_type = other DNA
tgtttttttgttctagctca

SEQ ID NO: 140469 - DNA, 20 bp, synthetic construct
  source 1..20: mol_type = other DNA
ttgtttttttgttctagctc

SEQ ID NO: 140470 - DNA, 20 bp, synthetic construct
  source 1..20: mol_type = other DNA
tttgtttttttgttctagct

SEQ ID NO: 140471 - DNA, 20 bp, synthetic construct
  source 1..20: mol_type = other DNA
ctttgtttttttgttctagc

SEQ ID NO: 140472 - DNA, 20 bp, synthetic construct
  source 1..20: mol_type = other DNA
cctttgtttttttgttctag

SEQ ID NO: 140473 - DNA, 20 bp, synthetic construct
  source 1..20: mol_type = other DNA
ccctttgtttttttgttcta

SEQ ID NO: 140474 - DNA, 20 bp, synthetic construct
  source 1..20: mol_type = other DNA
tccctttgtttttttgttct

SEQ ID NO: 140475 - DNA, 20 bp, synthetic construct
  source 1..20: mol_type = other DNA
ttccctttgtttttttgttc

SEQ ID NO: 140476 - DNA, 20 bp, synthetic construct
  source 1..20: mol_type = other DNA
tttccctttgtttttttgtt

SEQ ID NO: 140477 - DNA, 20 bp, synthetic construct
  source 1..20: mol_type = other DNA
atttccctttgtttttttgt

SEQ ID NO: 140478 - DNA, 20 bp, synthetic construct
  source 1..20: mol_type = other DNA
tatttccctttgtttttttg

SEQ ID NO: 140479 - DNA, 20 bp, synthetic construct
  source 1..20: mol_type = other DNA
atatttccctttgttttttt

SEQ ID NO: 140480 - DNA, 20 bp, synthetic construct
  source 1..20: mol_type = other DNA
aatatttccctttgtttttt

SEQ ID NO: 140481 - DNA, 20 bp, synthetic construct
  source 1..20: mol_type = other DNA
aaatatttccctttgttttt

SEQ ID NO: 140482 - DNA, 20 bp, synthetic construct
  source 1..20: mol_type = other DNA
gaaatatttccctttgtttt

SEQ ID NO: 140483 - DNA, 20 bp, synthetic construct
  source 1..20: mol_type = other DNA
agaaatatttccctttgttt

SEQ ID NO: 140484 - DNA, 20 bp, synthetic construct
  source 1..20: mol_type = other DNA
tagaaatatttccctttgtt

SEQ ID NO: 140485 - DNA, 20 bp, synthetic construct
  source 1..20: mol_type = other DNA
ttagaaatatttccctttgt

SEQ ID NO: 140486 - DNA, 20 bp, synthetic construct
  source 1..20: mol_type = other DNA
attagaaatatttccctttg

SEQ ID NO: 140487 - DNA, 20 bp, synthetic construct
  source 1..20: mol_type = other DNA
aattagaaatatttcccttt

SEQ ID NO: 140488 - DNA, 20 bp, synthetic construct
  source 1..20: mol_type = other DNA
taattagaaatatttccctt

SEQ ID NO: 140489 - DNA, 20 bp, synthetic construct
  source 1..20: mol_type = other DNA
ttaattagaaatatttccct

SEQ ID NO: 140490 - DNA, 20 bp, synthetic construct
  source 1..20: mol_type = other DNA
gttaattagaaatatttccc

SEQ ID NO: 140491 - DNA, 20 bp, synthetic construct
  source 1..20: mol_type = other DNA
agttaattagaaatatttcc

SEQ ID NO: 140492 - DNA, 20 bp, synthetic construct
  source 1..20: mol_type = other DNA
gagttaattagaaatatttc

SEQ ID NO: 140493 - DNA, 20 bp, synthetic construct
  source 1..20: mol_type = other DNA
agagttaattagaaatattt

SEQ ID NO: 140494 - DNA, 20 bp, synthetic construct
  source 1..20: mol_type = other DNA
aagagttaattagaaatatt

SEQ ID NO: 140495 - DNA, 20 bp, synthetic construct
  source 1..20: mol_type = other DNA
aaagagttaattagaaatat

SEQ ID NO: 140496 - DNA, 20 bp, synthetic construct
  source 1..20: mol_type = other DNA
aaaagagttaattagaaata

SEQ ID NO: 140497 - DNA, 20 bp, synthetic construct
  source 1..20: mol_type = other DNA
aaaaagagttaattagaaat

SEQ ID NO: 140498 - DNA, 20 bp, synthetic construct
  source 1..20: mol_type = other DNA
taaaaagagttaattagaaa

SEQ ID NO: 140499 - DNA, 20 bp, synthetic construct
  source 1..20: mol_type = other DNA
ttaaaaagagttaattagaa

SEQ ID NO: 140500 - DNA, 20 bp, synthetic construct
  source 1..20: mol_type = other DNA
tttaaaaagagttaattaga

SEQ ID NO: 140501 - DNA, 20 bp, synthetic construct
  source 1..20: mol_type = other DNA
atttaaaaagagttaattag

SEQ ID NO: 140502 - DNA, 20 bp, synthetic construct
  source 1..20: mol_type = other DNA
aatttaaaaagagttaatta

SEQ ID NO: 140503 - DNA, 20 bp, synthetic construct
  source 1..20: mol_type = other DNA
aaatttaaaaagagttaatt

SEQ ID NO: 140504 - DNA, 20 bp, synthetic construct
  source 1..20: mol_type = other DNA
aaaatttaaaaagagttaat

SEQ ID NO: 140505 - DNA, 20 bp, synthetic construct
  source 1..20: mol_type = other DNA
caaaatttaaaaagagttaa

SEQ ID NO: 140506 - DNA, 20 bp, synthetic construct
  source 1..20: mol_type = other DNA
acaaaatttaaaaagagtta

SEQ ID NO: 140507 - DNA, 20 bp, synthetic construct
  source 1..20: mol_type = other DNA
aacaaaatttaaaaagagtt

SEQ ID NO: 140508 - DNA, 20 bp, synthetic construct
  source 1..20: mol_type = other DNA
aaacaaaatttaaaaagagt

SEQ ID NO: 140509 - DNA, 20 bp, synthetic construct
  source 1..20: mol_type = other DNA
taaacaaaatttaaaaagag

SEQ ID NO: 140510 - DNA, 20 bp, synthetic construct
  source 1..20: mol_type = other DNA
gtaaacaaaatttaaaaaga

SEQ ID NO: 140511 - DNA, 20 bp, synthetic construct
  source 1..20: mol_type = other DNA
tgtaaacaaaatttaaaaag

SEQ ID NO: 140512 - DNA, 20 bp, synthetic construct
  source 1..20: mol_type = other DNA
ttgtaaacaaaatttaaaaa

SEQ ID NO: 140513 - DNA, 20 bp, synthetic construct
  source 1..20: mol_type = other DNA
gttgtaaacaaaatttaaaa

SEQ ID NO: 140514 - DNA, 20 bp, synthetic construct
  source 1..20: mol_type = other DNA
cgttgtaaacaaaatttaaa

SEQ ID NO: 140515 - DNA, 20 bp, synthetic construct
  source 1..20: mol_type = other DNA
acgttgtaaacaaaatttaa

SEQ ID NO: 140516 - DNA, 20 bp, synthetic construct
  source 1..20: mol_type = other DNA
tacgttgtaaacaaaattta

SEQ ID NO: 140517 - DNA, 20 bp, synthetic construct
  source 1..20: mol_type = other DNA
atacgttgtaaacaaaattt

SEQ ID NO: 140518 - DNA, 20 bp, synthetic construct
  source 1..20: mol_type = other DNA
catacgttgtaaacaaaatt

SEQ ID NO: 140519 - DNA, 20 bp, synthetic construct
  source 1..20: mol_type = other DNA
tcatacgttgtaaacaaaat

SEQ ID NO: 140520 - DNA, 20 bp, synthetic construct
  source 1..20: mol_type = other DNA
atcatacgttgtaaacaaaa

SEQ ID NO: 140521 - DNA, 20 bp, synthetic construct
  source 1..20: mol_type = other DNA
tatcatacgttgtaaacaaa

SEQ ID NO: 140522 - DNA, 20 bp, synthetic construct
  source 1..20: mol_type = other DNA
gtatcatacgttgtaaacaa

SEQ ID NO: 140523 - DNA, 20 bp, synthetic construct
  source 1..20: mol_type = other DNA
tgtatcatacgttgtaaaca

SEQ ID NO: 140524 - DNA, 20 bp, synthetic construct
  source 1..20: mol_type = other DNA
atgtatcatacgttgtaaac

SEQ ID NO: 140525 - DNA, 20 bp, synthetic construct
  source 1..20: mol_type = other DNA
tatgtatcatacgttgtaaa

SEQ ID NO: 140526 - DNA, 20 bp, synthetic construct
  source 1..20: mol_type = other DNA
atatgtatcatacgttgtaa

SEQ ID NO: 140527 - DNA, 20 bp, synthetic construct
  source 1..20: mol_type = other DNA
aatatgtatcatacgttgta

SEQ ID NO: 140528 - DNA, 20 bp, synthetic construct
  source 1..20: mol_type = other DNA
aaatatgtatcatacgttgt

SEQ ID NO: 140529 - DNA, 20 bp, synthetic construct
  source 1..20: mol_type = other DNA
aaaatatgtatcatacgttg

SEQ ID NO: 140530 - DNA, 20 bp, synthetic construct
  source 1..20: mol_type = other DNA
taaaatatgtatcatacgtt

SEQ ID NO: 140531 - DNA, 20 bp, synthetic construct
  source 1..20: mol_type = other DNA
gtaaaatatgtatcatacgt

SEQ ID NO: 140532 - DNA, 20 bp, synthetic construct
  source 1..20: mol_type = other DNA
tgtaaaatatgtatcatacg

SEQ ID NO: 140533 - DNA, 20 bp, synthetic construct
  source 1..20: mol_type = other DNA
gtgtaaaatatgtatcatac

SEQ ID NO: 140534 - DNA, 20 bp, synthetic construct
  source 1..20: mol_type = other DNA
tgtgtaaaatatgtatcata

SEQ ID NO: 140535 - DNA, 20 bp, synthetic construct
  source 1..20: mol_type = other DNA
atgtgtaaaatatgtatcat

SEQ ID NO: 140536 - DNA, 20 bp, synthetic construct
  source 1..20: mol_type = other DNA
gatgtgtaaaatatgtatca

SEQ ID NO: 140537 - DNA, 20 bp, synthetic construct
  source 1..20: mol_type = other DNA
ggatgtgtaaaatatgtatc

SEQ ID NO: 140538 - DNA, 20 bp, synthetic construct
  source 1..20: mol_type = other DNA
aggatgtgtaaaatatgtat

SEQ ID NO: 140539 - DNA, 20 bp, synthetic construct
  source 1..20: mol_type = other DNA
aaggatgtgtaaaatatgta

SEQ ID NO: 140540 - DNA, 20 bp, synthetic construct
  source 1..20: mol_type = other DNA
aaaggatgtgtaaaatatgt

SEQ ID NO: 140541 - DNA, 20 bp, synthetic construct
  source 1..20: mol_type = other DNA
caaaggatgtgtaaaatatg

SEQ ID NO: 140542 - DNA, 20 bp, synthetic construct
  source 1..20: mol_type = other DNA
acaaaggatgtgtaaaatat

SEQ ID NO: 140543 - DNA, 20 bp, synthetic construct
  source 1..20: mol_type = other DNA
cacaaaggatgtgtaaaata

SEQ ID NO: 140544 - DNA, 20 bp, synthetic construct
  source 1..20: mol_type = other DNA
ccacaaaggatgtgtaaaat

SEQ ID NO: 140545 - DNA, 20 bp, synthetic construct
  source 1..20: mol_type = other DNA
accacaaaggatgtgtaaaa

SEQ ID NO: 140546 - DNA, 20 bp, synthetic construct
  source 1..20: mol_type = other DNA
aaccacaaaggatgtgtaaa

SEQ ID NO: 140547 - DNA, 20 bp, synthetic construct
  source 1..20: mol_type = other DNA
aaaccacaaaggatgtgtaa

SEQ ID NO: 140548 - DNA, 20 bp, synthetic construct
  source 1..20: mol_type = other DNA
aaaaccacaaaggatgtgta

SEQ ID NO: 140549 - DNA, 20 bp, synthetic construct
  source 1..20: mol_type = other DNA
aaaaaccacaaaggatgtgt

SEQ ID NO: 140550 - DNA, 20 bp, synthetic construct
  source 1..20: mol_type = other DNA
caaaaaccacaaaggatgtg

SEQ ID NO: 140551 - DNA, 20 bp, synthetic construct
  source 1..20: mol_type = other DNA
acaaaaaccacaaaggatgt

SEQ ID NO: 140552 - DNA, 20 bp, synthetic construct
  source 1..20: mol_type = other DNA
aacaaaaaccacaaaggatg

SEQ ID NO: 140553 - DNA, 20 bp, synthetic construct
  source 1..20: mol_type = other DNA
gaacaaaaaccacaaaggat

SEQ ID NO: 140554 - DNA, 20 bp, synthetic construct
  source 1..20: mol_type = other DNA
cgaacaaaaaccacaaagga

SEQ ID NO: 140555 - DNA, 20 bp, synthetic construct
  source 1..20: mol_type = other DNA
acgaacaaaaaccacaaagg

SEQ ID NO: 140556 - DNA, 20 bp, synthetic construct
  source 1..20: mol_type = other DNA
gacgaacaaaaaccacaaag

SEQ ID NO: 140557 - DNA, 20 bp, synthetic construct
  source 1..20: mol_type = other DNA
agacgaacaaaaaccacaaa

SEQ ID NO: 140558 - DNA, 20 bp, synthetic construct
  source 1..20: mol_type = other DNA
aagacgaacaaaaaccacaa

SEQ ID NO: 140559 - DNA, 20 bp, synthetic construct
  source 1..20: mol_type = other DNA
caagacgaacaaaaaccaca

SEQ ID NO: 140560 - DNA, 20 bp, synthetic construct
  source 1..20: mol_type = other DNA
acaagacgaacaaaaaccac

SEQ ID NO: 140561 - DNA, 20 bp, synthetic construct
  source 1..20: mol_type = other DNA
aacaagacgaacaaaaacca

SEQ ID NO: 140562 - DNA, 20 bp, synthetic construct
  source 1..20: mol_type = other DNA
aaacaagacgaacaaaaacc

SEQ ID NO: 140563 - DNA, 20 bp, synthetic construct
  source 1..20: mol_type = other DNA
aaaacaagacgaacaaaaac

SEQ ID NO: 140564 - DNA, 20 bp, synthetic construct
  source 1..20: mol_type = other DNA
aaaaacaagacgaacaaaaa

SEQ ID NO: 140565 - DNA, 20 bp, synthetic construct
  source 1..20: mol_type = other DNA
taaaaacaagacgaacaaaa

SEQ ID NO: 140566 - DNA, 20 bp, synthetic construct
  source 1..20: mol_type = other DNA
ttaaaaacaagacgaacaaa

SEQ ID NO: 140567 - DNA, 20 bp, synthetic construct
  source 1..20: mol_type = other DNA
attaaaaacaagacgaacaa

SEQ ID NO: 140568 - DNA, 20 bp, synthetic construct
  source 1..20: mol_type = other DNA
gattaaaaacaagacgaaca

SEQ ID NO: 140569 - DNA, 20 bp, synthetic construct
  source 1..20: mol_type = other DNA
tgattaaaaacaagacgaac

SEQ ID NO: 140570 - DNA, 20 bp, synthetic construct
  source 1..20: mol_type = other DNA
ttgattaaaaacaagacgaa

SEQ ID NO: 140571 - DNA, 20 bp, synthetic construct
  source 1..20: mol_type = other DNA
attgattaaaaacaagacga

SEQ ID NO: 140572 - DNA, 20 bp, synthetic construct
  source 1..20: mol_type = other DNA
cattgattaaaaacaagacg

SEQ ID NO: 140573 - DNA, 20 bp, synthetic construct
  source 1..20: mol_type = other DNA
gcattgattaaaaacaagac

SEQ ID NO: 140574 - DNA, 20 bp, synthetic construct
  source 1..20: mol_type = other DNA
ggcattgattaaaaacaaga

SEQ ID NO: 140575 - DNA, 20 bp, synthetic construct
  source 1..20: mol_type = other DNA
aggcattgattaaaaacaag

SEQ ID NO: 140576 - DNA, 20 bp, synthetic construct
  source 1..20: mol_type = other DNA
aaggcattgattaaaaacaa

SEQ ID NO: 140577 - DNA, 20 bp, synthetic construct
  source 1..20: mol_type = other DNA
caaggcattgattaaaaaca

SEQ ID NO: 140578 - DNA, 20 bp, synthetic construct
  source 1..20: mol_type = other DNA
gcaaggcattgattaaaaac

SEQ ID NO: 140579 - DNA, 20 bp, synthetic construct
  source 1..20: mol_type = other DNA
tgcaaggcattgattaaaaa

SEQ ID NO: 140580 - DNA, 20 bp, synthetic construct
  source 1..20: mol_type = other DNA
ttgcaaggcattgattaaaa

SEQ ID NO: 140581 - DNA, 20 bp, synthetic construct
  source 1..20: mol_type = other DNA
cttgcaaggcattgattaaa

SEQ ID NO: 140582 - DNA, 20 bp, synthetic construct
  source 1..20: mol_type = other DNA
acttgcaaggcattgattaa

SEQ ID NO: 140583 - DNA, 20 bp, synthetic construct
  source 1..20: mol_type = other DNA
aacttgcaaggcattgatta

SEQ ID NO: 140584 - DNA, 20 bp, synthetic construct
  source 1..20: mol_type = other DNA
aaacttgcaaggcattgatt

SEQ ID NO: 140585 - DNA, 20 bp, synthetic construct
  source 1..20: mol_type = other DNA
taaacttgcaaggcattgat

SEQ ID NO: 140586 - DNA, 20 bp, synthetic construct
  source 1..20: mol_type = other DNA
gtaaacttgcaaggcattga

SEQ ID NO: 140587 - DNA, 20 bp, synthetic construct
  source 1..20: mol_type = other DNA
ggtaaacttgcaaggcattg

SEQ ID NO: 140588 - DNA, 20 bp, synthetic construct
  source 1..20: mol_type = other DNA
cggtaaacttgcaaggcatt

SEQ ID NO: 140589 - DNA, 20 bp, synthetic construct
  source 1..20: mol_type = other DNA
ccggtaaacttgcaaggcat

SEQ ID NO: 140590 - DNA, 20 bp, synthetic construct
  source 1..20: mol_type = other DNA
accggtaaacttgcaaggca

SEQ ID NO: 140591 - DNA, 20 bp, synthetic construct
  source 1..20: mol_type = other DNA
taccggtaaacttgcaaggc

SEQ ID NO: 140592 - DNA, 20 bp, synthetic construct
  source 1..20: mol_type = other DNA
ataccggtaaacttgcaagg

SEQ ID NO: 140593 - DNA, 20 bp, synthetic construct
  source 1..20: mol_type = other DNA
aataccggtaaacttgcaag

SEQ ID NO: 140594 - DNA, 20 bp, synthetic construct
  source 1..20: mol_type = other DNA
aaataccggtaaacttgcaa

SEQ ID NO: 140595 - DNA, 20 bp, synthetic construct
  source 1..20: mol_type = other DNA
taaataccggtaaacttgca

SEQ ID NO: 140596 - DNA, 20 bp, synthetic construct
  source 1..20: mol_type = other DNA
ctaaataccggtaaacttgc

SEQ ID NO: 140597 - DNA, 20 bp, synthetic construct
  source 1..20: mol_type = other DNA
cctaaataccggtaaacttg

SEQ ID NO: 140598 - DNA, 20 bp, synthetic construct
  source 1..20: mol_type = other DNA
acctaaataccggtaaactt

SEQ ID NO: 140599 - DNA, 20 bp, synthetic construct
  source 1..20: mol_type = other DNA
tacctaaataccggtaaact

SEQ ID NO: 140600 - DNA, 20 bp, synthetic construct
  source 1..20: mol_type = other DNA
ctacctaaataccggtaaac

SEQ ID NO: 140601 - DNA, 20 bp, synthetic construct
  source 1..20: mol_type = other DNA
cctacctaaataccggtaaa

SEQ ID NO: 140602 - DNA, 20 bp, synthetic construct
  source 1..20: mol_type = other DNA
ccctacctaaataccggtaa

SEQ ID NO: 140603 - DNA, 20 bp, synthetic construct
  source 1..20: mol_type = other DNA
tccctacctaaataccggta

SEQ ID NO: 140604 - DNA, 20 bp, synthetic construct
  source 1..20: mol_type = other DNA
ttccctacctaaataccggt

SEQ ID NO: 140605 - DNA, 20 bp, synthetic construct
  source 1..20: mol_type = other DNA
tttccctacctaaataccgg

SEQ ID NO: 140606 - DNA, 20 bp, synthetic construct
  source 1..20: mol_type = other DNA
ctttccctacctaaataccg

SEQ ID NO: 140607 - DNA, 20 bp, synthetic construct
  source 1..20: mol_type = other DNA
cctttccctacctaaatacc

SEQ ID NO: 140608 - DNA, 20 bp, synthetic construct
  source 1..20: mol_type = other DNA
tcctttccctacctaaatac

SEQ ID NO: 140609 - DNA, 20 bp, synthetic construct
  source 1..20: mol_type = other DNA
atcctttccctacctaaata

SEQ ID NO: 140610 - DNA, 20 bp, synthetic construct
  source 1..20: mol_type = other DNA
aatcctttccctacctaaat

SEQ ID NO: 140611 - DNA, 20 bp, synthetic construct
  source 1..20: mol_type = other DNA
aaatcctttccctacctaaa

SEQ ID NO: 140612 - DNA, 20 bp, synthetic construct
  source 1..20: mol_type = other DNA
aaaatcctttccctacctaa

SEQ ID NO: 140613 - DNA, 20 bp, synthetic construct
  source 1..20: mol_type = other DNA
caaaatcctttccctaccta

SEQ ID NO: 140614 - DNA, 20 bp, synthetic construct
  source 1..20: mol_type = other DNA
acaaaatcctttccctacct

SEQ ID NO: 140615 - DNA, 20 bp, synthetic construct
  source 1..20: mol_type = other DNA
aacaaaatcctttccctacc

SEQ ID NO: 140616 - DNA, 20 bp, synthetic construct
  source 1..20: mol_type = other DNA
aaacaaaatcctttccctac

SEQ ID NO: 140617 - DNA, 20 bp, synthetic construct
  source 1..20: mol_type = other DNA
aaaacaaaatcctttcccta

SEQ ID NO: 140618 - DNA, 20 bp, synthetic construct
  source 1..20: mol_type = other DNA
aaaaacaaaatcctttccct

SEQ ID NO: 140619 - DNA, 20 bp, synthetic construct
  source 1..20: mol_type = other DNA
caaaaacaaaatcctttccc

SEQ ID NO: 140620 - DNA, 20 bp, synthetic construct
  source 1..20: mol_type = other DNA
acaaaaacaaaatcctttcc

SEQ ID NO: 140621 - DNA, 20 bp, synthetic construct
  source 1..20: mol_type = other DNA
aacaaaaacaaaatcctttc

SEQ ID NO: 140622 - DNA, 20 bp, synthetic construct
  source 1..20: mol_type = other DNA
aaacaaaaacaaaatccttt

SEQ ID NO: 140623 - DNA, 20 bp, synthetic construct
  source 1..20: mol_type = other DNA
aaaacaaaaacaaaatcctt

SEQ ID NO: 140624 - DNA, 20 bp, synthetic construct
  source 1..20: mol_type = other DNA
aaaaacaaaaacaaaatcct

SEQ ID NO: 140625 - DNA, 20 bp, synthetic construct
  source 1..20: mol_type = other DNA
aaaaaacaaaaacaaaatcc

SEQ ID NO: 140626 - DNA, 20 bp, synthetic construct
  source 1..20: mol_type = other DNA
aaaaaaacaaaaacaaaatc

SEQ ID NO: 140627 - DNA, 20 bp, synthetic construct
  source 1..20: mol_type = other DNA
taaaaaaacaaaaacaaaat

SEQ ID NO: 140628 - DNA, 20 bp, synthetic construct
  source 1..20: mol_type = other DNA
ttaaaaaaacaaaaacaaaa

SEQ ID NO: 140629 - DNA, 20 bp, synthetic construct
  source 1..20: mol_type = other DNA
tttaaaaaaacaaaaacaaa

SEQ ID NO: 140630 - DNA, 20 bp, synthetic construct
  source 1..20: mol_type = other DNA
gtttaaaaaaacaaaaacaa

SEQ ID NO: 140631 - DNA, 20 bp, synthetic construct
  source 1..20: mol_type = other DNA
tgtttaaaaaaacaaaaaca

SEQ ID NO: 140632 - DNA, 20 bp, synthetic construct
  source 1..20: mol_type = other DNA
ttgtttaaaaaaacaaaaac

SEQ ID NO: 140633 - DNA, 20 bp, synthetic construct
  source 1..20: mol_type = other DNA
tttgtttaaaaaaacaaaaa

SEQ ID NO: 140634 - DNA, 20 bp, synthetic construct
  source 1..20: mol_type = other DNA
ctttgtttaaaaaaacaaaa

SEQ ID NO: 140635 - DNA, 20 bp, synthetic construct
  source 1..20: mol_type = other DNA
gctttgtttaaaaaaacaaa

SEQ ID NO: 140636 - DNA, 20 bp, synthetic construct
  source 1..20: mol_type = other DNA
ggctttgtttaaaaaaacaa

SEQ ID NO: 140637 - DNA, 20 bp, synthetic construct
  source 1..20: mol_type = other DNA
aggctttgtttaaaaaaaca

SEQ ID NO: 140638 - DNA, 20 bp, synthetic construct
  source 1..20: mol_type = other DNA
taggctttgtttaaaaaaac

SEQ ID NO: 140639 - DNA, 20 bp, synthetic construct
  source 1..20: mol_type = other DNA
ataggctttgtttaaaaaaa

SEQ ID NO: 140640 - DNA, 20 bp, synthetic construct
  source 1..20: mol_type = other DNA
cataggctttgtttaaaaaa

SEQ ID NO: 140641 - DNA, 20 bp, synthetic construct
  source 1..20: mol_type = other DNA
acataggctttgtttaaaaa

SEQ ID NO: 140642 - DNA, 20 bp, synthetic construct
  source 1..20: mol_type = other DNA
tacataggctttgtttaaaa

SEQ ID NO: 140643 - DNA, 20 bp, synthetic construct
  source 1..20: mol_type = other DNA
gtacataggctttgtttaaa

SEQ ID NO: 140644 - DNA, 20 bp, synthetic construct
  source 1..20: mol_type = other DNA
tgtacataggctttgtttaa

SEQ ID NO: 140645 - DNA, 20 bp, synthetic construct
  source 1..20: mol_type = other DNA
atgtacataggctttgttta

SEQ ID NO: 140646 - DNA, 20 bp, synthetic construct
  source 1..20: mol_type = other DNA
aatgtacataggctttgttt

SEQ ID NO: 140647 - DNA, 20 bp, synthetic construct
  source 1..20: mol_type = other DNA
gaatgtacataggctttgtt

SEQ ID NO: 140648 - DNA, 20 bp, synthetic construct
  source 1..20: mol_type = other DNA
tgaatgtacataggctttgt

SEQ ID NO: 140649 - DNA, 20 bp, synthetic construct
  source 1..20: mol_type = other DNA
gtgaatgtacataggctttg

SEQ ID NO: 140650 - DNA, 20 bp, synthetic construct
  source 1..20: mol_type = other DNA
agtgaatgtacataggcttt

SEQ ID NO: 140651 - DNA, 20 bp, synthetic construct
  source 1..20: mol_type = other DNA
gagtgaatgtacataggctt

SEQ ID NO: 140652 - DNA, 20 bp, synthetic construct
  source 1..20: mol_type = other DNA
tgagtgaatgtacataggct

SEQ ID NO: 140653 - DNA, 20 bp, synthetic construct
  source 1..20: mol_type = other DNA
ctgagtgaatgtacataggc

SEQ ID NO: 140654 - DNA, 20 bp, synthetic construct
  source 1..20: mol_type = other DNA
gctgagtgaatgtacatagg

SEQ ID NO: 140655 - DNA, 20 bp, synthetic construct
  source 1..20: mol_type = other DNA
agctgagtgaatgtacatag

SEQ ID NO: 140656 - DNA, 20 bp, synthetic construct
  source 1..20: mol_type = other DNA
aagctgagtgaatgtacata

SEQ ID NO: 140657 - DNA, 20 bp, synthetic construct
  source 1..20: mol_type = other DNA
caagctgagtgaatgtacat

SEQ ID NO: 140658 - DNA, 20 bp, synthetic construct
  source 1..20: mol_type = other DNA
ccaagctgagtgaatgtaca

SEQ ID NO: 140659 - DNA, 20 bp, synthetic construct
  source 1..20: mol_type = other DNA
cccaagctgagtgaatgtac

SEQ ID NO: 140660 - DNA, 20 bp, synthetic construct
  source 1..20: mol_type = other DNA
acccaagctgagtgaatgta

SEQ ID NO: 140661 - DNA, 20 bp, synthetic construct
  source 1..20: mol_type = other DNA
tacccaagctgagtgaatgt

SEQ ID NO: 140662 - DNA, 20 bp, synthetic construct
  source 1..20: mol_type = other DNA
atacccaagctgagtgaatg

SEQ ID NO: 140663 - DNA, 20 bp, synthetic construct
  source 1..20: mol_type = other DNA
aatacccaagctgagtgaat

SEQ ID NO: 140664 - DNA, 20 bp, synthetic construct
  source 1..20: mol_type = other DNA
aaatacccaagctgagtgaa

SEQ ID NO: 140665 - DNA, 20 bp, synthetic construct
  source 1..20: mol_type = other DNA
caaatacccaagctgagtga

SEQ ID NO: 140666 - DNA, 20 bp, synthetic construct
  source 1..20: mol_type = other DNA
acaaatacccaagctgagtg

SEQ ID NO: 140667 - DNA, 20 bp, synthetic construct
  source 1..20: mol_type = other DNA
cacaaatacccaagctgagt

SEQ ID NO: 140668 - DNA, 20 bp, synthetic construct
  source 1..20: mol_type = other DNA
gcacaaatacccaagctgag

SEQ ID NO: 140669 - DNA, 20 bp, synthetic construct
  source 1..20: mol_type = other DNA
agcacaaatacccaagctga

SEQ ID NO: 140670 - DNA, 20 bp, synthetic construct
  source 1..20: mol_type = other DNA
tagcacaaatacccaagctg

SEQ ID NO: 140671 - DNA, 20 bp, synthetic construct
  source 1..20: mol_type = other DNA
atagcacaaatacccaagct

SEQ ID NO: 140672 - DNA, 20 bp, synthetic construct
  source 1..20: mol_type = other DNA
catagcacaaatacccaagc

SEQ ID NO: 140673 - DNA, 20 bp, synthetic construct
  source 1..20: mol_type = other DNA
gcatagcacaaatacccaag

SEQ ID NO: 140674 - DNA, 20 bp, synthetic construct
  source 1..20: mol_type = other DNA
tgcatagcacaaatacccaa

SEQ ID NO: 140675 - DNA, 20 bp, synthetic construct
  source 1..20: mol_type = other DNA
atgcatagcacaaataccca

SEQ ID NO: 140676 - DNA, 20 bp, synthetic construct
  source 1..20: mol_type = other DNA
catgcatagcacaaataccc

SEQ ID NO: 140677 - DNA, 20 bp, synthetic construct
  source 1..20: mol_type = other DNA
gcatgcatagcacaaatacc

SEQ ID NO: 140678 - DNA, 20 bp, synthetic construct
  source 1..20: mol_type = other DNA
tgcatgcatagcacaaatac

SEQ ID NO: 140679 - DNA, 20 bp, synthetic construct
  source 1..20: mol_type = other DNA
ttgcatgcatagcacaaata

SEQ ID NO: 140680 - DNA, 20 bp, synthetic construct
  source 1..20: mol_type = other DNA
tttgcatgcatagcacaaat

SEQ ID NO: 140681 - DNA, 20 bp, synthetic construct
  source 1..20: mol_type = other DNA
atttgcatgcatagcacaaa

SEQ ID NO: 140682 - DNA, 20 bp, synthetic construct
  source 1..20: mol_type = other DNA
aatttgcatgcatagcacaa

SEQ ID NO: 140683 - DNA, 20 bp, synthetic construct
  source 1..20: mol_type = other DNA
taatttgcatgcatagcaca

SEQ ID NO: 140684 - DNA, 20 bp, synthetic construct
  source 1..20: mol_type = other DNA
ctaatttgcatgcatagcac

SEQ ID NO: 140685 - DNA, 20 bp, synthetic construct
  source 1..20: mol_type = other DNA
gctaatttgcatgcatagca

SEQ ID NO: 140686 - DNA, 20 bp, synthetic construct
  source 1..20: mol_type = other DNA
agctaatttgcatgcatagc

SEQ ID NO: 140687 - DNA, 20 bp, synthetic construct
  source 1..20: mol_type = other DNA
tagctaatttgcatgcatag

SEQ ID NO: 140688 - DNA, 20 bp, synthetic construct
  source 1..20: mol_type = other DNA
atagctaatttgcatgcata

SEQ ID NO: 140689 - DNA, 20 bp, synthetic construct
  source 1..20: mol_type = other DNA
tatagctaatttgcatgcat

SEQ ID NO: 140690 - DNA, 20 bp, synthetic construct
  source 1..20: mol_type = other DNA
ctatagctaatttgcatgca

SEQ ID NO: 140691 - DNA, 20 bp, synthetic construct
  source 1..20: mol_type = other DNA
tctatagctaatttgcatgc

SEQ ID NO: 140692 - DNA, 20 bp, synthetic construct
  source 1..20: mol_type = other DNA
atctatagctaatttgcatg

SEQ ID NO: 140693 - DNA, 20 bp, synthetic construct
  source 1..20: mol_type = other DNA
aatctatagctaatttgcat

SEQ ID NO: 140694 - DNA, 20 bp, synthetic construct
  source 1..20: mol_type = other DNA
taatctatagctaatttgca

SEQ ID NO: 140695 - DNA, 20 bp, synthetic construct
  source 1..20: mol_type = other DNA
ctaatctatagctaatttgc

SEQ ID NO: 140696 - DNA, 20 bp, synthetic construct
  source 1..20: mol_type = other DNA
tctaatctatagctaatttg

SEQ ID NO: 140697 - DNA, 20 bp, synthetic construct
  source 1..20: mol_type = other DNA
ttctaatctatagctaattt

SEQ ID NO: 140698 - DNA, 20 bp, synthetic construct
  source 1..20: mol_type = other DNA
tttctaatctatagctaatt

SEQ ID NO: 140699 - DNA, 20 bp, synthetic construct
  source 1..20: mol_type = other DNA
ttttctaatctatagctaat

SEQ ID NO: 140700 - DNA, 20 bp, synthetic construct
  source 1..20: mol_type = other DNA
gttttctaatctatagctaa

SEQ ID NO: 140701 - DNA, 20 bp, synthetic construct
  source 1..20: mol_type = other DNA
ggttttctaatctatagcta

SEQ ID NO: 140702 - DNA, 20 bp, synthetic construct
  source 1..20: mol_type = other DNA
cggttttctaatctatagct

SEQ ID NO: 140703 - DNA, 20 bp, synthetic construct
  source 1..20: mol_type = other DNA
acggttttctaatctatagc

SEQ ID NO: 140704 - DNA, 20 bp, synthetic construct
  source 1..20: mol_type = other DNA
tacggttttctaatctatag

SEQ ID NO: 140705 - DNA, 20 bp, synthetic construct
  source 1..20: mol_type = other DNA
atacggttttctaatctata

SEQ ID NO: 140706 - DNA, 20 bp, synthetic construct
  source 1..20: mol_type = other DNA
aatacggttttctaatctat

SEQ ID NO: 140707 - DNA, 20 bp, synthetic construct
  source 1..20: mol_type = other DNA
taatacggttttctaatcta

SEQ ID NO: 140708 - DNA, 20 bp, synthetic construct
  source 1..20: mol_type = other DNA
ataatacggttttctaatct

SEQ ID NO: 140709 - DNA, 20 bp, synthetic construct
  source 1..20: mol_type = other DNA
tataatacggttttctaatc

SEQ ID NO: 140710 - DNA, 20 bp, synthetic construct
  source 1..20: mol_type = other DNA
ctataatacggttttctaat

SEQ ID NO: 140711 - DNA, 20 bp, synthetic construct
  source 1..20: mol_type = other DNA
actataatacggttttctaa

SEQ ID NO: 140712 - DNA, 20 bp, synthetic construct
  source 1..20: mol_type = other DNA
gactataatacggttttcta

SEQ ID NO: 140713 - DNA, 20 bp, synthetic construct
  source 1..20: mol_type = other DNA
agactataatacggttttct

SEQ ID NO: 140714 - DNA, 20 bp, synthetic construct
  source 1..20: mol_type = other DNA
aagactataatacggttttc

SEQ ID NO: 140715 - DNA, 20 bp, synthetic construct
  source 1..20: mol_type = other DNA
aaagactataatacggtttt

SEQ ID NO: 140716 - DNA, 20 bp, synthetic construct
  source 1..20: mol_type = other DNA
taaagactataatacggttt

SEQ ID NO: 140717 - DNA, 20 bp, synthetic construct
  source 1..20: mol_type = other DNA
ttaaagactataatacggtt

SEQ ID NO: 140718 - DNA, 20 bp, synthetic construct
  source 1..20: mol_type = other DNA
tttaaagactataatacggt

SEQ ID NO: 140719 - DNA, 20 bp, synthetic construct
  source 1..20: mol_type = other DNA
atttaaagactataatacgg

SEQ ID NO: 140720 - DNA, 20 bp, synthetic construct
  source 1..20: mol_type = other DNA
tatttaaagactataatacg

SEQ ID NO: 140721 - DNA, 20 bp, synthetic construct
  source 1..20: mol_type = other DNA
gtatttaaagactataatac

SEQ ID NO: 140722 - DNA, 20 bp, synthetic construct
  source 1..20: mol_type = other DNA
agtatttaaagactataata

SEQ ID NO: 140723 - DNA, 20 bp, synthetic construct
  source 1..20: mol_type = other DNA
cagtatttaaagactataat

SEQ ID NO: 140724 - DNA, 20 bp, synthetic construct
  source 1..20: mol_type = other DNA
ccagtatttaaagactataa

SEQ ID NO: 140725 - DNA, 20 bp, synthetic construct
  source 1..20: mol_type = other DNA
accagtatttaaagactata

SEQ ID NO: 140726 - DNA, 20 bp, synthetic construct
  source 1..20: mol_type = other DNA
taccagtatttaaagactat

SEQ ID NO: 140727 - DNA, 20 bp, synthetic construct
  source 1..20: mol_type = other DNA
ttaccagtatttaaagacta

SEQ ID NO: 140728 - DNA, 20 bp, synthetic construct
  source 1..20: mol_type = other DNA
tttaccagtatttaaagact

SEQ ID NO: 140729 - DNA, 20 bp, synthetic construct
  source 1..20: mol_type = other DNA
gtttaccagtatttaaagac

SEQ ID NO: 140730 - DNA, 20 bp, synthetic construct
  source 1..20: mol_type = other DNA
agtttaccagtatttaaaga

SEQ ID NO: 140731 - DNA, 20 bp, synthetic construct
  source 1..20: mol_type = other DNA
aagtttaccagtatttaaag

SEQ ID NO: 140732 - DNA, 20 bp, synthetic construct
  source 1..20: mol_type = other DNA
taagtttaccagtatttaaa

SEQ ID NO: 140733 - DNA, 20 bp, synthetic construct
  source 1..20: mol_type = other DNA
ttaagtttaccagtatttaa

SEQ ID NO: 140734 - DNA, 20 bp, synthetic construct
  source 1..20: mol_type = other DNA
tttaagtttaccagtattta

SEQ ID NO: 140735 - DNA, 20 bp, synthetic construct
  source 1..20: mol_type = other DNA
atttaagtttaccagtattt

SEQ ID NO: 140736 - DNA, 20 bp, synthetic construct
  source 1..20: mol_type = other DNA
aatttaagtttaccagtatt

SEQ ID NO: 140737 - DNA, 20 bp, synthetic construct
  source 1..20: mol_type = other DNA
caatttaagtttaccagtat

SEQ ID NO: 140738 - DNA, 20 bp, synthetic construct
  source 1..20: mol_type = other DNA
gcaatttaagtttaccagta

SEQ ID NO: 140739 - DNA, 20 bp, synthetic construct
  source 1..20: mol_type = other DNA
tgcaatttaagtttaccagt

SEQ ID NO: 140740 - DNA, 20 bp, synthetic construct
  source 1..20: mol_type = other DNA
ctgcaatttaagtttaccag

SEQ ID NO: 140741 - DNA, 20 bp, synthetic construct
  source 1..20: mol_type = other DNA
tctgcaatttaagtttacca

SEQ ID NO: 140742 - DNA, 20 bp, synthetic construct
  source 1..20: mol_type = other DNA
ctctgcaatttaagtttacc

SEQ ID NO: 140743 - DNA, 20 bp, synthetic construct
  source 1..20: mol_type = other DNA
tctctgcaatttaagtttac

SEQ ID NO: 140744 - DNA, 20 bp, synthetic construct
  source 1..20: mol_type = other DNA
atctctgcaatttaagttta

SEQ ID NO: 140745 - DNA, 20 bp, synthetic construct
  source 1..20: mol_type = other DNA
catctctgcaatttaagttt

SEQ ID NO: 140746 - DNA, 20 bp, synthetic construct
  source 1..20: mol_type = other DNA
gcatctctgcaatttaagtt

SEQ ID NO: 140747 - DNA, 20 bp, synthetic construct
  source 1..20: mol_type = other DNA
ggcatctctgcaatttaagt

SEQ ID NO: 140748 - DNA, 20 bp, synthetic construct
  source 1..20: mol_type = other DNA
aggcatctctgcaatttaag

SEQ ID NO: 140749 - DNA, 20 bp, synthetic construct
  source 1..20: mol_type = other DNA
aaggcatctctgcaatttaa

SEQ ID NO: 140750 - DNA, 20 bp, synthetic construct
  source 1..20: mol_type = other DNA
aaaggcatctctgcaattta

SEQ ID NO: 140751 - DNA, 20 bp, synthetic construct
  source 1..20: mol_type = other DNA
aaaaggcatctctgcaattt

SEQ ID NO: 140752 - DNA, 20 bp, synthetic construct
  source 1..20: mol_type = other DNA
taaaaggcatctctgcaatt

SEQ ID NO: 140753 - DNA, 20 bp, synthetic construct
  source 1..20: mol_type = other DNA
ttaaaaggcatctctgcaat

SEQ ID NO: 140754 - DNA, 20 bp, synthetic construct
  source 1..20: mol_type = other DNA
tttaaaaggcatctctgcaa

SEQ ID NO: 140755 - DNA, 20 bp, synthetic construct
  source 1..20: mol_type = other DNA
ttttaaaaggcatctctgca

SEQ ID NO: 140756 - DNA, 20 bp, synthetic construct
  source 1..20: mol_type = other DNA
tttttaaaaggcatctctgc

SEQ ID NO: 140757 - DNA, 20 bp, synthetic construct
  source 1..20: mol_type = other DNA
atttttaaaaggcatctctg

SEQ ID NO: 140758 - DNA, 20 bp, synthetic construct
  source 1..20: mol_type = other DNA
catttttaaaaggcatctct

SEQ ID NO: 140759 - DNA, 20 bp, synthetic construct
  source 1..20: mol_type = other DNA
gcatttttaaaaggcatctc

SEQ ID NO: 140760 - DNA, 20 bp, synthetic construct
  source 1..20: mol_type = other DNA
tgcatttttaaaaggcatct

SEQ ID NO: 140761 - DNA, 20 bp, synthetic construct
  source 1..20: mol_type = other DNA
atgcatttttaaaaggcatc

SEQ ID NO: 140762 - DNA, 20 bp, synthetic construct
  source 1..20: mol_type = other DNA
tatgcatttttaaaaggcat

SEQ ID NO: 140763 - DNA, 20 bp, synthetic construct
  source 1..20: mol_type = other DNA
ctatgcatttttaaaaggca

SEQ ID NO: 140764 - DNA, 20 bp, synthetic construct
  source 1..20: mol_type = other DNA
actatgcatttttaaaaggc

SEQ ID NO: 140765 - DNA, 20 bp, synthetic construct
  source 1..20: mol_type = other DNA
tactatgcatttttaaaagg

SEQ ID NO: 140766 - DNA, 20 bp, synthetic construct
  source 1..20: mol_type = other DNA
ttactatgcatttttaaaag

SEQ ID NO: 140767 - DNA, 20 bp, synthetic construct
  source 1..20: mol_type = other DNA
tttactatgcatttttaaaa

SEQ ID NO: 140768 - DNA, 20 bp, synthetic construct
  source 1..20: mol_type = other DNA
ttttactatgcatttttaaa

SEQ ID NO: 140769 - DNA, 20 bp, synthetic construct
  source 1..20: mol_type = other DNA
tttttactatgcatttttaa

SEQ ID NO: 140770 - DNA, 20 bp, synthetic construct
  source 1..20: mol_type = other DNA
atttttactatgcattttta

SEQ ID NO: 140771 - DNA, 20 bp, synthetic construct
  source 1..20: mol_type = other DNA
tatttttactatgcattttt

SEQ ID NO: 140772 - DNA, 20 bp, synthetic construct
  source 1..20: mol_type = other DNA
atatttttactatgcatttt

SEQ ID NO: 140773 - DNA, 20 bp, synthetic construct
  source 1..20: mol_type = other DNA
aatatttttactatgcattt

SEQ ID NO: 140774 - DNA, 20 bp, synthetic construct
  source 1..20: mol_type = other DNA
aaatatttttactatgcatt

SEQ ID NO: 140775 - DNA, 20 bp, synthetic construct
  source 1..20: mol_type = other DNA
gaaatatttttactatgcat

SEQ ID NO: 140776 - DNA, 20 bp, synthetic construct
  source 1..20: mol_type = other DNA
tgaaatatttttactatgca

SEQ ID NO: 140777 - DNA, 20 bp, synthetic construct
  source 1..20: mol_type = other DNA
atgaaatatttttactatgc

SEQ ID NO: 140778 - DNA, 20 bp, synthetic construct
  source 1..20: mol_type = other DNA
gatgaaatatttttactatg

SEQ ID NO: 140779 - DNA, 20 bp, synthetic construct
  source 1..20: mol_type = other DNA
agatgaaatatttttactat

SEQ ID NO: 140780 - DNA, 20 bp, synthetic construct
  source 1..20: mol_type = other DNA
aagatgaaatatttttacta

SEQ ID NO: 140781 - DNA, 20 bp, synthetic construct
  source 1..20: mol_type = other DNA
aaagatgaaatatttttact

SEQ ID NO: 140782 - DNA, 20 bp, synthetic construct
  source 1..20: mol_type = other DNA
taaagatgaaatatttttac

SEQ ID NO: 140783 - DNA, 20 bp, synthetic construct
  source 1..20: mol_type = other DNA
gtaaagatgaaatattttta

SEQ ID NO: 140784 - DNA, 20 bp, synthetic construct
  source 1..20: mol_type = other DNA
agtaaagatgaaatattttt

SEQ ID NO: 140785 - DNA, 20 bp, synthetic construct
  source 1..20: mol_type = other DNA
aagtaaagatgaaatatttt

SEQ ID NO: 140786 - DNA, 20 bp, synthetic construct
  source 1..20: mol_type = other DNA
aaagtaaagatgaaatattt

SEQ ID NO: 140787 - DNA, 20 bp, synthetic construct
  source 1..20: mol_type = other DNA
aaaagtaaagatgaaatatt

SEQ ID NO: 140788 - DNA, 20 bp, synthetic construct
  source 1..20: mol_type = other DNA
gaaaagtaaagatgaaatat

SEQ ID NO: 140789 - DNA, 20 bp, synthetic construct
  source 1..20: mol_type = other DNA
agaaaagtaaagatgaaata

SEQ ID NO: 140790 - DNA, 20 bp, synthetic construct
  source 1..20: mol_type = other DNA
gagaaaagtaaagatgaaat

SEQ ID NO: 140791 - DNA, 20 bp, synthetic construct
  source 1..20: mol_type = other DNA
agagaaaagtaaagatgaaa

SEQ ID NO: 140792 - DNA, 20 bp, synthetic construct
  source 1..20: mol_type = other DNA
aagagaaaagtaaagatgaa

SEQ ID NO: 140793 - DNA, 20 bp, synthetic construct
  source 1..20: mol_type = other DNA
gaagagaaaagtaaagatga

SEQ ID NO: 140794 - DNA, 20 bp, synthetic construct
  source 1..20: mol_type = other DNA
tgaagagaaaagtaaagatg

SEQ ID NO: 140795 - DNA, 20 bp, synthetic construct
  source 1..20: mol_type = other DNA
ttgaagagaaaagtaaagat

SEQ ID NO: 140796 - DNA, 20 bp, synthetic construct
  source 1..20: mol_type = other DNA
tttgaagagaaaagtaaaga

SEQ ID NO: 140797 - DNA, 20 bp, synthetic construct
  source 1..20: mol_type = other DNA
atttgaagagaaaagtaaag

SEQ ID NO: 140798 - DNA, 20 bp, synthetic construct
  source 1..20: mol_type = other DNA
catttgaagagaaaagtaaa

SEQ ID NO: 140799 - DNA, 20 bp, synthetic construct
  source 1..20: mol_type = other DNA
tcatttgaagagaaaagtaa

SEQ ID NO: 140800 - DNA, 20 bp, synthetic construct
  source 1..20: mol_type = other DNA
atcatttgaagagaaaagta

SEQ ID NO: 140801 - DNA, 20 bp, synthetic construct
  source 1..20: mol_type = other DNA
aatcatttgaagagaaaagt

SEQ ID NO: 140802 - DNA, 20 bp, synthetic construct
  source 1..20: mol_type = other DNA
aaatcatttgaagagaaaag

SEQ ID NO: 140803 - DNA, 20 bp, synthetic construct
  source 1..20: mol_type = other DNA
aaaatcatttgaagagaaaa

SEQ ID NO: 140804 - DNA, 20 bp, synthetic construct
  source 1..20: mol_type = other DNA
taaaatcatttgaagagaaa

SEQ ID NO: 140805 - DNA, 20 bp, synthetic construct
  source 1..20: mol_type = other DNA
ttaaaatcatttgaagagaa

SEQ ID NO: 140806 - DNA, 20 bp, synthetic construct
  source 1..20: mol_type = other DNA
cttaaaatcatttgaagaga

SEQ ID NO: 140807 - DNA, 20 bp, synthetic construct
  source 1..20: mol_type = other DNA
tcttaaaatcatttgaagag

SEQ ID NO: 140808 - DNA, 20 bp, synthetic construct
  source 1..20: mol_type = other DNA
atcttaaaatcatttgaaga

SEQ ID NO: 140809 - DNA, 20 bp, synthetic construct
  source 1..20: mol_type = other DNA
aatcttaaaatcatttgaag

SEQ ID NO: 140810 - DNA, 20 bp, synthetic construct
  source 1..20: mol_type = other DNA
aaatcttaaaatcatttgaa

SEQ ID NO: 140811 - DNA, 20 bp, synthetic construct
  source 1..20: mol_type = other DNA
aaaatcttaaaatcatttga

SEQ ID NO: 140812 - DNA, 20 bp, synthetic construct
  source 1..20: mol_type = other DNA
aaaaatcttaaaatcatttg

SEQ ID NO: 140813 - DNA, 20 bp, synthetic construct
  source 1..20: mol_type = other DNA
taaaaatcttaaaatcattt

SEQ ID NO: 140814 - DNA, 20 bp, synthetic construct
  source 1..20: mol_type = other DNA
gtaaaaatcttaaaatcatt

SEQ ID NO: 140815 - DNA, 20 bp, synthetic construct
  source 1..20: mol_type = other DNA
tgtaaaaatcttaaaatcat

SEQ ID NO: 140816 - DNA, 20 bp, synthetic construct
  source 1..20: mol_type = other DNA
atgtaaaaatcttaaaatca

SEQ ID NO: 140817 - DNA, 20 bp, synthetic construct
  source 1..20: mol_type = other DNA
aatgtaaaaatcttaaaatc

SEQ ID NO: 140818 - DNA, 20 bp, synthetic construct
  source 1..20: mol_type = other DNA
aaatgtaaaaatcttaaaat

SEQ ID NO: 140819 - DNA, 20 bp, synthetic construct
  source 1..20: mol_type = other DNA
aaaatgtaaaaatcttaaaa

SEQ ID NO: 140820 - DNA, 20 bp, synthetic construct
  source 1..20: mol_type = other DNA
aaaaatgtaaaaatcttaaa

SEQ ID NO: 140821 - DNA, 20 bp, synthetic construct
  source 1..20: mol_type = other DNA
gaaaaatgtaaaaatcttaa

SEQ ID NO: 140822 - DNA, 20 bp, synthetic construct
  source 1..20: mol_type = other DNA
ggaaaaatgtaaaaatctta

SEQ ID NO: 140823 - DNA, 20 bp, synthetic construct
  source 1..20: mol_type = other DNA
tggaaaaatgtaaaaatctt

SEQ ID NO: 140824 - DNA, 20 bp, synthetic construct
  source 1..20: mol_type = other DNA
ctggaaaaatgtaaaaatct

SEQ ID NO: 140825 - DNA, 20 bp, synthetic construct
  source 1..20: mol_type = other DNA
actggaaaaatgtaaaaatc

SEQ ID NO: 140826 - DNA, 20 bp, synthetic construct
  source 1..20: mol_type = other DNA
aactggaaaaatgtaaaaat

SEQ ID NO: 140827 - DNA, 20 bp, synthetic construct
  source 1..20: mol_type = other DNA
caactggaaaaatgtaaaaa

SEQ ID NO: 140828 - DNA, 20 bp, synthetic construct
  source 1..20: mol_type = other DNA
tcaactggaaaaatgtaaaa

SEQ ID NO: 140829 - DNA, 20 bp, synthetic construct
  source 1..20: mol_type = other DNA
atcaactggaaaaatgtaaa

SEQ ID NO: 140830 - DNA, 20 bp, synthetic construct
  source 1..20: mol_type = other DNA
catcaactggaaaaatgtaa

SEQ ID NO: 140831 - DNA, 20 bp, synthetic construct
  source 1..20: mol_type = other DNA
tcatcaactggaaaaatgta

SEQ ID NO: 140832 - DNA, 20 bp, synthetic construct
  source 1..20: mol_type = other DNA
ttcatcaactggaaaaatgt

SEQ ID NO: 140833 - DNA, 20 bp, synthetic construct
  source 1..20: mol_type = other DNA
attcatcaactggaaaaatg

SEQ ID NO: 140834 - DNA, 20 bp, synthetic construct
  source 1..20: mol_type = other DNA
tattcatcaactggaaaaat

SEQ ID NO: 140835 - DNA, 20 bp, synthetic construct
  source 1..20: mol_type = other DNA
ttattcatcaactggaaaaa

SEQ ID NO: 140836 - DNA, 20 bp, synthetic construct
  source 1..20: mol_type = other DNA
gttattcatcaactggaaaa

SEQ ID NO: 140837 - DNA, 20 bp, synthetic construct
  source 1..20: mol_type = other DNA
agttattcatcaactggaaa

SEQ ID NO: 140838 - DNA, 20 bp, synthetic construct
  source 1..20: mol_type = other DNA
aagttattcatcaactggaa

SEQ ID NO: 140839 - DNA, 20 bp, synthetic construct
  source 1..20: mol_type = other DNA
taagttattcatcaactgga

SEQ ID NO: 140840 - DNA, 20 bp, synthetic construct
  source 1..20: mol_type = other DNA
ttaagttattcatcaactgg

SEQ ID NO: 140841 - DNA, 20 bp, synthetic construct
  source 1..20: mol_type = other DNA
tttaagttattcatcaactg

SEQ ID NO: 140842 - DNA, 20 bp, synthetic construct
  source 1..20: mol_type = other DNA
atttaagttattcatcaact

SEQ ID NO: 140843 - DNA, 20 bp, synthetic construct
  source 1..20: mol_type = other DNA
aatttaagttattcatcaac

SEQ ID NO: 140844 - DNA, 20 bp, synthetic construct
  source 1..20: mol_type = other DNA
taatttaagttattcatcaa

SEQ ID NO: 140845 - DNA, 20 bp, synthetic construct
  source 1..20: mol_type = other DNA
ataatttaagttattcatca

SEQ ID NO: 140846 - DNA, 20 bp, synthetic construct
  source 1..20: mol_type = other DNA
cataatttaagttattcatc

SEQ ID NO: 140847 - DNA, 20 bp, synthetic construct
  source 1..20: mol_type = other DNA
tcataatttaagttattcat

SEQ ID NO: 140848 - DNA, 20 bp, synthetic construct
  source 1..20: mol_type = other DNA
ctcataatttaagttattca

SEQ ID NO: 140849 - DNA, 20 bp, synthetic construct
  source 1..20: mol_type = other DNA
tctcataatttaagttattc

SEQ ID NO: 140850 - DNA, 20 bp, synthetic construct
  source 1..20: mol_type = other DNA
atctcataatttaagttatt

SEQ ID NO: 140851 - DNA, 20 bp, synthetic construct
  source 1..20: mol_type = other DNA
aatctcataatttaagttat

SEQ ID NO: 140852 - DNA, 20 bp, synthetic construct
  source 1..20: mol_type = other DNA
aaatctcataatttaagtta

SEQ ID NO: 140853 - DNA, 20 bp, synthetic construct
  source 1..20: mol_type = other DNA
gaaatctcataatttaagtt

SEQ ID NO: 140854 - DNA, 20 bp, synthetic construct
  source 1..20: mol_type = other DNA
tgaaatctcataatttaagt

SEQ ID NO: 140855 - DNA, 20 bp, synthetic construct
  source 1..20: mol_type = other DNA
atgaaatctcataatttaag

SEQ ID NO: 140856 - DNA, 20 bp, synthetic construct
  source 1..20: mol_type = other DNA
catgaaatctcataatttaa

SEQ ID NO: 140857 - DNA, 20 bp, synthetic construct
  source 1..20: mol_type = other DNA
ccatgaaatctcataattta

SEQ ID NO: 140858 - DNA, 20 bp, synthetic construct
  source 1..20: mol_type = other DNA
cccatgaaatctcataattt

SEQ ID NO: 140859 - DNA, 20 bp, synthetic construct
  source 1..20: mol_type = other DNA
gcccatgaaatctcataatt

SEQ ID NO: 140860 - DNA, 20 bp, synthetic construct
  source 1..20: mol_type = other DNA
tgcccatgaaatctcataat

SEQ ID NO: 140861 - DNA, 20 bp, synthetic construct
  source 1..20: mol_type = other DNA
atgcccatgaaatctcataa

SEQ ID NO: 140862 - DNA, 20 bp, synthetic construct
  source 1..20: mol_type = other DNA
tatgcccatgaaatctcata

SEQ ID NO: 140863 - DNA, 20 bp, synthetic construct
  source 1..20: mol_type = other DNA
ttatgcccatgaaatctcat

SEQ ID NO: 140864 - DNA, 20 bp, synthetic construct
  source 1..20: mol_type = other DNA
attatgcccatgaaatctca

SEQ ID NO: 140865 - DNA, 20 bp, synthetic construct
  source 1..20: mol_type = other DNA
aattatgcccatgaaatctc

SEQ ID NO: 140866 - DNA, 20 bp, synthetic construct
  source 1..20: mol_type = other DNA
taattatgcccatgaaatct

SEQ ID NO: 140867 - DNA, 20 bp, synthetic construct
  source 1..20: mol_type = other DNA
ataattatgcccatgaaatc

SEQ ID NO: 140868 - DNA, 20 bp, synthetic construct
  source 1..20: mol_type = other DNA
aataattatgcccatgaaat

SEQ ID NO: 140869 - DNA, 20 bp, synthetic construct
  source 1..20: mol_type = other DNA
aaataattatgcccatgaaa

SEQ ID NO: 140870 - DNA, 20 bp, synthetic construct
  source 1..20: mol_type = other DNA
aaaataattatgcccatgaa

SEQ ID NO: 140871 - DNA, 20 bp, synthetic construct
  source 1..20: mol_type = other DNA
gaaaataattatgcccatga

SEQ ID NO: 140872 - DNA, 20 bp, synthetic construct
  source 1..20: mol_type = other DNA
agaaaataattatgcccatg

SEQ ID NO: 140873 - DNA, 20 bp, synthetic construct
  source 1..20: mol_type = other DNA
tagaaaataattatgcccat

SEQ ID NO: 140874 - DNA, 20 bp, synthetic construct
  source 1..20: mol_type = other DNA
atagaaaataattatgccca

SEQ ID NO: 140875 - DNA, 20 bp, synthetic construct
  source 1..20: mol_type = other DNA
tatagaaaataattatgccc

SEQ ID NO: 140876 - DNA, 20 bp, synthetic construct
  source 1..20: mol_type = other DNA
atatagaaaataattatgcc

SEQ ID NO: 140877 - DNA, 20 bp, synthetic construct
  source 1..20: mol_type = other DNA
aatatagaaaataattatgc

SEQ ID NO: 140878 - DNA, 20 bp, synthetic construct
  source 1..20: mol_type = other DNA
aaatatagaaaataattatg

SEQ ID NO: 140879 - DNA, 20 bp, synthetic construct
  source 1..20: mol_type = other DNA
taaatatagaaaataattat

SEQ ID NO: 140880 - DNA, 20 bp, synthetic construct
  source 1..20: mol_type = other DNA
ataaatatagaaaataatta

SEQ ID NO: 140881 - DNA, 20 bp, synthetic construct
  source 1..20: mol_type = other DNA
aataaatatagaaaataatt

SEQ ID NO: 140882 - DNA, 20 bp, synthetic construct
  source 1..20: mol_type = other DNA
caataaatatagaaaataat

SEQ ID NO: 140883 - DNA, 20 bp, synthetic construct
  source 1..20: mol_type = other DNA
acaataaatatagaaaataa

SEQ ID NO: 140884 - DNA, 20 bp, synthetic construct
  source 1..20: mol_type = other DNA
aacaataaatatagaaaata

SEQ ID NO: 140885 - DNA, 20 bp, synthetic construct
  source 1..20: mol_type = other DNA
taacaataaatatagaaaat

SEQ ID NO: 140886 - DNA, 20 bp, synthetic construct
  source 1..20: mol_type = other DNA
gtaacaataaatatagaaaa

SEQ ID NO: 140887 - DNA, 20 bp, synthetic construct
  source 1..20: mol_type = other DNA
agtaacaataaatatagaaa

SEQ ID NO: 140888 - DNA, 20 bp, synthetic construct
  source 1..20: mol_type = other DNA
aagtaacaataaatatagaa

SEQ ID NO: 140889 - DNA, 20 bp, synthetic construct
  source 1..20: mol_type = other DNA
aaagtaacaataaatataga

SEQ ID NO: 140890 - DNA, 20 bp, synthetic construct
  source 1..20: mol_type = other DNA
aaaagtaacaataaatatag

SEQ ID NO: 140891 - DNA, 20 bp, synthetic construct
  source 1..20: mol_type = other DNA
aaaaagtaacaataaatata

SEQ ID NO: 140892 - DNA, 20 bp, synthetic construct
  source 1..20: mol_type = other DNA
taaaaagtaacaataaatat

SEQ ID NO: 140893 - DNA, 20 bp, synthetic construct
  source 1..20: mol_type = other DNA
ttaaaaagtaacaataaata

SEQ ID NO: 140894 - DNA, 20 bp, synthetic construct
  source 1..20: mol_type = other DNA
attaaaaagtaacaataaat

SEQ ID NO: 140895 - DNA, 20 bp, synthetic construct
  source 1..20: mol_type = other DNA
tattaaaaagtaacaataaa

SEQ ID NO: 140896 - DNA, 20 bp, synthetic construct
  source 1..20: mol_type = other DNA
atattaaaaagtaacaataa

SEQ ID NO: 140897 - DNA, 20 bp, synthetic construct
  source 1..20: mol_type = other DNA
aatattaaaaagtaacaata

SEQ ID NO: 140898 - DNA, 20 bp, synthetic construct
  source 1..20: mol_type = other DNA
gaatattaaaaagtaacaat

SEQ ID NO: 140899 - DNA, 20 bp, synthetic construct
  source 1..20: mol_type = other DNA
agaatattaaaaagtaacaa

SEQ ID NO: 140900 - DNA, 20 bp, synthetic construct
  source 1..20: mol_type = other DNA
aagaatattaaaaagtaaca

SEQ ID NO: 140901 - DNA, 20 bp, synthetic construct
  source 1..20: mol_type = other DNA
taagaatattaaaaagtaac

SEQ ID NO: 140902 - DNA, 20 bp, synthetic construct
  source 1..20: mol_type = other DNA
ttaagaatattaaaaagtaa

SEQ ID NO: 140903 - DNA, 20 bp, synthetic construct
  source 1..20: mol_type = other DNA
attaagaatattaaaaagta

SEQ ID NO: 140904 - DNA, 20 bp, synthetic construct
  source 1..20: mol_type = other DNA
tattaagaatattaaaaagt

SEQ ID NO: 140905 - DNA, 20 bp, synthetic construct
  source 1..20: mol_type = other DNA
gtattaagaatattaaaaag

SEQ ID NO: 140906 - DNA, 20 bp, synthetic construct
  source 1..20: mol_type = other DNA
agtattaagaatattaaaaa

SEQ ID NO: 140907 - DNA, 20 bp, synthetic construct
  source 1..20: mol_type = other DNA
aagtattaagaatattaaaa

SEQ ID NO: 140908 - DNA, 20 bp, synthetic construct
  source 1..20: mol_type = other DNA
aaagtattaagaatattaaa

SEQ ID NO: 140909 - DNA, 20 bp, synthetic construct
  source 1..20: mol_type = other DNA
caaagtattaagaatattaa

SEQ ID NO: 140910 - DNA, 20 bp, synthetic construct
  source 1..20: mol_type = other DNA
gcaaagtattaagaatatta

SEQ ID NO: 140911 - DNA, 20 bp, synthetic construct
  source 1..20: mol_type = other DNA
agcaaagtattaagaatatt

SEQ ID NO: 140912 - DNA, 20 bp, synthetic construct
  source 1..20: mol_type = other DNA
aagcaaagtattaagaatat

SEQ ID NO: 140913 - DNA, 20 bp, synthetic construct
  source 1..20: mol_type = other DNA
taagcaaagtattaagaata

SEQ ID NO: 140914 - DNA, 20 bp, synthetic construct
  source 1..20: mol_type = other DNA
ctaagcaaagtattaagaat

SEQ ID NO: 140915 - DNA, 20 bp, synthetic construct
  source 1..20: mol_type = other DNA
tctaagcaaagtattaagaa

SEQ ID NO: 140916 - DNA, 20 bp, synthetic construct
  source 1..20: mol_type = other DNA
ttctaagcaaagtattaaga

SEQ ID NO: 140917 - DNA, 20 bp, synthetic construct
  source 1..20: mol_type = other DNA
cttctaagcaaagtattaag

SEQ ID NO: 140918 - DNA, 20 bp, synthetic construct
  source 1..20: mol_type = other DNA
ccttctaagcaaagtattaa

SEQ ID NO: 140919 - DNA, 20 bp, synthetic construct
  source 1..20: mol_type = other DNA
accttctaagcaaagtatta

SEQ ID NO: 140920 - DNA, 20 bp, synthetic construct
  source 1..20: mol_type = other DNA
taccttctaagcaaagtatt

SEQ ID NO: 140921 - DNA, 20 bp, synthetic construct
  source 1..20: mol_type = other DNA
ataccttctaagcaaagtat

SEQ ID NO: 140922 - DNA, 20 bp, synthetic construct
  source 1..20: mol_type = other DNA
aataccttctaagcaaagta

SEQ ID NO: 140923 - DNA, 20 bp, synthetic construct
  source 1..20: mol_type = other DNA
aaataccttctaagcaaagt

SEQ ID NO: 140924 - DNA, 20 bp, synthetic construct
  source 1..20: mol_type = other DNA
taaataccttctaagcaaag

SEQ ID NO: 140925 - DNA, 20 bp, synthetic construct
  source 1..20: mol_type = other DNA
ttaaataccttctaagcaaa

SEQ ID NO: 140926 - DNA, 20 bp, synthetic construct
  source 1..20: mol_type = other DNA
tttaaataccttctaagcaa

SEQ ID NO: 140927 - DNA, 20 bp, synthetic construct
  source 1..20: mol_type = other DNA
ttttaaataccttctaagca

SEQ ID NO: 140928 - DNA, 20 bp, synthetic construct
  source 1..20: mol_type = other DNA
cttttaaataccttctaagc

SEQ ID NO: 140929 - DNA, 20 bp, synthetic construct
  source 1..20: mol_type = other DNA
acttttaaataccttctaag

SEQ ID NO: 140930 - DNA, 20 bp, synthetic construct
  source 1..20: mol_type = other DNA
cacttttaaataccttctaa

SEQ ID NO: 140931 - DNA, 20 bp, synthetic construct
  source 1..20: mol_type = other DNA
tcacttttaaataccttcta

SEQ ID NO: 140932 - DNA, 20 bp, synthetic construct
  source 1..20: mol_type = other DNA
ttcacttttaaataccttct

SEQ ID NO: 140933 - DNA, 20 bp, synthetic construct
  source 1..20: mol_type = other DNA
tttcacttttaaataccttc

SEQ ID NO: 140934 - DNA, 20 bp, synthetic construct
  source 1..20: mol_type = other DNA
atttcacttttaaatacctt

SEQ ID NO: 140935 - DNA, 20 bp, synthetic construct
  source 1..20: mol_type = other DNA
aatttcacttttaaatacct

SEQ ID NO: 140936 - DNA, 20 bp, synthetic construct
  source 1..20: mol_type = other DNA
aaatttcacttttaaatacc

SEQ ID NO: 140937 - DNA, 20 bp, synthetic construct
  source 1..20: mol_type = other DNA
gaaatttcacttttaaatac

SEQ ID NO: 140938 - DNA, 20 bp, synthetic construct
  source 1..20: mol_type = other DNA
tgaaatttcacttttaaata

SEQ ID NO: 140939 - DNA, 20 bp, synthetic construct
  source 1..20: mol_type = other DNA
ttgaaatttcacttttaaat

SEQ ID NO: 140940 - DNA, 20 bp, synthetic construct
  source 1..20: mol_type = other DNA
tttgaaatttcacttttaaa

SEQ ID NO: 140941 - DNA, 20 bp, synthetic construct
  source 1..20: mol_type = other DNA
gtttgaaatttcacttttaa

SEQ ID NO: 140942 - DNA, 20 bp, synthetic construct
  source 1..20: mol_type = other DNA
agtttgaaatttcactttta

SEQ ID NO: 140943 - DNA, 20 bp, synthetic construct
  source 1..20: mol_type = other DNA
aagtttgaaatttcactttt

SEQ ID NO: 140944 - DNA, 20 bp, synthetic construct
  source 1..20: mol_type = other DNA
aaagtttgaaatttcacttt

SEQ ID NO: 140945 - DNA, 20 bp, synthetic construct
  source 1..20: mol_type = other DNA
aaaagtttgaaatttcactt

SEQ ID NO: 140946 - DNA, 20 bp, synthetic construct
  source 1..20: mol_type = other DNA
aaaaagtttgaaatttcact

SEQ ID NO: 140947 - DNA, 20 bp, synthetic construct
  source 1..20: mol_type = other DNA
taaaaagtttgaaatttcac

SEQ ID NO: 140948 - DNA, 20 bp, synthetic construct
  source 1..20: mol_type = other DNA
ctaaaaagtttgaaatttca

SEQ ID NO: 140949 - DNA, 20 bp, synthetic construct
  source 1..20: mol_type = other DNA
actaaaaagtttgaaatttc

SEQ ID NO: 140950 - DNA, 20 bp, synthetic construct
  source 1..20: mol_type = other DNA
tactaaaaagtttgaaattt

SEQ ID NO: 140951 - DNA, 20 bp, synthetic construct
  source 1..20: mol_type = other DNA
gtactaaaaagtttgaaatt

SEQ ID NO: 140952 - DNA, 20 bp, synthetic construct
  source 1..20: mol_type = other DNA
tgtactaaaaagtttgaaat

SEQ ID NO: 140953 - DNA, 20 bp, synthetic construct
  source 1..20: mol_type = other DNA
ttgtactaaaaagtttgaaa

SEQ ID NO: 140954 - DNA, 20 bp, synthetic construct
  source 1..20: mol_type = other DNA
tttgtactaaaaagtttgaa

SEQ ID NO: 140955 - DNA, 20 bp, synthetic construct
  source 1..20: mol_type = other DNA
ttttgtactaaaaagtttga

SEQ ID NO: 140956 - DNA, 20 bp, synthetic construct
  source 1..20: mol_type = other DNA
attttgtactaaaaagtttg

SEQ ID NO: 140957 - DNA, 20 bp, synthetic construct
  source 1..20: mol_type = other DNA
aattttgtactaaaaagttt

SEQ ID NO: 140958 - DNA, 20 bp, synthetic construct
  source 1..20: mol_type = other DNA
aaattttgtactaaaaagtt

SEQ ID NO: 140959 - DNA, 20 bp, synthetic construct
  source 1..20: mol_type = other DNA
gaaattttgtactaaaaagt

SEQ ID NO: 140960 - DNA, 20 bp, synthetic construct
  source 1..20: mol_type = other DNA
agaaattttgtactaaaaag

SEQ ID NO: 140961 - DNA, 20 bp, synthetic construct
  source 1..20: mol_type = other DNA
aagaaattttgtactaaaaa

SEQ ID NO: 140962 - DNA, 20 bp, synthetic construct
  source 1..20: mol_type = other DNA
caagaaattttgtactaaaa

SEQ ID NO: 140963 - DNA, 20 bp, synthetic construct
  source 1..20: mol_type = other DNA
tcaagaaattttgtactaaa

SEQ ID NO: 140964 - DNA, 20 bp, synthetic construct
  source 1..20: mol_type = other DNA
ttcaagaaattttgtactaa

SEQ ID NO: 140965 - DNA, 20 bp, synthetic construct
  source 1..20: mol_type = other DNA
attcaagaaattttgtacta

SEQ ID NO: 140966 - DNA, 20 bp, synthetic construct
  source 1..20: mol_type = other DNA
tattcaagaaattttgtact

SEQ ID NO: 140967 - DNA, 20 bp, synthetic construct
  source 1..20: mol_type = other DNA
ttattcaagaaattttgtac

SEQ ID NO: 140968 - DNA, 20 bp, synthetic construct
  source 1..20: mol_type = other DNA
tttattcaagaaattttgta

SEQ ID NO: 140969 - DNA, 20 bp, synthetic construct
  source 1..20: mol_type = other DNA
atttattcaagaaattttgt

SEQ ID NO: 140970 - DNA, 20 bp, synthetic construct
  source 1..20: mol_type = other DNA
tatttattcaagaaattttg

SEQ ID NO: 140971 - DNA, 20 bp, synthetic construct
  source 1..20: mol_type = other DNA
ttatttattcaagaaatttt

SEQ ID NO: 140972 - DNA, 20 bp, synthetic construct
  source 1..20: mol_type = other DNA
tttatttattcaagaaattt

SEQ ID NO: 140973 - DNA, 20 bp, synthetic construct
  source 1..20: mol_type = other DNA
ctttatttattcaagaaatt

SEQ ID NO: 140974 - DNA, 20 bp, synthetic construct
  source 1..20: mol_type = other DNA
actttatttattcaagaaat

SEQ ID NO: 140975 - DNA, 20 bp, synthetic construct
  source 1..20: mol_type = other DNA
aactttatttattcaagaaa

SEQ ID NO: 140976 - DNA, 20 bp, synthetic construct
  source 1..20: mol_type = other DNA
taactttatttattcaagaa

SEQ ID NO: 140977 - DNA, 20 bp, synthetic construct
  source 1..20: mol_type = other DNA
gtaactttatttattcaaga

SEQ ID NO: 140978 - DNA, 20 bp, synthetic construct
  source 1..20: mol_type = other DNA
tgtaactttatttattcaag

SEQ ID NO: 140979 - DNA, 20 bp, synthetic construct
  source 1..20: mol_type = other DNA
ttgtaactttatttattcaa

SEQ ID NO: 140980 - DNA, 20 bp, synthetic construct
  source 1..20: mol_type = other DNA
tttgtaactttatttattca

SEQ ID NO: 140981 - DNA, 20 bp, synthetic construct
  source 1..20: mol_type = other DNA
ttttgtaactttatttattc

SEQ ID NO: 140982 - DNA, 20 bp, synthetic construct
  source 1..20: mol_type = other DNA
tttttgtaactttatttatt

SEQ ID NO: 140983 - DNA, 20 bp, synthetic construct
  source 1..20: mol_type = other DNA
ttttttgtaactttatttat

SEQ ID NO: 140984 - DNA, 20 bp, synthetic construct
  source 1..20: mol_type = other DNA
tttttttgtaactttattta

SEQ ID NO: 140985 - DNA, 20 bp, synthetic construct
  source 1..20: mol_type = other DNA
ttttttttgtaactttattt

SEQ ID NO: 140986 - DNA, 20 bp, synthetic construct
  source 1..20: mol_type = other DNA
tttttttttgtaactttatt

SEQ ID NO: 140987 - DNA, 20 bp, synthetic construct
  source 1..20: mol_type = other DNA
ttttttttttgtaactttat

SEQ ID NO: 140988 - DNA, 20 bp, synthetic construct
  source 1..20: mol_type = other DNA
gttttttttttgtaacttta

SEQ ID NO: 140989 - DNA, 20 bp, synthetic construct
  source 1..20: mol_type = other DNA
tgttttttttttgtaacttt

SEQ ID NO: 140990 - DNA, 20 bp, synthetic construct
  source 1..20: mol_type = other DNA
ttgttttttttttgtaactt

SEQ ID NO: 140991 - DNA, 20 bp, synthetic construct
  source 1..20: mol_type = other DNA
tttgttttttttttgtaact

SEQ ID NO: 140992 - DNA, 20 bp, synthetic construct
  source 1..20: mol_type = other DNA
ttttgttttttttttgtaac

SEQ ID NO: 140993 - DNA, 20 bp, synthetic construct
  source 1..20: mol_type = other DNA
tttttgttttttttttgtaa

SEQ ID NO: 140994 - DNA, 20 bp, synthetic construct
  source 1..20: mol_type = other DNA
gtttttgttttttttttgta

SEQ ID NO: 140995 - DNA, 20 bp, synthetic construct
  source 1..20: mol_type = other DNA
ggtttttgttttttttttgt

SEQ ID NO: 140996 - DNA, 20 bp, synthetic construct
  source 1..20: mol_type = other DNA
aggtttttgttttttttttg

SEQ ID NO: 140997 - DNA, 20 bp, synthetic construct
  source 1..20: mol_type = other DNA
gaggtttttgtttttttttt

SEQ ID NO: 140998 - DNA, 20 bp, synthetic construct
  source 1..20: mol_type = other DNA
agaggtttttgttttttttt

SEQ ID NO: 140999 - DNA, 20 bp, synthetic construct
  source 1..20: mol_type = other DNA
cagaggtttttgtttttttt

SEQ ID NO: 141000 - DNA, 20 bp, synthetic construct
  source 1..20: mol_type = other DNA
tcagaggtttttgttttttt

SEQ ID NO: 141001 - DNA, 20 bp, synthetic construct
  source 1..20: mol_type = other DNA
ctcagaggtttttgtttttt

SEQ ID NO: 141002 - DNA, 20 bp, synthetic construct
  source 1..20: mol_type = other DNA
tctcagaggtttttgttttt

SEQ ID NO: 141003 - DNA, 20 bp, synthetic construct
  source 1..20: mol_type = other DNA
atctcagaggtttttgtttt

SEQ ID NO: 141004 - DNA, 20 bp, synthetic construct
  source 1..20: mol_type = other DNA
aatctcagaggtttttgttt

SEQ ID NO: 141005 - DNA, 20 bp, synthetic construct
  source 1..20: mol_type = other DNA
gaatctcagaggtttttgtt

SEQ ID NO: 141006 - DNA, 20 bp, synthetic construct
  source 1..20: mol_type = other DNA
ggaatctcagaggtttttgt

SEQ ID NO: 141007 - DNA, 20 bp, synthetic construct
  source 1..20: mol_type = other DNA
cggaatctcagaggtttttg

SEQ ID NO: 141008 - DNA, 20 bp, synthetic construct
  source 1..20: mol_type = other DNA
acggaatctcagaggttttt

SEQ ID NO: 141009 - DNA, 20 bp, synthetic construct
  source 1..20: mol_type = other DNA
tacggaatctcagaggtttt

SEQ ID NO: 141010 - DNA, 20 bp, synthetic construct
  source 1..20: mol_type = other DNA
gtacggaatctcagaggttt

SEQ ID NO: 141011 - DNA, 20 bp, synthetic construct
  source 1..20: mol_type = other DNA
agtacggaatctcagaggtt

SEQ ID NO: 141012 - DNA, 20 bp, synthetic construct
  source 1..20: mol_type = other DNA
cagtacggaatctcagaggt

SEQ ID NO: 141013 - DNA, 20 bp, synthetic construct
  source 1..20: mol_type = other DNA
acagtacggaatctcagagg

SEQ ID NO: 141014 - DNA, 20 bp, synthetic construct
  source 1..20: mol_type = other DNA
tacagtacggaatctcagag

SEQ ID NO: 141015 - DNA, 20 bp, synthetic construct
  source 1..20: mol_type = other DNA
atacagtacggaatctcaga

SEQ ID NO: 141016 - DNA, 20 bp, synthetic construct
  source 1..20: mol_type = other DNA
gatacagtacggaatctcag

SEQ ID NO: 141017 - DNA, 20 bp, synthetic construct
  source 1..20: mol_type = other DNA
agatacagtacggaatctca

SEQ ID NO: 141018 - DNA, 20 bp, synthetic construct
  source 1..20: mol_type = other DNA
aagatacagtacggaatctc

SEQ ID NO: 141019 - DNA, 20 bp, synthetic construct
  source 1..20: mol_type = other DNA
aaagatacagtacggaatct

SEQ ID NO: 141020 - DNA, 20 bp, synthetic construct
  source 1..20: mol_type = other DNA
taaagatacagtacggaatc

SEQ ID NO: 141021 - DNA, 20 bp, synthetic construct
  source 1..20: mol_type = other DNA
ataaagatacagtacggaat

SEQ ID NO: 141022 - DNA, 20 bp, synthetic construct
  source 1..20: mol_type = other DNA
cataaagatacagtacggaa

SEQ ID NO: 141023 - DNA, 20 bp, synthetic construct
  source 1..20: mol_type = other DNA
tcataaagatacagtacgga

SEQ ID NO: 141024 - DNA, 20 bp, synthetic construct
  source 1..20: mol_type = other DNA
ttcataaagatacagtacgg

SEQ ID NO: 141025 - DNA, 20 bp, synthetic construct
  source 1..20: mol_type = other DNA
gttcataaagatacagtacg

SEQ ID NO: 141026 - DNA, 20 bp, synthetic construct
  source 1..20: mol_type = other DNA
ggttcataaagatacagtac

SEQ ID NO: 141027 - DNA, 20 bp, synthetic construct
  source 1..20: mol_type = other DNA
aggttcataaagatacagta

SEQ ID NO: 141028 - DNA, 20 bp, synthetic construct
  source 1..20: mol_type = other DNA
gaggttcataaagatacagt

SEQ ID NO: 141029 - DNA, 20 bp, synthetic construct
  source 1..20: mol_type = other DNA
ggaggttcataaagatacag

SEQ ID NO: 141030 - DNA, 20 bp, synthetic construct
  source 1..20: mol_type = other DNA
tggaggttcataaagataca

SEQ ID NO: 141031 - DNA, 20 bp, synthetic construct
  source 1..20: mol_type = other DNA
atggaggttcataaagatac

SEQ ID NO: 141032 - DNA, 20 bp, synthetic construct
  source 1..20: mol_type = other DNA
catggaggttcataaagata

SEQ ID NO: 141033 - DNA, 20 bp, synthetic construct
  source 1..20: mol_type = other DNA
tcatggaggttcataaagat

SEQ ID NO: 141034 - DNA, 20 bp, synthetic construct
  source 1..20: mol_type = other DNA
ttcatggaggttcataaaga

SEQ ID NO: 141035 - DNA, 20 bp, synthetic construct
  source 1..20: mol_type = other DNA
gttcatggaggttcataaag

SEQ ID NO: 141036 - DNA, 20 bp, synthetic construct
  source 1..20: mol_type = other DNA
tgttcatggaggttcataaa

SEQ ID NO: 141037 - DNA, 20 bp, synthetic construct
  source 1..20: mol_type = other DNA
ctgttcatggaggttcataa

SEQ ID NO: 141038 - DNA, 20 bp, synthetic construct
  source 1..20: mol_type = other DNA
tctgttcatggaggttcata

SEQ ID NO: 141039 - DNA, 20 bp, synthetic construct
  source 1..20: mol_type = other DNA
ttctgttcatggaggttcat

SEQ ID NO: 141040 - DNA, 20 bp, synthetic construct
  source 1..20: mol_type = other DNA
attctgttcatggaggttca

SEQ ID NO: 141041 - DNA, 20 bp, synthetic construct
  source 1..20: mol_type = other DNA
aattctgttcatggaggttc

SEQ ID NO: 141042 - DNA, 20 bp, synthetic construct
  source 1..20: mol_type = other DNA
aaattctgttcatggaggtt

SEQ ID NO: 141043 - DNA, 20 bp, synthetic construct
  source 1..20: mol_type = other DNA
caaattctgttcatggaggt

SEQ ID NO: 141044 - DNA, 20 bp, synthetic construct
  source 1..20: mol_type = other DNA
ccaaattctgttcatggagg

SEQ ID NO: 141045 - DNA, 20 bp, synthetic construct
  source 1..20: mol_type = other DNA
cccaaattctgttcatggag

SEQ ID NO: 141046 - DNA, 20 bp, synthetic construct
  source 1..20: mol_type = other DNA
tcccaaattctgttcatgga

SEQ ID NO: 141047 - DNA, 20 bp, synthetic construct
  source 1..20: mol_type = other DNA
atcccaaattctgttcatgg

SEQ ID NO: 141048 - DNA, 20 bp, synthetic construct
  source 1..20: mol_type = other DNA
aatcccaaattctgttcatg

SEQ ID NO: 141049 - DNA, 20 bp, synthetic construct
  source 1..20: mol_type = other DNA
aaatcccaaattctgttcat

SEQ ID NO: 141050 - DNA, 20 bp, synthetic construct
  source 1..20: mol_type = other DNA
caaatcccaaattctgttca

SEQ ID NO: 141051 - DNA, 20 bp, synthetic construct
  source 1..20: mol_type = other DNA
ccaaatcccaaattctgttc

SEQ ID NO: 141052 - DNA, 20 bp, synthetic construct
  source 1..20: mol_type = other DNA
cccaaatcccaaattctgtt

SEQ ID NO: 141053 - DNA, 20 bp, synthetic construct
  source 1..20: mol_type = other DNA
tcccaaatcccaaattctgt

SEQ ID NO: 141054 - DNA, 20 bp, synthetic construct
  source 1..20: mol_type = other DNA
ttcccaaatcccaaattctg

SEQ ID NO: 141055 - DNA, 20 bp, synthetic construct
  source 1..20: mol_type = other DNA
attcccaaatcccaaattct

SEQ ID NO: 141056 - DNA, 20 bp, synthetic construct
  source 1..20: mol_type = other DNA
aattcccaaatcccaaattc

SEQ ID NO: 141057 - DNA, 20 bp, synthetic construct
  source 1..20: mol_type = other DNA
caattcccaaatcccaaatt

SEQ ID NO: 141058 - DNA, 20 bp, synthetic construct
  source 1..20: mol_type = other DNA
gcaattcccaaatcccaaat

SEQ ID NO: 141059 - DNA, 20 bp, synthetic construct
  source 1..20: mol_type = other DNA
agcaattcccaaatcccaaa

SEQ ID NO: 141060 - DNA, 20 bp, synthetic construct
  source 1..20: mol_type = other DNA
aagcaattcccaaatcccaa

SEQ ID NO: 141061 - DNA, 20 bp, synthetic construct
  source 1..20: mol_type = other DNA
aaagcaattcccaaatccca

SEQ ID NO: 141062 - DNA, 20 bp, synthetic construct
  source 1..20: mol_type = other DNA
aaaagcaattcccaaatccc

SEQ ID NO: 141063 - DNA, 20 bp, synthetic construct
  source 1..20: mol_type = other DNA
gaaaagcaattcccaaatcc

SEQ ID NO: 141064 - DNA, 20 bp, synthetic construct
  source 1..20: mol_type = other DNA
ggaaaagcaattcccaaatc

SEQ ID NO: 141065 - DNA, 20 bp, synthetic construct
  source 1..20: mol_type = other DNA
aggaaaagcaattcccaaat

SEQ ID NO: 141066 - DNA, 20 bp, synthetic construct
  source 1..20: mol_type = other DNA
aaggaaaagcaattcccaaa

SEQ ID NO: 141067 - DNA, 20 bp, synthetic construct
  source 1..20: mol_type = other DNA
taaggaaaagcaattcccaa

SEQ ID NO: 141068 - DNA, 20 bp, synthetic construct
  source 1..20: mol_type = other DNA
ctaaggaaaagcaattccca

SEQ ID NO: 141069 - DNA, 20 bp, synthetic construct
  source 1..20: mol_type = other DNA
tctaaggaaaagcaattccc

SEQ ID NO: 141070 - DNA, 20 bp, synthetic construct
  source 1..20: mol_type = other DNA
gtctaaggaaaagcaattcc

SEQ ID NO: 141071 - DNA, 20 bp, synthetic construct
  source 1..20: mol_type = other DNA
tgtctaaggaaaagcaattc

SEQ ID NO: 141072 - DNA, 20 bp, synthetic construct
  source 1..20: mol_type = other DNA
ctgtctaaggaaaagcaatt

SEQ ID NO: 141073 - DNA, 20 bp, synthetic construct
  source 1..20: mol_type = other DNA
tctgtctaaggaaaagcaat

SEQ ID NO: 141074 - DNA, 20 bp, synthetic construct
  source 1..20: mol_type = other DNA
atctgtctaaggaaaagcaa

SEQ ID NO: 141075 - DNA, 20 bp, synthetic construct
  source 1..20: mol_type = other DNA
aatctgtctaaggaaaagca

SEQ ID NO: 141076 - DNA, 20 bp, synthetic construct
  source 1..20: mol_type = other DNA
aaatctgtctaaggaaaagc

SEQ ID NO: 141077 - DNA, 20 bp, synthetic construct
  source 1..20: mol_type = other DNA
taaatctgtctaaggaaaag

SEQ ID NO: 141078 - DNA, 20 bp, synthetic construct
  source 1..20: mol_type = other DNA
ctaaatctgtctaaggaaaa

SEQ ID NO: 141079 - DNA, 20 bp, synthetic construct
  source 1..20: mol_type = other DNA
tctaaatctgtctaaggaaa

SEQ ID NO: 141080 - DNA, 20 bp, synthetic construct
  source 1..20: mol_type = other DNA
atctaaatctgtctaaggaa

SEQ ID NO: 141081 - DNA, 20 bp, synthetic construct
  source 1..20: mol_type = other DNA
aatctaaatctgtctaagga

SEQ ID NO: 141082 - DNA, 20 bp, synthetic construct
  source 1..20: mol_type = other DNA
caatctaaatctgtctaagg

SEQ ID NO: 141083 - DNA, 20 bp, synthetic construct
  source 1..20: mol_type = other DNA
acaatctaaatctgtctaag

SEQ ID NO: 141084 - DNA, 20 bp, synthetic construct
  source 1..20: mol_type = other DNA
aacaatctaaatctgtctaa

SEQ ID NO: 141085 - DNA, 20 bp, synthetic construct
  source 1..20: mol_type = other DNA
taacaatctaaatctgtcta

SEQ ID NO: 141086 - DNA, 20 bp, synthetic construct
  source 1..20: mol_type = other DNA
gtaacaatctaaatctgtct

SEQ ID NO: 141087 - DNA, 20 bp, synthetic construct
  source 1..20: mol_type = other DNA
tgtaacaatctaaatctgtc

SEQ ID NO: 141088 - DNA, 20 bp, synthetic construct
  source 1..20: mol_type = other DNA
ttgtaacaatctaaatctgt

SEQ ID NO: 141089 - DNA, 20 bp, synthetic construct
  source 1..20: mol_type = other DNA
tttgtaacaatctaaatctg

SEQ ID NO: 141090 - DNA, 20 bp, synthetic construct
  source 1..20: mol_type = other DNA
atttgtaacaatctaaatct

SEQ ID NO: 141091 - DNA, 20 bp, synthetic construct
  source 1..20: mol_type = other DNA
catttgtaacaatctaaatc

SEQ ID NO: 141092 - DNA, 20 bp, synthetic construct
  source 1..20: mol_type = other DNA
tcatttgtaacaatctaaat

SEQ ID NO: 141093 - DNA, 20 bp, synthetic construct
  source 1..20: mol_type = other DNA
gtcatttgtaacaatctaaa

SEQ ID NO: 141094 - DNA, 20 bp, synthetic construct
  source 1..20: mol_type = other DNA
tgtcatttgtaacaatctaa

SEQ ID NO: 141095 - DNA, 20 bp, synthetic construct
  source 1..20: mol_type = other DNA
atgtcatttgtaacaatcta

SEQ ID NO: 141096 - DNA, 20 bp, synthetic construct
  source 1..20: mol_type = other DNA
aatgtcatttgtaacaatct

SEQ ID NO: 141097 - DNA, 20 bp, synthetic construct
  source 1..20: mol_type = other DNA
aaatgtcatttgtaacaatc

SEQ ID NO: 141098 - DNA, 20 bp, synthetic construct
  source 1..20: mol_type = other DNA
aaaatgtcatttgtaacaat

SEQ ID NO: 141099 - DNA, 20 bp, synthetic construct
  source 1..20: mol_type = other DNA
aaaaatgtcatttgtaacaa

SEQ ID NO: 141100 - DNA, 20 bp, synthetic construct
  source 1..20: mol_type = other DNA
taaaaatgtcatttgtaaca

SEQ ID NO: 141101 - DNA, 20 bp, synthetic construct
  source 1..20: mol_type = other DNA
ttaaaaatgtcatttgtaac

SEQ ID NO: 141102 - DNA, 20 bp, synthetic construct
  source 1..20: mol_type = other DNA
cttaaaaatgtcatttgtaa

SEQ ID NO: 141103 - DNA, 20 bp, synthetic construct
  source 1..20: mol_type = other DNA
tcttaaaaatgtcatttgta

SEQ ID NO: 141104 - DNA, 20 bp, synthetic construct
  source 1..20: mol_type = other DNA
ctcttaaaaatgtcatttgt

SEQ ID NO: 141105 - DNA, 20 bp, synthetic construct
  source 1..20: mol_type = other DNA
cctcttaaaaatgtcatttg

SEQ ID NO: 141106 - DNA, 20 bp, synthetic construct
  source 1..20: mol_type = other DNA
gcctcttaaaaatgtcattt

SEQ ID NO: 141107 - DNA, 20 bp, synthetic construct
  source 1..20: mol_type = other DNA
agcctcttaaaaatgtcatt

SEQ ID NO: 141108 - DNA, 20 bp, synthetic construct
  source 1..20: mol_type = other DNA
cagcctcttaaaaatgtcat

SEQ ID NO: 141109 - DNA, 20 bp, synthetic construct
  source 1..20: mol_type = other DNA
ccagcctcttaaaaatgtca

SEQ ID NO: 141110 - DNA, 20 bp, synthetic construct
  source 1..20: mol_type = other DNA
cccagcctcttaaaaatgtc

SEQ ID NO: 141111 - DNA, 20 bp, synthetic construct
  source 1..20: mol_type = other DNA
ccccagcctcttaaaaatgt

SEQ ID NO: 141112 - DNA, 20 bp, synthetic construct
  source 1..20: mol_type = other DNA
accccagcctcttaaaaatg

SEQ ID NO: 141113 - DNA, 20 bp, synthetic construct
  source 1..20: mol_type = other DNA
caccccagcctcttaaaaat

SEQ ID NO: 141114 - DNA, 20 bp, synthetic construct
  source 1..20: mol_type = other DNA
ccaccccagcctcttaaaaa

SEQ ID NO: 141115 - DNA, 20 bp, synthetic construct
  source 1..20: mol_type = other DNA
gccaccccagcctcttaaaa

SEQ ID NO: 141116 - DNA, 20 bp, synthetic construct
  source 1..20: mol_type = other DNA
cgccaccccagcctcttaaa

SEQ ID NO: 141117 - DNA, 20 bp, synthetic construct
  source 1..20: mol_type = other DNA
ccgccaccccagcctcttaa

SEQ ID NO: 141118 - DNA, 20 bp, synthetic construct
  source 1..20: mol_type = other DNA
accgccaccccagcctctta

SEQ ID NO: 141119 - DNA, 20 bp, synthetic construct
  source 1..20: mol_type = other DNA
taccgccaccccagcctctt

SEQ ID NO: 141120 - DNA, 20 bp, synthetic construct
  source 1..20: mol_type = other DNA
ctaccgccaccccagcctct

SEQ ID NO: 141121 - DNA, 20 bp, synthetic construct
  source 1..20: mol_type = other DNA
cctaccgccaccccagcctc

SEQ ID NO: 141122 - DNA, 20 bp, synthetic construct
  source 1..20: mol_type = other DNA
ccctaccgccaccccagcct

SEQ ID NO: 141123 - DNA, 20 bp, synthetic construct
  source 1..20: mol_type = other DNA
cccctaccgccaccccagcc

SEQ ID NO: 141124 - DNA, 20 bp, synthetic construct
  source 1..20: mol_type = other DNA
acccctaccgccaccccagc

SEQ ID NO: 141125 - DNA, 20 bp, synthetic construct
  source 1..20: mol_type = other DNA
aacccctaccgccaccccag

SEQ ID NO: 141126 - DNA, 20 bp, synthetic construct
  source 1..20: mol_type = other DNA
taacccctaccgccacccca

SEQ ID NO: 141127 - DNA, 20 bp, synthetic construct
  source 1..20: mol_type = other DNA
ctaacccctaccgccacccc

SEQ ID NO: 141128 - DNA, 20 bp, synthetic construct
  source 1..20: mol_type = other DNA
actaacccctaccgccaccc

SEQ ID NO: 141129 - DNA, 20 bp, synthetic construct
  source 1..20: mol_type = other DNA
cactaacccctaccgccacc

SEQ ID NO: 141130 - DNA, 20 bp, synthetic construct
  source 1..20: mol_type = other DNA
gcactaacccctaccgccac

SEQ ID NO: 141131 - DNA, 20 bp, synthetic construct
  source 1..20: mol_type = other DNA
agcactaacccctaccgcca

SEQ ID NO: 141132 - DNA, 20 bp, synthetic construct
  source 1..20: mol_type = other DNA
tagcactaacccctaccgcc

SEQ ID NO: 141133 - DNA, 20 bp, synthetic construct
  source 1..20: mol_type = other DNA
ttagcactaacccctaccgc

SEQ ID NO: 141134 - DNA, 20 bp, synthetic construct
  source 1..20: mol_type = other DNA
attagcactaacccctaccg

SEQ ID NO: 141135 - DNA, 20 bp, synthetic construct
  source 1..20: mol_type = other DNA
cattagcactaacccctacc

SEQ ID NO: 141136 - DNA, 20 bp, synthetic construct
  source 1..20: mol_type = other DNA
ccattagcactaacccctac

SEQ ID NO: 141137 - DNA, 20 bp, synthetic construct
  source 1..20: mol_type = other DNA
accattagcactaaccccta

SEQ ID NO: 141138 - DNA, 20 bp, synthetic construct
  source 1..20: mol_type = other DNA
aaccattagcactaacccct

SEQ ID NO: 141139 - DNA, 20 bp, synthetic construct
  source 1..20: mol_type = other DNA
aaaccattagcactaacccc

SEQ ID NO: 141140 - DNA, 20 bp, synthetic construct
  source 1..20: mol_type = other DNA
taaaccattagcactaaccc

SEQ ID NO: 141141 - DNA, 20 bp, synthetic construct
  source 1..20: mol_type = other DNA
ttaaaccattagcactaacc

SEQ ID NO: 141142 - DNA, 20 bp, synthetic construct
  source 1..20: mol_type = other DNA
gttaaaccattagcactaac

SEQ ID NO: 141143 - DNA, 20 bp, synthetic construct
  source 1..20: mol_type = other DNA
tgttaaaccattagcactaa

SEQ ID NO: 141144 - DNA, 20 bp, synthetic construct
  source 1..20: mol_type = other DNA
ctgttaaaccattagcacta

SEQ ID NO: 141145 - DNA, 20 bp, synthetic construct
  source 1..20: mol_type = other DNA
actgttaaaccattagcact

SEQ ID NO: 141146 - DNA, 20 bp, synthetic construct
  source 1..20: mol_type = other DNA
tactgttaaaccattagcac

SEQ ID NO: 141147 - DNA, 20 bp, synthetic construct
  source 1..20: mol_type = other DNA
ctactgttaaaccattagca

SEQ ID NO: 141148 - DNA, 20 bp, synthetic construct
  source 1..20: mol_type = other DNA
cctactgttaaaccattagc

SEQ ID NO: 141149 - DNA, 20 bp, synthetic construct
  source 1..20: mol_type = other DNA
ccctactgttaaaccattag

SEQ ID NO: 141150 - DNA, 20 bp, synthetic construct
  source 1..20: mol_type = other DNA
cccctactgttaaaccatta

SEQ ID NO: 141151 - DNA, 20 bp, synthetic construct
  source 1..20: mol_type = other DNA
tcccctactgttaaaccatt

SEQ ID NO: 141152 - DNA, 20 bp, synthetic construct
  source 1..20: mol_type = other DNA
gtcccctactgttaaaccat

SEQ ID NO: 141153 - DNA, 20 bp, synthetic construct
  source 1..20: mol_type = other DNA
ggtcccctactgttaaacca

SEQ ID NO: 141154 - DNA, 20 bp, synthetic construct
  source 1..20: mol_type = other DNA
tggtcccctactgttaaacc

SEQ ID NO: 141155 - DNA, 20 bp, synthetic construct
  source 1..20: mol_type = other DNA
atggtcccctactgttaaac

SEQ ID NO: 141156 - DNA, 20 bp, synthetic construct
  source 1..20: mol_type = other DNA
catggtcccctactgttaaa

SEQ ID NO: 141157 - DNA, 20 bp, synthetic construct
  source 1..20: mol_type = other DNA
ccatggtcccctactgttaa

SEQ ID NO: 141158 - DNA, 20 bp, synthetic construct
  source 1..20: mol_type = other DNA
tccatggtcccctactgtta

SEQ ID NO: 141159 - DNA, 20 bp, synthetic construct
  source 1..20: mol_type = other DNA
gtccatggtcccctactgtt

SEQ ID NO: 141160 - DNA, 20 bp, synthetic construct
  source 1..20: mol_type = other DNA
tgtccatggtcccctactgt

SEQ ID NO: 141161 - DNA, 20 bp, synthetic construct
  source 1..20: mol_type = other DNA
ttgtccatggtcccctactg

SEQ ID NO: 141162 - DNA, 20 bp, synthetic construct
  source 1..20: mol_type = other DNA
gttgtccatggtcccctact

SEQ ID NO: 141163 - DNA, 20 bp, synthetic construct
  source 1..20: mol_type = other DNA
agttgtccatggtcccctac

SEQ ID NO: 141164 - DNA, 20 bp, synthetic construct
  source 1..20: mol_type = other DNA
cagttgtccatggtccccta

SEQ ID NO: 141165 - DNA, 20 bp, synthetic construct
  source 1..20: mol_type = other DNA
acagttgtccatggtcccct

SEQ ID NO: 141166 - DNA, 20 bp, synthetic construct
  source 1..20: mol_type = other DNA
tacagttgtccatggtcccc

SEQ ID NO: 141167 - DNA, 20 bp, synthetic construct
  source 1..20: mol_type = other DNA
ctacagttgtccatggtccc

SEQ ID NO: 141168 - DNA, 20 bp, synthetic construct
  source 1..20: mol_type = other DNA
tctacagttgtccatggtcc

SEQ ID NO: 141169 - DNA, 20 bp, synthetic construct
  source 1..20: mol_type = other DNA
gtctacagttgtccatggtc

SEQ ID NO: 141170 - DNA, 20 bp, synthetic construct
  source 1..20: mol_type = other DNA
tgtctacagttgtccatggt

SEQ ID NO: 141171 - DNA, 20 bp, synthetic construct
  source 1..20: mol_type = other DNA
atgtctacagttgtccatgg

SEQ ID NO: 141172 - DNA, 20 bp, synthetic construct
  source 1..20: mol_type = other DNA
gatgtctacagttgtccatg

SEQ ID NO: 141173 - DNA, 20 bp, synthetic construct
  source 1..20: mol_type = other DNA
tgatgtctacagttgtccat

SEQ ID NO: 141174 - DNA, 20 bp, synthetic construct
  source 1..20: mol_type = other DNA
gtgatgtctacagttgtcca

SEQ ID NO: 141175 - DNA, 20 bp, synthetic construct
  source 1..20: mol_type = other DNA
agtgatgtctacagttgtcc

SEQ ID NO: 141176 - DNA, 20 bp, synthetic construct
  source 1..20: mol_type = other DNA
tagtgatgtctacagttgtc

SEQ ID NO: 141177 - DNA, 20 bp, synthetic construct
  source 1..20: mol_type = other DNA
atagtgatgtctacagttgt

SEQ ID NO: 141178 - DNA, 20 bp, synthetic construct
  source 1..20: mol_type = other DNA
gatagtgatgtctacagttg

SEQ ID NO: 141179 - DNA, 20 bp, synthetic construct
  source 1..20: mol_type = other DNA
ggatagtgatgtctacagtt

SEQ ID NO: 141180 - DNA, 20 bp, synthetic construct
  source 1..20: mol_type = other DNA
tggatagtgatgtctacagt

SEQ ID NO: 141181 - DNA, 20 bp, synthetic construct
  source 1..20: mol_type = other DNA
ctggatagtgatgtctacag

SEQ ID NO: 141182 - DNA, 20 bp, synthetic construct
  source 1..20: mol_type = other DNA
actggatagtgatgtctaca

SEQ ID NO: 141183 - DNA, 20 bp, synthetic construct
  source 1..20: mol_type = other DNA
tactggatagtgatgtctac

SEQ ID NO: 141184 - DNA, 20 bp, synthetic construct
  source 1..20: mol_type = other DNA
ctactggatagtgatgtcta

SEQ ID NO: 141185 - DNA, 20 bp, synthetic construct
  source 1..20: mol_type = other DNA
tctactggatagtgatgtct

SEQ ID NO: 141186 - DNA, 20 bp, synthetic construct
  source 1..20: mol_type = other DNA
ttctactggatagtgatgtc

SEQ ID NO: 141187 - DNA, 20 bp, synthetic construct
  source 1..20: mol_type = other DNA
gttctactggatagtgatgt

SEQ ID NO: 141188 - DNA, 20 bp, synthetic construct
  source 1..20: mol_type = other DNA
tgttctactggatagtgatg

SEQ ID NO: 141189 - DNA, 20 bp, synthetic construct
  source 1..20: mol_type = other DNA
atgttctactggatagtgat

SEQ ID NO: 141190 - DNA, 20 bp, synthetic construct
  source 1..20: mol_type = other DNA
aatgttctactggatagtga

SEQ ID NO: 141191 - DNA, 20 bp, synthetic construct
  source 1..20: mol_type = other DNA
aaatgttctactggatagtg

SEQ ID NO: 141192 - DNA, 20 bp, synthetic construct
  source 1..20: mol_type = other DNA
aaaatgttctactggatagt

SEQ ID NO: 141193 - DNA, 20 bp, synthetic construct
  source 1..20: mol_type = other DNA
caaaatgttctactggatag

SEQ ID NO: 141194 - DNA, 20 bp, synthetic construct
  source 1..20: mol_type = other DNA
acaaaatgttctactggata

SEQ ID NO: 141195 - DNA, 20 bp, synthetic construct
  source 1..20: mol_type = other DNA
cacaaaatgttctactggat

SEQ ID NO: 141196 - DNA, 20 bp, synthetic construct
  source 1..20: mol_type = other DNA
ccacaaaatgttctactgga

SEQ ID NO: 141197 - DNA, 20 bp, synthetic construct
  source 1..20: mol_type = other DNA
gccacaaaatgttctactgg

SEQ ID NO: 141198 - DNA, 20 bp, synthetic construct
  source 1..20: mol_type = other DNA
agccacaaaatgttctactg

SEQ ID NO: 141199 - DNA, 20 bp, synthetic construct
  source 1..20: mol_type = other DNA
cagccacaaaatgttctact

SEQ ID NO: 141200 - DNA, 20 bp, synthetic construct
  source 1..20: mol_type = other DNA
ccagccacaaaatgttctac

SEQ ID NO: 141201 - DNA, 20 bp, synthetic construct
  source 1..20: mol_type = other DNA
cccagccacaaaatgttcta

SEQ ID NO: 141202 - DNA, 20 bp, synthetic construct
  source 1..20: mol_type = other DNA
gcccagccacaaaatgttct

SEQ ID NO: 141203 - DNA, 20 bp, synthetic construct
  source 1..20: mol_type = other DNA
cgcccagccacaaaatgttc

SEQ ID NO: 141204 - DNA, 20 bp, synthetic construct
  source 1..20: mol_type = other DNA
gcgcccagccacaaaatgtt

SEQ ID NO: 141205 - DNA, 20 bp, synthetic construct
  source 1..20: mol_type = other DNA
cgcgcccagccacaaaatgt

SEQ ID NO: 141206 - DNA, 20 bp, synthetic construct
  source 1..20: mol_type = other DNA
ccgcgcccagccacaaaatg

SEQ ID NO: 141207 - DNA, 20 bp, synthetic construct
  source 1..20: mol_type = other DNA
accgcgcccagccacaaaat

SEQ ID NO: 141208 - DNA, 20 bp, synthetic construct
  source 1..20: mol_type = other DNA
caccgcgcccagccacaaaa

SEQ ID NO: 141209 - DNA, 20 bp, synthetic construct
  source 1..20: mol_type = other DNA
ccaccgcgcccagccacaaa

SEQ ID NO: 141210 - DNA, 20 bp, synthetic construct
  source 1..20: mol_type = other DNA
gccaccgcgcccagccacaa

SEQ ID NO: 141211 - DNA, 20 bp, synthetic construct
  source 1..20: mol_type = other DNA
agccaccgcgcccagccaca

SEQ ID NO: 141212 - DNA, 20 bp, synthetic construct
  source 1..20: mol_type = other DNA
gagccaccgcgcccagccac

SEQ ID NO: 141213 - DNA, 20 bp, synthetic construct
  source 1..20: mol_type = other DNA
tgagccaccgcgcccagcca

SEQ ID NO: 141214 - DNA, 20 bp, synthetic construct
  source 1..20: mol_type = other DNA
gtgagccaccgcgcccagcc

SEQ ID NO: 141215 - DNA, 20 bp, synthetic construct
  source 1..20: mol_type = other DNA
cgtgagccaccgcgcccagc

SEQ ID NO: 141216 - DNA, 20 bp, synthetic construct
  source 1..20: mol_type = other DNA
gcgtgagccaccgcgcccag

SEQ ID NO: 141217 - DNA, 20 bp, synthetic construct
  source 1..20: mol_type = other DNA
ggcgtgagccaccgcgccca

SEQ ID NO: 141218 - DNA, 20 bp, synthetic construct
  source 1..20: mol_type = other DNA
aggcgtgagccaccgcgccc

SEQ ID NO: 141219 - DNA, 20 bp, synthetic construct
  source 1..20: mol_type = other DNA
caggcgtgagccaccgcgcc

SEQ ID NO: 141220 - DNA, 20 bp, synthetic construct
  source 1..20: mol_type = other DNA
acaggcgtgagccaccgcgc

SEQ ID NO: 141221 - DNA, 20 bp, synthetic construct
  source 1..20: mol_type = other DNA
tacaggcgtgagccaccgcg

SEQ ID NO: 141222 - DNA, 20 bp, synthetic construct
  source 1..20: mol_type = other DNA
ctacaggcgtgagccaccgc

SEQ ID NO: 141223 - DNA, 20 bp, synthetic construct
  source 1..20: mol_type = other DNA
actacaggcgtgagccaccg

SEQ ID NO: 141224 - DNA, 20 bp, synthetic construct
  source 1..20: mol_type = other DNA
gactacaggcgtgagccacc

SEQ ID NO: 141225 - DNA, 20 bp, synthetic construct
  source 1..20: mol_type = other DNA
ggactacaggcgtgagccac

SEQ ID NO: 141226 - DNA, 20 bp, synthetic construct
  source 1..20: mol_type = other DNA
gggactacaggcgtgagcca

SEQ ID NO: 141227 - DNA, 20 bp, synthetic construct
  source 1..20: mol_type = other DNA
tgggactacaggcgtgagcc

SEQ ID NO: 141228 - DNA, 20 bp, synthetic construct
  source 1..20: mol_type = other DNA
ctgggactacaggcgtgagc

SEQ ID NO: 141229 - DNA, 20 bp, synthetic construct
  source 1..20: mol_type = other DNA
gctgggactacaggcgtgag

SEQ ID NO: 141230 - DNA, 20 bp, synthetic construct
  source 1..20: mol_type = other DNA
tgctgggactacaggcgtga

SEQ ID NO: 141231 - DNA, 20 bp, synthetic construct
  source 1..20: mol_type = other DNA
gtgctgggactacaggcgtg

SEQ ID NO: 141232 - DNA, 20 bp, synthetic construct
  source 1..20: mol_type = other DNA
agtgctgggactacaggcgt

SEQ ID NO: 141233 - DNA, 20 bp, synthetic construct
  source 1..20: mol_type = other DNA
aagtgctgggactacaggcg

SEQ ID NO: 141234 - DNA, 20 bp, synthetic construct
  source 1..20: mol_type = other DNA
aaagtgctgggactacaggc

SEQ ID NO: 141235 - DNA, 20 bp, synthetic construct
  source 1..20: mol_type = other DNA
caaagtgctgggactacagg

SEQ ID NO: 141236 - DNA, 20 bp, synthetic construct
  source 1..20: mol_type = other DNA
ccaaagtgctgggactacag

SEQ ID NO: 141237 - DNA, 20 bp, synthetic construct
  source 1..20: mol_type = other DNA
cccaaagtgctgggactaca

SEQ ID NO: 141238 - DNA, 20 bp, synthetic construct
  source 1..20: mol_type = other DNA
tcccaaagtgctgggactac

SEQ ID NO: 141239 - DNA, 20 bp, synthetic construct
  source 1..20: mol_type = other DNA
ctcccaaagtgctgggacta

SEQ ID NO: 141240 - DNA, 20 bp, synthetic construct
  source 1..20: mol_type = other DNA
cctcccaaagtgctgggact

SEQ ID NO: 141241 - DNA, 20 bp, synthetic construct
  source 1..20: mol_type = other DNA
gcctcccaaagtgctgggac

SEQ ID NO: 141242 - DNA, 20 bp, synthetic construct
  source 1..20: mol_type = other DNA
ggcctcccaaagtgctggga

SEQ ID NO: 141243 - DNA, 20 bp, synthetic construct
  source 1..20: mol_type = other DNA
tggcctcccaaagtgctggg

SEQ ID NO: 141244 - DNA, 20 bp, synthetic construct
  source 1..20: mol_type = other DNA
ttggcctcccaaagtgctgg

SEQ ID NO: 141245 - DNA, 20 bp, synthetic construct
  source 1..20: mol_type = other DNA
cttggcctcccaaagtgctg

SEQ ID NO: 141246 - DNA, 20 bp, synthetic construct
  source 1..20: mol_type = other DNA
tcttggcctcccaaagtgct

SEQ ID NO: 141247 - DNA, 20 bp, synthetic construct
  source 1..20: mol_type = other DNA
gtcttggcctcccaaagtgc

SEQ ID NO: 141248 - DNA, 20 bp, synthetic construct
  source 1..20: mol_type = other DNA
tgtcttggcctcccaaagtg

SEQ ID NO: 141249 - DNA, 20 bp, synthetic construct
  source 1..20: mol_type = other DNA
ttgtcttggcctcccaaagt

SEQ ID NO: 141250 - DNA, 20 bp, synthetic construct
  source 1..20: mol_type = other DNA
cttgtcttggcctcccaaag

SEQ ID NO: 141251 - DNA, 20 bp, synthetic construct
  source 1..20: mol_type = other DNA
acttgtcttggcctcccaaa

SEQ ID NO: 141252 - DNA, 20 bp, synthetic construct
  source 1..20: mol_type = other DNA
cacttgtcttggcctcccaa

SEQ ID NO: 141253 - DNA, 20 bp, synthetic construct
  source 1..20: mol_type = other DNA
ccacttgtcttggcctccca

SEQ ID NO: 141254 - DNA, 20 bp, synthetic construct
  source 1..20: mol_type = other DNA
tccacttgtcttggcctccc

SEQ ID NO: 141255 - DNA, 20 bp, synthetic construct
  source 1..20: mol_type = other DNA
atccacttgtcttggcctcc

SEQ ID NO: 141256 - DNA, 20 bp, synthetic construct
  source 1..20: mol_type = other DNA
gatccacttgtcttggcctc

SEQ ID NO: 141257 - DNA, 20 bp, synthetic construct
  source 1..20: mol_type = other DNA
tgatccacttgtcttggcct

SEQ ID NO: 141258 - DNA, 20 bp, synthetic construct
  source 1..20: mol_type = other DNA
gtgatccacttgtcttggcc

SEQ ID NO: 141259 - DNA, 20 bp, synthetic construct
  source 1..20: mol_type = other DNA
ggtgatccacttgtcttggc

SEQ ID NO: 141260 - DNA, 20 bp, synthetic construct
  source 1..20: mol_type = other DNA
aggtgatccacttgtcttgg

SEQ ID NO: 141261 - DNA, 20 bp, synthetic construct
  source 1..20: mol_type = other DNA
caggtgatccacttgtcttg

SEQ ID NO: 141262 - DNA, 20 bp, synthetic construct
  source 1..20: mol_type = other DNA
tcaggtgatccacttgtctt

SEQ ID NO: 141263 - DNA, 20 bp, synthetic construct
  source 1..20: mol_type = other DNA
ctcaggtgatccacttgtct

SEQ ID NO: 141264 - DNA, 20 bp, synthetic construct
  source 1..20: mol_type = other DNA
cctcaggtgatccacttgtc

SEQ ID NO: 141265 - DNA, 20 bp, synthetic construct
  source 1..20: mol_type = other DNA
acctcaggtgatccacttgt

SEQ ID NO: 141266 - DNA, 20 bp, synthetic construct
  source 1..20: mol_type = other DNA
gacctcaggtgatccacttg

SEQ ID NO: 141267 - DNA, 20 bp, synthetic construct
  source 1..20: mol_type = other DNA
tgacctcaggtgatccactt

SEQ ID NO: 141268 - DNA, 20 bp, synthetic construct
  source 1..20: mol_type = other DNA
ctgacctcaggtgatccact

SEQ ID NO: 141269 - DNA, 20 bp, synthetic construct
  source 1..20: mol_type = other DNA
cctgacctcaggtgatccac

SEQ ID NO: 141270 - DNA, 20 bp, synthetic construct
  source 1..20: mol_type = other DNA
tcctgacctcaggtgatcca

SEQ ID NO: 141271 - DNA, 20 bp, synthetic construct
  source 1..20: mol_type = other DNA
ctcctgacctcaggtgatcc

SEQ ID NO: 141272 - DNA, 20 bp, synthetic construct
  source 1..20: mol_type = other DNA
actcctgacctcaggtgatc

SEQ ID NO: 141273 - DNA, 20 bp, synthetic construct
  source 1..20: mol_type = other DNA
aactcctgacctcaggtgat

SEQ ID NO: 141274 - DNA, 20 bp, synthetic construct
  source 1..20: mol_type = other DNA
gaactcctgacctcaggtga

SEQ ID NO: 141275 - DNA, 20 bp, synthetic construct
  source 1..20: mol_type = other DNA
tgaactcctgacctcaggtg

SEQ ID NO: 141276 - DNA, 20 bp, synthetic construct
  source 1..20: mol_type = other DNA
ttgaactcctgacctcaggt

SEQ ID NO: 141277 - DNA, 20 bp, synthetic construct
  source 1..20: mol_type = other DNA
cttgaactcctgacctcagg

SEQ ID NO: 141278 - DNA, 20 bp, synthetic construct
  source 1..20: mol_type = other DNA
tcttgaactcctgacctcag

SEQ ID NO: 141279 - DNA, 20 bp, synthetic construct
  source 1..20: mol_type = other DNA
gtcttgaactcctgacctca

SEQ ID NO: 141280 - DNA, 20 bp, synthetic construct
  source 1..20: mol_type = other DNA
ggtcttgaactcctgacctc

SEQ ID NO: 141281 - DNA, 20 bp, synthetic construct
  source 1..20: mol_type = other DNA
tggtcttgaactcctgacct

SEQ ID NO: 141282 - DNA, 20 bp, synthetic construct
  source 1..20: mol_type = other DNA
ctggtcttgaactcctgacc

SEQ ID NO: 141283 - DNA, 20 bp, synthetic construct
  source 1..20: mol_type = other DNA
gctggtcttgaactcctgac

SEQ ID NO: 141284 - DNA, 20 bp, synthetic construct
  source 1..20: mol_type = other DNA
ggctggtcttgaactcctga

SEQ ID NO: 141285 - DNA, 20 bp, synthetic construct
  source 1..20: mol_type = other DNA
tggctggtcttgaactcctg

SEQ ID NO: 141286 - DNA, 20 bp, synthetic construct
  source 1..20: mol_type = other DNA
ctggctggtcttgaactcct

SEQ ID NO: 141287 - DNA, 20 bp, synthetic construct
  source 1..20: mol_type = other DNA
tctggctggtcttgaactcc

SEQ ID NO: 141288 - DNA, 20 bp, synthetic construct
  source 1..20: mol_type = other DNA
gtctggctggtcttgaactc

SEQ ID NO: 141289 - DNA, 20 bp, synthetic construct
  source 1..20: mol_type = other DNA
ggtctggctggtcttgaact

SEQ ID NO: 141290 - DNA, 20 bp, synthetic construct
  source 1..20: mol_type = other DNA
tggtctggctggtcttgaac

SEQ ID NO: 141291 - DNA, 20 bp, synthetic construct
  source 1..20: mol_type = other DNA
ttggtctggctggtcttgaa

SEQ ID NO: 141292 - DNA, 20 bp, synthetic construct
  source 1..20: mol_type = other DNA
gttggtctggctggtcttga

SEQ ID NO: 141293 - DNA, 20 bp, synthetic construct
  source 1..20: mol_type = other DNA
tgttggtctggctggtcttg

SEQ ID NO: 141294 - DNA, 20 bp, synthetic construct
  source 1..20: mol_type = other DNA
atgttggtctggctggtctt

SEQ ID NO: 141295 - DNA, 20 bp, synthetic construct
  source 1..20: mol_type = other DNA
catgttggtctggctggtct

SEQ ID NO: 141296 - DNA, 20 bp, synthetic construct
  source 1..20: mol_type = other DNA
ccatgttggtctggctggtc

SEQ ID NO: 141297 - DNA, 20 bp, synthetic construct
  source 1..20: mol_type = other DNA
accatgttggtctggctggt

SEQ ID NO: 141298 - DNA, 20 bp, synthetic construct
  source 1..20: mol_type = other DNA
caccatgttggtctggctgg

SEQ ID NO: 141299 - DNA, 20 bp, synthetic construct
  source 1..20: mol_type = other DNA
tcaccatgttggtctggctg

SEQ ID NO: 141300 - DNA, 20 bp, synthetic construct
  source 1..20: mol_type = other DNA
ttcaccatgttggtctggct

SEQ ID NO: 141301 - DNA, 20 bp, synthetic construct
  source 1..20: mol_type = other DNA
tttcaccatgttggtctggc

SEQ ID NO: 141302 - DNA, 20 bp, synthetic construct
  source 1..20: mol_type = other DNA
gtttcaccatgttggtctgg

SEQ ID NO: 141303 - DNA, 20 bp, synthetic construct
  source 1..20: mol_type = other DNA
ggtttcaccatgttggtctg

SEQ ID NO: 141304 - DNA, 20 bp, synthetic construct
  source 1..20: mol_type = other DNA
gggtttcaccatgttggtct

SEQ ID NO: 141305 - DNA, 20 bp, synthetic construct
  source 1..20: mol_type = other DNA
agggtttcaccatgttggtc

SEQ ID NO: 141306 - DNA, 20 bp, synthetic construct
  source 1..20: mol_type = other DNA
cagggtttcaccatgttggt

SEQ ID NO: 141307 - DNA, 20 bp, synthetic construct
  source 1..20: mol_type = other DNA
acagggtttcaccatgttgg

SEQ ID NO: 141308 - DNA, 20 bp, synthetic construct
  source 1..20: mol_type = other DNA
gacagggtttcaccatgttg

SEQ ID NO: 141309 - DNA, 20 bp, synthetic construct
  source 1..20: mol_type = other DNA
agacagggtttcaccatgtt

SEQ ID NO: 141310 - DNA, 20 bp, synthetic construct
  source 1..20: mol_type = other DNA
gagacagggtttcaccatgt

SEQ ID NO: 141311 - DNA, 20 bp, synthetic construct
  source 1..20: mol_type = other DNA
agagacagggtttcaccatg

SEQ ID NO: 141312 - DNA, 20 bp, synthetic construct
  source 1..20: mol_type = other DNA
tagagacagggtttcaccat

SEQ ID NO: 141313 - DNA, 20 bp, synthetic construct
  source 1..20: mol_type = other DNA
gtagagacagggtttcacca

SEQ ID NO: 141314 - DNA, 20 bp, synthetic construct
  source 1..20: mol_type = other DNA
agtagagacagggtttcacc

SEQ ID NO: 141315 - DNA, 20 bp, synthetic construct
  source 1..20: mol_type = other DNA
tagtagagacagggtttcac

SEQ ID NO: 141316 - DNA, 20 bp, synthetic construct
  source 1..20: mol_type = other DNA
ttagtagagacagggtttca

SEQ ID NO: 141317 - DNA, 20 bp, synthetic construct
  source 1..20: mol_type = other DNA
tttagtagagacagggtttc

SEQ ID NO: 141318 - DNA, 20 bp, synthetic construct
  source 1..20: mol_type = other DNA
ttttagtagagacagggttt

SEQ ID NO: 141319 - DNA, 20 bp, synthetic construct
  source 1..20: mol_type = other DNA
tttttagtagagacagggtt

SEQ ID NO: 141320 - DNA, 20 bp, synthetic construct
  source 1..20: mol_type = other DNA
atttttagtagagacagggt

SEQ ID NO: 141321 - DNA, 20 bp, synthetic construct
  source 1..20: mol_type = other DNA
tatttttagtagagacaggg

SEQ ID NO: 141322 - DNA, 20 bp, synthetic construct
  source 1..20: mol_type = other DNA
gtatttttagtagagacagg

SEQ ID NO: 141323 - DNA, 20 bp, synthetic construct
  source 1..20: mol_type = other DNA
tgtatttttagtagagacag

SEQ ID NO: 141324 - DNA, 20 bp, synthetic construct
  source 1..20: mol_type = other DNA
ttgtatttttagtagagaca

SEQ ID NO: 141325 - DNA, 20 bp, synthetic construct
  source 1..20: mol_type = other DNA
tttgtatttttagtagagac

SEQ ID NO: 141326 - DNA, 20 bp, synthetic construct
  source 1..20: mol_type = other DNA
ttttgtatttttagtagaga

SEQ ID NO: 141327 - DNA, 20 bp, synthetic construct
  source 1..20: mol_type = other DNA
tttttgtatttttagtagag

SEQ ID NO: 141328 - DNA, 20 bp, synthetic construct
  source 1..20: mol_type = other DNA
ttttttgtatttttagtaga

SEQ ID NO: 141329 - DNA, 20 bp, synthetic construct
  source 1..20: mol_type = other DNA
cttttttgtatttttagtag

SEQ ID NO: 141330 - DNA, 20 bp, synthetic construct
  source 1..20: mol_type = other DNA
acttttttgtatttttagta

SEQ ID NO: 141331 - DNA, 20 bp, synthetic construct
  source 1..20: mol_type = other DNA
aacttttttgtatttttagt

SEQ ID NO: 141332 - DNA, 20 bp, synthetic construct
  source 1..20: mol_type = other DNA
taacttttttgtatttttag

SEQ ID NO: 141333 - DNA, 20 bp, synthetic construct
  source 1..20: mol_type = other DNA
ctaacttttttgtattttta

SEQ ID NO: 141334 - DNA, 20 bp, synthetic construct
  source 1..20: mol_type = other DNA
gctaacttttttgtattttt

SEQ ID NO: 141335 - DNA, 20 bp, synthetic construct
  source 1..20: mol_type = other DNA
ggctaacttttttgtatttt

SEQ ID NO: 141336 - DNA, 20 bp, synthetic construct
  source 1..20: mol_type = other DNA
tggctaacttttttgtattt

SEQ ID NO: 141337 - DNA, 20 bp, synthetic construct
  source 1..20: mol_type = other DNA
ctggctaacttttttgtatt

SEQ ID NO: 141338 - DNA, 20 bp, synthetic construct
  source 1..20: mol_type = other DNA
cctggctaacttttttgtat

SEQ ID NO: 141339 - DNA, 20 bp, synthetic construct
  source 1..20: mol_type = other DNA
gcctggctaacttttttgta

SEQ ID NO: 141340 - DNA, 20 bp, synthetic construct
  source 1..20: mol_type = other DNA
cgcctggctaacttttttgt

SEQ ID NO: 141341 - DNA, 20 bp, synthetic construct
  source 1..20: mol_type = other DNA
gcgcctggctaacttttttg

SEQ ID NO: 141342 - DNA, 20 bp, synthetic construct
  source 1..20: mol_type = other DNA
cgcgcctggctaactttttt

SEQ ID NO: 141343 - DNA, 20 bp, synthetic construct
  source 1..20: mol_type = other DNA
gcgcgcctggctaacttttt

SEQ ID NO: 141344 - DNA, 20 bp, synthetic construct
  source 1..20: mol_type = other DNA
ggcgcgcctggctaactttt

SEQ ID NO: 141345 - DNA, 20 bp, synthetic construct
  source 1..20: mol_type = other DNA
aggcgcgcctggctaacttt

SEQ ID NO: 141346 - DNA, 20 bp, synthetic construct
  source 1..20: mol_type = other DNA
caggcgcgcctggctaactt

SEQ ID NO: 141347 - DNA, 20 bp, synthetic construct
  source 1..20: mol_type = other DNA
acaggcgcgcctggctaact

SEQ ID NO: 141348 - DNA, 20 bp, synthetic construct
  source 1..20: mol_type = other DNA
tacaggcgcgcctggctaac

SEQ ID NO: 141349 - DNA, 20 bp, synthetic construct
  source 1..20: mol_type = other DNA
ctacaggcgcgcctggctaa

SEQ ID NO: 141350 - DNA, 20 bp, synthetic construct
  source 1..20: mol_type = other DNA
actacaggcgcgcctggcta

SEQ ID NO: 141351 - DNA, 20 bp, synthetic construct
  source 1..20: mol_type = other DNA
gactacaggcgcgcctggct

SEQ ID NO: 141352 - DNA, 20 bp, synthetic construct
  source 1..20: mol_type = other DNA
ggactacaggcgcgcctggc

SEQ ID NO: 141353 - DNA, 20 bp, synthetic construct
  source 1..20: mol_type = other DNA
aggactacaggcgcgcctgg

SEQ ID NO: 141354 - DNA, 20 bp, synthetic construct
  source 1..20: mol_type = other DNA
taggactacaggcgcgcctg

SEQ ID NO: 141355 - DNA, 20 bp, synthetic construct
  source 1..20: mol_type = other DNA
ctaggactacaggcgcgcct

SEQ ID NO: 141356 - DNA, 20 bp, synthetic construct
  source 1..20: mol_type = other DNA
gctaggactacaggcgcgcc

SEQ ID NO: 141357 - DNA, 20 bp, synthetic construct
  source 1..20: mol_type = other DNA
agctaggactacaggcgcgc

SEQ ID NO: 141358 - DNA, 20 bp, synthetic construct
  source 1..20: mol_type = other DNA
tagctaggactacaggcgcg

SEQ ID NO: 141359 - DNA, 20 bp, synthetic construct
  source 1..20: mol_type = other DNA
gtagctaggactacaggcgc

SEQ ID NO: 141360 - DNA, 20 bp, synthetic construct
  source 1..20: mol_type = other DNA
agtagctaggactacaggcg

SEQ ID NO: 141361 - DNA, 20 bp, synthetic construct
  source 1..20: mol_type = other DNA
gagtagctaggactacaggc

SEQ ID NO: 141362 - DNA, 20 bp, synthetic construct
  source 1..20: mol_type = other DNA
tgagtagctaggactacagg

SEQ ID NO: 141363 - DNA, 20 bp, synthetic construct
  source 1..20: mol_type = other DNA
ctgagtagctaggactacag

SEQ ID NO: 141364 - DNA, 20 bp, synthetic construct
  source 1..20: mol_type = other DNA
cctgagtagctaggactaca

SEQ ID NO: 141365 - DNA, 20 bp, synthetic construct
  source 1..20: mol_type = other DNA
tcctgagtagctaggactac

SEQ ID NO: 141366 - DNA, 20 bp, synthetic construct
  source 1..20: mol_type = other DNA
ctcctgagtagctaggacta

SEQ ID NO: 141367 - DNA, 20 bp, synthetic construct
  source 1..20: mol_type = other DNA
cctcctgagtagctaggact

SEQ ID NO: 141368 - DNA, 20 bp, synthetic construct
  source 1..20: mol_type = other DNA
gcctcctgagtagctaggac

SEQ ID NO: 141369 - DNA, 20 bp, synthetic construct
  source 1..20: mol_type = other DNA
agcctcctgagtagctagga

SEQ ID NO: 141370 - DNA, 20 bp, synthetic construct
  source 1..20: mol_type = other DNA
cagcctcctgagtagctagg

SEQ ID NO: 141371 - DNA, 20 bp, synthetic construct
  source 1..20: mol_type = other DNA
tcagcctcctgagtagctag

SEQ ID NO: 141372 - DNA, 20 bp, synthetic construct
  source 1..20: mol_type = other DNA
gtcagcctcctgagtagcta

SEQ ID NO: 141373 - DNA, 20 bp, synthetic construct
  source 1..20: mol_type = other DNA
tgtcagcctcctgagtagct

SEQ ID NO: 141374 - DNA, 20 bp, synthetic construct
  source 1..20: mol_type = other DNA
gtgtcagcctcctgagtagc

SEQ ID NO: 141375 - DNA, 20 bp, synthetic construct
  source 1..20: mol_type = other DNA
tgtgtcagcctcctgagtag

SEQ ID NO: 141376 - DNA, 20 bp, synthetic construct
  source 1..20: mol_type = other DNA
ctgtgtcagcctcctgagta

SEQ ID NO: 141377 - DNA, 20 bp, synthetic construct
  source 1..20: mol_type = other DNA
cctgtgtcagcctcctgagt

SEQ ID NO: 141378 - DNA, 20 bp, synthetic construct
  source 1..20: mol_type = other DNA
tcctgtgtcagcctcctgag

SEQ ID NO: 141379 - DNA, 20 bp, synthetic construct
  source 1..20: mol_type = other DNA
ctcctgtgtcagcctcctga

SEQ ID NO: 141380 - DNA, 20 bp, synthetic construct
  source 1..20: mol_type = other DNA
tctcctgtgtcagcctcctg

SEQ ID NO: 141381 - DNA, 20 bp, synthetic construct
  source 1..20: mol_type = other DNA
ttctcctgtgtcagcctcct

SEQ ID NO: 141382 - DNA, 20 bp, synthetic construct
  source 1..20: mol_type = other DNA
attctcctgtgtcagcctcc

SEQ ID NO: 141383 - DNA, 20 bp, synthetic construct
  source 1..20: mol_type = other DNA
gattctcctgtgtcagcctc

SEQ ID NO: 141384 - DNA, 20 bp, synthetic construct
  source 1..20: mol_type = other DNA
cgattctcctgtgtcagcct

SEQ ID NO: 141385 - DNA, 20 bp, synthetic construct
  source 1..20: mol_type = other DNA
gcgattctcctgtgtcagcc

SEQ ID NO: 141386 - DNA, 20 bp, synthetic construct
  source 1..20: mol_type = other DNA
agcgattctcctgtgtcagc

SEQ ID NO: 141387 - DNA, 20 bp, synthetic construct
  source 1..20: mol_type = other DNA
aagcgattctcctgtgtcag

SEQ ID NO: 141388 - DNA, 20 bp, synthetic construct
  source 1..20: mol_type = other DNA
caagcgattctcctgtgtca

SEQ ID NO: 141389 - DNA, 20 bp, synthetic construct
  source 1..20: mol_type = other DNA
tcaagcgattctcctgtgtc

SEQ ID NO: 141390 - DNA, 20 bp, synthetic construct
  source 1..20: mol_type = other DNA
ttcaagcgattctcctgtgt

SEQ ID NO: 141391 - DNA, 20 bp, synthetic construct
  source 1..20: mol_type = other DNA
gttcaagcgattctcctgtg

SEQ ID NO: 141392 - DNA, 20 bp, synthetic construct
  source 1..20: mol_type = other DNA
ggttcaagcgattctcctgt

SEQ ID NO: 141393 - DNA, 20 bp, synthetic construct
  source 1..20: mol_type = other DNA
gggttcaagcgattctcctg

SEQ ID NO: 141394 - DNA, 20 bp, synthetic construct
  source 1..20: mol_type = other DNA
cgggttcaagcgattctcct

SEQ ID NO: 141395 - DNA, 20 bp, synthetic construct
  source 1..20: mol_type = other DNA
ccgggttcaagcgattctcc

SEQ ID NO: 141396 - DNA, 20 bp, synthetic construct
  source 1..20: mol_type = other DNA
cccgggttcaagcgattctc

SEQ ID NO: 141397 - DNA, 20 bp, synthetic construct
  source 1..20: mol_type = other DNA
tcccgggttcaagcgattct

SEQ ID NO: 141398 - DNA, 20 bp, synthetic construct
  source 1..20: mol_type = other DNA
ctcccgggttcaagcgattc

SEQ ID NO: 141399 - DNA, 20 bp, synthetic construct
  source 1..20: mol_type = other DNA
cctcccgggttcaagcgatt

SEQ ID NO: 141400 - DNA, 20 bp, synthetic construct
  source 1..20: mol_type = other DNA
gcctcccgggttcaagcgat

SEQ ID NO: 141401 - DNA, 20 bp, synthetic construct
  source 1..20: mol_type = other DNA
tgcctcccgggttcaagcga

SEQ ID NO: 141402 - DNA, 20 bp, synthetic construct
  source 1..20: mol_type = other DNA
ctgcctcccgggttcaagcg

SEQ ID NO: 141403 - DNA, 20 bp, synthetic construct
  source 1..20: mol_type = other DNA
tctgcctcccgggttcaagc

SEQ ID NO: 141404 - DNA, 20 bp, synthetic construct
  source 1..20: mol_type = other DNA
ctctgcctcccgggttcaag

SEQ ID NO: 141405 - DNA, 20 bp, synthetic construct
  source 1..20: mol_type = other DNA
cctctgcctcccgggttcaa

SEQ ID NO: 141406 - DNA, 20 bp, synthetic construct
  source 1..20: mol_type = other DNA
acctctgcctcccgggttca

SEQ ID NO: 141407 - DNA, 20 bp, synthetic construct
  source 1..20: mol_type = other DNA
aacctctgcctcccgggttc

SEQ ID NO: 141408 - DNA, 20 bp, synthetic construct
  source 1..20: mol_type = other DNA
caacctctgcctcccgggtt

SEQ ID NO: 141409 - DNA, 20 bp, synthetic construct
  source 1..20: mol_type = other DNA
gcaacctctgcctcccgggt

SEQ ID NO: 141410 - DNA, 20 bp, synthetic construct
  source 1..20: mol_type = other DNA
cgcaacctctgcctcccggg

SEQ ID NO: 141411 - DNA, 20 bp, synthetic construct
  source 1..20: mol_type = other DNA
ccgcaacctctgcctcccgg

SEQ ID NO: 141412 - DNA, 20 bp, synthetic construct
  source 1..20: mol_type = other DNA
accgcaacctctgcctcccg

SEQ ID NO: 141413 - DNA, 20 bp, synthetic construct
  source 1..20: mol_type = other DNA
caccgcaacctctgcctccc

SEQ ID NO: 141414 - DNA, 20 bp, synthetic construct
  source 1..20: mol_type = other DNA
tcaccgcaacctctgcctcc

SEQ ID NO: 141415 - DNA, 20 bp, synthetic construct
  source 1..20: mol_type = other DNA
ctcaccgcaacctctgcctc

SEQ ID NO: 141416 - DNA, 20 bp, synthetic construct
  source 1..20: mol_type = other DNA
gctcaccgcaacctctgcct

SEQ ID NO: 141417 - DNA, 20 bp, synthetic construct
  source 1..20: mol_type = other DNA
agctcaccgcaacctctgcc

SEQ ID NO: 141418 - DNA, 20 bp, synthetic construct
  source 1..20: mol_type = other DNA
cagctcaccgcaacctctgc

SEQ ID NO: 141419 - DNA, 20 bp, synthetic construct
  source 1..20: mol_type = other DNA
tcagctcaccgcaacctctg

SEQ ID NO: 141420 - DNA, 20 bp, synthetic construct
  source 1..20: mol_type = other DNA
atcagctcaccgcaacctct

SEQ ID NO: 141421 - DNA, 20 bp, synthetic construct
  source 1..20: mol_type = other DNA
tatcagctcaccgcaacctc

SEQ ID NO: 141422 - DNA, 20 bp, synthetic construct
  source 1..20: mol_type = other DNA
atatcagctcaccgcaacct

SEQ ID NO: 141423 - DNA, 20 bp, synthetic construct
  source 1..20: mol_type = other DNA
gatatcagctcaccgcaacc

SEQ ID NO: 141424 - DNA, 20 bp, synthetic construct
  source 1..20: mol_type = other DNA
tgatatcagctcaccgcaac

SEQ ID NO: 141425 - DNA, 20 bp, synthetic construct
  source 1..20: mol_type = other DNA
gtgatatcagctcaccgcaa

SEQ ID NO: 141426 - DNA, 20 bp, synthetic construct
  source 1..20: mol_type = other DNA
cgtgatatcagctcaccgca

SEQ ID NO: 141427 - DNA, 20 bp, synthetic construct
  source 1..20: mol_type = other DNA
gcgtgatatcagctcaccgc

SEQ ID NO: 141428 - DNA, 20 bp, synthetic construct
  source 1..20: mol_type = other DNA
ggcgtgatatcagctcaccg

SEQ ID NO: 141429 - DNA, 20 bp, synthetic construct
  source 1..20: mol_type = other DNA
tggcgtgatatcagctcacc

SEQ ID NO: 141430 - DNA, 20 bp, synthetic construct
  source 1..20: mol_type = other DNA
gtggcgtgatatcagctcac

SEQ ID NO: 141431 - DNA, 20 bp, synthetic construct
  source 1..20: mol_type = other DNA
agtggcgtgatatcagctca

SEQ ID NO: 141432 - DNA, 20 bp, synthetic construct
  source 1..20: mol_type = other DNA
cagtggcgtgatatcagctc

SEQ ID NO: 141433 - DNA, 20 bp, synthetic construct
  source 1..20: mol_type = other DNA
gcagtggcgtgatatcagct

SEQ ID NO: 141434 - DNA, 20 bp, synthetic construct
  source 1..20: mol_type = other DNA
tgcagtggcgtgatatcagc

SEQ ID NO: 141435 - DNA, 20 bp, synthetic construct
  source 1..20: mol_type = other DNA
gtgcagtggcgtgatatcag

SEQ ID NO: 141436 - DNA, 20 bp, synthetic construct
  source 1..20: mol_type = other DNA
agtgcagtggcgtgatatca

SEQ ID NO: 141437 - DNA, 20 bp, synthetic construct
  source 1..20: mol_type = other DNA
gagtgcagtggcgtgatatc

SEQ ID NO: 141438 - DNA, 20 bp, synthetic construct
  source 1..20: mol_type = other DNA
ggagtgcagtggcgtgatat

SEQ ID NO: 141439 - DNA, 20 bp, synthetic construct
  source 1..20: mol_type = other DNA
tggagtgcagtggcgtgata

SEQ ID NO: 141440 - DNA, 20 bp, synthetic construct
  source 1..20: mol_type = other DNA
gtggagtgcagtggcgtgat

SEQ ID NO: 141441 - DNA, 20 bp, synthetic construct
  source 1..20: mol_type = other DNA
ggtggagtgcagtggcgtga

SEQ ID NO: 141442 - DNA, 20 bp, synthetic construct
  source 1..20: mol_type = other DNA
gggtggagtgcagtggcgtg

SEQ ID NO: 141443 - DNA, 20 bp, synthetic construct
  source 1..20: mol_type = other DNA
agggtggagtgcagtggcgt

SEQ ID NO: 141444 - DNA, 20 bp, synthetic construct
  source 1..20: mol_type = other DNA
cagggtggagtgcagtggcg

SEQ ID NO: 141445 - DNA, 20 bp, synthetic construct
  source 1..20: mol_type = other DNA
ccagggtggagtgcagtggc

SEQ ID NO: 141446 - DNA, 20 bp, synthetic construct
  source 1..20: mol_type = other DNA
cccagggtggagtgcagtgg

SEQ ID NO: 141447 - DNA, 20 bp, synthetic construct
  source 1..20: mol_type = other DNA
gcccagggtggagtgcagtg

SEQ ID NO: 141448 - DNA, 20 bp, synthetic construct
  source 1..20: mol_type = other DNA
tgcccagggtggagtgcagt

SEQ ID NO: 141449 - DNA, 20 bp, synthetic construct
  source 1..20: mol_type = other DNA
ttgcccagggtggagtgcag

SEQ ID NO: 141450 - DNA, 20 bp, synthetic construct
  source 1..20: mol_type = other DNA
gttgcccagggtggagtgca

SEQ ID NO: 141451 - DNA, 20 bp, synthetic construct
  source 1..20: mol_type = other DNA
tgttgcccagggtggagtgc

SEQ ID NO: 141452 - DNA, 20 bp, synthetic construct
  source 1..20: mol_type = other DNA
ctgttgcccagggtggagtg

SEQ ID NO: 141453 - DNA, 20 bp, synthetic construct
  source 1..20: mol_type = other DNA
tctgttgcccagggtggagt

SEQ ID NO: 141454 - DNA, 20 bp, synthetic construct
  source 1..20: mol_type = other DNA
ctctgttgcccagggtggag

SEQ ID NO: 141455 - DNA, 20 bp, synthetic construct
  source 1..20: mol_type = other DNA
gctctgttgcccagggtgga

SEQ ID NO: 141456 - DNA, 20 bp, synthetic construct
  source 1..20: mol_type = other DNA
cgctctgttgcccagggtgg

SEQ ID NO: 141457 - DNA, 20 bp, synthetic construct
  source 1..20: mol_type = other DNA
tcgctctgttgcccagggtg

SEQ ID NO: 141458 - DNA, 20 bp, synthetic construct
  source 1..20: mol_type = other DNA
ctcgctctgttgcccagggt

SEQ ID NO: 141459 - DNA, 20 bp, synthetic construct
  source 1..20: mol_type = other DNA
tctcgctctgttgcccaggg

SEQ ID NO: 141460 - DNA, 20 bp, synthetic construct
  source 1..20: mol_type = other DNA
gtctcgctctgttgcccagg

SEQ ID NO: 141461 - DNA, 20 bp, synthetic construct
  source 1..20: mol_type = other DNA
agtctcgctctgttgcccag

SEQ ID NO: 141462 - DNA, 20 bp, synthetic construct
  source 1..20: mol_type = other DNA
gagtctcgctctgttgccca

SEQ ID NO: 141463 - DNA, 20 bp, synthetic construct
  source 1..20: mol_type = other DNA
ggagtctcgctctgttgccc

SEQ ID NO: 141464 - DNA, 20 bp, synthetic construct
  source 1..20: mol_type = other DNA
cggagtctcgctctgttgcc

SEQ ID NO: 141465 - DNA, 20 bp, synthetic construct
  source 1..20: mol_type = other DNA
acggagtctcgctctgttgc

SEQ ID NO: 141466 - DNA, 20 bp, synthetic construct
  source 1..20: mol_type = other DNA
gacggagtctcgctctgttg

SEQ ID NO: 141467 - DNA, 20 bp, synthetic construct
  source 1..20: mol_type = other DNA
agacggagtctcgctctgtt

SEQ ID NO: 141468 - DNA, 20 bp, synthetic construct
  source 1..20: mol_type = other DNA
gagacggagtctcgctctgt

SEQ ID NO: 141469 - DNA, 20 bp, synthetic construct
  source 1..20: mol_type = other DNA
tgagacggagtctcgctctg

SEQ ID NO: 141470 - DNA, 20 bp, synthetic construct
  source 1..20: mol_type = other DNA
ttgagacggagtctcgctct

SEQ ID NO: 141471 - DNA, 20 bp, synthetic construct
  source 1..20: mol_type = other DNA
tttgagacggagtctcgctc

SEQ ID NO: 141472 - DNA, 20 bp, synthetic construct
  source 1..20: mol_type = other DNA
ttttgagacggagtctcgct

SEQ ID NO: 141473 - DNA, 20 bp, synthetic construct
  source 1..20: mol_type = other DNA
gttttgagacggagtctcgc

SEQ ID NO: 141474 - DNA, 20 bp, synthetic construct
  source 1..20: mol_type = other DNA
tgttttgagacggagtctcg

SEQ ID NO: 141475 - DNA, 20 bp, synthetic construct
  source 1..20: mol_type = other DNA
ttgttttgagacggagtctc

SEQ ID NO: 141476 - DNA, 20 bp, synthetic construct
  source 1..20: mol_type = other DNA
gttgttttgagacggagtct

SEQ ID NO: 141477 - DNA, 20 bp, synthetic construct
  source 1..20: mol_type = other DNA
tgttgttttgagacggagtc

SEQ ID NO: 141478 - DNA, 20 bp, synthetic construct
  source 1..20: mol_type = other DNA
ttgttgttttgagacggagt

SEQ ID NO: 141479 - DNA, 20 bp, synthetic construct
  source 1..20: mol_type = other DNA
gttgttgttttgagacggag

SEQ ID NO: 141480 - DNA, 20 bp, synthetic construct
  source 1..20: mol_type = other DNA
tgttgttgttttgagacgga

SEQ ID NO: 141481 - DNA, 20 bp, synthetic construct
  source 1..20: mol_type = other DNA
ttgttgttgttttgagacgg

SEQ ID NO: 141482 - DNA, 20 bp, synthetic construct
  source 1..20: mol_type = other DNA
tttgttgttgttttgagacg

SEQ ID NO: 141483 - DNA, 20 bp, synthetic construct
  source 1..20: mol_type = other DNA
ttttgttgttgttttgagac

SEQ ID NO: 141484 - DNA, 20 bp, synthetic construct
  source 1..20: mol_type = other DNA
gttttgttgttgttttgaga

SEQ ID NO: 141485 - DNA, 20 bp, synthetic construct
  source 1..20: mol_type = other DNA
agttttgttgttgttttgag

SEQ ID NO: 141486 - DNA, 20 bp, synthetic construct
  source 1..20: mol_type = other DNA
cagttttgttgttgttttga

SEQ ID NO: 141487 - DNA, 20 bp, synthetic construct
  source 1..20: mol_type = other DNA
gcagttttgttgttgttttg

SEQ ID NO: 141488 - DNA, 20 bp, synthetic construct
  source 1..20: mol_type = other DNA
tgcagttttgttgttgtttt

SEQ ID NO: 141489 - DNA, 20 bp, synthetic construct
  source 1..20: mol_type = other DNA
gtgcagttttgttgttgttt

SEQ ID NO: 141490 - DNA, 20 bp, synthetic construct
  source 1..20: mol_type = other DNA
agtgcagttttgttgttgtt

SEQ ID NO: 141491 - DNA, 20 bp, synthetic construct
  source 1..20: mol_type = other DNA
cagtgcagttttgttgttgt

SEQ ID NO: 141492 - DNA, 20 bp, synthetic construct
  source 1..20: mol_type = other DNA
acagtgcagttttgttgttg

SEQ ID NO: 141493 - DNA, 20 bp, synthetic construct
  source 1..20: mol_type = other DNA
gacagtgcagttttgttgtt

SEQ ID NO: 141494 - DNA, 20 bp, synthetic construct
  source 1..20: mol_type = other DNA
ggacagtgcagttttgttgt

SEQ ID NO: 141495 - DNA, 20 bp, synthetic construct
  source 1..20: mol_type = other DNA
tggacagtgcagttttgttg

SEQ ID NO: 141496 - DNA, 20 bp, synthetic construct
  source 1..20: mol_type = other DNA
gtggacagtgcagttttgtt

SEQ ID NO: 141497 - DNA, 20 bp, synthetic construct
  source 1..20: mol_type = other DNA
ggtggacagtgcagttttgt

SEQ ID NO: 141498 - DNA, 20 bp, synthetic construct
  source 1..20: mol_type = other DNA
cggtggacagtgcagttttg

SEQ ID NO: 141499 - DNA, 20 bp, synthetic construct
  source 1..20: mol_type = other DNA
acggtggacagtgcagtttt

SEQ ID NO: 141500 - DNA, 20 bp, synthetic construct
  source 1..20: mol_type = other DNA
tacggtggacagtgcagttt

SEQ ID NO: 141501 - DNA, 20 bp, synthetic construct
  source 1..20: mol_type = other DNA
atacggtggacagtgcagtt

SEQ ID NO: 141502 - DNA, 20 bp, synthetic construct
  source 1..20: mol_type = other DNA
aatacggtggacagtgcagt

SEQ ID NO: 141503 - DNA, 20 bp, synthetic construct
  source 1..20: mol_type = other DNA
taatacggtggacagtgcag

SEQ ID NO: 141504 - DNA, 20 bp, synthetic construct
  source 1..20: mol_type = other DNA
ctaatacggtggacagtgca

SEQ ID NO: 141505 - DNA, 20 bp, synthetic construct
  source 1..20: mol_type = other DNA
gctaatacggtggacagtgc

SEQ ID NO: 141506 - DNA, 20 bp, synthetic construct
  source 1..20: mol_type = other DNA
agctaatacggtggacagtg

SEQ ID NO: 141507 - DNA, 20 bp, synthetic construct
  source 1..20: mol_type = other DNA
tagctaatacggtggacagt

SEQ ID NO: 141508 - DNA, 20 bp, synthetic construct
  source 1..20: mol_type = other DNA
gtagctaatacggtggacag

SEQ ID NO: 141509 - DNA, 20 bp, synthetic construct
  source 1..20: mol_type = other DNA
agtagctaatacggtggaca

SEQ ID NO: 141510 - DNA, 20 bp, synthetic construct
  source 1..20: mol_type = other DNA
aagtagctaatacggtggac

SEQ ID NO: 141511 - DNA, 20 bp, synthetic construct
  source 1..20: mol_type = other DNA
taagtagctaatacggtgga

SEQ ID NO: 141512 - DNA, 20 bp, synthetic construct
  source 1..20: mol_type = other DNA
ctaagtagctaatacggtgg

SEQ ID NO: 141513 - DNA, 20 bp, synthetic construct
  source 1..20: mol_type = other DNA
gctaagtagctaatacggtg

SEQ ID NO: 141514 - DNA, 20 bp, synthetic construct
  source 1..20: mol_type = other DNA
agctaagtagctaatacggt

SEQ ID NO: 141515 - DNA, 20 bp, synthetic construct
  source 1..20: mol_type = other DNA
tagctaagtagctaatacgg

SEQ ID NO: 141516 - DNA, 20 bp, synthetic construct
  source 1..20: mol_type = other DNA
gtagctaagtagctaatacg

SEQ ID NO: 141517 - DNA, 20 bp, synthetic construct
  source 1..20: mol_type = other DNA
tgtagctaagtagctaatac

SEQ ID NO: 141518 - DNA, 20 bp, synthetic construct
  source 1..20: mol_type = other DNA
atgtagctaagtagctaata

SEQ ID NO: 141519 - DNA, 20 bp, synthetic construct
  source 1..20: mol_type = other DNA
catgtagctaagtagctaat

SEQ ID NO: 141520 - DNA, 20 bp, synthetic construct
  source 1..20: mol_type = other DNA
acatgtagctaagtagctaa

SEQ ID NO: 141521 - DNA, 20 bp, synthetic construct
  source 1..20: mol_type = other DNA
cacatgtagctaagtagcta

SEQ ID NO: 141522 - DNA, 20 bp, synthetic construct
  source 1..20: mol_type = other DNA
ccacatgtagctaagtagct

SEQ ID NO: 141523 - DNA, 20 bp, synthetic construct
  source 1..20: mol_type = other DNA
gccacatgtagctaagtagc

SEQ ID NO: 141524 - DNA, 20 bp, synthetic construct
  source 1..20: mol_type = other DNA
agccacatgtagctaagtag

SEQ ID NO: 141525 - DNA, 20 bp, synthetic construct
  source 1..20: mol_type = other DNA
aagccacatgtagctaagta

SEQ ID NO: 141526 - DNA, 20 bp, synthetic construct
  source 1..20: mol_type = other DNA
aaagccacatgtagctaagt

SEQ ID NO: 141527 - DNA, 20 bp, synthetic construct
  source 1..20: mol_type = other DNA
aaaagccacatgtagctaag

SEQ ID NO: 141528 - DNA, 20 bp, synthetic construct
  source 1..20: mol_type = other DNA
aaaaagccacatgtagctaa

SEQ ID NO: 141529 - DNA, 20 bp, synthetic construct
  source 1..20: mol_type = other DNA
aaaaaagccacatgtagcta

SEQ ID NO: 141530 - DNA, 20 bp, synthetic construct
  source 1..20: mol_type = other DNA
taaaaaagccacatgtagct

SEQ ID NO: 141531 - DNA, 20 bp, synthetic construct
  source 1..20: mol_type = other DNA
ataaaaaagccacatgtagc

SEQ ID NO: 141532 - DNA, 20 bp, synthetic construct
  source 1..20: mol_type = other DNA
aataaaaaagccacatgtag

SEQ ID NO: 141533 - DNA, 20 bp, synthetic construct
  source 1..20: mol_type = other DNA
taataaaaaagccacatgta

SEQ ID NO: 141534 - DNA, 20 bp, synthetic construct
  source 1..20: mol_type = other DNA
ataataaaaaagccacatgt

SEQ ID NO: 141535 - DNA, 20 bp, synthetic construct
  source 1..20: mol_type = other DNA
aataataaaaaagccacatg

SEQ ID NO: 141536 - DNA, 20 bp, synthetic construct
  source 1..20: mol_type = other DNA
gaataataaaaaagccacat

SEQ ID NO: 141537 - DNA, 20 bp, synthetic construct
  source 1..20: mol_type = other DNA
tgaataataaaaaagccaca

SEQ ID NO: 141538 - DNA, 20 bp, synthetic construct
  source 1..20: mol_type = other DNA
ttgaataataaaaaagccac

SEQ ID NO: 141539 - DNA, 20 bp, synthetic construct
  source 1..20: mol_type = other DNA
tttgaataataaaaaagcca

SEQ ID NO: 141540 - DNA, 20 bp, synthetic construct
  source 1..20: mol_type = other DNA
ttttgaataataaaaaagcc

SEQ ID NO: 141541 - DNA, 20 bp, synthetic construct
  source 1..20: mol_type = other DNA
tttttgaataataaaaaagc

SEQ ID NO: 141542 - DNA, 20 bp, synthetic construct
  source 1..20: mol_type = other DNA
atttttgaataataaaaaag

SEQ ID NO: 141543 - DNA, 20 bp, synthetic construct
  source 1..20: mol_type = other DNA
tatttttgaataataaaaaa

SEQ ID NO: 141544 - DNA, 20 bp, synthetic construct
  source 1..20: mol_type = other DNA
ttatttttgaataataaaaa

SEQ ID NO: 141545 - DNA, 20 bp, synthetic construct
  source 1..20: mol_type = other DNA
tttatttttgaataataaaa

SEQ ID NO: 141546 - DNA, 20 bp, synthetic construct
  source 1..20: mol_type = other DNA
atttatttttgaataataaa

SEQ ID NO: 141547 - DNA, 20 bp, synthetic construct
  source 1..20: mol_type = other DNA
aatttatttttgaataataa

SEQ ID NO: 141548 - DNA, 20 bp, synthetic construct
  source 1..20: mol_type = other DNA
aaatttatttttgaataata

SEQ ID NO: 141549 - DNA, 20 bp, synthetic construct
  source 1..20: mol_type = other DNA
aaaatttatttttgaataat

SEQ ID NO: 141550 - DNA, 20 bp, synthetic construct
  source 1..20: mol_type = other DNA
aaaaatttatttttgaataa

SEQ ID NO: 141551 - DNA, 20 bp, synthetic construct
  source 1..20: mol_type = other DNA
taaaaatttatttttgaata

SEQ ID NO: 141552 - DNA, 20 bp, synthetic construct
  source 1..20: mol_type = other DNA
ctaaaaatttatttttgaat

SEQ ID NO: 141553 - DNA, 20 bp, synthetic construct
  source 1..20: mol_type = other DNA
cctaaaaatttatttttgaa

SEQ ID NO: 141554 - DNA, 20 bp, synthetic construct
  source 1..20: mol_type = other DNA
gcctaaaaatttatttttga

SEQ ID NO: 141555 - DNA, 20 bp, synthetic construct
  source 1..20: mol_type = other DNA
ggcctaaaaatttatttttg

SEQ ID NO: 141556 - DNA, 20 bp, synthetic construct
  source 1..20: mol_type = other DNA
cggcctaaaaatttattttt

SEQ ID NO: 141557 - DNA, 20 bp, synthetic construct
  source 1..20: mol_type = other DNA
ccggcctaaaaatttatttt

SEQ ID NO: 141558 - DNA, 20 bp, synthetic construct
  source 1..20: mol_type = other DNA
cccggcctaaaaatttattt

SEQ ID NO: 141559 - DNA, 20 bp, synthetic construct
  source 1..20: mol_type = other DNA
acccggcctaaaaatttatt

SEQ ID NO: 141560 - DNA, 20 bp, synthetic construct
  source 1..20: mol_type = other DNA
cacccggcctaaaaatttat

SEQ ID NO: 141561 - DNA, 20 bp, synthetic construct
  source 1..20: mol_type = other DNA
gcacccggcctaaaaattta

SEQ ID NO: 141562 - DNA, 20 bp, synthetic construct
  source 1..20: mol_type = other DNA
tgcacccggcctaaaaattt

SEQ ID NO: 141563 - DNA, 20 bp, synthetic construct
  source 1..20: mol_type = other DNA
ctgcacccggcctaaaaatt

SEQ ID NO: 141564 - DNA, 20 bp, synthetic construct
  source 1..20: mol_type = other DNA
actgcacccggcctaaaaat

SEQ ID NO: 141565 - DNA, 20 bp, synthetic construct
  source 1..20: mol_type = other DNA
aactgcacccggcctaaaaa

SEQ ID NO: 141566 - DNA, 20 bp, synthetic construct
  source 1..20: mol_type = other DNA
caactgcacccggcctaaaa

SEQ ID NO: 141567 - DNA, 20 bp, synthetic construct
  source 1..20: mol_type = other DNA
gcaactgcacccggcctaaa

SEQ ID NO: 141568 - DNA, 20 bp, synthetic construct
  source 1..20: mol_type = other DNA
agcaactgcacccggcctaa

SEQ ID NO: 141569 - DNA, 20 bp, synthetic construct
  source 1..20: mol_type = other DNA
gagcaactgcacccggccta

SEQ ID NO: 141570 - DNA, 20 bp, synthetic construct
  source 1..20: mol_type = other DNA
tgagcaactgcacccggcct

SEQ ID NO: 141571 - DNA, 20 bp, synthetic construct
  source 1..20: mol_type = other DNA
gtgagcaactgcacccggcc

SEQ ID NO: 141572 - DNA, 20 bp, synthetic construct
  source 1..20: mol_type = other DNA
tgtgagcaactgcacccggc

SEQ ID NO: 141573 - DNA, 20 bp, synthetic construct
  source 1..20: mol_type = other DNA
gtgtgagcaactgcacccgg

SEQ ID NO: 141574 - DNA, 20 bp, synthetic construct
  source 1..20: mol_type = other DNA
ggtgtgagcaactgcacccg

SEQ ID NO: 141575 - DNA, 20 bp, synthetic construct
  source 1..20: mol_type = other DNA
aggtgtgagcaactgcaccc

SEQ ID NO: 141576 - DNA, 20 bp, synthetic construct
  source 1..20: mol_type = other DNA
caggtgtgagcaactgcacc

SEQ ID NO: 141577 - DNA, 20 bp, synthetic construct
  source 1..20: mol_type = other DNA
acaggtgtgagcaactgcac

SEQ ID NO: 141578 - DNA, 20 bp, synthetic construct
  source 1..20: mol_type = other DNA
tacaggtgtgagcaactgca

SEQ ID NO: 141579 - DNA, 20 bp, synthetic construct
  source 1..20: mol_type = other DNA
ttacaggtgtgagcaactgc

SEQ ID NO: 141580 - DNA, 20 bp, synthetic construct
  source 1..20: mol_type = other DNA
attacaggtgtgagcaactg

SEQ ID NO: 141581 - DNA, 20 bp, synthetic construct
  source 1..20: mol_type = other DNA
gattacaggtgtgagcaact

SEQ ID NO: 141582 - DNA, 20 bp, synthetic construct
  source 1..20: mol_type = other DNA
ggattacaggtgtgagcaac

SEQ ID NO: 141583 - DNA, 20 bp, synthetic construct
  source 1..20: mol_type = other DNA
gggattacaggtgtgagcaa

SEQ ID NO: 141584 - DNA, 20 bp, synthetic construct
  source 1..20: mol_type = other DNA
tgggattacaggtgtgagca

SEQ ID NO: 141585 - DNA, 20 bp, synthetic construct
  source 1..20: mol_type = other DNA
ttgggattacaggtgtgagc

SEQ ID NO: 141586 - DNA, 20 bp, synthetic construct
  source 1..20: mol_type = other DNA
gttgggattacaggtgtgag

SEQ ID NO: 141587 - DNA, 20 bp, synthetic construct
  source 1..20: mol_type = other DNA
tgttgggattacaggtgtga

SEQ ID NO: 141588 - DNA, 20 bp, synthetic construct
  source 1..20: mol_type = other DNA
gtgttgggattacaggtgtg

SEQ ID NO: 141589 - DNA, 20 bp, synthetic construct
  source 1..20: mol_type = other DNA
agtgttgggattacaggtgt

SEQ ID NO: 141590 - DNA, 20 bp, synthetic construct
  source 1..20: mol_type = other DNA
aagtgttgggattacaggtg

SEQ ID NO: 141591 - DNA, 20 bp, synthetic construct
  source 1..20: mol_type = other DNA
aaagtgttgggattacaggt

SEQ ID NO: 141592 - DNA, 20 bp, synthetic construct
  source 1..20: mol_type = other DNA
caaagtgttgggattacagg

SEQ ID NO: 141593 - DNA, 20 bp, synthetic construct
  source 1..20: mol_type = other DNA
ccaaagtgttgggattacag

SEQ ID NO: 141594 - DNA, 20 bp, synthetic construct
  source 1..20: mol_type = other DNA
cccaaagtgttgggattaca

SEQ ID NO: 141595 - DNA, 20 bp, synthetic construct
  source 1..20: mol_type = other DNA
tcccaaagtgttgggattac

SEQ ID NO: 141596 - DNA, 20 bp, synthetic construct
  source 1..20: mol_type = other DNA
ctcccaaagtgttgggatta

SEQ ID NO: 141597 - DNA, 20 bp, synthetic construct
  source 1..20: mol_type = other DNA
cctcccaaagtgttgggatt

SEQ ID NO: 141598 - DNA, 20 bp, synthetic construct
  source 1..20: mol_type = other DNA
gcctcccaaagtgttgggat

SEQ ID NO: 141599 - DNA, 20 bp, synthetic construct
  source 1..20: mol_type = other DNA
ggcctcccaaagtgttggga

SEQ ID NO: 141600 - DNA, 20 bp, synthetic construct
  source 1..20: mol_type = other DNA
cggcctcccaaagtgttggg

SEQ ID NO: 141601 - DNA, 20 bp, synthetic construct
  source 1..20: mol_type = other DNA
tcggcctcccaaagtgttgg

SEQ ID NO: 141602 - DNA, 20 bp, synthetic construct
  source 1..20: mol_type = other DNA
ctcggcctcccaaagtgttg

SEQ ID NO: 141603 - DNA, 20 bp, synthetic construct
  source 1..20: mol_type = other DNA
tctcggcctcccaaagtgtt

SEQ ID NO: 141604 - DNA, 20 bp, synthetic construct
  source 1..20: mol_type = other DNA
atctcggcctcccaaagtgt

SEQ ID NO: 141605 - DNA, 20 bp, synthetic construct
  source 1..20: mol_type = other DNA
catctcggcctcccaaagtg

SEQ ID NO: 141606 - DNA, 20 bp, synthetic construct
  source 1..20: mol_type = other DNA
ccatctcggcctcccaaagt

SEQ ID NO: 141607 - DNA, 20 bp, synthetic construct
  source 1..20: mol_type = other DNA
tccatctcggcctcccaaag

SEQ ID NO: 141608 - DNA, 20 bp, synthetic construct
  source 1..20: mol_type = other DNA
gtccatctcggcctcccaaa

SEQ ID NO: 141609 - DNA, 20 bp, synthetic construct
  source 1..20: mol_type = other DNA
cgtccatctcggcctcccaa

SEQ ID NO: 141610 - DNA, 20 bp, synthetic construct
  source 1..20: mol_type = other DNA
ccgtccatctcggcctccca

SEQ ID NO: 141611 - DNA, 20 bp, synthetic construct
  source 1..20: mol_type = other DNA
tccgtccatctcggcctccc

SEQ ID NO: 141612 - DNA, 20 bp, synthetic construct
  source 1..20: mol_type = other DNA
atccgtccatctcggcctcc

SEQ ID NO: 141613 - DNA, 20 bp, synthetic construct
  source 1..20: mol_type = other DNA
gatccgtccatctcggcctc

SEQ ID NO: 141614 - DNA, 20 bp, synthetic construct
  source 1..20: mol_type = other DNA
tgatccgtccatctcggcct

SEQ ID NO: 141615 - DNA, 20 bp, synthetic construct
  source 1..20: mol_type = other DNA
gtgatccgtccatctcggcc

SEQ ID NO: 141616 - DNA, 20 bp, synthetic construct
  source 1..20: mol_type = other DNA
agtgatccgtccatctcggc

SEQ ID NO: 141617 - DNA, 20 bp, synthetic construct
  source 1..20: mol_type = other DNA
aagtgatccgtccatctcgg

SEQ ID NO: 141618 - DNA, 20 bp, synthetic construct
  source 1..20: mol_type = other DNA
caagtgatccgtccatctcg

SEQ ID NO: 141619 - DNA, 20 bp, synthetic construct
  source 1..20: mol_type = other DNA
tcaagtgatccgtccatctc

SEQ ID NO: 141620 - DNA, 20 bp, synthetic construct
  source 1..20: mol_type = other DNA
ctcaagtgatccgtccatct

SEQ ID NO: 141621 - DNA, 20 bp, synthetic construct
  source 1..20: mol_type = other DNA
cctcaagtgatccgtccatc

SEQ ID NO: 141622 - DNA, 20 bp, synthetic construct
  source 1..20: mol_type = other DNA
gcctcaagtgatccgtccat

SEQ ID NO: 141623 - DNA, 20 bp, synthetic construct
  source 1..20: mol_type = other DNA
ggcctcaagtgatccgtcca

SEQ ID NO: 141624 - DNA, 20 bp, synthetic construct
  source 1..20: mol_type = other DNA
tggcctcaagtgatccgtcc

SEQ ID NO: 141625 - DNA, 20 bp, synthetic construct
  source 1..20: mol_type = other DNA
ctggcctcaagtgatccgtc

SEQ ID NO: 141626 - DNA, 20 bp, synthetic construct
  source 1..20: mol_type = other DNA
cctggcctcaagtgatccgt

SEQ ID NO: 141627 - DNA, 20 bp, synthetic construct
  source 1..20: mol_type = other DNA
tcctggcctcaagtgatccg

SEQ ID NO: 141628 - DNA, 20 bp, synthetic construct
  source 1..20: mol_type = other DNA
ctcctggcctcaagtgatcc

SEQ ID NO: 141629 - DNA, 20 bp, synthetic construct
  source 1..20: mol_type = other DNA
actcctggcctcaagtgatc

SEQ ID NO: 141630 - DNA, 20 bp, synthetic construct
  source 1..20: mol_type = other DNA
aactcctggcctcaagtgat

SEQ ID NO: 141631 - DNA, 20 bp, synthetic construct
  source 1..20: mol_type = other DNA
aaactcctggcctcaagtga

SEQ ID NO: 141632 - DNA, 20 bp, synthetic construct
  source 1..20: mol_type = other DNA
caaactcctggcctcaagtg

SEQ ID NO: 141633 - DNA, 20 bp, synthetic construct
  source 1..20: mol_type = other DNA
tcaaactcctggcctcaagt

SEQ ID NO: 141634 - DNA, 20 bp, synthetic construct
  source 1..20: mol_type = other DNA
ctcaaactcctggcctcaag

SEQ ID NO: 141635 - DNA, 20 bp, synthetic construct
  source 1..20: mol_type = other DNA
tctcaaactcctggcctcaa

SEQ ID NO: 141636 - DNA, 20 bp, synthetic construct
  source 1..20: mol_type = other DNA
gtctcaaactcctggcctca

SEQ ID NO: 141637 - DNA, 20 bp, synthetic construct
  source 1..20: mol_type = other DNA
ggtctcaaactcctggcctc

SEQ ID NO: 141638 - DNA, 20 bp, synthetic construct
  source 1..20: mol_type = other DNA
tggtctcaaactcctggcct

SEQ ID NO: 141639 - DNA, 20 bp, synthetic construct
  source 1..20: mol_type = other DNA
ctggtctcaaactcctggcc

SEQ ID NO: 141640 - DNA, 20 bp, synthetic construct
  source 1..20: mol_type = other DNA
gctggtctcaaactcctggc

SEQ ID NO: 141641 - DNA, 20 bp, synthetic construct
  source 1..20: mol_type = other DNA
ggctggtctcaaactcctgg

SEQ ID NO: 141642 - DNA, 20 bp, synthetic construct
  source 1..20: mol_type = other DNA
aggctggtctcaaactcctg

SEQ ID NO: 141643 - DNA, 20 bp, synthetic construct
  source 1..20: mol_type = other DNA
caggctggtctcaaactcct

SEQ ID NO: 141644 - DNA, 20 bp, synthetic construct
  source 1..20: mol_type = other DNA
ccaggctggtctcaaactcc

SEQ ID NO: 141645 - DNA, 20 bp, synthetic construct
  source 1..20: mol_type = other DNA
gccaggctggtctcaaactc

SEQ ID NO: 141646 - DNA, 20 bp, synthetic construct
  source 1..20: mol_type = other DNA
ggccaggctggtctcaaact

SEQ ID NO: 141647 - DNA, 20 bp, synthetic construct
  source 1..20: mol_type = other DNA
tggccaggctggtctcaaac

SEQ ID NO: 141648 - DNA, 20 bp, synthetic construct
  source 1..20: mol_type = other DNA
ttggccaggctggtctcaaa

SEQ ID NO: 141649 - DNA, 20 bp, synthetic construct
  source 1..20: mol_type = other DNA
gttggccaggctggtctcaa

SEQ ID NO: 141650 - DNA, 20 bp, synthetic construct
  source 1..20: mol_type = other DNA
tgttggccaggctggtctca

SEQ ID NO: 141651 - DNA, 20 bp, synthetic construct
  source 1..20: mol_type = other DNA
atgttggccaggctggtctc

SEQ ID NO: 141652 - DNA, 20 bp, synthetic construct
  source 1..20: mol_type = other DNA
catgttggccaggctggtct

SEQ ID NO: 141653 - DNA, 20 bp, synthetic construct
  source 1..20: mol_type = other DNA
ccatgttggccaggctggtc

SEQ ID NO: 141654 - DNA, 20 bp, synthetic construct
  source 1..20: mol_type = other DNA
accatgttggccaggctggt

SEQ ID NO: 141655 - DNA, 20 bp, synthetic construct
  source 1..20: mol_type = other DNA
caccatgttggccaggctgg

SEQ ID NO: 141656 - DNA, 20 bp, synthetic construct
  source 1..20: mol_type = other DNA
tcaccatgttggccaggctg

SEQ ID NO: 141657 - DNA, 20 bp, synthetic construct
  source 1..20: mol_type = other DNA
ttcaccatgttggccaggct

SEQ ID NO: 141658 - DNA, 20 bp, synthetic construct
  source 1..20: mol_type = other DNA
tttcaccatgttggccaggc

SEQ ID NO: 141659 - DNA, 20 bp, synthetic construct
  source 1..20: mol_type = other DNA
gtttcaccatgttggccagg

SEQ ID NO: 141660 - DNA, 20 bp, synthetic construct
  source 1..20: mol_type = other DNA
ggtttcaccatgttggccag

SEQ ID NO: 141661 - DNA, 20 bp, synthetic construct
  source 1..20: mol_type = other DNA
gggtttcaccatgttggcca

SEQ ID NO: 141662 - DNA, 20 bp, synthetic construct
  source 1..20: mol_type = other DNA
ggggtttcaccatgttggcc

SEQ ID NO: 141663 - DNA, 20 bp, synthetic construct
  source 1..20: mol_type = other DNA
cggggtttcaccatgttggc

SEQ ID NO: 141664 - DNA, 20 bp, synthetic construct
  source 1..20: mol_type = other DNA
acggggtttcaccatgttgg

SEQ ID NO: 141665 - DNA, 20 bp, synthetic construct
  source 1..20: mol_type = other DNA
gacggggtttcaccatgttg

SEQ ID NO: 141666 - DNA, 20 bp, synthetic construct
  source 1..20: mol_type = other DNA
agacggggtttcaccatgtt

SEQ ID NO: 141667 - DNA, 20 bp, synthetic construct
  source 1..20: mol_type = other DNA
gagacggggtttcaccatgt

SEQ ID NO: 141668 - DNA, 20 bp, synthetic construct
  source 1..20: mol_type = other DNA
agagacggggtttcaccatg

SEQ ID NO: 141669 - DNA, 20 bp, synthetic construct
  source 1..20: mol_type = other DNA
tagagacggggtttcaccat

SEQ ID NO: 141670 - DNA, 20 bp, synthetic construct
  source 1..20: mol_type = other DNA
gtagagacggggtttcacca

SEQ ID NO: 141671 - DNA, 20 bp, synthetic construct
  source 1..20: mol_type = other DNA
agtagagacggggtttcacc

SEQ ID NO: 141672 - DNA, 20 bp, synthetic construct
  source 1..20: mol_type = other DNA
tagtagagacggggtttcac

SEQ ID NO: 141673 - DNA, 20 bp, synthetic construct
  source 1..20: mol_type = other DNA
ttagtagagacggggtttca

SEQ ID NO: 141674 - DNA, 20 bp, synthetic construct
  source 1..20: mol_type = other DNA
tttagtagagacggggtttc

SEQ ID NO: 141675 - DNA, 20 bp, synthetic construct
  source 1..20: mol_type = other DNA
ttttagtagagacggggttt

SEQ ID NO: 141676 - DNA, 20 bp, synthetic construct
  source 1..20: mol_type = other DNA
tttttagtagagacggggtt

SEQ ID NO: 141677 - DNA, 20 bp, synthetic construct
  source 1..20: mol_type = other DNA
atttttagtagagacggggt

SEQ ID NO: 141678 - DNA, 20 bp, synthetic construct
  source 1..20: mol_type = other DNA
tatttttagtagagacgggg

SEQ ID NO: 141679 - DNA, 20 bp, synthetic construct
  source 1..20: mol_type = other DNA
gtatttttagtagagacggg

SEQ ID NO: 141680 - DNA, 20 bp, synthetic construct
  source 1..20: mol_type = other DNA
tgtatttttagtagagacgg

SEQ ID NO: 141681 - DNA, 20 bp, synthetic construct
  source 1..20: mol_type = other DNA
ttgtatttttagtagagacg

SEQ ID NO: 141682 - DNA, 20 bp, synthetic construct
  source 1..20: mol_type = other DNA
tttgtatttttagtagagac

SEQ ID NO: 141683 - DNA, 20 bp, synthetic construct
  source 1..20: mol_type = other DNA
ttttgtatttttagtagaga

SEQ ID NO: 141684 - DNA, 20 bp, synthetic construct
  source 1..20: mol_type = other DNA
tttttgtatttttagtagag

SEQ ID NO: 141685 - DNA, 20 bp, synthetic construct
  source 1..20: mol_type = other DNA
atttttgtatttttagtaga

SEQ ID NO: 141686 - DNA, 20 bp, synthetic construct
  source 1..20: mol_type = other DNA
aatttttgtatttttagtag

SEQ ID NO: 141687 - DNA, 20 bp, synthetic construct
  source 1..20: mol_type = other DNA
taatttttgtatttttagta

SEQ ID NO: 141688 - DNA, 20 bp, synthetic construct
  source 1..20: mol_type = other DNA
ctaatttttgtatttttagt

SEQ ID NO: 141689 - DNA, 20 bp, synthetic construct
  source 1..20: mol_type = other DNA
gctaatttttgtatttttag

SEQ ID NO: 141690 - DNA, 20 bp, synthetic construct
  source 1..20: mol_type = other DNA
ggctaatttttgtattttta

SEQ ID NO: 141691 - DNA, 20 bp, synthetic construct
  source 1..20: mol_type = other DNA
tggctaatttttgtattttt

SEQ ID NO: 141692 - DNA, 20 bp, synthetic construct
  source 1..20: mol_type = other DNA
ctggctaatttttgtatttt

SEQ ID NO: 141693 - DNA, 20 bp, synthetic construct
  source 1..20: mol_type = other DNA
cctggctaatttttgtattt

SEQ ID NO: 141694 - DNA, 20 bp, synthetic construct
  source 1..20: mol_type = other DNA
acctggctaatttttgtatt

SEQ ID NO: 141695 - DNA, 20 bp, synthetic construct
  source 1..20: mol_type = other DNA
tacctggctaatttttgtat

SEQ ID NO: 141696 - DNA, 20 bp, synthetic construct
  source 1..20: mol_type = other DNA
ttacctggctaatttttgta

SEQ ID NO: 141697 - DNA, 20 bp, synthetic construct
  source 1..20: mol_type = other DNA
attacctggctaatttttgt

SEQ ID NO: 141698 - DNA, 20 bp, synthetic construct
  source 1..20: mol_type = other DNA
gattacctggctaatttttg

SEQ ID NO: 141699 - DNA, 20 bp, synthetic construct
  source 1..20: mol_type = other DNA
ggattacctggctaattttt

SEQ ID NO: 141700 - DNA, 20 bp, synthetic construct
  source 1..20: mol_type = other DNA
gggattacctggctaatttt

SEQ ID NO: 141701 - DNA, 20 bp, synthetic construct
  source 1..20: mol_type = other DNA
tgggattacctggctaattt

SEQ ID NO: 141702 - DNA, 20 bp, synthetic construct
  source 1..20: mol_type = other DNA
ctgggattacctggctaatt

SEQ ID NO: 141703 - DNA, 20 bp, synthetic construct
  source 1..20: mol_type = other DNA
gctgggattacctggctaat

SEQ ID NO: 141704 - DNA, 20 bp, synthetic construct
  source 1..20: mol_type = other DNA
agctgggattacctggctaa

SEQ ID NO: 141705 - DNA, 20 bp, synthetic construct
  source 1..20: mol_type = other DNA
tagctgggattacctggcta

SEQ ID NO: 141706 - DNA, 20 bp, synthetic construct
  source 1..20: mol_type = other DNA
gtagctgggattacctggct

SEQ ID NO: 141707 - DNA, 20 bp, synthetic construct
  source 1..20: mol_type = other DNA
agtagctgggattacctggc

SEQ ID NO: 141708 - DNA, 20 bp, synthetic construct
  source 1..20: mol_type = other DNA
gagtagctgggattacctgg

SEQ ID NO: 141709 - DNA, 20 bp, synthetic construct
  source 1..20: mol_type = other DNA
tgagtagctgggattacctg

SEQ ID NO: 141710 - DNA, 20 bp, synthetic construct
  source 1..20: mol_type = other DNA
ctgagtagctgggattacct

SEQ ID NO: 141711 - DNA, 20 bp, synthetic construct
  source 1..20: mol_type = other DNA
tctgagtagctgggattacc

SEQ ID NO: 141712 - DNA, 20 bp, synthetic construct
  source 1..20: mol_type = other DNA
ctctgagtagctgggattac

SEQ ID NO: 141713 - DNA, 20 bp, synthetic construct
  source 1..20: mol_type = other DNA
cctctgagtagctgggatta

SEQ ID NO: 141714 - DNA, 20 bp, synthetic construct
  source 1..20: mol_type = other DNA
gcctctgagtagctgggatt

SEQ ID NO: 141715 - DNA, 20 bp, synthetic construct
  source 1..20: mol_type = other DNA
agcctctgagtagctgggat

SEQ ID NO: 141716 - DNA, 20 bp, synthetic construct
  source 1..20: mol_type = other DNA
cagcctctgagtagctggga

SEQ ID NO: 141717 - DNA, 20 bp, synthetic construct
  source 1..20: mol_type = other DNA
tcagcctctgagtagctggg

SEQ ID NO: 141718 - DNA, 20 bp, synthetic construct
  source 1..20: mol_type = other DNA
ttcagcctctgagtagctgg

SEQ ID NO: 141719 - DNA, 20 bp, synthetic construct
  source 1..20: mol_type = other DNA
cttcagcctctgagtagctg

SEQ ID NO: 141720 - DNA, 20 bp, synthetic construct
  source 1..20: mol_type = other DNA
gcttcagcctctgagtagct

SEQ ID NO: 141721 - DNA, 20 bp, synthetic construct
  source 1..20: mol_type = other DNA
tgcttcagcctctgagtagc

SEQ ID NO: 141722 - DNA, 20 bp, synthetic construct
  source 1..20: mol_type = other DNA
ctgcttcagcctctgagtag

SEQ ID NO: 141723 - DNA, 20 bp, synthetic construct
  source 1..20: mol_type = other DNA
cctgcttcagcctctgagta

SEQ ID NO: 141724 - DNA, 20 bp, synthetic construct
  source 1..20: mol_type = other DNA
tcctgcttcagcctctgagt

SEQ ID NO: 141725 - DNA, 20 bp, synthetic construct
  source 1..20: mol_type = other DNA
ctcctgcttcagcctctgag

SEQ ID NO: 141726 - DNA, 20 bp, synthetic construct
  source 1..20: mol_type = other DNA
actcctgcttcagcctctga

SEQ ID NO: 141727 - DNA, 20 bp, synthetic construct
  source 1..20: mol_type = other DNA
tactcctgcttcagcctctg

SEQ ID NO: 141728 - DNA, 20 bp, synthetic construct
  source 1..20: mol_type = other DNA
atactcctgcttcagcctct

SEQ ID NO: 141729 - DNA, 20 bp, synthetic construct
  source 1..20: mol_type = other DNA
gatactcctgcttcagcctc

SEQ ID NO: 141730 - DNA, 20 bp, synthetic construct
  source 1..20: mol_type = other DNA
tgatactcctgcttcagcct

SEQ ID NO: 141731 - DNA, 20 bp, synthetic construct
  source 1..20: mol_type = other DNA
gtgatactcctgcttcagcc

SEQ ID NO: 141732 - DNA, 20 bp, synthetic construct
  source 1..20: mol_type = other DNA
agtgatactcctgcttcagc

SEQ ID NO: 141733 - DNA, 20 bp, synthetic construct
  source 1..20: mol_type = other DNA
aagtgatactcctgcttcag

SEQ ID NO: 141734 - DNA, 20 bp, synthetic construct
  source 1..20: mol_type = other DNA
aaagtgatactcctgcttca

SEQ ID NO: 141735 - DNA, 20 bp, synthetic construct
  source 1..20: mol_type = other DNA
taaagtgatactcctgcttc

SEQ ID NO: 141736 - DNA, 20 bp, synthetic construct
  source 1..20: mol_type = other DNA
ttaaagtgatactcctgctt

SEQ ID NO: 141737 - DNA, 20 bp, synthetic construct
  source 1..20: mol_type = other DNA
gttaaagtgatactcctgct

SEQ ID NO: 141738 - DNA, 20 bp, synthetic construct
  source 1..20: mol_type = other DNA
ggttaaagtgatactcctgc

SEQ ID NO: 141739 - DNA, 20 bp, synthetic construct
  source 1..20: mol_type = other DNA
gggttaaagtgatactcctg

SEQ ID NO: 141740 - DNA, 20 bp, synthetic construct
  source 1..20: mol_type = other DNA
tgggttaaagtgatactcct

SEQ ID NO: 141741 - DNA, 20 bp, synthetic construct
  source 1..20: mol_type = other DNA
ctgggttaaagtgatactcc

SEQ ID NO: 141742 - DNA, 20 bp, synthetic construct
  source 1..20: mol_type = other DNA
cctgggttaaagtgatactc

SEQ ID NO: 141743 - DNA, 20 bp, synthetic construct
  source 1..20: mol_type = other DNA
tcctgggttaaagtgatact

SEQ ID NO: 141744 - DNA, 20 bp, synthetic construct
  source 1..20: mol_type = other DNA
ctcctgggttaaagtgatac

SEQ ID NO: 141745 - DNA, 20 bp, synthetic construct
  source 1..20: mol_type = other DNA
cctcctgggttaaagtgata

SEQ ID NO: 141746 - DNA, 20 bp, synthetic construct
  source 1..20: mol_type = other DNA
gcctcctgggttaaagtgat

SEQ ID NO: 141747 - DNA, 20 bp, synthetic construct
  source 1..20: mol_type = other DNA
cgcctcctgggttaaagtga

SEQ ID NO: 141748 - DNA, 20 bp, synthetic construct
  source 1..20: mol_type = other DNA
ccgcctcctgggttaaagtg

SEQ ID NO: 141749 - DNA, 20 bp, synthetic construct
  source 1..20: mol_type = other DNA
tccgcctcctgggttaaagt

SEQ ID NO: 141750 - DNA, 20 bp, synthetic construct
  source 1..20: mol_type = other DNA
ctccgcctcctgggttaaag

SEQ ID NO: 141751 - DNA, 20 bp, synthetic construct
  source 1..20: mol_type = other DNA
cctccgcctcctgggttaaa

SEQ ID NO: 141752 - DNA, 20 bp, synthetic construct
  source 1..20: mol_type = other DNA
gcctccgcctcctgggttaa

SEQ ID NO: 141753 - DNA, 20 bp, synthetic construct
  source 1..20: mol_type = other DNA
agcctccgcctcctgggtta

SEQ ID NO: 141754 - DNA, 20 bp, synthetic construct
  source 1..20: mol_type = other DNA
cagcctccgcctcctgggtt

SEQ ID NO: 141755 - DNA, 20 bp, synthetic construct
  source 1..20: mol_type = other DNA
gcagcctccgcctcctgggt

SEQ ID NO: 141756 - DNA, 20 bp, synthetic construct
  source 1..20: mol_type = other DNA
tgcagcctccgcctcctggg

SEQ ID NO: 141757 - DNA, 20 bp, synthetic construct
  source 1..20: mol_type = other DNA
ctgcagcctccgcctcctgg

SEQ ID NO: 141758 - DNA, 20 bp, synthetic construct
  source 1..20: mol_type = other DNA
actgcagcctccgcctcctg

SEQ ID NO: 141759 - DNA, 20 bp, synthetic construct
  source 1..20: mol_type = other DNA
cactgcagcctccgcctcct

SEQ ID NO: 141760 - DNA, 20 bp, synthetic construct
  source 1..20: mol_type = other DNA
tcactgcagcctccgcctcc

SEQ ID NO: 141761 - DNA, 20 bp, synthetic construct
  source 1..20: mol_type = other DNA
ctcactgcagcctccgcctc

SEQ ID NO: 141762 - DNA, 20 bp, synthetic construct
  source 1..20: mol_type = other DNA
gctcactgcagcctccgcct

SEQ ID NO: 141763 - DNA, 20 bp, synthetic construct
  source 1..20: mol_type = other DNA
ggctcactgcagcctccgcc

SEQ ID NO: 141764 - DNA, 20 bp, synthetic construct
  source 1..20: mol_type = other DNA
cggctcactgcagcctccgc

SEQ ID NO: 141765 - DNA, 20 bp, synthetic construct
  source 1..20: mol_type = other DNA
tcggctcactgcagcctccg

SEQ ID NO: 141766 - DNA, 20 bp, synthetic construct
  source 1..20: mol_type = other DNA
ctcggctcactgcagcctcc

SEQ ID NO: 141767 - DNA, 20 bp, synthetic construct
  source 1..20: mol_type = other DNA
tctcggctcactgcagcctc

SEQ ID NO: 141768 - DNA, 20 bp, synthetic construct
  source 1..20: mol_type = other DNA
atctcggctcactgcagcct

SEQ ID NO: 141769 - DNA, 20 bp, synthetic construct
  source 1..20: mol_type = other DNA
gatctcggctcactgcagcc

SEQ ID NO: 141770 - DNA, 20 bp, synthetic construct
  source 1..20: mol_type = other DNA
cgatctcggctcactgcagc

SEQ ID NO: 141771 - DNA, 20 bp, synthetic construct
  source 1..20: mol_type = other DNA
gcgatctcggctcactgcag

SEQ ID NO: 141772 - DNA, 20 bp, synthetic construct
  source 1..20: mol_type = other DNA
agcgatctcggctcactgca

SEQ ID NO: 141773 - DNA, 20 bp, synthetic construct
  source 1..20: mol_type = other DNA
gagcgatctcggctcactgc

SEQ ID NO: 141774 - DNA, 20 bp, synthetic construct
  source 1..20: mol_type = other DNA
ggagcgatctcggctcactg

SEQ ID NO: 141775 - DNA, 20 bp, synthetic construct
  source 1..20: mol_type = other DNA
tggagcgatctcggctcact

SEQ ID NO: 141776 - DNA, 20 bp, synthetic construct
  source 1..20: mol_type = other DNA
gtggagcgatctcggctcac

SEQ ID NO: 141777 - DNA, 20 bp, synthetic construct
  source 1..20: mol_type = other DNA
agtggagcgatctcggctca

SEQ ID NO: 141778 - DNA, 20 bp, synthetic construct
  source 1..20: mol_type = other DNA
cagtggagcgatctcggctc

SEQ ID NO: 141779 - DNA, 20 bp, synthetic construct
  source 1..20: mol_type = other DNA
gcagtggagcgatctcggct

SEQ ID NO: 141780 - DNA, 20 bp, synthetic construct
  source 1..20: mol_type = other DNA
tgcagtggagcgatctcggc

SEQ ID NO: 141781 - DNA, 20 bp, synthetic construct
  source 1..20: mol_type = other DNA
gtgcagtggagcgatctcgg

SEQ ID NO: 141782 - DNA, 20 bp, synthetic construct
  source 1..20: mol_type = other DNA
agtgcagtggagcgatctcg

SEQ ID NO: 141783 - DNA, 20 bp, synthetic construct
  source 1..20: mol_type = other DNA
gagtgcagtggagcgatctc

SEQ ID NO: 141784 - DNA, 20 bp, synthetic construct
  source 1..20: mol_type = other DNA
ggagtgcagtggagcgatct

SEQ ID NO: 141785 - DNA, 20 bp, synthetic construct
  source 1..20: mol_type = other DNA
tggagtgcagtggagcgatc

SEQ ID NO: 141786 - DNA, 20 bp, synthetic construct
  source 1..20: mol_type = other DNA
ctggagtgcagtggagcgat

SEQ ID NO: 141787 - DNA, 20 bp, synthetic construct
  source 1..20: mol_type = other DNA
gctggagtgcagtggagcga

SEQ ID NO: 141788 - DNA, 20 bp, synthetic construct
  source 1..20: mol_type = other DNA
ggctggagtgcagtggagcg

SEQ ID NO: 141789 - DNA, 20 bp, synthetic construct
  source 1..20: mol_type = other DNA
aggctggagtgcagtggagc

SEQ ID NO: 141790 - DNA, 20 bp, synthetic construct
  source 1..20: mol_type = other DNA
caggctggagtgcagtggag

SEQ ID NO: 141791 - DNA, 20 bp, synthetic construct
  source 1..20: mol_type = other DNA
ccaggctggagtgcagtgga

SEQ ID NO: 141792 - DNA, 20 bp, synthetic construct
  source 1..20: mol_type = other DNA
cccaggctggagtgcagtgg

SEQ ID NO: 141793 - DNA, 20 bp, synthetic construct
  source 1..20: mol_type = other DNA
acccaggctggagtgcagtg

SEQ ID NO: 141794 - DNA, 20 bp, synthetic construct
  source 1..20: mol_type = other DNA
cacccaggctggagtgcagt

SEQ ID NO: 141795 - DNA, 20 bp, synthetic construct
  source 1..20: mol_type = other DNA
tcacccaggctggagtgcag

SEQ ID NO: 141796 - DNA, 20 bp, synthetic construct
  source 1..20: mol_type = other DNA
gtcacccaggctggagtgca

SEQ ID NO: 141797 - DNA, 20 bp, synthetic construct
  source 1..20: mol_type = other DNA
tgtcacccaggctggagtgc

SEQ ID NO: 141798 - DNA, 20 bp, synthetic construct
  source 1..20: mol_type = other DNA
ctgtcacccaggctggagtg

SEQ ID NO: 141799 - DNA, 20 bp, synthetic construct
  source 1..20: mol_type = other DNA
gctgtcacccaggctggagt

SEQ ID NO: 141800 - DNA, 20 bp, synthetic construct
  source 1..20: mol_type = other DNA
tgctgtcacccaggctggag

SEQ ID NO: 141801 - DNA, 20 bp, synthetic construct
  source 1..20: mol_type = other DNA
ttgctgtcacccaggctgga

SEQ ID NO: 141802 - DNA, 20 bp, synthetic construct
  source 1..20: mol_type = other DNA
cttgctgtcacccaggctgg

SEQ ID NO: 141803 - DNA, 20 bp, synthetic construct
  source 1..20: mol_type = other DNA
tcttgctgtcacccaggctg

SEQ ID NO: 141804 - DNA, 20 bp, synthetic construct
  source 1..20: mol_type = other DNA
gtcttgctgtcacccaggct

SEQ ID NO: 141805 - DNA, 20 bp, synthetic construct
  source 1..20: mol_type = other DNA
agtcttgctgtcacccaggc

SEQ ID NO: 141806 - DNA, 20 bp, synthetic construct
  source 1..20: mol_type = other DNA
cagtcttgctgtcacccagg

SEQ ID NO: 141807 - DNA, 20 bp, synthetic construct
  source 1..20: mol_type = other DNA
ccagtcttgctgtcacccag

SEQ ID NO: 141808 - DNA, 20 bp, synthetic construct
  source 1..20: mol_type = other DNA
cccagtcttgctgtcaccca

SEQ ID NO: 141809 - DNA, 20 bp, synthetic construct
  source 1..20: mol_type = other DNA
acccagtcttgctgtcaccc

SEQ ID NO: 141810 - DNA, 20 bp, synthetic construct
  source 1..20: mol_type = other DNA
gacccagtcttgctgtcacc

SEQ ID NO: 141811 - DNA, 20 bp, synthetic construct
  source 1..20: mol_type = other DNA
agacccagtcttgctgtcac

SEQ ID NO: 141812 - DNA, 20 bp, synthetic construct
  source 1..20: mol_type = other DNA
gagacccagtcttgctgtca

SEQ ID NO: 141813 - DNA, 20 bp, synthetic construct
  source 1..20: mol_type = other DNA
tgagacccagtcttgctgtc

SEQ ID NO: 141814 - DNA, 20 bp, synthetic construct
  source 1..20: mol_type = other DNA
ttgagacccagtcttgctgt

SEQ ID NO: 141815 - DNA, 20 bp, synthetic construct
  source 1..20: mol_type = other DNA
tttgagacccagtcttgctg

SEQ ID NO: 141816 - DNA, 20 bp, synthetic construct
  source 1..20: mol_type = other DNA
ttttgagacccagtcttgct

SEQ ID NO: 141817 - DNA, 20 bp, synthetic construct
  source 1..20: mol_type = other DNA
tttttgagacccagtcttgc

SEQ ID NO: 141818 - DNA, 20 bp, synthetic construct
  source 1..20: mol_type = other DNA
atttttgagacccagtcttg

SEQ ID NO: 141819 - DNA, 20 bp, synthetic construct
  source 1..20: mol_type = other DNA
tatttttgagacccagtctt

SEQ ID NO: 141820 - DNA, 20 bp, synthetic construct
  source 1..20: mol_type = other DNA
ttatttttgagacccagtct

SEQ ID NO: 141821 - DNA, 20 bp, synthetic construct
  source 1..20: mol_type = other DNA
tttatttttgagacccagtc

SEQ ID NO: 141822 - DNA, 20 bp, synthetic construct
  source 1..20: mol_type = other DNA
gtttatttttgagacccagt

SEQ ID NO: 141823 - DNA, 20 bp, synthetic construct
  source 1..20: mol_type = other DNA
tgtttatttttgagacccag

SEQ ID NO: 141824 - DNA, 20 bp, synthetic construct
  source 1..20: mol_type = other DNA
ttgtttatttttgagaccca

SEQ ID NO: 141825 - DNA, 20 bp, synthetic construct
  source 1..20: mol_type = other DNA
tttgtttatttttgagaccc

SEQ ID NO: 141826 - DNA, 20 bp, synthetic construct
  source 1..20: mol_type = other DNA
gtttgtttatttttgagacc

SEQ ID NO: 141827 - DNA, 20 bp, synthetic construct
  source 1..20: mol_type = other DNA
tgtttgtttatttttgagac

SEQ ID NO: 141828 - DNA, 20 bp, synthetic construct
  source 1..20: mol_type = other DNA
atgtttgtttatttttgaga

SEQ ID NO: 141829 - DNA, 20 bp, synthetic construct
  source 1..20: mol_type = other DNA
catgtttgtttatttttgag

SEQ ID NO: 141830 - DNA, 20 bp, synthetic construct
  source 1..20: mol_type = other DNA
ccatgtttgtttatttttga

SEQ ID NO: 141831 - DNA, 20 bp, synthetic construct
  source 1..20: mol_type = other DNA
gccatgtttgtttatttttg

SEQ ID NO: 141832 - DNA, 20 bp, synthetic construct
  source 1..20: mol_type = other DNA
ggccatgtttgtttattttt

SEQ ID NO: 141833 - DNA, 20 bp, synthetic construct
  source 1..20: mol_type = other DNA
cggccatgtttgtttatttt

SEQ ID NO: 141834 - DNA, 20 bp, synthetic construct
  source 1..20: mol_type = other DNA
ccggccatgtttgtttattt

SEQ ID NO: 141835 - DNA, 20 bp, synthetic construct
  source 1..20: mol_type = other DNA
cccggccatgtttgtttatt

SEQ ID NO: 141836 - DNA, 20 bp, synthetic construct
  source 1..20: mol_type = other DNA
gcccggccatgtttgtttat

SEQ ID NO: 141837 - DNA, 20 bp, synthetic construct
  source 1..20: mol_type = other DNA
cgcccggccatgtttgttta

SEQ ID NO: 141838 - DNA, 20 bp, synthetic construct
  source 1..20: mol_type = other DNA
gcgcccggccatgtttgttt

SEQ ID NO: 141839 - DNA, 20 bp, synthetic construct
  source 1..20: mol_type = other DNA
tgcgcccggccatgtttgtt

SEQ ID NO: 141840 - DNA, 20 bp, synthetic construct
  source 1..20: mol_type = other DNA
ctgcgcccggccatgtttgt

SEQ ID NO: 141841 - DNA, 20 bp, synthetic construct
  source 1..20: mol_type = other DNA
actgcgcccggccatgtttg

SEQ ID NO: 141842 - DNA, 20 bp, synthetic construct
  source 1..20: mol_type = other DNA
cactgcgcccggccatgttt

SEQ ID NO: 141843 - DNA, 20 bp, synthetic construct
  source 1..20: mol_type = other DNA
ccactgcgcccggccatgtt

SEQ ID NO: 141844 - DNA, 20 bp, synthetic construct
  source 1..20: mol_type = other DNA
gccactgcgcccggccatgt

SEQ ID NO: 141845 - DNA, 20 bp, synthetic construct
  source 1..20: mol_type = other DNA
agccactgcgcccggccatg

SEQ ID NO: 141846 - DNA, 20 bp, synthetic construct
  source 1..20: mol_type = other DNA
gagccactgcgcccggccat

SEQ ID NO: 141847 - DNA, 20 bp, synthetic construct
  source 1..20: mol_type = other DNA
tgagccactgcgcccggcca

SEQ ID NO: 141848 - DNA, 20 bp, synthetic construct
  source 1..20: mol_type = other DNA
atgagccactgcgcccggcc

SEQ ID NO: 141849 - DNA, 20 bp, synthetic construct
  source 1..20: mol_type = other DNA
catgagccactgcgcccggc

SEQ ID NO: 141850 - DNA, 20 bp, synthetic construct
  source 1..20: mol_type = other DNA
gcatgagccactgcgcccgg

SEQ ID NO: 141851 - DNA, 20 bp, synthetic construct
  source 1..20: mol_type = other DNA
ggcatgagccactgcgcccg

SEQ ID NO: 141852 - DNA, 20 bp, synthetic construct
  source 1..20: mol_type = other DNA
aggcatgagccactgcgccc

SEQ ID NO: 141853 - DNA, 20 bp, synthetic construct
  source 1..20: mol_type = other DNA
caggcatgagccactgcgcc

SEQ ID NO: 141854 - DNA, 20 bp, synthetic construct
  source 1..20: mol_type = other DNA
acaggcatgagccactgcgc

SEQ ID NO: 141855 - DNA, 20 bp, synthetic construct
  source 1..20: mol_type = other DNA
tacaggcatgagccactgcg

SEQ ID NO: 141856 - DNA, 20 bp, synthetic construct
  source 1..20: mol_type = other DNA
ttacaggcatgagccactgc

SEQ ID NO: 141857 - DNA, 20 bp, synthetic construct
  source 1..20: mol_type = other DNA
attacaggcatgagccactg

SEQ ID NO: 141858 - DNA, 20 bp, synthetic construct
  source 1..20: mol_type = other DNA
gattacaggcatgagccact

SEQ ID NO: 141859 - DNA, 20 bp, synthetic construct
  source 1..20: mol_type = other DNA
ggattacaggcatgagccac

SEQ ID NO: 141860 - DNA, 20 bp, synthetic construct
  source 1..20: mol_type = other DNA
gggattacaggcatgagcca

SEQ ID NO: 141861 - DNA, 20 bp, synthetic construct
  source 1..20: mol_type = other DNA
tgggattacaggcatgagcc

SEQ ID NO: 141862 - DNA, 20 bp, synthetic construct
  source 1..20: mol_type = other DNA
ctgggattacaggcatgagc

SEQ ID NO: 141863 - DNA, 20 bp, synthetic construct
  source 1..20: mol_type = other DNA
gctgggattacaggcatgag

SEQ ID NO: 141864 - DNA, 20 bp, synthetic construct
  source 1..20: mol_type = other DNA
tgctgggattacaggcatga

SEQ ID NO: 141865 - DNA, 20 bp, synthetic construct
  source 1..20: mol_type = other DNA
gtgctgggattacaggcatg

SEQ ID NO: 141866 - DNA, 20 bp, synthetic construct
  source 1..20: mol_type = other DNA
agtgctgggattacaggcat

SEQ ID NO: 141867 - DNA, 20 bp, synthetic construct
  source 1..20: mol_type = other DNA
aagtgctgggattacaggca

SEQ ID NO: 141868 - DNA, 20 bp, synthetic construct
  source 1..20: mol_type = other DNA
aaagtgctgggattacaggc

SEQ ID NO: 141869 - DNA, 20 bp, synthetic construct
  source 1..20: mol_type = other DNA
caaagtgctgggattacagg

SEQ ID NO: 141870 - DNA, 20 bp, synthetic construct
  source 1..20: mol_type = other DNA
ccaaagtgctgggattacag

SEQ ID NO: 141871 - DNA, 20 bp, synthetic construct
  source 1..20: mol_type = other DNA
cccaaagtgctgggattaca

SEQ ID NO: 141872 - DNA, 20 bp, synthetic construct
  source 1..20: mol_type = other DNA
tcccaaagtgctgggattac

SEQ ID NO: 141873 - DNA, 20 bp, synthetic construct
  source 1..20: mol_type = other DNA
ctcccaaagtgctgggatta

SEQ ID NO: 141874 - DNA, 20 bp, synthetic construct
  source 1..20: mol_type = other DNA
cctcccaaagtgctgggatt

SEQ ID NO: 141875 - DNA, 20 bp, synthetic construct
  source 1..20: mol_type = other DNA
gcctcccaaagtgctgggat

SEQ ID NO: 141876 - DNA, 20 bp, synthetic construct
  source 1..20: mol_type = other DNA
ggcctcccaaagtgctggga

SEQ ID NO: 141877 - DNA, 20 bp, synthetic construct
  source 1..20: mol_type = other DNA
cggcctcccaaagtgctggg

SEQ ID NO: 141878 - DNA, 20 bp, synthetic construct
  source 1..20: mol_type = other DNA
tcggcctcccaaagtgctgg

SEQ ID NO: 141879 - DNA, 20 bp, synthetic construct
  source 1..20: mol_type = other DNA
ctcggcctcccaaagtgctg

SEQ ID NO: 141880 - DNA, 20 bp, synthetic construct
  source 1..20: mol_type = other DNA
cctcggcctcccaaagtgct

SEQ ID NO: 141881 - DNA, 20 bp, synthetic construct
  source 1..20: mol_type = other DNA
gcctcggcctcccaaagtgc

SEQ ID NO: 141882 - DNA, 20 bp, synthetic construct
  source 1..20: mol_type = other DNA
cgcctcggcctcccaaagtg

SEQ ID NO: 141883 - DNA, 20 bp, synthetic construct
  source 1..20: mol_type = other DNA
ccgcctcggcctcccaaagt

SEQ ID NO: 141884 - DNA, 20 bp, synthetic construct
  source 1..20: mol_type = other DNA
tccgcctcggcctcccaaag

SEQ ID NO: 141885 - DNA, 20 bp, synthetic construct
  source 1..20: mol_type = other DNA
atccgcctcggcctcccaaa

SEQ ID NO: 141886 - DNA, 20 bp, synthetic construct
  source 1..20: mol_type = other DNA
catccgcctcggcctcccaa

SEQ ID NO: 141887 - DNA, 20 bp, synthetic construct
  source 1..20: mol_type = other DNA
ccatccgcctcggcctccca

SEQ ID NO: 141888 - DNA, 20 bp, synthetic construct
  source 1..20: mol_type = other DNA
tccatccgcctcggcctccc

SEQ ID NO: 141889 - DNA, 20 bp, synthetic construct
  source 1..20: mol_type = other DNA
atccatccgcctcggcctcc

SEQ ID NO: 141890 - DNA, 20 bp, synthetic construct
  source 1..20: mol_type = other DNA
gatccatccgcctcggcctc

SEQ ID NO: 141891 - DNA, 20 bp, synthetic construct
  source 1..20: mol_type = other DNA
tgatccatccgcctcggcct

SEQ ID NO: 141892 - DNA, 20 bp, synthetic construct
  source 1..20: mol_type = other DNA
gtgatccatccgcctcggcc

SEQ ID NO: 141893 - DNA, 20 bp, synthetic construct
  source 1..20: mol_type = other DNA
agtgatccatccgcctcggc

SEQ ID NO: 141894 - DNA, 20 bp, synthetic construct
  source 1..20: mol_type = other DNA
aagtgatccatccgcctcgg

SEQ ID NO: 141895 - DNA, 20 bp, synthetic construct
  source 1..20: mol_type = other DNA
caagtgatccatccgcctcg

SEQ ID NO: 141896 - DNA, 20 bp, synthetic construct
  source 1..20: mol_type = other DNA
tcaagtgatccatccgcctc

SEQ ID NO: 141897 - DNA, 20 bp, synthetic construct
  source 1..20: mol_type = other DNA
ctcaagtgatccatccgcct

SEQ ID NO: 141898 - DNA, 20 bp, synthetic construct
  source 1..20: mol_type = other DNA
cctcaagtgatccatccgcc

SEQ ID NO: 141899 - DNA, 20 bp, synthetic construct
  source 1..20: mol_type = other DNA
gcctcaagtgatccatccgc

SEQ ID NO: 141900 - DNA, 20 bp, synthetic construct
  source 1..20: mol_type = other DNA
ggcctcaagtgatccatccg

SEQ ID NO: 141901 - DNA, 20 bp, synthetic construct
  source 1..20: mol_type = other DNA
tggcctcaagtgatccatcc

SEQ ID NO: 141902 - DNA, 20 bp, synthetic construct
  source 1..20: mol_type = other DNA
ctggcctcaagtgatccatc

SEQ ID NO: 141903 - DNA, 20 bp, synthetic construct
  source 1..20: mol_type = other DNA
actggcctcaagtgatccat

SEQ ID NO: 141904 - DNA, 20 bp, synthetic construct
  source 1..20: mol_type = other DNA
tactggcctcaagtgatcca

SEQ ID NO: 141905 - DNA, 20 bp, synthetic construct
  source 1..20: mol_type = other DNA
ctactggcctcaagtgatcc

SEQ ID NO: 141906 - DNA, 20 bp, synthetic construct
  source 1..20: mol_type = other DNA
actactggcctcaagtgatc

SEQ ID NO: 141907 - DNA, 20 bp, synthetic construct
  source 1..20: mol_type = other DNA
aactactggcctcaagtgat

SEQ ID NO: 141908 - DNA, 20 bp, synthetic construct
  source 1..20: mol_type = other DNA
gaactactggcctcaagtga

SEQ ID NO: 141909 - DNA, 20 bp, synthetic construct
  source 1..20: mol_type = other DNA
cgaactactggcctcaagtg

SEQ ID NO: 141910 - DNA, 20 bp, synthetic construct
  source 1..20: mol_type = other DNA
tcgaactactggcctcaagt

SEQ ID NO: 141911 - DNA, 20 bp, synthetic construct
  source 1..20: mol_type = other DNA
ctcgaactactggcctcaag

SEQ ID NO: 141912 - DNA, 20 bp, synthetic construct
  source 1..20: mol_type = other DNA
tctcgaactactggcctcaa

SEQ ID NO: 141913 - DNA, 20 bp, synthetic construct
  source 1..20: mol_type = other DNA
gtctcgaactactggcctca

SEQ ID NO: 141914 - DNA, 20 bp, synthetic construct
  source 1..20: mol_type = other DNA
ggtctcgaactactggcctc

SEQ ID NO: 141915 - DNA, 20 bp, synthetic construct
  source 1..20: mol_type = other DNA
tggtctcgaactactggcct

SEQ ID NO: 141916 - DNA, 20 bp, synthetic construct
  source 1..20: mol_type = other DNA
ctggtctcgaactactggcc

SEQ ID NO: 141917 - DNA, 20 bp, synthetic construct
  source 1..20: mol_type = other DNA
gctggtctcgaactactggc

SEQ ID NO: 141918 - DNA, 20 bp, synthetic construct
  source 1..20: mol_type = other DNA
ggctggtctcgaactactgg

SEQ ID NO: 141919 - DNA, 20 bp, synthetic construct
  source 1..20: mol_type = other DNA
aggctggtctcgaactactg

SEQ ID NO: 141920 - DNA, 20 bp, synthetic construct
  source 1..20: mol_type = other DNA
caggctggtctcgaactact

SEQ ID NO: 141921 - DNA, 20 bp, synthetic construct
  source 1..20: mol_type = other DNA
ccaggctggtctcgaactac

SEQ ID NO: 141922 - DNA, 20 bp, synthetic construct
  source 1..20: mol_type = other DNA
gccaggctggtctcgaacta

SEQ ID NO: 141923 - DNA, 20 bp, synthetic construct
  source 1..20: mol_type = other DNA
ggccaggctggtctcgaact

SEQ ID NO: 141924 - DNA, 20 bp, synthetic construct
  source 1..20: mol_type = other DNA
tggccaggctggtctcgaac

SEQ ID NO: 141925 - DNA, 20 bp, synthetic construct
  source 1..20: mol_type = other DNA
ttggccaggctggtctcgaa

SEQ ID NO: 141926 - DNA, 20 bp, synthetic construct
  source 1..20: mol_type = other DNA
gttggccaggctggtctcga

SEQ ID NO: 141927 - DNA, 20 bp, synthetic construct
  source 1..20: mol_type = other DNA
tgttggccaggctggtctcg

SEQ ID NO: 141928 - DNA, 20 bp, synthetic construct
  source 1..20: mol_type = other DNA
atgttggccaggctggtctc

SEQ ID NO: 141929 - DNA, 20 bp, synthetic construct
  source 1..20: mol_type = other DNA
catgttggccaggctggtct

SEQ ID NO: 141930 - DNA, 20 bp, synthetic construct
  source 1..20: mol_type = other DNA
ccatgttggccaggctggtc

SEQ ID NO: 141931 - DNA, 20 bp, synthetic construct
  source 1..20: mol_type = other DNA
accatgttggccaggctggt

SEQ ID NO: 141932 - DNA, 20 bp, synthetic construct
  source 1..20: mol_type = other DNA
caccatgttggccaggctgg

SEQ ID NO: 141933 - DNA, 20 bp, synthetic construct
  source 1..20: mol_type = other DNA
tcaccatgttggccaggctg

SEQ ID NO: 141934 - DNA, 20 bp, synthetic construct
  source 1..20: mol_type = other DNA
ttcaccatgttggccaggct

SEQ ID NO: 141935 - DNA, 20 bp, synthetic construct
  source 1..20: mol_type = other DNA
tttcaccatgttggccaggc

SEQ ID NO: 141936 - DNA, 20 bp, synthetic construct
  source 1..20: mol_type = other DNA
gtttcaccatgttggccagg

SEQ ID NO: 141937 - DNA, 20 bp, synthetic construct
  source 1..20: mol_type = other DNA
ggtttcaccatgttggccag

SEQ ID NO: 141938 - DNA, 20 bp, synthetic construct
  source 1..20: mol_type = other DNA
gggtttcaccatgttggcca

SEQ ID NO: 141939 - DNA, 20 bp, synthetic construct
  source 1..20: mol_type = other DNA
cgggtttcaccatgttggcc

SEQ ID NO: 141940 - DNA, 20 bp, synthetic construct
  source 1..20: mol_type = other DNA
acgggtttcaccatgttggc

SEQ ID NO: 141941 - DNA, 20 bp, synthetic construct
  source 1..20: mol_type = other DNA
gacgggtttcaccatgttgg

SEQ ID NO: 141942 - DNA, 20 bp, synthetic construct
  source 1..20: mol_type = other DNA
agacgggtttcaccatgttg

SEQ ID NO: 141943 - DNA, 20 bp, synthetic construct
  source 1..20: mol_type = other DNA
gagacgggtttcaccatgtt

SEQ ID NO: 141944 - DNA, 20 bp, synthetic construct
  source 1..20: mol_type = other DNA
agagacgggtttcaccatgt

SEQ ID NO: 141945 - DNA, 20 bp, synthetic construct
  source 1..20: mol_type = other DNA
tagagacgggtttcaccatg

SEQ ID NO: 141946 - DNA, 20 bp, synthetic construct
  source 1..20: mol_type = other DNA
gtagagacgggtttcaccat

SEQ ID NO: 141947 - DNA, 20 bp, synthetic construct
  source 1..20: mol_type = other DNA
agtagagacgggtttcacca

SEQ ID NO: 141948 - DNA, 20 bp, synthetic construct
  source 1..20: mol_type = other DNA
tagtagagacgggtttcacc

SEQ ID NO: 141949 - DNA, 20 bp, synthetic construct
  source 1..20: mol_type = other DNA
ttagtagagacgggtttcac

SEQ ID NO: 141950 - DNA, 20 bp, synthetic construct
  source 1..20: mol_type = other DNA
tttagtagagacgggtttca

SEQ ID NO: 141951 - DNA, 20 bp, synthetic construct
  source 1..20: mol_type = other DNA
ttttagtagagacgggtttc

SEQ ID NO: 141952 - DNA, 20 bp, synthetic construct
  source 1..20: mol_type = other DNA
tttttagtagagacgggttt

SEQ ID NO: 141953 - DNA, 20 bp, synthetic construct
  source 1..20: mol_type = other DNA
atttttagtagagacgggtt

SEQ ID NO: 141954 - DNA, 20 bp, synthetic construct
  source 1..20: mol_type = other DNA
tatttttagtagagacgggt

SEQ ID NO: 141955 - DNA, 20 bp, synthetic construct
  source 1..20: mol_type = other DNA
gtatttttagtagagacggg

SEQ ID NO: 141956 - DNA, 20 bp, synthetic construct
  source 1..20: mol_type = other DNA
tgtatttttagtagagacgg

SEQ ID NO: 141957 - DNA, 20 bp, synthetic construct
  source 1..20: mol_type = other DNA
ttgtatttttagtagagacg

SEQ ID NO: 141958 - DNA, 20 bp, synthetic construct
  source 1..20: mol_type = other DNA
tttgtatttttagtagagac

SEQ ID NO: 141959 - DNA, 20 bp, synthetic construct
  source 1..20: mol_type = other DNA
ttttgtatttttagtagaga

SEQ ID NO: 141960 - DNA, 20 bp, synthetic construct
  source 1..20: mol_type = other DNA
tttttgtatttttagtagag

SEQ ID NO: 141961 - DNA, 20 bp, synthetic construct
  source 1..20: mol_type = other DNA
atttttgtatttttagtaga

SEQ ID NO: 141962 - DNA, 20 bp, synthetic construct
  source 1..20: mol_type = other DNA
gatttttgtatttttagtag

SEQ ID NO: 141963 - DNA, 20 bp, synthetic construct
  source 1..20: mol_type = other DNA
tgatttttgtatttttagta

SEQ ID NO: 141964 - DNA, 20 bp, synthetic construct
  source 1..20: mol_type = other DNA
ctgatttttgtatttttagt

SEQ ID NO: 141965 - DNA, 20 bp, synthetic construct
  source 1..20: mol_type = other DNA
gctgatttttgtatttttag

SEQ ID NO: 141966 - DNA, 20 bp, synthetic construct
  source 1..20: mol_type = other DNA
ggctgatttttgtattttta

SEQ ID NO: 141967 - DNA, 20 bp, synthetic construct
  source 1..20: mol_type = other DNA
tggctgatttttgtattttt

SEQ ID NO: 141968 - DNA, 20 bp, synthetic construct
  source 1..20: mol_type = other DNA
ctggctgatttttgtatttt

SEQ ID NO: 141969 - DNA, 20 bp, synthetic construct
  source 1..20: mol_type = other DNA
cctggctgatttttgtattt

SEQ ID NO: 141970 - DNA, 20 bp, synthetic construct
  source 1..20: mol_type = other DNA
gcctggctgatttttgtatt

SEQ ID NO: 141971 - DNA, 20 bp, synthetic construct
  source 1..20: mol_type = other DNA
tgcctggctgatttttgtat

SEQ ID NO: 141972 - DNA, 20 bp, synthetic construct
  source 1..20: mol_type = other DNA
atgcctggctgatttttgta

SEQ ID NO: 141973 - DNA, 20 bp, synthetic construct
  source 1..20: mol_type = other DNA
catgcctggctgatttttgt

SEQ ID NO: 141974 - DNA, 20 bp, synthetic construct
  source 1..20: mol_type = other DNA
ccatgcctggctgatttttg

SEQ ID NO: 141975 - DNA, 20 bp, synthetic construct
  source 1..20: mol_type = other DNA
accatgcctggctgattttt

SEQ ID NO: 141976 - DNA, 20 bp, synthetic construct
  source 1..20: mol_type = other DNA
caccatgcctggctgatttt

SEQ ID NO: 141977 - DNA, 20 bp, synthetic construct
  source 1..20: mol_type = other DNA
tcaccatgcctggctgattt

SEQ ID NO: 141978 - DNA, 20 bp, synthetic construct
  source 1..20: mol_type = other DNA
atcaccatgcctggctgatt

SEQ ID NO: 141979 - DNA, 20 bp, synthetic construct
  source 1..20: mol_type = other DNA
catcaccatgcctggctgat

SEQ ID NO: 141980 - DNA, 20 bp, synthetic construct
  source 1..20: mol_type = other DNA
gcatcaccatgcctggctga

SEQ ID NO: 141981 - DNA, 20 bp, synthetic construct
  source 1..20: mol_type = other DNA
agcatcaccatgcctggctg

SEQ ID NO: 141982 - DNA, 20 bp, synthetic construct
  source 1..20: mol_type = other DNA
aagcatcaccatgcctggct

SEQ ID NO: 141983 - DNA, 20 bp, synthetic construct
  source 1..20: mol_type = other DNA
caagcatcaccatgcctggc

SEQ ID NO: 141984 - DNA, 20 bp, synthetic construct
  source 1..20: mol_type = other DNA
gcaagcatcaccatgcctgg

SEQ ID NO: 141985 - DNA, 20 bp, synthetic construct
  source 1..20: mol_type = other DNA
ggcaagcatcaccatgcctg

SEQ ID NO: 141986 - DNA, 20 bp, synthetic construct
  source 1..20: mol_type = other DNA
aggcaagcatcaccatgcct

SEQ ID NO: 141987 - DNA, 20 bp, synthetic construct
  source 1..20: mol_type = other DNA
taggcaagcatcaccatgcc

SEQ ID NO: 141988 - DNA, 20 bp, synthetic construct
  source 1..20: mol_type = other DNA
ataggcaagcatcaccatgc

SEQ ID NO: 141989 - DNA, 20 bp, synthetic construct
  source 1..20: mol_type = other DNA
tataggcaagcatcaccatg

SEQ ID NO: 141990 - DNA, 20 bp, synthetic construct
  source 1..20: mol_type = other DNA
ctataggcaagcatcaccat

SEQ ID NO: 141991 - DNA, 20 bp, synthetic construct
  source 1..20: mol_type = other DNA
actataggcaagcatcacca

SEQ ID NO: 141992 - DNA, 20 bp, synthetic construct
  source 1..20: mol_type = other DNA
aactataggcaagcatcacc

SEQ ID NO: 141993 - DNA, 20 bp, synthetic construct
  source 1..20: mol_type = other DNA
gaactataggcaagcatcac

SEQ ID NO: 141994 - DNA, 20 bp, synthetic construct
  source 1..20: mol_type = other DNA
ggaactataggcaagcatca

SEQ ID NO: 141995 - DNA, 20 bp, synthetic construct
  source 1..20: mol_type = other DNA
tggaactataggcaagcatc

SEQ ID NO: 141996 - DNA, 20 bp, synthetic construct
  source 1..20: mol_type = other DNA
ctggaactataggcaagcat

SEQ ID NO: 141997 - DNA, 20 bp, synthetic construct
  source 1..20: mol_type = other DNA
gctggaactataggcaagca

SEQ ID NO: 141998 - DNA, 20 bp, synthetic construct
  source 1..20: mol_type = other DNA
agctggaactataggcaagc

SEQ ID NO: 141999 - DNA, 20 bp, synthetic construct
  source 1..20: mol_type = other DNA
tagctggaactataggcaag

SEQ ID NO: 142000 - DNA, 20 bp, synthetic construct
  source 1..20: mol_type = other DNA
gtagctggaactataggcaa

SEQ ID NO: 142001 - DNA, 20 bp, synthetic construct
  source 1..20: mol_type = other DNA
agtagctggaactataggca

SEQ ID NO: 142002 - DNA, 20 bp, synthetic construct
  source 1..20: mol_type = other DNA
gagtagctggaactataggc

SEQ ID NO: 142003 - DNA, 20 bp, synthetic construct
  source 1..20: mol_type = other DNA
cgagtagctggaactatagg

SEQ ID NO: 142004 - DNA, 20 bp, synthetic construct
  source 1..20: mol_type = other DNA
ccgagtagctggaactatag

SEQ ID NO: 142005 - DNA, 20 bp, synthetic construct
  source 1..20: mol_type = other DNA
gccgagtagctggaactata

SEQ ID NO: 142006 - DNA, 20 bp, synthetic construct
  source 1..20: mol_type = other DNA
tgccgagtagctggaactat

SEQ ID NO: 142007 - DNA, 20 bp, synthetic construct
  source 1..20: mol_type = other DNA
ctgccgagtagctggaacta

SEQ ID NO: 142008 - DNA, 20 bp, synthetic construct
  source 1..20: mol_type = other DNA
cctgccgagtagctggaact

SEQ ID NO: 142009 - DNA, 20 bp, synthetic construct
  source 1..20: mol_type = other DNA
gcctgccgagtagctggaac

SEQ ID NO: 142010 - DNA, 20 bp, synthetic construct
  source 1..20: mol_type = other DNA
agcctgccgagtagctggaa

SEQ ID NO: 142011 - DNA, 20 bp, synthetic construct
  source 1..20: mol_type = other DNA
cagcctgccgagtagctgga

SEQ ID NO: 142012 - DNA, 20 bp, synthetic construct
  source 1..20: mol_type = other DNA
tcagcctgccgagtagctgg

SEQ ID NO: 142013 - DNA, 20 bp, synthetic construct
  source 1..20: mol_type = other DNA
ctcagcctgccgagtagctg

SEQ ID NO: 142014 - DNA, 20 bp, synthetic construct
  source 1..20: mol_type = other DNA
cctcagcctgccgagtagct

SEQ ID NO: 142015 - DNA, 20 bp, synthetic construct
  source 1..20: mol_type = other DNA
gcctcagcctgccgagtagc

SEQ ID NO: 142016 - DNA, 20 bp, synthetic construct
  source 1..20: mol_type = other DNA
tgcctcagcctgccgagtag

SEQ ID NO: 142017 - DNA, 20 bp, synthetic construct
  source 1..20: mol_type = other DNA
ctgcctcagcctgccgagta

SEQ ID NO: 142018 - DNA, 20 bp, synthetic construct
  source 1..20: mol_type = other DNA
cctgcctcagcctgccgagt

SEQ ID NO: 142019 - DNA, 20 bp, synthetic construct
  source 1..20: mol_type = other DNA
tcctgcctcagcctgccgag

SEQ ID NO: 142020 - DNA, 20 bp, synthetic construct
  source 1..20: mol_type = other DNA
ctcctgcctcagcctgccga

SEQ ID NO: 142021 - DNA, 20 bp, synthetic construct
  source 1..20: mol_type = other DNA
tctcctgcctcagcctgccg

SEQ ID NO: 142022 - DNA, 20 bp, synthetic construct
  source 1..20: mol_type = other DNA
ttctcctgcctcagcctgcc

SEQ ID NO: 142023 - DNA, 20 bp, synthetic construct
  source 1..20: mol_type = other DNA
attctcctgcctcagcctgc

SEQ ID NO: 142024 - DNA, 20 bp, synthetic construct
  source 1..20: mol_type = other DNA
gattctcctgcctcagcctg

SEQ ID NO: 142025 - DNA, 20 bp, synthetic construct
  source 1..20: mol_type = other DNA
cgattctcctgcctcagcct

SEQ ID NO: 142026 - DNA, 20 bp, synthetic construct
  source 1..20: mol_type = other DNA
gcgattctcctgcctcagcc

SEQ ID NO: 142027 - DNA, 20 bp, synthetic construct
  source 1..20: mol_type = other DNA
agcgattctcctgcctcagc

SEQ ID NO: 142028 - DNA, 20 bp, synthetic construct
  source 1..20: mol_type = other DNA
aagcgattctcctgcctcag

SEQ ID NO: 142029 - DNA, 20 bp, synthetic construct
  source 1..20: mol_type = other DNA
caagcgattctcctgcctca

SEQ ID NO: 142030 - DNA, 20 bp, synthetic construct
  source 1..20: mol_type = other DNA
tcaagcgattctcctgcctc

SEQ ID NO: 142031 - DNA, 20 bp, synthetic construct
  source 1..20: mol_type = other DNA
ttcaagcgattctcctgcct

SEQ ID NO: 142032 - DNA, 20 bp, synthetic construct
  source 1..20: mol_type = other DNA
gttcaagcgattctcctgcc

SEQ ID NO: 142033 - DNA, 20 bp, synthetic construct
  source 1..20: mol_type = other DNA
ggttcaagcgattctcctgc

SEQ ID NO: 142034 - DNA, 20 bp, synthetic construct
  source 1..20: mol_type = other DNA
gggttcaagcgattctcctg

SEQ ID NO: 142035 - DNA, 20 bp, synthetic construct
  source 1..20: mol_type = other DNA
cgggttcaagcgattctcct

SEQ ID NO: 142036 - DNA, 20 bp, synthetic construct
  source 1..20: mol_type = other DNA
ccgggttcaagcgattctcc

SEQ ID NO: 142037 - DNA, 20 bp, synthetic construct
  source 1..20: mol_type = other DNA
cccgggttcaagcgattctc

SEQ ID NO: 142038 - DNA, 20 bp, synthetic construct
  source 1..20: mol_type = other DNA
tcccgggttcaagcgattct

SEQ ID NO: 142039 - DNA, 20 bp, synthetic construct
  source 1..20: mol_type = other DNA
ctcccgggttcaagcgattc

SEQ ID NO: 142040 - DNA, 20 bp, synthetic construct
  source 1..20: mol_type = other DNA
cctcccgggttcaagcgatt

SEQ ID NO: 142041 - DNA, 20 bp, synthetic construct
  source 1..20: mol_type = other DNA
gcctcccgggttcaagcgat

SEQ ID NO: 142042 - DNA, 20 bp, synthetic construct
  source 1..20: mol_type = other DNA
cgcctcccgggttcaagcga

SEQ ID NO: 142043 - DNA, 20 bp, synthetic construct
  source 1..20: mol_type = other DNA
ccgcctcccgggttcaagcg

SEQ ID NO: 142044 - DNA, 20 bp, synthetic construct
  source 1..20: mol_type = other DNA
tccgcctcccgggttcaagc

SEQ ID NO: 142045 - DNA, 20 bp, synthetic construct
  source 1..20: mol_type = other DNA
ctccgcctcccgggttcaag

SEQ ID NO: 142046 - DNA, 20 bp, synthetic construct
  source 1..20: mol_type = other DNA
cctccgcctcccgggttcaa

SEQ ID NO: 142047 - DNA, 20 bp, synthetic construct
  source 1..20: mol_type = other DNA
acctccgcctcccgggttca

SEQ ID NO: 142048 - DNA, 20 bp, synthetic construct
  source 1..20: mol_type = other DNA
aacctccgcctcccgggttc

SEQ ID NO: 142049 - DNA, 20 bp, synthetic construct
  source 1..20: mol_type = other DNA
caacctccgcctcccgggtt

SEQ ID NO: 142050 - DNA, 20 bp, synthetic construct
  source 1..20: mol_type = other DNA
gcaacctccgcctcccgggt

SEQ ID NO: 142051 - DNA, 20 bp, synthetic construct
  source 1..20: mol_type = other DNA
tgcaacctccgcctcccggg

SEQ ID NO: 142052 - DNA, 20 bp, synthetic construct
  source 1..20: mol_type = other DNA
ctgcaacctccgcctcccgg

SEQ ID NO: 142053 - DNA, 20 bp, synthetic construct
  source 1..20: mol_type = other DNA
actgcaacctccgcctcccg

SEQ ID NO: 142054 - DNA, 20 bp, synthetic construct
  source 1..20: mol_type = other DNA
cactgcaacctccgcctccc

SEQ ID NO: 142055 - DNA, 20 bp, synthetic construct
  source 1..20: mol_type = other DNA
tcactgcaacctccgcctcc

SEQ ID NO: 142056 - DNA, 20 bp, synthetic construct
  source 1..20: mol_type = other DNA
ctcactgcaacctccgcctc

SEQ ID NO: 142057 - DNA, 20 bp, synthetic construct
  source 1..20: mol_type = other DNA
gctcactgcaacctccgcct

SEQ ID NO: 142058 - DNA, 20 bp, synthetic construct
  source 1..20: mol_type = other DNA
ggctcactgcaacctccgcc

SEQ ID NO: 142059 - DNA, 20 bp, synthetic construct
  source 1..20: mol_type = other DNA
cggctcactgcaacctccgc

SEQ ID NO: 142060 - DNA, 20 bp, synthetic construct
  source 1..20: mol_type = other DNA
tcggctcactgcaacctccg

SEQ ID NO: 142061 - DNA, 20 bp, synthetic construct
  source 1..20: mol_type = other DNA
ctcggctcactgcaacctcc

SEQ ID NO: 142062 - DNA, 20 bp, synthetic construct
  source 1..20: mol_type = other DNA
tctcggctcactgcaacctc

SEQ ID NO: 142063 - DNA, 20 bp, synthetic construct
  source 1..20: mol_type = other DNA
atctcggctcactgcaacct

SEQ ID NO: 142064 - DNA, 20 bp, synthetic construct
  source 1..20: mol_type = other DNA
catctcggctcactgcaacc

SEQ ID NO: 142065 - DNA, 20 bp, synthetic construct
  source 1..20: mol_type = other DNA
ccatctcggctcactgcaac

SEQ ID NO: 142066 - DNA, 20 bp, synthetic construct
  source 1..20: mol_type = other DNA
accatctcggctcactgcaa

SEQ ID NO: 142067 - DNA, 20 bp, synthetic construct
  source 1..20: mol_type = other DNA
caccatctcggctcactgca

SEQ ID NO: 142068 - DNA, 20 bp, synthetic construct
  source 1..20: mol_type = other DNA
gcaccatctcggctcactgc

SEQ ID NO: 142069 - DNA, 20 bp, synthetic construct
  source 1..20: mol_type = other DNA
ggcaccatctcggctcactg

SEQ ID NO: 142070 - DNA, 20 bp, synthetic construct
  source 1..20: mol_type = other DNA
gggcaccatctcggctcact

SEQ ID NO: 142071 - DNA, 20 bp, synthetic construct
  source 1..20: mol_type = other DNA
ggggcaccatctcggctcac

SEQ ID NO: 142072 - DNA, 20 bp, synthetic construct
  source 1..20: mol_type = other DNA
aggggcaccatctcggctca

SEQ ID NO: 142073 - DNA, 20 bp, synthetic construct
  source 1..20: mol_type = other DNA
caggggcaccatctcggctc

SEQ ID NO: 142074 - DNA, 20 bp, synthetic construct
  source 1..20: mol_type = other DNA
gcaggggcaccatctcggct

SEQ ID NO: 142075 - DNA, 20 bp, synthetic construct
  source 1..20: mol_type = other DNA
tgcaggggcaccatctcggc

SEQ ID NO: 142076 - DNA, 20 bp, synthetic construct
  source 1..20: mol_type = other DNA
gtgcaggggcaccatctcgg

SEQ ID NO: 142077 - DNA, 20 bp, synthetic construct
  source 1..20: mol_type = other DNA
agtgcaggggcaccatctcg

SEQ ID NO: 142078 - DNA, 20 bp, synthetic construct
  source 1..20: mol_type = other DNA
gagtgcaggggcaccatctc

SEQ ID NO: 142079 - DNA, 20 bp, synthetic construct
  source 1..20: mol_type = other DNA
ggagtgcaggggcaccatct

SEQ ID NO: 142080 - DNA, 20 bp, synthetic construct
  source 1..20: mol_type = other DNA
tggagtgcaggggcaccatc

SEQ ID NO: 142081 - DNA, 20 bp, synthetic construct
  source 1..20: mol_type = other DNA
ctggagtgcaggggcaccat

SEQ ID NO: 142082 - DNA, 20 bp, synthetic construct
  source 1..20: mol_type = other DNA
gctggagtgcaggggcacca

SEQ ID NO: 142083 - DNA, 20 bp, synthetic construct
  source 1..20: mol_type = other DNA
ggctggagtgcaggggcacc

SEQ ID NO: 142084 - DNA, 20 bp, synthetic construct
  source 1..20: mol_type = other DNA
aggctggagtgcaggggcac

SEQ ID NO: 142085 - DNA, 20 bp, synthetic construct
  source 1..20: mol_type = other DNA
caggctggagtgcaggggca

SEQ ID NO: 142086 - DNA, 20 bp, synthetic construct
  source 1..20: mol_type = other DNA
ccaggctggagtgcaggggc

SEQ ID NO: 142087 - DNA, 20 bp, synthetic construct
  source 1..20: mol_type = other DNA
cccaggctggagtgcagggg

SEQ ID NO: 142088 - DNA, 20 bp, synthetic construct
  source 1..20: mol_type = other DNA
gcccaggctggagtgcaggg

SEQ ID NO: 142089 - DNA, 20 bp, synthetic construct
  source 1..20: mol_type = other DNA
tgcccaggctggagtgcagg

SEQ ID NO: 142090 - DNA, 20 bp, synthetic construct
  source 1..20: mol_type = other DNA
ttgcccaggctggagtgcag

SEQ ID NO: 142091 - DNA, 20 bp, synthetic construct
  source 1..20: mol_type = other DNA
gttgcccaggctggagtgca

SEQ ID NO: 142092 - DNA, 20 bp, synthetic construct
  source 1..20: mol_type = other DNA
tgttgcccaggctggagtgc

SEQ ID NO: 142093 - DNA, 20 bp, synthetic construct
  source 1..20: mol_type = other DNA
ctgttgcccaggctggagtg

SEQ ID NO: 142094 - DNA, 20 bp, synthetic construct
  source 1..20: mol_type = other DNA
tctgttgcccaggctggagt

SEQ ID NO: 142095 - DNA, 20 bp, synthetic construct
  source 1..20: mol_type = other DNA
ctctgttgcccaggctggag

SEQ ID NO: 142096 - DNA, 20 bp, synthetic construct
  source 1..20: mol_type = other DNA
gctctgttgcccaggctgga

SEQ ID NO: 142097 - DNA, 20 bp, synthetic construct
  source 1..20: mol_type = other DNA
cgctctgttgcccaggctgg

SEQ ID NO: 142098 - DNA, 20 bp, synthetic construct
  source 1..20: mol_type = other DNA
tcgctctgttgcccaggctg

SEQ ID NO: 142099 - DNA, 20 bp, synthetic construct
  source 1..20: mol_type = other DNA
ctcgctctgttgcccaggct

SEQ ID NO: 142100 - DNA, 20 bp, synthetic construct
  source 1..20: mol_type = other DNA
tctcgctctgttgcccaggc

SEQ ID NO: 142101 - DNA, 20 bp, synthetic construct
  source 1..20: mol_type = other DNA
gtctcgctctgttgcccagg

SEQ ID NO: 142102 - DNA, 20 bp, synthetic construct
  source 1..20: mol_type = other DNA
agtctcgctctgttgcccag

SEQ ID NO: 142103 - DNA, 20 bp, synthetic construct
  source 1..20: mol_type = other DNA
gagtctcgctctgttgccca

SEQ ID NO: 142104 - DNA, 20 bp, synthetic construct
  source 1..20: mol_type = other DNA
agagtctcgctctgttgccc

SEQ ID NO: 142105 - DNA, 20 bp, synthetic construct
  source 1..20: mol_type = other DNA
cagagtctcgctctgttgcc

SEQ ID NO: 142106 - DNA, 20 bp, synthetic construct
  source 1..20: mol_type = other DNA
acagagtctcgctctgttgc

SEQ ID NO: 142107 - DNA, 20 bp, synthetic construct
  source 1..20: mol_type = other DNA
gacagagtctcgctctgttg

SEQ ID NO: 142108 - DNA, 20 bp, synthetic construct
  source 1..20: mol_type = other DNA
tgacagagtctcgctctgtt

SEQ ID NO: 142109 - DNA, 20 bp, synthetic construct
  source 1..20: mol_type = other DNA
ttgacagagtctcgctctgt

SEQ ID NO: 142110 - DNA, 20 bp, synthetic construct
  source 1..20: mol_type = other DNA
tttgacagagtctcgctctg

SEQ ID NO: 142111 - DNA, 20 bp, synthetic construct
  source 1..20: mol_type = other DNA
ttttgacagagtctcgctct

SEQ ID NO: 142112 - DNA, 20 bp, synthetic construct
  source 1..20: mol_type = other DNA
tttttgacagagtctcgctc

SEQ ID NO: 142113 - DNA, 20 bp, synthetic construct
  source 1..20: mol_type = other DNA
atttttgacagagtctcgct

SEQ ID NO: 142114 - DNA, 20 bp, synthetic construct
  source 1..20: mol_type = other DNA
aatttttgacagagtctcgc

SEQ ID NO: 142115 - DNA, 20 bp, synthetic construct
  source 1..20: mol_type = other DNA
taatttttgacagagtctcg

SEQ ID NO: 142116 - DNA, 20 bp, synthetic construct
  source 1..20: mol_type = other DNA
ttaatttttgacagagtctc

SEQ ID NO: 142117 - DNA, 20 bp, synthetic construct
  source 1..20: mol_type = other DNA
tttaatttttgacagagtct

SEQ ID NO: 142118 - DNA, 20 bp, synthetic construct
  source 1..20: mol_type = other DNA
gtttaatttttgacagagtc

SEQ ID NO: 142119 - DNA, 20 bp, synthetic construct
  source 1..20: mol_type = other DNA
tgtttaatttttgacagagt

SEQ ID NO: 142120 - DNA, 20 bp, synthetic construct
  source 1..20: mol_type = other DNA
ttgtttaatttttgacagag

SEQ ID NO: 142121 - DNA, 20 bp, synthetic construct
  source 1..20: mol_type = other DNA
tttgtttaatttttgacaga

SEQ ID NO: 142122 - DNA, 20 bp, synthetic construct
  source 1..20: mol_type = other DNA
atttgtttaatttttgacag

SEQ ID NO: 142123 - DNA, 20 bp, synthetic construct
  source 1..20: mol_type = other DNA
tatttgtttaatttttgaca

SEQ ID NO: 142124 - DNA, 20 bp, synthetic construct
  source 1..20: mol_type = other DNA
ttatttgtttaatttttgac

SEQ ID NO: 142125 - DNA, 20 bp, synthetic construct
  source 1..20: mol_type = other DNA
tttatttgtttaatttttga

SEQ ID NO: 142126 - DNA, 20 bp, synthetic construct
  source 1..20: mol_type = other DNA
atttatttgtttaatttttg

SEQ ID NO: 142127 - DNA, 20 bp, synthetic construct
  source 1..20: mol_type = other DNA
tatttatttgtttaattttt

SEQ ID NO: 142128 - DNA, 20 bp, synthetic construct
  source 1..20: mol_type = other DNA
gtatttatttgtttaatttt

SEQ ID NO: 142129 - DNA, 20 bp, synthetic construct
  source 1..20: mol_type = other DNA
tgtatttatttgtttaattt

SEQ ID NO: 142130 - DNA, 20 bp, synthetic construct
  source 1..20: mol_type = other DNA
atgtatttatttgtttaatt

SEQ ID NO: 142131 - DNA, 20 bp, synthetic construct
  source 1..20: mol_type = other DNA
aatgtatttatttgtttaat

SEQ ID NO: 142132 - DNA, 20 bp, synthetic construct
  source 1..20: mol_type = other DNA
aaatgtatttatttgtttaa

SEQ ID NO: 142133 - DNA, 20 bp, synthetic construct
  source 1..20: mol_type = other DNA
aaaatgtatttatttgttta

SEQ ID NO: 142134 - DNA, 20 bp, synthetic construct
  source 1..20: mol_type = other DNA
aaaaatgtatttatttgttt

SEQ ID NO: 142135 - DNA, 20 bp, synthetic construct
  source 1..20: mol_type = other DNA
taaaaatgtatttatttgtt

SEQ ID NO: 142136 - DNA, 20 bp, synthetic construct
  source 1..20: mol_type = other DNA
ttaaaaatgtatttatttgt

SEQ ID NO: 142137 - DNA, 20 bp, synthetic construct
  source 1..20: mol_type = other DNA
tttaaaaatgtatttatttg

SEQ ID NO: 142138 - DNA, 20 bp, synthetic construct
  source 1..20: mol_type = other DNA
ttttaaaaatgtatttattt

SEQ ID NO: 142139 - DNA, 20 bp, synthetic construct
  source 1..20: mol_type = other DNA
attttaaaaatgtatttatt

SEQ ID NO: 142140 - DNA, 20 bp, synthetic construct
  source 1..20: mol_type = other DNA
cattttaaaaatgtatttat

SEQ ID NO: 142141 - DNA, 20 bp, synthetic construct
  source 1..20: mol_type = other DNA
tcattttaaaaatgtattta

SEQ ID NO: 142142 - DNA, 20 bp, synthetic construct
  source 1..20: mol_type = other DNA
ttcattttaaaaatgtattt

SEQ ID NO: 142143 - DNA, 20 bp, synthetic construct
  source 1..20: mol_type = other DNA
gttcattttaaaaatgtatt

SEQ ID NO: 142144 - DNA, 20 bp, synthetic construct
  source 1..20: mol_type = other DNA
cgttcattttaaaaatgtat

SEQ ID NO: 142145 - DNA, 20 bp, synthetic construct
  source 1..20: mol_type = other DNA
acgttcattttaaaaatgta

SEQ ID NO: 142146 - DNA, 20 bp, synthetic construct
  source 1..20: mol_type = other DNA
tacgttcattttaaaaatgt

SEQ ID NO: 142147 - DNA, 20 bp, synthetic construct
  source 1..20: mol_type = other DNA
ttacgttcattttaaaaatg

SEQ ID NO: 142148 - DNA, 20 bp, synthetic construct
  source 1..20: mol_type = other DNA
cttacgttcattttaaaaat

SEQ ID NO: 142149 - DNA, 20 bp, synthetic construct
  source 1..20: mol_type = other DNA
tcttacgttcattttaaaaa

SEQ ID NO: 142150 - DNA, 20 bp, synthetic construct
  source 1..20: mol_type = other DNA
atcttacgttcattttaaaa

SEQ ID NO: 142151 - DNA, 20 bp, synthetic construct
  source 1..20: mol_type = other DNA
aatcttacgttcattttaaa

SEQ ID NO: 142152 - DNA, 20 bp, synthetic construct
  source 1..20: mol_type = other DNA
aaatcttacgttcattttaa

SEQ ID NO: 142153 - DNA, 20 bp, synthetic construct
  source 1..20: mol_type = other DNA
aaaatcttacgttcatttta

SEQ ID NO: 142154 - DNA, 20 bp, synthetic construct
  source 1..20: mol_type = other DNA
aaaaatcttacgttcatttt

SEQ ID NO: 142155 - DNA, 20 bp, synthetic construct
  source 1..20: mol_type = other DNA
taaaaatcttacgttcattt

SEQ ID NO: 142156 - DNA, 20 bp, synthetic construct
  source 1..20: mol_type = other DNA
gtaaaaatcttacgttcatt

SEQ ID NO: 142157 - DNA, 20 bp, synthetic construct
  source 1..20: mol_type = other DNA
tgtaaaaatcttacgttcat

SEQ ID NO: 142158 - DNA, 20 bp, synthetic construct
  source 1..20: mol_type = other DNA
ttgtaaaaatcttacgttca

SEQ ID NO: 142159 - DNA, 20 bp, synthetic construct
  source 1..20: mol_type = other DNA
cttgtaaaaatcttacgttc

SEQ ID NO: 142160 - DNA, 20 bp, synthetic construct
  source 1..20: mol_type = other DNA
acttgtaaaaatcttacgtt

SEQ ID NO: 142161 - DNA, 20 bp, synthetic construct
  source 1..20: mol_type = other DNA
tacttgtaaaaatcttacgt

SEQ ID NO: 142162 - DNA, 20 bp, synthetic construct
  source 1..20: mol_type = other DNA
gtacttgtaaaaatcttacg

SEQ ID NO: 142163 - DNA, 20 bp, synthetic construct
  source 1..20: mol_type = other DNA
tgtacttgtaaaaatcttac

SEQ ID NO: 142164 - DNA, 20 bp, synthetic construct
  source 1..20: mol_type = other DNA
ttgtacttgtaaaaatctta

SEQ ID NO: 142165 - DNA, 20 bp, synthetic construct
  source 1..20: mol_type = other DNA
gttgtacttgtaaaaatctt

SEQ ID NO: 142166 - DNA, 20 bp, synthetic construct
  source 1..20: mol_type = other DNA
tgttgtacttgtaaaaatct

SEQ ID NO: 142167 - DNA, 20 bp, synthetic construct
  source 1..20: mol_type = other DNA
ttgttgtacttgtaaaaatc

SEQ ID NO: 142168 - DNA, 20 bp, synthetic construct
  source 1..20: mol_type = other DNA
tttgttgtacttgtaaaaat

SEQ ID NO: 142169 - DNA, 20 bp, synthetic construct
  source 1..20: mol_type = other DNA
gtttgttgtacttgtaaaaa

SEQ ID NO: 142170 - DNA, 20 bp, synthetic construct
  source 1..20: mol_type = other DNA
agtttgttgtacttgtaaaa

SEQ ID NO: 142171 - DNA, 20 bp, synthetic construct
  source 1..20: mol_type = other DNA
gagtttgttgtacttgtaaa

SEQ ID NO: 142172 - DNA, 20 bp, synthetic construct
  source 1..20: mol_type = other DNA
tgagtttgttgtacttgtaa

SEQ ID NO: 142173 - DNA, 20 bp, synthetic construct
  source 1..20: mol_type = other DNA
ctgagtttgttgtacttgta

SEQ ID NO: 142174 - DNA, 20 bp, synthetic construct
  source 1..20: mol_type = other DNA
cctgagtttgttgtacttgt

SEQ ID NO: 142175 - DNA, 20 bp, synthetic construct
  source 1..20: mol_type = other DNA
acctgagtttgttgtacttg

SEQ ID NO: 142176 - DNA, 20 bp, synthetic construct
  source 1..20: mol_type = other DNA
aacctgagtttgttgtactt

SEQ ID NO: 142177 - DNA, 20 bp, synthetic construct
  source 1..20: mol_type = other DNA
gaacctgagtttgttgtact

SEQ ID NO: 142178 - DNA, 20 bp, synthetic construct
  source 1..20: mol_type = other DNA
cgaacctgagtttgttgtac

SEQ ID NO: 142179 - DNA, 20 bp, synthetic construct
  source 1..20: mol_type = other DNA
tcgaacctgagtttgttgta

SEQ ID NO: 142180 - DNA, 20 bp, synthetic construct
  source 1..20: mol_type = other DNA
ttcgaacctgagtttgttgt

SEQ ID NO: 142181 - DNA, 20 bp, synthetic construct
  source 1..20: mol_type = other DNA
tttcgaacctgagtttgttg

SEQ ID NO: 142182 - DNA, 20 bp, synthetic construct
  source 1..20: mol_type = other DNA
atttcgaacctgagtttgtt

SEQ ID NO: 142183 - DNA, 20 bp, synthetic construct
  source 1..20: mol_type = other DNA
aatttcgaacctgagtttgt

SEQ ID NO: 142184 - DNA, 20 bp, synthetic construct
  source 1..20: mol_type = other DNA
aaatttcgaacctgagtttg

SEQ ID NO: 142185 - DNA, 20 bp, synthetic construct
  source 1..20: mol_type = other DNA
taaatttcgaacctgagttt

SEQ ID NO: 142186 - DNA, 20 bp, synthetic construct
  source 1..20: mol_type = other DNA
gtaaatttcgaacctgagtt

SEQ ID NO: 142187 - DNA, 20 bp, synthetic construct
  source 1..20: mol_type = other DNA
tgtaaatttcgaacctgagt

SEQ ID NO: 142188 - DNA, 20 bp, synthetic construct
  source 1..20: mol_type = other DNA
atgtaaatttcgaacctgag

SEQ ID NO: 142189 - DNA, 20 bp, synthetic construct
  source 1..20: mol_type = other DNA
gatgtaaatttcgaacctga

SEQ ID NO: 142190 - DNA, 20 bp, synthetic construct
  source 1..20: mol_type = other DNA
tgatgtaaatttcgaacctg

SEQ ID NO: 142191 - DNA, 20 bp, synthetic construct
  source 1..20: mol_type = other DNA
ttgatgtaaatttcgaacct

SEQ ID NO: 142192 - DNA, 20 bp, synthetic construct
  source 1..20: mol_type = other DNA
tttgatgtaaatttcgaacc

SEQ ID NO: 142193 - DNA, 20 bp, synthetic construct
  source 1..20: mol_type = other DNA
atttgatgtaaatttcgaac

SEQ ID NO: 142194 - DNA, 20 bp, synthetic construct
  source 1..20: mol_type = other DNA
gatttgatgtaaatttcgaa

SEQ ID NO: 142195 - DNA, 20 bp, synthetic construct
  source 1..20: mol_type = other DNA
agatttgatgtaaatttcga

SEQ ID NO: 142196 - DNA, 20 bp, synthetic construct
  source 1..20: mol_type = other DNA
aagatttgatgtaaatttcg

SEQ ID NO: 142197 - DNA, 20 bp, synthetic construct
  source 1..20: mol_type = other DNA
aaagatttgatgtaaatttc

SEQ ID NO: 142198 - DNA, 20 bp, synthetic construct
  source 1..20: mol_type = other DNA
aaaagatttgatgtaaattt

SEQ ID NO: 142199 - DNA, 20 bp, synthetic construct
  source 1..20: mol_type = other DNA
taaaagatttgatgtaaatt

SEQ ID NO: 142200 - DNA, 20 bp, synthetic construct
  source 1..20: mol_type = other DNA
ctaaaagatttgatgtaaat

SEQ ID NO: 142201 - DNA, 20 bp, synthetic construct
  source 1..20: mol_type = other DNA
tctaaaagatttgatgtaaa

SEQ ID NO: 142202 - DNA, 20 bp, synthetic construct
  source 1..20: mol_type = other DNA
gtctaaaagatttgatgtaa

SEQ ID NO: 142203 - DNA, 20 bp, synthetic construct
  source 1..20: mol_type = other DNA
ggtctaaaagatttgatgta

SEQ ID NO: 142204 - DNA, 20 bp, synthetic construct
  source 1..20: mol_type = other DNA
tggtctaaaagatttgatgt

SEQ ID NO: 142205 - DNA, 20 bp, synthetic construct
  source 1..20: mol_type = other DNA
ttggtctaaaagatttgatg

SEQ ID NO: 142206 - DNA, 20 bp, synthetic construct
  source 1..20: mol_type = other DNA
cttggtctaaaagatttgat

SEQ ID NO: 142207 - DNA, 20 bp, synthetic construct
  source 1..20: mol_type = other DNA
acttggtctaaaagatttga

SEQ ID NO: 142208 - DNA, 20 bp, synthetic construct
  source 1..20: mol_type = other DNA
gacttggtctaaaagatttg

SEQ ID NO: 142209 - DNA, 20 bp, synthetic construct
  source 1..20: mol_type = other DNA
tgacttggtctaaaagattt

SEQ ID NO: 142210 - DNA, 20 bp, synthetic construct
  source 1..20: mol_type = other DNA
ctgacttggtctaaaagatt

SEQ ID NO: 142211 - DNA, 20 bp, synthetic construct
  source 1..20: mol_type = other DNA
actgacttggtctaaaagat

SEQ ID NO: 142212 - DNA, 20 bp, synthetic construct
  source 1..20: mol_type = other DNA
cactgacttggtctaaaaga

SEQ ID NO: 142213 - DNA, 20 bp, synthetic construct
  source 1..20: mol_type = other DNA
gcactgacttggtctaaaag

SEQ ID NO: 142214 - DNA, 20 bp, synthetic construct
  source 1..20: mol_type = other DNA
ggcactgacttggtctaaaa

SEQ ID NO: 142215 - DNA, 20 bp, synthetic construct
  source 1..20: mol_type = other DNA
aggcactgacttggtctaaa

SEQ ID NO: 142216 - DNA, 20 bp, synthetic construct
  source 1..20: mol_type = other DNA
taggcactgacttggtctaa

SEQ ID NO: 142217 - DNA, 20 bp, synthetic construct
  source 1..20: mol_type = other DNA
ataggcactgacttggtcta

SEQ ID NO: 142218 - DNA, 20 bp, synthetic construct
  source 1..20: mol_type = other DNA
tataggcactgacttggtct

SEQ ID NO: 142219 - DNA, 20 bp, synthetic construct
  source 1..20: mol_type = other DNA
gtataggcactgacttggtc

SEQ ID NO: 142220 - DNA, 20 bp, synthetic construct
  source 1..20: mol_type = other DNA
tgtataggcactgacttggt

SEQ ID NO: 142221 - DNA, 20 bp, synthetic construct
  source 1..20: mol_type = other DNA
ttgtataggcactgacttgg

SEQ ID NO: 142222 - DNA, 20 bp, synthetic construct
  source 1..20: mol_type = other DNA
gttgtataggcactgacttg

SEQ ID NO: 142223 - DNA, 20 bp, synthetic construct
  source 1..20: mol_type = other DNA
agttgtataggcactgactt

SEQ ID NO: 142224 - DNA, 20 bp, synthetic construct
  source 1..20: mol_type = other DNA
aagttgtataggcactgact

SEQ ID NO: 142225 - DNA, 20 bp, synthetic construct
  source 1..20: mol_type = other DNA
caagttgtataggcactgac

SEQ ID NO: 142226 - DNA, 20 bp, synthetic construct
  source 1..20: mol_type = other DNA
ccaagttgtataggcactga

SEQ ID NO: 142227 - DNA, 20 bp, synthetic construct
  source 1..20: mol_type = other DNA
tccaagttgtataggcactg

SEQ ID NO: 142228 - DNA, 20 bp, synthetic construct
  source 1..20: mol_type = other DNA
ctccaagttgtataggcact

SEQ ID NO: 142229 - DNA, 20 bp, synthetic construct
  source 1..20: mol_type = other DNA
cctccaagttgtataggcac

SEQ ID NO: 142230 - DNA, 20 bp, synthetic construct
  source 1..20: mol_type = other DNA
tcctccaagttgtataggca

SEQ ID NO: 142231 - DNA, 20 bp, synthetic construct
  source 1..20: mol_type = other DNA
ctcctccaagttgtataggc

SEQ ID NO: 142232 - DNA, 20 bp, synthetic construct
  source 1..20: mol_type = other DNA
gctcctccaagttgtatagg

SEQ ID NO: 142233 - DNA, 20 bp, synthetic construct
  source 1..20: mol_type = other DNA
agctcctccaagttgtatag

SEQ ID NO: 142234 - DNA, 20 bp, synthetic construct
  source 1..20: mol_type = other DNA
cagctcctccaagttgtata

SEQ ID NO: 142235 - DNA, 20 bp, synthetic construct
  source 1..20: mol_type = other DNA
ccagctcctccaagttgtat

SEQ ID NO: 142236 - DNA, 20 bp, synthetic construct
  source 1..20: mol_type = other DNA
tccagctcctccaagttgta

SEQ ID NO: 142237 - DNA, 20 bp, synthetic construct
  source 1..20: mol_type = other DNA
ttccagctcctccaagttgt

SEQ ID NO: 142238 - DNA, 20 bp, synthetic construct
  source 1..20: mol_type = other DNA
cttccagctcctccaagttg

SEQ ID NO: 142239 - DNA, 20 bp, synthetic construct
  source 1..20: mol_type = other DNA
acttccagctcctccaagtt

SEQ ID NO: 142240 - DNA, 20 bp, synthetic construct
  source 1..20: mol_type = other DNA
tacttccagctcctccaagt

SEQ ID NO: 142241 - DNA, 20 bp, synthetic construct
  source 1..20: mol_type = other DNA
ttacttccagctcctccaag

SEQ ID NO: 142242 - DNA, 20 bp, synthetic construct
  source 1..20: mol_type = other DNA
tttacttccagctcctccaa

SEQ ID NO: 142243 - DNA, 20 bp, synthetic construct
  source 1..20: mol_type = other DNA
gtttacttccagctcctcca

SEQ ID NO: 142244 - DNA, 20 bp, synthetic construct
  source 1..20: mol_type = other DNA
agtttacttccagctcctcc

SEQ ID NO: 142245 - DNA, 20 bp, synthetic construct
  source 1..20: mol_type = other DNA
aagtttacttccagctcctc

SEQ ID NO: 142246 - DNA, 20 bp, synthetic construct
  source 1..20: mol_type = other DNA
taagtttacttccagctcct

SEQ ID NO: 142247 - DNA, 20 bp, synthetic construct
  source 1..20: mol_type = other DNA
ttaagtttacttccagctcc

SEQ ID NO: 142248 - DNA, 20 bp, synthetic construct
  source 1..20: mol_type = other DNA
attaagtttacttccagctc

SEQ ID NO: 142249 - DNA, 20 bp, synthetic construct
  source 1..20: mol_type = other DNA
cattaagtttacttccagct

SEQ ID NO: 142250 - DNA, 20 bp, synthetic construct
  source 1..20: mol_type = other DNA
tcattaagtttacttccagc

SEQ ID NO: 142251 - DNA, 20 bp, synthetic construct
  source 1..20: mol_type = other DNA
ctcattaagtttacttccag

SEQ ID NO: 142252 - DNA, 20 bp, synthetic construct
  source 1..20: mol_type = other DNA
actcattaagtttacttcca

SEQ ID NO: 142253 - DNA, 20 bp, synthetic construct
  source 1..20: mol_type = other DNA
tactcattaagtttacttcc

SEQ ID NO: 142254 - DNA, 20 bp, synthetic construct
  source 1..20: mol_type = other DNA
atactcattaagtttacttc

SEQ ID NO: 142255 - DNA, 20 bp, synthetic construct
  source 1..20: mol_type = other DNA
catactcattaagtttactt

SEQ ID NO: 142256 - DNA, 20 bp, synthetic construct
  source 1..20: mol_type = other DNA
tcatactcattaagtttact

SEQ ID NO: 142257 - DNA, 20 bp, synthetic construct
  source 1..20: mol_type = other DNA
atcatactcattaagtttac

SEQ ID NO: 142258 - DNA, 20 bp, synthetic construct
  source 1..20: mol_type = other DNA
catcatactcattaagttta

SEQ ID NO: 142259 - DNA, 20 bp, synthetic construct
  source 1..20: mol_type = other DNA
tcatcatactcattaagttt

SEQ ID NO: 142260 - DNA, 20 bp, synthetic construct
  source 1..20: mol_type = other DNA
atcatcatactcattaagtt

SEQ ID NO: 142261 - DNA, 20 bp, synthetic construct
  source 1..20: mol_type = other DNA
catcatcatactcattaagt

SEQ ID NO: 142262 - DNA, 20 bp, synthetic construct
  source 1..20: mol_type = other DNA
tcatcatcatactcattaag

SEQ ID NO: 142263 - DNA, 20 bp, synthetic construct
  source 1..20: mol_type = other DNA
atcatcatcatactcattaa

SEQ ID NO: 142264 - DNA, 20 bp, synthetic construct
  source 1..20: mol_type = other DNA
catcatcatcatactcatta

SEQ ID NO: 142265 - DNA, 20 bp, synthetic construct
  source 1..20: mol_type = other DNA
ccatcatcatcatactcatt

SEQ ID NO: 142266 - DNA, 20 bp, synthetic construct
  source 1..20: mol_type = other DNA
tccatcatcatcatactcat

SEQ ID NO: 142267 - DNA, 20 bp, synthetic construct
  source 1..20: mol_type = other DNA
ctccatcatcatcatactca

SEQ ID NO: 142268 - DNA, 20 bp, synthetic construct
  source 1..20: mol_type = other DNA
cctccatcatcatcatactc

SEQ ID NO: 142269 - DNA, 20 bp, synthetic construct
  source 1..20: mol_type = other DNA
ccctccatcatcatcatact

SEQ ID NO: 142270 - DNA, 20 bp, synthetic construct
  source 1..20: mol_type = other DNA
gccctccatcatcatcatac

SEQ ID NO: 142271 - DNA, 20 bp, synthetic construct
  source 1..20: mol_type = other DNA
ggccctccatcatcatcata

SEQ ID NO: 142272 - DNA, 20 bp, synthetic construct
  source 1..20: mol_type = other DNA
aggccctccatcatcatcat

SEQ ID NO: 142273 - DNA, 20 bp, synthetic construct
  source 1..20: mol_type = other DNA
caggccctccatcatcatca

SEQ ID NO: 142274 - DNA, 20 bp, synthetic construct
  source 1..20: mol_type = other DNA
acaggccctccatcatcatc

SEQ ID NO: 142275 - DNA, 20 bp, synthetic construct
  source 1..20: mol_type = other DNA
aacaggccctccatcatcat

SEQ ID NO: 142276 - DNA, 20 bp, synthetic construct
  source 1..20: mol_type = other DNA
taacaggccctccatcatca

SEQ ID NO: 142277 - DNA, 20 bp, synthetic construct
  source 1..20: mol_type = other DNA
ttaacaggccctccatcatc

SEQ ID NO: 142278 - DNA, 20 bp, synthetic construct
  source 1..20: mol_type = other DNA
attaacaggccctccatcat

SEQ ID NO: 142279 - DNA, 20 bp, synthetic construct
  source 1..20: mol_type = other DNA
tattaacaggccctccatca

SEQ ID NO: 142280 - DNA, 20 bp, synthetic construct
  source 1..20: mol_type = other DNA
ttattaacaggccctccatc

SEQ ID NO: 142281 - DNA, 20 bp, synthetic construct
  source 1..20: mol_type = other DNA
cttattaacaggccctccat

SEQ ID NO: 142282 - DNA, 20 bp, synthetic construct
  source 1..20: mol_type = other DNA
gcttattaacaggccctcca

SEQ ID NO: 142283 - DNA, 20 bp, synthetic construct
  source 1..20: mol_type = other DNA
ggcttattaacaggccctcc

SEQ ID NO: 142284 - DNA, 20 bp, synthetic construct
  source 1..20: mol_type = other DNA
tggcttattaacaggccctc

SEQ ID NO: 142285 - DNA, 20 bp, synthetic construct
  source 1..20: mol_type = other DNA
gtggcttattaacaggccct

SEQ ID NO: 142286 - DNA, 20 bp, synthetic construct
  source 1..20: mol_type = other DNA
ggtggcttattaacaggccc

SEQ ID NO: 142287 - DNA, 20 bp, synthetic construct
  source 1..20: mol_type = other DNA
tggtggcttattaacaggcc

SEQ ID NO: 142288 - DNA, 20 bp, synthetic construct
  source 1..20: mol_type = other DNA
ttggtggcttattaacaggc

SEQ ID NO: 142289 - DNA, 20 bp, synthetic construct
  source 1..20: mol_type = other DNA
cttggtggcttattaacagg

SEQ ID NO: 142290 - DNA, 20 bp, synthetic construct
  source 1..20: mol_type = other DNA
acttggtggcttattaacag

SEQ ID NO: 142291 - DNA, 20 bp, synthetic construct
  source 1..20: mol_type = other DNA
aacttggtggcttattaaca

SEQ ID NO: 142292 - DNA, 20 bp, synthetic construct
  source 1..20: mol_type = other DNA
taacttggtggcttattaac

SEQ ID NO: 142293 - DNA, 20 bp, synthetic construct
  source 1..20: mol_type = other DNA
ctaacttggtggcttattaa

SEQ ID NO: 142294 - DNA, 20 bp, synthetic construct
  source 1..20: mol_type = other DNA
tctaacttggtggcttatta

SEQ ID NO: 142295 - DNA, 20 bp, synthetic construct
  source 1..20: mol_type = other DNA
ttctaacttggtggcttatt

SEQ ID NO: 142296 - DNA, 20 bp, synthetic construct
  source 1..20: mol_type = other DNA
tttctaacttggtggcttat

SEQ ID NO: 142297 - DNA, 20 bp, synthetic construct
  source 1..20: mol_type = other DNA
ttttctaacttggtggctta

SEQ ID NO: 142298 - DNA, 20 bp, synthetic construct
  source 1..20: mol_type = other DNA
tttttctaacttggtggctt

SEQ ID NO: 142299 - DNA, 20 bp, synthetic construct
  source 1..20: mol_type = other DNA
ttttttctaacttggtggct

SEQ ID NO: 142300 - DNA, 20 bp, synthetic construct
  source 1..20: mol_type = other DNA
tttttttctaacttggtggc

SEQ ID NO: 142301 - DNA, 20 bp, synthetic construct
  source 1..20: mol_type = other DNA
ctttttttctaacttggtgg

SEQ ID NO: 142302 - DNA, 20 bp, synthetic construct
  source 1..20: mol_type = other DNA
cctttttttctaacttggtg

SEQ ID NO: 142303 - DNA, 20 bp, synthetic construct
  source 1..20: mol_type = other DNA
tcctttttttctaacttggt

SEQ ID NO: 142304 - DNA, 20 bp, synthetic construct
  source 1..20: mol_type = other DNA
gtcctttttttctaacttgg

SEQ ID NO: 142305 - DNA, 20 bp, synthetic construct
  source 1..20: mol_type = other DNA
agtcctttttttctaacttg

SEQ ID NO: 142306 - DNA, 20 bp, synthetic construct
  source 1..20: mol_type = other DNA
cagtcctttttttctaactt

SEQ ID NO: 142307 - DNA, 20 bp, synthetic construct
  source 1..20: mol_type = other DNA
acagtcctttttttctaact

SEQ ID NO: 142308 - DNA, 20 bp, synthetic construct
  source 1..20: mol_type = other DNA
gacagtcctttttttctaac

SEQ ID NO: 142309 - DNA, 20 bp, synthetic construct
  source 1..20: mol_type = other DNA
agacagtcctttttttctaa

SEQ ID NO: 142310 - DNA, 20 bp, synthetic construct
  source 1..20: mol_type = other DNA
aagacagtcctttttttcta

SEQ ID NO: 142311 - DNA, 20 bp, synthetic construct
  source 1..20: mol_type = other DNA
taagacagtcctttttttct

SEQ ID NO: 142312 - DNA, 20 bp, synthetic construct
  source 1..20: mol_type = other DNA
ataagacagtcctttttttc

SEQ ID NO: 142313 - DNA, 20 bp, synthetic construct
  source 1..20: mol_type = other DNA
tataagacagtccttttttt

SEQ ID NO: 142314 - DNA, 20 bp, synthetic construct
  source 1..20: mol_type = other DNA
ctataagacagtcctttttt

SEQ ID NO: 142315 - DNA, 20 bp, synthetic construct
  source 1..20: mol_type = other DNA
tctataagacagtccttttt

SEQ ID NO: 142316 - DNA, 20 bp, synthetic construct
  source 1..20: mol_type = other DNA
gtctataagacagtcctttt

SEQ ID NO: 142317 - DNA, 20 bp, synthetic construct
  source 1..20: mol_type = other DNA
agtctataagacagtccttt

SEQ ID NO: 142318 - DNA, 20 bp, synthetic construct
  source 1..20: mol_type = other DNA
aagtctataagacagtcctt

SEQ ID NO: 142319 - DNA, 20 bp, synthetic construct
  source 1..20: mol_type = other DNA
taagtctataagacagtcct

SEQ ID NO: 142320 - DNA, 20 bp, synthetic construct
  source 1..20: mol_type = other DNA
ataagtctataagacagtcc

SEQ ID NO: 142321 - DNA, 20 bp, synthetic construct
  source 1..20: mol_type = other DNA
cataagtctataagacagtc

SEQ ID NO: 142322 - DNA, 20 bp, synthetic construct
  source 1..20: mol_type = other DNA
ccataagtctataagacagt

SEQ ID NO: 142323 - DNA, 20 bp, synthetic construct
  source 1..20: mol_type = other DNA
cccataagtctataagacag

SEQ ID NO: 142324 - DNA, 20 bp, synthetic construct
  source 1..20: mol_type = other DNA
tcccataagtctataagaca

SEQ ID NO: 142325 - DNA, 20 bp, synthetic construct
  source 1..20: mol_type = other DNA
gtcccataagtctataagac

SEQ ID NO: 142326 - DNA, 20 bp, synthetic construct
  source 1..20: mol_type = other DNA
agtcccataagtctataaga

SEQ ID NO: 142327 - DNA, 20 bp, synthetic construct
  source 1..20: mol_type = other DNA
cagtcccataagtctataag

SEQ ID NO: 142328 - DNA, 20 bp, synthetic construct
  source 1..20: mol_type = other DNA
acagtcccataagtctataa

SEQ ID NO: 142329 - DNA, 20 bp, synthetic construct
  source 1..20: mol_type = other DNA
cacagtcccataagtctata

SEQ ID NO: 142330 - DNA, 20 bp, synthetic construct
  source 1..20: mol_type = other DNA
tcacagtcccataagtctat

SEQ ID NO: 142331 - DNA, 20 bp, synthetic construct
  source 1..20: mol_type = other DNA
ttcacagtcccataagtcta

SEQ ID NO: 142332 - DNA, 20 bp, synthetic construct
  source 1..20: mol_type = other DNA
cttcacagtcccataagtct

SEQ ID NO: 142333 - DNA, 20 bp, synthetic construct
  source 1..20: mol_type = other DNA
gcttcacagtcccataagtc

SEQ ID NO: 142334 - DNA, 20 bp, synthetic construct
  source 1..20: mol_type = other DNA
agcttcacagtcccataagt

SEQ ID NO: 142335 - DNA, 20 bp, synthetic construct
  source 1..20: mol_type = other DNA
gagcttcacagtcccataag

SEQ ID NO: 142336 - DNA, 20 bp, synthetic construct
  source 1..20: mol_type = other DNA
tgagcttcacagtcccataa

SEQ ID NO: 142337 - DNA, 20 bp, synthetic construct
  source 1..20: mol_type = other DNA
ctgagcttcacagtcccata

SEQ ID NO: 142338 - DNA, 20 bp, synthetic construct
  source 1..20: mol_type = other DNA
cctgagcttcacagtcccat

SEQ ID NO: 142339 - DNA, 20 bp, synthetic construct
  source 1..20: mol_type = other DNA
tcctgagcttcacagtccca

SEQ ID NO: 142340 - DNA, 20 bp, synthetic construct
  source 1..20: mol_type = other DNA
ttcctgagcttcacagtccc

SEQ ID NO: 142341 - DNA, 20 bp, synthetic construct
  source 1..20: mol_type = other DNA
cttcctgagcttcacagtcc

SEQ ID NO: 142342 - DNA, 20 bp, synthetic construct
  source 1..20: mol_type = other DNA
ccttcctgagcttcacagtc

SEQ ID NO: 142343 - DNA, 20 bp, synthetic construct
  source 1..20: mol_type = other DNA
gccttcctgagcttcacagt

SEQ ID NO: 142344 - DNA, 20 bp, synthetic construct
  source 1..20: mol_type = other DNA
agccttcctgagcttcacag

SEQ ID NO: 142345 - DNA, 20 bp, synthetic construct
  source 1..20: mol_type = other DNA
aagccttcctgagcttcaca

SEQ ID NO: 142346 - DNA, 20 bp, synthetic construct
  source 1..20: mol_type = other DNA
gaagccttcctgagcttcac

SEQ ID NO: 142347 - DNA, 20 bp, synthetic construct
  source 1..20: mol_type = other DNA
tgaagccttcctgagcttca

SEQ ID NO: 142348 - DNA, 20 bp, synthetic construct
  source 1..20: mol_type = other DNA
atgaagccttcctgagcttc

SEQ ID NO: 142349 - DNA, 20 bp, synthetic construct
  source 1..20: mol_type = other DNA
gatgaagccttcctgagctt

SEQ ID NO: 142350 - DNA, 20 bp, synthetic construct
  source 1..20: mol_type = other DNA
cgatgaagccttcctgagct

SEQ ID NO: 142351 - DNA, 20 bp, synthetic construct
  source 1..20: mol_type = other DNA
acgatgaagccttcctgagc

SEQ ID NO: 142352 - DNA, 20 bp, synthetic construct
  source 1..20: mol_type = other DNA
aacgatgaagccttcctgag

SEQ ID NO: 142353 - DNA, 20 bp, synthetic construct
  source 1..20: mol_type = other DNA
aaacgatgaagccttcctga

SEQ ID NO: 142354 - DNA, 20 bp, synthetic construct
  source 1..20: mol_type = other DNA
caaacgatgaagccttcctg

SEQ ID NO: 142355 - DNA, 20 bp, synthetic construct
  source 1..20: mol_type = other DNA
acaaacgatgaagccttcct

SEQ ID NO: 142356 - DNA, 20 bp, synthetic construct
  source 1..20: mol_type = other DNA
tacaaacgatgaagccttcc

SEQ ID NO: 142357 - DNA, 20 bp, synthetic construct
  source 1..20: mol_type = other DNA
gtacaaacgatgaagccttc

SEQ ID NO: 142358 - DNA, 20 bp, synthetic construct
  source 1..20: mol_type = other DNA
tgtacaaacgatgaagcctt

SEQ ID NO: 142359 - DNA, 20 bp, synthetic construct
  source 1..20: mol_type = other DNA
atgtacaaacgatgaagcct

SEQ ID NO: 142360 - DNA, 20 bp, synthetic construct
  source 1..20: mol_type = other DNA
gatgtacaaacgatgaagcc

SEQ ID NO: 142361 - DNA, 20 bp, synthetic construct
  source 1..20: mol_type = other DNA
tgatgtacaaacgatgaagc

SEQ ID NO: 142362 - DNA, 20 bp, synthetic construct
  source 1..20: mol_type = other DNA
atgatgtacaaacgatgaag

SEQ ID NO: 142363 - DNA, 20 bp, synthetic construct
  source 1..20: mol_type = other DNA
aatgatgtacaaacgatgaa

SEQ ID NO: 142364 - DNA, 20 bp, synthetic construct
  source 1..20: mol_type = other DNA
aaatgatgtacaaacgatga

SEQ ID NO: 142365 - DNA, 20 bp, synthetic construct
  source 1..20: mol_type = other DNA
caaatgatgtacaaacgatg

SEQ ID NO: 142366 - DNA, 20 bp, synthetic construct
  source 1..20: mol_type = other DNA
acaaatgatgtacaaacgat

SEQ ID NO: 142367 - DNA, 20 bp, synthetic construct
  source 1..20: mol_type = other DNA
aacaaatgatgtacaaacga

SEQ ID NO: 142368 - DNA, 20 bp, synthetic construct
  source 1..20: mol_type = other DNA
gaacaaatgatgtacaaacg

SEQ ID NO: 142369 - DNA, 20 bp, synthetic construct
  source 1..20: mol_type = other DNA
agaacaaatgatgtacaaac

SEQ ID NO: 142370 - DNA, 20 bp, synthetic construct
  source 1..20: mol_type = other DNA
tagaacaaatgatgtacaaa

SEQ ID NO: 142371 - DNA, 20 bp, synthetic construct
  source 1..20: mol_type = other DNA
ctagaacaaatgatgtacaa

SEQ ID NO: 142372 - DNA, 20 bp, synthetic construct
  source 1..20: mol_type = other DNA
gctagaacaaatgatgtaca

SEQ ID NO: 142373 - DNA, 20 bp, synthetic construct
  source 1..20: mol_type = other DNA
agctagaacaaatgatgtac

SEQ ID NO: 142374 - DNA, 20 bp, synthetic construct
  source 1..20: mol_type = other DNA
gagctagaacaaatgatgta

SEQ ID NO: 142375 - DNA, 20 bp, synthetic construct
  source 1..20: mol_type = other DNA
ggagctagaacaaatgatgt

SEQ ID NO: 142376 - DNA, 20 bp, synthetic construct
  source 1..20: mol_type = other DNA
gggagctagaacaaatgatg

SEQ ID NO: 142377 - DNA, 20 bp, synthetic construct
  source 1..20: mol_type = other DNA
tgggagctagaacaaatgat

SEQ ID NO: 142378 - DNA, 20 bp, synthetic construct
  source 1..20: mol_type = other DNA
ctgggagctagaacaaatga

SEQ ID NO: 142379 - DNA, 20 bp, synthetic construct
  source 1..20: mol_type = other DNA
tctgggagctagaacaaatg

SEQ ID NO: 142380 - DNA, 20 bp, synthetic construct
  source 1..20: mol_type = other DNA
ttctgggagctagaacaaat

SEQ ID NO: 142381 - DNA, 20 bp, synthetic construct
  source 1..20: mol_type = other DNA
cttctgggagctagaacaaa

SEQ ID NO: 142382 - DNA, 20 bp, synthetic construct
  source 1..20: mol_type = other DNA
tcttctgggagctagaacaa

SEQ ID NO: 142383 - DNA, 20 bp, synthetic construct
  source 1..20: mol_type = other DNA
gtcttctgggagctagaaca

SEQ ID NO: 142384 - DNA, 20 bp, synthetic construct
  source 1..20: mol_type = other DNA
cgtcttctgggagctagaac

SEQ ID NO: 142385 - DNA, 20 bp, synthetic construct
  source 1..20: mol_type = other DNA
acgtcttctgggagctagaa

SEQ ID NO: 142386 - DNA, 20 bp, synthetic construct
  source 1..20: mol_type = other DNA
aacgtcttctgggagctaga

SEQ ID NO: 142387 - DNA, 20 bp, synthetic construct
  source 1..20: mol_type = other DNA
gaacgtcttctgggagctag

SEQ ID NO: 142388 - DNA, 20 bp, synthetic construct
  source 1..20: mol_type = other DNA
tgaacgtcttctgggagcta

SEQ ID NO: 142389 - DNA, 20 bp, synthetic construct
  source 1..20: mol_type = other DNA
gtgaacgtcttctgggagct

SEQ ID NO: 142390 - DNA, 20 bp, synthetic construct
  source 1..20: mol_type = other DNA
agtgaacgtcttctgggagc

SEQ ID NO: 142391 - DNA, 20 bp, synthetic construct
  source 1..20: mol_type = other DNA
tagtgaacgtcttctgggag

SEQ ID NO: 142392 - DNA, 20 bp, synthetic construct
  source 1..20: mol_type = other DNA
gtagtgaacgtcttctggga

SEQ ID NO: 142393 - DNA, 20 bp, synthetic construct
  source 1..20: mol_type = other DNA
agtagtgaacgtcttctggg

SEQ ID NO: 142394 - DNA, 20 bp, synthetic construct
  source 1..20: mol_type = other DNA
gagtagtgaacgtcttctgg

SEQ ID NO: 142395 - DNA, 20 bp, synthetic construct
  source 1..20: mol_type = other DNA
agagtagtgaacgtcttctg

SEQ ID NO: 142396 - DNA, 20 bp, synthetic construct
  source 1..20: mol_type = other DNA
aagagtagtgaacgtcttct

SEQ ID NO: 142397 - DNA, 20 bp, synthetic construct
  source 1..20: mol_type = other DNA
taagagtagtgaacgtcttc

SEQ ID NO: 142398 - DNA, 20 bp, synthetic construct
  source 1..20: mol_type = other DNA
ttaagagtagtgaacgtctt

SEQ ID NO: 142399 - DNA, 20 bp, synthetic construct
  source 1..20: mol_type = other DNA
tttaagagtagtgaacgtct

SEQ ID NO: 142400 - DNA, 20 bp, synthetic construct
  source 1..20: mol_type = other DNA
ttttaagagtagtgaacgtc

SEQ ID NO: 142401 - DNA, 20 bp, synthetic construct
  source 1..20: mol_type = other DNA
tttttaagagtagtgaacgt

SEQ ID NO: 142402 - DNA, 20 bp, synthetic construct
  source 1..20: mol_type = other DNA
gtttttaagagtagtgaacg

SEQ ID NO: 142403 - DNA, 20 bp, synthetic construct
  source 1..20: mol_type = other DNA
tgtttttaagagtagtgaac

SEQ ID NO: 142404 - DNA, 20 bp, synthetic construct
  source 1..20: mol_type = other DNA
atgtttttaagagtagtgaa

SEQ ID NO: 142405 - DNA, 20 bp, synthetic construct
  source 1..20: mol_type = other DNA
aatgtttttaagagtagtga

SEQ ID NO: 142406 - DNA, 20 bp, synthetic construct
  source 1..20: mol_type = other DNA
gaatgtttttaagagtagtg

SEQ ID NO: 142407 - DNA, 20 bp, synthetic construct
  source 1..20: mol_type = other DNA
tgaatgtttttaagagtagt

SEQ ID NO: 142408 - DNA, 20 bp, synthetic construct
  source 1..20: mol_type = other DNA
ctgaatgtttttaagagtag

SEQ ID NO: 142409 - DNA, 20 bp, synthetic construct
  source 1..20: mol_type = other DNA
tctgaatgtttttaagagta

SEQ ID NO: 142410 - DNA, 20 bp, synthetic construct
  source 1..20: mol_type = other DNA
ctctgaatgtttttaagagt

SEQ ID NO: 142411 - DNA, 20 bp, synthetic construct
  source 1..20: mol_type = other DNA
tctctgaatgtttttaagag

SEQ ID NO: 142412 - DNA, 20 bp, synthetic construct
  source 1..20: mol_type = other DNA
gtctctgaatgtttttaaga

SEQ ID NO: 142413 - DNA, 20 bp, synthetic construct
  source 1..20: mol_type = other DNA
agtctctgaatgtttttaag

SEQ ID NO: 142414 - DNA, 20 bp, synthetic construct
  source 1..20: mol_type = other DNA
tagtctctgaatgtttttaa

SEQ ID NO: 142415 - DNA, 20 bp, synthetic construct
  source 1..20: mol_type = other DNA
atagtctctgaatgttttta

SEQ ID NO: 142416 - DNA, 20 bp, synthetic construct
  source 1..20: mol_type = other DNA
catagtctctgaatgttttt

SEQ ID NO: 142417 - DNA, 20 bp, synthetic construct
  source 1..20: mol_type = other DNA
acatagtctctgaatgtttt

SEQ ID NO: 142418 - DNA, 20 bp, synthetic construct
  source 1..20: mol_type = other DNA
aacatagtctctgaatgttt

SEQ ID NO: 142419 - DNA, 20 bp, synthetic construct
  source 1..20: mol_type = other DNA
caacatagtctctgaatgtt

SEQ ID NO: 142420 - DNA, 20 bp, synthetic construct
  source 1..20: mol_type = other DNA
gcaacatagtctctgaatgt

SEQ ID NO: 142421 - DNA, 20 bp, synthetic construct
  source 1..20: mol_type = other DNA
ggcaacatagtctctgaatg

SEQ ID NO: 142422 - DNA, 20 bp, synthetic construct
  source 1..20: mol_type = other DNA
tggcaacatagtctctgaat

SEQ ID NO: 142423 - DNA, 20 bp, synthetic construct
  source 1..20: mol_type = other DNA
gtggcaacatagtctctgaa

SEQ ID NO: 142424 - DNA, 20 bp, synthetic construct
  source 1..20: mol_type = other DNA
tgtggcaacatagtctctga

SEQ ID NO: 142425 - DNA, 20 bp, synthetic construct
  source 1..20: mol_type = other DNA
ctgtggcaacatagtctctg

SEQ ID NO: 142426 - DNA, 20 bp, synthetic construct
  source 1..20: mol_type = other DNA
actgtggcaacatagtctct

SEQ ID NO: 142427 - DNA, 20 bp, synthetic construct
  source 1..20: mol_type = other DNA
aactgtggcaacatagtctc

SEQ ID NO: 142428 - DNA, 20 bp, synthetic construct
  source 1..20: mol_type = other DNA
aaactgtggcaacatagtct

SEQ ID NO: 142429 - DNA, 20 bp, synthetic construct
  source 1..20: mol_type = other DNA
aaaactgtggcaacatagtc

SEQ ID NO: 142430 - DNA, 20 bp, synthetic construct
  source 1..20: mol_type = other DNA
gaaaactgtggcaacatagt

SEQ ID NO: 142431 - DNA, 20 bp, synthetic construct
  source 1..20: mol_type = other DNA
agaaaactgtggcaacatag

SEQ ID NO: 142432 - DNA, 20 bp, synthetic construct
  source 1..20: mol_type = other DNA
aagaaaactgtggcaacata

SEQ ID NO: 142433 - DNA, 20 bp, synthetic construct
  source 1..20: mol_type = other DNA
caagaaaactgtggcaacat

SEQ ID NO: 142434 - DNA, 20 bp, synthetic construct
  source 1..20: mol_type = other DNA
acaagaaaactgtggcaaca

SEQ ID NO: 142435 - DNA, 20 bp, synthetic construct
  source 1..20: mol_type = other DNA
aacaagaaaactgtggcaac

SEQ ID NO: 142436 - DNA, 20 bp, synthetic construct
  source 1..20: mol_type = other DNA
taacaagaaaactgtggcaa

SEQ ID NO: 142437 - DNA, 20 bp, synthetic construct
  source 1..20: mol_type = other DNA
ttaacaagaaaactgtggca

SEQ ID NO: 142438 - DNA, 20 bp, synthetic construct
  source 1..20: mol_type = other DNA
tttaacaagaaaactgtggc

SEQ ID NO: 142439 - DNA, 20 bp, synthetic construct
  source 1..20: mol_type = other DNA
ttttaacaagaaaactgtgg

SEQ ID NO: 142440 - DNA, 20 bp, synthetic construct
  source 1..20: mol_type = other DNA
attttaacaagaaaactgtg

SEQ ID NO: 142441 - DNA, 20 bp, synthetic construct
  source 1..20: mol_type = other DNA
tattttaacaagaaaactgt

SEQ ID NO: 142442 - DNA, 20 bp, synthetic construct
  source 1..20: mol_type = other DNA
atattttaacaagaaaactg

SEQ ID NO: 142443 - DNA, 20 bp, synthetic construct
  source 1..20: mol_type = other DNA
aatattttaacaagaaaact

SEQ ID NO: 142444 - DNA, 20 bp, synthetic construct
  source 1..20: mol_type = other DNA
gaatattttaacaagaaaac

SEQ ID NO: 142445 - DNA, 20 bp, synthetic construct
  source 1..20: mol_type = other DNA
agaatattttaacaagaaaa

SEQ ID NO: 142446 - DNA, 20 bp, synthetic construct
  source 1..20: mol_type = other DNA
cagaatattttaacaagaaa

SEQ ID NO: 142447 - DNA, 20 bp, synthetic construct
  source 1..20: mol_type = other DNA
ccagaatattttaacaagaa

SEQ ID NO: 142448 - DNA, 20 bp, synthetic construct
  source 1..20: mol_type = other DNA
gccagaatattttaacaaga

SEQ ID NO: 142449 - DNA, 20 bp, synthetic construct
  source 1..20: mol_type = other DNA
tgccagaatattttaacaag

SEQ ID NO: 142450 - DNA, 20 bp, synthetic construct
  source 1..20: mol_type = other DNA
atgccagaatattttaacaa

SEQ ID NO: 142451 - DNA, 20 bp, synthetic construct
  source 1..20: mol_type = other DNA
tatgccagaatattttaaca

SEQ ID NO: 142452 - DNA, 20 bp, synthetic construct
  source 1..20: mol_type = other DNA
atatgccagaatattttaac

SEQ ID NO: 142453 - DNA, 20 bp, synthetic construct
  source 1..20: mol_type = other DNA
catatgccagaatattttaa

SEQ ID NO: 142454 - DNA, 20 bp, synthetic construct
  source 1..20: mol_type = other DNA
acatatgccagaatatttta

SEQ ID NO: 142455 - DNA, 20 bp, synthetic construct
  source 1..20: mol_type = other DNA
aacatatgccagaatatttt

SEQ ID NO: 142456 - DNA, 20 bp, synthetic construct
  source 1..20: mol_type = other DNA
taacatatgccagaatattt

SEQ ID NO: 142457 - DNA, 20 bp, synthetic construct
  source 1..20: mol_type = other DNA
ttaacatatgccagaatatt

SEQ ID NO: 142458 - DNA, 20 bp, synthetic construct
  source 1..20: mol_type = other DNA
attaacatatgccagaatat

SEQ ID NO: 142459 - DNA, 20 bp, synthetic construct
  source 1..20: mol_type = other DNA
aattaacatatgccagaata

SEQ ID NO: 142460 - DNA, 20 bp, synthetic construct
  source 1..20: mol_type = other DNA
gaattaacatatgccagaat

SEQ ID NO: 142461 - DNA, 20 bp, synthetic construct
  source 1..20: mol_type = other DNA
ggaattaacatatgccagaa

SEQ ID NO: 142462 - DNA, 20 bp, synthetic construct
  source 1..20: mol_type = other DNA
aggaattaacatatgccaga

SEQ ID NO: 142463 - DNA, 20 bp, synthetic construct
  source 1..20: mol_type = other DNA
taggaattaacatatgccag

SEQ ID NO: 142464 - DNA, 20 bp, synthetic construct
  source 1..20: mol_type = other DNA
gtaggaattaacatatgcca

SEQ ID NO: 142465 - DNA, 20 bp, synthetic construct
  source 1..20: mol_type = other DNA
tgtaggaattaacatatgcc

SEQ ID NO: 142466 - DNA, 20 bp, synthetic construct
  source 1..20: mol_type = other DNA
ctgtaggaattaacatatgc

SEQ ID NO: 142467 - DNA, 20 bp, synthetic construct
  source 1..20: mol_type = other DNA
actgtaggaattaacatatg

SEQ ID NO: 142468 - DNA, 20 bp, synthetic construct
  source 1..20: mol_type = other DNA
gactgtaggaattaacatat

SEQ ID NO: 142469 - DNA, 20 bp, synthetic construct
  source 1..20: mol_type = other DNA
agactgtaggaattaacata

SEQ ID NO: 142470 - DNA, 20 bp, synthetic construct
  source 1..20: mol_type = other DNA
cagactgtaggaattaacat

SEQ ID NO: 142471 - DNA, 20 bp, synthetic construct
  source 1..20: mol_type = other DNA
ccagactgtaggaattaaca

SEQ ID NO: 142472 - DNA, 20 bp, synthetic construct
  source 1..20: mol_type = other DNA
tccagactgtaggaattaac

SEQ ID NO: 142473 - DNA, 20 bp, synthetic construct
  source 1..20: mol_type = other DNA
ttccagactgtaggaattaa

SEQ ID NO: 142474 - DNA, 20 bp, synthetic construct
  source 1..20: mol_type = other DNA
tttccagactgtaggaatta

SEQ ID NO: 142475 - DNA, 20 bp, synthetic construct
  source 1..20: mol_type = other DNA
ttttccagactgtaggaatt

SEQ ID NO: 142476 - DNA, 20 bp, synthetic construct
  source 1..20: mol_type = other DNA
attttccagactgtaggaat

SEQ ID NO: 142477 - DNA, 20 bp, synthetic construct
  source 1..20: mol_type = other DNA
aattttccagactgtaggaa

SEQ ID NO: 142478 - DNA, 20 bp, synthetic construct
  source 1..20: mol_type = other DNA
aaattttccagactgtagga

SEQ ID NO: 142479 - DNA, 20 bp, synthetic construct
  source 1..20: mol_type = other DNA
aaaattttccagactgtagg

SEQ ID NO: 142480 - DNA, 20 bp, synthetic construct
  source 1..20: mol_type = other DNA
gaaaattttccagactgtag

SEQ ID NO: 142481 - DNA, 20 bp, synthetic construct
  source 1..20: mol_type = other DNA
ggaaaattttccagactgta

SEQ ID NO: 142482 - DNA, 20 bp, synthetic construct
  source 1..20: mol_type = other DNA
gggaaaattttccagactgt

SEQ ID NO: 142483 - DNA, 20 bp, synthetic construct
  source 1..20: mol_type = other DNA
tgggaaaattttccagactg

SEQ ID NO: 142484 - DNA, 20 bp, synthetic construct
  source 1..20: mol_type = other DNA
ctgggaaaattttccagact

SEQ ID NO: 142485 - DNA, 20 bp, synthetic construct
  source 1..20: mol_type = other DNA
actgggaaaattttccagac

SEQ ID NO: 142486 - DNA, 20 bp, synthetic construct
  source 1..20: mol_type = other DNA
cactgggaaaattttccaga

SEQ ID NO: 142487 - DNA, 20 bp, synthetic construct
  source 1..20: mol_type = other DNA
acactgggaaaattttccag

SEQ ID NO: 142488 - DNA, 20 bp, synthetic construct
  source 1..20: mol_type = other DNA
tacactgggaaaattttcca

SEQ ID NO: 142489 - DNA, 20 bp, synthetic construct
  source 1..20: mol_type = other DNA
atacactgggaaaattttcc

SEQ ID NO: 142490 - DNA, 20 bp, synthetic construct
  source 1..20: mol_type = other DNA
tatacactgggaaaattttc

SEQ ID NO: 142491 - DNA, 20 bp, synthetic construct
  source 1..20: mol_type = other DNA
ttatacactgggaaaatttt

SEQ ID NO: 142492 - DNA, 20 bp, synthetic construct
  source 1..20: mol_type = other DNA
tttatacactgggaaaattt

SEQ ID NO: 142493 - DNA, 20 bp, synthetic construct
  source 1..20: mol_type = other DNA
gtttatacactgggaaaatt

SEQ ID NO: 142494 - DNA, 20 bp, synthetic construct
  source 1..20: mol_type = other DNA
tgtttatacactgggaaaat

SEQ ID NO: 142495 - DNA, 20 bp, synthetic construct
  source 1..20: mol_type = other DNA
ttgtttatacactgggaaaa

SEQ ID NO: 142496 - DNA, 20 bp, synthetic construct
  source 1..20: mol_type = other DNA
tttgtttatacactgggaaa

SEQ ID NO: 142497 - DNA, 20 bp, synthetic construct
  source 1..20: mol_type = other DNA
ctttgtttatacactgggaa

SEQ ID NO: 142498 - DNA, 20 bp, synthetic construct
  source 1..20: mol_type = other DNA
gctttgtttatacactggga

SEQ ID NO: 142499 - DNA, 20 bp, synthetic construct
  source 1..20: mol_type = other DNA
agctttgtttatacactggg

SEQ ID NO: 142500 - DNA, 20 bp, synthetic construct
  source 1..20: mol_type = other DNA
cagctttgtttatacactgg

SEQ ID NO: 142501 - DNA, 20 bp, synthetic construct
  source 1..20: mol_type = other DNA
gcagctttgtttatacactg

SEQ ID NO: 142502 - DNA, 20 bp, synthetic construct
  source 1..20: mol_type = other DNA
agcagctttgtttatacact

SEQ ID NO: 142503 - DNA, 20 bp, synthetic construct
  source 1..20: mol_type = other DNA
cagcagctttgtttatacac

SEQ ID NO: 142504 - DNA, 20 bp, synthetic construct
  source 1..20: mol_type = other DNA
acagcagctttgtttataca

SEQ ID NO: 142505 - DNA, 20 bp, synthetic construct
  source 1..20: mol_type = other DNA
tacagcagctttgtttatac

SEQ ID NO: 142506 - DNA, 20 bp, synthetic construct
  source 1..20: mol_type = other DNA
atacagcagctttgtttata

SEQ ID NO: 142507 - DNA, 20 bp, synthetic construct
  source 1..20: mol_type = other DNA
gatacagcagctttgtttat

SEQ ID NO: 142508 - DNA, 20 bp, synthetic construct
  source 1..20: mol_type = other DNA
ggatacagcagctttgttta

SEQ ID NO: 142509 - DNA, 20 bp, synthetic construct
  source 1..20: mol_type = other DNA
tggatacagcagctttgttt

SEQ ID NO: 142510 - DNA, 20 bp, synthetic construct
  source 1..20: mol_type = other DNA
ctggatacagcagctttgtt

SEQ ID NO: 142511 - DNA, 20 bp, synthetic construct
  source 1..20: mol_type = other DNA
actggatacagcagctttgt

SEQ ID NO: 142512 - DNA, 20 bp, synthetic construct
  source 1..20: mol_type = other DNA
gactggatacagcagctttg

SEQ ID NO: 142513 - DNA, 20 bp, synthetic construct
  source 1..20: mol_type = other DNA
agactggatacagcagcttt

SEQ ID NO: 142514 - DNA, 20 bp, synthetic construct
  source 1..20: mol_type = other DNA
tagactggatacagcagctt

SEQ ID NO: 142515 - DNA, 20 bp, synthetic construct
  source 1..20: mol_type = other DNA
ttagactggatacagcagct

SEQ ID NO: 142516 - DNA, 20 bp, synthetic construct
  source 1..20: mol_type = other DNA
tttagactggatacagcagc

SEQ ID NO: 142517 - DNA, 20 bp, synthetic construct
  source 1..20: mol_type = other DNA
gtttagactggatacagcag

SEQ ID NO: 142518 - DNA, 20 bp, synthetic construct
  source 1..20: mol_type = other DNA
agtttagactggatacagca

SEQ ID NO: 142519 - DNA, 20 bp, synthetic construct
  source 1..20: mol_type = other DNA
cagtttagactggatacagc

SEQ ID NO: 142520 - DNA, 20 bp, synthetic construct
  source 1..20: mol_type = other DNA
ccagtttagactggatacag

SEQ ID NO: 142521 - DNA, 20 bp, synthetic construct
  source 1..20: mol_type = other DNA
tccagtttagactggataca

SEQ ID NO: 142522 - DNA, 20 bp, synthetic construct
  source 1..20: mol_type = other DNA
atccagtttagactggatac

SEQ ID NO: 142523 - DNA, 20 bp, synthetic construct
  source 1..20: mol_type = other DNA
tatccagtttagactggata

SEQ ID NO: 142524 - DNA, 20 bp, synthetic construct
  source 1..20: mol_type = other DNA
atatccagtttagactggat

SEQ ID NO: 142525 - DNA, 20 bp, synthetic construct
  source 1..20: mol_type = other DNA
catatccagtttagactgga

SEQ ID NO: 142526 - DNA, 20 bp, synthetic construct
  source 1..20: mol_type = other DNA
tcatatccagtttagactgg

SEQ ID NO: 142527 - DNA, 20 bp, synthetic construct
  source 1..20: mol_type = other DNA
ttcatatccagtttagactg

SEQ ID NO: 142528 - DNA, 20 bp, synthetic construct
  source 1..20: mol_type = other DNA
cttcatatccagtttagact

SEQ ID NO: 142529 - DNA, 20 bp, synthetic construct
  source 1..20: mol_type = other DNA
ccttcatatccagtttagac

SEQ ID NO: 142530 - DNA, 20 bp, synthetic construct
  source 1..20: mol_type = other DNA
tccttcatatccagtttaga

SEQ ID NO: 142531 - DNA, 20 bp, synthetic construct
  source 1..20: mol_type = other DNA
ttccttcatatccagtttag

SEQ ID NO: 142532 - DNA, 20 bp, synthetic construct
  source 1..20: mol_type = other DNA
attccttcatatccagttta

SEQ ID NO: 142533 - DNA, 20 bp, synthetic construct
  source 1..20: mol_type = other DNA
tattccttcatatccagttt

SEQ ID NO: 142534 - DNA, 20 bp, synthetic construct
  source 1..20: mol_type = other DNA
atattccttcatatccagtt

SEQ ID NO: 142535 - DNA, 20 bp, synthetic construct
  source 1..20: mol_type = other DNA
aatattccttcatatccagt

SEQ ID NO: 142536 - DNA, 20 bp, synthetic construct
  source 1..20: mol_type = other DNA
taatattccttcatatccag

SEQ ID NO: 142537 - DNA, 20 bp, synthetic construct
  source 1..20: mol_type = other DNA
ttaatattccttcatatcca

SEQ ID NO: 142538 - DNA, 20 bp, synthetic construct
  source 1..20: mol_type = other DNA
attaatattccttcatatcc

SEQ ID NO: 142539 - DNA, 20 bp, synthetic construct
  source 1..20: mol_type = other DNA
cattaatattccttcatatc

SEQ ID NO: 142540 - DNA, 20 bp, synthetic construct
  source 1..20: mol_type = other DNA
gcattaatattccttcatat

SEQ ID NO: 142541 - DNA, 20 bp, synthetic construct
  source 1..20: mol_type = other DNA
ggcattaatattccttcata

SEQ ID NO: 142542 - DNA, 20 bp, synthetic construct
  source 1..20: mol_type = other DNA
tggcattaatattccttcat

SEQ ID NO: 142543 - DNA, 20 bp, synthetic construct
  source 1..20: mol_type = other DNA
ctggcattaatattccttca

SEQ ID NO: 142544 - DNA, 20 bp, synthetic construct
  source 1..20: mol_type = other DNA
gctggcattaatattccttc

SEQ ID NO: 142545 - DNA, 20 bp, synthetic construct
  source 1..20: mol_type = other DNA
agctggcattaatattcctt

SEQ ID NO: 142546 - DNA, 20 bp, synthetic construct
  source 1..20: mol_type = other DNA
cagctggcattaatattcct

SEQ ID NO: 142547 - DNA, 20 bp, synthetic construct
  source 1..20: mol_type = other DNA
acagctggcattaatattcc

SEQ ID NO: 142548 - DNA, 20 bp, synthetic construct
  source 1..20: mol_type = other DNA
cacagctggcattaatattc

SEQ ID NO: 142549 - DNA, 20 bp, synthetic construct
  source 1..20: mol_type = other DNA
ccacagctggcattaatatt

SEQ ID NO: 142550 - DNA, 20 bp, synthetic construct
  source 1..20: mol_type = other DNA
gccacagctggcattaatat

SEQ ID NO: 142551 - DNA, 20 bp, synthetic construct
  source 1..20: mol_type = other DNA
tgccacagctggcattaata

SEQ ID NO: 142552 - DNA, 20 bp, synthetic construct
  source 1..20: mol_type = other DNA
atgccacagctggcattaat

SEQ ID NO: 142553 - DNA, 20 bp, synthetic construct
  source 1..20: mol_type = other DNA
aatgccacagctggcattaa

SEQ ID NO: 142554 - DNA, 20 bp, synthetic construct
  source 1..20: mol_type = other DNA
caatgccacagctggcatta

SEQ ID NO: 142555 - DNA, 20 bp, synthetic construct
  source 1..20: mol_type = other DNA
ccaatgccacagctggcatt

SEQ ID NO: 142556 - DNA, 20 bp, synthetic construct
  source 1..20: mol_type = other DNA
gccaatgccacagctggcat

SEQ ID NO: 142557 - DNA, 20 bp, synthetic construct
  source 1..20: mol_type = other DNA
tgccaatgccacagctggca

SEQ ID NO: 142558 - DNA, 20 bp, synthetic construct
  source 1..20: mol_type = other DNA
ctgccaatgccacagctggc

SEQ ID NO: 142559 - DNA, 20 bp, synthetic construct
  source 1..20: mol_type = other DNA
actgccaatgccacagctgg

SEQ ID NO: 142560 - DNA, 20 bp, synthetic construct
  source 1..20: mol_type = other DNA
cactgccaatgccacagctg

SEQ ID NO: 142561 - DNA, 20 bp, synthetic construct
  source 1..20: mol_type = other DNA
ccactgccaatgccacagct

SEQ ID NO: 142562 - DNA, 20 bp, synthetic construct
  source 1..20: mol_type = other DNA
tccactgccaatgccacagc

SEQ ID NO: 142563 - DNA, 20 bp, synthetic construct
  source 1..20: mol_type = other DNA
atccactgccaatgccacag

SEQ ID NO: 142564 - DNA, 20 bp, synthetic construct
  source 1..20: mol_type = other DNA
catccactgccaatgccaca

SEQ ID NO: 142565 - DNA, 20 bp, synthetic construct
  source 1..20: mol_type = other DNA
gcatccactgccaatgccac

SEQ ID NO: 142566 - DNA, 20 bp, synthetic construct
  source 1..20: mol_type = other DNA
tgcatccactgccaatgcca

SEQ ID NO: 142567 - DNA, 20 bp, synthetic construct
  source 1..20: mol_type = other DNA
gtgcatccactgccaatgcc

SEQ ID NO: 142568 - DNA, 20 bp, synthetic construct
  source 1..20: mol_type = other DNA
tgtgcatccactgccaatgc

SEQ ID NO: 142569 - DNA, 20 bp, synthetic construct
  source 1..20: mol_type = other DNA
ctgtgcatccactgccaatg

SEQ ID NO: 142570 - DNA, 20 bp, synthetic construct
  source 1..20: mol_type = other DNA
cctgtgcatccactgccaat

SEQ ID NO: 142571 - DNA, 20 bp, synthetic construct
  source 1..20: mol_type = other DNA
acctgtgcatccactgccaa

SEQ ID NO: 142572 - DNA, 20 bp, synthetic construct
  source 1..20: mol_type = other DNA
cacctgtgcatccactgcca

SEQ ID NO: 142573 - DNA, 20 bp, synthetic construct
  source 1..20: mol_type = other DNA
tcacctgtgcatccactgcc

SEQ ID NO: 142574 - DNA, 20 bp, synthetic construct
  source 1..20: mol_type = other DNA
atcacctgtgcatccactgc

SEQ ID NO: 142575 - DNA, 20 bp, synthetic construct
  source 1..20: mol_type = other DNA
gatcacctgtgcatccactg

SEQ ID NO: 142576 - DNA, 20 bp, synthetic construct
  source 1..20: mol_type = other DNA
ggatcacctgtgcatccact

SEQ ID NO: 142577 - DNA, 20 bp, synthetic construct
  source 1..20: mol_type = other DNA
aggatcacctgtgcatccac

SEQ ID NO: 142578 - DNA, 20 bp, synthetic construct
  source 1..20: mol_type = other DNA
taggatcacctgtgcatcca

SEQ ID NO: 142579 - DNA, 20 bp, synthetic construct
  source 1..20: mol_type = other DNA
ctaggatcacctgtgcatcc

SEQ ID NO: 142580 - DNA, 20 bp, synthetic construct
  source 1..20: mol_type = other DNA
tctaggatcacctgtgcatc

SEQ ID NO: 142581 - DNA, 20 bp, synthetic construct
  source 1..20: mol_type = other DNA
ttctaggatcacctgtgcat

SEQ ID NO: 142582 - DNA, 20 bp, synthetic construct
  source 1..20: mol_type = other DNA
gttctaggatcacctgtgca

SEQ ID NO: 142583 - DNA, 20 bp, synthetic construct
  source 1..20: mol_type = other DNA
agttctaggatcacctgtgc

SEQ ID NO: 142584 - DNA, 20 bp, synthetic construct
  source 1..20: mol_type = other DNA
cagttctaggatcacctgtg

SEQ ID NO: 142585 - DNA, 20 bp, synthetic construct
  source 1..20: mol_type = other DNA
ccagttctaggatcacctgt

SEQ ID NO: 142586 - DNA, 20 bp, synthetic construct
  source 1..20: mol_type = other DNA
gccagttctaggatcacctg

SEQ ID NO: 142587 - DNA, 20 bp, synthetic construct
  source 1..20: mol_type = other DNA
agccagttctaggatcacct

SEQ ID NO: 142588 - DNA, 20 bp, synthetic construct
  source 1..20: mol_type = other DNA
gagccagttctaggatcacc

SEQ ID NO: 142589 - DNA, 20 bp, synthetic construct
  source 1..20: mol_type = other DNA
agagccagttctaggatcac

SEQ ID NO: 142590 - DNA, 20 bp, synthetic construct
  source 1..20: mol_type = other DNA
aagagccagttctaggatca

SEQ ID NO: 142591 - DNA, 20 bp, synthetic construct
  source 1..20: mol_type = other DNA
aaagagccagttctaggatc

SEQ ID NO: 142592 - DNA, 20 bp, synthetic construct
  source 1..20: mol_type = other DNA
caaagagccagttctaggat

SEQ ID NO: 142593 - DNA, 20 bp, synthetic construct
  source 1..20: mol_type = other DNA
gcaaagagccagttctagga

SEQ ID NO: 142594 - DNA, 20 bp, synthetic construct
  source 1..20: mol_type = other DNA
ggcaaagagccagttctagg

SEQ ID NO: 142595 - DNA, 20 bp, synthetic construct
  source 1..20: mol_type = other DNA
aggcaaagagccagttctag

SEQ ID NO: 142596 - DNA, 20 bp, synthetic construct
  source 1..20: mol_type = other DNA
aaggcaaagagccagttcta

SEQ ID NO: 142597 - DNA, 20 bp, synthetic construct
  source 1..20: mol_type = other DNA
caaggcaaagagccagttct

SEQ ID NO: 142598 - DNA, 20 bp, synthetic construct
  source 1..20: mol_type = other DNA
gcaaggcaaagagccagttc

SEQ ID NO: 142599 - DNA, 20 bp, synthetic construct
  source 1..20: mol_type = other DNA
ggcaaggcaaagagccagtt

SEQ ID NO: 142600 - DNA, 20 bp, synthetic construct
  source 1..20: mol_type = other DNA
gggcaaggcaaagagccagt

SEQ ID NO: 142601 - DNA, 20 bp, synthetic construct
  source 1..20: mol_type = other DNA
agggcaaggcaaagagccag

SEQ ID NO: 142602 - DNA, 20 bp, synthetic construct
  source 1..20: mol_type = other DNA
aagggcaaggcaaagagcca

SEQ ID NO: 142603 - DNA, 20 bp, synthetic construct
  source 1..20: mol_type = other DNA
aaagggcaaggcaaagagcc

SEQ ID NO: 142604 - DNA, 20 bp, synthetic construct
  source 1..20: mol_type = other DNA
gaaagggcaaggcaaagagc

SEQ ID NO: 142605 - DNA, 20 bp, synthetic construct
  source 1..20: mol_type = other DNA
ggaaagggcaaggcaaagag

SEQ ID NO: 142606 - DNA, 20 bp, synthetic construct
  source 1..20: mol_type = other DNA
gggaaagggcaaggcaaaga

SEQ ID NO: 142607 - DNA, 20 bp, synthetic construct
  source 1..20: mol_type = other DNA
ggggaaagggcaaggcaaag

SEQ ID NO: 142608 - DNA, 20 bp, synthetic construct
  source 1..20: mol_type = other DNA
aggggaaagggcaaggcaaa

SEQ ID NO: 142609 - DNA, 20 bp, synthetic construct
  source 1..20: mol_type = other DNA
caggggaaagggcaaggcaa

SEQ ID NO: 142610 - DNA, 20 bp, synthetic construct
  source 1..20: mol_type = other DNA
gcaggggaaagggcaaggca

SEQ ID NO: 142611 - DNA, 20 bp, synthetic construct
  source 1..20: mol_type = other DNA
agcaggggaaagggcaaggc

SEQ ID NO: 142612 - DNA, 20 bp, synthetic construct
  source 1..20: mol_type = other DNA
tagcaggggaaagggcaagg

SEQ ID NO: 142613 - DNA, 20 bp, synthetic construct
  source 1..20: mol_type = other DNA
ttagcaggggaaagggcaag

SEQ ID NO: 142614 - DNA, 20 bp, synthetic construct
  source 1..20: mol_type = other DNA
cttagcaggggaaagggcaa

SEQ ID NO: 142615 - DNA, 20 bp, synthetic construct
  source 1..20: mol_type = other DNA
tcttagcaggggaaagggca

SEQ ID NO: 142616 - DNA, 20 bp, synthetic construct
  source 1..20: mol_type = other DNA
ctcttagcaggggaaagggc

SEQ ID NO: 142617 - DNA, 20 bp, synthetic construct
  source 1..20: mol_type = other DNA
tctcttagcaggggaaaggg

SEQ ID NO: 142618 - DNA, 20 bp, synthetic construct
  source 1..20: mol_type = other DNA
atctcttagcaggggaaagg

SEQ ID NO: 142619 - DNA, 20 bp, synthetic construct
  source 1..20: mol_type = other DNA
tatctcttagcaggggaaag

SEQ ID NO: 142620 - DNA, 20 bp, synthetic construct
  source 1..20: mol_type = other DNA
ctatctcttagcaggggaaa

SEQ ID NO: 142621 - DNA, 20 bp, synthetic construct
  source 1..20: mol_type = other DNA
gctatctcttagcaggggaa

SEQ ID NO: 142622 - DNA, 20 bp, synthetic construct
  source 1..20: mol_type = other DNA
agctatctcttagcagggga

SEQ ID NO: 142623 - DNA, 20 bp, synthetic construct
  source 1..20: mol_type = other DNA
aagctatctcttagcagggg

SEQ ID NO: 142624 - DNA, 20 bp, synthetic construct
  source 1..20: mol_type = other DNA
aaagctatctcttagcaggg

SEQ ID NO: 142625 - DNA, 20 bp, synthetic construct
  source 1..20: mol_type = other DNA
caaagctatctcttagcagg

SEQ ID NO: 142626 - DNA, 20 bp, synthetic construct
  source 1..20: mol_type = other DNA
gcaaagctatctcttagcag

SEQ ID NO: 142627 - DNA, 20 bp, synthetic construct
  source 1..20: mol_type = other DNA
tgcaaagctatctcttagca

SEQ ID NO: 142628 - DNA, 20 bp, synthetic construct
  source 1..20: mol_type = other DNA
ctgcaaagctatctcttagc

SEQ ID NO: 142629 - DNA, 20 bp, synthetic construct
  source 1..20: mol_type = other DNA
gctgcaaagctatctcttag

SEQ ID NO: 142630 - DNA, 20 bp, synthetic construct
  source 1..20: mol_type = other DNA
agctgcaaagctatctctta

SEQ ID NO: 142631 - DNA, 20 bp, synthetic construct
  source 1..20: mol_type = other DNA
cagctgcaaagctatctctt

SEQ ID NO: 142632 - DNA, 20 bp, synthetic construct
  source 1..20: mol_type = other DNA
ccagctgcaaagctatctct

SEQ ID NO: 142633 - DNA, 20 bp, synthetic construct
  source 1..20: mol_type = other DNA
tccagctgcaaagctatctc

SEQ ID NO: 142634 - DNA, 20 bp, synthetic construct
  source 1..20: mol_type = other DNA
ctccagctgcaaagctatct

SEQ ID NO: 142635 - DNA, 20 bp, synthetic construct
  source 1..20: mol_type = other DNA
tctccagctgcaaagctatc

SEQ ID NO: 142636 - DNA, 20 bp, synthetic construct
  source 1..20: mol_type = other DNA
gtctccagctgcaaagctat

SEQ ID NO: 142637 - DNA, 20 bp, synthetic construct
  source 1..20: mol_type = other DNA
cgtctccagctgcaaagcta

SEQ ID NO: 142638 - DNA, 20 bp, synthetic construct
  source 1..20: mol_type = other DNA
acgtctccagctgcaaagct

SEQ ID NO: 142639 - DNA, 20 bp, synthetic construct
  source 1..20: mol_type = other DNA
tacgtctccagctgcaaagc

SEQ ID NO: 142640 - DNA, 20 bp, synthetic construct
  source 1..20: mol_type = other DNA
ttacgtctccagctgcaaag

SEQ ID NO: 142641 - DNA, 20 bp, synthetic construct
  source 1..20: mol_type = other DNA
gttacgtctccagctgcaaa

SEQ ID NO: 142642 - DNA, 20 bp, synthetic construct
  source 1..20: mol_type = other DNA
agttacgtctccagctgcaa

SEQ ID NO: 142643 - DNA, 20 bp, synthetic construct
  source 1..20: mol_type = other DNA
cagttacgtctccagctgca

SEQ ID NO: 142644 - DNA, 20 bp, synthetic construct
  source 1..20: mol_type = other DNA
acagttacgtctccagctgc

SEQ ID NO: 142645 - DNA, 20 bp, synthetic construct
  source 1..20: mol_type = other DNA
aacagttacgtctccagctg

SEQ ID NO: 142646 - DNA, 20 bp, synthetic construct
  source 1..20: mol_type = other DNA
taacagttacgtctccagct

SEQ ID NO: 142647 - DNA, 20 bp, synthetic construct
  source 1..20: mol_type = other DNA
ctaacagttacgtctccagc

SEQ ID NO: 142648 - DNA, 20 bp, synthetic construct
  source 1..20: mol_type = other DNA
cctaacagttacgtctccag

SEQ ID NO: 142649 - DNA, 20 bp, synthetic construct
  source 1..20: mol_type = other DNA
ccctaacagttacgtctcca

SEQ ID NO: 142650 - DNA, 20 bp, synthetic construct
  source 1..20: mol_type = other DNA
gccctaacagttacgtctcc

SEQ ID NO: 142651 - DNA, 20 bp, synthetic construct
  source 1..20: mol_type = other DNA
agccctaacagttacgtctc

SEQ ID NO: 142652 - DNA, 20 bp, synthetic construct
  source 1..20: mol_type = other DNA
cagccctaacagttacgtct

SEQ ID NO: 142653 - DNA, 20 bp, synthetic construct
  source 1..20: mol_type = other DNA
ccagccctaacagttacgtc

SEQ ID NO: 142654 - DNA, 20 bp, synthetic construct
  source 1..20: mol_type = other DNA
tccagccctaacagttacgt

SEQ ID NO: 142655 - DNA, 20 bp, synthetic construct
  source 1..20: mol_type = other DNA
ctccagccctaacagttacg

SEQ ID NO: 142656 - DNA, 20 bp, synthetic construct
  source 1..20: mol_type = other DNA
tctccagccctaacagttac

SEQ ID NO: 142657 - DNA, 20 bp, synthetic construct
  source 1..20: mol_type = other DNA
ctctccagccctaacagtta

SEQ ID NO: 142658 - DNA, 20 bp, synthetic construct
  source 1..20: mol_type = other DNA
actctccagccctaacagtt

SEQ ID NO: 142659 - DNA, 20 bp, synthetic construct
  source 1..20: mol_type = other DNA
aactctccagccctaacagt

SEQ ID NO: 142660 - DNA, 20 bp, synthetic construct
  source 1..20: mol_type = other DNA
caactctccagccctaacag

SEQ ID NO: 142661 - DNA, 20 bp, synthetic construct
  source 1..20: mol_type = other DNA
ccaactctccagccctaaca

SEQ ID NO: 142662 - DNA, 20 bp, synthetic construct
  source 1..20: mol_type = other DNA
accaactctccagccctaac

SEQ ID NO: 142663 - DNA, 20 bp, synthetic construct
  source 1..20: mol_type = other DNA
caccaactctccagccctaa

SEQ ID NO: 142664 - DNA, 20 bp, synthetic construct
  source 1..20: mol_type = other DNA
ccaccaactctccagcccta

SEQ ID NO: 142665 - DNA, 20 bp, synthetic construct
  source 1..20: mol_type = other DNA
gccaccaactctccagccct

SEQ ID NO: 142666 - DNA, 20 bp, synthetic construct
  source 1..20: mol_type = other DNA
ggccaccaactctccagccc

SEQ ID NO: 142667 - DNA, 20 bp, synthetic construct
  source 1..20: mol_type = other DNA
gggccaccaactctccagcc

SEQ ID NO: 142668 - DNA, 20 bp, synthetic construct
  source 1..20: mol_type = other DNA
agggccaccaactctccagc

SEQ ID NO: 142669 - DNA, 20 bp, synthetic construct
  source 1..20: mol_type = other DNA
aagggccaccaactctccag

SEQ ID NO: 142670 - DNA, 20 bp, synthetic construct
  source 1..20: mol_type = other DNA
taagggccaccaactctcca

SEQ ID NO: 142671 - DNA, 20 bp, synthetic construct
  source 1..20: mol_type = other DNA
ctaagggccaccaactctcc

SEQ ID NO: 142672 - DNA, 20 bp, synthetic construct
  source 1..20: mol_type = other DNA
gctaagggccaccaactctc

SEQ ID NO: 142673 - DNA, 20 bp, synthetic construct
  source 1..20: mol_type = other DNA
ggctaagggccaccaactct

SEQ ID NO: 142674 - DNA, 20 bp, synthetic construct
  source 1..20: mol_type = other DNA
gggctaagggccaccaactc

SEQ ID NO: 142675 - DNA, 20 bp, synthetic construct
  source 1..20: mol_type = other DNA
agggctaagggccaccaact

SEQ ID NO: 142676 - DNA, 20 bp, synthetic construct
  source 1..20: mol_type = other DNA
tagggctaagggccaccaac

SEQ ID NO: 142677 - DNA, 20 bp, synthetic construct
  source 1..20: mol_type = other DNA
gtagggctaagggccaccaa

SEQ ID NO: 142678 - DNA, 20 bp, synthetic construct
  source 1..20: mol_type = other DNA
tgtagggctaagggccacca

SEQ ID NO: 142679 - DNA, 20 bp, synthetic construct
  source 1..20: mol_type = other DNA
ttgtagggctaagggccacc

SEQ ID NO: 142680 - DNA, 20 bp, synthetic construct
  source 1..20: mol_type = other DNA
gttgtagggctaagggccac

SEQ ID NO: 142681 - DNA, 20 bp, synthetic construct
  source 1..20: mol_type = other DNA
tgttgtagggctaagggcca

SEQ ID NO: 142682 - DNA, 20 bp, synthetic construct
  source 1..20: mol_type = other DNA
gtgttgtagggctaagggcc

SEQ ID NO: 142683 - DNA, 20 bp, synthetic construct
  source 1..20: mol_type = other DNA
ggtgttgtagggctaagggc

SEQ ID NO: 142684 - DNA, 20 bp, synthetic construct
  source 1..20: mol_type = other DNA
aggtgttgtagggctaaggg

SEQ ID NO: 142685 - DNA, 20 bp, synthetic construct
  source 1..20: mol_type = other DNA
taggtgttgtagggctaagg

SEQ ID NO: 142686 - DNA, 20 bp, synthetic construct
  source 1..20: mol_type = other DNA
ctaggtgttgtagggctaag

SEQ ID NO: 142687 - DNA, 20 bp, synthetic construct
  source 1..20: mol_type = other DNA
cctaggtgttgtagggctaa

SEQ ID NO: 142688 - DNA, 20 bp, synthetic construct
  source 1..20: mol_type = other DNA
tcctaggtgttgtagggcta

SEQ ID NO: 142689 - DNA, 20 bp, synthetic construct
  source 1..20: mol_type = other DNA
atcctaggtgttgtagggct

SEQ ID NO: 142690 - DNA, 20 bp, synthetic construct
  source 1..20: mol_type = other DNA
aatcctaggtgttgtagggc

SEQ ID NO: 142691 - DNA, 20 bp, synthetic construct
  source 1..20: mol_type = other DNA
taatcctaggtgttgtaggg

SEQ ID NO: 142692 - DNA, 20 bp, synthetic construct
  source 1..20: mol_type = other DNA
ataatcctaggtgttgtagg

SEQ ID NO: 142693 - DNA, 20 bp, synthetic construct
  source 1..20: mol_type = other DNA
tataatcctaggtgttgtag

SEQ ID NO: 142694 - DNA, 20 bp, synthetic construct
  source 1..20: mol_type = other DNA
ctataatcctaggtgttgta

SEQ ID NO: 142695 - DNA, 20 bp, synthetic construct
  source 1..20: mol_type = other DNA
tctataatcctaggtgttgt

SEQ ID NO: 142696 - DNA, 20 bp, synthetic construct
  source 1..20: mol_type = other DNA
ttctataatcctaggtgttg

SEQ ID NO: 142697 - DNA, 20 bp, synthetic construct
  source 1..20: mol_type = other DNA
gttctataatcctaggtgtt

SEQ ID NO: 142698 - DNA, 20 bp, synthetic construct
  source 1..20: mol_type = other DNA
agttctataatcctaggtgt

SEQ ID NO: 142699 - DNA, 20 bp, synthetic construct
  source 1..20: mol_type = other DNA
cagttctataatcctaggtg

SEQ ID NO: 142700 - DNA, 20 bp, synthetic construct
  source 1..20: mol_type = other DNA
gcagttctataatcctaggt

SEQ ID NO: 142701 - DNA, 20 bp, synthetic construct
  source 1..20: mol_type = other DNA
agcagttctataatcctagg

SEQ ID NO: 142702 - DNA, 20 bp, synthetic construct
  source 1..20: mol_type = other DNA
gagcagttctataatcctag

SEQ ID NO: 142703 - DNA, 20 bp, synthetic construct
  source 1..20: mol_type = other DNA
ggagcagttctataatccta

SEQ ID NO: 142704 - DNA, 20 bp, synthetic construct
  source 1..20: mol_type = other DNA
tggagcagttctataatcct

SEQ ID NO: 142705 - DNA, 20 bp, synthetic construct
  source 1..20: mol_type = other DNA
atggagcagttctataatcc

SEQ ID NO: 142706 - DNA, 20 bp, synthetic construct
  source 1..20: mol_type = other DNA
catggagcagttctataatc

SEQ ID NO: 142707 - DNA, 20 bp, synthetic construct
  source 1..20: mol_type = other DNA
acatggagcagttctataat

SEQ ID NO: 142708 - DNA, 20 bp, synthetic construct
  source 1..20: mol_type = other DNA
cacatggagcagttctataa

SEQ ID NO: 142709 - DNA, 20 bp, synthetic construct
  source 1..20: mol_type = other DNA
gcacatggagcagttctata

SEQ ID NO: 142710 - DNA, 20 bp, synthetic construct
  source 1..20: mol_type = other DNA
ggcacatggagcagttctat

SEQ ID NO: 142711 - DNA, 20 bp, synthetic construct
  source 1..20: mol_type = other DNA
aggcacatggagcagttcta

SEQ ID NO: 142712 - DNA, 20 bp, synthetic construct
  source 1..20: mol_type = other DNA
taggcacatggagcagttct

SEQ ID NO: 142713 - DNA, 20 bp, synthetic construct
  source 1..20: mol_type = other DNA
ctaggcacatggagcagttc

SEQ ID NO: 142714 - DNA, 20 bp, synthetic construct
  source 1..20: mol_type = other DNA
gctaggcacatggagcagtt

SEQ ID NO: 142715 - DNA, 20 bp, synthetic construct
  source 1..20: mol_type = other DNA
ggctaggcacatggagcagt

SEQ ID NO: 142716 - DNA, 20 bp, synthetic construct
  source 1..20: mol_type = other DNA
aggctaggcacatggagcag

SEQ ID NO: 142717 - DNA, 20 bp, synthetic construct
  source 1..20: mol_type = other DNA
taggctaggcacatggagca

SEQ ID NO: 142718 - DNA, 20 bp, synthetic construct
  source 1..20: mol_type = other DNA
ttaggctaggcacatggagc

SEQ ID NO: 142719 - DNA, 20 bp, synthetic construct
  source 1..20: mol_type = other DNA
gttaggctaggcacatggag

SEQ ID NO: 142720 - DNA, 20 bp, synthetic construct
  source 1..20: mol_type = other DNA
ggttaggctaggcacatgga

SEQ ID NO: 142721 - DNA, 20 bp, synthetic construct
  source 1..20: mol_type = other DNA
gggttaggctaggcacatgg

SEQ ID NO: 142722 - DNA, 20 bp, synthetic construct
  source 1..20: mol_type = other DNA
agggttaggctaggcacatg

SEQ ID NO: 142723 - DNA, 20 bp, synthetic construct
  source 1..20: mol_type = other DNA
gagggttaggctaggcacat

SEQ ID NO: 142724 - DNA, 20 bp, synthetic construct
  source 1..20: mol_type = other DNA
agagggttaggctaggcaca

SEQ ID NO: 142725 - DNA, 20 bp, synthetic construct
  source 1..20: mol_type = other DNA
cagagggttaggctaggcac

SEQ ID NO: 142726 - DNA, 20 bp, synthetic construct
  source 1..20: mol_type = other DNA
gcagagggttaggctaggca

SEQ ID NO: 142727 - DNA, 20 bp, synthetic construct
  source 1..20: mol_type = other DNA
tgcagagggttaggctaggc

SEQ ID NO: 142728 - DNA, 20 bp, synthetic construct
  source 1..20: mol_type = other DNA
gtgcagagggttaggctagg

SEQ ID NO: 142729 - DNA, 20 bp, synthetic construct
  source 1..20: mol_type = other DNA
tgtgcagagggttaggctag

SEQ ID NO: 142730 - DNA, 20 bp, synthetic construct
  source 1..20: mol_type = other DNA
gtgtgcagagggttaggcta

SEQ ID NO: 142731 - DNA, 20 bp, synthetic construct
  source 1..20: mol_type = other DNA
ggtgtgcagagggttaggct

SEQ ID NO: 142732 - DNA, 20 bp, synthetic construct
  source 1..20: mol_type = other DNA
tggtgtgcagagggttaggc

SEQ ID NO: 142733 - DNA, 20 bp, synthetic construct
  source 1..20: mol_type = other DNA
atggtgtgcagagggttagg

SEQ ID NO: 142734 - DNA, 20 bp, synthetic construct
  source 1..20: mol_type = other DNA
aatggtgtgcagagggttag

SEQ ID NO: 142735 - DNA, 20 bp, synthetic construct
  source 1..20: mol_type = other DNA
aaatggtgtgcagagggtta

SEQ ID NO: 142736 - DNA, 20 bp, synthetic construct
  source 1..20: mol_type = other DNA
taaatggtgtgcagagggtt

SEQ ID NO: 142737 - DNA, 20 bp, synthetic construct
  source 1..20: mol_type = other DNA
gtaaatggtgtgcagagggt

SEQ ID NO: 142738 - DNA, 20 bp, synthetic construct
  source 1..20: mol_type = other DNA
cgtaaatggtgtgcagaggg

SEQ ID NO: 142739 - DNA, 20 bp, synthetic construct
  source 1..20: mol_type = other DNA
acgtaaatggtgtgcagagg

SEQ ID NO: 142740 - DNA, 20 bp, synthetic construct
  source 1..20: mol_type = other DNA
cacgtaaatggtgtgcagag

SEQ ID NO: 142741 - DNA, 20 bp, synthetic construct
  source 1..20: mol_type = other DNA
ccacgtaaatggtgtgcaga

SEQ ID NO: 142742 - DNA, 20 bp, synthetic construct
  source 1..20: mol_type = other DNA
tccacgtaaatggtgtgcag

SEQ ID NO: 142743 - DNA, 20 bp, synthetic construct
  source 1..20: mol_type = other DNA
ttccacgtaaatggtgtgca

SEQ ID NO: 142744 - DNA, 20 bp, synthetic construct
  source 1..20: mol_type = other DNA
attccacgtaaatggtgtgc

SEQ ID NO: 142745 - DNA, 20 bp, synthetic construct
  source 1..20: mol_type = other DNA
tattccacgtaaatggtgtg

SEQ ID NO: 142746 - DNA, 20 bp, synthetic construct
  source 1..20: mol_type = other DNA
atattccacgtaaatggtgt

SEQ ID NO: 142747 - DNA, 20 bp, synthetic construct
  source 1..20: mol_type = other DNA
tatattccacgtaaatggtg

SEQ ID NO: 142748 - DNA, 20 bp, synthetic construct
  source 1..20: mol_type = other DNA
gtatattccacgtaaatggt

SEQ ID NO: 142749 - DNA, 20 bp, synthetic construct
  source 1..20: mol_type = other DNA
ggtatattccacgtaaatgg

SEQ ID NO: 142750 - DNA, 20 bp, synthetic construct
  source 1..20: mol_type = other DNA
gggtatattccacgtaaatg

SEQ ID NO: 142751 - DNA, 20 bp, synthetic construct
  source 1..20: mol_type = other DNA
tgggtatattccacgtaaat

SEQ ID NO: 142752 - DNA, 20 bp, synthetic construct
  source 1..20: mol_type = other DNA
ctgggtatattccacgtaaa

SEQ ID NO: 142753 - DNA, 20 bp, synthetic construct
  source 1..20: mol_type = other DNA
tctgggtatattccacgtaa

SEQ ID NO: 142754 - DNA, 20 bp, synthetic construct
  source 1..20: mol_type = other DNA
ctctgggtatattccacgta

SEQ ID NO: 142755 - DNA, 20 bp, synthetic construct
  source 1..20: mol_type = other DNA
gctctgggtatattccacgt

SEQ ID NO: 142756 - DNA, 20 bp, synthetic construct
  source 1..20: mol_type = other DNA
ggctctgggtatattccacg

SEQ ID NO: 142757 - DNA, 20 bp, synthetic construct
  source 1..20: mol_type = other DNA
cggctctgggtatattccac

SEQ ID NO: 142758 - DNA, 20 bp, synthetic construct
  source 1..20: mol_type = other DNA
acggctctgggtatattcca

SEQ ID NO: 142759 - DNA, 20 bp, synthetic construct
  source 1..20: mol_type = other DNA
gacggctctgggtatattcc

SEQ ID NO: 142760 - DNA, 20 bp, synthetic construct
  source 1..20: mol_type = other DNA
agacggctctgggtatattc

SEQ ID NO: 142761 - DNA, 20 bp, synthetic construct
  source 1..20: mol_type = other DNA
tagacggctctgggtatatt

SEQ ID NO: 142762 - DNA, 20 bp, synthetic construct
  source 1..20: mol_type = other DNA
atagacggctctgggtatat

SEQ ID NO: 142763 - DNA, 20 bp, synthetic construct
  source 1..20: mol_type = other DNA
catagacggctctgggtata

SEQ ID NO: 142764 - DNA, 20 bp, synthetic construct
  source 1..20: mol_type = other DNA
gcatagacggctctgggtat

SEQ ID NO: 142765 - DNA, 20 bp, synthetic construct
  source 1..20: mol_type = other DNA
agcatagacggctctgggta

SEQ ID NO: 142766 - DNA, 20 bp, synthetic construct
  source 1..20: mol_type = other DNA
cagcatagacggctctgggt

SEQ ID NO: 142767 - DNA, 20 bp, synthetic construct
  source 1..20: mol_type = other DNA
ccagcatagacggctctggg

SEQ ID NO: 142768 - DNA, 20 bp, synthetic construct
  source 1..20: mol_type = other DNA
accagcatagacggctctgg

SEQ ID NO: 142769 - DNA, 20 bp, synthetic construct
  source 1..20: mol_type = other DNA
caccagcatagacggctctg

SEQ ID NO: 142770 - DNA, 20 bp, synthetic construct
  source 1..20: mol_type = other DNA
tcaccagcatagacggctct

SEQ ID NO: 142771 - DNA, 20 bp, synthetic construct
  source 1..20: mol_type = other DNA
gtcaccagcatagacggctc

SEQ ID NO: 142772 - DNA, 20 bp, synthetic construct
  source 1..20: mol_type = other DNA
agtcaccagcatagacggct

SEQ ID NO: 142773 - DNA, 20 bp, synthetic construct
  source 1..20: mol_type = other DNA
gagtcaccagcatagacggc

SEQ ID NO: 142774 - DNA, 20 bp, synthetic construct
  source 1..20: mol_type = other DNA
cgagtcaccagcatagacgg

SEQ ID NO: 142775 - DNA, 20 bp, synthetic construct
  source 1..20: mol_type = other DNA
ccgagtcaccagcatagacg

SEQ ID NO: 142776 - DNA, 20 bp, synthetic construct
  source 1..20: mol_type = other DNA
gccgagtcaccagcatagac

SEQ ID NO: 142777 - DNA, 20 bp, synthetic construct
  source 1..20: mol_type = other DNA
tgccgagtcaccagcataga

SEQ ID NO: 142778 - DNA, 20 bp, synthetic construct
  source 1..20: mol_type = other DNA
ctgccgagtcaccagcatag

SEQ ID NO: 142779 - DNA, 20 bp, synthetic construct
  source 1..20: mol_type = other DNA
gctgccgagtcaccagcata

SEQ ID NO: 142780 - DNA, 20 bp, synthetic construct
  source 1..20: mol_type = other DNA
ggctgccgagtcaccagcat

SEQ ID NO: 142781 - DNA, 20 bp, synthetic construct
  source 1..20: mol_type = other DNA
aggctgccgagtcaccagca

SEQ ID NO: 142782 - DNA, 20 bp, synthetic construct
  source 1..20: mol_type = other DNA
aaggctgccgagtcaccagc

SEQ ID NO: 142783 - DNA, 20 bp, synthetic construct
  source 1..20: mol_type = other DNA
caaggctgccgagtcaccag

SEQ ID NO: 142784 - DNA, 20 bp, synthetic construct
  source 1..20: mol_type = other DNA
gcaaggctgccgagtcacca

SEQ ID NO: 142785 - DNA, 20 bp, synthetic construct
  source 1..20: mol_type = other DNA
ggcaaggctgccgagtcacc

SEQ ID NO: 142786 - DNA, 20 bp, synthetic construct
  source 1..20: mol_type = other DNA
aggcaaggctgccgagtcac

SEQ ID NO: 142787 - DNA, 20 bp, synthetic construct
  source 1..20: mol_type = other DNA
taggcaaggctgccgagtca

SEQ ID NO: 142788 - DNA, 20 bp, synthetic construct
  source 1..20: mol_type = other DNA
gtaggcaaggctgccgagtc

SEQ ID NO: 142789 - DNA, 20 bp, synthetic construct
  source 1..20: mol_type = other DNA
ggtaggcaaggctgccgagt

SEQ ID NO: 142790 - DNA, 20 bp, synthetic construct
  source 1..20: mol_type = other DNA
tggtaggcaaggctgccgag

SEQ ID NO: 142791 - DNA, 20 bp, synthetic construct
  source 1..20: mol_type = other DNA
ctggtaggcaaggctgccga

SEQ ID NO: 142792 - DNA, 20 bp, synthetic construct
  source 1..20: mol_type = other DNA
tctggtaggcaaggctgccg

SEQ ID NO: 142793 - DNA, 20 bp, synthetic construct
  source 1..20: mol_type = other DNA
gtctggtaggcaaggctgcc

SEQ ID NO: 142794 - DNA, 20 bp, synthetic construct
  source 1..20: mol_type = other DNA
agtctggtaggcaaggctgc

SEQ ID NO: 142795 - DNA, 20 bp, synthetic construct
  source 1..20: mol_type = other DNA
cagtctggtaggcaaggctg

SEQ ID NO: 142796 - DNA, 20 bp, synthetic construct
  source 1..20: mol_type = other DNA
gcagtctggtaggcaaggct

SEQ ID NO: 142797 - DNA, 20 bp, synthetic construct
  source 1..20: mol_type = other DNA
agcagtctggtaggcaaggc

SEQ ID NO: 142798 - DNA, 20 bp, synthetic construct
  source 1..20: mol_type = other DNA
cagcagtctggtaggcaagg

SEQ ID NO: 142799 - DNA, 20 bp, synthetic construct
  source 1..20: mol_type = other DNA
ccagcagtctggtaggcaag

SEQ ID NO: 142800 - DNA, 20 bp, synthetic construct
  source 1..20: mol_type = other DNA
tccagcagtctggtaggcaa

SEQ ID NO: 142801 - DNA, 20 bp, synthetic construct
  source 1..20: mol_type = other DNA
ttccagcagtctggtaggca

SEQ ID NO: 142802 - DNA, 20 bp, synthetic construct
  source 1..20: mol_type = other DNA
gttccagcagtctggtaggc

SEQ ID NO: 142803 - DNA, 20 bp, synthetic construct
  source 1..20: mol_type = other DNA
agttccagcagtctggtagg

SEQ ID NO: 142804 - DNA, 20 bp, synthetic construct
  source 1..20: mol_type = other DNA
tagttccagcagtctggtag

SEQ ID NO: 142805 - DNA, 20 bp, synthetic construct
  source 1..20: mol_type = other DNA
ctagttccagcagtctggta

SEQ ID NO: 142806 - DNA, 20 bp, synthetic construct
  source 1..20: mol_type = other DNA
cctagttccagcagtctggt

SEQ ID NO: 142807 - DNA, 20 bp, synthetic construct
  source 1..20: mol_type = other DNA
ccctagttccagcagtctgg

SEQ ID NO: 142808 - DNA, 20 bp, synthetic construct
  source 1..20: mol_type = other DNA
accctagttccagcagtctg

SEQ ID NO: 142809 - DNA, 20 bp, synthetic construct
  source 1..20: mol_type = other DNA
caccctagttccagcagtct

SEQ ID NO: 142810 - DNA, 20 bp, synthetic construct
  source 1..20: mol_type = other DNA
gcaccctagttccagcagtc

SEQ ID NO: 142811 - DNA, 20 bp, synthetic construct
  source 1..20: mol_type = other DNA
ggcaccctagttccagcagt

SEQ ID NO: 142812 - DNA, 20 bp, synthetic construct
  source 1..20: mol_type = other DNA
aggcaccctagttccagcag

SEQ ID NO: 142813 - DNA, 20 bp, synthetic construct
  source 1..20: mol_type = other DNA
gaggcaccctagttccagca

SEQ ID NO: 142814 - DNA, 20 bp, synthetic construct
  source 1..20: mol_type = other DNA
agaggcaccctagttccagc

SEQ ID NO: 142815 - DNA, 20 bp, synthetic construct
  source 1..20: mol_type = other DNA
aagaggcaccctagttccag

SEQ ID NO: 142816 - DNA, 20 bp, synthetic construct
  source 1..20: mol_type = other DNA
gaagaggcaccctagttcca

SEQ ID NO: 142817 - DNA, 20 bp, synthetic construct
  source 1..20: mol_type = other DNA
ggaagaggcaccctagttcc

SEQ ID NO: 142818 - DNA, 20 bp, synthetic construct
  source 1..20: mol_type = other DNA
gggaagaggcaccctagttc

SEQ ID NO: 142819 - DNA, 20 bp, synthetic construct
  source 1..20: mol_type = other DNA
tgggaagaggcaccctagtt

SEQ ID NO: 142820 - DNA, 20 bp, synthetic construct
  source 1..20: mol_type = other DNA
ttgggaagaggcaccctagt

SEQ ID NO: 142821 - DNA, 20 bp, synthetic construct
  source 1..20: mol_type = other DNA
tttgggaagaggcaccctag

SEQ ID NO: 142822 - DNA, 20 bp, synthetic construct
  source 1..20: mol_type = other DNA
ctttgggaagaggcacccta

SEQ ID NO: 142823 - DNA, 20 bp, synthetic construct
  source 1..20: mol_type = other DNA
gctttgggaagaggcaccct

SEQ ID NO: 142824 - DNA, 20 bp, synthetic construct
  source 1..20: mol_type = other DNA
agctttgggaagaggcaccc

SEQ ID NO: 142825 - DNA, 20 bp, synthetic construct
  source 1..20: mol_type = other DNA
cagctttgggaagaggcacc

SEQ ID NO: 142826 - DNA, 20 bp, synthetic construct
  source 1..20: mol_type = other DNA
acagctttgggaagaggcac

SEQ ID NO: 142827 - DNA, 20 bp, synthetic construct
  source 1..20: mol_type = other DNA
cacagctttgggaagaggca

SEQ ID NO: 142828 - DNA, 20 bp, synthetic construct
  source 1..20: mol_type = other DNA
gcacagctttgggaagaggc

SEQ ID NO: 142829 - DNA, 20 bp, synthetic construct
  source 1..20: mol_type = other DNA
agcacagctttgggaagagg

SEQ ID NO: 142830 - DNA, 20 bp, synthetic construct
  source 1..20: mol_type = other DNA
aagcacagctttgggaagag

SEQ ID NO: 142831 - DNA, 20 bp, synthetic construct
  source 1..20: mol_type = other DNA
caagcacagctttgggaaga

SEQ ID NO: 142832 - DNA, 20 bp, synthetic construct
  source 1..20: mol_type = other DNA
gcaagcacagctttgggaag

SEQ ID NO: 142833 - DNA, 20 bp, synthetic construct
  source 1..20: mol_type = other DNA
agcaagcacagctttgggaa

SEQ ID NO: 142834 - DNA, 20 bp, synthetic construct
  source 1..20: mol_type = other DNA
aagcaagcacagctttggga

SEQ ID NO: 142835 - DNA, 20 bp, synthetic construct
  source 1..20: mol_type = other DNA
gaagcaagcacagctttggg

SEQ ID NO: 142836 - DNA, 20 bp, synthetic construct
  source 1..20: mol_type = other DNA
agaagcaagcacagctttgg

SEQ ID NO: 142837 - DNA, 20 bp, synthetic construct
  source 1..20: mol_type = other DNA
gagaagcaagcacagctttg

SEQ ID NO: 142838 - DNA, 20 bp, synthetic construct
  source 1..20: mol_type = other DNA
agagaagcaagcacagcttt

SEQ ID NO: 142839 - DNA, 20 bp, synthetic construct
  source 1..20: mol_type = other DNA
gagagaagcaagcacagctt

SEQ ID NO: 142840 - DNA, 20 bp, synthetic construct
  source 1..20: mol_type = other DNA
tgagagaagcaagcacagct

SEQ ID NO: 142841 - DNA, 20 bp, synthetic construct
  source 1..20: mol_type = other DNA
gtgagagaagcaagcacagc

SEQ ID NO: 142842 - DNA, 20 bp, synthetic construct
  source 1..20: mol_type = other DNA
ggtgagagaagcaagcacag

SEQ ID NO: 142843 - DNA, 20 bp, synthetic construct
  source 1..20: mol_type = other DNA
tggtgagagaagcaagcaca

SEQ ID NO: 142844 - DNA, 20 bp, synthetic construct
  source 1..20: mol_type = other DNA
ttggtgagagaagcaagcac

SEQ ID NO: 142845 - DNA, 20 bp, synthetic construct
  source 1..20: mol_type = other DNA
attggtgagagaagcaagca

SEQ ID NO: 142846 - DNA, 20 bp, synthetic construct
  source 1..20: mol_type = other DNA
gattggtgagagaagcaagc

SEQ ID NO: 142847 - DNA, 20 bp, synthetic construct
  source 1..20: mol_type = other DNA
tgattggtgagagaagcaag

SEQ ID NO: 142848 - DNA, 20 bp, synthetic construct
  source 1..20: mol_type = other DNA
ctgattggtgagagaagcaa

SEQ ID NO: 142849 - DNA, 20 bp, synthetic construct
  source 1..20: mol_type = other DNA
actgattggtgagagaagca

SEQ ID NO: 142850 - DNA, 20 bp, synthetic construct
  source 1..20: mol_type = other DNA
gactgattggtgagagaagc

SEQ ID NO: 142851 - DNA, 20 bp, synthetic construct
  source 1..20: mol_type = other DNA
ggactgattggtgagagaag

SEQ ID NO: 142852 - DNA, 20 bp, synthetic construct
  source 1..20: mol_type = other DNA
aggactgattggtgagagaa

SEQ ID NO: 142853 - DNA, 20 bp, synthetic construct
  source 1..20: mol_type = other DNA
caggactgattggtgagaga

SEQ ID NO: 142854 - DNA, 20 bp, synthetic construct
  source 1..20: mol_type = other DNA
gcaggactgattggtgagag

SEQ ID NO: 142855 - DNA, 20 bp, synthetic construct
  source 1..20: mol_type = other DNA
tgcaggactgattggtgaga

SEQ ID NO: 142856 - DNA, 20 bp, synthetic construct
  source 1..20: mol_type = other DNA
atgcaggactgattggtgag

SEQ ID NO: 142857 - DNA, 20 bp, synthetic construct
  source 1..20: mol_type = other DNA
tatgcaggactgattggtga

SEQ ID NO: 142858 - DNA, 20 bp, synthetic construct
  source 1..20: mol_type = other DNA
atatgcaggactgattggtg

SEQ ID NO: 142859 - DNA, 20 bp, synthetic construct
  source 1..20: mol_type = other DNA
catatgcaggactgattggt

SEQ ID NO: 142860 - DNA, 20 bp, synthetic construct
  source 1..20: mol_type = other DNA
acatatgcaggactgattgg

SEQ ID NO: 142861 - DNA, 20 bp, synthetic construct
  source 1..20: mol_type = other DNA
gacatatgcaggactgattg

SEQ ID NO: 142862 - DNA, 20 bp, synthetic construct
  source 1..20: mol_type = other DNA
agacatatgcaggactgatt

SEQ ID NO: 142863 - DNA, 20 bp, synthetic construct
  source 1..20: mol_type = other DNA
cagacatatgcaggactgat

SEQ ID NO: 142864 - DNA, 20 bp, synthetic construct
  source 1..20: mol_type = other DNA
acagacatatgcaggactga

SEQ ID NO: 142865 - DNA, 20 bp, synthetic construct
  source 1..20: mol_type = other DNA
cacagacatatgcaggactg

SEQ ID NO: 142866 - DNA, 20 bp, synthetic construct
  source 1..20: mol_type = other DNA
acacagacatatgcaggact

SEQ ID NO: 142867 - DNA, 20 bp, synthetic construct
  source 1..20: mol_type = other DNA
aacacagacatatgcaggac

SEQ ID NO: 142868 - DNA, 20 bp, synthetic construct
  source 1..20: mol_type = other DNA
aaacacagacatatgcagga

SEQ ID NO: 142869 - DNA, 20 bp, synthetic construct
  source 1..20: mol_type = other DNA
caaacacagacatatgcagg

SEQ ID NO: 142870 - DNA, 20 bp, synthetic construct
  source 1..20: mol_type = other DNA
gcaaacacagacatatgcag

SEQ ID NO: 142871 - DNA, 20 bp, synthetic construct
  source 1..20: mol_type = other DNA
agcaaacacagacatatgca

SEQ ID NO: 142872 - DNA, 20 bp, synthetic construct
  source 1..20: mol_type = other DNA
tagcaaacacagacatatgc

SEQ ID NO: 142873 - DNA, 20 bp, synthetic construct
  source 1..20: mol_type = other DNA
ttagcaaacacagacatatg

SEQ ID NO: 142874 - DNA, 20 bp, synthetic construct
  source 1..20: mol_type = other DNA
gttagcaaacacagacatat

SEQ ID NO: 142875 - DNA, 20 bp, synthetic construct
  source 1..20: mol_type = other DNA
tgttagcaaacacagacata

SEQ ID NO: 142876 - DNA, 20 bp, synthetic construct
  source 1..20: mol_type = other DNA
gtgttagcaaacacagacat

SEQ ID NO: 142877 - DNA, 20 bp, synthetic construct
  source 1..20: mol_type = other DNA
cgtgttagcaaacacagaca

SEQ ID NO: 142878 - DNA, 20 bp, synthetic construct
  source 1..20: mol_type = other DNA
acgtgttagcaaacacagac

SEQ ID NO: 142879 - DNA, 20 bp, synthetic construct
  source 1..20: mol_type = other DNA
aacgtgttagcaaacacaga

SEQ ID NO: 142880 - DNA, 20 bp, synthetic construct
  source 1..20: mol_type = other DNA
taacgtgttagcaaacacag

SEQ ID NO: 142881 - DNA, 20 bp, synthetic construct
  source 1..20: mol_type = other DNA
ataacgtgttagcaaacaca

SEQ ID NO: 142882 - DNA, 20 bp, synthetic construct
  source 1..20: mol_type = other DNA
tataacgtgttagcaaacac

SEQ ID NO: 142883 - DNA, 20 bp, synthetic construct
  source 1..20: mol_type = other DNA
atataacgtgttagcaaaca

SEQ ID NO: 142884 - DNA, 20 bp, synthetic construct
  source 1..20: mol_type = other DNA
catataacgtgttagcaaac

SEQ ID NO: 142885 - DNA, 20 bp, synthetic construct
  source 1..20: mol_type = other DNA
tcatataacgtgttagcaaa

SEQ ID NO: 142886 - DNA, 20 bp, synthetic construct
  source 1..20: mol_type = other DNA
ttcatataacgtgttagcaa

SEQ ID NO: 142887 - DNA, 20 bp, synthetic construct
  source 1..20: mol_type = other DNA
cttcatataacgtgttagca

SEQ ID NO: 142888 - DNA, 20 bp, synthetic construct
  source 1..20: mol_type = other DNA
tcttcatataacgtgttagc

SEQ ID NO: 142889 - DNA, 20 bp, synthetic construct
  source 1..20: mol_type = other DNA
ttcttcatataacgtgttag

SEQ ID NO: 142890 - DNA, 20 bp, synthetic construct
  source 1..20: mol_type = other DNA
attcttcatataacgtgtta

SEQ ID NO: 142891 - DNA, 20 bp, synthetic construct
  source 1..20: mol_type = other DNA
cattcttcatataacgtgtt

SEQ ID NO: 142892 - DNA, 20 bp, synthetic construct
  source 1..20: mol_type = other DNA
acattcttcatataacgtgt

SEQ ID NO: 142893 - DNA, 20 bp, synthetic construct
  source 1..20: mol_type = other DNA
cacattcttcatataacgtg

SEQ ID NO: 142894 - DNA, 20 bp, synthetic construct
  source 1..20: mol_type = other DNA
ccacattcttcatataacgt

SEQ ID NO: 142895 - DNA, 20 bp, synthetic construct
  source 1..20: mol_type = other DNA
cccacattcttcatataacg

SEQ ID NO: 142896 - DNA, 20 bp, synthetic construct
  source 1..20: mol_type = other DNA
ccccacattcttcatataac

SEQ ID NO: 142897 - DNA, 20 bp, synthetic construct
  source 1..20: mol_type = other DNA
tccccacattcttcatataa

SEQ ID NO: 142898 - DNA, 20 bp, synthetic construct
  source 1..20: mol_type = other DNA
ttccccacattcttcatata

SEQ ID NO: 142899 - DNA, 20 bp, synthetic construct
  source 1..20: mol_type = other DNA
gttccccacattcttcatat

SEQ ID NO: 142900 - DNA, 20 bp, synthetic construct
  source 1..20: mol_type = other DNA
agttccccacattcttcata

SEQ ID NO: 142901 - DNA, 20 bp, synthetic construct
  source 1..20: mol_type = other DNA
tagttccccacattcttcat

SEQ ID NO: 142902 - DNA, 20 bp, synthetic construct
  source 1..20: mol_type = other DNA
atagttccccacattcttca

SEQ ID NO: 142903 - DNA, 20 bp, synthetic construct
  source 1..20: mol_type = other DNA
aatagttccccacattcttc

SEQ ID NO: 142904 - DNA, 20 bp, synthetic construct
  source 1..20: mol_type = other DNA
aaatagttccccacattctt

SEQ ID NO: 142905 - DNA, 20 bp, synthetic construct
  source 1..20: mol_type = other DNA
aaaatagttccccacattct

SEQ ID NO: 142906 - DNA, 20 bp, synthetic construct
  source 1..20: mol_type = other DNA
caaaatagttccccacattc

SEQ ID NO: 142907 - DNA, 20 bp, synthetic construct
  source 1..20: mol_type = other DNA
ccaaaatagttccccacatt

SEQ ID NO: 142908 - DNA, 20 bp, synthetic construct
  source 1..20: mol_type = other DNA
tccaaaatagttccccacat

SEQ ID NO: 142909 - DNA, 20 bp, synthetic construct
  source 1..20: mol_type = other DNA
ttccaaaatagttccccaca

SEQ ID NO: 142910 - DNA, 20 bp, synthetic construct
  source 1..20: mol_type = other DNA
attccaaaatagttccccac

SEQ ID NO: 142911 - DNA, 20 bp, synthetic construct
  source 1..20: mol_type = other DNA
gattccaaaatagttcccca

SEQ ID NO: 142912 - DNA, 20 bp, synthetic construct
  source 1..20: mol_type = other DNA
tgattccaaaatagttcccc

SEQ ID NO: 142913 - DNA, 20 bp, synthetic construct
  source 1..20: mol_type = other DNA
atgattccaaaatagttccc

SEQ ID NO: 142914 - DNA, 20 bp, synthetic construct
  source 1..20: mol_type = other DNA
aatgattccaaaatagttcc

SEQ ID NO: 142915 - DNA, 20 bp, synthetic construct
  source 1..20: mol_type = other DNA
aaatgattccaaaatagttc

SEQ ID NO: 142916 - DNA, 20 bp, synthetic construct
  source 1..20: mol_type = other DNA
gaaatgattccaaaatagtt

SEQ ID NO: 142917 - DNA, 20 bp, synthetic construct
  source 1..20: mol_type = other DNA
agaaatgattccaaaatagt

SEQ ID NO: 142918 - DNA, 20 bp, synthetic construct
  source 1..20: mol_type = other DNA
cagaaatgattccaaaatag

SEQ ID NO: 142919 - DNA, 20 bp, synthetic construct
  source 1..20: mol_type = other DNA
acagaaatgattccaaaata

SEQ ID NO: 142920 - DNA, 20 bp, synthetic construct
  source 1..20: mol_type = other DNA
cacagaaatgattccaaaat

SEQ ID NO: 142921 - DNA, 20 bp, synthetic construct
  source 1..20: mol_type = other DNA
acacagaaatgattccaaaa

SEQ ID NO: 142922 - DNA, 20 bp, synthetic construct
  source 1..20: mol_type = other DNA
tacacagaaatgattccaaa

SEQ ID NO: 142923 - DNA, 20 bp, synthetic construct
  source 1..20: mol_type = other DNA
atacacagaaatgattccaa

SEQ ID NO: 142924 - DNA, 20 bp, synthetic construct
  source 1..20: mol_type = other DNA
catacacagaaatgattcca

SEQ ID NO: 142925 - DNA, 20 bp, synthetic construct
  source 1..20: mol_type = other DNA
ccatacacagaaatgattcc

SEQ ID NO: 142926 - DNA, 20 bp, synthetic construct
  source 1..20: mol_type = other DNA
cccatacacagaaatgattc

SEQ ID NO: 142927 - DNA, 20 bp, synthetic construct
  source 1..20: mol_type = other DNA
gcccatacacagaaatgatt

SEQ ID NO: 142928 - DNA, 20 bp, synthetic construct
  source 1..20: mol_type = other DNA
agcccatacacagaaatgat

SEQ ID NO: 142929 - DNA, 20 bp, synthetic construct
  source 1..20: mol_type = other DNA
aagcccatacacagaaatga

SEQ ID NO: 142930 - DNA, 20 bp, synthetic construct
  source 1..20: mol_type = other DNA
taagcccatacacagaaatg

SEQ ID NO: 142931 - DNA, 20 bp, synthetic construct
  source 1..20: mol_type = other DNA
ataagcccatacacagaaat

SEQ ID NO: 142932 - DNA, 20 bp, synthetic construct
  source 1..20: mol_type = other DNA
aataagcccatacacagaaa

SEQ ID NO: 142933 - DNA, 20 bp, synthetic construct
  source 1..20: mol_type = other DNA
taataagcccatacacagaa

SEQ ID NO: 142934 - DNA, 20 bp, synthetic construct
  source 1..20: mol_type = other DNA
ataataagcccatacacaga

SEQ ID NO: 142935 - DNA, 20 bp, synthetic construct
  source 1..20: mol_type = other DNA
gataataagcccatacacag

SEQ ID NO: 142936 - DNA, 20 bp, synthetic construct
  source 1..20: mol_type = other DNA
agataataagcccatacaca

SEQ ID NO: 142937 - DNA, 20 bp, synthetic construct
  source 1..20: mol_type = other DNA
aagataataagcccatacac

SEQ ID NO: 142938 - DNA, 20 bp, synthetic construct
  source 1..20: mol_type = other DNA
caagataataagcccataca

SEQ ID NO: 142939 - DNA, 20 bp, synthetic construct
  source 1..20: mol_type = other DNA
tcaagataataagcccatac

SEQ ID NO: 142940 - DNA, 20 bp, synthetic construct
  source 1..20: mol_type = other DNA
ctcaagataataagcccata

SEQ ID NO: 142941 - DNA, 20 bp, synthetic construct
  source 1..20: mol_type = other DNA
cctcaagataataagcccat

SEQ ID NO: 142942 - DNA, 20 bp, synthetic construct
  source 1..20: mol_type = other DNA
ccctcaagataataagccca

SEQ ID NO: 142943 - DNA, 20 bp, synthetic construct
  source 1..20: mol_type = other DNA
tccctcaagataataagccc

SEQ ID NO: 142944 - DNA, 20 bp, synthetic construct
  source 1..20: mol_type = other DNA
atccctcaagataataagcc

SEQ ID NO: 142945 - DNA, 20 bp, synthetic construct
  source 1..20: mol_type = other DNA
aatccctcaagataataagc

SEQ ID NO: 142946 - DNA, 20 bp, synthetic construct
  source 1..20: mol_type = other DNA
aaatccctcaagataataag

SEQ ID NO: 142947 - DNA, 20 bp, synthetic construct
  source 1..20: mol_type = other DNA
aaaatccctcaagataataa

SEQ ID NO: 142948 - DNA, 20 bp, synthetic construct
  source 1..20: mol_type = other DNA
taaaatccctcaagataata

SEQ ID NO: 142949 - DNA, 20 bp, synthetic construct
  source 1..20: mol_type = other DNA
ctaaaatccctcaagataat

SEQ ID NO: 142950 - DNA, 20 bp, synthetic construct
  source 1..20: mol_type = other DNA
cctaaaatccctcaagataa

SEQ ID NO: 142951 - DNA, 20 bp, synthetic construct
  source 1..20: mol_type = other DNA
tcctaaaatccctcaagata

SEQ ID NO: 142952 - DNA, 20 bp, synthetic construct
  source 1..20: mol_type = other DNA
atcctaaaatccctcaagat

SEQ ID NO: 142953 - DNA, 20 bp, synthetic construct
  source 1..20: mol_type = other DNA
aatcctaaaatccctcaaga

SEQ ID NO: 142954 - DNA, 20 bp, synthetic construct
  source 1..20: mol_type = other DNA
aaatcctaaaatccctcaag

SEQ ID NO: 142955 - DNA, 20 bp, synthetic construct
  source 1..20: mol_type = other DNA
caaatcctaaaatccctcaa

SEQ ID NO: 142956 - DNA, 20 bp, synthetic construct
  source 1..20: mol_type = other DNA
acaaatcctaaaatccctca

SEQ ID NO: 142957 - DNA, 20 bp, synthetic construct
  source 1..20: mol_type = other DNA
aacaaatcctaaaatccctc

SEQ ID NO: 142958 - DNA, 20 bp, synthetic construct
  source 1..20: mol_type = other DNA
aaacaaatcctaaaatccct

SEQ ID NO: 142959 - DNA, 20 bp, synthetic construct
  source 1..20: mol_type = other DNA
gaaacaaatcctaaaatccc

SEQ ID NO: 142960 - DNA, 20 bp, synthetic construct
  source 1..20: mol_type = other DNA
agaaacaaatcctaaaatcc

SEQ ID NO: 142961 - DNA, 20 bp, synthetic construct
  source 1..20: mol_type = other DNA
gagaaacaaatcctaaaatc

SEQ ID NO: 142962 - DNA, 20 bp, synthetic construct
  source 1..20: mol_type = other DNA
tgagaaacaaatcctaaaat

SEQ ID NO: 142963 - DNA, 20 bp, synthetic construct
  source 1..20: mol_type = other DNA
ttgagaaacaaatcctaaaa

SEQ ID NO: 142964 - DNA, 20 bp, synthetic construct
  source 1..20: mol_type = other DNA
cttgagaaacaaatcctaaa

SEQ ID NO: 142965 - DNA, 20 bp, synthetic construct
  source 1..20: mol_type = other DNA
tcttgagaaacaaatcctaa

SEQ ID NO: 142966 - DNA, 20 bp, synthetic construct
  source 1..20: mol_type = other DNA
ctcttgagaaacaaatccta

SEQ ID NO: 142967 - DNA, 20 bp, synthetic construct
  source 1..20: mol_type = other DNA
tctcttgagaaacaaatcct

SEQ ID NO: 142968 - DNA, 20 bp, synthetic construct
  source 1..20: mol_type = other DNA
ctctcttgagaaacaaatcc

SEQ ID NO: 142969 - DNA, 20 bp, synthetic construct
  source 1..20: mol_type = other DNA
cctctcttgagaaacaaatc

SEQ ID NO: 142970 - DNA, 20 bp, synthetic construct
  source 1..20: mol_type = other DNA
ccctctcttgagaaacaaat

SEQ ID NO: 142971 - DNA, 20 bp, synthetic construct
  source 1..20: mol_type = other DNA
gccctctcttgagaaacaaa

SEQ ID NO: 142972 - DNA, 20 bp, synthetic construct
  source 1..20: mol_type = other DNA
agccctctcttgagaaacaa

SEQ ID NO: 142973 - DNA, 20 bp, synthetic construct
  source 1..20: mol_type = other DNA
cagccctctcttgagaaaca

SEQ ID NO: 142974 - DNA, 20 bp, synthetic construct
  source 1..20: mol_type = other DNA
ccagccctctcttgagaaac

SEQ ID NO: 142975 - DNA, 20 bp, synthetic construct
  source 1..20: mol_type = other DNA
cccagccctctcttgagaaa

SEQ ID NO: 142976 - DNA, 20 bp, synthetic construct
  source 1..20: mol_type = other DNA
tcccagccctctcttgagaa

SEQ ID NO: 142977 - DNA, 20 bp, synthetic construct
  source 1..20: mol_type = other DNA
ttcccagccctctcttgaga

SEQ ID NO: 142978 - DNA, 20 bp, synthetic construct
  source 1..20: mol_type = other DNA
gttcccagccctctcttgag

SEQ ID NO: 142979 - DNA, 20 bp, synthetic construct
  source 1..20: mol_type = other DNA
agttcccagccctctcttga

SEQ ID NO: 142980 - DNA, 20 bp, synthetic construct
  source 1..20: mol_type = other DNA
tagttcccagccctctcttg

SEQ ID NO: 142981 - DNA, 20 bp, synthetic construct
  source 1..20: mol_type = other DNA
atagttcccagccctctctt

SEQ ID NO: 142982 - DNA, 20 bp, synthetic construct
  source 1..20: mol_type = other DNA
tatagttcccagccctctct

SEQ ID NO: 142983 - DNA, 20 bp, synthetic construct
  source 1..20: mol_type = other DNA
gtatagttcccagccctctc

SEQ ID NO: 142984 - DNA, 20 bp, synthetic construct
  source 1..20: mol_type = other DNA
ggtatagttcccagccctct

SEQ ID NO: 142985 - DNA, 20 bp, synthetic construct
  source 1..20: mol_type = other DNA
aggtatagttcccagccctc

SEQ ID NO: 142986 - DNA, 20 bp, synthetic construct
  source 1..20: mol_type = other DNA
aaggtatagttcccagccct

SEQ ID NO: 142987 - DNA, 20 bp, synthetic construct
  source 1..20: mol_type = other DNA
caaggtatagttcccagccc

SEQ ID NO: 142988 - DNA, 20 bp, synthetic construct
  source 1..20: mol_type = other DNA
gcaaggtatagttcccagcc

SEQ ID NO: 142989 - DNA, 20 bp, synthetic construct
  source 1..20: mol_type = other DNA
agcaaggtatagttcccagc

SEQ ID NO: 142990 - DNA, 20 bp, synthetic construct
  source 1..20: mol_type = other DNA
tagcaaggtatagttcccag

SEQ ID NO: 142991 - DNA, 20 bp, synthetic construct
  source 1..20: mol_type = other DNA
ctagcaaggtatagttccca

SEQ ID NO: 142992 - DNA, 20 bp, synthetic construct
  source 1..20: mol_type = other DNA
tctagcaaggtatagttccc

SEQ ID NO: 142993 - DNA, 20 bp, synthetic construct
  source 1..20: mol_type = other DNA
ctctagcaaggtatagttcc

SEQ ID NO: 142994 - DNA, 20 bp, synthetic construct
  source 1..20: mol_type = other DNA
actctagcaaggtatagttc

SEQ ID NO: 142995 - DNA, 20 bp, synthetic construct
  source 1..20: mol_type = other DNA
aactctagcaaggtatagtt

SEQ ID NO: 142996 - DNA, 20 bp, synthetic construct
  source 1..20: mol_type = other DNA
caactctagcaaggtatagt

SEQ ID NO: 142997 - DNA, 20 bp, synthetic construct
  source 1..20: mol_type = other DNA
acaactctagcaaggtatag

SEQ ID NO: 142998 - DNA, 20 bp, synthetic construct
  source 1..20: mol_type = other DNA
gacaactctagcaaggtata

SEQ ID NO: 142999 - DNA, 20 bp, synthetic construct
  source 1..20: mol_type = other DNA
agacaactctagcaaggtat

SEQ ID NO: 143000 - DNA, 20 bp, synthetic construct
  source 1..20: mol_type = other DNA
aagacaactctagcaaggta

SEQ ID NO: 143001 - DNA, 20 bp, synthetic construct
  source 1..20: mol_type = other DNA
caagacaactctagcaaggt

SEQ ID NO: 143002 - DNA, 20 bp, synthetic construct
  source 1..20: mol_type = other DNA
tcaagacaactctagcaagg

SEQ ID NO: 143003 - DNA, 20 bp, synthetic construct
  source 1..20: mol_type = other DNA
ctcaagacaactctagcaag

SEQ ID NO: 143004 - DNA, 20 bp, synthetic construct
  source 1..20: mol_type = other DNA
tctcaagacaactctagcaa

SEQ ID NO: 143005 - DNA, 20 bp, synthetic construct
  source 1..20: mol_type = other DNA
ttctcaagacaactctagca

SEQ ID NO: 143006 - DNA, 20 bp, synthetic construct
  source 1..20: mol_type = other DNA
gttctcaagacaactctagc

SEQ ID NO: 143007 - DNA, 20 bp, synthetic construct
  source 1..20: mol_type = other DNA
cgttctcaagacaactctag

SEQ ID NO: 143008 - DNA, 20 bp, synthetic construct
  source 1..20: mol_type = other DNA
gcgttctcaagacaactcta

SEQ ID NO: 143009 - DNA, 20 bp, synthetic construct
  source 1..20: mol_type = other DNA
agcgttctcaagacaactct

SEQ ID NO: 143010 - DNA, 20 bp, synthetic construct
  source 1..20: mol_type = other DNA
gagcgttctcaagacaactc

SEQ ID NO: 143011 - DNA, 20 bp, synthetic construct
  source 1..20: mol_type = other DNA
agagcgttctcaagacaact

SEQ ID NO: 143012 - DNA, 20 bp, synthetic construct
  source 1..20: mol_type = other DNA
tagagcgttctcaagacaac

SEQ ID NO: 143013 - DNA, 20 bp, synthetic construct
  source 1..20: mol_type = other DNA
atagagcgttctcaagacaa

SEQ ID NO: 143014 - DNA, 20 bp, synthetic construct
  source 1..20: mol_type = other DNA
aatagagcgttctcaagaca

SEQ ID NO: 143015 - DNA, 20 bp, synthetic construct
  source 1..20: mol_type = other DNA
gaatagagcgttctcaagac

SEQ ID NO: 143016 - DNA, 20 bp, synthetic construct
  source 1..20: mol_type = other DNA
agaatagagcgttctcaaga

SEQ ID NO: 143017 - DNA, 20 bp, synthetic construct
  source 1..20: mol_type = other DNA
gagaatagagcgttctcaag

SEQ ID NO: 143018 - DNA, 20 bp, synthetic construct
  source 1..20: mol_type = other DNA
tgagaatagagcgttctcaa

SEQ ID NO: 143019 - DNA, 20 bp, synthetic construct
  source 1..20: mol_type = other DNA
ctgagaatagagcgttctca

SEQ ID NO: 143020 - DNA, 20 bp, synthetic construct
  source 1..20: mol_type = other DNA
gctgagaatagagcgttctc

SEQ ID NO: 143021 - DNA, 20 bp, synthetic construct
  source 1..20: mol_type = other DNA
agctgagaatagagcgttct

SEQ ID NO: 143022 - DNA, 20 bp, synthetic construct
  source 1..20: mol_type = other DNA
gagctgagaatagagcgttc

SEQ ID NO: 143023 - DNA, 20 bp, synthetic construct
  source 1..20: mol_type = other DNA
tgagctgagaatagagcgtt

SEQ ID NO: 143024 - DNA, 20 bp, synthetic construct
  source 1..20: mol_type = other DNA
atgagctgagaatagagcgt

SEQ ID NO: 143025 - DNA, 20 bp, synthetic construct
  source 1..20: mol_type = other DNA
aatgagctgagaatagagcg

SEQ ID NO: 143026 - DNA, 20 bp, synthetic construct
  source 1..20: mol_type = other DNA
caatgagctgagaatagagc

SEQ ID NO: 143027 - DNA, 20 bp, synthetic construct
  source 1..20: mol_type = other DNA
gcaatgagctgagaatagag

SEQ ID NO: 143028 - DNA, 20 bp, synthetic construct
  source 1..20: mol_type = other DNA
ggcaatgagctgagaataga

SEQ ID NO: 143029 - DNA, 20 bp, synthetic construct
  source 1..20: mol_type = other DNA
aggcaatgagctgagaatag

SEQ ID NO: 143030 - DNA, 20 bp, synthetic construct
  source 1..20: mol_type = other DNA
gaggcaatgagctgagaata

SEQ ID NO: 143031 - DNA, 20 bp, synthetic construct
  source 1..20: mol_type = other DNA
cgaggcaatgagctgagaat

SEQ ID NO: 143032 - DNA, 20 bp, synthetic construct
  source 1..20: mol_type = other DNA
acgaggcaatgagctgagaa

SEQ ID NO: 143033 - DNA, 20 bp, synthetic construct
  source 1..20: mol_type = other DNA
cacgaggcaatgagctgaga

SEQ ID NO: 143034 - DNA, 20 bp, synthetic construct
  source 1..20: mol_type = other DNA
ccacgaggcaatgagctgag

SEQ ID NO: 143035 - DNA, 20 bp, synthetic construct
  source 1..20: mol_type = other DNA
tccacgaggcaatgagctga

SEQ ID NO: 143036 - DNA, 20 bp, synthetic construct
  source 1..20: mol_type = other DNA
ctccacgaggcaatgagctg

SEQ ID NO: 143037 - DNA, 20 bp, synthetic construct
  source 1..20: mol_type = other DNA
cctccacgaggcaatgagct

SEQ ID NO: 143038 - DNA, 20 bp, synthetic construct
  source 1..20: mol_type = other DNA
acctccacgaggcaatgagc

SEQ ID NO: 143039 - DNA, 20 bp, synthetic construct
  source 1..20: mol_type = other DNA
aacctccacgaggcaatgag

SEQ ID NO: 143040 - DNA, 20 bp, synthetic construct
  source 1..20: mol_type = other DNA
taacctccacgaggcaatga

SEQ ID NO: 143041 - DNA, 20 bp, synthetic construct
  source 1..20: mol_type = other DNA
ctaacctccacgaggcaatg

SEQ ID NO: 143042 - DNA, 20 bp, synthetic construct
  source 1..20: mol_type = other DNA
actaacctccacgaggcaat

SEQ ID NO: 143043 - DNA, 20 bp, synthetic construct
  source 1..20: mol_type = other DNA
aactaacctccacgaggcaa

SEQ ID NO: 143044 - DNA, 20 bp, synthetic construct
  source 1..20: mol_type = other DNA
aaactaacctccacgaggca

SEQ ID NO: 143045 - DNA, 20 bp, synthetic construct
  source 1..20: mol_type = other DNA
aaaactaacctccacgaggc

SEQ ID NO: 143046 - DNA, 20 bp, synthetic construct
  source 1..20: mol_type = other DNA
aaaaactaacctccacgagg

SEQ ID NO: 143047 - DNA, 20 bp, synthetic construct
  source 1..20: mol_type = other DNA
aaaaaactaacctccacgag

SEQ ID NO: 143048 - DNA, 20 bp, synthetic construct
  source 1..20: mol_type = other DNA
taaaaaactaacctccacga

SEQ ID NO: 143049 - DNA, 20 bp, synthetic construct
  source 1..20: mol_type = other DNA
ataaaaaactaacctccacg

SEQ ID NO: 143050 - DNA, 20 bp, synthetic construct
  source 1..20: mol_type = other DNA
gataaaaaactaacctccac

SEQ ID NO: 143051 - DNA, 20 bp, synthetic construct
  source 1..20: mol_type = other DNA
tgataaaaaactaacctcca

SEQ ID NO: 143052 - DNA, 20 bp, synthetic construct
  source 1..20: mol_type = other DNA
atgataaaaaactaacctcc

SEQ ID NO: 143053 - DNA, 20 bp, synthetic construct
  source 1..20: mol_type = other DNA
gatgataaaaaactaacctc

SEQ ID NO: 143054 - DNA, 20 bp, synthetic construct
  source 1..20: mol_type = other DNA
cgatgataaaaaactaacct

SEQ ID NO: 143055 - DNA, 20 bp, synthetic construct
  source 1..20: mol_type = other DNA
ccgatgataaaaaactaacc

SEQ ID NO: 143056 - DNA, 20 bp, synthetic construct
  source 1..20: mol_type = other DNA
accgatgataaaaaactaac

SEQ ID NO: 143057 - DNA, 20 bp, synthetic construct
  source 1..20: mol_type = other DNA
caccgatgataaaaaactaa

SEQ ID NO: 143058 - DNA, 20 bp, synthetic construct
  source 1..20: mol_type = other DNA
acaccgatgataaaaaacta

SEQ ID NO: 143059 - DNA, 20 bp, synthetic construct
  source 1..20: mol_type = other DNA
cacaccgatgataaaaaact

SEQ ID NO: 143060 - DNA, 20 bp, synthetic construct
  source 1..20: mol_type = other DNA
gcacaccgatgataaaaaac

SEQ ID NO: 143061 - DNA, 20 bp, synthetic construct
  source 1..20: mol_type = other DNA
agcacaccgatgataaaaaa

SEQ ID NO: 143062 - DNA, 20 bp, synthetic construct
  source 1..20: mol_type = other DNA
cagcacaccgatgataaaaa

SEQ ID NO: 143063 - DNA, 20 bp, synthetic construct
  source 1..20: mol_type = other DNA
acagcacaccgatgataaaa

SEQ ID NO: 143064 - DNA, 20 bp, synthetic construct
  source 1..20: mol_type = other DNA
gacagcacaccgatgataaa

SEQ ID NO: 143065 - DNA, 20 bp, synthetic construct
  source 1..20: mol_type = other DNA
ggacagcacaccgatgataa

SEQ ID NO: 143066 - DNA, 20 bp, synthetic construct
  source 1..20: mol_type = other DNA
tggacagcacaccgatgata

SEQ ID NO: 143067 - DNA, 20 bp, synthetic construct
  source 1..20: mol_type = other DNA
atggacagcacaccgatgat

SEQ ID NO: 143068 - DNA, 20 bp, synthetic construct
  source 1..20: mol_type = other DNA
tatggacagcacaccgatga

SEQ ID NO: 143069 - DNA, 20 bp, synthetic construct
  source 1..20: mol_type = other DNA
ctatggacagcacaccgatg

SEQ ID NO: 143070 - DNA, 20 bp, synthetic construct
  source 1..20: mol_type = other DNA
actatggacagcacaccgat

SEQ ID NO: 143071 - DNA, 20 bp, synthetic construct
  source 1..20: mol_type = other DNA
gactatggacagcacaccga

SEQ ID NO: 143072 - DNA, 20 bp, synthetic construct
  source 1..20: mol_type = other DNA
tgactatggacagcacaccg

SEQ ID NO: 143073 - DNA, 20 bp, synthetic construct
  source 1..20: mol_type = other DNA
gtgactatggacagcacacc

SEQ ID NO: 143074 - DNA, 20 bp, synthetic construct
  source 1..20: mol_type = other DNA
agtgactatggacagcacac

SEQ ID NO: 143075 - DNA, 20 bp, synthetic construct
  source 1..20: mol_type = other DNA
cagtgactatggacagcaca

SEQ ID NO: 143076 - DNA, 20 bp, synthetic construct
  source 1..20: mol_type = other DNA
ccagtgactatggacagcac

SEQ ID NO: 143077 - DNA, 20 bp, synthetic construct
  source 1..20: mol_type = other DNA
tccagtgactatggacagca

SEQ ID NO: 143078 - DNA, 20 bp, synthetic construct
  source 1..20: mol_type = other DNA
ttccagtgactatggacagc

SEQ ID NO: 143079 - DNA, 20 bp, synthetic construct
  source 1..20: mol_type = other DNA
cttccagtgactatggacag

SEQ ID NO: 143080 - DNA, 20 bp, synthetic construct
  source 1..20: mol_type = other DNA
gcttccagtgactatggaca

SEQ ID NO: 143081 - DNA, 20 bp, synthetic construct
  source 1..20: mol_type = other DNA
tgcttccagtgactatggac

SEQ ID NO: 143082 - DNA, 20 bp, synthetic construct
  source 1..20: mol_type = other DNA
ctgcttccagtgactatgga

SEQ ID NO: 143083 - DNA, 20 bp, synthetic construct
  source 1..20: mol_type = other DNA
actgcttccagtgactatgg

SEQ ID NO: 143084 - DNA, 20 bp, synthetic construct
  source 1..20: mol_type = other DNA
cactgcttccagtgactatg

SEQ ID NO: 143085 - DNA, 20 bp, synthetic construct
  source 1..20: mol_type = other DNA
tcactgcttccagtgactat

SEQ ID NO: 143086 - DNA, 20 bp, synthetic construct
  source 1..20: mol_type = other DNA
ttcactgcttccagtgacta

SEQ ID NO: 143087 - DNA, 20 bp, synthetic construct
  source 1..20: mol_type = other DNA
gttcactgcttccagtgact

SEQ ID NO: 143088 - DNA, 20 bp, synthetic construct
  source 1..20: mol_type = other DNA
tgttcactgcttccagtgac

SEQ ID NO: 143089 - DNA, 20 bp, synthetic construct
  source 1..20: mol_type = other DNA
gtgttcactgcttccagtga

SEQ ID NO: 143090 - DNA, 20 bp, synthetic construct
  source 1..20: mol_type = other DNA
tgtgttcactgcttccagtg

SEQ ID NO: 143091 - DNA, 20 bp, synthetic construct
  source 1..20: mol_type = other DNA
atgtgttcactgcttccagt

SEQ ID NO: 143092 - DNA, 20 bp, synthetic construct
  source 1..20: mol_type = other DNA
gatgtgttcactgcttccag

SEQ ID NO: 143093 - DNA, 20 bp, synthetic construct
  source 1..20: mol_type = other DNA
ggatgtgttcactgcttcca

SEQ ID NO: 143094 - DNA, 20 bp, synthetic construct
  source 1..20: mol_type = other DNA
aggatgtgttcactgcttcc

SEQ ID NO: 143095 - DNA, 20 bp, synthetic construct
  source 1..20: mol_type = other DNA
taggatgtgttcactgcttc

SEQ ID NO: 143096 - DNA, 20 bp, synthetic construct
  source 1..20: mol_type = other DNA
gtaggatgtgttcactgctt

SEQ ID NO: 143097 - DNA, 20 bp, synthetic construct
  source 1..20: mol_type = other DNA
agtaggatgtgttcactgct

SEQ ID NO: 143098 - DNA, 20 bp, synthetic construct
  source 1..20: mol_type = other DNA
gagtaggatgtgttcactgc

SEQ ID NO: 143099 - DNA, 20 bp, synthetic construct
  source 1..20: mol_type = other DNA
agagtaggatgtgttcactg

SEQ ID NO: 143100 - DNA, 20 bp, synthetic construct
  source 1..20: mol_type = other DNA
cagagtaggatgtgttcact

SEQ ID NO: 143101 - DNA, 20 bp, synthetic construct
  source 1..20: mol_type = other DNA
gcagagtaggatgtgttcac

SEQ ID NO: 143102 - DNA, 20 bp, synthetic construct
  source 1..20: mol_type = other DNA
agcagagtaggatgtgttca

SEQ ID NO: 143103 - DNA, 20 bp, synthetic construct
  source 1..20: mol_type = other DNA
aagcagagtaggatgtgttc

SEQ ID NO: 143104 - DNA, 20 bp, synthetic construct
  source 1..20: mol_type = other DNA
gaagcagagtaggatgtgtt

SEQ ID NO: 143105 - DNA, 20 bp, synthetic construct
  source 1..20: mol_type = other DNA
agaagcagagtaggatgtgt

SEQ ID NO: 143106 - DNA, 20 bp, synthetic construct
  source 1..20: mol_type = other DNA
cagaagcagagtaggatgtg

SEQ ID NO: 143107 - DNA, 20 bp, synthetic construct
  source 1..20: mol_type = other DNA
tcagaagcagagtaggatgt

SEQ ID NO: 143108 - DNA, 20 bp, synthetic construct
  source 1..20: mol_type = other DNA
atcagaagcagagtaggatg

SEQ ID NO: 143109 - DNA, 20 bp, synthetic construct
  source 1..20: mol_type = other DNA
aatcagaagcagagtaggat

SEQ ID NO: 143110 - DNA, 20 bp, synthetic construct
  source 1..20: mol_type = other DNA
gaatcagaagcagagtagga

SEQ ID NO: 143111 - DNA, 20 bp, synthetic construct
  source 1..20: mol_type = other DNA
agaatcagaagcagagtagg

SEQ ID NO: 143112 - DNA, 20 bp, synthetic construct
  source 1..20: mol_type = other DNA
gagaatcagaagcagagtag

SEQ ID NO: 143113 - DNA, 20 bp, synthetic construct
  source 1..20: mol_type = other DNA
tgagaatcagaagcagagta

SEQ ID NO: 143114 - DNA, 20 bp, synthetic construct
  source 1..20: mol_type = other DNA
ttgagaatcagaagcagagt

SEQ ID NO: 143115 - DNA, 20 bp, synthetic construct
  source 1..20: mol_type = other DNA
gttgagaatcagaagcagag

SEQ ID NO: 143116 - DNA, 20 bp, synthetic construct
  source 1..20: mol_type = other DNA
agttgagaatcagaagcaga

SEQ ID NO: 143117 - DNA, 20 bp, synthetic construct
  source 1..20: mol_type = other DNA
aagttgagaatcagaagcag

SEQ ID NO: 143118 - DNA, 20 bp, synthetic construct
  source 1..20: mol_type = other DNA
taagttgagaatcagaagca

SEQ ID NO: 143119 - DNA, 20 bp, synthetic construct
  source 1..20: mol_type = other DNA
gtaagttgagaatcagaagc

SEQ ID NO: 143120 - DNA, 20 bp, synthetic construct
  source 1..20: mol_type = other DNA
agtaagttgagaatcagaag

SEQ ID NO: 143121 - DNA, 20 bp, synthetic construct
  source 1..20: mol_type = other DNA
cagtaagttgagaatcagaa

SEQ ID NO: 143122 - DNA, 20 bp, synthetic construct
  source 1..20: mol_type = other DNA
acagtaagttgagaatcaga

SEQ ID NO: 143123 - DNA, 20 bp, synthetic construct
  source 1..20: mol_type = other DNA
aacagtaagttgagaatcag

SEQ ID NO: 143124 - DNA, 20 bp, synthetic construct
  source 1..20: mol_type = other DNA
aaacagtaagttgagaatca

SEQ ID NO: 143125 - DNA, 20 bp, synthetic construct
  source 1..20: mol_type = other DNA
aaaacagtaagttgagaatc

SEQ ID NO: 143126 - DNA, 20 bp, synthetic construct
  source 1..20: mol_type = other DNA
aaaaacagtaagttgagaat

SEQ ID NO: 143127 - DNA, 20 bp, synthetic construct
  source 1..20: mol_type = other DNA
caaaaacagtaagttgagaa

SEQ ID NO: 143128 - DNA, 20 bp, synthetic construct
  source 1..20: mol_type = other DNA
tcaaaaacagtaagttgaga

SEQ ID NO: 143129 - DNA, 20 bp, synthetic construct
  source 1..20: mol_type = other DNA
ttcaaaaacagtaagttgag

SEQ ID NO: 143130 - DNA, 20 bp, synthetic construct
  source 1..20: mol_type = other DNA
cttcaaaaacagtaagttga

SEQ ID NO: 143131 - DNA, 20 bp, synthetic construct
  source 1..20: mol_type = other DNA
gcttcaaaaacagtaagttg

SEQ ID NO: 143132 - DNA, 20 bp, synthetic construct
  source 1..20: mol_type = other DNA
tgcttcaaaaacagtaagtt

SEQ ID NO: 143133 - DNA, 20 bp, synthetic construct
  source 1..20: mol_type = other DNA
gtgcttcaaaaacagtaagt

SEQ ID NO: 143134 - DNA, 20 bp, synthetic construct
  source 1..20: mol_type = other DNA
tgtgcttcaaaaacagtaag

SEQ ID NO: 143135 - DNA, 20 bp, synthetic construct
  source 1..20: mol_type = other DNA
atgtgcttcaaaaacagtaa

SEQ ID NO: 143136 - DNA, 20 bp, synthetic construct
  source 1..20: mol_type = other DNA
catgtgcttcaaaaacagta

SEQ ID NO: 143137 - DNA, 20 bp, synthetic construct
  source 1..20: mol_type = other DNA
tcatgtgcttcaaaaacagt

SEQ ID NO: 143138 - DNA, 20 bp, synthetic construct
  source 1..20: mol_type = other DNA
ttcatgtgcttcaaaaacag

SEQ ID NO: 143139 - DNA, 20 bp, synthetic construct
  source 1..20: mol_type = other DNA
gttcatgtgcttcaaaaaca

SEQ ID NO: 143140 - DNA, 20 bp, synthetic construct
  source 1..20: mol_type = other DNA
tgttcatgtgcttcaaaaac

SEQ ID NO: 143141 - DNA, 20 bp, synthetic construct
  source 1..20: mol_type = other DNA
ctgttcatgtgcttcaaaaa

SEQ ID NO: 143142 - DNA, 20 bp, synthetic construct
  source 1..20: mol_type = other DNA
cctgttcatgtgcttcaaaa

SEQ ID NO: 143143 - DNA, 20 bp, synthetic construct
  source 1..20: mol_type = other DNA
gcctgttcatgtgcttcaaa

SEQ ID NO: 143144 - DNA, 20 bp, synthetic construct
  source 1..20: mol_type = other DNA
ggcctgttcatgtgcttcaa

SEQ ID NO: 143145 - DNA, 20 bp, synthetic construct
  source 1..20: mol_type = other DNA
tggcctgttcatgtgcttca

SEQ ID NO: 143146 - DNA, 20 bp, synthetic construct
  source 1..20: mol_type = other DNA
ctggcctgttcatgtgcttc

SEQ ID NO: 143147 - DNA, 20 bp, synthetic construct
  source 1..20: mol_type = other DNA
cctggcctgttcatgtgctt

SEQ ID NO: 143148 - DNA, 20 bp, synthetic construct
  source 1..20: mol_type = other DNA
gcctggcctgttcatgtgct

SEQ ID NO: 143149 - DNA, 20 bp, synthetic construct
  source 1..20: mol_type = other DNA
tgcctggcctgttcatgtgc

SEQ ID NO: 143150 - DNA, 20 bp, synthetic construct
  source 1..20: mol_type = other DNA
gtgcctggcctgttcatgtg

SEQ ID NO: 143151 - DNA, 20 bp, synthetic construct
  source 1..20: mol_type = other DNA
cgtgcctggcctgttcatgt

SEQ ID NO: 143152 - DNA, 20 bp, synthetic construct
  source 1..20: mol_type = other DNA
ccgtgcctggcctgttcatg

SEQ ID NO: 143153 - DNA, 20 bp, synthetic construct
  source 1..20: mol_type = other DNA
accgtgcctggcctgttcat

SEQ ID NO: 143154 - DNA, 20 bp, synthetic construct
  source 1..20: mol_type = other DNA
caccgtgcctggcctgttca

SEQ ID NO: 143155 - DNA, 20 bp, synthetic construct
  source 1..20: mol_type = other DNA
ccaccgtgcctggcctgttc

SEQ ID NO: 143156 - DNA, 20 bp, synthetic construct
  source 1..20: mol_type = other DNA
gccaccgtgcctggcctgtt

SEQ ID NO: 143157 - DNA, 20 bp, synthetic construct
  source 1..20: mol_type = other DNA
agccaccgtgcctggcctgt

SEQ ID NO: 143158 - DNA, 20 bp, synthetic construct
  source 1..20: mol_type = other DNA
gagccaccgtgcctggcctg

SEQ ID NO: 143159 - DNA, 20 bp, synthetic construct
  source 1..20: mol_type = other DNA
tgagccaccgtgcctggcct

SEQ ID NO: 143160 - DNA, 20 bp, synthetic construct
  source 1..20: mol_type = other DNA
gtgagccaccgtgcctggcc

SEQ ID NO: 143161 - DNA, 20 bp, synthetic construct
  source 1..20: mol_type = other DNA
cgtgagccaccgtgcctggc

SEQ ID NO: 143162 - DNA, 20 bp, synthetic construct
  source 1..20: mol_type = other DNA
acgtgagccaccgtgcctgg

SEQ ID NO: 143163 - DNA, 20 bp, synthetic construct
  source 1..20: mol_type = other DNA
gacgtgagccaccgtgcctg

SEQ ID NO: 143164 - DNA, 20 bp, synthetic construct
  source 1..20: mol_type = other DNA
agacgtgagccaccgtgcct

SEQ ID NO: 143165 - DNA, 20 bp, synthetic construct
  source 1..20: mol_type = other DNA
cagacgtgagccaccgtgcc

SEQ ID NO: 143166 - DNA, 20 bp, synthetic construct
  source 1..20: mol_type = other DNA
acagacgtgagccaccgtgc

SEQ ID NO: 143167 - DNA, 20 bp, synthetic construct
  source 1..20: mol_type = other DNA
tacagacgtgagccaccgtg

SEQ ID NO: 143168 - DNA, 20 bp, synthetic construct
  source 1..20: mol_type = other DNA
ttacagacgtgagccaccgt

SEQ ID NO: 143169 - DNA, 20 bp, synthetic construct
  source 1..20: mol_type = other DNA
attacagacgtgagccaccg

SEQ ID NO: 143170 - DNA, 20 bp, synthetic construct
  source 1..20: mol_type = other DNA
gattacagacgtgagccacc

SEQ ID NO: 143171 - DNA, 20 bp, synthetic construct
  source 1..20: mol_type = other DNA
ggattacagacgtgagccac

SEQ ID NO: 143172 - DNA, 20 bp, synthetic construct
  source 1..20: mol_type = other DNA
gggattacagacgtgagcca

SEQ ID NO: 143173 - DNA, 20 bp, synthetic construct
  source 1..20: mol_type = other DNA
tgggattacagacgtgagcc

SEQ ID NO: 143174 - DNA, 20 bp, synthetic construct
  source 1..20: mol_type = other DNA
ctgggattacagacgtgagc

SEQ ID NO: 143175 - DNA, 20 bp, synthetic construct
  source 1..20: mol_type = other DNA
gctgggattacagacgtgag

SEQ ID NO: 143176 - DNA, 20 bp, synthetic construct
  source 1..20: mol_type = other DNA
tgctgggattacagacgtga

SEQ ID NO: 143177 - DNA, 20 bp, synthetic construct
  source 1..20: mol_type = other DNA
gtgctgggattacagacgtg

SEQ ID NO: 143178 - DNA, 20 bp, synthetic construct
  source 1..20: mol_type = other DNA
agtgctgggattacagacgt

SEQ ID NO: 143179 - DNA, 20 bp, synthetic construct
  source 1..20: mol_type = other DNA
aagtgctgggattacagacg

SEQ ID NO: 143180 - DNA, 20 bp, synthetic construct
  source 1..20: mol_type = other DNA
aaagtgctgggattacagac

SEQ ID NO: 143181 - DNA, 20 bp, synthetic construct
  source 1..20: mol_type = other DNA
caaagtgctgggattacaga

SEQ ID NO: 143182 - DNA, 20 bp, synthetic construct
  source 1..20: mol_type = other DNA
ccaaagtgctgggattacag

SEQ ID NO: 143183 - DNA, 20 bp, synthetic construct
  source 1..20: mol_type = other DNA
cccaaagtgctgggattaca

SEQ ID NO: 143184 - DNA, 20 bp, synthetic construct
  source 1..20: mol_type = other DNA
tcccaaagtgctgggattac

SEQ ID NO: 143185 - DNA, 20 bp, synthetic construct
  source 1..20: mol_type = other DNA
ctcccaaagtgctgggatta

SEQ ID NO: 143186 - DNA, 20 bp, synthetic construct
  source 1..20: mol_type = other DNA
cctcccaaagtgctgggatt

SEQ ID NO: 143187 - DNA, 20 bp, synthetic construct
  source 1..20: mol_type = other DNA
gcctcccaaagtgctgggat

SEQ ID NO: 143188 - DNA, 20 bp, synthetic construct
  source 1..20: mol_type = other DNA
agcctcccaaagtgctggga

SEQ ID NO: 143189 - DNA, 20 bp, synthetic construct
  source 1..20: mol_type = other DNA
cagcctcccaaagtgctggg

SEQ ID NO: 143190 - DNA, 20 bp, synthetic construct
  source 1..20: mol_type = other DNA
tcagcctcccaaagtgctgg

SEQ ID NO: 143191 - DNA, 20 bp, synthetic construct
  source 1..20: mol_type = other DNA
ttcagcctcccaaagtgctg

SEQ ID NO: 143192 - DNA, 20 bp, synthetic construct
  source 1..20: mol_type = other DNA
cttcagcctcccaaagtgct

SEQ ID NO: 143193 - DNA, 20 bp, synthetic construct
  source 1..20: mol_type = other DNA
acttcagcctcccaaagtgc

SEQ ID NO: 143194 - DNA, 20 bp, synthetic construct
  source 1..20: mol_type = other DNA
cacttcagcctcccaaagtg

SEQ ID NO: 143195 - DNA, 20 bp, synthetic construct
  source 1..20: mol_type = other DNA
ccacttcagcctcccaaagt

SEQ ID NO: 143196 - DNA, 20 bp, synthetic construct
  source 1..20: mol_type = other DNA
cccacttcagcctcccaaag

SEQ ID NO: 143197 - DNA, 20 bp, synthetic construct
  source 1..20: mol_type = other DNA
gcccacttcagcctcccaaa

SEQ ID NO: 143198 - DNA, 20 bp, synthetic construct
  source 1..20: mol_type = other DNA
cgcccacttcagcctcccaa

SEQ ID NO: 143199 - DNA, 20 bp, synthetic construct
  source 1..20: mol_type = other DNA
ccgcccacttcagcctccca

SEQ ID NO: 143200 - DNA, 20 bp, synthetic construct
  source 1..20: mol_type = other DNA
tccgcccacttcagcctccc

SEQ ID NO: 143201 - DNA, 20 bp, synthetic construct
  source 1..20: mol_type = other DNA
atccgcccacttcagcctcc

SEQ ID NO: 143202 - DNA, 20 bp, synthetic construct
  source 1..20: mol_type = other DNA
gatccgcccacttcagcctc

SEQ ID NO: 143203 - DNA, 20 bp, synthetic construct
  source 1..20: mol_type = other DNA
tgatccgcccacttcagcct

SEQ ID NO: 143204 - DNA, 20 bp, synthetic construct
  source 1..20: mol_type = other DNA
atgatccgcccacttcagcc

SEQ ID NO: 143205 - DNA, 20 bp, synthetic construct
  source 1..20: mol_type = other DNA
aatgatccgcccacttcagc

SEQ ID NO: 143206 - DNA, 20 bp, synthetic construct
  source 1..20: mol_type = other DNA
aaatgatccgcccacttcag

SEQ ID NO: 143207 - DNA, 20 bp, synthetic construct
  source 1..20: mol_type = other DNA
caaatgatccgcccacttca

SEQ ID NO: 143208 - DNA, 20 bp, synthetic construct
  source 1..20: mol_type = other DNA
tcaaatgatccgcccacttc

SEQ ID NO: 143209 - DNA, 20 bp, synthetic construct
  source 1..20: mol_type = other DNA
ctcaaatgatccgcccactt

SEQ ID NO: 143210 - DNA, 20 bp, synthetic construct
  source 1..20: mol_type = other DNA
cctcaaatgatccgcccact

SEQ ID NO: 143211 - DNA, 20 bp, synthetic construct
  source 1..20: mol_type = other DNA
acctcaaatgatccgcccac

SEQ ID NO: 143212 - DNA, 20 bp, synthetic construct
  source 1..20: mol_type = other DNA
gacctcaaatgatccgccca

SEQ ID NO: 143213 - DNA, 20 bp, synthetic construct
  source 1..20: mol_type = other DNA
tgacctcaaatgatccgccc

SEQ ID NO: 143214 - DNA, 20 bp, synthetic construct
  source 1..20: mol_type = other DNA
ctgacctcaaatgatccgcc

SEQ ID NO: 143215 - DNA, 20 bp, synthetic construct
  source 1..20: mol_type = other DNA
cctgacctcaaatgatccgc

SEQ ID NO: 143216 - DNA, 20 bp, synthetic construct
  source 1..20: mol_type = other DNA
tcctgacctcaaatgatccg

SEQ ID NO: 143217 - DNA, 20 bp, synthetic construct
  source 1..20: mol_type = other DNA
ctcctgacctcaaatgatcc

SEQ ID NO: 143218 - DNA, 20 bp, synthetic construct
  source 1..20: mol_type = other DNA
actcctgacctcaaatgatc

SEQ ID NO: 143219 - DNA, 20 bp, synthetic construct
  source 1..20: mol_type = other DNA
aactcctgacctcaaatgat

SEQ ID NO: 143220 - DNA, 20 bp, synthetic construct
  source 1..20: mol_type = other DNA
aaactcctgacctcaaatga

SEQ ID NO: 143221 - DNA, 20 bp, synthetic construct
  source 1..20: mol_type = other DNA
caaactcctgacctcaaatg

SEQ ID NO: 143222 - DNA, 20 bp, synthetic construct
  source 1..20: mol_type = other DNA
tcaaactcctgacctcaaat

SEQ ID NO: 143223 - DNA, 20 bp, synthetic construct
  source 1..20: mol_type = other DNA
ctcaaactcctgacctcaaa

SEQ ID NO: 143224 - DNA, 20 bp, synthetic construct
  source 1..20: mol_type = other DNA
tctcaaactcctgacctcaa

SEQ ID NO: 143225 - DNA, 20 bp, synthetic construct
  source 1..20: mol_type = other DNA
atctcaaactcctgacctca

SEQ ID NO: 143226 - DNA, 20 bp, synthetic construct
  source 1..20: mol_type = other DNA
gatctcaaactcctgacctc

SEQ ID NO: 143227 - DNA, 20 bp, synthetic construct
  source 1..20: mol_type = other DNA
tgatctcaaactcctgacct

SEQ ID NO: 143228 - DNA, 20 bp, synthetic construct
  source 1..20: mol_type = other DNA
ctgatctcaaactcctgacc

SEQ ID NO: 143229 - DNA, 20 bp, synthetic construct
  source 1..20: mol_type = other DNA
gctgatctcaaactcctgac

SEQ ID NO: 143230 - DNA, 20 bp, synthetic construct
  source 1..20: mol_type = other DNA
ggctgatctcaaactcctga

SEQ ID NO: 143231 - DNA, 20 bp, synthetic construct
  source 1..20: mol_type = other DNA
aggctgatctcaaactcctg

SEQ ID NO: 143232 - DNA, 20 bp, synthetic construct
  source 1..20: mol_type = other DNA
caggctgatctcaaactcct

SEQ ID NO: 143233 - DNA, 20 bp, synthetic construct
  source 1..20: mol_type = other DNA
ccaggctgatctcaaactcc

SEQ ID NO: 143234 - DNA, 20 bp, synthetic construct
  source 1..20: mol_type = other DNA
gccaggctgatctcaaactc

SEQ ID NO: 143235 - DNA, 20 bp, synthetic construct
  source 1..20: mol_type = other DNA
ggccaggctgatctcaaact

SEQ ID NO: 143236 - DNA, 20 bp, synthetic construct
  source 1..20: mol_type = other DNA
tggccaggctgatctcaaac

SEQ ID NO: 143237 - DNA, 20 bp, synthetic construct
  source 1..20: mol_type = other DNA
ctggccaggctgatctcaaa

SEQ ID NO: 143238 - DNA, 20 bp, synthetic construct
  source 1..20: mol_type = other DNA
gctggccaggctgatctcaa

SEQ ID NO: 143239 - DNA, 20 bp, synthetic construct
  source 1..20: mol_type = other DNA
tgctggccaggctgatctca

SEQ ID NO: 143240 - DNA, 20 bp, synthetic construct
  source 1..20: mol_type = other DNA
atgctggccaggctgatctc

SEQ ID NO: 143241 - DNA, 20 bp, synthetic construct
  source 1..20: mol_type = other DNA
catgctggccaggctgatct

SEQ ID NO: 143242 - DNA, 20 bp, synthetic construct
  source 1..20: mol_type = other DNA
ccatgctggccaggctgatc

SEQ ID NO: 143243 - DNA, 20 bp, synthetic construct
  source 1..20: mol_type = other DNA
gccatgctggccaggctgat

SEQ ID NO: 143244 - DNA, 20 bp, synthetic construct
  source 1..20: mol_type = other DNA
cgccatgctggccaggctga

SEQ ID NO: 143245 - DNA, 20 bp, synthetic construct
  source 1..20: mol_type = other DNA
tcgccatgctggccaggctg

SEQ ID NO: 143246 - DNA, 20 bp, synthetic construct
  source 1..20: mol_type = other DNA
ttcgccatgctggccaggct

SEQ ID NO: 143247 - DNA, 20 bp, synthetic construct
  source 1..20: mol_type = other DNA
tttcgccatgctggccaggc

SEQ ID NO: 143248 - DNA, 20 bp, synthetic construct
  source 1..20: mol_type = other DNA
gtttcgccatgctggccagg

SEQ ID NO: 143249 - DNA, 20 bp, synthetic construct
  source 1..20: mol_type = other DNA
ggtttcgccatgctggccag

SEQ ID NO: 143250 - DNA, 20 bp, synthetic construct
  source 1..20: mol_type = other DNA
gggtttcgccatgctggcca

SEQ ID NO: 143251 - DNA, 20 bp, synthetic construct
  source 1..20: mol_type = other DNA
ggggtttcgccatgctggcc

SEQ ID NO: 143252 - DNA, 20 bp, synthetic construct
  source 1..20: mol_type = other DNA
tggggtttcgccatgctggc

SEQ ID NO: 143253 - DNA, 20 bp, synthetic construct
  source 1..20: mol_type = other DNA
atggggtttcgccatgctgg

SEQ ID NO: 143254 - DNA, 20 bp, synthetic construct
  source 1..20: mol_type = other DNA
gatggggtttcgccatgctg

SEQ ID NO: 143255 - DNA, 20 bp, synthetic construct
  source 1..20: mol_type = other DNA
agatggggtttcgccatgct

SEQ ID NO: 143256 - DNA, 20 bp, synthetic construct
  source 1..20: mol_type = other DNA
gagatggggtttcgccatgc

SEQ ID NO: 143257 - DNA, 20 bp, synthetic construct
  source 1..20: mol_type = other DNA
agagatggggtttcgccatg

SEQ ID NO: 143258 - DNA, 20 bp, synthetic construct
  source 1..20: mol_type = other DNA
tagagatggggtttcgccat

SEQ ID NO: 143259 - DNA, 20 bp, synthetic construct
  source 1..20: mol_type = other DNA
gtagagatggggtttcgcca

SEQ ID NO: 143260 - DNA, 20 bp, synthetic construct
  source 1..20: mol_type = other DNA
agtagagatggggtttcgcc

SEQ ID NO: 143261 - DNA, 20 bp, synthetic construct
  source 1..20: mol_type = other DNA
tagtagagatggggtttcgc

SEQ ID NO: 143262 - DNA, 20 bp, synthetic construct
  source 1..20: mol_type = other DNA
ttagtagagatggggtttcg

SEQ ID NO: 143263 - DNA, 20 bp, synthetic construct
  source 1..20: mol_type = other DNA
tttagtagagatggggtttc

SEQ ID NO: 143264 - DNA, 20 bp, synthetic construct
  source 1..20: mol_type = other DNA
ttttagtagagatggggttt

SEQ ID NO: 143265 - DNA, 20 bp, synthetic construct
  source 1..20: mol_type = other DNA
tttttagtagagatggggtt

SEQ ID NO: 143266 - DNA, 20 bp, synthetic construct
  source 1..20: mol_type = other DNA
atttttagtagagatggggt

SEQ ID NO: 143267 - DNA, 20 bp, synthetic construct
  source 1..20: mol_type = other DNA
tatttttagtagagatgggg

SEQ ID NO: 143268 - DNA, 20 bp, synthetic construct
  source 1..20: mol_type = other DNA
gtatttttagtagagatggg

SEQ ID NO: 143269 - DNA, 20 bp, synthetic construct
  source 1..20: mol_type = other DNA
tgtatttttagtagagatgg

SEQ ID NO: 143270 - DNA, 20 bp, synthetic construct
  source 1..20: mol_type = other DNA
ttgtatttttagtagagatg

SEQ ID NO: 143271 - DNA, 20 bp, synthetic construct
  source 1..20: mol_type = other DNA
tttgtatttttagtagagat

SEQ ID NO: 143272 - DNA, 20 bp, synthetic construct
  source 1..20: mol_type = other DNA
ttttgtatttttagtagaga

SEQ ID NO: 143273 - DNA, 20 bp, synthetic construct
  source 1..20: mol_type = other DNA
tttttgtatttttagtagag

SEQ ID NO: 143274 - DNA, 20 bp, synthetic construct
  source 1..20: mol_type = other DNA
atttttgtatttttagtaga

SEQ ID NO: 143275 - DNA, 20 bp, synthetic construct
  source 1..20: mol_type = other DNA
aatttttgtatttttagtag

SEQ ID NO: 143276 - DNA, 20 bp, synthetic construct
  source 1..20: mol_type = other DNA
taatttttgtatttttagta

SEQ ID NO: 143277 - DNA, 20 bp, synthetic construct
  source 1..20: mol_type = other DNA
ctaatttttgtatttttagt

SEQ ID NO: 143278 - DNA, 20 bp, synthetic construct
  source 1..20: mol_type = other DNA
gctaatttttgtatttttag

SEQ ID NO: 143279 - DNA, 20 bp, synthetic construct
  source 1..20: mol_type = other DNA
agctaatttttgtattttta

SEQ ID NO: 143280 - DNA, 20 bp, synthetic construct
  source 1..20: mol_type = other DNA
cagctaatttttgtattttt

SEQ ID NO: 143281 - DNA, 20 bp, synthetic construct
  source 1..20: mol_type = other DNA
ccagctaatttttgtatttt

SEQ ID NO: 143282 - DNA, 20 bp, synthetic construct
  source 1..20: mol_type = other DNA
cccagctaatttttgtattt

SEQ ID NO: 143283 - DNA, 20 bp, synthetic construct
  source 1..20: mol_type = other DNA
gcccagctaatttttgtatt

SEQ ID NO: 143284 - DNA, 20 bp, synthetic construct
  source 1..20: mol_type = other DNA
cgcccagctaatttttgtat

SEQ ID NO: 143285 - DNA, 20 bp, synthetic construct
  source 1..20: mol_type = other DNA
acgcccagctaatttttgta

SEQ ID NO: 143286 - DNA, 20 bp, synthetic construct
  source 1..20: mol_type = other DNA
cacgcccagctaatttttgt

SEQ ID NO: 143287 - DNA, 20 bp, synthetic construct
  source 1..20: mol_type = other DNA
ccacgcccagctaatttttg

SEQ ID NO: 143288 - DNA, 20 bp, synthetic construct
  source 1..20: mol_type = other DNA
accacgcccagctaattttt

SEQ ID NO: 143289 - DNA, 20 bp, synthetic construct
  source 1..20: mol_type = other DNA
caccacgcccagctaatttt

SEQ ID NO: 143290 - DNA, 20 bp, synthetic construct
  source 1..20: mol_type = other DNA
ccaccacgcccagctaattt

SEQ ID NO: 143291 - DNA, 20 bp, synthetic construct
  source 1..20: mol_type = other DNA
gccaccacgcccagctaatt

SEQ ID NO: 143292 - DNA, 20 bp, synthetic construct
  source 1..20: mol_type = other DNA
tgccaccacgcccagctaat

SEQ ID NO: 143293 - DNA, 20 bp, synthetic construct
  source 1..20: mol_type = other DNA
gtgccaccacgcccagctaa

SEQ ID NO: 143294 - DNA, 20 bp, synthetic construct
  source 1..20: mol_type = other DNA
tgtgccaccacgcccagcta

SEQ ID NO: 143295 - DNA, 20 bp, synthetic construct
  source 1..20: mol_type = other DNA
atgtgccaccacgcccagct

SEQ ID NO: 143296 - DNA, 20 bp, synthetic construct
  source 1..20: mol_type = other DNA
catgtgccaccacgcccagc

SEQ ID NO: 143297 - DNA, 20 bp, synthetic construct
  source 1..20: mol_type = other DNA
gcatgtgccaccacgcccag

SEQ ID NO: 143298 - DNA, 20 bp, synthetic construct
  source 1..20: mol_type = other DNA
ggcatgtgccaccacgccca

SEQ ID NO: 143299 - DNA, 20 bp, synthetic construct
  source 1..20: mol_type = other DNA
aggcatgtgccaccacgccc

SEQ ID NO: 143300 - DNA, 20 bp, synthetic construct
  source 1..20: mol_type = other DNA
caggcatgtgccaccacgcc

SEQ ID NO: 143301 - DNA, 20 bp, synthetic construct
  source 1..20: mol_type = other DNA
acaggcatgtgccaccacgc

SEQ ID NO: 143302 - DNA, 20 bp, synthetic construct
  source 1..20: mol_type = other DNA
tacaggcatgtgccaccacg

SEQ ID NO: 143303 - DNA, 20 bp, synthetic construct
  source 1..20: mol_type = other DNA
ttacaggcatgtgccaccac

SEQ ID NO: 143304 - DNA, 20 bp, synthetic construct
  source 1..20: mol_type = other DNA
attacaggcatgtgccacca

SEQ ID NO: 143305 - DNA, 20 bp, synthetic construct
  source 1..20: mol_type = other DNA
gattacaggcatgtgccacc

SEQ ID NO: 143306 - DNA, 20 bp, synthetic construct
  source 1..20: mol_type = other DNA
agattacaggcatgtgccac

SEQ ID NO: 143307 - DNA, 20 bp, synthetic construct
  source 1..20: mol_type = other DNA
gagattacaggcatgtgcca

SEQ ID NO: 143308 - DNA, 20 bp, synthetic construct
  source 1..20: mol_type = other DNA
tgagattacaggcatgtgcc

SEQ ID NO: 143309 - DNA, 20 bp, synthetic construct
  source 1..20: mol_type = other DNA
ctgagattacaggcatgtgc

SEQ ID NO: 143310 - DNA, 20 bp, synthetic construct
  source 1..20: mol_type = other DNA
gctgagattacaggcatgtg

SEQ ID NO: 143311 - DNA, 20 bp, synthetic construct
  source 1..20: mol_type = other DNA
agctgagattacaggcatgt

SEQ ID NO: 143312 - DNA, 20 bp, synthetic construct
  source 1..20: mol_type = other DNA
tagctgagattacaggcatg

SEQ ID NO: 143313 - DNA, 20 bp, synthetic construct
  source 1..20: mol_type = other DNA
gtagctgagattacaggcat

SEQ ID NO: 143314 - DNA, 20 bp, synthetic construct
  source 1..20: mol_type = other DNA
agtagctgagattacaggca

SEQ ID NO: 143315 - DNA, 20 bp, synthetic construct
  source 1..20: mol_type = other DNA
gagtagctgagattacaggc

SEQ ID NO: 143316 - DNA, 20 bp, synthetic construct
  source 1..20: mol_type = other DNA
cgagtagctgagattacagg

SEQ ID NO: 143317 - DNA, 20 bp, synthetic construct
  source 1..20: mol_type = other DNA
ccgagtagctgagattacag

SEQ ID NO: 143318 - DNA, 20 bp, synthetic construct
  source 1..20: mol_type = other DNA
cccgagtagctgagattaca

SEQ ID NO: 143319 - DNA, 20 bp, synthetic construct
  source 1..20: mol_type = other DNA
tcccgagtagctgagattac

SEQ ID NO: 143320 - DNA, 20 bp, synthetic construct
  source 1..20: mol_type = other DNA
ctcccgagtagctgagatta

SEQ ID NO: 143321 - DNA, 20 bp, synthetic construct
  source 1..20: mol_type = other DNA
cctcccgagtagctgagatt

SEQ ID NO: 143322 - DNA, 20 bp, synthetic construct
  source 1..20: mol_type = other DNA
gcctcccgagtagctgagat

SEQ ID NO: 143323 - DNA, 20 bp, synthetic construct
  source 1..20: mol_type = other DNA
agcctcccgagtagctgaga

SEQ ID NO: 143324 - DNA, 20 bp, synthetic construct
  source 1..20: mol_type = other DNA
cagcctcccgagtagctgag

SEQ ID NO: 143325 - DNA, 20 bp, synthetic construct
  source 1..20: mol_type = other DNA
tcagcctcccgagtagctga

SEQ ID NO: 143326 - DNA, 20 bp, synthetic construct
  source 1..20: mol_type = other DNA
ctcagcctcccgagtagctg

SEQ ID NO: 143327 - DNA, 20 bp, synthetic construct
  source 1..20: mol_type = other DNA
cctcagcctcccgagtagct

SEQ ID NO: 143328 - DNA, 20 bp, synthetic construct
  source 1..20: mol_type = other DNA
gcctcagcctcccgagtagc

SEQ ID NO: 143329 - DNA, 20 bp, synthetic construct
  source 1..20: mol_type = other DNA
tgcctcagcctcccgagtag

SEQ ID NO: 143330 - DNA, 20 bp, synthetic construct
  source 1..20: mol_type = other DNA
ctgcctcagcctcccgagta

SEQ ID NO: 143331 - DNA, 20 bp, synthetic construct
  source 1..20: mol_type = other DNA
cctgcctcagcctcccgagt

SEQ ID NO: 143332 - DNA, 20 bp, synthetic construct
  source 1..20: mol_type = other DNA
tcctgcctcagcctcccgag

SEQ ID NO: 143333 - DNA, 20 bp, synthetic construct
  source 1..20: mol_type = other DNA
ctcctgcctcagcctcccga

SEQ ID NO: 143334 - DNA, 20 bp, synthetic construct
  source 1..20: mol_type = other DNA
tctcctgcctcagcctcccg

SEQ ID NO: 143335 - DNA, 20 bp, synthetic construct
  source 1..20: mol_type = other DNA
ttctcctgcctcagcctccc

SEQ ID NO: 143336 - DNA, 20 bp, synthetic construct
  source 1..20: mol_type = other DNA
attctcctgcctcagcctcc

SEQ ID NO: 143337 - DNA, 20 bp, synthetic construct
  source 1..20: mol_type = other DNA
aattctcctgcctcagcctc

SEQ ID NO: 143338 - DNA, 20 bp, synthetic construct
  source 1..20: mol_type = other DNA
caattctcctgcctcagcct

SEQ ID NO: 143339 - DNA, 20 bp, synthetic construct
  source 1..20: mol_type = other DNA
gcaattctcctgcctcagcc

SEQ ID NO: 143340 - DNA, 20 bp, synthetic construct
  source 1..20: mol_type = other DNA
agcaattctcctgcctcagc

SEQ ID NO: 143341 - DNA, 20 bp, synthetic construct
  source 1..20: mol_type = other DNA
aagcaattctcctgcctcag

SEQ ID NO: 143342 - DNA, 20 bp, synthetic construct
  source 1..20: mol_type = other DNA
caagcaattctcctgcctca

SEQ ID NO: 143343 - DNA, 20 bp, synthetic construct
  source 1..20: mol_type = other DNA
tcaagcaattctcctgcctc

SEQ ID NO: 143344 - DNA, 20 bp, synthetic construct
  source 1..20: mol_type = other DNA
ttcaagcaattctcctgcct

SEQ ID NO: 143345 - DNA, 20 bp, synthetic construct
  source 1..20: mol_type = other DNA
gttcaagcaattctcctgcc

SEQ ID NO: 143346 - DNA, 20 bp, synthetic construct
  source 1..20: mol_type = other DNA
ggttcaagcaattctcctgc

SEQ ID NO: 143347 - DNA, 20 bp, synthetic construct
  source 1..20: mol_type = other DNA
aggttcaagcaattctcctg

SEQ ID NO: 143348 - DNA, 20 bp, synthetic construct
  source 1..20: mol_type = other DNA
caggttcaagcaattctcct

SEQ ID NO: 143349 - DNA, 20 bp, synthetic construct
  source 1..20: mol_type = other DNA
ccaggttcaagcaattctcc

SEQ ID NO: 143350 - DNA, 20 bp, synthetic construct
  source 1..20: mol_type = other DNA
cccaggttcaagcaattctc

SEQ ID NO: 143351 - DNA, 20 bp, synthetic construct
  source 1..20: mol_type = other DNA
tcccaggttcaagcaattct

SEQ ID NO: 143352 - DNA, 20 bp, synthetic construct
  source 1..20: mol_type = other DNA
ctcccaggttcaagcaattc

SEQ ID NO: 143353 - DNA, 20 bp, synthetic construct
  source 1..20: mol_type = other DNA
cctcccaggttcaagcaatt

SEQ ID NO: 143354 - DNA, 20 bp, synthetic construct
  source 1..20: mol_type = other DNA
gcctcccaggttcaagcaat

SEQ ID NO: 143355 - DNA, 20 bp, synthetic construct
  source 1..20: mol_type = other DNA
tgcctcccaggttcaagcaa

SEQ ID NO: 143356 - DNA, 20 bp, synthetic construct
  source 1..20: mol_type = other DNA
ctgcctcccaggttcaagca

SEQ ID NO: 143357 - DNA, 20 bp, synthetic construct
  source 1..20: mol_type = other DNA
tctgcctcccaggttcaagc

SEQ ID NO: 143358 - DNA, 20 bp, synthetic construct
  source 1..20: mol_type = other DNA
ctctgcctcccaggttcaag

SEQ ID NO: 143359 - DNA, 20 bp, synthetic construct
  source 1..20: mol_type = other DNA
cctctgcctcccaggttcaa

SEQ ID NO: 143360 - DNA, 20 bp, synthetic construct
  source 1..20: mol_type = other DNA
acctctgcctcccaggttca

SEQ ID NO: 143361 - DNA, 20 bp, synthetic construct
  source 1..20: mol_type = other DNA
aacctctgcctcccaggttc

SEQ ID NO: 143362 - DNA, 20 bp, synthetic construct
  source 1..20: mol_type = other DNA
caacctctgcctcccaggtt

SEQ ID NO: 143363 - DNA, 20 bp, synthetic construct
  source 1..20: mol_type = other DNA
gcaacctctgcctcccaggt

SEQ ID NO: 143364 - DNA, 20 bp, synthetic construct
  source 1..20: mol_type = other DNA
tgcaacctctgcctcccagg

SEQ ID NO: 143365 - DNA, 20 bp, synthetic construct
  source 1..20: mol_type = other DNA
ctgcaacctctgcctcccag

SEQ ID NO: 143366 - DNA, 20 bp, synthetic construct
  source 1..20: mol_type = other DNA
actgcaacctctgcctccca

SEQ ID NO: 143367 - DNA, 20 bp, synthetic construct
  source 1..20: mol_type = other DNA
cactgcaacctctgcctccc

SEQ ID NO: 143368 - DNA, 20 bp, synthetic construct
  source 1..20: mol_type = other DNA
tcactgcaacctctgcctcc

SEQ ID NO: 143369 - DNA, 20 bp, synthetic construct
  source 1..20: mol_type = other DNA
ctcactgcaacctctgcctc

SEQ ID NO: 143370 - DNA, 20 bp, synthetic construct
  source 1..20: mol_type = other DNA
gctcactgcaacctctgcct

SEQ ID NO: 143371 - DNA, 20 bp, synthetic construct
  source 1..20: mol_type = other DNA
ggctcactgcaacctctgcc

SEQ ID NO: 143372 - DNA, 20 bp, synthetic construct
  source 1..20: mol_type = other DNA
aggctcactgcaacctctgc

SEQ ID NO: 143373 - DNA, 20 bp, synthetic construct
  source 1..20: mol_type = other DNA
caggctcactgcaacctctg

SEQ ID NO: 143374 - DNA, 20 bp, synthetic construct
  source 1..20: mol_type = other DNA
ccaggctcactgcaacctct

SEQ ID NO: 143375 - DNA, 20 bp, synthetic construct
  source 1..20: mol_type = other DNA
cccaggctcactgcaacctc

SEQ ID NO: 143376 - DNA, 20 bp, synthetic construct
  source 1..20: mol_type = other DNA
gcccaggctcactgcaacct

SEQ ID NO: 143377 - DNA, 20 bp, synthetic construct
  source 1..20: mol_type = other DNA
tgcccaggctcactgcaacc

SEQ ID NO: 143378 - DNA, 20 bp, synthetic construct
  source 1..20: mol_type = other DNA
ttgcccaggctcactgcaac

SEQ ID NO: 143379 - DNA, 20 bp, synthetic construct
  source 1..20: mol_type = other DNA
gttgcccaggctcactgcaa

SEQ ID NO: 143380 - DNA, 20 bp, synthetic construct
  source 1..20: mol_type = other DNA
tgttgcccaggctcactgca

SEQ ID NO: 143381 - DNA, 20 bp, synthetic construct
  source 1..20: mol_type = other DNA
ctgttgcccaggctcactgc

SEQ ID NO: 143382 - DNA, 20 bp, synthetic construct
  source 1..20: mol_type = other DNA
tctgttgcccaggctcactg

SEQ ID NO: 143383 - DNA, 20 bp, synthetic construct
  source 1..20: mol_type = other DNA
ctctgttgcccaggctcact

SEQ ID NO: 143384 - DNA, 20 bp, synthetic construct
  source 1..20: mol_type = other DNA
actctgttgcccaggctcac

SEQ ID NO: 143385 - DNA, 20 bp, synthetic construct
  source 1..20: mol_type = other DNA
cactctgttgcccaggctca

SEQ ID NO: 143386 - DNA, 20 bp, synthetic construct
  source 1..20: mol_type = other DNA
tcactctgttgcccaggctc

SEQ ID NO: 143387 - DNA, 20 bp, synthetic construct
  source 1..20: mol_type = other DNA
ctcactctgttgcccaggct

SEQ ID NO: 143388 - DNA, 20 bp, synthetic construct
  source 1..20: mol_type = other DNA
actcactctgttgcccaggc

SEQ ID NO: 143389 - DNA, 20 bp, synthetic construct
  source 1..20: mol_type = other DNA
cactcactctgttgcccagg

SEQ ID NO: 143390 - DNA, 20 bp, synthetic construct
  source 1..20: mol_type = other DNA
tcactcactctgttgcccag

SEQ ID NO: 143391 - DNA, 20 bp, synthetic construct
  source 1..20: mol_type = other DNA
ctcactcactctgttgccca

SEQ ID NO: 143392 - DNA, 20 bp, synthetic construct
  source 1..20: mol_type = other DNA
tctcactcactctgttgccc

SEQ ID NO: 143393 - DNA, 20 bp, synthetic construct
  source 1..20: mol_type = other DNA
gtctcactcactctgttgcc

SEQ ID NO: 143394 - DNA, 20 bp, synthetic construct
  source 1..20: mol_type = other DNA
agtctcactcactctgttgc

SEQ ID NO: 143395 - DNA, 20 bp, synthetic construct
  source 1..20: mol_type = other DNA
aagtctcactcactctgttg

SEQ ID NO: 143396 - DNA, 20 bp, synthetic construct
  source 1..20: mol_type = other DNA
taagtctcactcactctgtt

SEQ ID NO: 143397 - DNA, 20 bp, synthetic construct
  source 1..20: mol_type = other DNA
ataagtctcactcactctgt

SEQ ID NO: 143398 - DNA, 20 bp, synthetic construct
  source 1..20: mol_type = other DNA
tataagtctcactcactctg

SEQ ID NO: 143399 - DNA, 20 bp, synthetic construct
  source 1..20: mol_type = other DNA
atataagtctcactcactct

SEQ ID NO: 143400 - DNA, 20 bp, synthetic construct
  source 1..20: mol_type = other DNA
gatataagtctcactcactc

SEQ ID NO: 143401 - DNA, 20 bp, synthetic construct
  source 1..20: mol_type = other DNA
agatataagtctcactcact

SEQ ID NO: 143402 - DNA, 20 bp, synthetic construct
  source 1..20: mol_type = other DNA
gagatataagtctcactcac

SEQ ID NO: 143403 - DNA, 20 bp, synthetic construct
  source 1..20: mol_type = other DNA
tgagatataagtctcactca

SEQ ID NO: 143404 - DNA, 20 bp, synthetic construct
  source 1..20: mol_type = other DNA
ttgagatataagtctcactc

SEQ ID NO: 143405 - DNA, 20 bp, synthetic construct
  source 1..20: mol_type = other DNA
tttgagatataagtctcact

SEQ ID NO: 143406 - DNA, 20 bp, synthetic construct
  source 1..20: mol_type = other DNA
ttttgagatataagtctcac

SEQ ID NO: 143407 - DNA, 20 bp, synthetic construct
  source 1..20: mol_type = other DNA
tttttgagatataagtctca

SEQ ID NO: 143408 - DNA, 20 bp, synthetic construct
  source 1..20: mol_type = other DNA
ttttttgagatataagtctc

SEQ ID NO: 143409 - DNA, 20 bp, synthetic construct
  source 1..20: mol_type = other DNA
tttttttgagatataagtct

SEQ ID NO: 143410 - DNA, 20 bp, synthetic construct
  source 1..20: mol_type = other DNA
ttttttttgagatataagtc

SEQ ID NO: 143411 - DNA, 20 bp, synthetic construct
  source 1..20: mol_type = other DNA
tttttttttgagatataagt

SEQ ID NO: 143412 - DNA, 20 bp, synthetic construct
  source 1..20: mol_type = other DNA
gtttttttttgagatataag

SEQ ID NO: 143413 - DNA, 20 bp, synthetic construct
  source 1..20: mol_type = other DNA
tgtttttttttgagatataa

SEQ ID NO: 143414 - DNA, 20 bp, synthetic construct
  source 1..20: mol_type = other DNA
ttgtttttttttgagatata

SEQ ID NO: 143415 - DNA, 20 bp, synthetic construct
  source 1..20: mol_type = other DNA
tttgtttttttttgagatat

SEQ ID NO: 143416 - DNA, 20 bp, synthetic construct
  source 1..20: mol_type = other DNA
ttttgtttttttttgagata

SEQ ID NO: 143417 - DNA, 20 bp, synthetic construct
  source 1..20: mol_type = other DNA
tttttgtttttttttgagat

SEQ ID NO: 143418 - DNA, 20 bp, synthetic construct
  source 1..20: mol_type = other DNA
ttttttgtttttttttgaga

SEQ ID NO: 143419 - DNA, 20 bp, synthetic construct
  source 1..20: mol_type = other DNA
gttttttgtttttttttgag

SEQ ID NO: 143420 - DNA, 20 bp, synthetic construct
  source 1..20: mol_type = other DNA
tgttttttgtttttttttga

SEQ ID NO: 143421 - DNA, 20 bp, synthetic construct
  source 1..20: mol_type = other DNA
ttgttttttgtttttttttg

SEQ ID NO: 143422 - DNA, 20 bp, synthetic construct
  source 1..20: mol_type = other DNA
tttgttttttgttttttttt

SEQ ID NO: 143423 - DNA, 20 bp, synthetic construct
  source 1..20: mol_type = other DNA
ttttgttttttgtttttttt

SEQ ID NO: 143424 - DNA, 20 bp, synthetic construct
  source 1..20: mol_type = other DNA
tttttgttttttgttttttt

SEQ ID NO: 143425 - DNA, 20 bp, synthetic construct
  source 1..20: mol_type = other DNA
ttttttgttttttgtttttt

SEQ ID NO: 143426 - DNA, 20 bp, synthetic construct
  source 1..20: mol_type = other DNA
gttttttgttttttgttttt

SEQ ID NO: 143427 - DNA, 20 bp, synthetic construct
  source 1..20: mol_type = other DNA
agttttttgttttttgtttt

SEQ ID NO: 143428 - DNA, 20 bp, synthetic construct
  source 1..20: mol_type = other DNA
cagttttttgttttttgttt

SEQ ID NO: 143429 - DNA, 20 bp, synthetic construct
  source 1..20: mol_type = other DNA
tcagttttttgttttttgtt

SEQ ID NO: 143430 - DNA, 20 bp, synthetic construct
  source 1..20: mol_type = other DNA
ttcagttttttgttttttgt

SEQ ID NO: 143431 - DNA, 20 bp, synthetic construct
  source 1..20: mol_type = other DNA
tttcagttttttgttttttg

SEQ ID NO: 143432 - DNA, 20 bp, synthetic construct
  source 1..20: mol_type = other DNA
ctttcagttttttgtttttt

SEQ ID NO: 143433 - DNA, 20 bp, synthetic construct
  source 1..20: mol_type = other DNA
tctttcagttttttgttttt

SEQ ID NO: 143434 - DNA, 20 bp, synthetic construct
  source 1..20: mol_type = other DNA
gtctttcagttttttgtttt

SEQ ID NO: 143435 - DNA, 20 bp, synthetic construct
  source 1..20: mol_type = other DNA
tgtctttcagttttttgttt

SEQ ID NO: 143436 - DNA, 20 bp, synthetic construct
  source 1..20: mol_type = other DNA
atgtctttcagttttttgtt

SEQ ID NO: 143437 - DNA, 20 bp, synthetic construct
  source 1..20: mol_type = other DNA
catgtctttcagttttttgt

SEQ ID NO: 143438 - DNA, 20 bp, synthetic construct
  source 1..20: mol_type = other DNA
tcatgtctttcagttttttg

SEQ ID NO: 143439 - DNA, 20 bp, synthetic construct
  source 1..20: mol_type = other DNA
ttcatgtctttcagtttttt

SEQ ID NO: 143440 - DNA, 20 bp, synthetic construct
  source 1..20: mol_type = other DNA
cttcatgtctttcagttttt

SEQ ID NO: 143441 - DNA, 20 bp, synthetic construct
  source 1..20: mol_type = other DNA
tcttcatgtctttcagtttt

SEQ ID NO: 143442 - DNA, 20 bp, synthetic construct
  source 1..20: mol_type = other DNA
ttcttcatgtctttcagttt

SEQ ID NO: 143443 - DNA, 20 bp, synthetic construct
  source 1..20: mol_type = other DNA
tttcttcatgtctttcagtt

SEQ ID NO: 143444 - DNA, 20 bp, synthetic construct
  source 1..20: mol_type = other DNA
atttcttcatgtctttcagt

SEQ ID NO: 143445 - DNA, 20 bp, synthetic construct
  source 1..20: mol_type = other DNA
catttcttcatgtctttcag

SEQ ID NO: 143446 - DNA, 20 bp, synthetic construct
  source 1..20: mol_type = other DNA
ccatttcttcatgtctttca

SEQ ID NO: 143447 - DNA, 20 bp, synthetic construct
  source 1..20: mol_type = other DNA
accatttcttcatgtctttc

SEQ ID NO: 143448 - DNA, 20 bp, synthetic construct
  source 1..20: mol_type = other DNA
aaccatttcttcatgtcttt

SEQ ID NO: 143449 - DNA, 20 bp, synthetic construct
  source 1..20: mol_type = other DNA
aaaccatttcttcatgtctt

SEQ ID NO: 143450 - DNA, 20 bp, synthetic construct
  source 1..20: mol_type = other DNA
aaaaccatttcttcatgtct

SEQ ID NO: 143451 - DNA, 20 bp, synthetic construct
  source 1..20: mol_type = other DNA
aaaaaccatttcttcatgtc

SEQ ID NO: 143452 - DNA, 20 bp, synthetic construct
  source 1..20: mol_type = other DNA
caaaaaccatttcttcatgt

SEQ ID NO: 143453 - DNA, 20 bp, synthetic construct
  source 1..20: mol_type = other DNA
acaaaaaccatttcttcatg

SEQ ID NO: 143454 - DNA, 20 bp, synthetic construct
  source 1..20: mol_type = other DNA
tacaaaaaccatttcttcat

SEQ ID NO: 143455 - DNA, 20 bp, synthetic construct
  source 1..20: mol_type = other DNA
gtacaaaaaccatttcttca

SEQ ID NO: 143456 - DNA, 20 bp, synthetic construct
  source 1..20: mol_type = other DNA
ggtacaaaaaccatttcttc

SEQ ID NO: 143457 - DNA, 20 bp, synthetic construct
  source 1..20: mol_type = other DNA
tggtacaaaaaccatttctt

SEQ ID NO: 143458 - DNA, 20 bp, synthetic construct
  source 1..20: mol_type = other DNA
ttggtacaaaaaccatttct

SEQ ID NO: 143459 - DNA, 20 bp, synthetic construct
  source 1..20: mol_type = other DNA
cttggtacaaaaaccatttc

SEQ ID NO: 143460 - DNA, 20 bp, synthetic construct
  source 1..20: mol_type = other DNA
ccttggtacaaaaaccattt

SEQ ID NO: 143461 - DNA, 20 bp, synthetic construct
  source 1..20: mol_type = other DNA
accttggtacaaaaaccatt

SEQ ID NO: 143462 - DNA, 20 bp, synthetic construct
  source 1..20: mol_type = other DNA
aaccttggtacaaaaaccat

SEQ ID NO: 143463 - DNA, 20 bp, synthetic construct
  source 1..20: mol_type = other DNA
aaaccttggtacaaaaacca

SEQ ID NO: 143464 - DNA, 20 bp, synthetic construct
  source 1..20: mol_type = other DNA
caaaccttggtacaaaaacc

SEQ ID NO: 143465 - DNA, 20 bp, synthetic construct
  source 1..20: mol_type = other DNA
ccaaaccttggtacaaaaac

SEQ ID NO: 143466 - DNA, 20 bp, synthetic construct
  source 1..20: mol_type = other DNA
gccaaaccttggtacaaaaa

SEQ ID NO: 143467 - DNA, 20 bp, synthetic construct
  source 1..20: mol_type = other DNA
ggccaaaccttggtacaaaa

SEQ ID NO: 143468 - DNA, 20 bp, synthetic construct
  source 1..20: mol_type = other DNA
gggccaaaccttggtacaaa

SEQ ID NO: 143469 - DNA, 20 bp, synthetic construct
  source 1..20: mol_type = other DNA
tgggccaaaccttggtacaa

SEQ ID NO: 143470 - DNA, 20 bp, synthetic construct
  source 1..20: mol_type = other DNA
gtgggccaaaccttggtaca

SEQ ID NO: 143471 - DNA, 20 bp, synthetic construct
  source 1..20: mol_type = other DNA
cgtgggccaaaccttggtac

SEQ ID NO: 143472 - DNA, 20 bp, synthetic construct
  source 1..20: mol_type = other DNA
gcgtgggccaaaccttggta

SEQ ID NO: 143473 - DNA, 20 bp, synthetic construct
  source 1..20: mol_type = other DNA
agcgtgggccaaaccttggt

SEQ ID NO: 143474 - DNA, 20 bp, synthetic construct
  source 1..20: mol_type = other DNA
cagcgtgggccaaaccttgg

SEQ ID NO: 143475 - DNA, 20 bp, synthetic construct
  source 1..20: mol_type = other DNA
tcagcgtgggccaaaccttg

SEQ ID NO: 143476 - DNA, 20 bp, synthetic construct
  source 1..20: mol_type = other DNA
ctcagcgtgggccaaacctt

SEQ ID NO: 143477 - DNA, 20 bp, synthetic construct
  source 1..20: mol_type = other DNA
tctcagcgtgggccaaacct

SEQ ID NO: 143478 - DNA, 20 bp, synthetic construct
  source 1..20: mol_type = other DNA
atctcagcgtgggccaaacc

SEQ ID NO: 143479 - DNA, 20 bp, synthetic construct
  source 1..20: mol_type = other DNA
aatctcagcgtgggccaaac

SEQ ID NO: 143480 - DNA, 20 bp, synthetic construct
  source 1..20: mol_type = other DNA
gaatctcagcgtgggccaaa

SEQ ID NO: 143481 - DNA, 20 bp, synthetic construct
  source 1..20: mol_type = other DNA
tgaatctcagcgtgggccaa

SEQ ID NO: 143482 - DNA, 20 bp, synthetic construct
  source 1..20: mol_type = other DNA
gtgaatctcagcgtgggcca

SEQ ID NO: 143483 - DNA, 20 bp, synthetic construct
  source 1..20: mol_type = other DNA
tgtgaatctcagcgtgggcc

SEQ ID NO: 143484 - DNA, 20 bp, synthetic construct
  source 1..20: mol_type = other DNA
ttgtgaatctcagcgtgggc

SEQ ID NO: 143485 - DNA, 20 bp, synthetic construct
  source 1..20: mol_type = other DNA
tttgtgaatctcagcgtggg

SEQ ID NO: 143486 - DNA, 20 bp, synthetic construct
  source 1..20: mol_type = other DNA
ctttgtgaatctcagcgtgg

SEQ ID NO: 143487 - DNA, 20 bp, synthetic construct
  source 1..20: mol_type = other DNA
tctttgtgaatctcagcgtg

SEQ ID NO: 143488 - DNA, 20 bp, synthetic construct
  source 1..20: mol_type = other DNA
ttctttgtgaatctcagcgt

SEQ ID NO: 143489 - DNA, 20 bp, synthetic construct
  source 1..20: mol_type = other DNA
gttctttgtgaatctcagcg

SEQ ID NO: 143490 - DNA, 20 bp, synthetic construct
  source 1..20: mol_type = other DNA
agttctttgtgaatctcagc

SEQ ID NO: 143491 - DNA, 20 bp, synthetic construct
  source 1..20: mol_type = other DNA
cagttctttgtgaatctcag

SEQ ID NO: 143492 - DNA, 20 bp, synthetic construct
  source 1..20: mol_type = other DNA
ccagttctttgtgaatctca

SEQ ID NO: 143493 - DNA, 20 bp, synthetic construct
  source 1..20: mol_type = other DNA
gccagttctttgtgaatctc

SEQ ID NO: 143494 - DNA, 20 bp, synthetic construct
  source 1..20: mol_type = other DNA
agccagttctttgtgaatct

SEQ ID NO: 143495 - DNA, 20 bp, synthetic construct
  source 1..20: mol_type = other DNA
aagccagttctttgtgaatc

SEQ ID NO: 143496 - DNA, 20 bp, synthetic construct
  source 1..20: mol_type = other DNA
aaagccagttctttgtgaat

SEQ ID NO: 143497 - DNA, 20 bp, synthetic construct
  source 1..20: mol_type = other DNA
gaaagccagttctttgtgaa

SEQ ID NO: 143498 - DNA, 20 bp, synthetic construct
  source 1..20: mol_type = other DNA
tgaaagccagttctttgtga

SEQ ID NO: 143499 - DNA, 20 bp, synthetic construct
  source 1..20: mol_type = other DNA
ctgaaagccagttctttgtg

SEQ ID NO: 143500 - DNA, 20 bp, synthetic construct
  source 1..20: mol_type = other DNA
actgaaagccagttctttgt

SEQ ID NO: 143501 - DNA, 20 bp, synthetic construct
  source 1..20: mol_type = other DNA
aactgaaagccagttctttg

SEQ ID NO: 143502 - DNA, 20 bp, synthetic construct
  source 1..20: mol_type = other DNA
gaactgaaagccagttcttt

SEQ ID NO: 143503 - DNA, 20 bp, synthetic construct
  source 1..20: mol_type = other DNA
agaactgaaagccagttctt

SEQ ID NO: 143504 - DNA, 20 bp, synthetic construct
  source 1..20: mol_type = other DNA
aagaactgaaagccagttct

SEQ ID NO: 143505 - DNA, 20 bp, synthetic construct
  source 1..20: mol_type = other DNA
taagaactgaaagccagttc

SEQ ID NO: 143506 - DNA, 20 bp, synthetic construct
  source 1..20: mol_type = other DNA
ataagaactgaaagccagtt

SEQ ID NO: 143507 - DNA, 20 bp, synthetic construct
  source 1..20: mol_type = other DNA
gataagaactgaaagccagt

SEQ ID NO: 143508 - DNA, 20 bp, synthetic construct
  source 1..20: mol_type = other DNA
agataagaactgaaagccag

SEQ ID NO: 143509 - DNA, 20 bp, synthetic construct
  source 1..20: mol_type = other DNA
aagataagaactgaaagcca

SEQ ID NO: 143510 - DNA, 20 bp, synthetic construct
  source 1..20: mol_type = other DNA
aaagataagaactgaaagcc

SEQ ID NO: 143511 - DNA, 20 bp, synthetic construct
  source 1..20: mol_type = other DNA
taaagataagaactgaaagc

SEQ ID NO: 143512 - DNA, 20 bp, synthetic construct
  source 1..20: mol_type = other DNA
ataaagataagaactgaaag

SEQ ID NO: 143513 - DNA, 20 bp, synthetic construct
  source 1..20: mol_type = other DNA
aataaagataagaactgaaa

SEQ ID NO: 143514 - DNA, 20 bp, synthetic construct
  source 1..20: mol_type = other DNA
aaataaagataagaactgaa

SEQ ID NO: 143515 - DNA, 20 bp, synthetic construct
  source 1..20: mol_type = other DNA
aaaataaagataagaactga

SEQ ID NO: 143516 - DNA, 20 bp, synthetic construct
  source 1..20: mol_type = other DNA
caaaataaagataagaactg

SEQ ID NO: 143517 - DNA, 20 bp, synthetic construct
  source 1..20: mol_type = other DNA
tcaaaataaagataagaact

SEQ ID NO: 143518 - DNA, 20 bp, synthetic construct
  source 1..20: mol_type = other DNA
atcaaaataaagataagaac

SEQ ID NO: 143519 - DNA, 20 bp, synthetic construct
  source 1..20: mol_type = other DNA
aatcaaaataaagataagaa

SEQ ID NO: 143520 - DNA, 20 bp, synthetic construct
  source 1..20: mol_type = other DNA
aaatcaaaataaagataaga

SEQ ID NO: 143521 - DNA, 20 bp, synthetic construct
  source 1..20: mol_type = other DNA
taaatcaaaataaagataag

SEQ ID NO: 143522 - DNA, 20 bp, synthetic construct
  source 1..20: mol_type = other DNA
ttaaatcaaaataaagataa

SEQ ID NO: 143523 - DNA, 20 bp, synthetic construct
  source 1..20: mol_type = other DNA
tttaaatcaaaataaagata

SEQ ID NO: 143524 - DNA, 20 bp, synthetic construct
  source 1..20: mol_type = other DNA
gtttaaatcaaaataaagat

SEQ ID NO: 143525 - DNA, 20 bp, synthetic construct
  source 1..20: mol_type = other DNA
agtttaaatcaaaataaaga

SEQ ID NO: 143526 - DNA, 20 bp, synthetic construct
  source 1..20: mol_type = other DNA
cagtttaaatcaaaataaag

SEQ ID NO: 143527 - DNA, 20 bp, synthetic construct
  source 1..20: mol_type = other DNA
ccagtttaaatcaaaataaa

SEQ ID NO: 143528 - DNA, 20 bp, synthetic construct
  source 1..20: mol_type = other DNA
gccagtttaaatcaaaataa

SEQ ID NO: 143529 - DNA, 20 bp, synthetic construct
  source 1..20: mol_type = other DNA
ggccagtttaaatcaaaata

SEQ ID NO: 143530 - DNA, 20 bp, synthetic construct
  source 1..20: mol_type = other DNA
gggccagtttaaatcaaaat

SEQ ID NO: 143531 - DNA, 20 bp, synthetic construct
  source 1..20: mol_type = other DNA
tgggccagtttaaatcaaaa

SEQ ID NO: 143532 - DNA, 20 bp, synthetic construct
  source 1..20: mol_type = other DNA
atgggccagtttaaatcaaa

SEQ ID NO: 143533 - DNA, 20 bp, synthetic construct
  source 1..20: mol_type = other DNA
gatgggccagtttaaatcaa

SEQ ID NO: 143534 - DNA, 20 bp, synthetic construct
  source 1..20: mol_type = other DNA
tgatgggccagtttaaatca

SEQ ID NO: 143535 - DNA, 20 bp, synthetic construct
  source 1..20: mol_type = other DNA
atgatgggccagtttaaatc

SEQ ID NO: 143536 - DNA, 20 bp, synthetic construct
  source 1..20: mol_type = other DNA
catgatgggccagtttaaat

SEQ ID NO: 143537 - DNA, 20 bp, synthetic construct
  source 1..20: mol_type = other DNA
acatgatgggccagtttaaa

SEQ ID NO: 143538 - DNA, 20 bp, synthetic construct
  source 1..20: mol_type = other DNA
aacatgatgggccagtttaa

SEQ ID NO: 143539 - DNA, 20 bp, synthetic construct
  source 1..20: mol_type = other DNA
caacatgatgggccagttta

SEQ ID NO: 143540 - DNA, 20 bp, synthetic construct
  source 1..20: mol_type = other DNA
acaacatgatgggccagttt

SEQ ID NO: 143541 - DNA, 20 bp, synthetic construct
  source 1..20: mol_type = other DNA
gacaacatgatgggccagtt

SEQ ID NO: 143542 - DNA, 20 bp, synthetic construct
  source 1..20: mol_type = other DNA
ggacaacatgatgggccagt

SEQ ID NO: 143543 - DNA, 20 bp, synthetic construct
  source 1..20: mol_type = other DNA
aggacaacatgatgggccag

SEQ ID NO: 143544 - DNA, 20 bp, synthetic construct
  source 1..20: mol_type = other DNA
aaggacaacatgatgggcca

SEQ ID NO: 143545 - DNA, 20 bp, synthetic construct
  source 1..20: mol_type = other DNA
aaaggacaacatgatgggcc

SEQ ID NO: 143546 - DNA, 20 bp, synthetic construct
  source 1..20: mol_type = other DNA
caaaggacaacatgatgggc

SEQ ID NO: 143547 - DNA, 20 bp, synthetic construct
  source 1..20: mol_type = other DNA
tcaaaggacaacatgatggg

SEQ ID NO: 143548 - DNA, 20 bp, synthetic construct
  source 1..20: mol_type = other DNA
ttcaaaggacaacatgatgg

SEQ ID NO: 143549 - DNA, 20 bp, synthetic construct
  source 1..20: mol_type = other DNA
cttcaaaggacaacatgatg

SEQ ID NO: 143550 - DNA, 20 bp, synthetic construct
  source 1..20: mol_type = other DNA
acttcaaaggacaacatgat

SEQ ID NO: 143551 - DNA, 20 bp, synthetic construct
  source 1..20: mol_type = other DNA
aacttcaaaggacaacatga

SEQ ID NO: 143552 - DNA, 20 bp, synthetic construct
  source 1..20: mol_type = other DNA
taacttcaaaggacaacatg

SEQ ID NO: 143553 - DNA, 20 bp, synthetic construct
  source 1..20: mol_type = other DNA
ctaacttcaaaggacaacat

SEQ ID NO: 143554 - DNA, 20 bp, synthetic construct
  source 1..20: mol_type = other DNA
actaacttcaaaggacaaca

SEQ ID NO: 143555 - DNA, 20 bp, synthetic construct
  source 1..20: mol_type = other DNA
gactaacttcaaaggacaac

SEQ ID NO: 143556 - DNA, 20 bp, synthetic construct
  source 1..20: mol_type = other DNA
agactaacttcaaaggacaa

SEQ ID NO: 143557 - DNA, 20 bp, synthetic construct
  source 1..20: mol_type = other DNA
tagactaacttcaaaggaca

SEQ ID NO: 143558 - DNA, 20 bp, synthetic construct
  source 1..20: mol_type = other DNA
ctagactaacttcaaaggac

SEQ ID NO: 143559 - DNA, 20 bp, synthetic construct
  source 1..20: mol_type = other DNA
actagactaacttcaaagga

SEQ ID NO: 143560 - DNA, 20 bp, synthetic construct
  source 1..20: mol_type = other DNA
tactagactaacttcaaagg

SEQ ID NO: 143561 - DNA, 20 bp, synthetic construct
  source 1..20: mol_type = other DNA
ttactagactaacttcaaag

SEQ ID NO: 143562 - DNA, 20 bp, synthetic construct
  source 1..20: mol_type = other DNA
tttactagactaacttcaaa

SEQ ID NO: 143563 - DNA, 20 bp, synthetic construct
  source 1..20: mol_type = other DNA
atttactagactaacttcaa

SEQ ID NO: 143564 - DNA, 20 bp, synthetic construct
  source 1..20: mol_type = other DNA
aatttactagactaacttca

SEQ ID NO: 143565 - DNA, 20 bp, synthetic construct
  source 1..20: mol_type = other DNA
aaatttactagactaacttc

SEQ ID NO: 143566 - DNA, 20 bp, synthetic construct
  source 1..20: mol_type = other DNA
gaaatttactagactaactt

SEQ ID NO: 143567 - DNA, 20 bp, synthetic construct
  source 1..20: mol_type = other DNA
agaaatttactagactaact

SEQ ID NO: 143568 - DNA, 20 bp, synthetic construct
  source 1..20: mol_type = other DNA
aagaaatttactagactaac

SEQ ID NO: 143569 - DNA, 20 bp, synthetic construct
  source 1..20: mol_type = other DNA
aaagaaatttactagactaa

SEQ ID NO: 143570 - DNA, 20 bp, synthetic construct
  source 1..20: mol_type = other DNA
gaaagaaatttactagacta

SEQ ID NO: 143571 - DNA, 20 bp, synthetic construct
  source 1..20: mol_type = other DNA
ggaaagaaatttactagact

SEQ ID NO: 143572 - DNA, 20 bp, synthetic construct
  source 1..20: mol_type = other DNA
tggaaagaaatttactagac

SEQ ID NO: 143573 - DNA, 20 bp, synthetic construct
  source 1..20: mol_type = other DNA
ttggaaagaaatttactaga

SEQ ID NO: 143574 - DNA, 20 bp, synthetic construct
  source 1..20: mol_type = other DNA
tttggaaagaaatttactag

SEQ ID NO: 143575 - DNA, 20 bp, synthetic construct
  source 1..20: mol_type = other DNA
ctttggaaagaaatttacta

SEQ ID NO: 143576 - DNA, 20 bp, synthetic construct
  source 1..20: mol_type = other DNA
cctttggaaagaaatttact

SEQ ID NO: 143577 - DNA, 20 bp, synthetic construct
  source 1..20: mol_type = other DNA
ccctttggaaagaaatttac

SEQ ID NO: 143578 - DNA, 20 bp, synthetic construct
  source 1..20: mol_type = other DNA
gccctttggaaagaaattta

SEQ ID NO: 143579 - DNA, 20 bp, synthetic construct
  source 1..20: mol_type = other DNA
agccctttggaaagaaattt

SEQ ID NO: 143580 - DNA, 20 bp, synthetic construct
  source 1..20: mol_type = other DNA
cagccctttggaaagaaatt

SEQ ID NO: 143581 - DNA, 20 bp, synthetic construct
  source 1..20: mol_type = other DNA
ccagccctttggaaagaaat

SEQ ID NO: 143582 - DNA, 20 bp, synthetic construct
  source 1..20: mol_type = other DNA
cccagccctttggaaagaaa

SEQ ID NO: 143583 - DNA, 20 bp, synthetic construct
  source 1..20: mol_type = other DNA
ccccagccctttggaaagaa

SEQ ID NO: 143584 - DNA, 20 bp, synthetic construct
  source 1..20: mol_type = other DNA
gccccagccctttggaaaga

SEQ ID NO: 143585 - DNA, 20 bp, synthetic construct
  source 1..20: mol_type = other DNA
tgccccagccctttggaaag

SEQ ID NO: 143586 - DNA, 20 bp, synthetic construct
  source 1..20: mol_type = other DNA
gtgccccagccctttggaaa

SEQ ID NO: 143587 - DNA, 20 bp, synthetic construct
  source 1..20: mol_type = other DNA
agtgccccagccctttggaa

SEQ ID NO: 143588 - DNA, 20 bp, synthetic construct
  source 1..20: mol_type = other DNA
gagtgccccagccctttgga

SEQ ID NO: 143589 - DNA, 20 bp, synthetic construct
  source 1..20: mol_type = other DNA
tgagtgccccagccctttgg

SEQ ID NO: 143590 - DNA, 20 bp, synthetic construct
  source 1..20: mol_type = other DNA
ctgagtgccccagccctttg

SEQ ID NO: 143591 - DNA, 20 bp, synthetic construct
  source 1..20: mol_type = other DNA
tctgagtgccccagcccttt

SEQ ID NO: 143592 - DNA, 20 bp, synthetic construct
  source 1..20: mol_type = other DNA
ttctgagtgccccagccctt

SEQ ID NO: 143593 - DNA, 20 bp, synthetic construct
  source 1..20: mol_type = other DNA
cttctgagtgccccagccct

SEQ ID NO: 143594 - DNA, 20 bp, synthetic construct
  source 1..20: mol_type = other DNA
ccttctgagtgccccagccc

SEQ ID NO: 143595 - DNA, 20 bp, synthetic construct
  source 1..20: mol_type = other DNA
cccttctgagtgccccagcc

SEQ ID NO: 143596 - DNA, 20 bp, synthetic construct
  source 1..20: mol_type = other DNA
tcccttctgagtgccccagc

SEQ ID NO: 143597 - DNA, 20 bp, synthetic construct
  source 1..20: mol_type = other DNA
ctcccttctgagtgccccag

SEQ ID NO: 143598 - DNA, 20 bp, synthetic construct
  source 1..20: mol_type = other DNA
actcccttctgagtgcccca

SEQ ID NO: 143599 - DNA, 20 bp, synthetic construct
  source 1..20: mol_type = other DNA
aactcccttctgagtgcccc

SEQ ID NO: 143600 - DNA, 20 bp, synthetic construct
  source 1..20: mol_type = other DNA
aaactcccttctgagtgccc

SEQ ID NO: 143601 - DNA, 20 bp, synthetic construct
  source 1..20: mol_type = other DNA
taaactcccttctgagtgcc

SEQ ID NO: 143602 - DNA, 20 bp, synthetic construct
  source 1..20: mol_type = other DNA
gtaaactcccttctgagtgc

SEQ ID NO: 143603 - DNA, 20 bp, synthetic construct
  source 1..20: mol_type = other DNA
agtaaactcccttctgagtg

SEQ ID NO: 143604 - DNA, 20 bp, synthetic construct
  source 1..20: mol_type = other DNA
aagtaaactcccttctgagt

SEQ ID NO: 143605 - DNA, 20 bp, synthetic construct
  source 1..20: mol_type = other DNA
aaagtaaactcccttctgag

SEQ ID NO: 143606 - DNA, 20 bp, synthetic construct
  source 1..20: mol_type = other DNA
aaaagtaaactcccttctga

SEQ ID NO: 143607 - DNA, 20 bp, synthetic construct
  source 1..20: mol_type = other DNA
gaaaagtaaactcccttctg

SEQ ID NO: 143608 - DNA, 20 bp, synthetic construct
  source 1..20: mol_type = other DNA
agaaaagtaaactcccttct

SEQ ID NO: 143609 - DNA, 20 bp, synthetic construct
  source 1..20: mol_type = other DNA
tagaaaagtaaactcccttc

SEQ ID NO: 143610 - DNA, 20 bp, synthetic construct
  source 1..20: mol_type = other DNA
atagaaaagtaaactccctt

SEQ ID NO: 143611 - DNA, 20 bp, synthetic construct
  source 1..20: mol_type = other DNA
tatagaaaagtaaactccct

SEQ ID NO: 143612 - DNA, 20 bp, synthetic construct
  source 1..20: mol_type = other DNA
atatagaaaagtaaactccc

SEQ ID NO: 143613 - DNA, 20 bp, synthetic construct
  source 1..20: mol_type = other DNA
aatatagaaaagtaaactcc

SEQ ID NO: 143614 - DNA, 20 bp, synthetic construct
  source 1..20: mol_type = other DNA
aaatatagaaaagtaaactc

SEQ ID NO: 143615 - DNA, 20 bp, synthetic construct
  source 1..20: mol_type = other DNA
taaatatagaaaagtaaact

SEQ ID NO: 143616 - DNA, 20 bp, synthetic construct
  source 1..20: mol_type = other DNA
ataaatatagaaaagtaaac

SEQ ID NO: 143617 - DNA, 20 bp, synthetic construct
  source 1..20: mol_type = other DNA
aataaatatagaaaagtaaa

SEQ ID NO: 143618 - DNA, 20 bp, synthetic construct
  source 1..20: mol_type = other DNA
aaataaatatagaaaagtaa

SEQ ID NO: 143619 - DNA, 20 bp, synthetic construct
  source 1..20: mol_type = other DNA
gaaataaatatagaaaagta

SEQ ID NO: 143620 - DNA, 20 bp, synthetic construct
  source 1..20: mol_type = other DNA
tgaaataaatatagaaaagt

SEQ ID NO: 143621 - DNA, 20 bp, synthetic construct
  source 1..20: mol_type = other DNA
atgaaataaatatagaaaag

SEQ ID NO: 143622 - DNA, 20 bp, synthetic construct
  source 1..20: mol_type = other DNA
tatgaaataaatatagaaaa

SEQ ID NO: 143623 - DNA, 20 bp, synthetic construct
  source 1..20: mol_type = other DNA
ttatgaaataaatatagaaa

SEQ ID NO: 143624 - DNA, 20 bp, synthetic construct
  source 1..20: mol_type = other DNA
tttatgaaataaatatagaa

SEQ ID NO: 143625 - DNA, 20 bp, synthetic construct
  source 1..20: mol_type = other DNA
ctttatgaaataaatataga

SEQ ID NO: 143626 - DNA, 20 bp, synthetic construct
  source 1..20: mol_type = other DNA
gctttatgaaataaatatag

SEQ ID NO: 143627 - DNA, 20 bp, synthetic construct
  source 1..20: mol_type = other DNA
tgctttatgaaataaatata

SEQ ID NO: 143628 - DNA, 20 bp, synthetic construct
  source 1..20: mol_type = other DNA
ttgctttatgaaataaatat

SEQ ID NO: 143629 - DNA, 20 bp, synthetic construct
  source 1..20: mol_type = other DNA
tttgctttatgaaataaata

SEQ ID NO: 143630 - DNA, 20 bp, synthetic construct
  source 1..20: mol_type = other DNA
ctttgctttatgaaataaat

SEQ ID NO: 143631 - DNA, 20 bp, synthetic construct
  source 1..20: mol_type = other DNA
tctttgctttatgaaataaa

SEQ ID NO: 143632 - DNA, 20 bp, synthetic construct
  source 1..20: mol_type = other DNA
atctttgctttatgaaataa

SEQ ID NO: 143633 - DNA, 20 bp, synthetic construct
  source 1..20: mol_type = other DNA
catctttgctttatgaaata

SEQ ID NO: 143634 - DNA, 20 bp, synthetic construct
  source 1..20: mol_type = other DNA
ccatctttgctttatgaaat

SEQ ID NO: 143635 - DNA, 20 bp, synthetic construct
  source 1..20: mol_type = other DNA
cccatctttgctttatgaaa

SEQ ID NO: 143636 - DNA, 20 bp, synthetic construct
  source 1..20: mol_type = other DNA
tcccatctttgctttatgaa

SEQ ID NO: 143637 - DNA, 20 bp, synthetic construct
  source 1..20: mol_type = other DNA
ctcccatctttgctttatga

SEQ ID NO: 143638 - DNA, 20 bp, synthetic construct
  source 1..20: mol_type = other DNA
tctcccatctttgctttatg

SEQ ID NO: 143639 - DNA, 20 bp, synthetic construct
  source 1..20: mol_type = other DNA
atctcccatctttgctttat

SEQ ID NO: 143640 - DNA, 20 bp, synthetic construct
  source 1..20: mol_type = other DNA
gatctcccatctttgcttta

SEQ ID NO: 143641 - DNA, 20 bp, synthetic construct
  source 1..20: mol_type = other DNA
ggatctcccatctttgcttt

SEQ ID NO: 143642 - DNA, 20 bp, synthetic construct
  source 1..20: mol_type = other DNA
aggatctcccatctttgctt

SEQ ID NO: 143643 - DNA, 20 bp, synthetic construct
  source 1..20: mol_type = other DNA
gaggatctcccatctttgct

SEQ ID NO: 143644 - DNA, 20 bp, synthetic construct
  source 1..20: mol_type = other DNA
ggaggatctcccatctttgc

SEQ ID NO: 143645 - DNA, 20 bp, synthetic construct
  source 1..20: mol_type = other DNA
tggaggatctcccatctttg

SEQ ID NO: 143646 - DNA, 20 bp, synthetic construct
  source 1..20: mol_type = other DNA
atggaggatctcccatcttt

SEQ ID NO: 143647 - DNA, 20 bp, synthetic construct
  source 1..20: mol_type = other DNA
aatggaggatctcccatctt

SEQ ID NO: 143648 - DNA, 20 bp, synthetic construct
  source 1..20: mol_type = other DNA
taatggaggatctcccatct

SEQ ID NO: 143649 - DNA, 20 bp, synthetic construct
  source 1..20: mol_type = other DNA
ctaatggaggatctcccatc

SEQ ID NO: 143650 - DNA, 20 bp, synthetic construct
  source 1..20: mol_type = other DNA
cctaatggaggatctcccat

SEQ ID NO: 143651 - DNA, 20 bp, synthetic construct
  source 1..20: mol_type = other DNA
ccctaatggaggatctccca

SEQ ID NO: 143652 - DNA, 20 bp, synthetic construct
  source 1..20: mol_type = other DNA
gccctaatggaggatctccc

SEQ ID NO: 143653 - DNA, 20 bp, synthetic construct
  source 1..20: mol_type = other DNA
agccctaatggaggatctcc

SEQ ID NO: 143654 - DNA, 20 bp, synthetic construct
  source 1..20: mol_type = other DNA
aagccctaatggaggatctc

SEQ ID NO: 143655 - DNA, 20 bp, synthetic construct
  source 1..20: mol_type = other DNA
caagccctaatggaggatct

SEQ ID NO: 143656 - DNA, 20 bp, synthetic construct
  source 1..20: mol_type = other DNA
ccaagccctaatggaggatc

SEQ ID NO: 143657 - DNA, 20 bp, synthetic construct
  source 1..20: mol_type = other DNA
cccaagccctaatggaggat

SEQ ID NO: 143658 - DNA, 20 bp, synthetic construct
  source 1..20: mol_type = other DNA
tcccaagccctaatggagga

SEQ ID NO: 143659 - DNA, 20 bp, synthetic construct
  source 1..20: mol_type = other DNA
ttcccaagccctaatggagg

SEQ ID NO: 143660 - DNA, 20 bp, synthetic construct
  source 1..20: mol_type = other DNA
tttcccaagccctaatggag

SEQ ID NO: 143661 - DNA, 20 bp, synthetic construct
  source 1..20: mol_type = other DNA
ctttcccaagccctaatgga

SEQ ID NO: 143662 - DNA, 20 bp, synthetic construct
  source 1..20: mol_type = other DNA
actttcccaagccctaatgg

SEQ ID NO: 143663 - DNA, 20 bp, synthetic construct
  source 1..20: mol_type = other DNA
tactttcccaagccctaatg

SEQ ID NO: 143664 - DNA, 20 bp, synthetic construct
  source 1..20: mol_type = other DNA
ttactttcccaagccctaat

SEQ ID NO: 143665 - DNA, 20 bp, synthetic construct
  source 1..20: mol_type = other DNA
tttactttcccaagccctaa

SEQ ID NO: 143666 - DNA, 20 bp, synthetic construct
  source 1..20: mol_type = other DNA
gtttactttcccaagcccta

SEQ ID NO: 143667 - DNA, 20 bp, synthetic construct
  source 1..20: mol_type = other DNA
agtttactttcccaagccct

SEQ ID NO: 143668 - DNA, 20 bp, synthetic construct
  source 1..20: mol_type = other DNA
cagtttactttcccaagccc

SEQ ID NO: 143669 - DNA, 20 bp, synthetic construct
  source 1..20: mol_type = other DNA
tcagtttactttcccaagcc

SEQ ID NO: 143670 - DNA, 20 bp, synthetic construct
  source 1..20: mol_type = other DNA
ctcagtttactttcccaagc

SEQ ID NO: 143671 - DNA, 20 bp, synthetic construct
  source 1..20: mol_type = other DNA
actcagtttactttcccaag

SEQ ID NO: 143672 - DNA, 20 bp, synthetic construct
  source 1..20: mol_type = other DNA
cactcagtttactttcccaa

SEQ ID NO: 143673 - DNA, 20 bp, synthetic construct
  source 1..20: mol_type = other DNA
ccactcagtttactttccca

SEQ ID NO: 143674 - DNA, 20 bp, synthetic construct
  source 1..20: mol_type = other DNA
gccactcagtttactttccc

SEQ ID NO: 143675 - DNA, 20 bp, synthetic construct
  source 1..20: mol_type = other DNA
tgccactcagtttactttcc

SEQ ID NO: 143676 - DNA, 20 bp, synthetic construct
  source 1..20: mol_type = other DNA
ctgccactcagtttactttc

SEQ ID NO: 143677 - DNA, 20 bp, synthetic construct
  source 1..20: mol_type = other DNA
tctgccactcagtttacttt

SEQ ID NO: 143678 - DNA, 20 bp, synthetic construct
  source 1..20: mol_type = other DNA
ttctgccactcagtttactt

SEQ ID NO: 143679 - DNA, 20 bp, synthetic construct
  source 1..20: mol_type = other DNA
cttctgccactcagtttact

SEQ ID NO: 143680 - DNA, 20 bp, synthetic construct
  source 1..20: mol_type = other DNA
ccttctgccactcagtttac

SEQ ID NO: 143681 - DNA, 20 bp, synthetic construct
  source 1..20: mol_type = other DNA
cccttctgccactcagttta

SEQ ID NO: 143682 - DNA, 20 bp, synthetic construct
  source 1..20: mol_type = other DNA
gcccttctgccactcagttt

SEQ ID NO: 143683 - DNA, 20 bp, synthetic construct
  source 1..20: mol_type = other DNA
agcccttctgccactcagtt

SEQ ID NO: 143684 - DNA, 20 bp, synthetic construct
  source 1..20: mol_type = other DNA
gagcccttctgccactcagt

SEQ ID NO: 143685 - DNA, 20 bp, synthetic construct
  source 1..20: mol_type = other DNA
ggagcccttctgccactcag

SEQ ID NO: 143686 - DNA, 20 bp, synthetic construct
  source 1..20: mol_type = other DNA
aggagcccttctgccactca

SEQ ID NO: 143687 - DNA, 20 bp, synthetic construct
  source 1..20: mol_type = other DNA
caggagcccttctgccactc

SEQ ID NO: 143688 - DNA, 20 bp, synthetic construct
  source 1..20: mol_type = other DNA
acaggagcccttctgccact

SEQ ID NO: 143689 - DNA, 20 bp, synthetic construct
  source 1..20: mol_type = other DNA
cacaggagcccttctgccac

SEQ ID NO: 143690 - DNA, 20 bp, synthetic construct
  source 1..20: mol_type = other DNA
tcacaggagcccttctgcca

SEQ ID NO: 143691 - DNA, 20 bp, synthetic construct
  source 1..20: mol_type = other DNA
atcacaggagcccttctgcc

SEQ ID NO: 143692 - DNA, 20 bp, synthetic construct
  source 1..20: mol_type = other DNA
aatcacaggagcccttctgc

SEQ ID NO: 143693 - DNA, 20 bp, synthetic construct
  source 1..20: mol_type = other DNA
taatcacaggagcccttctg

SEQ ID NO: 143694 - DNA, 20 bp, synthetic construct
  source 1..20: mol_type = other DNA
ctaatcacaggagcccttct

SEQ ID NO: 143695 - DNA, 20 bp, synthetic construct
  source 1..20: mol_type = other DNA
gctaatcacaggagcccttc

SEQ ID NO: 143696 - DNA, 20 bp, synthetic construct
  source 1..20: mol_type = other DNA
agctaatcacaggagccctt

SEQ ID NO: 143697 - DNA, 20 bp, synthetic construct
  source 1..20: mol_type = other DNA
cagctaatcacaggagccct

SEQ ID NO: 143698 - DNA, 20 bp, synthetic construct
  source 1..20: mol_type = other DNA
tcagctaatcacaggagccc

SEQ ID NO: 143699 - DNA, 20 bp, synthetic construct
  source 1..20: mol_type = other DNA
ctcagctaatcacaggagcc

SEQ ID NO: 143700 - DNA, 20 bp, synthetic construct
  source 1..20: mol_type = other DNA
tctcagctaatcacaggagc

SEQ ID NO: 143701 - DNA, 20 bp, synthetic construct
  source 1..20: mol_type = other DNA
ctctcagctaatcacaggag

SEQ ID NO: 143702 - DNA, 20 bp, synthetic construct
  source 1..20: mol_type = other DNA
tctctcagctaatcacagga

SEQ ID NO: 143703 - DNA, 20 bp, synthetic construct
  source 1..20: mol_type = other DNA
ctctctcagctaatcacagg

SEQ ID NO: 143704 - DNA, 20 bp, synthetic construct
  source 1..20: mol_type = other DNA
tctctctcagctaatcacag

SEQ ID NO: 143705 - DNA, 20 bp, synthetic construct
  source 1..20: mol_type = other DNA
gtctctctcagctaatcaca

SEQ ID NO: 143706 - DNA, 20 bp, synthetic construct
  source 1..20: mol_type = other DNA
agtctctctcagctaatcac

SEQ ID NO: 143707 - DNA, 20 bp, synthetic construct
  source 1..20: mol_type = other DNA
cagtctctctcagctaatca

SEQ ID NO: 143708 - DNA, 20 bp, synthetic construct
  source 1..20: mol_type = other DNA
acagtctctctcagctaatc

SEQ ID NO: 143709 - DNA, 20 bp, synthetic construct
  source 1..20: mol_type = other DNA
cacagtctctctcagctaat

SEQ ID NO: 143710 - DNA, 20 bp, synthetic construct
  source 1..20: mol_type = other DNA
ccacagtctctctcagctaa

SEQ ID NO: 143711 - DNA, 20 bp, synthetic construct
  source 1..20: mol_type = other DNA
accacagtctctctcagcta

SEQ ID NO: 143712 - DNA, 20 bp, synthetic construct
  source 1..20: mol_type = other DNA
gaccacagtctctctcagct

SEQ ID NO: 143713 - DNA, 20 bp, synthetic construct
  source 1..20: mol_type = other DNA
ggaccacagtctctctcagc

SEQ ID NO: 143714 - DNA, 20 bp, synthetic construct
  source 1..20: mol_type = other DNA
aggaccacagtctctctcag

SEQ ID NO: 143715 - DNA, 20 bp, synthetic construct
  source 1..20: mol_type = other DNA
aaggaccacagtctctctca

SEQ ID NO: 143716 - DNA, 20 bp, synthetic construct
  source 1..20: mol_type = other DNA
gaaggaccacagtctctctc

SEQ ID NO: 143717 - DNA, 20 bp, synthetic construct
  source 1..20: mol_type = other DNA
cgaaggaccacagtctctct

SEQ ID NO: 143718 - DNA, 20 bp, synthetic construct
  source 1..20: mol_type = other DNA
ccgaaggaccacagtctctc

SEQ ID NO: 143719 - DNA, 20 bp, synthetic construct
  source 1..20: mol_type = other DNA
gccgaaggaccacagtctct

SEQ ID NO: 143720 - DNA, 20 bp, synthetic construct
  source 1..20: mol_type = other DNA
ggccgaaggaccacagtctc

SEQ ID NO: 143721 - DNA, 20 bp, synthetic construct
  source 1..20: mol_type = other DNA
gggccgaaggaccacagtct

SEQ ID NO: 143722 - DNA, 20 bp, synthetic construct
  source 1..20: mol_type = other DNA
agggccgaaggaccacagtc

SEQ ID NO: 143723 - DNA, 20 bp, synthetic construct
  source 1..20: mol_type = other DNA
cagggccgaaggaccacagt

SEQ ID NO: 143724 - DNA, 20 bp, synthetic construct
  source 1..20: mol_type = other DNA
tcagggccgaaggaccacag

SEQ ID NO: 143725 - DNA, 20 bp, synthetic construct
  source 1..20: mol_type = other DNA
atcagggccgaaggaccaca

SEQ ID NO: 143726 - DNA, 20 bp, synthetic construct
  source 1..20: mol_type = other DNA
catcagggccgaaggaccac

SEQ ID NO: 143727 - DNA, 20 bp, synthetic construct
  source 1..20: mol_type = other DNA
tcatcagggccgaaggacca

SEQ ID NO: 143728 - DNA, 20 bp, synthetic construct
  source 1..20: mol_type = other DNA
atcatcagggccgaaggacc

SEQ ID NO: 143729 - DNA, 20 bp, synthetic construct
  source 1..20: mol_type = other DNA
tatcatcagggccgaaggac

SEQ ID NO: 143730 - DNA, 20 bp, synthetic construct
  source 1..20: mol_type = other DNA
ctatcatcagggccgaagga

SEQ ID NO: 143731 - DNA, 20 bp, synthetic construct
  source 1..20: mol_type = other DNA
tctatcatcagggccgaagg

SEQ ID NO: 143732 - DNA, 20 bp, synthetic construct
  source 1..20: mol_type = other DNA
atctatcatcagggccgaag

SEQ ID NO: 143733 - DNA, 20 bp, synthetic construct
  source 1..20: mol_type = other DNA
gatctatcatcagggccgaa

SEQ ID NO: 143734 - DNA, 20 bp, synthetic construct
  source 1..20: mol_type = other DNA
ggatctatcatcagggccga

SEQ ID NO: 143735 - DNA, 20 bp, synthetic construct
  source 1..20: mol_type = other DNA
gggatctatcatcagggccg

SEQ ID NO: 143736 - DNA, 20 bp, synthetic construct
  source 1..20: mol_type = other DNA
agggatctatcatcagggcc

SEQ ID NO: 143737 - DNA, 20 bp, synthetic construct
  source 1..20: mol_type = other DNA
cagggatctatcatcagggc

SEQ ID NO: 143738 - DNA, 20 bp, synthetic construct
  source 1..20: mol_type = other DNA
ccagggatctatcatcaggg

SEQ ID NO: 143739 - DNA, 20 bp, synthetic construct
  source 1..20: mol_type = other DNA
gccagggatctatcatcagg

SEQ ID NO: 143740 - DNA, 20 bp, synthetic construct
  source 1..20: mol_type = other DNA
ggccagggatctatcatcag

SEQ ID NO: 143741 - DNA, 20 bp, synthetic construct
  source 1..20: mol_type = other DNA
aggccagggatctatcatca

SEQ ID NO: 143742 - DNA, 20 bp, synthetic construct
  source 1..20: mol_type = other DNA
aaggccagggatctatcatc

SEQ ID NO: 143743 - DNA, 20 bp, synthetic construct
  source 1..20: mol_type = other DNA
caaggccagggatctatcat

SEQ ID NO: 143744 - DNA, 20 bp, synthetic construct
  source 1..20: mol_type = other DNA
gcaaggccagggatctatca

SEQ ID NO: 143745 - DNA, 20 bp, synthetic construct
  source 1..20: mol_type = other DNA
ggcaaggccagggatctatc

SEQ ID NO: 143746 - DNA, 20 bp, synthetic construct
  source 1..20: mol_type = other DNA
tggcaaggccagggatctat

SEQ ID NO: 143747 - DNA, 20 bp, synthetic construct
  source 1..20: mol_type = other DNA
gtggcaaggccagggatcta

SEQ ID NO: 143748 - DNA, 20 bp, synthetic construct
  source 1..20: mol_type = other DNA
tgtggcaaggccagggatct

SEQ ID NO: 143749 - DNA, 20 bp, synthetic construct
  source 1..20: mol_type = other DNA
atgtggcaaggccagggatc

SEQ ID NO: 143750 - DNA, 20 bp, synthetic construct
  source 1..20: mol_type = other DNA
tatgtggcaaggccagggat

SEQ ID NO: 143751 - DNA, 20 bp, synthetic construct
  source 1..20: mol_type = other DNA
gtatgtggcaaggccaggga

SEQ ID NO: 143752 - DNA, 20 bp, synthetic construct
  source 1..20: mol_type = other DNA
ggtatgtggcaaggccaggg

SEQ ID NO: 143753 - DNA, 20 bp, synthetic construct
  source 1..20: mol_type = other DNA
tggtatgtggcaaggccagg

SEQ ID NO: 143754 - DNA, 20 bp, synthetic construct
  source 1..20: mol_type = other DNA
atggtatgtggcaaggccag

SEQ ID NO: 143755 - DNA, 20 bp, synthetic construct
  source 1..20: mol_type = other DNA
tatggtatgtggcaaggcca

SEQ ID NO: 143756 - DNA, 20 bp, synthetic construct
  source 1..20: mol_type = other DNA
gtatggtatgtggcaaggcc

SEQ ID NO: 143757 - DNA, 20 bp, synthetic construct
  source 1..20: mol_type = other DNA
tgtatggtatgtggcaaggc

SEQ ID NO: 143758 - DNA, 20 bp, synthetic construct
  source 1..20: mol_type = other DNA
gtgtatggtatgtggcaagg

SEQ ID NO: 143759 - DNA, 20 bp, synthetic construct
  source 1..20: mol_type = other DNA
tgtgtatggtatgtggcaag

SEQ ID NO: 143760 - DNA, 20 bp, synthetic construct
  source 1..20: mol_type = other DNA
ctgtgtatggtatgtggcaa

SEQ ID NO: 143761 - DNA, 20 bp, synthetic construct
  source 1..20: mol_type = other DNA
actgtgtatggtatgtggca

SEQ ID NO: 143762 - DNA, 20 bp, synthetic construct
  source 1..20: mol_type = other DNA
cactgtgtatggtatgtggc

SEQ ID NO: 143763 - DNA, 20 bp, synthetic construct
  source 1..20: mol_type = other DNA
gcactgtgtatggtatgtgg

SEQ ID NO: 143764 - DNA, 20 bp, synthetic construct
  source 1..20: mol_type = other DNA
ggcactgtgtatggtatgtg

SEQ ID NO: 143765 - DNA, 20 bp, synthetic construct
  source 1..20: mol_type = other DNA
gggcactgtgtatggtatgt

SEQ ID NO: 143766 - DNA, 20 bp, synthetic construct
  source 1..20: mol_type = other DNA
cgggcactgtgtatggtatg

SEQ ID NO: 143767 - DNA, 20 bp, synthetic construct
  source 1..20: mol_type = other DNA
gcgggcactgtgtatggtat

SEQ ID NO: 143768 - DNA, 20 bp, synthetic construct
  source 1..20: mol_type = other DNA
tgcgggcactgtgtatggta

SEQ ID NO: 143769 - DNA, 20 bp, synthetic construct
  source 1..20: mol_type = other DNA
gtgcgggcactgtgtatggt

SEQ ID NO: 143770 - DNA, 20 bp, synthetic construct
  source 1..20: mol_type = other DNA
ggtgcgggcactgtgtatgg

SEQ ID NO: 143771 - DNA, 20 bp, synthetic construct
  source 1..20: mol_type = other DNA
gggtgcgggcactgtgtatg

SEQ ID NO: 143772 - DNA, 20 bp, synthetic construct
  source 1..20: mol_type = other DNA
ggggtgcgggcactgtgtat

SEQ ID NO: 143773 - DNA, 20 bp, synthetic construct
  source 1..20: mol_type = other DNA
gggggtgcgggcactgtgta

SEQ ID NO: 143774 - DNA, 20 bp, synthetic construct
  source 1..20: mol_type = other DNA
tgggggtgcgggcactgtgt

SEQ ID NO: 143775 - DNA, 20 bp, synthetic construct
  source 1..20: mol_type = other DNA
atgggggtgcgggcactgtg

SEQ ID NO: 143776 - DNA, 20 bp, synthetic construct
  source 1..20: mol_type = other DNA
gatgggggtgcgggcactgt

SEQ ID NO: 143777 - DNA, 20 bp, synthetic construct
  source 1..20: mol_type = other DNA
ggatgggggtgcgggcactg

SEQ ID NO: 143778 - DNA, 20 bp, synthetic construct
  source 1..20: mol_type = other DNA
gggatgggggtgcgggcact

SEQ ID NO: 143779 - DNA, 20 bp, synthetic construct
  source 1..20: mol_type = other DNA
ggggatgggggtgcgggcac

SEQ ID NO: 143780 - DNA, 20 bp, synthetic construct
  source 1..20: mol_type = other DNA
gggggatgggggtgcgggca

SEQ ID NO: 143781 - DNA, 20 bp, synthetic construct
  source 1..20: mol_type = other DNA
tgggggatgggggtgcgggc

SEQ ID NO: 143782 - DNA, 20 bp, synthetic construct
  source 1..20: mol_type = other DNA
gtgggggatgggggtgcggg

SEQ ID NO: 143783 - DNA, 20 bp, synthetic construct
  source 1..20: mol_type = other DNA
ggtgggggatgggggtgcgg

SEQ ID NO: 143784 - DNA, 20 bp, synthetic construct
  source 1..20: mol_type = other DNA
tggtgggggatgggggtgcg

SEQ ID NO: 143785 - DNA, 20 bp, synthetic construct
  source 1..20: mol_type = other DNA
gtggtgggggatgggggtgc

SEQ ID NO: 143786 - DNA, 20 bp, synthetic construct
  source 1..20: mol_type = other DNA
tgtggtgggggatgggggtg

SEQ ID NO: 143787 - DNA, 20 bp, synthetic construct
  source 1..20: mol_type = other DNA
gtgtggtgggggatgggggt

SEQ ID NO: 143788 - DNA, 20 bp, synthetic construct
  source 1..20: mol_type = other DNA
ggtgtggtgggggatggggg

SEQ ID NO: 143789 - DNA, 20 bp, synthetic construct
  source 1..20: mol_type = other DNA
gggtgtggtgggggatgggg

SEQ ID NO: 143790 - DNA, 20 bp, synthetic construct
  source 1..20: mol_type = other DNA
tgggtgtggtgggggatggg

SEQ ID NO: 143791 - DNA, 20 bp, synthetic construct
  source 1..20: mol_type = other DNA
ttgggtgtggtgggggatgg

SEQ ID NO: 143792 - DNA, 20 bp, synthetic construct
  source 1..20: mol_type = other DNA
attgggtgtggtgggggatg

SEQ ID NO: 143793 - DNA, 20 bp, synthetic construct
  source 1..20: mol_type = other DNA
tattgggtgtggtgggggat

SEQ ID NO: 143794 - DNA, 20 bp, synthetic construct
  source 1..20: mol_type = other DNA
atattgggtgtggtggggga

SEQ ID NO: 143795 - DNA, 20 bp, synthetic construct
  source 1..20: mol_type = other DNA
tatattgggtgtggtggggg

SEQ ID NO: 143796 - DNA, 20 bp, synthetic construct
  source 1..20: mol_type = other DNA
ctatattgggtgtggtgggg

SEQ ID NO: 143797 - DNA, 20 bp, synthetic construct
  source 1..20: mol_type = other DNA
actatattgggtgtggtggg

SEQ ID NO: 143798 - DNA, 20 bp, synthetic construct
  source 1..20: mol_type = other DNA
gactatattgggtgtggtgg

SEQ ID NO: 143799 - DNA, 20 bp, synthetic construct
  source 1..20: mol_type = other DNA
agactatattgggtgtggtg

SEQ ID NO: 143800 - DNA, 20 bp, synthetic construct
  source 1..20: mol_type = other DNA
cagactatattgggtgtggt

SEQ ID NO: 143801 - DNA, 20 bp, synthetic construct
  source 1..20: mol_type = other DNA
acagactatattgggtgtgg

SEQ ID NO: 143802 - DNA, 20 bp, synthetic construct
  source 1..20: mol_type = other DNA
cacagactatattgggtgtg

SEQ ID NO: 143803 - DNA, 20 bp, synthetic construct
  source 1..20: mol_type = other DNA
gcacagactatattgggtgt

SEQ ID NO: 143804 - DNA, 20 bp, synthetic construct
  source 1..20: mol_type = other DNA
ggcacagactatattgggtg

SEQ ID NO: 143805 - DNA, 20 bp, synthetic construct
  source 1..20: mol_type = other DNA
gggcacagactatattgggt

SEQ ID NO: 143806 - DNA, 20 bp, synthetic construct
  source 1..20: mol_type = other DNA
agggcacagactatattggg

SEQ ID NO: 143807 - DNA, 20 bp, synthetic construct
  source 1..20: mol_type = other DNA
gagggcacagactatattgg

SEQ ID NO: 143808 - DNA, 20 bp, synthetic construct
  source 1..20: mol_type = other DNA
tgagggcacagactatattg

SEQ ID NO: 143809 - DNA, 20 bp, synthetic construct
  source 1..20: mol_type = other DNA
ctgagggcacagactatatt

SEQ ID NO: 143810 - DNA, 20 bp, synthetic construct
  source 1..20: mol_type = other DNA
cctgagggcacagactatat

SEQ ID NO: 143811 - DNA, 20 bp, synthetic construct
  source 1..20: mol_type = other DNA
tcctgagggcacagactata

SEQ ID NO: 143812 - DNA, 20 bp, synthetic construct
  source 1..20: mol_type = other DNA
gtcctgagggcacagactat

SEQ ID NO: 143813 - DNA, 20 bp, synthetic construct
  source 1..20: mol_type = other DNA
tgtcctgagggcacagacta

SEQ ID NO: 143814 - DNA, 20 bp, synthetic construct
  source 1..20: mol_type = other DNA
atgtcctgagggcacagact

SEQ ID NO: 143815 - DNA, 20 bp, synthetic construct
  source 1..20: mol_type = other DNA
aatgtcctgagggcacagac

SEQ ID NO: 143816 - DNA, 20 bp, synthetic construct
  source 1..20: mol_type = other DNA
caatgtcctgagggcacaga

SEQ ID NO: 143817 - DNA, 20 bp, synthetic construct
  source 1..20: mol_type = other DNA
gcaatgtcctgagggcacag

SEQ ID NO: 143818 - DNA, 20 bp, synthetic construct
  source 1..20: mol_type = other DNA
agcaatgtcctgagggcaca

SEQ ID NO: 143819 - DNA, 20 bp, synthetic construct
  source 1..20: mol_type = other DNA
gagcaatgtcctgagggcac

SEQ ID NO: 143820 - DNA, 20 bp, synthetic construct
  source 1..20: mol_type = other DNA
ggagcaatgtcctgagggca

SEQ ID NO: 143821 - DNA, 20 bp, synthetic construct
  source 1..20: mol_type = other DNA
tggagcaatgtcctgagggc

SEQ ID NO: 143822 - DNA, 20 bp, synthetic construct
  source 1..20: mol_type = other DNA
ctggagcaatgtcctgaggg

SEQ ID NO: 143823 - DNA, 20 bp, synthetic construct
  source 1..20: mol_type = other DNA
cctggagcaatgtcctgagg

SEQ ID NO: 143824 - DNA, 20 bp, synthetic construct
  source 1..20: mol_type = other DNA
ccctggagcaatgtcctgag

SEQ ID NO: 143825 - DNA, 20 bp, synthetic construct
  source 1..20: mol_type = other DNA
gccctggagcaatgtcctga

SEQ ID NO: 143826 - DNA, 20 bp, synthetic construct
  source 1..20: mol_type = other DNA
tgccctggagcaatgtcctg

SEQ ID NO: 143827 - DNA, 20 bp, synthetic construct
  source 1..20: mol_type = other DNA
ctgccctggagcaatgtcct

SEQ ID NO: 143828 - DNA, 20 bp, synthetic construct
  source 1..20: mol_type = other DNA
actgccctggagcaatgtcc

SEQ ID NO: 143829 - DNA, 20 bp, synthetic construct
  source 1..20: mol_type = other DNA
tactgccctggagcaatgtc

SEQ ID NO: 143830 - DNA, 20 bp, synthetic construct
  source 1..20: mol_type = other DNA
ctactgccctggagcaatgt

SEQ ID NO: 143831 - DNA, 20 bp, synthetic construct
  source 1..20: mol_type = other DNA
gctactgccctggagcaatg

SEQ ID NO: 143832 - DNA, 20 bp, synthetic construct
  source 1..20: mol_type = other DNA
tgctactgccctggagcaat

SEQ ID NO: 143833 - DNA, 20 bp, synthetic construct
  source 1..20: mol_type = other DNA
atgctactgccctggagcaa

SEQ ID NO: 143834 - DNA, 20 bp, synthetic construct
  source 1..20: mol_type = other DNA
catgctactgccctggagca

SEQ ID NO: 143835 - DNA, 20 bp, synthetic construct
  source 1..20: mol_type = other DNA
ccatgctactgccctggagc

SEQ ID NO: 143836 - DNA, 20 bp, synthetic construct
  source 1..20: mol_type = other DNA
accatgctactgccctggag

SEQ ID NO: 143837 - DNA, 20 bp, synthetic construct
  source 1..20: mol_type = other DNA
caccatgctactgccctgga

SEQ ID NO: 143838 - DNA, 20 bp, synthetic construct
  source 1..20: mol_type = other DNA
tcaccatgctactgccctgg

SEQ ID NO: 143839 - DNA, 20 bp, synthetic construct
  source 1..20: mol_type = other DNA
ctcaccatgctactgccctg

SEQ ID NO: 143840 - DNA, 20 bp, synthetic construct
  source 1..20: mol_type = other DNA
cctcaccatgctactgccct

SEQ ID NO: 143841 - DNA, 20 bp, synthetic construct
  source 1..20: mol_type = other DNA
acctcaccatgctactgccc

SEQ ID NO: 143842 - DNA, 20 bp, synthetic construct
  source 1..20: mol_type = other DNA
aacctcaccatgctactgcc

SEQ ID NO: 143843 - DNA, 20 bp, synthetic construct
  source 1..20: mol_type = other DNA
taacctcaccatgctactgc

SEQ ID NO: 143844 - DNA, 20 bp, synthetic construct
  source 1..20: mol_type = other DNA
ctaacctcaccatgctactg

SEQ ID NO: 143845 - DNA, 20 bp, synthetic construct
  source 1..20: mol_type = other DNA
gctaacctcaccatgctact

SEQ ID NO: 143846 - DNA, 20 bp, synthetic construct
  source 1..20: mol_type = other DNA
ggctaacctcaccatgctac

SEQ ID NO: 143847 - DNA, 20 bp, synthetic construct
  source 1..20: mol_type = other DNA
aggctaacctcaccatgcta

SEQ ID NO: 143848 - DNA, 20 bp, synthetic construct
  source 1..20: mol_type = other DNA
caggctaacctcaccatgct

SEQ ID NO: 143849 - DNA, 20 bp, synthetic construct
  source 1..20: mol_type = other DNA
tcaggctaacctcaccatgc

SEQ ID NO: 143850 - DNA, 20 bp, synthetic construct
  source 1..20: mol_type = other DNA
atcaggctaacctcaccatg

SEQ ID NO: 143851 - DNA, 20 bp, synthetic construct
  source 1..20: mol_type = other DNA
catcaggctaacctcaccat

SEQ ID NO: 143852 - DNA, 20 bp, synthetic construct
  source 1..20: mol_type = other DNA
tcatcaggctaacctcacca

SEQ ID NO: 143853 - DNA, 20 bp, synthetic construct
  source 1..20: mol_type = other DNA
atcatcaggctaacctcacc

SEQ ID NO: 143854 - DNA, 20 bp, synthetic construct
  source 1..20: mol_type = other DNA
catcatcaggctaacctcac

SEQ ID NO: 143855 - DNA, 20 bp, synthetic construct
  source 1..20: mol_type = other DNA
ccatcatcaggctaacctca

SEQ ID NO: 143856 - DNA, 20 bp, synthetic construct
  source 1..20: mol_type = other DNA
gccatcatcaggctaacctc

SEQ ID NO: 143857 - DNA, 20 bp, synthetic construct
  source 1..20: mol_type = other DNA
ggccatcatcaggctaacct

SEQ ID NO: 143858 - DNA, 20 bp, synthetic construct
  source 1..20: mol_type = other DNA
aggccatcatcaggctaacc

SEQ ID NO: 143859 - DNA, 20 bp, synthetic construct
  source 1..20: mol_type = other DNA
aaggccatcatcaggctaac

SEQ ID NO: 143860 - DNA, 20 bp, synthetic construct
  source 1..20: mol_type = other DNA
caaggccatcatcaggctaa

SEQ ID NO: 143861 - DNA, 20 bp, synthetic construct
  source 1..20: mol_type = other DNA
tcaaggccatcatcaggcta

SEQ ID NO: 143862 - DNA, 20 bp, synthetic construct
  source 1..20: mol_type = other DNA
ctcaaggccatcatcaggct

SEQ ID NO: 143863 - DNA, 20 bp, synthetic construct
  source 1..20: mol_type = other DNA
gctcaaggccatcatcaggc

SEQ ID NO: 143864 - DNA, 20 bp, synthetic construct
  source 1..20: mol_type = other DNA
agctcaaggccatcatcagg

SEQ ID NO: 143865 - DNA, 20 bp, synthetic construct
  source 1..20: mol_type = other DNA
tagctcaaggccatcatcag

SEQ ID NO: 143866 - DNA, 20 bp, synthetic construct
  source 1..20: mol_type = other DNA
ttagctcaaggccatcatca

SEQ ID NO: 143867 - DNA, 20 bp, synthetic construct
  source 1..20: mol_type = other DNA
tttagctcaaggccatcatc

SEQ ID NO: 143868 - DNA, 20 bp, synthetic construct
  source 1..20: mol_type = other DNA
ctttagctcaaggccatcat

SEQ ID NO: 143869 - DNA, 20 bp, synthetic construct
  source 1..20: mol_type = other DNA
tctttagctcaaggccatca

SEQ ID NO: 143870 - DNA, 20 bp, synthetic construct
  source 1..20: mol_type = other DNA
ctctttagctcaaggccatc

SEQ ID NO: 143871 - DNA, 20 bp, synthetic construct
  source 1..20: mol_type = other DNA
actctttagctcaaggccat

SEQ ID NO: 143872 - DNA, 20 bp, synthetic construct
  source 1..20: mol_type = other DNA
cactctttagctcaaggcca

SEQ ID NO: 143873 - DNA, 20 bp, synthetic construct
  source 1..20: mol_type = other DNA
acactctttagctcaaggcc

SEQ ID NO: 143874 - DNA, 20 bp, synthetic construct
  source 1..20: mol_type = other DNA
cacactctttagctcaaggc

SEQ ID NO: 143875 - DNA, 20 bp, synthetic construct
  source 1..20: mol_type = other DNA
gcacactctttagctcaagg

SEQ ID NO: 143876 - DNA, 20 bp, synthetic construct
  source 1..20: mol_type = other DNA
tgcacactctttagctcaag

SEQ ID NO: 143877 - DNA, 20 bp, synthetic construct
  source 1..20: mol_type = other DNA
gtgcacactctttagctcaa

SEQ ID NO: 143878 - DNA, 20 bp, synthetic construct
  source 1..20: mol_type = other DNA
ggtgcacactctttagctca

SEQ ID NO: 143879 - DNA, 20 bp, synthetic construct
  source 1..20: mol_type = other DNA
aggtgcacactctttagctc

SEQ ID NO: 143880 - DNA, 20 bp, synthetic construct
  source 1..20: mol_type = other DNA
taggtgcacactctttagct

SEQ ID NO: 143881 - DNA, 20 bp, synthetic construct
  source 1..20: mol_type = other DNA
ttaggtgcacactctttagc

SEQ ID NO: 143882 - DNA, 20 bp, synthetic construct
  source 1..20: mol_type = other DNA
tttaggtgcacactctttag

SEQ ID NO: 143883 - DNA, 20 bp, synthetic construct
  source 1..20: mol_type = other DNA
ttttaggtgcacactcttta

SEQ ID NO: 143884 - DNA, 20 bp, synthetic construct
  source 1..20: mol_type = other DNA
attttaggtgcacactcttt

SEQ ID NO: 143885 - DNA, 20 bp, synthetic construct
  source 1..20: mol_type = other DNA
cattttaggtgcacactctt

SEQ ID NO: 143886 - DNA, 20 bp, synthetic construct
  source 1..20: mol_type = other DNA
gcattttaggtgcacactct

SEQ ID NO: 143887 - DNA, 20 bp, synthetic construct
  source 1..20: mol_type = other DNA
tgcattttaggtgcacactc

SEQ ID NO: 143888 - DNA, 20 bp, synthetic construct
  source 1..20: mol_type = other DNA
gtgcattttaggtgcacact

SEQ ID NO: 143889 - DNA, 20 bp, synthetic construct
  source 1..20: mol_type = other DNA
agtgcattttaggtgcacac

SEQ ID NO: 143890 - DNA, 20 bp, synthetic construct
  source 1..20: mol_type = other DNA
aagtgcattttaggtgcaca

SEQ ID NO: 143891 - DNA, 20 bp, synthetic construct
  source 1..20: mol_type = other DNA
caagtgcattttaggtgcac

SEQ ID NO: 143892 - DNA, 20 bp, synthetic construct
  source 1..20: mol_type = other DNA
acaagtgcattttaggtgca

SEQ ID NO: 143893 - DNA, 20 bp, synthetic construct
  source 1..20: mol_type = other DNA
aacaagtgcattttaggtgc

SEQ ID NO: 143894 - DNA, 20 bp, synthetic construct
  source 1..20: mol_type = other DNA
aaacaagtgcattttaggtg

SEQ ID NO: 143895 - DNA, 20 bp, synthetic construct
  source 1..20: mol_type = other DNA
caaacaagtgcattttaggt

SEQ ID NO: 143896 - DNA, 20 bp, synthetic construct
  source 1..20: mol_type = other DNA
tcaaacaagtgcattttagg

SEQ ID NO: 143897 - DNA, 20 bp, synthetic construct
  source 1..20: mol_type = other DNA
ctcaaacaagtgcattttag

SEQ ID NO: 143898 - DNA, 20 bp, synthetic construct
  source 1..20: mol_type = other DNA
actcaaacaagtgcatttta

SEQ ID NO: 143899 - DNA, 20 bp, synthetic construct
  source 1..20: mol_type = other DNA
tactcaaacaagtgcatttt

SEQ ID NO: 143900 - DNA, 20 bp, synthetic construct
  source 1..20: mol_type = other DNA
ctactcaaacaagtgcattt

SEQ ID NO: 143901 - DNA, 20 bp, synthetic construct
  source 1..20: mol_type = other DNA
actactcaaacaagtgcatt

SEQ ID NO: 143902 - DNA, 20 bp, synthetic construct
  source 1..20: mol_type = other DNA
aactactcaaacaagtgcat

SEQ ID NO: 143903 - DNA, 20 bp, synthetic construct
  source 1..20: mol_type = other DNA
aaactactcaaacaagtgca

SEQ ID NO: 143904 - DNA, 20 bp, synthetic construct
  source 1..20: mol_type = other DNA
gaaactactcaaacaagtgc

SEQ ID NO: 143905 - DNA, 20 bp, synthetic construct
  source 1..20: mol_type = other DNA
agaaactactcaaacaagtg

SEQ ID NO: 143906 - DNA, 20 bp, synthetic construct
  source 1..20: mol_type = other DNA
cagaaactactcaaacaagt

SEQ ID NO: 143907 - DNA, 20 bp, synthetic construct
  source 1..20: mol_type = other DNA
gcagaaactactcaaacaag

SEQ ID NO: 143908 - DNA, 20 bp, synthetic construct
  source 1..20: mol_type = other DNA
ggcagaaactactcaaacaa

SEQ ID NO: 143909 - DNA, 20 bp, synthetic construct
  source 1..20: mol_type = other DNA
aggcagaaactactcaaaca

SEQ ID NO: 143910 - DNA, 20 bp, synthetic construct
  source 1..20: mol_type = other DNA
taggcagaaactactcaaac

SEQ ID NO: 143911 - DNA, 20 bp, synthetic construct
  source 1..20: mol_type = other DNA
ataggcagaaactactcaaa

SEQ ID NO: 143912 - DNA, 20 bp, synthetic construct
  source 1..20: mol_type = other DNA
cataggcagaaactactcaa

SEQ ID NO: 143913 - DNA, 20 bp, synthetic construct
  source 1..20: mol_type = other DNA
gcataggcagaaactactca

SEQ ID NO: 143914 - DNA, 20 bp, synthetic construct
  source 1..20: mol_type = other DNA
ggcataggcagaaactactc

SEQ ID NO: 143915 - DNA, 20 bp, synthetic construct
  source 1..20: mol_type = other DNA
aggcataggcagaaactact

SEQ ID NO: 143916 - DNA, 20 bp, synthetic construct
  source 1..20: mol_type = other DNA
aaggcataggcagaaactac

SEQ ID NO: 143917 - DNA, 20 bp, synthetic construct
  source 1..20: mol_type = other DNA
gaaggcataggcagaaacta

SEQ ID NO: 143918 - DNA, 20 bp, synthetic construct
  source 1..20: mol_type = other DNA
tgaaggcataggcagaaact

SEQ ID NO: 143919 - DNA, 20 bp, synthetic construct
  source 1..20: mol_type = other DNA
ttgaaggcataggcagaaac

SEQ ID NO: 143920 - DNA, 20 bp, synthetic construct
  source 1..20: mol_type = other DNA
cttgaaggcataggcagaaa

SEQ ID NO: 143921 - DNA, 20 bp, synthetic construct
  source 1..20: mol_type = other DNA
acttgaaggcataggcagaa

SEQ ID NO: 143922 - DNA, 20 bp, synthetic construct
  source 1..20: mol_type = other DNA
aacttgaaggcataggcaga

SEQ ID NO: 143923 - DNA, 20 bp, synthetic construct
  source 1..20: mol_type = other DNA
caacttgaaggcataggcag

SEQ ID NO: 143924 - DNA, 20 bp, synthetic construct
  source 1..20: mol_type = other DNA
gcaacttgaaggcataggca

SEQ ID NO: 143925 - DNA, 20 bp, synthetic construct
  source 1..20: mol_type = other DNA
ggcaacttgaaggcataggc

SEQ ID NO: 143926 - DNA, 20 bp, synthetic construct
  source 1..20: mol_type = other DNA
aggcaacttgaaggcatagg

SEQ ID NO: 143927 - DNA, 20 bp, synthetic construct
  source 1..20: mol_type = other DNA
aaggcaacttgaaggcatag

SEQ ID NO: 143928 - DNA, 20 bp, synthetic construct
  source 1..20: mol_type = other DNA
aaaggcaacttgaaggcata

SEQ ID NO: 143929 - DNA, 20 bp, synthetic construct
  source 1..20: mol_type = other DNA
aaaaggcaacttgaaggcat

SEQ ID NO: 143930 - DNA, 20 bp, synthetic construct
  source 1..20: mol_type = other DNA
aaaaaggcaacttgaaggca

SEQ ID NO: 143931 - DNA, 20 bp, synthetic construct
  source 1..20: mol_type = other DNA
caaaaaggcaacttgaaggc

SEQ ID NO: 143932 - DNA, 20 bp, synthetic construct
  source 1..20: mol_type = other DNA
ccaaaaaggcaacttgaagg

SEQ ID NO: 143933 - DNA, 20 bp, synthetic construct
  source 1..20: mol_type = other DNA
cccaaaaaggcaacttgaag

SEQ ID NO: 143934 - DNA, 20 bp, synthetic construct
  source 1..20: mol_type = other DNA
tcccaaaaaggcaacttgaa

SEQ ID NO: 143935 - DNA, 20 bp, synthetic construct
  source 1..20: mol_type = other DNA
ttcccaaaaaggcaacttga

SEQ ID NO: 143936 - DNA, 20 bp, synthetic construct
  source 1..20: mol_type = other DNA
tttcccaaaaaggcaacttg

SEQ ID NO: 143937 - DNA, 20 bp, synthetic construct
  source 1..20: mol_type = other DNA
ttttcccaaaaaggcaactt

SEQ ID NO: 143938 - DNA, 20 bp, synthetic construct
  source 1..20: mol_type = other DNA
gttttcccaaaaaggcaact

SEQ ID NO: 143939 - DNA, 20 bp, synthetic construct
  source 1..20: mol_type = other DNA
ggttttcccaaaaaggcaac

SEQ ID NO: 143940 - DNA, 20 bp, synthetic construct
  source 1..20: mol_type = other DNA
aggttttcccaaaaaggcaa

SEQ ID NO: 143941 - DNA, 20 bp, synthetic construct
  source 1..20: mol_type = other DNA
taggttttcccaaaaaggca

SEQ ID NO: 143942 - DNA, 20 bp, synthetic construct
  source 1..20: mol_type = other DNA
ctaggttttcccaaaaaggc

SEQ ID NO: 143943 - DNA, 20 bp, synthetic construct
  source 1..20: mol_type = other DNA
actaggttttcccaaaaagg

SEQ ID NO: 143944 - DNA, 20 bp, synthetic construct
  source 1..20: mol_type = other DNA
cactaggttttcccaaaaag

SEQ ID NO: 143945 - DNA, 20 bp, synthetic construct
  source 1..20: mol_type = other DNA
tcactaggttttcccaaaaa

SEQ ID NO: 143946 - DNA, 20 bp, synthetic construct
  source 1..20: mol_type = other DNA
gtcactaggttttcccaaaa

SEQ ID NO: 143947 - DNA, 20 bp, synthetic construct
  source 1..20: mol_type = other DNA
ggtcactaggttttcccaaa

SEQ ID NO: 143948 - DNA, 20 bp, synthetic construct
  source 1..20: mol_type = other DNA
cggtcactaggttttcccaa

SEQ ID NO: 143949 - DNA, 20 bp, synthetic construct
  source 1..20: mol_type = other DNA
acggtcactaggttttccca

SEQ ID NO: 143950 - DNA, 20 bp, synthetic construct
  source 1..20: mol_type = other DNA
aacggtcactaggttttccc

SEQ ID NO: 143951 - DNA, 20 bp, synthetic construct
  source 1..20: mol_type = other DNA
taacggtcactaggttttcc

SEQ ID NO: 143952 - DNA, 20 bp, synthetic construct
  source 1..20: mol_type = other DNA
ttaacggtcactaggttttc

SEQ ID NO: 143953 - DNA, 20 bp, synthetic construct
  source 1..20: mol_type = other DNA
cttaacggtcactaggtttt

SEQ ID NO: 143954 - DNA, 20 bp, synthetic construct
  source 1..20: mol_type = other DNA
tcttaacggtcactaggttt

SEQ ID NO: 143955 - DNA, 20 bp, synthetic construct
  source 1..20: mol_type = other DNA
ctcttaacggtcactaggtt

SEQ ID NO: 143956 - DNA, 20 bp, synthetic construct
  source 1..20: mol_type = other DNA
actcttaacggtcactaggt

SEQ ID NO: 143957 - DNA, 20 bp, synthetic construct
  source 1..20: mol_type = other DNA
tactcttaacggtcactagg

SEQ ID NO: 143958 - DNA, 20 bp, synthetic construct
  source 1..20: mol_type = other DNA
ttactcttaacggtcactag

SEQ ID NO: 143959 - DNA, 20 bp, synthetic construct
  source 1..20: mol_type = other DNA
tttactcttaacggtcacta

SEQ ID NO: 143960 - DNA, 20 bp, synthetic construct
  source 1..20: mol_type = other DNA
atttactcttaacggtcact

SEQ ID NO: 143961 - DNA, 20 bp, synthetic construct
  source 1..20: mol_type = other DNA
catttactcttaacggtcac

SEQ ID NO: 143962 - DNA, 20 bp, synthetic construct
  source 1..20: mol_type = other DNA
gcatttactcttaacggtca

SEQ ID NO: 143963 - DNA, 20 bp, synthetic construct
  source 1..20: mol_type = other DNA
tgcatttactcttaacggtc

SEQ ID NO: 143964 - DNA, 20 bp, synthetic construct
  source 1..20: mol_type = other DNA
ttgcatttactcttaacggt

SEQ ID NO: 143965 - DNA, 20 bp, synthetic construct
  source 1..20: mol_type = other DNA
tttgcatttactcttaacgg

SEQ ID NO: 143966 - DNA, 20 bp, synthetic construct
  source 1..20: mol_type = other DNA
gtttgcatttactcttaacg

SEQ ID NO: 143967 - DNA, 20 bp, synthetic construct
  source 1..20: mol_type = other DNA
agtttgcatttactcttaac

SEQ ID NO: 143968 - DNA, 20 bp, synthetic construct
  source 1..20: mol_type = other DNA
tagtttgcatttactcttaa

SEQ ID NO: 143969 - DNA, 20 bp, synthetic construct
  source 1..20: mol_type = other DNA
ttagtttgcatttactctta

SEQ ID NO: 143970 - DNA, 20 bp, synthetic construct
  source 1..20: mol_type = other DNA
attagtttgcatttactctt

SEQ ID NO: 143971 - DNA, 20 bp, synthetic construct
  source 1..20: mol_type = other DNA
aattagtttgcatttactct

SEQ ID NO: 143972 - DNA, 20 bp, synthetic construct
  source 1..20: mol_type = other DNA
aaattagtttgcatttactc

SEQ ID NO: 143973 - DNA, 20 bp, synthetic construct
  source 1..20: mol_type = other DNA
caaattagtttgcatttact

SEQ ID NO: 143974 - DNA, 20 bp, synthetic construct
  source 1..20: mol_type = other DNA
tcaaattagtttgcatttac

SEQ ID NO: 143975 - DNA, 20 bp, synthetic construct
  source 1..20: mol_type = other DNA
atcaaattagtttgcattta

SEQ ID NO: 143976 - DNA, 20 bp, synthetic construct
  source 1..20: mol_type = other DNA
aatcaaattagtttgcattt

SEQ ID NO: 143977 - DNA, 20 bp, synthetic construct
  source 1..20: mol_type = other DNA
aaatcaaattagtttgcatt

SEQ ID NO: 143978 - DNA, 20 bp, synthetic construct
  source 1..20: mol_type = other DNA
aaaatcaaattagtttgcat

SEQ ID NO: 143979 - DNA, 20 bp, synthetic construct
  source 1..20: mol_type = other DNA
taaaatcaaattagtttgca

SEQ ID NO: 143980 - DNA, 20 bp, synthetic construct
  source 1..20: mol_type = other DNA
ttaaaatcaaattagtttgc

SEQ ID NO: 143981 - DNA, 20 bp, synthetic construct
  source 1..20: mol_type = other DNA
attaaaatcaaattagtttg

SEQ ID NO: 143982 - DNA, 20 bp, synthetic construct
  source 1..20: mol_type = other DNA
tattaaaatcaaattagttt

SEQ ID NO: 143983 - DNA, 20 bp, synthetic construct
  source 1..20: mol_type = other DNA
atattaaaatcaaattagtt

SEQ ID NO: 143984 - DNA, 20 bp, synthetic construct
  source 1..20: mol_type = other DNA
gatattaaaatcaaattagt

SEQ ID NO: 143985 - DNA, 20 bp, synthetic construct
  source 1..20: mol_type = other DNA
tgatattaaaatcaaattag

SEQ ID NO: 143986 - DNA, 20 bp, synthetic construct
  source 1..20: mol_type = other DNA
atgatattaaaatcaaatta

SEQ ID NO: 143987 - DNA, 20 bp, synthetic construct
  source 1..20: mol_type = other DNA
tatgatattaaaatcaaatt

SEQ ID NO: 143988 - DNA, 20 bp, synthetic construct
  source 1..20: mol_type = other DNA
atatgatattaaaatcaaat

SEQ ID NO: 143989 - DNA, 20 bp, synthetic construct
  source 1..20: mol_type = other DNA
catatgatattaaaatcaaa

SEQ ID NO: 143990 - DNA, 20 bp, synthetic construct
  source 1..20: mol_type = other DNA
acatatgatattaaaatcaa

SEQ ID NO: 143991 - DNA, 20 bp, synthetic construct
  source 1..20: mol_type = other DNA
tacatatgatattaaaatca

SEQ ID NO: 143992 - DNA, 20 bp, synthetic construct
  source 1..20: mol_type = other DNA
ctacatatgatattaaaatc

SEQ ID NO: 143993 - DNA, 20 bp, synthetic construct
  source 1..20: mol_type = other DNA
tctacatatgatattaaaat

SEQ ID NO: 143994 - DNA, 20 bp, synthetic construct
  source 1..20: mol_type = other DNA
ctctacatatgatattaaaa

SEQ ID NO: 143995 - DNA, 20 bp, synthetic construct
  source 1..20: mol_type = other DNA
gctctacatatgatattaaa

SEQ ID NO: 143996 - DNA, 20 bp, synthetic construct
  source 1..20: mol_type = other DNA
agctctacatatgatattaa

SEQ ID NO: 143997 - DNA, 20 bp, synthetic construct
  source 1..20: mol_type = other DNA
cagctctacatatgatatta

SEQ ID NO: 143998 - DNA, 20 bp, synthetic construct
  source 1..20: mol_type = other DNA
acagctctacatatgatatt

SEQ ID NO: 143999 - DNA, 20 bp, synthetic construct
  source 1..20: mol_type = other DNA
tacagctctacatatgatat

SEQ ID NO: 144000 - DNA, 20 bp, synthetic construct
  source 1..20: mol_type = other DNA
atacagctctacatatgata

SEQ ID NO: 144001 - DNA, 20 bp, synthetic construct
  source 1..20: mol_type = other DNA
aatacagctctacatatgat

SEQ ID NO: 144002 - DNA, 20 bp, synthetic construct
  source 1..20: mol_type = other DNA
taatacagctctacatatga

SEQ ID NO: 144003 - DNA, 20 bp, synthetic construct
  source 1..20: mol_type = other DNA
ataatacagctctacatatg

SEQ ID NO: 144004 - DNA, 20 bp, synthetic construct
  source 1..20: mol_type = other DNA
tataatacagctctacatat

SEQ ID NO: 144005 - DNA, 20 bp, synthetic construct
  source 1..20: mol_type = other DNA
atataatacagctctacata

SEQ ID NO: 144006 - DNA, 20 bp, synthetic construct
  source 1..20: mol_type = other DNA
catataatacagctctacat

SEQ ID NO: 144007 - DNA, 20 bp, synthetic construct
  source 1..20: mol_type = other DNA
tcatataatacagctctaca

SEQ ID NO: 144008 - DNA, 20 bp, synthetic construct
  source 1..20: mol_type = other DNA
ttcatataatacagctctac

SEQ ID NO: 144009 - DNA, 20 bp, synthetic construct
  source 1..20: mol_type = other DNA
gttcatataatacagctcta

SEQ ID NO: 144010 - DNA, 20 bp, synthetic construct
  source 1..20: mol_type = other DNA
ggttcatataatacagctct

SEQ ID NO: 144011 - DNA, 20 bp, synthetic construct
  source 1..20: mol_type = other DNA
tggttcatataatacagctc

SEQ ID NO: 144012 - DNA, 20 bp, synthetic construct
  source 1..20: mol_type = other DNA
ttggttcatataatacagct

SEQ ID NO: 144013 - DNA, 20 bp, synthetic construct
  source 1..20: mol_type = other DNA
tttggttcatataatacagc

SEQ ID NO: 144014 - DNA, 20 bp, synthetic construct
  source 1..20: mol_type = other DNA
atttggttcatataatacag

SEQ ID NO: 144015 - DNA, 20 bp, synthetic construct
  source 1..20: mol_type = other DNA
catttggttcatataataca

SEQ ID NO: 144016 - DNA, 20 bp, synthetic construct
  source 1..20: mol_type = other DNA
gcatttggttcatataatac

SEQ ID NO: 144017 - DNA, 20 bp, synthetic construct
  source 1..20: mol_type = other DNA
agcatttggttcatataata

SEQ ID NO: 144018 - DNA, 20 bp, synthetic construct
  source 1..20: mol_type = other DNA
tagcatttggttcatataat

SEQ ID NO: 144019 - DNA, 20 bp, synthetic construct
  source 1..20: mol_type = other DNA
ctagcatttggttcatataa

SEQ ID NO: 144020 - DNA, 20 bp, synthetic construct
  source 1..20: mol_type = other DNA
actagcatttggttcatata

SEQ ID NO: 144021 - DNA, 20 bp, synthetic construct
  source 1..20: mol_type = other DNA
gactagcatttggttcatat

SEQ ID NO: 144022 - DNA, 20 bp, synthetic construct
  source 1..20: mol_type = other DNA
agactagcatttggttcata

SEQ ID NO: 144023 - DNA, 20 bp, synthetic construct
  source 1..20: mol_type = other DNA
cagactagcatttggttcat

SEQ ID NO: 144024 - DNA, 20 bp, synthetic construct
  source 1..20: mol_type = other DNA
acagactagcatttggttca

SEQ ID NO: 144025 - DNA, 20 bp, synthetic construct
  source 1..20: mol_type = other DNA
aacagactagcatttggttc

SEQ ID NO: 144026 - DNA, 20 bp, synthetic construct
  source 1..20: mol_type = other DNA
taacagactagcatttggtt

SEQ ID NO: 144027 - DNA, 20 bp, synthetic construct
  source 1..20: mol_type = other DNA
ttaacagactagcatttggt

SEQ ID NO: 144028 - DNA, 20 bp, synthetic construct
  source 1..20: mol_type = other DNA
cttaacagactagcatttgg

SEQ ID NO: 144029 - DNA, 20 bp, synthetic construct
  source 1..20: mol_type = other DNA
gcttaacagactagcatttg

SEQ ID NO: 144030 - DNA, 20 bp, synthetic construct
  source 1..20: mol_type = other DNA
tgcttaacagactagcattt

SEQ ID NO: 144031 - DNA, 20 bp, synthetic construct
  source 1..20: mol_type = other DNA
ttgcttaacagactagcatt

SEQ ID NO: 144032 - DNA, 20 bp, synthetic construct
  source 1..20: mol_type = other DNA
attgcttaacagactagcat

SEQ ID NO: 144033 - DNA, 20 bp, synthetic construct
  source 1..20: mol_type = other DNA
tattgcttaacagactagca

SEQ ID NO: 144034 - DNA, 20 bp, synthetic construct
  source 1..20: mol_type = other DNA
ctattgcttaacagactagc

SEQ ID NO: 144035 - DNA, 20 bp, synthetic construct
  source 1..20: mol_type = other DNA
gctattgcttaacagactag

SEQ ID NO: 144036 - DNA, 20 bp, synthetic construct
  source 1..20: mol_type = other DNA
agctattgcttaacagacta

SEQ ID NO: 144037 - DNA, 20 bp, synthetic construct
  source 1..20: mol_type = other DNA
tagctattgcttaacagact

SEQ ID NO: 144038 - DNA, 20 bp, synthetic construct
  source 1..20: mol_type = other DNA
gtagctattgcttaacagac

SEQ ID NO: 144039 - DNA, 20 bp, synthetic construct
  source 1..20: mol_type = other DNA
tgtagctattgcttaacaga

SEQ ID NO: 144040 - DNA, 20 bp, synthetic construct
  source 1..20: mol_type = other DNA
gtgtagctattgcttaacag

SEQ ID NO: 144041 - DNA, 20 bp, synthetic construct
  source 1..20: mol_type = other DNA
agtgtagctattgcttaaca

SEQ ID NO: 144042 - DNA, 20 bp, synthetic construct
  source 1..20: mol_type = other DNA
aagtgtagctattgcttaac

SEQ ID NO: 144043 - DNA, 20 bp, synthetic construct
  source 1..20: mol_type = other DNA
taagtgtagctattgcttaa

SEQ ID NO: 144044 - DNA, 20 bp, synthetic construct
  source 1..20: mol_type = other DNA
ataagtgtagctattgctta

SEQ ID NO: 144045 - DNA, 20 bp, synthetic construct
  source 1..20: mol_type = other DNA
aataagtgtagctattgctt

SEQ ID NO: 144046 - DNA, 20 bp, synthetic construct
  source 1..20: mol_type = other DNA
aaataagtgtagctattgct

SEQ ID NO: 144047 - DNA, 20 bp, synthetic construct
  source 1..20: mol_type = other DNA
aaaataagtgtagctattgc

SEQ ID NO: 144048 - DNA, 20 bp, synthetic construct
  source 1..20: mol_type = other DNA
aaaaataagtgtagctattg

SEQ ID NO: 144049 - DNA, 20 bp, synthetic construct
  source 1..20: mol_type = other DNA
aaaaaataagtgtagctatt

SEQ ID NO: 144050 - DNA, 20 bp, synthetic construct
  source 1..20: mol_type = other DNA
gaaaaaataagtgtagctat

SEQ ID NO: 144051 - DNA, 20 bp, synthetic construct
  source 1..20: mol_type = other DNA
tgaaaaaataagtgtagcta

SEQ ID NO: 144052 - DNA, 20 bp, synthetic construct
  source 1..20: mol_type = other DNA
ttgaaaaaataagtgtagct

SEQ ID NO: 144053 - DNA, 20 bp, synthetic construct
  source 1..20: mol_type = other DNA
cttgaaaaaataagtgtagc

SEQ ID NO: 144054 - DNA, 20 bp, synthetic construct
  source 1..20: mol_type = other DNA
tcttgaaaaaataagtgtag

SEQ ID NO: 144055 - DNA, 20 bp, synthetic construct
  source 1..20: mol_type = other DNA
gtcttgaaaaaataagtgta

SEQ ID NO: 144056 - DNA, 20 bp, synthetic construct
  source 1..20: mol_type = other DNA
tgtcttgaaaaaataagtgt

SEQ ID NO: 144057 - DNA, 20 bp, synthetic construct
  source 1..20: mol_type = other DNA
ttgtcttgaaaaaataagtg

SEQ ID NO: 144058 - DNA, 20 bp, synthetic construct
  source 1..20: mol_type = other DNA
attgtcttgaaaaaataagt

SEQ ID NO: 144059 - DNA, 20 bp, synthetic construct
  source 1..20: mol_type = other DNA
cattgtcttgaaaaaataag

SEQ ID NO: 144060 - DNA, 20 bp, synthetic construct
  source 1..20: mol_type = other DNA
ccattgtcttgaaaaaataa

SEQ ID NO: 144061 - DNA, 20 bp, synthetic construct
  source 1..20: mol_type = other DNA
tccattgtcttgaaaaaata

SEQ ID NO: 144062 - DNA, 20 bp, synthetic construct
  source 1..20: mol_type = other DNA
atccattgtcttgaaaaaat

SEQ ID NO: 144063 - DNA, 20 bp, synthetic construct
  source 1..20: mol_type = other DNA
catccattgtcttgaaaaaa

SEQ ID NO: 144064 - DNA, 20 bp, synthetic construct
  source 1..20: mol_type = other DNA
ccatccattgtcttgaaaaa

SEQ ID NO: 144065 - DNA, 20 bp, synthetic construct
  source 1..20: mol_type = other DNA
accatccattgtcttgaaaa

SEQ ID NO: 144066 - DNA, 20 bp, synthetic construct
  source 1..20: mol_type = other DNA
aaccatccattgtcttgaaa

SEQ ID NO: 144067 - DNA, 20 bp, synthetic construct
  source 1..20: mol_type = other DNA
aaaccatccattgtcttgaa

SEQ ID NO: 144068 - DNA, 20 bp, synthetic construct
  source 1..20: mol_type = other DNA
taaaccatccattgtcttga

SEQ ID NO: 144069 - DNA, 20 bp, synthetic construct
  source 1..20: mol_type = other DNA
ttaaaccatccattgtcttg

SEQ ID NO: 144070 - DNA, 20 bp, synthetic construct
  source 1..20: mol_type = other DNA
tttaaaccatccattgtctt

SEQ ID NO: 144071 - DNA, 20 bp, synthetic construct
  source 1..20: mol_type = other DNA
atttaaaccatccattgtct

SEQ ID NO: 144072 - DNA, 20 bp, synthetic construct
  source 1..20: mol_type = other DNA
catttaaaccatccattgtc

SEQ ID NO: 144073 - DNA, 20 bp, synthetic construct
  source 1..20: mol_type = other DNA
ccatttaaaccatccattgt

SEQ ID NO: 144074 - DNA, 20 bp, synthetic construct
  source 1..20: mol_type = other DNA
tccatttaaaccatccattg

SEQ ID NO: 144075 - DNA, 20 bp, synthetic construct
  source 1..20: mol_type = other DNA
ctccatttaaaccatccatt

SEQ ID NO: 144076 - DNA, 20 bp, synthetic construct
  source 1..20: mol_type = other DNA
actccatttaaaccatccat

SEQ ID NO: 144077 - DNA, 20 bp, synthetic construct
  source 1..20: mol_type = other DNA
gactccatttaaaccatcca

SEQ ID NO: 144078 - DNA, 20 bp, synthetic construct
  source 1..20: mol_type = other DNA
tgactccatttaaaccatcc

SEQ ID NO: 144079 - DNA, 20 bp, synthetic construct
  source 1..20: mol_type = other DNA
atgactccatttaaaccatc

SEQ ID NO: 144080 - DNA, 20 bp, synthetic construct
  source 1..20: mol_type = other DNA
gatgactccatttaaaccat

SEQ ID NO: 144081 - DNA, 20 bp, synthetic construct
  source 1..20: mol_type = other DNA
agatgactccatttaaacca

SEQ ID NO: 144082 - DNA, 20 bp, synthetic construct
  source 1..20: mol_type = other DNA
tagatgactccatttaaacc

SEQ ID NO: 144083 - DNA, 20 bp, synthetic construct
  source 1..20: mol_type = other DNA
atagatgactccatttaaac

SEQ ID NO: 144084 - DNA, 20 bp, synthetic construct
  source 1..20: mol_type = other DNA
tatagatgactccatttaaa

SEQ ID NO: 144085 - DNA, 20 bp, synthetic construct
  source 1..20: mol_type = other DNA
ctatagatgactccatttaa

SEQ ID NO: 144086 - DNA, 20 bp, synthetic construct
  source 1..20: mol_type = other DNA
tctatagatgactccattta

SEQ ID NO: 144087 - DNA, 20 bp, synthetic construct
  source 1..20: mol_type = other DNA
ttctatagatgactccattt

SEQ ID NO: 144088 - DNA, 20 bp, synthetic construct
  source 1..20: mol_type = other DNA
tttctatagatgactccatt

SEQ ID NO: 144089 - DNA, 20 bp, synthetic construct
  source 1..20: mol_type = other DNA
atttctatagatgactccat

SEQ ID NO: 144090 - DNA, 20 bp, synthetic construct
  source 1..20: mol_type = other DNA
aatttctatagatgactcca

SEQ ID NO: 144091 - DNA, 20 bp, synthetic construct
  source 1..20: mol_type = other DNA
caatttctatagatgactcc

SEQ ID NO: 144092 - DNA, 20 bp, synthetic construct
  source 1..20: mol_type = other DNA
ccaatttctatagatgactc

SEQ ID NO: 144093 - DNA, 20 bp, synthetic construct
  source 1..20: mol_type = other DNA
accaatttctatagatgact

SEQ ID NO: 144094 - DNA, 20 bp, synthetic construct
  source 1..20: mol_type = other DNA
taccaatttctatagatgac

SEQ ID NO: 144095 - DNA, 20 bp, synthetic construct
  source 1..20: mol_type = other DNA
ctaccaatttctatagatga

SEQ ID NO: 144096 - DNA, 20 bp, synthetic construct
  source 1..20: mol_type = other DNA
actaccaatttctatagatg

SEQ ID NO: 144097 - DNA, 20 bp, synthetic construct
  source 1..20: mol_type = other DNA
cactaccaatttctatagat

SEQ ID NO: 144098 - DNA, 20 bp, synthetic construct
  source 1..20: mol_type = other DNA
ccactaccaatttctataga

SEQ ID NO: 144099 - DNA, 20 bp, synthetic construct
  source 1..20: mol_type = other DNA
gccactaccaatttctatag

SEQ ID NO: 144100 - DNA, 20 bp, synthetic construct
  source 1..20: mol_type = other DNA
cgccactaccaatttctata

SEQ ID NO: 144101 - DNA, 20 bp, synthetic construct
  source 1..20: mol_type = other DNA
acgccactaccaatttctat

SEQ ID NO: 144102 - DNA, 20 bp, synthetic construct
  source 1..20: mol_type = other DNA
cacgccactaccaatttcta

SEQ ID NO: 144103 - DNA, 20 bp, synthetic construct
  source 1..20: mol_type = other DNA
tcacgccactaccaatttct

SEQ ID NO: 144104 - DNA, 20 bp, synthetic construct
  source 1..20: mol_type = other DNA
ctcacgccactaccaatttc

SEQ ID NO: 144105 - DNA, 20 bp, synthetic construct
  source 1..20: mol_type = other DNA
actcacgccactaccaattt

SEQ ID NO: 144106 - DNA, 20 bp, synthetic construct
  source 1..20: mol_type = other DNA
aactcacgccactaccaatt

SEQ ID NO: 144107 - DNA, 20 bp, synthetic construct
  source 1..20: mol_type = other DNA
taactcacgccactaccaat

SEQ ID NO: 144108 - DNA, 20 bp, synthetic construct
  source 1..20: mol_type = other DNA
ataactcacgccactaccaa

SEQ ID NO: 144109 - DNA, 20 bp, synthetic construct
  source 1..20: mol_type = other DNA
cataactcacgccactacca

SEQ ID NO: 144110 - DNA, 20 bp, synthetic construct
  source 1..20: mol_type = other DNA
gcataactcacgccactacc

SEQ ID NO: 144111 - DNA, 20 bp, synthetic construct
  source 1..20: mol_type = other DNA
tgcataactcacgccactac

SEQ ID NO: 144112 - DNA, 20 bp, synthetic construct
  source 1..20: mol_type = other DNA
atgcataactcacgccacta

SEQ ID NO: 144113 - DNA, 20 bp, synthetic construct
  source 1..20: mol_type = other DNA
aatgcataactcacgccact

SEQ ID NO: 144114 - DNA, 20 bp, synthetic construct
  source 1..20: mol_type = other DNA
caatgcataactcacgccac

SEQ ID NO: 144115 - DNA, 20 bp, synthetic construct
  source 1..20: mol_type = other DNA
acaatgcataactcacgcca

SEQ ID NO: 144116 - DNA, 20 bp, synthetic construct
  source 1..20: mol_type = other DNA
tacaatgcataactcacgcc

SEQ ID NO: 144117 - DNA, 20 bp, synthetic construct
  source 1..20: mol_type = other DNA
ttacaatgcataactcacgc

SEQ ID NO: 144118 - DNA, 20 bp, synthetic construct
  source 1..20: mol_type = other DNA
gttacaatgcataactcacg

SEQ ID NO: 144119 - DNA, 20 bp, synthetic construct
  source 1..20: mol_type = other DNA
ggttacaatgcataactcac

SEQ ID NO: 144120 - DNA, 20 bp, synthetic construct
  source 1..20: mol_type = other DNA
tggttacaatgcataactca

SEQ ID NO: 144121 - DNA, 20 bp, synthetic construct
  source 1..20: mol_type = other DNA
atggttacaatgcataactc

SEQ ID NO: 144122 - DNA, 20 bp, synthetic construct
  source 1..20: mol_type = other DNA
gatggttacaatgcataact

SEQ ID NO: 144123 - DNA, 20 bp, synthetic construct
  source 1..20: mol_type = other DNA
tgatggttacaatgcataac

SEQ ID NO: 144124 - DNA, 20 bp, synthetic construct
  source 1..20: mol_type = other DNA
ttgatggttacaatgcataa

SEQ ID NO: 144125 - DNA, 20 bp, synthetic construct
  source 1..20: mol_type = other DNA
cttgatggttacaatgcata

SEQ ID NO: 144126 - DNA, 20 bp, synthetic construct
  source 1..20: mol_type = other DNA
tcttgatggttacaatgcat

SEQ ID NO: 144127 - DNA, 20 bp, synthetic construct
  source 1..20: mol_type = other DNA
ttcttgatggttacaatgca

SEQ ID NO: 144128 - DNA, 20 bp, synthetic construct
  source 1..20: mol_type = other DNA
tttcttgatggttacaatgc

SEQ ID NO: 144129 - DNA, 20 bp, synthetic construct
  source 1..20: mol_type = other DNA
ctttcttgatggttacaatg

SEQ ID NO: 144130 - DNA, 20 bp, synthetic construct
  source 1..20: mol_type = other DNA
actttcttgatggttacaat

SEQ ID NO: 144131 - DNA, 20 bp, synthetic construct
  source 1..20: mol_type = other DNA
aactttcttgatggttacaa

SEQ ID NO: 144132 - DNA, 20 bp, synthetic construct
  source 1..20: mol_type = other DNA
gaactttcttgatggttaca

SEQ ID NO: 144133 - DNA, 20 bp, synthetic construct
  source 1..20: mol_type = other DNA
tgaactttcttgatggttac

SEQ ID NO: 144134 - DNA, 20 bp, synthetic construct
  source 1..20: mol_type = other DNA
ctgaactttcttgatggtta

SEQ ID NO: 144135 - DNA, 20 bp, synthetic construct
  source 1..20: mol_type = other DNA
actgaactttcttgatggtt

SEQ ID NO: 144136 - DNA, 20 bp, synthetic construct
  source 1..20: mol_type = other DNA
aactgaactttcttgatggt

SEQ ID NO: 144137 - DNA, 20 bp, synthetic construct
  source 1..20: mol_type = other DNA
caactgaactttcttgatgg

SEQ ID NO: 144138 - DNA, 20 bp, synthetic construct
  source 1..20: mol_type = other DNA
tcaactgaactttcttgatg

SEQ ID NO: 144139 - DNA, 20 bp, synthetic construct
  source 1..20: mol_type = other DNA
atcaactgaactttcttgat

SEQ ID NO: 144140 - DNA, 20 bp, synthetic construct
  source 1..20: mol_type = other DNA
catcaactgaactttcttga

SEQ ID NO: 144141 - DNA, 20 bp, synthetic construct
  source 1..20: mol_type = other DNA
tcatcaactgaactttcttg

SEQ ID NO: 144142 - DNA, 20 bp, synthetic construct
  source 1..20: mol_type = other DNA
ttcatcaactgaactttctt

SEQ ID NO: 144143 - DNA, 20 bp, synthetic construct
  source 1..20: mol_type = other DNA
cttcatcaactgaactttct

SEQ ID NO: 144144 - DNA, 20 bp, synthetic construct
  source 1..20: mol_type = other DNA
acttcatcaactgaactttc

SEQ ID NO: 144145 - DNA, 20 bp, synthetic construct
  source 1..20: mol_type = other DNA
cacttcatcaactgaacttt

SEQ ID NO: 144146 - DNA, 20 bp, synthetic construct
  source 1..20: mol_type = other DNA
acacttcatcaactgaactt

SEQ ID NO: 144147 - DNA, 20 bp, synthetic construct
  source 1..20: mol_type = other DNA
tacacttcatcaactgaact

SEQ ID NO: 144148 - DNA, 20 bp, synthetic construct
  source 1..20: mol_type = other DNA
ctacacttcatcaactgaac

SEQ ID NO: 144149 - DNA, 20 bp, synthetic construct
  source 1..20: mol_type = other DNA
tctacacttcatcaactgaa

SEQ ID NO: 144150 - DNA, 20 bp, synthetic construct
  source 1..20: mol_type = other DNA
ctctacacttcatcaactga

SEQ ID NO: 144151 - DNA, 20 bp, synthetic construct
  source 1..20: mol_type = other DNA
cctctacacttcatcaactg

SEQ ID NO: 144152 - DNA, 20 bp, synthetic construct
  source 1..20: mol_type = other DNA
tcctctacacttcatcaact

SEQ ID NO: 144153 - DNA, 20 bp, synthetic construct
  source 1..20: mol_type = other DNA
ctcctctacacttcatcaac

SEQ ID NO: 144154 - DNA, 20 bp, synthetic construct
  source 1..20: mol_type = other DNA
gctcctctacacttcatcaa

SEQ ID NO: 144155 - DNA, 20 bp, synthetic construct
  source 1..20: mol_type = other DNA
cgctcctctacacttcatca

SEQ ID NO: 144156 - DNA, 20 bp, synthetic construct
  source 1..20: mol_type = other DNA
tcgctcctctacacttcatc

SEQ ID NO: 144157 - DNA, 20 bp, synthetic construct
  source 1..20: mol_type = other DNA
atcgctcctctacacttcat

SEQ ID NO: 144158 - DNA, 20 bp, synthetic construct
  source 1..20: mol_type = other DNA
catcgctcctctacacttca

SEQ ID NO: 144159 - DNA, 20 bp, synthetic construct
  source 1..20: mol_type = other DNA
ccatcgctcctctacacttc

SEQ ID NO: 144160 - DNA, 20 bp, synthetic construct
  source 1..20: mol_type = other DNA
tccatcgctcctctacactt

SEQ ID NO: 144161 - DNA, 20 bp, synthetic construct
  source 1..20: mol_type = other DNA
ctccatcgctcctctacact

SEQ ID NO: 144162 - DNA, 20 bp, synthetic construct
  source 1..20: mol_type = other DNA
cctccatcgctcctctacac

SEQ ID NO: 144163 - DNA, 20 bp, synthetic construct
  source 1..20: mol_type = other DNA
acctccatcgctcctctaca

SEQ ID NO: 144164 - DNA, 20 bp, synthetic construct
  source 1..20: mol_type = other DNA
aacctccatcgctcctctac

SEQ ID NO: 144165 - DNA, 20 bp, synthetic construct
  source 1..20: mol_type = other DNA
caacctccatcgctcctcta

SEQ ID NO: 144166 - DNA, 20 bp, synthetic construct
  source 1..20: mol_type = other DNA
acaacctccatcgctcctct

SEQ ID NO: 144167 - DNA, 20 bp, synthetic construct
  source 1..20: mol_type = other DNA
gacaacctccatcgctcctc

SEQ ID NO: 144168 - DNA, 20 bp, synthetic construct
  source 1..20: mol_type = other DNA
tgacaacctccatcgctcct

SEQ ID NO: 144169 - DNA, 20 bp, synthetic construct
  source 1..20: mol_type = other DNA
ctgacaacctccatcgctcc

SEQ ID NO: 144170 - DNA, 20 bp, synthetic construct
  source 1..20: mol_type = other DNA
tctgacaacctccatcgctc

SEQ ID NO: 144171 - DNA, 20 bp, synthetic construct
  source 1..20: mol_type = other DNA
gtctgacaacctccatcgct

SEQ ID NO: 144172 - DNA, 20 bp, synthetic construct
  source 1..20: mol_type = other DNA
tgtctgacaacctccatcgc

SEQ ID NO: 144173 - DNA, 20 bp, synthetic construct
  source 1..20: mol_type = other DNA
atgtctgacaacctccatcg

SEQ ID NO: 144174 - DNA, 20 bp, synthetic construct
  source 1..20: mol_type = other DNA
gatgtctgacaacctccatc

SEQ ID NO: 144175 - DNA, 20 bp, synthetic construct
  source 1..20: mol_type = other DNA
cgatgtctgacaacctccat

SEQ ID NO: 144176 - DNA, 20 bp, synthetic construct
  source 1..20: mol_type = other DNA
ccgatgtctgacaacctcca

SEQ ID NO: 144177 - DNA, 20 bp, synthetic construct
  source 1..20: mol_type = other DNA
accgatgtctgacaacctcc

SEQ ID NO: 144178 - DNA, 20 bp, synthetic construct
  source 1..20: mol_type = other DNA
aaccgatgtctgacaacctc

SEQ ID NO: 144179 - DNA, 20 bp, synthetic construct
  source 1..20: mol_type = other DNA
caaccgatgtctgacaacct

SEQ ID NO: 144180 - DNA, 20 bp, synthetic construct
  source 1..20: mol_type = other DNA
acaaccgatgtctgacaacc

SEQ ID NO: 144181 - DNA, 20 bp, synthetic construct
  source 1..20: mol_type = other DNA
cacaaccgatgtctgacaac

SEQ ID NO: 144182 - DNA, 20 bp, synthetic construct
  source 1..20: mol_type = other DNA
acacaaccgatgtctgacaa

SEQ ID NO: 144183 - DNA, 20 bp, synthetic construct
  source 1..20: mol_type = other DNA
tacacaaccgatgtctgaca

SEQ ID NO: 144184 - DNA, 20 bp, synthetic construct
  source 1..20: mol_type = other DNA
gtacacaaccgatgtctgac

SEQ ID NO: 144185 - DNA, 20 bp, synthetic construct
  source 1..20: mol_type = other DNA
tgtacacaaccgatgtctga

SEQ ID NO: 144186 - DNA, 20 bp, synthetic construct
  source 1..20: mol_type = other DNA
atgtacacaaccgatgtctg

SEQ ID NO: 144187 - DNA, 20 bp, synthetic construct
  source 1..20: mol_type = other DNA
catgtacacaaccgatgtct

SEQ ID NO: 144188 - DNA, 20 bp, synthetic construct
  source 1..20: mol_type = other DNA
gcatgtacacaaccgatgtc

SEQ ID NO: 144189 - DNA, 20 bp, synthetic construct
  source 1..20: mol_type = other DNA
agcatgtacacaaccgatgt

SEQ ID NO: 144190 - DNA, 20 bp, synthetic construct
  source 1..20: mol_type = other DNA
gagcatgtacacaaccgatg

SEQ ID NO: 144191 - DNA, 20 bp, synthetic construct
  source 1..20: mol_type = other DNA
ggagcatgtacacaaccgat

SEQ ID NO: 144192 - DNA, 20 bp, synthetic construct
  source 1..20: mol_type = other DNA
aggagcatgtacacaaccga

SEQ ID NO: 144193 - DNA, 20 bp, synthetic construct
  source 1..20: mol_type = other DNA
aaggagcatgtacacaaccg

SEQ ID NO: 144194 - DNA, 20 bp, synthetic construct
  source 1..20: mol_type = other DNA
aaaggagcatgtacacaacc

SEQ ID NO: 144195 - DNA, 20 bp, synthetic construct
  source 1..20: mol_type = other DNA
aaaaggagcatgtacacaac

SEQ ID NO: 144196 - DNA, 20 bp, synthetic construct
  source 1..20: mol_type = other DNA
aaaaaggagcatgtacacaa

SEQ ID NO: 144197 - DNA, 20 bp, synthetic construct
  source 1..20: mol_type = other DNA
gaaaaaggagcatgtacaca

SEQ ID NO: 144198 - DNA, 20 bp, synthetic construct
  source 1..20: mol_type = other DNA
agaaaaaggagcatgtacac

SEQ ID NO: 144199 - DNA, 20 bp, synthetic construct
  source 1..20: mol_type = other DNA
aagaaaaaggagcatgtaca

SEQ ID NO: 144200 - DNA, 20 bp, synthetic construct
  source 1..20: mol_type = other DNA
aaagaaaaaggagcatgtac

SEQ ID NO: 144201 - DNA, 20 bp, synthetic construct
  source 1..20: mol_type = other DNA
gaaagaaaaaggagcatgta

SEQ ID NO: 144202 - DNA, 20 bp, synthetic construct
  source 1..20: mol_type = other DNA
tgaaagaaaaaggagcatgt

SEQ ID NO: 144203 - DNA, 20 bp, synthetic construct
  source 1..20: mol_type = other DNA
gtgaaagaaaaaggagcatg

SEQ ID NO: 144204 - DNA, 20 bp, synthetic construct
  source 1..20: mol_type = other DNA
agtgaaagaaaaaggagcat

SEQ ID NO: 144205 - DNA, 20 bp, synthetic construct
  source 1..20: mol_type = other DNA
aagtgaaagaaaaaggagca

SEQ ID NO: 144206 - DNA, 20 bp, synthetic construct
  source 1..20: mol_type = other DNA
aaagtgaaagaaaaaggagc

SEQ ID NO: 144207 - DNA, 20 bp, synthetic construct
  source 1..20: mol_type = other DNA
taaagtgaaagaaaaaggag

SEQ ID NO: 144208 - DNA, 20 bp, synthetic construct
  source 1..20: mol_type = other DNA
ctaaagtgaaagaaaaagga

SEQ ID NO: 144209 - DNA, 20 bp, synthetic construct
  source 1..20: mol_type = other DNA
actaaagtgaaagaaaaagg

SEQ ID NO: 144210 - DNA, 20 bp, synthetic construct
  source 1..20: mol_type = other DNA
aactaaagtgaaagaaaaag

SEQ ID NO: 144211 - DNA, 20 bp, synthetic construct
  source 1..20: mol_type = other DNA
aaactaaagtgaaagaaaaa

SEQ ID NO: 144212 - DNA, 20 bp, synthetic construct
  source 1..20: mol_type = other DNA
gaaactaaagtgaaagaaaa

SEQ ID NO: 144213 - DNA, 20 bp, synthetic construct
  source 1..20: mol_type = other DNA
ggaaactaaagtgaaagaaa

SEQ ID NO: 144214 - DNA, 20 bp, synthetic construct
  source 1..20: mol_type = other DNA
tggaaactaaagtgaaagaa

SEQ ID NO: 144215 - DNA, 20 bp, synthetic construct
  source 1..20: mol_type = other DNA
gtggaaactaaagtgaaaga

SEQ ID NO: 144216 - DNA, 20 bp, synthetic construct
  source 1..20: mol_type = other DNA
cgtggaaactaaagtgaaag

SEQ ID NO: 144217 - DNA, 20 bp, synthetic construct
  source 1..20: mol_type = other DNA
ccgtggaaactaaagtgaaa

SEQ ID NO: 144218 - DNA, 20 bp, synthetic construct
  source 1..20: mol_type = other DNA
cccgtggaaactaaagtgaa

SEQ ID NO: 144219 - DNA, 20 bp, synthetic construct
  source 1..20: mol_type = other DNA
gcccgtggaaactaaagtga

SEQ ID NO: 144220 - DNA, 20 bp, synthetic construct
  source 1..20: mol_type = other DNA
agcccgtggaaactaaagtg

SEQ ID NO: 144221 - DNA, 20 bp, synthetic construct
  source 1..20: mol_type = other DNA
gagcccgtggaaactaaagt

SEQ ID NO: 144222 - DNA, 20 bp, synthetic construct
  source 1..20: mol_type = other DNA
ggagcccgtggaaactaaag

SEQ ID NO: 144223 - DNA, 20 bp, synthetic construct
  source 1..20: mol_type = other DNA
gggagcccgtggaaactaaa

SEQ ID NO: 144224 - DNA, 20 bp, synthetic construct
  source 1..20: mol_type = other DNA
agggagcccgtggaaactaa

SEQ ID NO: 144225 - DNA, 20 bp, synthetic construct
  source 1..20: mol_type = other DNA
aagggagcccgtggaaacta

SEQ ID NO: 144226 - DNA, 20 bp, synthetic construct
  source 1..20: mol_type = other DNA
caagggagcccgtggaaact

SEQ ID NO: 144227 - DNA, 20 bp, synthetic construct
  source 1..20: mol_type = other DNA
gcaagggagcccgtggaaac

SEQ ID NO: 144228 - DNA, 20 bp, synthetic construct
  source 1..20: mol_type = other DNA
agcaagggagcccgtggaaa

SEQ ID NO: 144229 - DNA, 20 bp, synthetic construct
  source 1..20: mol_type = other DNA
gagcaagggagcccgtggaa

SEQ ID NO: 144230 - DNA, 20 bp, synthetic construct
  source 1..20: mol_type = other DNA
tgagcaagggagcccgtgga

SEQ ID NO: 144231 - DNA, 20 bp, synthetic construct
  source 1..20: mol_type = other DNA
ctgagcaagggagcccgtgg

SEQ ID NO: 144232 - DNA, 20 bp, synthetic construct
  source 1..20: mol_type = other DNA
gctgagcaagggagcccgtg

SEQ ID NO: 144233 - DNA, 20 bp, synthetic construct
  source 1..20: mol_type = other DNA
tgctgagcaagggagcccgt

SEQ ID NO: 144234 - DNA, 20 bp, synthetic construct
  source 1..20: mol_type = other DNA
ctgctgagcaagggagcccg

SEQ ID NO: 144235 - DNA, 20 bp, synthetic construct
  source 1..20: mol_type = other DNA
actgctgagcaagggagccc

SEQ ID NO: 144236 - DNA, 20 bp, synthetic construct
  source 1..20: mol_type = other DNA
tactgctgagcaagggagcc

SEQ ID NO: 144237 - DNA, 20 bp, synthetic construct
  source 1..20: mol_type = other DNA
atactgctgagcaagggagc

SEQ ID NO: 144238 - DNA, 20 bp, synthetic construct
  source 1..20: mol_type = other DNA
catactgctgagcaagggag

SEQ ID NO: 144239 - DNA, 20 bp, synthetic construct
  source 1..20: mol_type = other DNA
gcatactgctgagcaaggga

SEQ ID NO: 144240 - DNA, 20 bp, synthetic construct
  source 1..20: mol_type = other DNA
cgcatactgctgagcaaggg

SEQ ID NO: 144241 - DNA, 20 bp, synthetic construct
  source 1..20: mol_type = other DNA
gcgcatactgctgagcaagg

SEQ ID NO: 144242 - DNA, 20 bp, synthetic construct
  source 1..20: mol_type = other DNA
tgcgcatactgctgagcaag

SEQ ID NO: 144243 - DNA, 20 bp, synthetic construct
  source 1..20: mol_type = other DNA
gtgcgcatactgctgagcaa

SEQ ID NO: 144244 - DNA, 20 bp, synthetic construct
  source 1..20: mol_type = other DNA
ggtgcgcatactgctgagca

SEQ ID NO: 144245 - DNA, 20 bp, synthetic construct
  source 1..20: mol_type = other DNA
gggtgcgcatactgctgagc

SEQ ID NO: 144246 - DNA, 20 bp, synthetic construct
  source 1..20: mol_type = other DNA
agggtgcgcatactgctgag

SEQ ID NO: 144247 - DNA, 20 bp, synthetic construct
  source 1..20: mol_type = other DNA
tagggtgcgcatactgctga

SEQ ID NO: 144248 - DNA, 20 bp, synthetic construct
  source 1..20: mol_type = other DNA
ttagggtgcgcatactgctg

SEQ ID NO: 144249 - DNA, 20 bp, synthetic construct
  source 1..20: mol_type = other DNA
gttagggtgcgcatactgct

SEQ ID NO: 144250 - DNA, 20 bp, synthetic construct
  source 1..20: mol_type = other DNA
cgttagggtgcgcatactgc

SEQ ID NO: 144251 - DNA, 20 bp, synthetic construct
  source 1..20: mol_type = other DNA
gcgttagggtgcgcatactg

SEQ ID NO: 144252 - DNA, 20 bp, synthetic construct
  source 1..20: mol_type = other DNA
agcgttagggtgcgcatact

SEQ ID NO: 144253 - DNA, 20 bp, synthetic construct
  source 1..20: mol_type = other DNA
tagcgttagggtgcgcatac

SEQ ID NO: 144254 - DNA, 20 bp, synthetic construct
  source 1..20: mol_type = other DNA
gtagcgttagggtgcgcata

SEQ ID NO: 144255 - DNA, 20 bp, synthetic construct
  source 1..20: mol_type = other DNA
ggtagcgttagggtgcgcat

SEQ ID NO: 144256 - DNA, 20 bp, synthetic construct
  source 1..20: mol_type = other DNA
gggtagcgttagggtgcgca

SEQ ID NO: 144257 - DNA, 20 bp, synthetic construct
  source 1..20: mol_type = other DNA
agggtagcgttagggtgcgc

SEQ ID NO: 144258 - DNA, 20 bp, synthetic construct
  source 1..20: mol_type = other DNA
cagggtagcgttagggtgcg

SEQ ID NO: 144259 - DNA, 20 bp, synthetic construct
  source 1..20: mol_type = other DNA
gcagggtagcgttagggtgc

SEQ ID NO: 144260 - DNA, 20 bp, synthetic construct
  source 1..20: mol_type = other DNA
tgcagggtagcgttagggtg

SEQ ID NO: 144261 - DNA, 20 bp, synthetic construct
  source 1..20: mol_type = other DNA
gtgcagggtagcgttagggt

SEQ ID NO: 144262 - DNA, 20 bp, synthetic construct
  source 1..20: mol_type = other DNA
ggtgcagggtagcgttaggg

SEQ ID NO: 144263 - DNA, 20 bp, synthetic construct
  source 1..20: mol_type = other DNA
gggtgcagggtagcgttagg

SEQ ID NO: 144264 - DNA, 20 bp, synthetic construct
  source 1..20: mol_type = other DNA
tgggtgcagggtagcgttag

SEQ ID NO: 144265 - DNA, 20 bp, synthetic construct
  source 1..20: mol_type = other DNA
gtgggtgcagggtagcgtta

SEQ ID NO: 144266 - DNA, 20 bp, synthetic construct
  source 1..20: mol_type = other DNA
tgtgggtgcagggtagcgtt

SEQ ID NO: 144267 - DNA, 20 bp, synthetic construct
  source 1..20: mol_type = other DNA
atgtgggtgcagggtagcgt

SEQ ID NO: 144268 - DNA, 20 bp, synthetic construct
  source 1..20: mol_type = other DNA
tatgtgggtgcagggtagcg

SEQ ID NO: 144269 - DNA, 20 bp, synthetic construct
  source 1..20: mol_type = other DNA
gtatgtgggtgcagggtagc

SEQ ID NO: 144270 - DNA, 20 bp, synthetic construct
  source 1..20: mol_type = other DNA
agtatgtgggtgcagggtag

SEQ ID NO: 144271 - DNA, 20 bp, synthetic construct
  source 1..20: mol_type = other DNA
gagtatgtgggtgcagggta

SEQ ID NO: 144272 - DNA, 20 bp, synthetic construct
  source 1..20: mol_type = other DNA
ggagtatgtgggtgcagggt

SEQ ID NO: 144273 - DNA, 20 bp, synthetic construct
  source 1..20: mol_type = other DNA
tggagtatgtgggtgcaggg

SEQ ID NO: 144274 - DNA, 20 bp, synthetic construct
  source 1..20: mol_type = other DNA
gtggagtatgtgggtgcagg

SEQ ID NO: 144275 - DNA, 20 bp, synthetic construct
  source 1..20: mol_type = other DNA
tgtggagtatgtgggtgcag

SEQ ID NO: 144276 - DNA, 20 bp, synthetic construct
  source 1..20: mol_type = other DNA
gtgtggagtatgtgggtgca

SEQ ID NO: 144277 - DNA, 20 bp, synthetic construct
  source 1..20: mol_type = other DNA
ggtgtggagtatgtgggtgc

SEQ ID NO: 144278 - DNA, 20 bp, synthetic construct
  source 1..20: mol_type = other DNA
gggtgtggagtatgtgggtg

SEQ ID NO: 144279 - DNA, 20 bp, synthetic construct
  source 1..20: mol_type = other DNA
agggtgtggagtatgtgggt

SEQ ID NO: 144280 - DNA, 20 bp, synthetic construct
  source 1..20: mol_type = other DNA
gagggtgtggagtatgtggg

SEQ ID NO: 144281 - DNA, 20 bp, synthetic construct
  source 1..20: mol_type = other DNA
tgagggtgtggagtatgtgg

SEQ ID NO: 144282 - DNA, 20 bp, synthetic construct
  source 1..20: mol_type = other DNA
ctgagggtgtggagtatgtg

SEQ ID NO: 144283 - DNA, 20 bp, synthetic construct
  source 1..20: mol_type = other DNA
gctgagggtgtggagtatgt

SEQ ID NO: 144284 - DNA, 20 bp, synthetic construct
  source 1..20: mol_type = other DNA
ggctgagggtgtggagtatg

SEQ ID NO: 144285 - DNA, 20 bp, synthetic construct
  source 1..20: mol_type = other DNA
aggctgagggtgtggagtat

SEQ ID NO: 144286 - DNA, 20 bp, synthetic construct
  source 1..20: mol_type = other DNA
aaggctgagggtgtggagta

SEQ ID NO: 144287 - DNA, 20 bp, synthetic construct
  source 1..20: mol_type = other DNA
gaaggctgagggtgtggagt

SEQ ID NO: 144288 - DNA, 20 bp, synthetic construct
  source 1..20: mol_type = other DNA
tgaaggctgagggtgtggag

SEQ ID NO: 144289 - DNA, 20 bp, synthetic construct
  source 1..20: mol_type = other DNA
ctgaaggctgagggtgtgga

SEQ ID NO: 144290 - DNA, 20 bp, synthetic construct
  source 1..20: mol_type = other DNA
gctgaaggctgagggtgtgg

SEQ ID NO: 144291 - DNA, 20 bp, synthetic construct
  source 1..20: mol_type = other DNA
agctgaaggctgagggtgtg

SEQ ID NO: 144292 - DNA, 20 bp, synthetic construct
  source 1..20: mol_type = other DNA
tagctgaaggctgagggtgt

SEQ ID NO: 144293 - DNA, 20 bp, synthetic construct
  source 1..20: mol_type = other DNA
gtagctgaaggctgagggtg

SEQ ID NO: 144294 - DNA, 20 bp, synthetic construct
  source 1..20: mol_type = other DNA
ggtagctgaaggctgagggt

SEQ ID NO: 144295 - DNA, 20 bp, synthetic construct
  source 1..20: mol_type = other DNA
gggtagctgaaggctgaggg

SEQ ID NO: 144296 - DNA, 20 bp, synthetic construct
  source 1..20: mol_type = other DNA
ggggtagctgaaggctgagg

SEQ ID NO: 144297 - DNA, 20 bp, synthetic construct
  source 1..20: mol_type = other DNA
gggggtagctgaaggctgag

SEQ ID NO: 144298 - DNA, 20 bp, synthetic construct
  source 1..20: mol_type = other DNA
tgggggtagctgaaggctga

SEQ ID NO: 144299 - DNA, 20 bp, synthetic construct
  source 1..20: mol_type = other DNA
gtgggggtagctgaaggctg

SEQ ID NO: 144300 - DNA, 20 bp, synthetic construct
  source 1..20: mol_type = other DNA
agtgggggtagctgaaggct

SEQ ID NO: 144301 - DNA, 20 bp, synthetic construct
  source 1..20: mol_type = other DNA
cagtgggggtagctgaaggc

SEQ ID NO: 144302 - DNA, 20 bp, synthetic construct
  source 1..20: mol_type = other DNA
ccagtgggggtagctgaagg

SEQ ID NO: 144303 - DNA, 20 bp, synthetic construct
  source 1..20: mol_type = other DNA
tccagtgggggtagctgaag

SEQ ID NO: 144304 - DNA, 20 bp, synthetic construct
  source 1..20: mol_type = other DNA
gtccagtgggggtagctgaa

SEQ ID NO: 144305 - DNA, 20 bp, synthetic construct
  source 1..20: mol_type = other DNA
tgtccagtgggggtagctga

SEQ ID NO: 144306 - DNA, 20 bp, synthetic construct
  source 1..20: mol_type = other DNA
ctgtccagtgggggtagctg

SEQ ID NO: 144307 - DNA, 20 bp, synthetic construct
  source 1..20: mol_type = other DNA
gctgtccagtgggggtagct

SEQ ID NO: 144308 - DNA, 20 bp, synthetic construct
  source 1..20: mol_type = other DNA
tgctgtccagtgggggtagc

SEQ ID NO: 144309 - DNA, 20 bp, synthetic construct
  source 1..20: mol_type = other DNA
ctgctgtccagtgggggtag

SEQ ID NO: 144310 - DNA, 20 bp, synthetic construct
  source 1..20: mol_type = other DNA
gctgctgtccagtgggggta

SEQ ID NO: 144311 - DNA, 20 bp, synthetic construct
  source 1..20: mol_type = other DNA
tgctgctgtccagtgggggt

SEQ ID NO: 144312 - DNA, 20 bp, synthetic construct
  source 1..20: mol_type = other DNA
ttgctgctgtccagtggggg

SEQ ID NO: 144313 - DNA, 20 bp, synthetic construct
  source 1..20: mol_type = other DNA
tttgctgctgtccagtgggg

SEQ ID NO: 144314 - DNA, 20 bp, synthetic construct
  source 1..20: mol_type = other DNA
ctttgctgctgtccagtggg

SEQ ID NO: 144315 - DNA, 20 bp, synthetic construct
  source 1..20: mol_type = other DNA
gctttgctgctgtccagtgg

SEQ ID NO: 144316 - DNA, 20 bp, synthetic construct
  source 1..20: mol_type = other DNA
ggctttgctgctgtccagtg

SEQ ID NO: 144317 - DNA, 20 bp, synthetic construct
  source 1..20: mol_type = other DNA
tggctttgctgctgtccagt

SEQ ID NO: 144318 - DNA, 20 bp, synthetic construct
  source 1..20: mol_type = other DNA
ttggctttgctgctgtccag

SEQ ID NO: 144319 - DNA, 20 bp, synthetic construct
  source 1..20: mol_type = other DNA
gttggctttgctgctgtcca

SEQ ID NO: 144320 - DNA, 20 bp, synthetic construct
  source 1..20: mol_type = other DNA
tgttggctttgctgctgtcc

SEQ ID NO: 144321 - DNA, 20 bp, synthetic construct
  source 1..20: mol_type = other DNA
atgttggctttgctgctgtc

SEQ ID NO: 144322 - DNA, 20 bp, synthetic construct
  source 1..20: mol_type = other DNA
catgttggctttgctgctgt

SEQ ID NO: 144323 - DNA, 20 bp, synthetic construct
  source 1..20: mol_type = other DNA
ccatgttggctttgctgctg

SEQ ID NO: 144324 - DNA, 20 bp, synthetic construct
  source 1..20: mol_type = other DNA
accatgttggctttgctgct

SEQ ID NO: 144325 - DNA, 20 bp, synthetic construct
  source 1..20: mol_type = other DNA
caccatgttggctttgctgc

SEQ ID NO: 144326 - DNA, 20 bp, synthetic construct
  source 1..20: mol_type = other DNA
ccaccatgttggctttgctg

SEQ ID NO: 144327 - DNA, 20 bp, synthetic construct
  source 1..20: mol_type = other DNA
tccaccatgttggctttgct

SEQ ID NO: 144328 - DNA, 20 bp, synthetic construct
  source 1..20: mol_type = other DNA
ttccaccatgttggctttgc

SEQ ID NO: 144329 - DNA, 20 bp, synthetic construct
  source 1..20: mol_type = other DNA
cttccaccatgttggctttg

SEQ ID NO: 144330 - DNA, 20 bp, synthetic construct
  source 1..20: mol_type = other DNA
acttccaccatgttggcttt

SEQ ID NO: 144331 - DNA, 20 bp, synthetic construct
  source 1..20: mol_type = other DNA
gacttccaccatgttggctt

SEQ ID NO: 144332 - DNA, 20 bp, synthetic construct
  source 1..20: mol_type = other DNA
tgacttccaccatgttggct

SEQ ID NO: 144333 - DNA, 20 bp, synthetic construct
  source 1..20: mol_type = other DNA
atgacttccaccatgttggc

SEQ ID NO: 144334 - DNA, 20 bp, synthetic construct
  source 1..20: mol_type = other DNA
gatgacttccaccatgttgg

SEQ ID NO: 144335 - DNA, 20 bp, synthetic construct
  source 1..20: mol_type = other DNA
ggatgacttccaccatgttg

SEQ ID NO: 144336 - DNA, 20 bp, synthetic construct
  source 1..20: mol_type = other DNA
aggatgacttccaccatgtt

SEQ ID NO: 144337 - DNA, 20 bp, synthetic construct
  source 1..20: mol_type = other DNA
caggatgacttccaccatgt

SEQ ID NO: 144338 - DNA, 20 bp, synthetic construct
  source 1..20: mol_type = other DNA
gcaggatgacttccaccatg

SEQ ID NO: 144339 - DNA, 20 bp, synthetic construct
  source 1..20: mol_type = other DNA
tgcaggatgacttccaccat

SEQ ID NO: 144340 - DNA, 20 bp, synthetic construct
  source 1..20: mol_type = other DNA
gtgcaggatgacttccacca

SEQ ID NO: 144341 - DNA, 20 bp, synthetic construct
  source 1..20: mol_type = other DNA
ggtgcaggatgacttccacc

SEQ ID NO: 144342 - DNA, 20 bp, synthetic construct
  source 1..20: mol_type = other DNA
gggtgcaggatgacttccac

SEQ ID NO: 144343 - DNA, 20 bp, synthetic construct
  source 1..20: mol_type = other DNA
tgggtgcaggatgacttcca

SEQ ID NO: 144344 - DNA, 20 bp, synthetic construct
  source 1..20: mol_type = other DNA
ctgggtgcaggatgacttcc

SEQ ID NO: 144345 - DNA, 20 bp, synthetic construct
  source 1..20: mol_type = other DNA
actgggtgcaggatgacttc

SEQ ID NO: 144346 - DNA, 20 bp, synthetic construct
  source 1..20: mol_type = other DNA
gactgggtgcaggatgactt

SEQ ID NO: 144347 - DNA, 20 bp, synthetic construct
  source 1..20: mol_type = other DNA
ggactgggtgcaggatgact

SEQ ID NO: 144348 - DNA, 20 bp, synthetic construct
  source 1..20: mol_type = other DNA
aggactgggtgcaggatgac

SEQ ID NO: 144349 - DNA, 20 bp, synthetic construct
  source 1..20: mol_type = other DNA
caggactgggtgcaggatga

SEQ ID NO: 144350 - DNA, 20 bp, synthetic construct
  source 1..20: mol_type = other DNA
acaggactgggtgcaggatg

SEQ ID NO: 144351 - DNA, 20 bp, synthetic construct
  source 1..20: mol_type = other DNA
aacaggactgggtgcaggat

SEQ ID NO: 144352 - DNA, 20 bp, synthetic construct
  source 1..20: mol_type = other DNA
gaacaggactgggtgcagga

SEQ ID NO: 144353 - DNA, 20 bp, synthetic construct
  source 1..20: mol_type = other DNA
tgaacaggactgggtgcagg

SEQ ID NO: 144354 - DNA, 20 bp, synthetic construct
  source 1..20: mol_type = other DNA
ctgaacaggactgggtgcag

SEQ ID NO: 144355 - DNA, 20 bp, synthetic construct
  source 1..20: mol_type = other DNA
cctgaacaggactgggtgca

SEQ ID NO: 144356 - DNA, 20 bp, synthetic construct
  source 1..20: mol_type = other DNA
acctgaacaggactgggtgc

SEQ ID NO: 144357 - DNA, 20 bp, synthetic construct
  source 1..20: mol_type = other DNA
tacctgaacaggactgggtg

SEQ ID NO: 144358 - DNA, 20 bp, synthetic construct
  source 1..20: mol_type = other DNA
ttacctgaacaggactgggt

SEQ ID NO: 144359 - DNA, 20 bp, synthetic construct
  source 1..20: mol_type = other DNA
cttacctgaacaggactggg

SEQ ID NO: 144360 - DNA, 20 bp, synthetic construct
  source 1..20: mol_type = other DNA
ccttacctgaacaggactgg

SEQ ID NO: 144361 - DNA, 20 bp, synthetic construct
  source 1..20: mol_type = other DNA
cccttacctgaacaggactg

SEQ ID NO: 144362 - DNA, 20 bp, synthetic construct
  source 1..20: mol_type = other DNA
gcccttacctgaacaggact

SEQ ID NO: 144363 - DNA, 20 bp, synthetic construct
  source 1..20: mol_type = other DNA
tgcccttacctgaacaggac

SEQ ID NO: 144364 - DNA, 20 bp, synthetic construct
  source 1..20: mol_type = other DNA
ttgcccttacctgaacagga

SEQ ID NO: 144365 - DNA, 20 bp, synthetic construct
  source 1..20: mol_type = other DNA
gttgcccttacctgaacagg

SEQ ID NO: 144366 - DNA, 20 bp, synthetic construct
  source 1..20: mol_type = other DNA
agttgcccttacctgaacag

SEQ ID NO: 144367 - DNA, 20 bp, synthetic construct
  source 1..20: mol_type = other DNA
gagttgcccttacctgaaca

SEQ ID NO: 144368 - DNA, 20 bp, synthetic construct
  source 1..20: mol_type = other DNA
tgagttgcccttacctgaac

SEQ ID NO: 144369 - DNA, 20 bp, synthetic construct
  source 1..20: mol_type = other DNA
ctgagttgcccttacctgaa

SEQ ID NO: 144370 - DNA, 20 bp, synthetic construct
  source 1..20: mol_type = other DNA
tctgagttgcccttacctga

SEQ ID NO: 144371 - DNA, 20 bp, synthetic construct
  source 1..20: mol_type = other DNA
ctctgagttgcccttacctg

SEQ ID NO: 144372 - DNA, 20 bp, synthetic construct
  source 1..20: mol_type = other DNA
cctctgagttgcccttacct

SEQ ID NO: 144373 - DNA, 20 bp, synthetic construct
  source 1..20: mol_type = other DNA
acctctgagttgcccttacc

SEQ ID NO: 144374 - DNA, 20 bp, synthetic construct
  source 1..20: mol_type = other DNA
gacctctgagttgcccttac

SEQ ID NO: 144375 - DNA, 20 bp, synthetic construct
  source 1..20: mol_type = other DNA
agacctctgagttgccctta

SEQ ID NO: 144376 - DNA, 20 bp, synthetic construct
  source 1..20: mol_type = other DNA
cagacctctgagttgccctt

SEQ ID NO: 144377 - DNA, 20 bp, synthetic construct
  source 1..20: mol_type = other DNA
gcagacctctgagttgccct

SEQ ID NO: 144378 - DNA, 20 bp, synthetic construct
  source 1..20: mol_type = other DNA
tgcagacctctgagttgccc

SEQ ID NO: 144379 - DNA, 20 bp, synthetic construct
  source 1..20: mol_type = other DNA
atgcagacctctgagttgcc

SEQ ID NO: 144380 - DNA, 20 bp, synthetic construct
  source 1..20: mol_type = other DNA
catgcagacctctgagttgc

SEQ ID NO: 144381 - DNA, 20 bp, synthetic construct
  source 1..20: mol_type = other DNA
ccatgcagacctctgagttg

SEQ ID NO: 144382 - DNA, 20 bp, synthetic construct
  source 1..20: mol_type = other DNA
tccatgcagacctctgagtt

SEQ ID NO: 144383 - DNA, 20 bp, synthetic construct
  source 1..20: mol_type = other DNA
ctccatgcagacctctgagt

SEQ ID NO: 144384 - DNA, 20 bp, synthetic construct
  source 1..20: mol_type = other DNA
actccatgcagacctctgag

SEQ ID NO: 144385 - DNA, 20 bp, synthetic construct
  source 1..20: mol_type = other DNA
cactccatgcagacctctga

SEQ ID NO: 144386 - DNA, 20 bp, synthetic construct
  source 1..20: mol_type = other DNA
ccactccatgcagacctctg

SEQ ID NO: 144387 - DNA, 20 bp, synthetic construct
  source 1..20: mol_type = other DNA
gccactccatgcagacctct

SEQ ID NO: 144388 - DNA, 20 bp, synthetic construct
  source 1..20: mol_type = other DNA
agccactccatgcagacctc

SEQ ID NO: 144389 - DNA, 20 bp, synthetic construct
  source 1..20: mol_type = other DNA
aagccactccatgcagacct

SEQ ID NO: 144390 - DNA, 20 bp, synthetic construct
  source 1..20: mol_type = other DNA
gaagccactccatgcagacc

SEQ ID NO: 144391 - DNA, 20 bp, synthetic construct
  source 1..20: mol_type = other DNA
agaagccactccatgcagac

SEQ ID NO: 144392 - DNA, 20 bp, synthetic construct
  source 1..20: mol_type = other DNA
aagaagccactccatgcaga

SEQ ID NO: 144393 - DNA, 20 bp, synthetic construct
  source 1..20: mol_type = other DNA
aaagaagccactccatgcag

SEQ ID NO: 144394 - DNA, 20 bp, synthetic construct
  source 1..20: mol_type = other DNA
taaagaagccactccatgca

SEQ ID NO: 144395 - DNA, 20 bp, synthetic construct
  source 1..20: mol_type = other DNA
ataaagaagccactccatgc

SEQ ID NO: 144396 - DNA, 20 bp, synthetic construct
  source 1..20: mol_type = other DNA
gataaagaagccactccatg

SEQ ID NO: 144397 - DNA, 20 bp, synthetic construct
  source 1..20: mol_type = other DNA
ggataaagaagccactccat

SEQ ID NO: 144398 - DNA, 20 bp, synthetic construct
  source 1..20: mol_type = other DNA
aggataaagaagccactcca

SEQ ID NO: 144399 - DNA, 20 bp, synthetic construct
  source 1..20: mol_type = other DNA
taggataaagaagccactcc

SEQ ID NO: 144400 - DNA, 20 bp, synthetic construct
  source 1..20: mol_type = other DNA
ctaggataaagaagccactc

SEQ ID NO: 144401 - DNA, 20 bp, synthetic construct
  source 1..20: mol_type = other DNA
actaggataaagaagccact

SEQ ID NO: 144402 - DNA, 20 bp, synthetic construct
  source 1..20: mol_type = other DNA
tactaggataaagaagccac

SEQ ID NO: 144403 - DNA, 20 bp, synthetic construct
  source 1..20: mol_type = other DNA
atactaggataaagaagcca

SEQ ID NO: 144404 - DNA, 20 bp, synthetic construct
  source 1..20: mol_type = other DNA
gatactaggataaagaagcc

SEQ ID NO: 144405 - DNA, 20 bp, synthetic construct
  source 1..20: mol_type = other DNA
agatactaggataaagaagc

SEQ ID NO: 144406 - DNA, 20 bp, synthetic construct
  source 1..20: mol_type = other DNA
cagatactaggataaagaag

SEQ ID NO: 144407 - DNA, 20 bp, synthetic construct
  source 1..20: mol_type = other DNA
tcagatactaggataaagaa

SEQ ID NO: 144408 - DNA, 20 bp, synthetic construct
  source 1..20: mol_type = other DNA
ctcagatactaggataaaga

SEQ ID NO: 144409 - DNA, 20 bp, synthetic construct
  source 1..20: mol_type = other DNA
actcagatactaggataaag

SEQ ID NO: 144410 - DNA, 20 bp, synthetic construct
  source 1..20: mol_type = other DNA
cactcagatactaggataaa

SEQ ID NO: 144411 - DNA, 20 bp, synthetic construct
  source 1..20: mol_type = other DNA
gcactcagatactaggataa

SEQ ID NO: 144412 - DNA, 20 bp, synthetic construct
  source 1..20: mol_type = other DNA
agcactcagatactaggata

SEQ ID NO: 144413 - DNA, 20 bp, synthetic construct
  source 1..20: mol_type = other DNA
aagcactcagatactaggat

SEQ ID NO: 144414 - DNA, 20 bp, synthetic construct
  source 1..20: mol_type = other DNA
aaagcactcagatactagga

SEQ ID NO: 144415 - DNA, 20 bp, synthetic construct
  source 1..20: mol_type = other DNA
gaaagcactcagatactagg

SEQ ID NO: 144416 - DNA, 20 bp, synthetic construct
  source 1..20: mol_type = other DNA
agaaagcactcagatactag

SEQ ID NO: 144417 - DNA, 20 bp, synthetic construct
  source 1..20: mol_type = other DNA
aagaaagcactcagatacta

SEQ ID NO: 144418 - DNA, 20 bp, synthetic construct
  source 1..20: mol_type = other DNA
gaagaaagcactcagatact

SEQ ID NO: 144419 - DNA, 20 bp, synthetic construct
  source 1..20: mol_type = other DNA
tgaagaaagcactcagatac

SEQ ID NO: 144420 - DNA, 20 bp, synthetic construct
  source 1..20: mol_type = other DNA
ctgaagaaagcactcagata

SEQ ID NO: 144421 - DNA, 20 bp, synthetic construct
  source 1..20: mol_type = other DNA
cctgaagaaagcactcagat

SEQ ID NO: 144422 - DNA, 20 bp, synthetic construct
  source 1..20: mol_type = other DNA
acctgaagaaagcactcaga

SEQ ID NO: 144423 - DNA, 20 bp, synthetic construct
  source 1..20: mol_type = other DNA
cacctgaagaaagcactcag

SEQ ID NO: 144424 - DNA, 20 bp, synthetic construct
  source 1..20: mol_type = other DNA
gcacctgaagaaagcactca

SEQ ID NO: 144425 - DNA, 20 bp, synthetic construct
  source 1..20: mol_type = other DNA
ggcacctgaagaaagcactc

SEQ ID NO: 144426 - DNA, 20 bp, synthetic construct
  source 1..20: mol_type = other DNA
tggcacctgaagaaagcact

SEQ ID NO: 144427 - DNA, 20 bp, synthetic construct
  source 1..20: mol_type = other DNA
ctggcacctgaagaaagcac

SEQ ID NO: 144428 - DNA, 20 bp, synthetic construct
  source 1..20: mol_type = other DNA
cctggcacctgaagaaagca

SEQ ID NO: 144429 - DNA, 20 bp, synthetic construct
  source 1..20: mol_type = other DNA
acctggcacctgaagaaagc

SEQ ID NO: 144430 - DNA, 20 bp, synthetic construct
  source 1..20: mol_type = other DNA
tacctggcacctgaagaaag

SEQ ID NO: 144431 - DNA, 20 bp, synthetic construct
  source 1..20: mol_type = other DNA
atacctggcacctgaagaaa

SEQ ID NO: 144432 - DNA, 20 bp, synthetic construct
  source 1..20: mol_type = other DNA
gatacctggcacctgaagaa

SEQ ID NO: 144433 - DNA, 20 bp, synthetic construct
  source 1..20: mol_type = other DNA
cgatacctggcacctgaaga

SEQ ID NO: 144434 - DNA, 20 bp, synthetic construct
  source 1..20: mol_type = other DNA
gcgatacctggcacctgaag

SEQ ID NO: 144435 - DNA, 20 bp, synthetic construct
  source 1..20: mol_type = other DNA
tgcgatacctggcacctgaa

SEQ ID NO: 144436 - DNA, 20 bp, synthetic construct
  source 1..20: mol_type = other DNA
atgcgatacctggcacctga

SEQ ID NO: 144437 - DNA, 20 bp, synthetic construct
  source 1..20: mol_type = other DNA
gatgcgatacctggcacctg

SEQ ID NO: 144438 - DNA, 20 bp, synthetic construct
  source 1..20: mol_type = other DNA
cgatgcgatacctggcacct

SEQ ID NO: 144439 - DNA, 20 bp, synthetic construct
  source 1..20: mol_type = other DNA
acgatgcgatacctggcacc

SEQ ID NO: 144440 - DNA, 20 bp, synthetic construct
  source 1..20: mol_type = other DNA
gacgatgcgatacctggcac

SEQ ID NO: 144441 - DNA, 20 bp, synthetic construct
  source 1..20: mol_type = other DNA
tgacgatgcgatacctggca

SEQ ID NO: 144442 - DNA, 20 bp, synthetic construct
  source 1..20: mol_type = other DNA
ctgacgatgcgatacctggc

SEQ ID NO: 144443 - DNA, 20 bp, synthetic construct
  source 1..20: mol_type = other DNA
tctgacgatgcgatacctgg

SEQ ID NO: 144444 - DNA, 20 bp, synthetic construct
  source 1..20: mol_type = other DNA
ttctgacgatgcgatacctg

SEQ ID NO: 144445 - DNA, 20 bp, synthetic construct
  source 1..20: mol_type = other DNA
gttctgacgatgcgatacct

SEQ ID NO: 144446 - DNA, 20 bp, synthetic construct
  source 1..20: mol_type = other DNA
tgttctgacgatgcgatacc

SEQ ID NO: 144447 - DNA, 20 bp, synthetic construct
  source 1..20: mol_type = other DNA
gtgttctgacgatgcgatac

SEQ ID NO: 144448 - DNA, 20 bp, synthetic construct
  source 1..20: mol_type = other DNA
tgtgttctgacgatgcgata

SEQ ID NO: 144449 - DNA, 20 bp, synthetic construct
  source 1..20: mol_type = other DNA
atgtgttctgacgatgcgat

SEQ ID NO: 144450 - DNA, 20 bp, synthetic construct
  source 1..20: mol_type = other DNA
catgtgttctgacgatgcga

SEQ ID NO: 144451 - DNA, 20 bp, synthetic construct
  source 1..20: mol_type = other DNA
ccatgtgttctgacgatgcg

SEQ ID NO: 144452 - DNA, 20 bp, synthetic construct
  source 1..20: mol_type = other DNA
gccatgtgttctgacgatgc

SEQ ID NO: 144453 - DNA, 20 bp, synthetic construct
  source 1..20: mol_type = other DNA
tgccatgtgttctgacgatg

SEQ ID NO: 144454 - DNA, 20 bp, synthetic construct
  source 1..20: mol_type = other DNA
atgccatgtgttctgacgat

SEQ ID NO: 144455 - DNA, 20 bp, synthetic construct
  source 1..20: mol_type = other DNA
catgccatgtgttctgacga

SEQ ID NO: 144456 - DNA, 20 bp, synthetic construct
  source 1..20: mol_type = other DNA
acatgccatgtgttctgacg

SEQ ID NO: 144457 - DNA, 20 bp, synthetic construct
  source 1..20: mol_type = other DNA
gacatgccatgtgttctgac

SEQ ID NO: 144458 - DNA, 20 bp, synthetic construct
  source 1..20: mol_type = other DNA
ggacatgccatgtgttctga

SEQ ID NO: 144459 - DNA, 20 bp, synthetic construct
  source 1..20: mol_type = other DNA
tggacatgccatgtgttctg

SEQ ID NO: 144460 - DNA, 20 bp, synthetic construct
  source 1..20: mol_type = other DNA
gtggacatgccatgtgttct

SEQ ID NO: 144461 - DNA, 20 bp, synthetic construct
  source 1..20: mol_type = other DNA
ggtggacatgccatgtgttc

SEQ ID NO: 144462 - DNA, 20 bp, synthetic construct
  source 1..20: mol_type = other DNA
gggtggacatgccatgtgtt

SEQ ID NO: 144463 - DNA, 20 bp, synthetic construct
  source 1..20: mol_type = other DNA
agggtggacatgccatgtgt

SEQ ID NO: 144464 - DNA, 20 bp, synthetic construct
  source 1..20: mol_type = other DNA
gagggtggacatgccatgtg

SEQ ID NO: 144465 - DNA, 20 bp, synthetic construct
  source 1..20: mol_type = other DNA
cgagggtggacatgccatgt

SEQ ID NO: 144466 - DNA, 20 bp, synthetic construct
  source 1..20: mol_type = other DNA
acgagggtggacatgccatg

SEQ ID NO: 144467 - DNA, 20 bp, synthetic construct
  source 1..20: mol_type = other DNA
cacgagggtggacatgccat

SEQ ID NO: 144468 - DNA, 20 bp, synthetic construct
  source 1..20: mol_type = other DNA
tcacgagggtggacatgcca

SEQ ID NO: 144469 - DNA, 20 bp, synthetic construct
  source 1..20: mol_type = other DNA
ttcacgagggtggacatgcc

SEQ ID NO: 144470 - DNA, 20 bp, synthetic construct
  source 1..20: mol_type = other DNA
cttcacgagggtggacatgc

SEQ ID NO: 144471 - DNA, 20 bp, synthetic construct
  source 1..20: mol_type = other DNA
tcttcacgagggtggacatg

SEQ ID NO: 144472 - DNA, 20 bp, synthetic construct
  source 1..20: mol_type = other DNA
atcttcacgagggtggacat

SEQ ID NO: 144473 - DNA, 20 bp, synthetic construct
  source 1..20: mol_type = other DNA
catcttcacgagggtggaca

SEQ ID NO: 144474 - DNA, 20 bp, synthetic construct
  source 1..20: mol_type = other DNA
ccatcttcacgagggtggac

SEQ ID NO: 144475 - DNA, 20 bp, synthetic construct
  source 1..20: mol_type = other DNA
tccatcttcacgagggtgga

SEQ ID NO: 144476 - DNA, 20 bp, synthetic construct
  source 1..20: mol_type = other DNA
atccatcttcacgagggtgg

SEQ ID NO: 144477 - DNA, 20 bp, synthetic construct
  source 1..20: mol_type = other DNA
tatccatcttcacgagggtg

SEQ ID NO: 144478 - DNA, 20 bp, synthetic construct
  source 1..20: mol_type = other DNA
gtatccatcttcacgagggt

SEQ ID NO: 144479 - DNA, 20 bp, synthetic construct
  source 1..20: mol_type = other DNA
tgtatccatcttcacgaggg

SEQ ID NO: 144480 - DNA, 20 bp, synthetic construct
  source 1..20: mol_type = other DNA
ctgtatccatcttcacgagg

SEQ ID NO: 144481 - DNA, 20 bp, synthetic construct
  source 1..20: mol_type = other DNA
gctgtatccatcttcacgag

SEQ ID NO: 144482 - DNA, 20 bp, synthetic construct
  source 1..20: mol_type = other DNA
agctgtatccatcttcacga

SEQ ID NO: 144483 - DNA, 20 bp, synthetic construct
  source 1..20: mol_type = other DNA
cagctgtatccatcttcacg

SEQ ID NO: 144484 - DNA, 20 bp, synthetic construct
  source 1..20: mol_type = other DNA
acagctgtatccatcttcac

SEQ ID NO: 144485 - DNA, 20 bp, synthetic construct
  source 1..20: mol_type = other DNA
cacagctgtatccatcttca

SEQ ID NO: 144486 - DNA, 20 bp, synthetic construct
  source 1..20: mol_type = other DNA
gcacagctgtatccatcttc

SEQ ID NO: 144487 - DNA, 20 bp, synthetic construct
  source 1..20: mol_type = other DNA
ggcacagctgtatccatctt

SEQ ID NO: 144488 - DNA, 20 bp, synthetic construct
  source 1..20: mol_type = other DNA
gggcacagctgtatccatct

SEQ ID NO: 144489 - DNA, 20 bp, synthetic construct
  source 1..20: mol_type = other DNA
ggggcacagctgtatccatc

SEQ ID NO: 144490 - DNA, 20 bp, synthetic construct
  source 1..20: mol_type = other DNA
aggggcacagctgtatccat

SEQ ID NO: 144491 - DNA, 20 bp, synthetic construct
  source 1..20: mol_type = other DNA
caggggcacagctgtatcca

SEQ ID NO: 144492 - DNA, 20 bp, synthetic construct
  source 1..20: mol_type = other DNA
ccaggggcacagctgtatcc

SEQ ID NO: 144493 - DNA, 20 bp, synthetic construct
  source 1..20: mol_type = other DNA
cccaggggcacagctgtatc

SEQ ID NO: 144494 - DNA, 20 bp, synthetic construct
  source 1..20: mol_type = other DNA
ccccaggggcacagctgtat

SEQ ID NO: 144495 - DNA, 20 bp, synthetic construct
  source 1..20: mol_type = other DNA
accccaggggcacagctgta

SEQ ID NO: 144496 - DNA, 20 bp, synthetic construct
  source 1..20: mol_type = other DNA
caccccaggggcacagctgt

SEQ ID NO: 144497 - DNA, 20 bp, synthetic construct
  source 1..20: mol_type = other DNA
ccaccccaggggcacagctg

SEQ ID NO: 144498 - DNA, 20 bp, synthetic construct
  source 1..20: mol_type = other DNA
accaccccaggggcacagct

SEQ ID NO: 144499 - DNA, 20 bp, synthetic construct
  source 1..20: mol_type = other DNA
caccaccccaggggcacagc

SEQ ID NO: 144500 - DNA, 20 bp, synthetic construct
  source 1..20: mol_type = other DNA
ccaccaccccaggggcacag

SEQ ID NO: 144501 - DNA, 20 bp, synthetic construct
  source 1..20: mol_type = other DNA
accaccaccccaggggcaca

SEQ ID NO: 144502 - DNA, 20 bp, synthetic construct
  source 1..20: mol_type = other DNA
aaccaccaccccaggggcac

SEQ ID NO: 144503 - DNA, 20 bp, synthetic construct
  source 1..20: mol_type = other DNA
aaaccaccaccccaggggca

SEQ ID NO: 144504 - DNA, 20 bp, synthetic construct
  source 1..20: mol_type = other DNA
aaaaccaccaccccaggggc

SEQ ID NO: 144505 - DNA, 20 bp, synthetic construct
  source 1..20: mol_type = other DNA
taaaaccaccaccccagggg

SEQ ID NO: 144506 - DNA, 20 bp, synthetic construct
  source 1..20: mol_type = other DNA
ttaaaaccaccaccccaggg

SEQ ID NO: 144507 - DNA, 20 bp, synthetic construct
  source 1..20: mol_type = other DNA
cttaaaaccaccaccccagg

SEQ ID NO: 144508 - DNA, 20 bp, synthetic construct
  source 1..20: mol_type = other DNA
tcttaaaaccaccaccccag

SEQ ID NO: 144509 - DNA, 20 bp, synthetic construct
  source 1..20: mol_type = other DNA
ttcttaaaaccaccacccca

SEQ ID NO: 144510 - DNA, 20 bp, synthetic construct
  source 1..20: mol_type = other DNA
attcttaaaaccaccacccc

SEQ ID NO: 144511 - DNA, 20 bp, synthetic construct
  source 1..20: mol_type = other DNA
gattcttaaaaccaccaccc

SEQ ID NO: 144512 - DNA, 20 bp, synthetic construct
  source 1..20: mol_type = other DNA
tgattcttaaaaccaccacc

SEQ ID NO: 144513 - DNA, 20 bp, synthetic construct
  source 1..20: mol_type = other DNA
gtgattcttaaaaccaccac

SEQ ID NO: 144514 - DNA, 20 bp, synthetic construct
  source 1..20: mol_type = other DNA
tgtgattcttaaaaccacca

SEQ ID NO: 144515 - DNA, 20 bp, synthetic construct
  source 1..20: mol_type = other DNA
atgtgattcttaaaaccacc

SEQ ID NO: 144516 - DNA, 20 bp, synthetic construct
  source 1..20: mol_type = other DNA
aatgtgattcttaaaaccac

SEQ ID NO: 144517 - DNA, 20 bp, synthetic construct
  source 1..20: mol_type = other DNA
aaatgtgattcttaaaacca

SEQ ID NO: 144518 - DNA, 20 bp, synthetic construct
  source 1..20: mol_type = other DNA
taaatgtgattcttaaaacc

SEQ ID NO: 144519 - DNA, 20 bp, synthetic construct
  source 1..20: mol_type = other DNA
ttaaatgtgattcttaaaac

SEQ ID NO: 144520 - DNA, 20 bp, synthetic construct
  source 1..20: mol_type = other DNA
tttaaatgtgattcttaaaa

SEQ ID NO: 144521 - DNA, 20 bp, synthetic construct
  source 1..20: mol_type = other DNA
ctttaaatgtgattcttaaa

SEQ ID NO: 144522 - DNA, 20 bp, synthetic construct
  source 1..20: mol_type = other DNA
cctttaaatgtgattcttaa

SEQ ID NO: 144523 - DNA, 20 bp, synthetic construct
  source 1..20: mol_type = other DNA
gcctttaaatgtgattctta

SEQ ID NO: 144524 - DNA, 20 bp, synthetic construct
  source 1..20: mol_type = other DNA
agcctttaaatgtgattctt

SEQ ID NO: 144525 - DNA, 20 bp, synthetic construct
  source 1..20: mol_type = other DNA
cagcctttaaatgtgattct

SEQ ID NO: 144526 - DNA, 20 bp, synthetic construct
  source 1..20: mol_type = other DNA
ccagcctttaaatgtgattc

SEQ ID NO: 144527 - DNA, 20 bp, synthetic construct
  source 1..20: mol_type = other DNA
cccagcctttaaatgtgatt

SEQ ID NO: 144528 - DNA, 20 bp, synthetic construct
  source 1..20: mol_type = other DNA
gcccagcctttaaatgtgat

SEQ ID NO: 144529 - DNA, 20 bp, synthetic construct
  source 1..20: mol_type = other DNA
cgcccagcctttaaatgtga

SEQ ID NO: 144530 - DNA, 20 bp, synthetic construct
  source 1..20: mol_type = other DNA
gcgcccagcctttaaatgtg

SEQ ID NO: 144531 - DNA, 20 bp, synthetic construct
  source 1..20: mol_type = other DNA
tgcgcccagcctttaaatgt

SEQ ID NO: 144532 - DNA, 20 bp, synthetic construct
  source 1..20: mol_type = other DNA
ctgcgcccagcctttaaatg

SEQ ID NO: 144533 - DNA, 20 bp, synthetic construct
  source 1..20: mol_type = other DNA
actgcgcccagcctttaaat

SEQ ID NO: 144534 - DNA, 20 bp, synthetic construct
  source 1..20: mol_type = other DNA
cactgcgcccagcctttaaa

SEQ ID NO: 144535 - DNA, 20 bp, synthetic construct
  source 1..20: mol_type = other DNA
ccactgcgcccagcctttaa

SEQ ID NO: 144536 - DNA, 20 bp, synthetic construct
  source 1..20: mol_type = other DNA
gccactgcgcccagccttta

SEQ ID NO: 144537 - DNA, 20 bp, synthetic construct
  source 1..20: mol_type = other DNA
agccactgcgcccagccttt

SEQ ID NO: 144538 - DNA, 20 bp, synthetic construct
  source 1..20: mol_type = other DNA
gagccactgcgcccagcctt

SEQ ID NO: 144539 - DNA, 20 bp, synthetic construct
  source 1..20: mol_type = other DNA
tgagccactgcgcccagcct

SEQ ID NO: 144540 - DNA, 20 bp, synthetic construct
  source 1..20: mol_type = other DNA
gtgagccactgcgcccagcc

SEQ ID NO: 144541 - DNA, 20 bp, synthetic construct
  source 1..20: mol_type = other DNA
cgtgagccactgcgcccagc

SEQ ID NO: 144542 - DNA, 20 bp, synthetic construct
  source 1..20: mol_type = other DNA
gcgtgagccactgcgcccag

SEQ ID NO: 144543 - DNA, 20 bp, synthetic construct
  source 1..20: mol_type = other DNA
ggcgtgagccactgcgccca

SEQ ID NO: 144544 - DNA, 20 bp, synthetic construct
  source 1..20: mol_type = other DNA
aggcgtgagccactgcgccc

SEQ ID NO: 144545 - DNA, 20 bp, synthetic construct
  source 1..20: mol_type = other DNA
caggcgtgagccactgcgcc

SEQ ID NO: 144546 - DNA, 20 bp, synthetic construct
  source 1..20: mol_type = other DNA
acaggcgtgagccactgcgc

SEQ ID NO: 144547 - DNA, 20 bp, synthetic construct
  source 1..20: mol_type = other DNA
tacaggcgtgagccactgcg

SEQ ID NO: 144548 - DNA, 20 bp, synthetic construct
  source 1..20: mol_type = other DNA
ttacaggcgtgagccactgc

SEQ ID NO: 144549 - DNA, 20 bp, synthetic construct
  source 1..20: mol_type = other DNA
attacaggcgtgagccactg

SEQ ID NO: 144550 - DNA, 20 bp, synthetic construct
  source 1..20: mol_type = other DNA
gattacaggcgtgagccact

SEQ ID NO: 144551 - DNA, 20 bp, synthetic construct
  source 1..20: mol_type = other DNA
ggattacaggcgtgagccac

SEQ ID NO: 144552 - DNA, 20 bp, synthetic construct
  source 1..20: mol_type = other DNA
gggattacaggcgtgagcca

SEQ ID NO: 144553 - DNA, 20 bp, synthetic construct
  source 1..20: mol_type = other DNA
tgggattacaggcgtgagcc

SEQ ID NO: 144554 - DNA, 20 bp, synthetic construct
  source 1..20: mol_type = other DNA
gtgggattacaggcgtgagc

SEQ ID NO: 144555 - DNA, 20 bp, synthetic construct
  source 1..20: mol_type = other DNA
ggtgggattacaggcgtgag

SEQ ID NO: 144556 - DNA, 20 bp, synthetic construct
  source 1..20: mol_type = other DNA
tggtgggattacaggcgtga

SEQ ID NO: 144557 - DNA, 20 bp, synthetic construct
  source 1..20: mol_type = other DNA
gtggtgggattacaggcgtg

SEQ ID NO: 144558 - DNA, 20 bp, synthetic construct
  source 1..20: mol_type = other DNA
agtggtgggattacaggcgt

SEQ ID NO: 144559 - DNA, 20 bp, synthetic construct
  source 1..20: mol_type = other DNA
aagtggtgggattacaggcg

SEQ ID NO: 144560 - DNA, 20 bp, synthetic construct
  source 1..20: mol_type = other DNA
aaagtggtgggattacaggc

SEQ ID NO: 144561 - DNA, 20 bp, synthetic construct
  source 1..20: mol_type = other DNA
caaagtggtgggattacagg

SEQ ID NO: 144562 - DNA, 20 bp, synthetic construct
  source 1..20: mol_type = other DNA
ccaaagtggtgggattacag

SEQ ID NO: 144563 - DNA, 20 bp, synthetic construct
  source 1..20: mol_type = other DNA
cccaaagtggtgggattaca

SEQ ID NO: 144564 - DNA, 20 bp, synthetic construct
  source 1..20: mol_type = other DNA
tcccaaagtggtgggattac

SEQ ID NO: 144565 - DNA, 20 bp, synthetic construct
  source 1..20: mol_type = other DNA
ctcccaaagtggtgggatta

SEQ ID NO: 144566 - DNA, 20 bp, synthetic construct
  source 1..20: mol_type = other DNA
cctcccaaagtggtgggatt

SEQ ID NO: 144567 - DNA, 20 bp, synthetic construct
  source 1..20: mol_type = other DNA
gcctcccaaagtggtgggat

SEQ ID NO: 144568 - DNA, 20 bp, synthetic construct
  source 1..20: mol_type = other DNA
ggcctcccaaagtggtggga

SEQ ID NO: 144569 - DNA, 20 bp, synthetic construct
  source 1..20: mol_type = other DNA
cggcctcccaaagtggtggg

SEQ ID NO: 144570 - DNA, 20 bp, synthetic construct
  source 1..20: mol_type = other DNA
tcggcctcccaaagtggtgg

SEQ ID NO: 144571 - DNA, 20 bp, synthetic construct
  source 1..20: mol_type = other DNA
ctcggcctcccaaagtggtg

SEQ ID NO: 144572 - DNA, 20 bp, synthetic construct
  source 1..20: mol_type = other DNA
cctcggcctcccaaagtggt

SEQ ID NO: 144573 - DNA, 20 bp, synthetic construct
  source 1..20: mol_type = other DNA
gcctcggcctcccaaagtgg

SEQ ID NO: 144574 - DNA, 20 bp, synthetic construct
  source 1..20: mol_type = other DNA
cgcctcggcctcccaaagtg

SEQ ID NO: 144575 - DNA, 20 bp, synthetic construct
  source 1..20: mol_type = other DNA
ccgcctcggcctcccaaagt

SEQ ID NO: 144576 - DNA, 20 bp, synthetic construct
  source 1..20: mol_type = other DNA
cccgcctcggcctcccaaag

SEQ ID NO: 144577 - DNA, 20 bp, synthetic construct
  source 1..20: mol_type = other DNA
acccgcctcggcctcccaaa

SEQ ID NO: 144578 - DNA, 20 bp, synthetic construct
  source 1..20: mol_type = other DNA
cacccgcctcggcctcccaa

SEQ ID NO: 144579 - DNA, 20 bp, synthetic construct
  source 1..20: mol_type = other DNA
ccacccgcctcggcctccca

SEQ ID NO: 144580 - DNA, 20 bp, synthetic construct
  source 1..20: mol_type = other DNA
tccacccgcctcggcctccc

SEQ ID NO: 144581 - DNA, 20 bp, synthetic construct
  source 1..20: mol_type = other DNA
atccacccgcctcggcctcc

SEQ ID NO: 144582 - DNA, 20 bp, synthetic construct
  source 1..20: mol_type = other DNA
gatccacccgcctcggcctc

SEQ ID NO: 144583 - DNA, 20 bp, synthetic construct
  source 1..20: mol_type = other DNA
tgatccacccgcctcggcct

SEQ ID NO: 144584 - DNA, 20 bp, synthetic construct
  source 1..20: mol_type = other DNA
gtgatccacccgcctcggcc

SEQ ID NO: 144585 - DNA, 20 bp, synthetic construct
  source 1..20: mol_type = other DNA
cgtgatccacccgcctcggc

SEQ ID NO: 144586 - DNA, 20 bp, synthetic construct
  source 1..20: mol_type = other DNA
tcgtgatccacccgcctcgg

SEQ ID NO: 144587 - DNA, 20 bp, synthetic construct
  source 1..20: mol_type = other DNA
ctcgtgatccacccgcctcg

SEQ ID NO: 144588 - DNA, 20 bp, synthetic construct
  source 1..20: mol_type = other DNA
cctcgtgatccacccgcctc

SEQ ID NO: 144589 - DNA, 20 bp, synthetic construct
  source 1..20: mol_type = other DNA
acctcgtgatccacccgcct

SEQ ID NO: 144590 - DNA, 20 bp, synthetic construct
  source 1..20: mol_type = other DNA
gacctcgtgatccacccgcc

SEQ ID NO: 144591 - DNA, 20 bp, synthetic construct
  source 1..20: mol_type = other DNA
tgacctcgtgatccacccgc

SEQ ID NO: 144592 - DNA, 20 bp, synthetic construct
  source 1..20: mol_type = other DNA
ctgacctcgtgatccacccg

SEQ ID NO: 144593 - DNA, 20 bp, synthetic construct
  source 1..20: mol_type = other DNA
cctgacctcgtgatccaccc

SEQ ID NO: 144594 - DNA, 20 bp, synthetic construct
  source 1..20: mol_type = other DNA
tcctgacctcgtgatccacc

SEQ ID NO: 144595 - DNA, 20 bp, synthetic construct
  source 1..20: mol_type = other DNA
ctcctgacctcgtgatccac

SEQ ID NO: 144596 - DNA, 20 bp, synthetic construct
  source 1..20: mol_type = other DNA
tctcctgacctcgtgatcca

SEQ ID NO: 144597 - DNA, 20 bp, synthetic construct
  source 1..20: mol_type = other DNA
atctcctgacctcgtgatcc

SEQ ID NO: 144598 - DNA, 20 bp, synthetic construct
  source 1..20: mol_type = other DNA
aatctcctgacctcgtgatc

SEQ ID NO: 144599 - DNA, 20 bp, synthetic construct
  source 1..20: mol_type = other DNA
caatctcctgacctcgtgat

SEQ ID NO: 144600 - DNA, 20 bp, synthetic construct
  source 1..20: mol_type = other DNA
tcaatctcctgacctcgtga

SEQ ID NO: 144601 - DNA, 20 bp, synthetic construct
  source 1..20: mol_type = other DNA
ctcaatctcctgacctcgtg

SEQ ID NO: 144602 - DNA, 20 bp, synthetic construct
  source 1..20: mol_type = other DNA
tctcaatctcctgacctcgt

SEQ ID NO: 144603 - DNA, 20 bp, synthetic construct
  source 1..20: mol_type = other DNA
gtctcaatctcctgacctcg

SEQ ID NO: 144604 - DNA, 20 bp, synthetic construct
  source 1..20: mol_type = other DNA
ggtctcaatctcctgacctc

SEQ ID NO: 144605 - DNA, 20 bp, synthetic construct
  source 1..20: mol_type = other DNA
tggtctcaatctcctgacct

SEQ ID NO: 144606 - DNA, 20 bp, synthetic construct
  source 1..20: mol_type = other DNA
atggtctcaatctcctgacc

SEQ ID NO: 144607 - DNA, 20 bp, synthetic construct
  source 1..20: mol_type = other DNA
gatggtctcaatctcctgac

SEQ ID NO: 144608 - DNA, 20 bp, synthetic construct
  source 1..20: mol_type = other DNA
ggatggtctcaatctcctga

SEQ ID NO: 144609 - DNA, 20 bp, synthetic construct
  source 1..20: mol_type = other DNA
aggatggtctcaatctcctg

SEQ ID NO: 144610 - DNA, 20 bp, synthetic construct
  source 1..20: mol_type = other DNA
caggatggtctcaatctcct

SEQ ID NO: 144611 - DNA, 20 bp, synthetic construct
  source 1..20: mol_type = other DNA
ccaggatggtctcaatctcc

SEQ ID NO: 144612 - DNA, 20 bp, synthetic construct
  source 1..20: mol_type = other DNA
gccaggatggtctcaatctc

SEQ ID NO: 144613 - DNA, 20 bp, synthetic construct
  source 1..20: mol_type = other DNA
cgccaggatggtctcaatct

SEQ ID NO: 144614 - DNA, 20 bp, synthetic construct
  source 1..20: mol_type = other DNA
tcgccaggatggtctcaatc

SEQ ID NO: 144615 - DNA, 20 bp, synthetic construct
  source 1..20: mol_type = other DNA
ttcgccaggatggtctcaat

SEQ ID NO: 144616 - DNA, 20 bp, synthetic construct
  source 1..20: mol_type = other DNA
gttcgccaggatggtctcaa

SEQ ID NO: 144617 - DNA, 20 bp, synthetic construct
  source 1..20: mol_type = other DNA
tgttcgccaggatggtctca

SEQ ID NO: 144618 - DNA, 20 bp, synthetic construct
  source 1..20: mol_type = other DNA
gtgttcgccaggatggtctc

SEQ ID NO: 144619 - DNA, 20 bp, synthetic construct
  source 1..20: mol_type = other DNA
agtgttcgccaggatggtct

SEQ ID NO: 144620 - DNA, 20 bp, synthetic construct
  source 1..20: mol_type = other DNA
cagtgttcgccaggatggtc

SEQ ID NO: 144621 - DNA, 20 bp, synthetic construct
  source 1..20: mol_type = other DNA
acagtgttcgccaggatggt

SEQ ID NO: 144622 - DNA, 20 bp, synthetic construct
  source 1..20: mol_type = other DNA
cacagtgttcgccaggatgg

SEQ ID NO: 144623 - DNA, 20 bp, synthetic construct
  source 1..20: mol_type = other DNA
tcacagtgttcgccaggatg

SEQ ID NO: 144624 - DNA, 20 bp, synthetic construct
  source 1..20: mol_type = other DNA
ttcacagtgttcgccaggat

SEQ ID NO: 144625 - DNA, 20 bp, synthetic construct
  source 1..20: mol_type = other DNA
tttcacagtgttcgccagga

SEQ ID NO: 144626 - DNA, 20 bp, synthetic construct
  source 1..20: mol_type = other DNA
gtttcacagtgttcgccagg

SEQ ID NO: 144627 - DNA, 20 bp, synthetic construct
  source 1..20: mol_type = other DNA
agtttcacagtgttcgccag

SEQ ID NO: 144628 - DNA, 20 bp, synthetic construct
  source 1..20: mol_type = other DNA
gagtttcacagtgttcgcca

SEQ ID NO: 144629 - DNA, 20 bp, synthetic construct
  source 1..20: mol_type = other DNA
ggagtttcacagtgttcgcc

SEQ ID NO: 144630 - DNA, 20 bp, synthetic construct
  source 1..20: mol_type = other DNA
cggagtttcacagtgttcgc

SEQ ID NO: 144631 - DNA, 20 bp, synthetic construct
  source 1..20: mol_type = other DNA
acggagtttcacagtgttcg

SEQ ID NO: 144632 - DNA, 20 bp, synthetic construct
  source 1..20: mol_type = other DNA
gacggagtttcacagtgttc

SEQ ID NO: 144633 - DNA, 20 bp, synthetic construct
  source 1..20: mol_type = other DNA
agacggagtttcacagtgtt

SEQ ID NO: 144634 - DNA, 20 bp, synthetic construct
  source 1..20: mol_type = other DNA
gagacggagtttcacagtgt

SEQ ID NO: 144635 - DNA, 20 bp, synthetic construct
  source 1..20: mol_type = other DNA
agagacggagtttcacagtg

SEQ ID NO: 144636 - DNA, 20 bp, synthetic construct
  source 1..20: mol_type = other DNA
tagagacggagtttcacagt

SEQ ID NO: 144637 - DNA, 20 bp, synthetic construct
  source 1..20: mol_type = other DNA
ttagagacggagtttcacag

SEQ ID NO: 144638 - DNA, 20 bp, synthetic construct
  source 1..20: mol_type = other DNA
attagagacggagtttcaca

SEQ ID NO: 144639 - DNA, 20 bp, synthetic construct
  source 1..20: mol_type = other DNA
tattagagacggagtttcac

SEQ ID NO: 144640 - DNA, 20 bp, synthetic construct
  source 1..20: mol_type = other DNA
ttattagagacggagtttca

SEQ ID NO: 144641 - DNA, 20 bp, synthetic construct
  source 1..20: mol_type = other DNA
tttattagagacggagtttc

SEQ ID NO: 144642 - DNA, 20 bp, synthetic construct
  source 1..20: mol_type = other DNA
ttttattagagacggagttt

SEQ ID NO: 144643 - DNA, 20 bp, synthetic construct
  source 1..20: mol_type = other DNA
tttttattagagacggagtt

SEQ ID NO: 144644 - DNA, 20 bp, synthetic construct
  source 1..20: mol_type = other DNA
atttttattagagacggagt

SEQ ID NO: 144645 - DNA, 20 bp, synthetic construct
  source 1..20: mol_type = other DNA
tatttttattagagacggag

SEQ ID NO: 144646 - DNA, 20 bp, synthetic construct
  source 1..20: mol_type = other DNA
gtatttttattagagacgga

SEQ ID NO: 144647 - DNA, 20 bp, synthetic construct
  source 1..20: mol_type = other DNA
tgtatttttattagagacgg

SEQ ID NO: 144648 - DNA, 20 bp, synthetic construct
  source 1..20: mol_type = other DNA
ttgtatttttattagagacg

SEQ ID NO: 144649 - DNA, 20 bp, synthetic construct
  source 1..20: mol_type = other DNA
tttgtatttttattagagac

SEQ ID NO: 144650 - DNA, 20 bp, synthetic construct
  source 1..20: mol_type = other DNA
ttttgtatttttattagaga

SEQ ID NO: 144651 - DNA, 20 bp, synthetic construct
  source 1..20: mol_type = other DNA
tttttgtatttttattagag

SEQ ID NO: 144652 - DNA, 20 bp, synthetic construct
  source 1..20: mol_type = other DNA
ttttttgtatttttattaga

SEQ ID NO: 144653 - DNA, 20 bp, synthetic construct
  source 1..20: mol_type = other DNA
tttttttgtatttttattag

SEQ ID NO: 144654 - DNA, 20 bp, synthetic construct
  source 1..20: mol_type = other DNA
atttttttgtatttttatta

SEQ ID NO: 144655 - DNA, 20 bp, synthetic construct
  source 1..20: mol_type = other DNA
aatttttttgtatttttatt

SEQ ID NO: 144656 - DNA, 20 bp, synthetic construct
  source 1..20: mol_type = other DNA
taatttttttgtatttttat

SEQ ID NO: 144657 - DNA, 20 bp, synthetic construct
  source 1..20: mol_type = other DNA
ctaatttttttgtattttta

SEQ ID NO: 144658 - DNA, 20 bp, synthetic construct
  source 1..20: mol_type = other DNA
gctaatttttttgtattttt

SEQ ID NO: 144659 - DNA, 20 bp, synthetic construct
  source 1..20: mol_type = other DNA
ggctaatttttttgtatttt

SEQ ID NO: 144660 - DNA, 20 bp, synthetic construct
  source 1..20: mol_type = other DNA
cggctaatttttttgtattt

SEQ ID NO: 144661 - DNA, 20 bp, synthetic construct
  source 1..20: mol_type = other DNA
ccggctaatttttttgtatt

SEQ ID NO: 144662 - DNA, 20 bp, synthetic construct
  source 1..20: mol_type = other DNA
cccggctaatttttttgtat

SEQ ID NO: 144663 - DNA, 20 bp, synthetic construct
  source 1..20: mol_type = other DNA
gcccggctaatttttttgta

SEQ ID NO: 144664 - DNA, 20 bp, synthetic construct
  source 1..20: mol_type = other DNA
cgcccggctaatttttttgt

SEQ ID NO: 144665 - DNA, 20 bp, synthetic construct
  source 1..20: mol_type = other DNA
acgcccggctaatttttttg

SEQ ID NO: 144666 - DNA, 20 bp, synthetic construct
  source 1..20: mol_type = other DNA
cacgcccggctaattttttt

SEQ ID NO: 144667 - DNA, 20 bp, synthetic construct
  source 1..20: mol_type = other DNA
ccacgcccggctaatttttt

SEQ ID NO: 144668 - DNA, 20 bp, synthetic construct
  source 1..20: mol_type = other DNA
accacgcccggctaattttt

SEQ ID NO: 144669 - DNA, 20 bp, synthetic construct
  source 1..20: mol_type = other DNA
caccacgcccggctaatttt

SEQ ID NO: 144670 - DNA, 20 bp, synthetic construct
  source 1..20: mol_type = other DNA
ccaccacgcccggctaattt

SEQ ID NO: 144671 - DNA, 20 bp, synthetic construct
  source 1..20: mol_type = other DNA
accaccacgcccggctaatt

SEQ ID NO: 144672 - DNA, 20 bp, synthetic construct
  source 1..20: mol_type = other DNA
caccaccacgcccggctaat

SEQ ID NO: 144673 - DNA, 20 bp, synthetic construct
  source 1..20: mol_type = other DNA
ccaccaccacgcccggctaa

SEQ ID NO: 144674 - DNA, 20 bp, synthetic construct
  source 1..20: mol_type = other DNA
cccaccaccacgcccggcta

SEQ ID NO: 144675 - DNA, 20 bp, synthetic construct
  source 1..20: mol_type = other DNA
gcccaccaccacgcccggct

SEQ ID NO: 144676 - DNA, 20 bp, synthetic construct
  source 1..20: mol_type = other DNA
cgcccaccaccacgcccggc

SEQ ID NO: 144677 - DNA, 20 bp, synthetic construct
  source 1..20: mol_type = other DNA
gcgcccaccaccacgcccgg

SEQ ID NO: 144678 - DNA, 20 bp, synthetic construct
  source 1..20: mol_type = other DNA
ggcgcccaccaccacgcccg

SEQ ID NO: 144679 - DNA, 20 bp, synthetic construct
  source 1..20: mol_type = other DNA
aggcgcccaccaccacgccc

SEQ ID NO: 144680 - DNA, 20 bp, synthetic construct
  source 1..20: mol_type = other DNA
caggcgcccaccaccacgcc

SEQ ID NO: 144681 - DNA, 20 bp, synthetic construct
  source 1..20: mol_type = other DNA
acaggcgcccaccaccacgc

SEQ ID NO: 144682 - DNA, 20 bp, synthetic construct
  source 1..20: mol_type = other DNA
tacaggcgcccaccaccacg

SEQ ID NO: 144683 - DNA, 20 bp, synthetic construct
  source 1..20: mol_type = other DNA
ctacaggcgcccaccaccac

SEQ ID NO: 144684 - DNA, 20 bp, synthetic construct
  source 1..20: mol_type = other DNA
actacaggcgcccaccacca

SEQ ID NO: 144685 - DNA, 20 bp, synthetic construct
  source 1..20: mol_type = other DNA
gactacaggcgcccaccacc

SEQ ID NO: 144686 - DNA, 20 bp, synthetic construct
  source 1..20: mol_type = other DNA
ggactacaggcgcccaccac

SEQ ID NO: 144687 - DNA, 20 bp, synthetic construct
  source 1..20: mol_type = other DNA
gggactacaggcgcccacca

SEQ ID NO: 144688 - DNA, 20 bp, synthetic construct
  source 1..20: mol_type = other DNA
tgggactacaggcgcccacc

SEQ ID NO: 144689 - DNA, 20 bp, synthetic construct
  source 1..20: mol_type = other DNA
ctgggactacaggcgcccac

SEQ ID NO: 144690 - DNA, 20 bp, synthetic construct
  source 1..20: mol_type = other DNA
gctgggactacaggcgccca

SEQ ID NO: 144691 - DNA, 20 bp, synthetic construct
  source 1..20: mol_type = other DNA
agctgggactacaggcgccc

SEQ ID NO: 144692 - DNA, 20 bp, synthetic construct
  source 1..20: mol_type = other DNA
aagctgggactacaggcgcc

SEQ ID NO: 144693 - DNA, 20 bp, synthetic construct
  source 1..20: mol_type = other DNA
gaagctgggactacaggcgc

SEQ ID NO: 144694 - DNA, 20 bp, synthetic construct
  source 1..20: mol_type = other DNA
agaagctgggactacaggcg

SEQ ID NO: 144695 - DNA, 20 bp, synthetic construct
  source 1..20: mol_type = other DNA
gagaagctgggactacaggc

SEQ ID NO: 144696 - DNA, 20 bp, synthetic construct
  source 1..20: mol_type = other DNA
cgagaagctgggactacagg

SEQ ID NO: 144697 - DNA, 20 bp, synthetic construct
  source 1..20: mol_type = other DNA
ccgagaagctgggactacag

SEQ ID NO: 144698 - DNA, 20 bp, synthetic construct
  source 1..20: mol_type = other DNA
cccgagaagctgggactaca

SEQ ID NO: 144699 - DNA, 20 bp, synthetic construct
  source 1..20: mol_type = other DNA
tcccgagaagctgggactac

SEQ ID NO: 144700 - DNA, 20 bp, synthetic construct
  source 1..20: mol_type = other DNA
ctcccgagaagctgggacta

SEQ ID NO: 144701 - DNA, 20 bp, synthetic construct
  source 1..20: mol_type = other DNA
cctcccgagaagctgggact

SEQ ID NO: 144702 - DNA, 20 bp, synthetic construct
  source 1..20: mol_type = other DNA
gcctcccgagaagctgggac

SEQ ID NO: 144703 - DNA, 20 bp, synthetic construct
  source 1..20: mol_type = other DNA
agcctcccgagaagctggga

SEQ ID NO: 144704 - DNA, 20 bp, synthetic construct
  source 1..20: mol_type = other DNA
cagcctcccgagaagctggg

SEQ ID NO: 144705 - DNA, 20 bp, synthetic construct
  source 1..20: mol_type = other DNA
tcagcctcccgagaagctgg

SEQ ID NO: 144706 - DNA, 20 bp, synthetic construct
  source 1..20: mol_type = other DNA
ctcagcctcccgagaagctg

SEQ ID NO: 144707 - DNA, 20 bp, synthetic construct
  source 1..20: mol_type = other DNA
cctcagcctcccgagaagct

SEQ ID NO: 144708 - DNA, 20 bp, synthetic construct
  source 1..20: mol_type = other DNA
tcctcagcctcccgagaagc

SEQ ID NO: 144709 - DNA, 20 bp, synthetic construct
  source 1..20: mol_type = other DNA
ttcctcagcctcccgagaag

SEQ ID NO: 144710 - DNA, 20 bp, synthetic construct
  source 1..20: mol_type = other DNA
cttcctcagcctcccgagaa

SEQ ID NO: 144711 - DNA, 20 bp, synthetic construct
  source 1..20: mol_type = other DNA
ccttcctcagcctcccgaga

SEQ ID NO: 144712 - DNA, 20 bp, synthetic construct
  source 1..20: mol_type = other DNA
tccttcctcagcctcccgag

SEQ ID NO: 144713 - DNA, 20 bp, synthetic construct
  source 1..20: mol_type = other DNA
ctccttcctcagcctcccga

SEQ ID NO: 144714 - DNA, 20 bp, synthetic construct
  source 1..20: mol_type = other DNA
tctccttcctcagcctcccg

SEQ ID NO: 144715 - DNA, 20 bp, synthetic construct
  source 1..20: mol_type = other DNA
ttctccttcctcagcctccc

SEQ ID NO: 144716 - DNA, 20 bp, synthetic construct
  source 1..20: mol_type = other DNA
attctccttcctcagcctcc

SEQ ID NO: 144717 - DNA, 20 bp, synthetic construct
  source 1..20: mol_type = other DNA
cattctccttcctcagcctc

SEQ ID NO: 144718 - DNA, 20 bp, synthetic construct
  source 1..20: mol_type = other DNA
ccattctccttcctcagcct

SEQ ID NO: 144719 - DNA, 20 bp, synthetic construct
  source 1..20: mol_type = other DNA
gccattctccttcctcagcc

SEQ ID NO: 144720 - DNA, 20 bp, synthetic construct
  source 1..20: mol_type = other DNA
cgccattctccttcctcagc

SEQ ID NO: 144721 - DNA, 20 bp, synthetic construct
  source 1..20: mol_type = other DNA
acgccattctccttcctcag

SEQ ID NO: 144722 - DNA, 20 bp, synthetic construct
  source 1..20: mol_type = other DNA
cacgccattctccttcctca

SEQ ID NO: 144723 - DNA, 20 bp, synthetic construct
  source 1..20: mol_type = other DNA
tcacgccattctccttcctc

SEQ ID NO: 144724 - DNA, 20 bp, synthetic construct
  source 1..20: mol_type = other DNA
ttcacgccattctccttcct

SEQ ID NO: 144725 - DNA, 20 bp, synthetic construct
  source 1..20: mol_type = other DNA
gttcacgccattctccttcc

SEQ ID NO: 144726 - DNA, 20 bp, synthetic construct
  source 1..20: mol_type = other DNA
ggttcacgccattctccttc

SEQ ID NO: 144727 - DNA, 20 bp, synthetic construct
  source 1..20: mol_type = other DNA
gggttcacgccattctcctt

SEQ ID NO: 144728 - DNA, 20 bp, synthetic construct
  source 1..20: mol_type = other DNA
cgggttcacgccattctcct

SEQ ID NO: 144729 - DNA, 20 bp, synthetic construct
  source 1..20: mol_type = other DNA
ccgggttcacgccattctcc

SEQ ID NO: 144730 - DNA, 20 bp, synthetic construct
  source 1..20: mol_type = other DNA
cccgggttcacgccattctc

SEQ ID NO: 144731 - DNA, 20 bp, synthetic construct
  source 1..20: mol_type = other DNA
tcccgggttcacgccattct

SEQ ID NO: 144732 - DNA, 20 bp, synthetic construct
  source 1..20: mol_type = other DNA
ctcccgggttcacgccattc

SEQ ID NO: 144733 - DNA, 20 bp, synthetic construct
  source 1..20: mol_type = other DNA
cctcccgggttcacgccatt

SEQ ID NO: 144734 - DNA, 20 bp, synthetic construct
  source 1..20: mol_type = other DNA
gcctcccgggttcacgccat

SEQ ID NO: 144735 - DNA, 20 bp, synthetic construct
  source 1..20: mol_type = other DNA
cgcctcccgggttcacgcca

SEQ ID NO: 144736 - DNA, 20 bp, synthetic construct
  source 1..20: mol_type = other DNA
ccgcctcccgggttcacgcc

SEQ ID NO: 144737 - DNA, 20 bp, synthetic construct
  source 1..20: mol_type = other DNA
tccgcctcccgggttcacgc

SEQ ID NO: 144738 - DNA, 20 bp, synthetic construct
  source 1..20: mol_type = other DNA
ctccgcctcccgggttcacg

SEQ ID NO: 144739 - DNA, 20 bp, synthetic construct
  source 1..20: mol_type = other DNA
gctccgcctcccgggttcac

SEQ ID NO: 144740 - DNA, 20 bp, synthetic construct
  source 1..20: mol_type = other DNA
agctccgcctcccgggttca

SEQ ID NO: 144741 - DNA, 20 bp, synthetic construct
  source 1..20: mol_type = other DNA
aagctccgcctcccgggttc

SEQ ID NO: 144742 - DNA, 20 bp, synthetic construct
  source 1..20: mol_type = other DNA
caagctccgcctcccgggtt

SEQ ID NO: 144743 - DNA, 20 bp, synthetic construct
  source 1..20: mol_type = other DNA
gcaagctccgcctcccgggt

SEQ ID NO: 144744 - DNA, 20 bp, synthetic construct
  source 1..20: mol_type = other DNA
tgcaagctccgcctcccggg

SEQ ID NO: 144745 - DNA, 20 bp, synthetic construct
  source 1..20: mol_type = other DNA
ctgcaagctccgcctcccgg

SEQ ID NO: 144746 - DNA, 20 bp, synthetic construct
  source 1..20: mol_type = other DNA
actgcaagctccgcctcccg

SEQ ID NO: 144747 - DNA, 20 bp, synthetic construct
  source 1..20: mol_type = other DNA
cactgcaagctccgcctccc

SEQ ID NO: 144748 - DNA, 20 bp, synthetic construct
  source 1..20: mol_type = other DNA
tcactgcaagctccgcctcc

SEQ ID NO: 144749 - DNA, 20 bp, synthetic construct
  source 1..20: mol_type = other DNA
ctcactgcaagctccgcctc

SEQ ID NO: 144750 - DNA, 20 bp, synthetic construct
  source 1..20: mol_type = other DNA
gctcactgcaagctccgcct

SEQ ID NO: 144751 - DNA, 20 bp, synthetic construct
  source 1..20: mol_type = other DNA
tgctcactgcaagctccgcc

SEQ ID NO: 144752 - DNA, 20 bp, synthetic construct
  source 1..20: mol_type = other DNA
ctgctcactgcaagctccgc

SEQ ID NO: 144753 - DNA, 20 bp, synthetic construct
  source 1..20: mol_type = other DNA
tctgctcactgcaagctccg

SEQ ID NO: 144754 - DNA, 20 bp, synthetic construct
  source 1..20: mol_type = other DNA
ctctgctcactgcaagctcc

SEQ ID NO: 144755 - DNA, 20 bp, synthetic construct
  source 1..20: mol_type = other DNA
tctctgctcactgcaagctc

SEQ ID NO: 144756 - DNA, 20 bp, synthetic construct
  source 1..20: mol_type = other DNA
atctctgctcactgcaagct

SEQ ID NO: 144757 - DNA, 20 bp, synthetic construct
  source 1..20: mol_type = other DNA
gatctctgctcactgcaagc

SEQ ID NO: 144758 - DNA, 20 bp, synthetic construct
  source 1..20: mol_type = other DNA
cgatctctgctcactgcaag

SEQ ID NO: 144759 - DNA, 20 bp, synthetic construct
  source 1..20: mol_type = other DNA
gcgatctctgctcactgcaa

SEQ ID NO: 144760 - DNA, 20 bp, synthetic construct
  source 1..20: mol_type = other DNA
cgcgatctctgctcactgca

SEQ ID NO: 144761 - DNA, 20 bp, synthetic construct
  source 1..20: mol_type = other DNA
gcgcgatctctgctcactgc

SEQ ID NO: 144762 - DNA, 20 bp, synthetic construct
  source 1..20: mol_type = other DNA
ggcgcgatctctgctcactg

SEQ ID NO: 144763 - DNA, 20 bp, synthetic construct
  source 1..20: mol_type = other DNA
tggcgcgatctctgctcact

SEQ ID NO: 144764 - DNA, 20 bp, synthetic construct
  source 1..20: mol_type = other DNA
gtggcgcgatctctgctcac

SEQ ID NO: 144765 - DNA, 20 bp, synthetic construct
  source 1..20: mol_type = other DNA
agtggcgcgatctctgctca

SEQ ID NO: 144766 - DNA, 20 bp, synthetic construct
  source 1..20: mol_type = other DNA
cagtggcgcgatctctgctc

SEQ ID NO: 144767 - DNA, 20 bp, synthetic construct
  source 1..20: mol_type = other DNA
gcagtggcgcgatctctgct

SEQ ID NO: 144768 - DNA, 20 bp, synthetic construct
  source 1..20: mol_type = other DNA
tgcagtggcgcgatctctgc

SEQ ID NO: 144769 - DNA, 20 bp, synthetic construct
  source 1..20: mol_type = other DNA
gtgcagtggcgcgatctctg

SEQ ID NO: 144770 - DNA, 20 bp, synthetic construct
  source 1..20: mol_type = other DNA
agtgcagtggcgcgatctct

SEQ ID NO: 144771 - DNA, 20 bp, synthetic construct
  source 1..20: mol_type = other DNA
gagtgcagtggcgcgatctc

SEQ ID NO: 144772 - DNA, 20 bp, synthetic construct
  source 1..20: mol_type = other DNA
ggagtgcagtggcgcgatct

SEQ ID NO: 144773 - DNA, 20 bp, synthetic construct
  source 1..20: mol_type = other DNA
tggagtgcagtggcgcgatc

SEQ ID NO: 144774 - DNA, 20 bp, synthetic construct
  source 1..20: mol_type = other DNA
ctggagtgcagtggcgcgat

SEQ ID NO: 144775 - DNA, 20 bp, synthetic construct
  source 1..20: mol_type = other DNA
gctggagtgcagtggcgcga

SEQ ID NO: 144776 - DNA, 20 bp, synthetic construct
  source 1..20: mol_type = other DNA
agctggagtgcagtggcgcg

SEQ ID NO: 144777 - DNA, 20 bp, synthetic construct
  source 1..20: mol_type = other DNA
aagctggagtgcagtggcgc

SEQ ID NO: 144778 - DNA, 20 bp, synthetic construct
  source 1..20: mol_type = other DNA
caagctggagtgcagtggcg

SEQ ID NO: 144779 - DNA, 20 bp, synthetic construct
  source 1..20: mol_type = other DNA
ccaagctggagtgcagtggc

SEQ ID NO: 144780 - DNA, 20 bp, synthetic construct
  source 1..20: mol_type = other DNA
tccaagctggagtgcagtgg

SEQ ID NO: 144781 - DNA, 20 bp, synthetic construct
  source 1..20: mol_type = other DNA
gtccaagctggagtgcagtg

SEQ ID NO: 144782 - DNA, 20 bp, synthetic construct
  source 1..20: mol_type = other DNA
tgtccaagctggagtgcagt

SEQ ID NO: 144783 - DNA, 20 bp, synthetic construct
  source 1..20: mol_type = other DNA
ttgtccaagctggagtgcag

SEQ ID NO: 144784 - DNA, 20 bp, synthetic construct
  source 1..20: mol_type = other DNA
gttgtccaagctggagtgca

SEQ ID NO: 144785 - DNA, 20 bp, synthetic construct
  source 1..20: mol_type = other DNA
tgttgtccaagctggagtgc

SEQ ID NO: 144786 - DNA, 20 bp, synthetic construct
  source 1..20: mol_type = other DNA
ctgttgtccaagctggagtg

SEQ ID NO: 144787 - DNA, 20 bp, synthetic construct
  source 1..20: mol_type = other DNA
gctgttgtccaagctggagt

SEQ ID NO: 144788 - DNA, 20 bp, synthetic construct
  source 1..20: mol_type = other DNA
cgctgttgtccaagctggag

SEQ ID NO: 144789 - DNA, 20 bp, synthetic construct
  source 1..20: mol_type = other DNA
tcgctgttgtccaagctgga

SEQ ID NO: 144790 - DNA, 20 bp, synthetic construct
  source 1..20: mol_type = other DNA
ctcgctgttgtccaagctgg

SEQ ID NO: 144791 - DNA, 20 bp, synthetic construct
  source 1..20: mol_type = other DNA
tctcgctgttgtccaagctg

SEQ ID NO: 144792 - DNA, 20 bp, synthetic construct
  source 1..20: mol_type = other DNA
gtctcgctgttgtccaagct

SEQ ID NO: 144793 - DNA, 20 bp, synthetic construct
  source 1..20: mol_type = other DNA
agtctcgctgttgtccaagc

SEQ ID NO: 144794 - DNA, 20 bp, synthetic construct
  source 1..20: mol_type = other DNA
gagtctcgctgttgtccaag

SEQ ID NO: 144795 - DNA, 20 bp, synthetic construct
  source 1..20: mol_type = other DNA
agagtctcgctgttgtccaa

SEQ ID NO: 144796 - DNA, 20 bp, synthetic construct
  source 1..20: mol_type = other DNA
cagagtctcgctgttgtcca

SEQ ID NO: 144797 - DNA, 20 bp, synthetic construct
  source 1..20: mol_type = other DNA
acagagtctcgctgttgtcc

SEQ ID NO: 144798 - DNA, 20 bp, synthetic construct
  source 1..20: mol_type = other DNA
gacagagtctcgctgttgtc

SEQ ID NO: 144799 - DNA, 20 bp, synthetic construct
  source 1..20: mol_type = other DNA
agacagagtctcgctgttgt

SEQ ID NO: 144800 - DNA, 20 bp, synthetic construct
  source 1..20: mol_type = other DNA
gagacagagtctcgctgttg

SEQ ID NO: 144801 - DNA, 20 bp, synthetic construct
  source 1..20: mol_type = other DNA
tgagacagagtctcgctgtt

SEQ ID NO: 144802 - DNA, 20 bp, synthetic construct
  source 1..20: mol_type = other DNA
ttgagacagagtctcgctgt

SEQ ID NO: 144803 - DNA, 20 bp, synthetic construct
  source 1..20: mol_type = other DNA
tttgagacagagtctcgctg

SEQ ID NO: 144804 - DNA, 20 bp, synthetic construct
  source 1..20: mol_type = other DNA
ttttgagacagagtctcgct

SEQ ID NO: 144805 - DNA, 20 bp, synthetic construct
  source 1..20: mol_type = other DNA
tttttgagacagagtctcgc

SEQ ID NO: 144806 - DNA, 20 bp, synthetic construct
  source 1..20: mol_type = other DNA
ttttttgagacagagtctcg

SEQ ID NO: 144807 - DNA, 20 bp, synthetic construct
  source 1..20: mol_type = other DNA
tttttttgagacagagtctc

SEQ ID NO: 144808 - DNA, 20 bp, synthetic construct
  source 1..20: mol_type = other DNA
atttttttgagacagagtct

SEQ ID NO: 144809 - DNA, 20 bp, synthetic construct
  source 1..20: mol_type = other DNA
tatttttttgagacagagtc

SEQ ID NO: 144810 - DNA, 20 bp, synthetic construct
  source 1..20: mol_type = other DNA
ttatttttttgagacagagt

SEQ ID NO: 144811 - DNA, 20 bp, synthetic construct
  source 1..20: mol_type = other DNA
tttatttttttgagacagag

SEQ ID NO: 144812 - DNA, 20 bp, synthetic construct
  source 1..20: mol_type = other DNA
ttttatttttttgagacaga

SEQ ID NO: 144813 - DNA, 20 bp, synthetic construct
  source 1..20: mol_type = other DNA
tttttatttttttgagacag

SEQ ID NO: 144814 - DNA, 20 bp, synthetic construct
  source 1..20: mol_type = other DNA
ttttttatttttttgagaca

SEQ ID NO: 144815 - DNA, 20 bp, synthetic construct
  source 1..20: mol_type = other DNA
attttttatttttttgagac

SEQ ID NO: 144816 - DNA, 20 bp, synthetic construct
  source 1..20: mol_type = other DNA
aattttttatttttttgaga

SEQ ID NO: 144817 - DNA, 20 bp, synthetic construct
  source 1..20: mol_type = other DNA
taattttttatttttttgag

SEQ ID NO: 144818 - DNA, 20 bp, synthetic construct
  source 1..20: mol_type = other DNA
ttaattttttatttttttga

SEQ ID NO: 144819 - DNA, 20 bp, synthetic construct
  source 1..20: mol_type = other DNA
tttaattttttatttttttg

SEQ ID NO: 144820 - DNA, 20 bp, synthetic construct
  source 1..20: mol_type = other DNA
ttttaattttttattttttt

SEQ ID NO: 144821 - DNA, 20 bp, synthetic construct
  source 1..20: mol_type = other DNA
tttttaattttttatttttt

SEQ ID NO: 144822 - DNA, 20 bp, synthetic construct
  source 1..20: mol_type = other DNA
ttttttaattttttattttt

SEQ ID NO: 144823 - DNA, 20 bp, synthetic construct
  source 1..20: mol_type = other DNA
tttttttaattttttatttt

SEQ ID NO: 144824 - DNA, 20 bp, synthetic construct
  source 1..20: mol_type = other DNA
ttttttttaattttttattt

SEQ ID NO: 144825 - DNA, 20 bp, synthetic construct
  source 1..20: mol_type = other DNA
attttttttaattttttatt

SEQ ID NO: 144826 - DNA, 20 bp, synthetic construct
  source 1..20: mol_type = other DNA
gattttttttaattttttat

SEQ ID NO: 144827 - DNA, 20 bp, synthetic construct
  source 1..20: mol_type = other DNA
tgattttttttaatttttta

SEQ ID NO: 144828 - DNA, 20 bp, synthetic construct
  source 1..20: mol_type = other DNA
gtgattttttttaatttttt

SEQ ID NO: 144829 - DNA, 20 bp, synthetic construct
  source 1..20: mol_type = other DNA
tgtgattttttttaattttt

SEQ ID NO: 144830 - DNA, 20 bp, synthetic construct
  source 1..20: mol_type = other DNA
atgtgattttttttaatttt

SEQ ID NO: 144831 - DNA, 20 bp, synthetic construct
  source 1..20: mol_type = other DNA
aatgtgattttttttaattt

SEQ ID NO: 144832 - DNA, 20 bp, synthetic construct
  source 1..20: mol_type = other DNA
aaatgtgattttttttaatt

SEQ ID NO: 144833 - DNA, 20 bp, synthetic construct
  source 1..20: mol_type = other DNA
taaatgtgattttttttaat

SEQ ID NO: 144834 - DNA, 20 bp, synthetic construct
  source 1..20: mol_type = other DNA
ttaaatgtgattttttttaa

SEQ ID NO: 144835 - DNA, 20 bp, synthetic construct
  source 1..20: mol_type = other DNA
cttaaatgtgatttttttta

SEQ ID NO: 144836 - DNA, 20 bp, synthetic construct
  source 1..20: mol_type = other DNA
tcttaaatgtgatttttttt

SEQ ID NO: 144837 - DNA, 20 bp, synthetic construct
  source 1..20: mol_type = other DNA
atcttaaatgtgattttttt

SEQ ID NO: 144838 - DNA, 20 bp, synthetic construct
  source 1..20: mol_type = other DNA
tatcttaaatgtgatttttt

SEQ ID NO: 144839 - DNA, 20 bp, synthetic construct
  source 1..20: mol_type = other DNA
gtatcttaaatgtgattttt

SEQ ID NO: 144840 - DNA, 20 bp, synthetic construct
  source 1..20: mol_type = other DNA
tgtatcttaaatgtgatttt

SEQ ID NO: 144841 - DNA, 20 bp, synthetic construct
  source 1..20: mol_type = other DNA
atgtatcttaaatgtgattt

SEQ ID NO: 144842 - DNA, 20 bp, synthetic construct
  source 1..20: mol_type = other DNA
catgtatcttaaatgtgatt

SEQ ID NO: 144843 - DNA, 20 bp, synthetic construct
  source 1..20: mol_type = other DNA
acatgtatcttaaatgtgat

SEQ ID NO: 144844 - DNA, 20 bp, synthetic construct
  source 1..20: mol_type = other DNA
aacatgtatcttaaatgtga

SEQ ID NO: 144845 - DNA, 20 bp, synthetic construct
  source 1..20: mol_type = other DNA
caacatgtatcttaaatgtg

SEQ ID NO: 144846 - DNA, 20 bp, synthetic construct
  source 1..20: mol_type = other DNA
tcaacatgtatcttaaatgt

SEQ ID NO: 144847 - DNA, 20 bp, synthetic construct
  source 1..20: mol_type = other DNA
atcaacatgtatcttaaatg

SEQ ID NO: 144848 - DNA, 20 bp, synthetic construct
  source 1..20: mol_type = other DNA
tatcaacatgtatcttaaat

SEQ ID NO: 144849 - DNA, 20 bp, synthetic construct
  source 1..20: mol_type = other DNA
ttatcaacatgtatcttaaa

SEQ ID NO: 144850 - DNA, 20 bp, synthetic construct
  source 1..20: mol_type = other DNA
attatcaacatgtatcttaa

SEQ ID NO: 144851 - DNA, 20 bp, synthetic construct
  source 1..20: mol_type = other DNA
tattatcaacatgtatctta

SEQ ID NO: 144852 - DNA, 20 bp, synthetic construct
  source 1..20: mol_type = other DNA
ttattatcaacatgtatctt

SEQ ID NO: 144853 - DNA, 20 bp, synthetic construct
  source 1..20: mol_type = other DNA
cttattatcaacatgtatct

SEQ ID NO: 144854 - DNA, 20 bp, synthetic construct
  source 1..20: mol_type = other DNA
ccttattatcaacatgtatc

SEQ ID NO: 144855 - DNA, 20 bp, synthetic construct
  source 1..20: mol_type = other DNA
accttattatcaacatgtat

SEQ ID NO: 144856 - DNA, 20 bp, synthetic construct
  source 1..20: mol_type = other DNA
caccttattatcaacatgta

SEQ ID NO: 144857 - DNA, 20 bp, synthetic construct
  source 1..20: mol_type = other DNA
tcaccttattatcaacatgt

SEQ ID NO: 144858 - DNA, 20 bp, synthetic construct
  source 1..20: mol_type = other DNA
atcaccttattatcaacatg

SEQ ID NO: 144859 - DNA, 20 bp, synthetic construct
  source 1..20: mol_type = other DNA
aatcaccttattatcaacat

SEQ ID NO: 144860 - DNA, 20 bp, synthetic construct
  source 1..20: mol_type = other DNA
caatcaccttattatcaaca

SEQ ID NO: 144861 - DNA, 20 bp, synthetic construct
  source 1..20: mol_type = other DNA
ccaatcaccttattatcaac

SEQ ID NO: 144862 - DNA, 20 bp, synthetic construct
  source 1..20: mol_type = other DNA
tccaatcaccttattatcaa

SEQ ID NO: 144863 - DNA, 20 bp, synthetic construct
  source 1..20: mol_type = other DNA
atccaatcaccttattatca

SEQ ID NO: 144864 - DNA, 20 bp, synthetic construct
  source 1..20: mol_type = other DNA
tatccaatcaccttattatc

SEQ ID NO: 144865 - DNA, 20 bp, synthetic construct
  source 1..20: mol_type = other DNA
ttatccaatcaccttattat

SEQ ID NO: 144866 - DNA, 20 bp, synthetic construct
  source 1..20: mol_type = other DNA
cttatccaatcaccttatta

SEQ ID NO: 144867 - DNA, 20 bp, synthetic construct
  source 1..20: mol_type = other DNA
gcttatccaatcaccttatt

SEQ ID NO: 144868 - DNA, 20 bp, synthetic construct
  source 1..20: mol_type = other DNA
agcttatccaatcaccttat

SEQ ID NO: 144869 - DNA, 20 bp, synthetic construct
  source 1..20: mol_type = other DNA
gagcttatccaatcacctta

SEQ ID NO: 144870 - DNA, 20 bp, synthetic construct
  source 1..20: mol_type = other DNA
agagcttatccaatcacctt

SEQ ID NO: 144871 - DNA, 20 bp, synthetic construct
  source 1..20: mol_type = other DNA
cagagcttatccaatcacct

SEQ ID NO: 144872 - DNA, 20 bp, synthetic construct
  source 1..20: mol_type = other DNA
ccagagcttatccaatcacc

SEQ ID NO: 144873 - DNA, 20 bp, synthetic construct
  source 1..20: mol_type = other DNA
tccagagcttatccaatcac

SEQ ID NO: 144874 - DNA, 20 bp, synthetic construct
  source 1..20: mol_type = other DNA
ttccagagcttatccaatca

SEQ ID NO: 144875 - DNA, 20 bp, synthetic construct
  source 1..20: mol_type = other DNA
tttccagagcttatccaatc

SEQ ID NO: 144876 - DNA, 20 bp, synthetic construct
  source 1..20: mol_type = other DNA
gtttccagagcttatccaat

SEQ ID NO: 144877 - DNA, 20 bp, synthetic construct
  source 1..20: mol_type = other DNA
agtttccagagcttatccaa

SEQ ID NO: 144878 - DNA, 20 bp, synthetic construct
  source 1..20: mol_type = other DNA
aagtttccagagcttatcca

SEQ ID NO: 144879 - DNA, 20 bp, synthetic construct
  source 1..20: mol_type = other DNA
caagtttccagagcttatcc

SEQ ID NO: 144880 - DNA, 20 bp, synthetic construct
  source 1..20: mol_type = other DNA
gcaagtttccagagcttatc

SEQ ID NO: 144881 - DNA, 20 bp, synthetic construct
  source 1..20: mol_type = other DNA
tgcaagtttccagagcttat

SEQ ID NO: 144882 - DNA, 20 bp, synthetic construct
  source 1..20: mol_type = other DNA
ctgcaagtttccagagctta

SEQ ID NO: 144883 - DNA, 20 bp, synthetic construct
  source 1..20: mol_type = other DNA
actgcaagtttccagagctt

SEQ ID NO: 144884 - DNA, 20 bp, synthetic construct
  source 1..20: mol_type = other DNA
tactgcaagtttccagagct

SEQ ID NO: 144885 - DNA, 20 bp, synthetic construct
  source 1..20: mol_type = other DNA
ttactgcaagtttccagagc

SEQ ID NO: 144886 - DNA, 20 bp, synthetic construct
  source 1..20: mol_type = other DNA
attactgcaagtttccagag

SEQ ID NO: 144887 - DNA, 20 bp, synthetic construct
  source 1..20: mol_type = other DNA
cattactgcaagtttccaga

SEQ ID NO: 144888 - DNA, 20 bp, synthetic construct
  source 1..20: mol_type = other DNA
tcattactgcaagtttccag

SEQ ID NO: 144889 - DNA, 20 bp, synthetic construct
  source 1..20: mol_type = other DNA
ttcattactgcaagtttcca

SEQ ID NO: 144890 - DNA, 20 bp, synthetic construct
  source 1..20: mol_type = other DNA
tttcattactgcaagtttcc

SEQ ID NO: 144891 - DNA, 20 bp, synthetic construct
  source 1..20: mol_type = other DNA
ttttcattactgcaagtttc

SEQ ID NO: 144892 - DNA, 20 bp, synthetic construct
  source 1..20: mol_type = other DNA
tttttcattactgcaagttt

SEQ ID NO: 144893 - DNA, 20 bp, synthetic construct
  source 1..20: mol_type = other DNA
atttttcattactgcaagtt

SEQ ID NO: 144894 - DNA, 20 bp, synthetic construct
  source 1..20: mol_type = other DNA
gatttttcattactgcaagt

SEQ ID NO: 144895 - DNA, 20 bp, synthetic construct
  source 1..20: mol_type = other DNA
tgatttttcattactgcaag

SEQ ID NO: 144896 - DNA, 20 bp, synthetic construct
  source 1..20: mol_type = other DNA
ttgatttttcattactgcaa

SEQ ID NO: 144897 - DNA, 20 bp, synthetic construct
  source 1..20: mol_type = other DNA
tttgatttttcattactgca

SEQ ID NO: 144898 - DNA, 20 bp, synthetic construct
  source 1..20: mol_type = other DNA
atttgatttttcattactgc

SEQ ID NO: 144899 - DNA, 20 bp, synthetic construct
  source 1..20: mol_type = other DNA
aatttgatttttcattactg

SEQ ID NO: 144900 - DNA, 20 bp, synthetic construct
  source 1..20: mol_type = other DNA
aaatttgatttttcattact

SEQ ID NO: 144901 - DNA, 20 bp, synthetic construct
  source 1..20: mol_type = other DNA
taaatttgatttttcattac

SEQ ID NO: 144902 - DNA, 20 bp, synthetic construct
  source 1..20: mol_type = other DNA
ttaaatttgatttttcatta

SEQ ID NO: 144903 - DNA, 20 bp, synthetic construct
  source 1..20: mol_type = other DNA
gttaaatttgatttttcatt

SEQ ID NO: 144904 - DNA, 20 bp, synthetic construct
  source 1..20: mol_type = other DNA
tgttaaatttgatttttcat

SEQ ID NO: 144905 - DNA, 20 bp, synthetic construct
  source 1..20: mol_type = other DNA
atgttaaatttgatttttca

SEQ ID NO: 144906 - DNA, 20 bp, synthetic construct
  source 1..20: mol_type = other DNA
tatgttaaatttgatttttc

SEQ ID NO: 144907 - DNA, 20 bp, synthetic construct
  source 1..20: mol_type = other DNA
ttatgttaaatttgattttt

SEQ ID NO: 144908 - DNA, 20 bp, synthetic construct
  source 1..20: mol_type = other DNA
tttatgttaaatttgatttt

SEQ ID NO: 144909 - DNA, 20 bp, synthetic construct
  source 1..20: mol_type = other DNA
ctttatgttaaatttgattt

SEQ ID NO: 144910 - DNA, 20 bp, synthetic construct
  source 1..20: mol_type = other DNA
actttatgttaaatttgatt

SEQ ID NO: 144911 - DNA, 20 bp, synthetic construct
  source 1..20: mol_type = other DNA
aactttatgttaaatttgat

SEQ ID NO: 144912 - DNA, 20 bp, synthetic construct
  source 1..20: mol_type = other DNA
gaactttatgttaaatttga

SEQ ID NO: 144913 - DNA, 20 bp, synthetic construct
  source 1..20: mol_type = other DNA
tgaactttatgttaaatttg

SEQ ID NO: 144914 - DNA, 20 bp, synthetic construct
  source 1..20: mol_type = other DNA
atgaactttatgttaaattt

SEQ ID NO: 144915 - DNA, 20 bp, synthetic construct
  source 1..20: mol_type = other DNA
tatgaactttatgttaaatt

SEQ ID NO: 144916 - DNA, 20 bp, synthetic construct
  source 1..20: mol_type = other DNA
ttatgaactttatgttaaat

SEQ ID NO: 144917 - DNA, 20 bp, synthetic construct
  source 1..20: mol_type = other DNA
cttatgaactttatgttaaa

SEQ ID NO: 144918 - DNA, 20 bp, synthetic construct
  source 1..20: mol_type = other DNA
ccttatgaactttatgttaa

SEQ ID NO: 144919 - DNA, 20 bp, synthetic construct
  source 1..20: mol_type = other DNA
gccttatgaactttatgtta

SEQ ID NO: 144920 - DNA, 20 bp, synthetic construct
  source 1..20: mol_type = other DNA
tgccttatgaactttatgtt

SEQ ID NO: 144921 - DNA, 20 bp, synthetic construct
  source 1..20: mol_type = other DNA
ttgccttatgaactttatgt

SEQ ID NO: 144922 - DNA, 20 bp, synthetic construct
  source 1..20: mol_type = other DNA
tttgccttatgaactttatg

SEQ ID NO: 144923 - DNA, 20 bp, synthetic construct
  source 1..20: mol_type = other DNA
atttgccttatgaactttat

SEQ ID NO: 144924 - DNA, 20 bp, synthetic construct
  source 1..20: mol_type = other DNA
aatttgccttatgaacttta

SEQ ID NO: 144925 - DNA, 20 bp, synthetic construct
  source 1..20: mol_type = other DNA
gaatttgccttatgaacttt

SEQ ID NO: 144926 - DNA, 20 bp, synthetic construct
  source 1..20: mol_type = other DNA
ggaatttgccttatgaactt

SEQ ID NO: 144927 - DNA, 20 bp, synthetic construct
  source 1..20: mol_type = other DNA
aggaatttgccttatgaact

SEQ ID NO: 144928 - DNA, 20 bp, synthetic construct
  source 1..20: mol_type = other DNA
taggaatttgccttatgaac

SEQ ID NO: 144929 - DNA, 20 bp, synthetic construct
  source 1..20: mol_type = other DNA
ataggaatttgccttatgaa

SEQ ID NO: 144930 - DNA, 20 bp, synthetic construct
  source 1..20: mol_type = other DNA
aataggaatttgccttatga

SEQ ID NO: 144931 - DNA, 20 bp, synthetic construct
  source 1..20: mol_type = other DNA
aaataggaatttgccttatg

SEQ ID NO: 144932 - DNA, 20 bp, synthetic construct
  source 1..20: mol_type = other DNA
caaataggaatttgccttat

SEQ ID NO: 144933 - DNA, 20 bp, synthetic construct
  source 1..20: mol_type = other DNA
gcaaataggaatttgcctta

SEQ ID NO: 144934 - DNA, 20 bp, synthetic construct
  source 1..20: mol_type = other DNA
agcaaataggaatttgcctt

SEQ ID NO: 144935 - DNA, 20 bp, synthetic construct
  source 1..20: mol_type = other DNA
aagcaaataggaatttgcct

SEQ ID NO: 144936 - DNA, 20 bp, synthetic construct
  source 1..20: mol_type = other DNA
caagcaaataggaatttgcc

SEQ ID NO: 144937 - DNA, 20 bp, synthetic construct
  source 1..20: mol_type = other DNA
ccaagcaaataggaatttgc

SEQ ID NO: 144938 - DNA, 20 bp, synthetic construct
  source 1..20: mol_type = other DNA
cccaagcaaataggaatttg

SEQ ID NO: 144939 - DNA, 20 bp, synthetic construct
  source 1..20: mol_type = other DNA
tcccaagcaaataggaattt

SEQ ID NO: 144940 - DNA, 20 bp, synthetic construct
  source 1..20: mol_type = other DNA
gtcccaagcaaataggaatt

SEQ ID NO: 144941 - DNA, 20 bp, synthetic construct
  source 1..20: mol_type = other DNA
agtcccaagcaaataggaat

SEQ ID NO: 144942 - DNA, 20 bp, synthetic construct
  source 1..20: mol_type = other DNA
aagtcccaagcaaataggaa

SEQ ID NO: 144943 - DNA, 20 bp, synthetic construct
  source 1..20: mol_type = other DNA
aaagtcccaagcaaatagga

SEQ ID NO: 144944 - DNA, 20 bp, synthetic construct
  source 1..20: mol_type = other DNA
aaaagtcccaagcaaatagg

SEQ ID NO: 144945 - DNA, 20 bp, synthetic construct
  source 1..20: mol_type = other DNA
aaaaagtcccaagcaaatag

SEQ ID NO: 144946 - DNA, 20 bp, synthetic construct
  source 1..20: mol_type = other DNA
taaaaagtcccaagcaaata

SEQ ID NO: 144947 - DNA, 20 bp, synthetic construct
  source 1..20: mol_type = other DNA
ttaaaaagtcccaagcaaat

SEQ ID NO: 144948 - DNA, 20 bp, synthetic construct
  source 1..20: mol_type = other DNA
attaaaaagtcccaagcaaa

SEQ ID NO: 144949 - DNA, 20 bp, synthetic construct
  source 1..20: mol_type = other DNA
aattaaaaagtcccaagcaa

SEQ ID NO: 144950 - DNA, 20 bp, synthetic construct
  source 1..20: mol_type = other DNA
aaattaaaaagtcccaagca

SEQ ID NO: 144951 - DNA, 20 bp, synthetic construct
  source 1..20: mol_type = other DNA
gaaattaaaaagtcccaagc

SEQ ID NO: 144952 - DNA, 20 bp, synthetic construct
  source 1..20: mol_type = other DNA
agaaattaaaaagtcccaag

SEQ ID NO: 144953 - DNA, 20 bp, synthetic construct
  source 1..20: mol_type = other DNA
tagaaattaaaaagtcccaa

SEQ ID NO: 144954 - DNA, 20 bp, synthetic construct
  source 1..20: mol_type = other DNA
ttagaaattaaaaagtccca

SEQ ID NO: 144955 - DNA, 20 bp, synthetic construct
  source 1..20: mol_type = other DNA
cttagaaattaaaaagtccc

SEQ ID NO: 144956 - DNA, 20 bp, synthetic construct
  source 1..20: mol_type = other DNA
ccttagaaattaaaaagtcc

SEQ ID NO: 144957 - DNA, 20 bp, synthetic construct
  source 1..20: mol_type = other DNA
accttagaaattaaaaagtc

SEQ ID NO: 144958 - DNA, 20 bp, synthetic construct
  source 1..20: mol_type = other DNA
aaccttagaaattaaaaagt

SEQ ID NO: 144959 - DNA, 20 bp, synthetic construct
  source 1..20: mol_type = other DNA
aaaccttagaaattaaaaag

SEQ ID NO: 144960 - DNA, 20 bp, synthetic construct
  source 1..20: mol_type = other DNA
taaaccttagaaattaaaaa

SEQ ID NO: 144961 - DNA, 20 bp, synthetic construct
  source 1..20: mol_type = other DNA
ataaaccttagaaattaaaa

SEQ ID NO: 144962 - DNA, 20 bp, synthetic construct
  source 1..20: mol_type = other DNA
cataaaccttagaaattaaa

SEQ ID NO: 144963 - DNA, 20 bp, synthetic construct
  source 1..20: mol_type = other DNA
acataaaccttagaaattaa

SEQ ID NO: 144964 - DNA, 20 bp, synthetic construct
  source 1..20: mol_type = other DNA
cacataaaccttagaaatta

SEQ ID NO: 144965 - DNA, 20 bp, synthetic construct
  source 1..20: mol_type = other DNA
tcacataaaccttagaaatt

SEQ ID NO: 144966 - DNA, 20 bp, synthetic construct
  source 1..20: mol_type = other DNA
atcacataaaccttagaaat

SEQ ID NO: 144967 - DNA, 20 bp, synthetic construct
  source 1..20: mol_type = other DNA
catcacataaaccttagaaa

SEQ ID NO: 144968 - DNA, 20 bp, synthetic construct
  source 1..20: mol_type = other DNA
tcatcacataaaccttagaa

SEQ ID NO: 144969 - DNA, 20 bp, synthetic construct
  source 1..20: mol_type = other DNA
ctcatcacataaaccttaga

SEQ ID NO: 144970 - DNA, 20 bp, synthetic construct
  source 1..20: mol_type = other DNA
cctcatcacataaaccttag

SEQ ID NO: 144971 - DNA, 20 bp, synthetic construct
  source 1..20: mol_type = other DNA
acctcatcacataaacctta

SEQ ID NO: 144972 - DNA, 20 bp, synthetic construct
  source 1..20: mol_type = other DNA
aacctcatcacataaacctt

SEQ ID NO: 144973 - DNA, 20 bp, synthetic construct
  source 1..20: mol_type = other DNA
taacctcatcacataaacct

SEQ ID NO: 144974 - DNA, 20 bp, synthetic construct
  source 1..20: mol_type = other DNA
ataacctcatcacataaacc

SEQ ID NO: 144975 - DNA, 20 bp, synthetic construct
  source 1..20: mol_type = other DNA
aataacctcatcacataaac

SEQ ID NO: 144976 - DNA, 20 bp, synthetic construct
  source 1..20: mol_type = other DNA
aaataacctcatcacataaa

SEQ ID NO: 144977 - DNA, 20 bp, synthetic construct
  source 1..20: mol_type = other DNA
aaaataacctcatcacataa

SEQ ID NO: 144978 - DNA, 20 bp, synthetic construct
  source 1..20: mol_type = other DNA
gaaaataacctcatcacata

SEQ ID NO: 144979 - DNA, 20 bp, synthetic construct
  source 1..20: mol_type = other DNA
ggaaaataacctcatcacat

SEQ ID NO: 144980 - DNA, 20 bp, synthetic construct
  source 1..20: mol_type = other DNA
aggaaaataacctcatcaca

SEQ ID NO: 144981 - DNA, 20 bp, synthetic construct
  source 1..20: mol_type = other DNA
taggaaaataacctcatcac

SEQ ID NO: 144982 - DNA, 20 bp, synthetic construct
  source 1..20: mol_type = other DNA
ataggaaaataacctcatca

SEQ ID NO: 144983 - DNA, 20 bp, synthetic construct
  source 1..20: mol_type = other DNA
cataggaaaataacctcatc

SEQ ID NO: 144984 - DNA, 20 bp, synthetic construct
  source 1..20: mol_type = other DNA
tcataggaaaataacctcat

SEQ ID NO: 144985 - DNA, 20 bp, synthetic construct
  source 1..20: mol_type = other DNA
ctcataggaaaataacctca

SEQ ID NO: 144986 - DNA, 20 bp, synthetic construct
  source 1..20: mol_type = other DNA
gctcataggaaaataacctc

SEQ ID NO: 144987 - DNA, 20 bp, synthetic construct
  source 1..20: mol_type = other DNA
agctcataggaaaataacct

SEQ ID NO: 144988 - DNA, 20 bp, synthetic construct
  source 1..20: mol_type = other DNA
aagctcataggaaaataacc

SEQ ID NO: 144989 - DNA, 20 bp, synthetic construct
  source 1..20: mol_type = other DNA
gaagctcataggaaaataac

SEQ ID NO: 144990 - DNA, 20 bp, synthetic construct
  source 1..20: mol_type = other DNA
agaagctcataggaaaataa

SEQ ID NO: 144991 - DNA, 20 bp, synthetic construct
  source 1..20: mol_type = other DNA
aagaagctcataggaaaata

SEQ ID NO: 144992 - DNA, 20 bp, synthetic construct
  source 1..20: mol_type = other DNA
caagaagctcataggaaaat

SEQ ID NO: 144993 - DNA, 20 bp, synthetic construct
  source 1..20: mol_type = other DNA
tcaagaagctcataggaaaa

SEQ ID NO: 144994 - DNA, 20 bp, synthetic construct
  source 1..20: mol_type = other DNA
ttcaagaagctcataggaaa

SEQ ID NO: 144995 - DNA, 20 bp, synthetic construct
  source 1..20: mol_type = other DNA
attcaagaagctcataggaa

SEQ ID NO: 144996 - DNA, 20 bp, synthetic construct
  source 1..20: mol_type = other DNA
aattcaagaagctcatagga

SEQ ID NO: 144997 - DNA, 20 bp, synthetic construct
  source 1..20: mol_type = other DNA
taattcaagaagctcatagg

SEQ ID NO: 144998 - DNA, 20 bp, synthetic construct
  source 1..20: mol_type = other DNA
ataattcaagaagctcatag

SEQ ID NO: 144999 - DNA, 20 bp, synthetic construct
  source 1..20: mol_type = other DNA
cataattcaagaagctcata

SEQ ID NO: 145000 - DNA, 20 bp, synthetic construct
  source 1..20: mol_type = other DNA
acataattcaagaagctcat

SEQ ID NO: 145001 - DNA, 20 bp, synthetic construct
  source 1..20: mol_type = other DNA
aacataattcaagaagctca

SEQ ID NO: 145002 - DNA, 20 bp, synthetic construct
  source 1..20: mol_type = other DNA
aaacataattcaagaagctc

SEQ ID NO: 145003 - DNA, 20 bp, synthetic construct
  source 1..20: mol_type = other DNA
caaacataattcaagaagct

SEQ ID NO: 145004 - DNA, 20 bp, synthetic construct
  source 1..20: mol_type = other DNA
gcaaacataattcaagaagc

SEQ ID NO: 145005 - DNA, 20 bp, synthetic construct
  source 1..20: mol_type = other DNA
agcaaacataattcaagaag

SEQ ID NO: 145006 - DNA, 20 bp, synthetic construct
  source 1..20: mol_type = other DNA
tagcaaacataattcaagaa

SEQ ID NO: 145007 - DNA, 20 bp, synthetic construct
  source 1..20: mol_type = other DNA
ttagcaaacataattcaaga

SEQ ID NO: 145008 - DNA, 20 bp, synthetic construct
  source 1..20: mol_type = other DNA
attagcaaacataattcaag

SEQ ID NO: 145009 - DNA, 20 bp, synthetic construct
  source 1..20: mol_type = other DNA
cattagcaaacataattcaa

SEQ ID NO: 145010 - DNA, 20 bp, synthetic construct
  source 1..20: mol_type = other DNA
ccattagcaaacataattca

SEQ ID NO: 145011 - DNA, 20 bp, synthetic construct
  source 1..20: mol_type = other DNA
tccattagcaaacataattc

SEQ ID NO: 145012 - DNA, 20 bp, synthetic construct
  source 1..20: mol_type = other DNA
ctccattagcaaacataatt

SEQ ID NO: 145013 - DNA, 20 bp, synthetic construct
  source 1..20: mol_type = other DNA
cctccattagcaaacataat

SEQ ID NO: 145014 - DNA, 20 bp, synthetic construct
  source 1..20: mol_type = other DNA
gcctccattagcaaacataa

SEQ ID NO: 145015 - DNA, 20 bp, synthetic construct
  source 1..20: mol_type = other DNA
tgcctccattagcaaacata

SEQ ID NO: 145016 - DNA, 20 bp, synthetic construct
  source 1..20: mol_type = other DNA
ctgcctccattagcaaacat

SEQ ID NO: 145017 - DNA, 20 bp, synthetic construct
  source 1..20: mol_type = other DNA
actgcctccattagcaaaca

SEQ ID NO: 145018 - DNA, 20 bp, synthetic construct
  source 1..20: mol_type = other DNA
aactgcctccattagcaaac

SEQ ID NO: 145019 - DNA, 20 bp, synthetic construct
  source 1..20: mol_type = other DNA
taactgcctccattagcaaa

SEQ ID NO: 145020 - DNA, 20 bp, synthetic construct
  source 1..20: mol_type = other DNA
ttaactgcctccattagcaa

SEQ ID NO: 145021 - DNA, 20 bp, synthetic construct
  source 1..20: mol_type = other DNA
tttaactgcctccattagca

SEQ ID NO: 145022 - DNA, 20 bp, synthetic construct
  source 1..20: mol_type = other DNA
ctttaactgcctccattagc

SEQ ID NO: 145023 - DNA, 20 bp, synthetic construct
  source 1..20: mol_type = other DNA
tctttaactgcctccattag

SEQ ID NO: 145024 - DNA, 20 bp, synthetic construct
  source 1..20: mol_type = other DNA
atctttaactgcctccatta

SEQ ID NO: 145025 - DNA, 20 bp, synthetic construct
  source 1..20: mol_type = other DNA
catctttaactgcctccatt

SEQ ID NO: 145026 - DNA, 20 bp, synthetic construct
  source 1..20: mol_type = other DNA
acatctttaactgcctccat

SEQ ID NO: 145027 - DNA, 20 bp, synthetic construct
  source 1..20: mol_type = other DNA
gacatctttaactgcctcca

SEQ ID NO: 145028 - DNA, 20 bp, synthetic construct
  source 1..20: mol_type = other DNA
agacatctttaactgcctcc

SEQ ID NO: 145029 - DNA, 20 bp, synthetic construct
  source 1..20: mol_type = other DNA
aagacatctttaactgcctc

SEQ ID NO: 145030 - DNA, 20 bp, synthetic construct
  source 1..20: mol_type = other DNA
aaagacatctttaactgcct

SEQ ID NO: 145031 - DNA, 20 bp, synthetic construct
  source 1..20: mol_type = other DNA
caaagacatctttaactgcc

SEQ ID NO: 145032 - DNA, 20 bp, synthetic construct
  source 1..20: mol_type = other DNA
tcaaagacatctttaactgc

SEQ ID NO: 145033 - DNA, 20 bp, synthetic construct
  source 1..20: mol_type = other DNA
atcaaagacatctttaactg

SEQ ID NO: 145034 - DNA, 20 bp, synthetic construct
  source 1..20: mol_type = other DNA
tatcaaagacatctttaact

SEQ ID NO: 145035 - DNA, 20 bp, synthetic construct
  source 1..20: mol_type = other DNA
atatcaaagacatctttaac

SEQ ID NO: 145036 - DNA, 20 bp, synthetic construct
  source 1..20: mol_type = other DNA
gatatcaaagacatctttaa

SEQ ID NO: 145037 - DNA, 20 bp, synthetic construct
  source 1..20: mol_type = other DNA
agatatcaaagacatcttta

SEQ ID NO: 145038 - DNA, 20 bp, synthetic construct
  source 1..20: mol_type = other DNA
tagatatcaaagacatcttt

SEQ ID NO: 145039 - DNA, 20 bp, synthetic construct
  source 1..20: mol_type = other DNA
atagatatcaaagacatctt

SEQ ID NO: 145040 - DNA, 20 bp, synthetic construct
  source 1..20: mol_type = other DNA
gatagatatcaaagacatct

SEQ ID NO: 145041 - DNA, 20 bp, synthetic construct
  source 1..20: mol_type = other DNA
tgatagatatcaaagacatc

SEQ ID NO: 145042 - DNA, 20 bp, synthetic construct
  source 1..20: mol_type = other DNA
ctgatagatatcaaagacat

SEQ ID NO: 145043 - DNA, 20 bp, synthetic construct
  source 1..20: mol_type = other DNA
actgatagatatcaaagaca

SEQ ID NO: 145044 - DNA, 20 bp, synthetic construct
  source 1..20: mol_type = other DNA
aactgatagatatcaaagac

SEQ ID NO: 145045 - DNA, 20 bp, synthetic construct
  source 1..20: mol_type = other DNA
gaactgatagatatcaaaga

SEQ ID NO: 145046 - DNA, 20 bp, synthetic construct
  source 1..20: mol_type = other DNA
ggaactgatagatatcaaag

SEQ ID NO: 145047 - DNA, 20 bp, synthetic construct
  source 1..20: mol_type = other DNA
gggaactgatagatatcaaa

SEQ ID NO: 145048 - DNA, 20 bp, synthetic construct
  source 1..20: mol_type = other DNA
agggaactgatagatatcaa

SEQ ID NO: 145049 - DNA, 20 bp, synthetic construct
  source 1..20: mol_type = other DNA
cagggaactgatagatatca

SEQ ID NO: 145050 - DNA, 20 bp, synthetic construct
  source 1..20: mol_type = other DNA
ccagggaactgatagatatc

SEQ ID NO: 145051 - DNA, 20 bp, synthetic construct
  source 1..20: mol_type = other DNA
cccagggaactgatagatat

SEQ ID NO: 145052 - DNA, 20 bp, synthetic construct
  source 1..20: mol_type = other DNA
ccccagggaactgatagata

SEQ ID NO: 145053 - DNA, 20 bp, synthetic construct
  source 1..20: mol_type = other DNA
gccccagggaactgatagat

SEQ ID NO: 145054 - DNA, 20 bp, synthetic construct
  source 1..20: mol_type = other DNA
tgccccagggaactgataga

SEQ ID NO: 145055 - DNA, 20 bp, synthetic construct
  source 1..20: mol_type = other DNA
ctgccccagggaactgatag

SEQ ID NO: 145056 - DNA, 20 bp, synthetic construct
  source 1..20: mol_type = other DNA
actgccccagggaactgata

SEQ ID NO: 145057 - DNA, 20 bp, synthetic construct
  source 1..20: mol_type = other DNA
tactgccccagggaactgat

SEQ ID NO: 145058 - DNA, 20 bp, synthetic construct
  source 1..20: mol_type = other DNA
ctactgccccagggaactga

SEQ ID NO: 145059 - DNA, 20 bp, synthetic construct
  source 1..20: mol_type = other DNA
actactgccccagggaactg

SEQ ID NO: 145060 - DNA, 20 bp, synthetic construct
  source 1..20: mol_type = other DNA
gactactgccccagggaact

SEQ ID NO: 145061 - DNA, 20 bp, synthetic construct
  source 1..20: mol_type = other DNA
agactactgccccagggaac

SEQ ID NO: 145062 - DNA, 20 bp, synthetic construct
  source 1..20: mol_type = other DNA
aagactactgccccagggaa

SEQ ID NO: 145063 - DNA, 20 bp, synthetic construct
  source 1..20: mol_type = other DNA
aaagactactgccccaggga

SEQ ID NO: 145064 - DNA, 20 bp, synthetic construct
  source 1..20: mol_type = other DNA
aaaagactactgccccaggg

SEQ ID NO: 145065 - DNA, 20 bp, synthetic construct
  source 1..20: mol_type = other DNA
aaaaagactactgccccagg

SEQ ID NO: 145066 - DNA, 20 bp, synthetic construct
  source 1..20: mol_type = other DNA
aaaaaagactactgccccag

SEQ ID NO: 145067 - DNA, 20 bp, synthetic construct
  source 1..20: mol_type = other DNA
caaaaaagactactgcccca

SEQ ID NO: 145068 - DNA, 20 bp, synthetic construct
  source 1..20: mol_type = other DNA
tcaaaaaagactactgcccc

SEQ ID NO: 145069 - DNA, 20 bp, synthetic construct
  source 1..20: mol_type = other DNA
gtcaaaaaagactactgccc

SEQ ID NO: 145070 - DNA, 20 bp, synthetic construct
  source 1..20: mol_type = other DNA
agtcaaaaaagactactgcc

SEQ ID NO: 145071 - DNA, 20 bp, synthetic construct
  source 1..20: mol_type = other DNA
aagtcaaaaaagactactgc

SEQ ID NO: 145072 - DNA, 20 bp, synthetic construct
  source 1..20: mol_type = other DNA
aaagtcaaaaaagactactg

SEQ ID NO: 145073 - DNA, 20 bp, synthetic construct
  source 1..20: mol_type = other DNA
taaagtcaaaaaagactact

SEQ ID NO: 145074 - DNA, 20 bp, synthetic construct
  source 1..20: mol_type = other DNA
ctaaagtcaaaaaagactac

SEQ ID NO: 145075 - DNA, 20 bp, synthetic construct
  source 1..20: mol_type = other DNA
actaaagtcaaaaaagacta

SEQ ID NO: 145076 - DNA, 20 bp, synthetic construct
  source 1..20: mol_type = other DNA
tactaaagtcaaaaaagact

SEQ ID NO: 145077 - DNA, 20 bp, synthetic construct
  source 1..20: mol_type = other DNA
atactaaagtcaaaaaagac

SEQ ID NO: 145078 - DNA, 20 bp, synthetic construct
  source 1..20: mol_type = other DNA
catactaaagtcaaaaaaga

SEQ ID NO: 145079 - DNA, 20 bp, synthetic construct
  source 1..20: mol_type = other DNA
acatactaaagtcaaaaaag

SEQ ID NO: 145080 - DNA, 20 bp, synthetic construct
  source 1..20: mol_type = other DNA
tacatactaaagtcaaaaaa

SEQ ID NO: 145081 - DNA, 20 bp, synthetic construct
  source 1..20: mol_type = other DNA
atacatactaaagtcaaaaa

SEQ ID NO: 145082 - DNA, 20 bp, synthetic construct
  source 1..20: mol_type = other DNA
catacatactaaagtcaaaa

SEQ ID NO: 145083 - DNA, 20 bp, synthetic construct
  source 1..20: mol_type = other DNA
gcatacatactaaagtcaaa

SEQ ID NO: 145084 - DNA, 20 bp, synthetic construct
  source 1..20: mol_type = other DNA
agcatacatactaaagtcaa

SEQ ID NO: 145085 - DNA, 20 bp, synthetic construct
  source 1..20: mol_type = other DNA
gagcatacatactaaagtca

SEQ ID NO: 145086 - DNA, 20 bp, synthetic construct
  source 1..20: mol_type = other DNA
tgagcatacatactaaagtc

SEQ ID NO: 145087 - DNA, 20 bp, synthetic construct
  source 1..20: mol_type = other DNA
ctgagcatacatactaaagt

SEQ ID NO: 145088 - DNA, 20 bp, synthetic construct
  source 1..20: mol_type = other DNA
tctgagcatacatactaaag

SEQ ID NO: 145089 - DNA, 20 bp, synthetic construct
  source 1..20: mol_type = other DNA
ttctgagcatacatactaaa

SEQ ID NO: 145090 - DNA, 20 bp, synthetic construct
  source 1..20: mol_type = other DNA
cttctgagcatacatactaa

SEQ ID NO: 145091 - DNA, 20 bp, synthetic construct
  source 1..20: mol_type = other DNA
acttctgagcatacatacta

SEQ ID NO: 145092 - DNA, 20 bp, synthetic construct
  source 1..20: mol_type = other DNA
aacttctgagcatacatact

SEQ ID NO: 145093 - DNA, 20 bp, synthetic construct
  source 1..20: mol_type = other DNA
aaacttctgagcatacatac

SEQ ID NO: 145094 - DNA, 20 bp, synthetic construct
  source 1..20: mol_type = other DNA
gaaacttctgagcatacata

SEQ ID NO: 145095 - DNA, 20 bp, synthetic construct
  source 1..20: mol_type = other DNA
agaaacttctgagcatacat

SEQ ID NO: 145096 - DNA, 20 bp, synthetic construct
  source 1..20: mol_type = other DNA
tagaaacttctgagcataca

SEQ ID NO: 145097 - DNA, 20 bp, synthetic construct
  source 1..20: mol_type = other DNA
ttagaaacttctgagcatac

SEQ ID NO: 145098 - DNA, 20 bp, synthetic construct
  source 1..20: mol_type = other DNA
gttagaaacttctgagcata

SEQ ID NO: 145099 - DNA, 20 bp, synthetic construct
  source 1..20: mol_type = other DNA
agttagaaacttctgagcat

SEQ ID NO: 145100 - DNA, 20 bp, synthetic construct
  source 1..20: mol_type = other DNA
cagttagaaacttctgagca

SEQ ID NO: 145101 - DNA, 20 bp, synthetic construct
  source 1..20: mol_type = other DNA
gcagttagaaacttctgagc

SEQ ID NO: 145102 - DNA, 20 bp, synthetic construct
  source 1..20: mol_type = other DNA
ggcagttagaaacttctgag

SEQ ID NO: 145103 - DNA, 20 bp, synthetic construct
  source 1..20: mol_type = other DNA
tggcagttagaaacttctga

SEQ ID NO: 145104 - DNA, 20 bp, synthetic construct
  source 1..20: mol_type = other DNA
ctggcagttagaaacttctg

SEQ ID NO: 145105 - DNA, 20 bp, synthetic construct
  source 1..20: mol_type = other DNA
tctggcagttagaaacttct

SEQ ID NO: 145106 - DNA, 20 bp, synthetic construct
  source 1..20: mol_type = other DNA
gtctggcagttagaaacttc

SEQ ID NO: 145107 - DNA, 20 bp, synthetic construct
  source 1..20: mol_type = other DNA
agtctggcagttagaaactt

SEQ ID NO: 145108 - DNA, 20 bp, synthetic construct
  source 1..20: mol_type = other DNA
cagtctggcagttagaaact

SEQ ID NO: 145109 - DNA, 20 bp, synthetic construct
  source 1..20: mol_type = other DNA
tcagtctggcagttagaaac

SEQ ID NO: 145110 - DNA, 20 bp, synthetic construct
  source 1..20: mol_type = other DNA
ctcagtctggcagttagaaa

SEQ ID NO: 145111 - DNA, 20 bp, synthetic construct
  source 1..20: mol_type = other DNA
tctcagtctggcagttagaa

SEQ ID NO: 145112 - DNA, 20 bp, synthetic construct
  source 1..20: mol_type = other DNA
ttctcagtctggcagttaga

SEQ ID NO: 145113 - DNA, 20 bp, synthetic construct
  source 1..20: mol_type = other DNA
attctcagtctggcagttag

SEQ ID NO: 145114 - DNA, 20 bp, synthetic construct
  source 1..20: mol_type = other DNA
gattctcagtctggcagtta

SEQ ID NO: 145115 - DNA, 20 bp, synthetic construct
  source 1..20: mol_type = other DNA
tgattctcagtctggcagtt

SEQ ID NO: 145116 - DNA, 20 bp, synthetic construct
  source 1..20: mol_type = other DNA
ctgattctcagtctggcagt

SEQ ID NO: 145117 - DNA, 20 bp, synthetic construct
  source 1..20: mol_type = other DNA
cctgattctcagtctggcag

SEQ ID NO: 145118 - DNA, 20 bp, synthetic construct
  source 1..20: mol_type = other DNA
gcctgattctcagtctggca

SEQ ID NO: 145119 - DNA, 20 bp, synthetic construct
  source 1..20: mol_type = other DNA
agcctgattctcagtctggc

SEQ ID NO: 145120 - DNA, 20 bp, synthetic construct
  source 1..20: mol_type = other DNA
aagcctgattctcagtctgg

SEQ ID NO: 145121 - DNA, 20 bp, synthetic construct
  source 1..20: mol_type = other DNA
gaagcctgattctcagtctg

SEQ ID NO: 145122 - DNA, 20 bp, synthetic construct
  source 1..20: mol_type = other DNA
agaagcctgattctcagtct

SEQ ID NO: 145123 - DNA, 20 bp, synthetic construct
  source 1..20: mol_type = other DNA
cagaagcctgattctcagtc

SEQ ID NO: 145124 - DNA, 20 bp, synthetic construct
  source 1..20: mol_type = other DNA
acagaagcctgattctcagt

SEQ ID NO: 145125 - DNA, 20 bp, synthetic construct
  source 1..20: mol_type = other DNA
tacagaagcctgattctcag

SEQ ID NO: 145126 - DNA, 20 bp, synthetic construct
  source 1..20: mol_type = other DNA
gtacagaagcctgattctca

SEQ ID NO: 145127 - DNA, 20 bp, synthetic construct
  source 1..20: mol_type = other DNA
ggtacagaagcctgattctc

SEQ ID NO: 145128 - DNA, 20 bp, synthetic construct
  source 1..20: mol_type = other DNA
gggtacagaagcctgattct

SEQ ID NO: 145129 - DNA, 20 bp, synthetic construct
  source 1..20: mol_type = other DNA
agggtacagaagcctgattc

SEQ ID NO: 145130 - DNA, 20 bp, synthetic construct
  source 1..20: mol_type = other DNA
tagggtacagaagcctgatt

SEQ ID NO: 145131 - DNA, 20 bp, synthetic construct
  source 1..20: mol_type = other DNA
ctagggtacagaagcctgat

SEQ ID NO: 145132 - DNA, 20 bp, synthetic construct
  source 1..20: mol_type = other DNA
tctagggtacagaagcctga

SEQ ID NO: 145133 - DNA, 20 bp, synthetic construct
  source 1..20: mol_type = other DNA
ttctagggtacagaagcctg

SEQ ID NO: 145134 - DNA, 20 bp, synthetic construct
  source 1..20: mol_type = other DNA
tttctagggtacagaagcct

SEQ ID NO: 145135 - DNA, 20 bp, synthetic construct
  source 1..20: mol_type = other DNA
ctttctagggtacagaagcc

SEQ ID NO: 145136 - DNA, 20 bp, synthetic construct
  source 1..20: mol_type = other DNA
cctttctagggtacagaagc

SEQ ID NO: 145137 - DNA, 20 bp, synthetic construct
  source 1..20: mol_type = other DNA
tcctttctagggtacagaag

SEQ ID NO: 145138 - DNA, 20 bp, synthetic construct
  source 1..20: mol_type = other DNA
ctcctttctagggtacagaa

SEQ ID NO: 145139 - DNA, 20 bp, synthetic construct
  source 1..20: mol_type = other DNA
actcctttctagggtacaga

SEQ ID NO: 145140 - DNA, 20 bp, synthetic construct
  source 1..20: mol_type = other DNA
aactcctttctagggtacag

SEQ ID NO: 145141 - DNA, 20 bp, synthetic construct
  source 1..20: mol_type = other DNA
caactcctttctagggtaca

SEQ ID NO: 145142 - DNA, 20 bp, synthetic construct
  source 1..20: mol_type = other DNA
acaactcctttctagggtac

SEQ ID NO: 145143 - DNA, 20 bp, synthetic construct
  source 1..20: mol_type = other DNA
gacaactcctttctagggta

SEQ ID NO: 145144 - DNA, 20 bp, synthetic construct
  source 1..20: mol_type = other DNA
ggacaactcctttctagggt

SEQ ID NO: 145145 - DNA, 20 bp, synthetic construct
  source 1..20: mol_type = other DNA
tggacaactcctttctaggg

SEQ ID NO: 145146 - DNA, 20 bp, synthetic construct
  source 1..20: mol_type = other DNA
ctggacaactcctttctagg

SEQ ID NO: 145147 - DNA, 20 bp, synthetic construct
  source 1..20: mol_type = other DNA
tctggacaactcctttctag

SEQ ID NO: 145148 - DNA, 20 bp, synthetic construct
  source 1..20: mol_type = other DNA
atctggacaactcctttcta

SEQ ID NO: 145149 - DNA, 20 bp, synthetic construct
  source 1..20: mol_type = other DNA
catctggacaactcctttct

SEQ ID NO: 145150 - DNA, 20 bp, synthetic construct
  source 1..20: mol_type = other DNA
ccatctggacaactcctttc

SEQ ID NO: 145151 - DNA, 20 bp, synthetic construct
  source 1..20: mol_type = other DNA
cccatctggacaactccttt

SEQ ID NO: 145152 - DNA, 20 bp, synthetic construct
  source 1..20: mol_type = other DNA
tcccatctggacaactcctt

SEQ ID NO: 145153 - DNA, 20 bp, synthetic construct
  source 1..20: mol_type = other DNA
ctcccatctggacaactcct

SEQ ID NO: 145154 - DNA, 20 bp, synthetic construct
  source 1..20: mol_type = other DNA
cctcccatctggacaactcc

SEQ ID NO: 145155 - DNA, 20 bp, synthetic construct
  source 1..20: mol_type = other DNA
gcctcccatctggacaactc

SEQ ID NO: 145156 - DNA, 20 bp, synthetic construct
  source 1..20: mol_type = other DNA
tgcctcccatctggacaact

SEQ ID NO: 145157 - DNA, 20 bp, synthetic construct
  source 1..20: mol_type = other DNA
gtgcctcccatctggacaac

SEQ ID NO: 145158 - DNA, 20 bp, synthetic construct
  source 1..20: mol_type = other DNA
ggtgcctcccatctggacaa

SEQ ID NO: 145159 - DNA, 20 bp, synthetic construct
  source 1..20: mol_type = other DNA
aggtgcctcccatctggaca

SEQ ID NO: 145160 - DNA, 20 bp, synthetic construct
  source 1..20: mol_type = other DNA
gaggtgcctcccatctggac

SEQ ID NO: 145161 - DNA, 20 bp, synthetic construct
  source 1..20: mol_type = other DNA
ggaggtgcctcccatctgga

SEQ ID NO: 145162 - DNA, 20 bp, synthetic construct
  source 1..20: mol_type = other DNA
tggaggtgcctcccatctgg

SEQ ID NO: 145163 - DNA, 20 bp, synthetic construct
  source 1..20: mol_type = other DNA
ctggaggtgcctcccatctg

SEQ ID NO: 145164 - DNA, 20 bp, synthetic construct
  source 1..20: mol_type = other DNA
gctggaggtgcctcccatct

SEQ ID NO: 145165 - DNA, 20 bp, synthetic construct
  source 1..20: mol_type = other DNA
ggctggaggtgcctcccatc

SEQ ID NO: 145166 - DNA, 20 bp, synthetic construct
  source 1..20: mol_type = other DNA
aggctggaggtgcctcccat

SEQ ID NO: 145167 - DNA, 20 bp, synthetic construct
  source 1..20: mol_type = other DNA
aaggctggaggtgcctccca

SEQ ID NO: 145168 - DNA, 20 bp, synthetic construct
  source 1..20: mol_type = other DNA
caaggctggaggtgcctccc

SEQ ID NO: 145169 - DNA, 20 bp, synthetic construct
  source 1..20: mol_type = other DNA
gcaaggctggaggtgcctcc

SEQ ID NO: 145170 - DNA, 20 bp, synthetic construct
  source 1..20: mol_type = other DNA
agcaaggctggaggtgcctc

SEQ ID NO: 145171 - DNA, 20 bp, synthetic construct
  source 1..20: mol_type = other DNA
gagcaaggctggaggtgcct

SEQ ID NO: 145172 - DNA, 20 bp, synthetic construct
  source 1..20: mol_type = other DNA
agagcaaggctggaggtgcc

SEQ ID NO: 145173 - DNA, 20 bp, synthetic construct
  source 1..20: mol_type = other DNA
aagagcaaggctggaggtgc

SEQ ID NO: 145174 - DNA, 20 bp, synthetic construct
  source 1..20: mol_type = other DNA
taagagcaaggctggaggtg

SEQ ID NO: 145175 - DNA, 20 bp, synthetic construct
  source 1..20: mol_type = other DNA
gtaagagcaaggctggaggt

SEQ ID NO: 145176 - DNA, 20 bp, synthetic construct
  source 1..20: mol_type = other DNA
ggtaagagcaaggctggagg

SEQ ID NO: 145177 - DNA, 20 bp, synthetic construct
  source 1..20: mol_type = other DNA
tggtaagagcaaggctggag

SEQ ID NO: 145178 - DNA, 20 bp, synthetic construct
  source 1..20: mol_type = other DNA
gtggtaagagcaaggctgga

SEQ ID NO: 145179 - DNA, 20 bp, synthetic construct
  source 1..20: mol_type = other DNA
ggtggtaagagcaaggctgg

SEQ ID NO: 145180 - DNA, 20 bp, synthetic construct
  source 1..20: mol_type = other DNA
gggtggtaagagcaaggctg

SEQ ID NO: 145181 - DNA, 20 bp, synthetic construct
  source 1..20: mol_type = other DNA
agggtggtaagagcaaggct

SEQ ID NO: 145182 - DNA, 20 bp, synthetic construct
  source 1..20: mol_type = other DNA
cagggtggtaagagcaaggc

SEQ ID NO: 145183 - DNA, 20 bp, synthetic construct
  source 1..20: mol_type = other DNA
acagggtggtaagagcaagg

SEQ ID NO: 145184 - DNA, 20 bp, synthetic construct
  source 1..20: mol_type = other DNA
tacagggtggtaagagcaag

SEQ ID NO: 145185 - DNA, 20 bp, synthetic construct
  source 1..20: mol_type = other DNA
gtacagggtggtaagagcaa

SEQ ID NO: 145186 - DNA, 20 bp, synthetic construct
  source 1..20: mol_type = other DNA
tgtacagggtggtaagagca

SEQ ID NO: 145187 - DNA, 20 bp, synthetic construct
  source 1..20: mol_type = other DNA
atgtacagggtggtaagagc

SEQ ID NO: 145188 - DNA, 20 bp, synthetic construct
  source 1..20: mol_type = other DNA
aatgtacagggtggtaagag

SEQ ID NO: 145189 - DNA, 20 bp, synthetic construct
  source 1..20: mol_type = other DNA
gaatgtacagggtggtaaga

SEQ ID NO: 145190 - DNA, 20 bp, synthetic construct
  source 1..20: mol_type = other DNA
agaatgtacagggtggtaag

SEQ ID NO: 145191 - DNA, 20 bp, synthetic construct
  source 1..20: mol_type = other DNA
gagaatgtacagggtggtaa

SEQ ID NO: 145192 - DNA, 20 bp, synthetic construct
  source 1..20: mol_type = other DNA
ggagaatgtacagggtggta

SEQ ID NO: 145193 - DNA, 20 bp, synthetic construct
  source 1..20: mol_type = other DNA
aggagaatgtacagggtggt

SEQ ID NO: 145194 - DNA, 20 bp, synthetic construct
  source 1..20: mol_type = other DNA
caggagaatgtacagggtgg

SEQ ID NO: 145195 - DNA, 20 bp, synthetic construct
  source 1..20: mol_type = other DNA
acaggagaatgtacagggtg

SEQ ID NO: 145196 - DNA, 20 bp, synthetic construct
  source 1..20: mol_type = other DNA
tacaggagaatgtacagggt

SEQ ID NO: 145197 - DNA, 20 bp, synthetic construct
  source 1..20: mol_type = other DNA
gtacaggagaatgtacaggg

SEQ ID NO: 145198 - DNA, 20 bp, synthetic construct
  source 1..20: mol_type = other DNA
agtacaggagaatgtacagg

SEQ ID NO: 145199 - DNA, 20 bp, synthetic construct
  source 1..20: mol_type = other DNA
aagtacaggagaatgtacag

SEQ ID NO: 145200 - DNA, 20 bp, synthetic construct
  source 1..20: mol_type = other DNA
aaagtacaggagaatgtaca

SEQ ID NO: 145201 - DNA, 20 bp, synthetic construct
  source 1..20: mol_type = other DNA
gaaagtacaggagaatgtac

SEQ ID NO: 145202 - DNA, 20 bp, synthetic construct
  source 1..20: mol_type = other DNA
ggaaagtacaggagaatgta

SEQ ID NO: 145203 - DNA, 20 bp, synthetic construct
  source 1..20: mol_type = other DNA
tggaaagtacaggagaatgt

SEQ ID NO: 145204 - DNA, 20 bp, synthetic construct
  source 1..20: mol_type = other DNA
ctggaaagtacaggagaatg

SEQ ID NO: 145205 - DNA, 20 bp, synthetic construct
  source 1..20: mol_type = other DNA
actggaaagtacaggagaat

SEQ ID NO: 145206 - DNA, 20 bp, synthetic construct
  source 1..20: mol_type = other DNA
cactggaaagtacaggagaa

SEQ ID NO: 145207 - DNA, 20 bp, synthetic construct
  source 1..20: mol_type = other DNA
tcactggaaagtacaggaga

SEQ ID NO: 145208 - DNA, 20 bp, synthetic construct
  source 1..20: mol_type = other DNA
gtcactggaaagtacaggag

SEQ ID NO: 145209 - DNA, 20 bp, synthetic construct
  source 1..20: mol_type = other DNA
ggtcactggaaagtacagga

SEQ ID NO: 145210 - DNA, 20 bp, synthetic construct
  source 1..20: mol_type = other DNA
gggtcactggaaagtacagg

SEQ ID NO: 145211 - DNA, 20 bp, synthetic construct
  source 1..20: mol_type = other DNA
agggtcactggaaagtacag

SEQ ID NO: 145212 - DNA, 20 bp, synthetic construct
  source 1..20: mol_type = other DNA
gagggtcactggaaagtaca

SEQ ID NO: 145213 - DNA, 20 bp, synthetic construct
  source 1..20: mol_type = other DNA
tgagggtcactggaaagtac

SEQ ID NO: 145214 - DNA, 20 bp, synthetic construct
  source 1..20: mol_type = other DNA
atgagggtcactggaaagta

SEQ ID NO: 145215 - DNA, 20 bp, synthetic construct
  source 1..20: mol_type = other DNA
gatgagggtcactggaaagt

SEQ ID NO: 145216 - DNA, 20 bp, synthetic construct
  source 1..20: mol_type = other DNA
tgatgagggtcactggaaag

SEQ ID NO: 145217 - DNA, 20 bp, synthetic construct
  source 1..20: mol_type = other DNA
atgatgagggtcactggaaa

SEQ ID NO: 145218 - DNA, 20 bp, synthetic construct
  source 1..20: mol_type = other DNA
tatgatgagggtcactggaa

SEQ ID NO: 145219 - DNA, 20 bp, synthetic construct
  source 1..20: mol_type = other DNA
ctatgatgagggtcactgga

SEQ ID NO: 145220 - DNA, 20 bp, synthetic construct
  source 1..20: mol_type = other DNA
cctatgatgagggtcactgg

SEQ ID NO: 145221 - DNA, 20 bp, synthetic construct
  source 1..20: mol_type = other DNA
gcctatgatgagggtcactg

SEQ ID NO: 145222 - DNA, 20 bp, synthetic construct
  source 1..20: mol_type = other DNA
ggcctatgatgagggtcact

SEQ ID NO: 145223 - DNA, 20 bp, synthetic construct
  source 1..20: mol_type = other DNA
gggcctatgatgagggtcac

SEQ ID NO: 145224 - DNA, 20 bp, synthetic construct
  source 1..20: mol_type = other DNA
tgggcctatgatgagggtca

SEQ ID NO: 145225 - DNA, 20 bp, synthetic construct
  source 1..20: mol_type = other DNA
ttgggcctatgatgagggtc

SEQ ID NO: 145226 - DNA, 20 bp, synthetic construct
  source 1..20: mol_type = other DNA
cttgggcctatgatgagggt

SEQ ID NO: 145227 - DNA, 20 bp, synthetic construct
  source 1..20: mol_type = other DNA
acttgggcctatgatgaggg

SEQ ID NO: 145228 - DNA, 20 bp, synthetic construct
  source 1..20: mol_type = other DNA
cacttgggcctatgatgagg

SEQ ID NO: 145229 - DNA, 20 bp, synthetic construct
  source 1..20: mol_type = other DNA
acacttgggcctatgatgag

SEQ ID NO: 145230 - DNA, 20 bp, synthetic construct
  source 1..20: mol_type = other DNA
cacacttgggcctatgatga

SEQ ID NO: 145231 - DNA, 20 bp, synthetic construct
  source 1..20: mol_type = other DNA
gcacacttgggcctatgatg

SEQ ID NO: 145232 - DNA, 20 bp, synthetic construct
  source 1..20: mol_type = other DNA
tgcacacttgggcctatgat

SEQ ID NO: 145233 - DNA, 20 bp, synthetic construct
  source 1..20: mol_type = other DNA
ttgcacacttgggcctatga

SEQ ID NO: 145234 - DNA, 20 bp, synthetic construct
  source 1..20: mol_type = other DNA
tttgcacacttgggcctatg

SEQ ID NO: 145235 - DNA, 20 bp, synthetic construct
  source 1..20: mol_type = other DNA
ctttgcacacttgggcctat

SEQ ID NO: 145236 - DNA, 20 bp, synthetic construct
  source 1..20: mol_type = other DNA
gctttgcacacttgggccta

SEQ ID NO: 145237 - DNA, 20 bp, synthetic construct
  source 1..20: mol_type = other DNA
agctttgcacacttgggcct

SEQ ID NO: 145238 - DNA, 20 bp, synthetic construct
  source 1..20: mol_type = other DNA
aagctttgcacacttgggcc

SEQ ID NO: 145239 - DNA, 20 bp, synthetic construct
  source 1..20: mol_type = other DNA
taagctttgcacacttgggc

SEQ ID NO: 145240 - DNA, 20 bp, synthetic construct
  source 1..20: mol_type = other DNA
ctaagctttgcacacttggg

SEQ ID NO: 145241 - DNA, 20 bp, synthetic construct
  source 1..20: mol_type = other DNA
gctaagctttgcacacttgg

SEQ ID NO: 145242 - DNA, 20 bp, synthetic construct
  source 1..20: mol_type = other DNA
agctaagctttgcacacttg

SEQ ID NO: 145243 - DNA, 20 bp, synthetic construct
  source 1..20: mol_type = other DNA
aagctaagctttgcacactt

SEQ ID NO: 145244 - DNA, 20 bp, synthetic construct
  source 1..20: mol_type = other DNA
aaagctaagctttgcacact

SEQ ID NO: 145245 - DNA, 20 bp, synthetic construct
  source 1..20: mol_type = other DNA
caaagctaagctttgcacac

SEQ ID NO: 145246 - DNA, 20 bp, synthetic construct
  source 1..20: mol_type = other DNA
acaaagctaagctttgcaca

SEQ ID NO: 145247 - DNA, 20 bp, synthetic construct
  source 1..20: mol_type = other DNA
cacaaagctaagctttgcac

SEQ ID NO: 145248 - DNA, 20 bp, synthetic construct
  source 1..20: mol_type = other DNA
ccacaaagctaagctttgca

SEQ ID NO: 145249 - DNA, 20 bp, synthetic construct
  source 1..20: mol_type = other DNA
cccacaaagctaagctttgc

SEQ ID NO: 145250 - DNA, 20 bp, synthetic construct
  source 1..20: mol_type = other DNA
acccacaaagctaagctttg

SEQ ID NO: 145251 - DNA, 20 bp, synthetic construct
  source 1..20: mol_type = other DNA
tacccacaaagctaagcttt

SEQ ID NO: 145252 - DNA, 20 bp, synthetic construct
  source 1..20: mol_type = other DNA
atacccacaaagctaagctt

SEQ ID NO: 145253 - DNA, 20 bp, synthetic construct
  source 1..20: mol_type = other DNA
gatacccacaaagctaagct

SEQ ID NO: 145254 - DNA, 20 bp, synthetic construct
  source 1..20: mol_type = other DNA
ggatacccacaaagctaagc

SEQ ID NO: 145255 - DNA, 20 bp, synthetic construct
  source 1..20: mol_type = other DNA
gggatacccacaaagctaag

SEQ ID NO: 145256 - DNA, 20 bp, synthetic construct
  source 1..20: mol_type = other DNA
agggatacccacaaagctaa

SEQ ID NO: 145257 - DNA, 20 bp, synthetic construct
  source 1..20: mol_type = other DNA
aagggatacccacaaagcta

SEQ ID NO: 145258 - DNA, 20 bp, synthetic construct
  source 1..20: mol_type = other DNA
caagggatacccacaaagct

SEQ ID NO: 145259 - DNA, 20 bp, synthetic construct
  source 1..20: mol_type = other DNA
ccaagggatacccacaaagc

SEQ ID NO: 145260 - DNA, 20 bp, synthetic construct
  source 1..20: mol_type = other DNA
gccaagggatacccacaaag

SEQ ID NO: 145261 - DNA, 20 bp, synthetic construct
  source 1..20: mol_type = other DNA
agccaagggatacccacaaa

SEQ ID NO: 145262 - DNA, 20 bp, synthetic construct
  source 1..20: mol_type = other DNA
cagccaagggatacccacaa

SEQ ID NO: 145263 - DNA, 20 bp, synthetic construct
  source 1..20: mol_type = other DNA
gcagccaagggatacccaca

SEQ ID NO: 145264 - DNA, 20 bp, synthetic construct
  source 1..20: mol_type = other DNA
agcagccaagggatacccac

SEQ ID NO: 145265 - DNA, 20 bp, synthetic construct
  source 1..20: mol_type = other DNA
aagcagccaagggataccca

SEQ ID NO: 145266 - DNA, 20 bp, synthetic construct
  source 1..20: mol_type = other DNA
aaagcagccaagggataccc

SEQ ID NO: 145267 - DNA, 20 bp, synthetic construct
  source 1..20: mol_type = other DNA
aaaagcagccaagggatacc

SEQ ID NO: 145268 - DNA, 20 bp, synthetic construct
  source 1..20: mol_type = other DNA
gaaaagcagccaagggatac

SEQ ID NO: 145269 - DNA, 20 bp, synthetic construct
  source 1..20: mol_type = other DNA
tgaaaagcagccaagggata

SEQ ID NO: 145270 - DNA, 20 bp, synthetic construct
  source 1..20: mol_type = other DNA
atgaaaagcagccaagggat

SEQ ID NO: 145271 - DNA, 20 bp, synthetic construct
  source 1..20: mol_type = other DNA
aatgaaaagcagccaaggga

SEQ ID NO: 145272 - DNA, 20 bp, synthetic construct
  source 1..20: mol_type = other DNA
taatgaaaagcagccaaggg

SEQ ID NO: 145273 - DNA, 20 bp, synthetic construct
  source 1..20: mol_type = other DNA
ttaatgaaaagcagccaagg

SEQ ID NO: 145274 - DNA, 20 bp, synthetic construct
  source 1..20: mol_type = other DNA
tttaatgaaaagcagccaag

SEQ ID NO: 145275 - DNA, 20 bp, synthetic construct
  source 1..20: mol_type = other DNA
ctttaatgaaaagcagccaa

SEQ ID NO: 145276 - DNA, 20 bp, synthetic construct
  source 1..20: mol_type = other DNA
tctttaatgaaaagcagcca

SEQ ID NO: 145277 - DNA, 20 bp, synthetic construct
  source 1..20: mol_type = other DNA
ttctttaatgaaaagcagcc

SEQ ID NO: 145278 - DNA, 20 bp, synthetic construct
  source 1..20: mol_type = other DNA
cttctttaatgaaaagcagc

SEQ ID NO: 145279 - DNA, 20 bp, synthetic construct
  source 1..20: mol_type = other DNA
acttctttaatgaaaagcag

SEQ ID NO: 145280 - DNA, 20 bp, synthetic construct
  source 1..20: mol_type = other DNA
aacttctttaatgaaaagca

SEQ ID NO: 145281 - DNA, 20 bp, synthetic construct
  source 1..20: mol_type = other DNA
aaacttctttaatgaaaagc

SEQ ID NO: 145282 - DNA, 20 bp, synthetic construct
  source 1..20: mol_type = other DNA
aaaacttctttaatgaaaag

SEQ ID NO: 145283 - DNA, 20 bp, synthetic construct
  source 1..20: mol_type = other DNA
gaaaacttctttaatgaaaa

SEQ ID NO: 145284 - DNA, 20 bp, synthetic construct
  source 1..20: mol_type = other DNA
ggaaaacttctttaatgaaa

SEQ ID NO: 145285 - DNA, 20 bp, synthetic construct
  source 1..20: mol_type = other DNA
aggaaaacttctttaatgaa

SEQ ID NO: 145286 - DNA, 20 bp, synthetic construct
  source 1..20: mol_type = other DNA
gaggaaaacttctttaatga

SEQ ID NO: 145287 - DNA, 20 bp, synthetic construct
  source 1..20: mol_type = other DNA
agaggaaaacttctttaatg

SEQ ID NO: 145288 - DNA, 20 bp, synthetic construct
  source 1..20: mol_type = other DNA
gagaggaaaacttctttaat

SEQ ID NO: 145289 - DNA, 20 bp, synthetic construct
  source 1..20: mol_type = other DNA
tgagaggaaaacttctttaa

SEQ ID NO: 145290 - DNA, 20 bp, synthetic construct
  source 1..20: mol_type = other DNA
ttgagaggaaaacttcttta

SEQ ID NO: 145291 - DNA, 20 bp, synthetic construct
  source 1..20: mol_type = other DNA
attgagaggaaaacttcttt

SEQ ID NO: 145292 - DNA, 20 bp, synthetic construct
  source 1..20: mol_type = other DNA
aattgagaggaaaacttctt

SEQ ID NO: 145293 - DNA, 20 bp, synthetic construct
  source 1..20: mol_type = other DNA
gaattgagaggaaaacttct

SEQ ID NO: 145294 - DNA, 20 bp, synthetic construct
  source 1..20: mol_type = other DNA
agaattgagaggaaaacttc

SEQ ID NO: 145295 - DNA, 20 bp, synthetic construct
  source 1..20: mol_type = other DNA
aagaattgagaggaaaactt

SEQ ID NO: 145296 - DNA, 20 bp, synthetic construct
  source 1..20: mol_type = other DNA
aaagaattgagaggaaaact

SEQ ID NO: 145297 - DNA, 20 bp, synthetic construct
  source 1..20: mol_type = other DNA
gaaagaattgagaggaaaac

SEQ ID NO: 145298 - DNA, 20 bp, synthetic construct
  source 1..20: mol_type = other DNA
ggaaagaattgagaggaaaa

SEQ ID NO: 145299 - DNA, 20 bp, synthetic construct
  source 1..20: mol_type = other DNA
aggaaagaattgagaggaaa

SEQ ID NO: 145300 - DNA, 20 bp, synthetic construct
  source 1..20: mol_type = other DNA
caggaaagaattgagaggaa

SEQ ID NO: 145301 - DNA, 20 bp, synthetic construct
  source 1..20: mol_type = other DNA
acaggaaagaattgagagga

SEQ ID NO: 145302 - DNA, 20 bp, synthetic construct
  source 1..20: mol_type = other DNA
gacaggaaagaattgagagg

SEQ ID NO: 145303 - DNA, 20 bp, synthetic construct
  source 1..20: mol_type = other DNA
cgacaggaaagaattgagag

SEQ ID NO: 145304 - DNA, 20 bp, synthetic construct
  source 1..20: mol_type = other DNA
gcgacaggaaagaattgaga

SEQ ID NO: 145305 - DNA, 20 bp, synthetic construct
  source 1..20: mol_type = other DNA
agcgacaggaaagaattgag

SEQ ID NO: 145306 - DNA, 20 bp, synthetic construct
  source 1..20: mol_type = other DNA
aagcgacaggaaagaattga

SEQ ID NO: 145307 - DNA, 20 bp, synthetic construct
  source 1..20: mol_type = other DNA
aaagcgacaggaaagaattg

SEQ ID NO: 145308 - DNA, 20 bp, synthetic construct
  source 1..20: mol_type = other DNA
caaagcgacaggaaagaatt

SEQ ID NO: 145309 - DNA, 20 bp, synthetic construct
  source 1..20: mol_type = other DNA
gcaaagcgacaggaaagaat

SEQ ID NO: 145310 - DNA, 20 bp, synthetic construct
  source 1..20: mol_type = other DNA
tgcaaagcgacaggaaagaa

SEQ ID NO: 145311 - DNA, 20 bp, synthetic construct
  source 1..20: mol_type = other DNA
ctgcaaagcgacaggaaaga

SEQ ID NO: 145312 - DNA, 20 bp, synthetic construct
  source 1..20: mol_type = other DNA
gctgcaaagcgacaggaaag

SEQ ID NO: 145313 - DNA, 20 bp, synthetic construct
  source 1..20: mol_type = other DNA
tgctgcaaagcgacaggaaa

SEQ ID NO: 145314 - DNA, 20 bp, synthetic construct
  source 1..20: mol_type = other DNA
gtgctgcaaagcgacaggaa

SEQ ID NO: 145315 - DNA, 20 bp, synthetic construct
  source 1..20: mol_type = other DNA
ggtgctgcaaagcgacagga

SEQ ID NO: 145316 - DNA, 20 bp, synthetic construct
  source 1..20: mol_type = other DNA
tggtgctgcaaagcgacagg

SEQ ID NO: 145317 - DNA, 20 bp, synthetic construct
  source 1..20: mol_type = other DNA
atggtgctgcaaagcgacag

SEQ ID NO: 145318 - DNA, 20 bp, synthetic construct
  source 1..20: mol_type = other DNA
gatggtgctgcaaagcgaca

SEQ ID NO: 145319 - DNA, 20 bp, synthetic construct
  source 1..20: mol_type = other DNA
tgatggtgctgcaaagcgac

SEQ ID NO: 145320 - DNA, 20 bp, synthetic construct
  source 1..20: mol_type = other DNA
ctgatggtgctgcaaagcga

SEQ ID NO: 145321 - DNA, 20 bp, synthetic construct
  source 1..20: mol_type = other DNA
gctgatggtgctgcaaagcg

SEQ ID NO: 145322 - DNA, 20 bp, synthetic construct
  source 1..20: mol_type = other DNA
tgctgatggtgctgcaaagc

SEQ ID NO: 145323 - DNA, 20 bp, synthetic construct
  source 1..20: mol_type = other DNA
gtgctgatggtgctgcaaag

SEQ ID NO: 145324 - DNA, 20 bp, synthetic construct
  source 1..20: mol_type = other DNA
ggtgctgatggtgctgcaaa

SEQ ID NO: 145325 - DNA, 20 bp, synthetic construct
  source 1..20: mol_type = other DNA
tggtgctgatggtgctgcaa

SEQ ID NO: 145326 - DNA, 20 bp, synthetic construct
  source 1..20: mol_type = other DNA
ctggtgctgatggtgctgca

SEQ ID NO: 145327 - DNA, 20 bp, synthetic construct
  source 1..20: mol_type = other DNA
cctggtgctgatggtgctgc

SEQ ID NO: 145328 - DNA, 20 bp, synthetic construct
  source 1..20: mol_type = other DNA
gcctggtgctgatggtgctg

SEQ ID NO: 145329 - DNA, 20 bp, synthetic construct
  source 1..20: mol_type = other DNA
ggcctggtgctgatggtgct

SEQ ID NO: 145330 - DNA, 20 bp, synthetic construct
  source 1..20: mol_type = other DNA
cggcctggtgctgatggtgc

SEQ ID NO: 145331 - DNA, 20 bp, synthetic construct
  source 1..20: mol_type = other DNA
gcggcctggtgctgatggtg

SEQ ID NO: 145332 - DNA, 20 bp, synthetic construct
  source 1..20: mol_type = other DNA
ggcggcctggtgctgatggt

SEQ ID NO: 145333 - DNA, 20 bp, synthetic construct
  source 1..20: mol_type = other DNA
gggcggcctggtgctgatgg

SEQ ID NO: 145334 - DNA, 20 bp, synthetic construct
  source 1..20: mol_type = other DNA
tgggcggcctggtgctgatg

SEQ ID NO: 145335 - DNA, 20 bp, synthetic construct
  source 1..20: mol_type = other DNA
ctgggcggcctggtgctgat

SEQ ID NO: 145336 - DNA, 20 bp, synthetic construct
  source 1..20: mol_type = other DNA
cctgggcggcctggtgctga

SEQ ID NO: 145337 - DNA, 20 bp, synthetic construct
  source 1..20: mol_type = other DNA
gcctgggcggcctggtgctg

SEQ ID NO: 145338 - DNA, 20 bp, synthetic construct
  source 1..20: mol_type = other DNA
agcctgggcggcctggtgct

SEQ ID NO: 145339 - DNA, 20 bp, synthetic construct
  source 1..20: mol_type = other DNA
gagcctgggcggcctggtgc

SEQ ID NO: 145340 - DNA, 20 bp, synthetic construct
  source 1..20: mol_type = other DNA
agagcctgggcggcctggtg

SEQ ID NO: 145341 - DNA, 20 bp, synthetic construct
  source 1..20: mol_type = other DNA
gagagcctgggcggcctggt

SEQ ID NO: 145342 - DNA, 20 bp, synthetic construct
  source 1..20: mol_type = other DNA
ggagagcctgggcggcctgg

SEQ ID NO: 145343 - DNA, 20 bp, synthetic construct
  source 1..20: mol_type = other DNA
tggagagcctgggcggcctg

SEQ ID NO: 145344 - DNA, 20 bp, synthetic construct
  source 1..20: mol_type = other DNA
atggagagcctgggcggcct

SEQ ID NO: 145345 - DNA, 20 bp, synthetic construct
  source 1..20: mol_type = other DNA
gatggagagcctgggcggcc

SEQ ID NO: 145346 - DNA, 20 bp, synthetic construct
  source 1..20: mol_type = other DNA
agatggagagcctgggcggc

SEQ ID NO: 145347 - DNA, 20 bp, synthetic construct
  source 1..20: mol_type = other DNA
cagatggagagcctgggcgg

SEQ ID NO: 145348 - DNA, 20 bp, synthetic construct
  source 1..20: mol_type = other DNA
ccagatggagagcctgggcg

SEQ ID NO: 145349 - DNA, 20 bp, synthetic construct
  source 1..20: mol_type = other DNA
gccagatggagagcctgggc

SEQ ID NO: 145350 - DNA, 20 bp, synthetic construct
  source 1..20: mol_type = other DNA
ggccagatggagagcctggg

SEQ ID NO: 145351 - DNA, 20 bp, synthetic construct
  source 1..20: mol_type = other DNA
tggccagatggagagcctgg

SEQ ID NO: 145352 - DNA, 20 bp, synthetic construct
  source 1..20: mol_type = other DNA
ctggccagatggagagcctg

SEQ ID NO: 145353 - DNA, 20 bp, synthetic construct
  source 1..20: mol_type = other DNA
actggccagatggagagcct

SEQ ID NO: 145354 - DNA, 20 bp, synthetic construct
  source 1..20: mol_type = other DNA
gactggccagatggagagcc

SEQ ID NO: 145355 - DNA, 20 bp, synthetic construct
  source 1..20: mol_type = other DNA
ggactggccagatggagagc

SEQ ID NO: 145356 - DNA, 20 bp, synthetic construct
  source 1..20: mol_type = other DNA
tggactggccagatggagag

SEQ ID NO: 145357 - DNA, 20 bp, synthetic construct
  source 1..20: mol_type = other DNA
gtggactggccagatggaga

SEQ ID NO: 145358 - DNA, 20 bp, synthetic construct
  source 1..20: mol_type = other DNA
tgtggactggccagatggag

SEQ ID NO: 145359 - DNA, 20 bp, synthetic construct
  source 1..20: mol_type = other DNA
ctgtggactggccagatgga

SEQ ID NO: 145360 - DNA, 20 bp, synthetic construct
  source 1..20: mol_type = other DNA
gctgtggactggccagatgg

SEQ ID NO: 145361 - DNA, 20 bp, synthetic construct
  source 1..20: mol_type = other DNA
tgctgtggactggccagatg

SEQ ID NO: 145362 - DNA, 20 bp, synthetic construct
  source 1..20: mol_type = other DNA
ctgctgtggactggccagat

SEQ ID NO: 145363 - DNA, 20 bp, synthetic construct
  source 1..20: mol_type = other DNA
gctgctgtggactggccaga

SEQ ID NO: 145364 - DNA, 20 bp, synthetic construct
  source 1..20: mol_type = other DNA
tgctgctgtggactggccag

SEQ ID NO: 145365 - DNA, 20 bp, synthetic construct
  source 1..20: mol_type = other DNA
ctgctgctgtggactggcca

SEQ ID NO: 145366 - DNA, 20 bp, synthetic construct
  source 1..20: mol_type = other DNA
actgctgctgtggactggcc

SEQ ID NO: 145367 - DNA, 20 bp, synthetic construct
  source 1..20: mol_type = other DNA
gactgctgctgtggactggc

SEQ ID NO: 145368 - DNA, 20 bp, synthetic construct
  source 1..20: mol_type = other DNA
tgactgctgctgtggactgg

SEQ ID NO: 145369 - DNA, 20 bp, synthetic construct
  source 1..20: mol_type = other DNA
ctgactgctgctgtggactg

SEQ ID NO: 145370 - DNA, 20 bp, synthetic construct
  source 1..20: mol_type = other DNA
gctgactgctgctgtggact

SEQ ID NO: 145371 - DNA, 20 bp, synthetic construct
  source 1..20: mol_type = other DNA
ggctgactgctgctgtggac

SEQ ID NO: 145372 - DNA, 20 bp, synthetic construct
  source 1..20: mol_type = other DNA
tggctgactgctgctgtgga

SEQ ID NO: 145373 - DNA, 20 bp, synthetic construct
  source 1..20: mol_type = other DNA
atggctgactgctgctgtgg

SEQ ID NO: 145374 - DNA, 20 bp, synthetic construct
  source 1..20: mol_type = other DNA
aatggctgactgctgctgtg

SEQ ID NO: 145375 - DNA, 20 bp, synthetic construct
  source 1..20: mol_type = other DNA
aaatggctgactgctgctgt

SEQ ID NO: 145376 - DNA, 20 bp, synthetic construct
  source 1..20: mol_type = other DNA
taaatggctgactgctgctg

SEQ ID NO: 145377 - DNA, 20 bp, synthetic construct
  source 1..20: mol_type = other DNA
gtaaatggctgactgctgct

SEQ ID NO: 145378 - DNA, 20 bp, synthetic construct
  source 1..20: mol_type = other DNA
ggtaaatggctgactgctgc

SEQ ID NO: 145379 - DNA, 20 bp, synthetic construct
  source 1..20: mol_type = other DNA
tggtaaatggctgactgctg

SEQ ID NO: 145380 - DNA, 20 bp, synthetic construct
  source 1..20: mol_type = other DNA
gtggtaaatggctgactgct

SEQ ID NO: 145381 - DNA, 20 bp, synthetic construct
  source 1..20: mol_type = other DNA
cgtggtaaatggctgactgc

SEQ ID NO: 145382 - DNA, 20 bp, synthetic construct
  source 1..20: mol_type = other DNA
gcgtggtaaatggctgactg

SEQ ID NO: 145383 - DNA, 20 bp, synthetic construct
  source 1..20: mol_type = other DNA
cgcgtggtaaatggctgact

SEQ ID NO: 145384 - DNA, 20 bp, synthetic construct
  source 1..20: mol_type = other DNA
ccgcgtggtaaatggctgac

SEQ ID NO: 145385 - DNA, 20 bp, synthetic construct
  source 1..20: mol_type = other DNA
cccgcgtggtaaatggctga

SEQ ID NO: 145386 - DNA, 20 bp, synthetic construct
  source 1..20: mol_type = other DNA
ccccgcgtggtaaatggctg

SEQ ID NO: 145387 - DNA, 20 bp, synthetic construct
  source 1..20: mol_type = other DNA
gccccgcgtggtaaatggct

SEQ ID NO: 145388 - DNA, 20 bp, synthetic construct
  source 1..20: mol_type = other DNA
agccccgcgtggtaaatggc

SEQ ID NO: 145389 - DNA, 20 bp, synthetic construct
  source 1..20: mol_type = other DNA
aagccccgcgtggtaaatgg

SEQ ID NO: 145390 - DNA, 20 bp, synthetic construct
  source 1..20: mol_type = other DNA
caagccccgcgtggtaaatg

SEQ ID NO: 145391 - DNA, 20 bp, synthetic construct
  source 1..20: mol_type = other DNA
gcaagccccgcgtggtaaat

SEQ ID NO: 145392 - DNA, 20 bp, synthetic construct
  source 1..20: mol_type = other DNA
cgcaagccccgcgtggtaaa

SEQ ID NO: 145393 - DNA, 20 bp, synthetic construct
  source 1..20: mol_type = other DNA
gcgcaagccccgcgtggtaa

SEQ ID NO: 145394 - DNA, 20 bp, synthetic construct
  source 1..20: mol_type = other DNA
ggcgcaagccccgcgtggta

SEQ ID NO: 145395 - DNA, 20 bp, synthetic construct
  source 1..20: mol_type = other DNA
tggcgcaagccccgcgtggt

SEQ ID NO: 145396 - DNA, 20 bp, synthetic construct
  source 1..20: mol_type = other DNA
ttggcgcaagccccgcgtgg

SEQ ID NO: 145397 - DNA, 20 bp, synthetic construct
  source 1..20: mol_type = other DNA
gttggcgcaagccccgcgtg

SEQ ID NO: 145398 - DNA, 20 bp, synthetic construct
  source 1..20: mol_type = other DNA
agttggcgcaagccccgcgt

SEQ ID NO: 145399 - DNA, 20 bp, synthetic construct
  source 1..20: mol_type = other DNA
gagttggcgcaagccccgcg

SEQ ID NO: 145400 - DNA, 20 bp, synthetic construct
  source 1..20: mol_type = other DNA
ggagttggcgcaagccccgc

SEQ ID NO: 145401 - DNA, 20 bp, synthetic construct
  source 1..20: mol_type = other DNA
tggagttggcgcaagccccg

SEQ ID NO: 145402 - DNA, 20 bp, synthetic construct
  source 1..20: mol_type = other DNA
gtggagttggcgcaagcccc

SEQ ID NO: 145403 - DNA, 20 bp, synthetic construct
  source 1..20: mol_type = other DNA
ggtggagttggcgcaagccc

SEQ ID NO: 145404 - DNA, 20 bp, synthetic construct
  source 1..20: mol_type = other DNA
gggtggagttggcgcaagcc

SEQ ID NO: 145405 - DNA, 20 bp, synthetic construct
  source 1..20: mol_type = other DNA
agggtggagttggcgcaagc

SEQ ID NO: 145406 - DNA, 20 bp, synthetic construct
  source 1..20: mol_type = other DNA
gagggtggagttggcgcaag

SEQ ID NO: 145407 - DNA, 20 bp, synthetic construct
  source 1..20: mol_type = other DNA
ggagggtggagttggcgcaa

SEQ ID NO: 145408 - DNA, 20 bp, synthetic construct
  source 1..20: mol_type = other DNA
tggagggtggagttggcgca

SEQ ID NO: 145409 - DNA, 20 bp, synthetic construct
  source 1..20: mol_type = other DNA
atggagggtggagttggcgc

SEQ ID NO: 145410 - DNA, 20 bp, synthetic construct
  source 1..20: mol_type = other DNA
catggagggtggagttggcg

SEQ ID NO: 145411 - DNA, 20 bp, synthetic construct
  source 1..20: mol_type = other DNA
tcatggagggtggagttggc

SEQ ID NO: 145412 - DNA, 20 bp, synthetic construct
  source 1..20: mol_type = other DNA
gtcatggagggtggagttgg

SEQ ID NO: 145413 - DNA, 20 bp, synthetic construct
  source 1..20: mol_type = other DNA
tgtcatggagggtggagttg

SEQ ID NO: 145414 - DNA, 20 bp, synthetic construct
  source 1..20: mol_type = other DNA
gtgtcatggagggtggagtt

SEQ ID NO: 145415 - DNA, 20 bp, synthetic construct
  source 1..20: mol_type = other DNA
ggtgtcatggagggtggagt

SEQ ID NO: 145416 - DNA, 20 bp, synthetic construct
  source 1..20: mol_type = other DNA
aggtgtcatggagggtggag

SEQ ID NO: 145417 - DNA, 20 bp, synthetic construct
  source 1..20: mol_type = other DNA
caggtgtcatggagggtgga

SEQ ID NO: 145418 - DNA, 20 bp, synthetic construct
  source 1..20: mol_type = other DNA
gcaggtgtcatggagggtgg

SEQ ID NO: 145419 - DNA, 20 bp, synthetic construct
  source 1..20: mol_type = other DNA
ggcaggtgtcatggagggtg

SEQ ID NO: 145420 - DNA, 20 bp, synthetic construct
  source 1..20: mol_type = other DNA
aggcaggtgtcatggagggt

SEQ ID NO: 145421 - DNA, 20 bp, synthetic construct
  source 1..20: mol_type = other DNA
gaggcaggtgtcatggaggg

SEQ ID NO: 145422 - DNA, 20 bp, synthetic construct
  source 1..20: mol_type = other DNA
ggaggcaggtgtcatggagg

SEQ ID NO: 145423 - DNA, 20 bp, synthetic construct
  source 1..20: mol_type = other DNA
tggaggcaggtgtcatggag

SEQ ID NO: 145424 - DNA, 20 bp, synthetic construct
  source 1..20: mol_type = other DNA
ttggaggcaggtgtcatgga

SEQ ID NO: 145425 - DNA, 20 bp, synthetic construct
  source 1..20: mol_type = other DNA
gttggaggcaggtgtcatgg

SEQ ID NO: 145426 - DNA, 20 bp, synthetic construct
  source 1..20: mol_type = other DNA
tgttggaggcaggtgtcatg

SEQ ID NO: 145427 - DNA, 20 bp, synthetic construct
  source 1..20: mol_type = other DNA
gtgttggaggcaggtgtcat

SEQ ID NO: 145428 - DNA, 20 bp, synthetic construct
  source 1..20: mol_type = other DNA
cgtgttggaggcaggtgtca

SEQ ID NO: 145429 - DNA, 20 bp, synthetic construct
  source 1..20: mol_type = other DNA
gcgtgttggaggcaggtgtc

SEQ ID NO: 145430 - DNA, 20 bp, synthetic construct
  source 1..20: mol_type = other DNA
tgcgtgttggaggcaggtgt

SEQ ID NO: 145431 - DNA, 20 bp, synthetic construct
  source 1..20: mol_type = other DNA
ctgcgtgttggaggcaggtg

SEQ ID NO: 145432 - DNA, 20 bp, synthetic construct
  source 1..20: mol_type = other DNA
actgcgtgttggaggcaggt

SEQ ID NO: 145433 - DNA, 20 bp, synthetic construct
  source 1..20: mol_type = other DNA
gactgcgtgttggaggcagg

SEQ ID NO: 145434 - DNA, 20 bp, synthetic construct
  source 1..20: mol_type = other DNA
cgactgcgtgttggaggcag

SEQ ID NO: 145435 - DNA, 20 bp, synthetic construct
  source 1..20: mol_type = other DNA
gcgactgcgtgttggaggca

SEQ ID NO: 145436 - DNA, 20 bp, synthetic construct
  source 1..20: mol_type = other DNA
ggcgactgcgtgttggaggc

SEQ ID NO: 145437 - DNA, 20 bp, synthetic construct
  source 1..20: mol_type = other DNA
tggcgactgcgtgttggagg

SEQ ID NO: 145438 - DNA, 20 bp, synthetic construct
  source 1..20: mol_type = other DNA
gtggcgactgcgtgttggag

SEQ ID NO: 145439 - DNA, 20 bp, synthetic construct
  source 1..20: mol_type = other DNA
tgtggcgactgcgtgttgga

SEQ ID NO: 145440 - DNA, 20 bp, synthetic construct
  source 1..20: mol_type = other DNA
ctgtggcgactgcgtgttgg

SEQ ID NO: 145441 - DNA, 20 bp, synthetic construct
  source 1..20: mol_type = other DNA
tctgtggcgactgcgtgttg

SEQ ID NO: 145442 - DNA, 20 bp, synthetic construct
  source 1..20: mol_type = other DNA
ttctgtggcgactgcgtgtt

SEQ ID NO: 145443 - DNA, 20 bp, synthetic construct
  source 1..20: mol_type = other DNA
attctgtggcgactgcgtgt

SEQ ID NO: 145444 - DNA, 20 bp, synthetic construct
  source 1..20: mol_type = other DNA
tattctgtggcgactgcgtg

SEQ ID NO: 145445 - DNA, 20 bp, synthetic construct
  source 1..20: mol_type = other DNA
ctattctgtggcgactgcgt

SEQ ID NO: 145446 - DNA, 20 bp, synthetic construct
  source 1..20: mol_type = other DNA
actattctgtggcgactgcg

SEQ ID NO: 145447 - DNA, 20 bp, synthetic construct
  source 1..20: mol_type = other DNA
aactattctgtggcgactgc

SEQ ID NO: 145448 - DNA, 20 bp, synthetic construct
  source 1..20: mol_type = other DNA
aaactattctgtggcgactg

SEQ ID NO: 145449 - DNA, 20 bp, synthetic construct
  source 1..20: mol_type = other DNA
gaaactattctgtggcgact

SEQ ID NO: 145450 - DNA, 20 bp, synthetic construct
  source 1..20: mol_type = other DNA
ggaaactattctgtggcgac

SEQ ID NO: 145451 - DNA, 20 bp, synthetic construct
  source 1..20: mol_type = other DNA
gggaaactattctgtggcga

SEQ ID NO: 145452 - DNA, 20 bp, synthetic construct
  source 1..20: mol_type = other DNA
tgggaaactattctgtggcg

SEQ ID NO: 145453 - DNA, 20 bp, synthetic construct
  source 1..20: mol_type = other DNA
ctgggaaactattctgtggc

SEQ ID NO: 145454 - DNA, 20 bp, synthetic construct
  source 1..20: mol_type = other DNA
gctgggaaactattctgtgg

SEQ ID NO: 145455 - DNA, 20 bp, synthetic construct
  source 1..20: mol_type = other DNA
tgctgggaaactattctgtg

SEQ ID NO: 145456 - DNA, 20 bp, synthetic construct
  source 1..20: mol_type = other DNA
ctgctgggaaactattctgt

SEQ ID NO: 145457 - DNA, 20 bp, synthetic construct
  source 1..20: mol_type = other DNA
gctgctgggaaactattctg

SEQ ID NO: 145458 - DNA, 20 bp, synthetic construct
  source 1..20: mol_type = other DNA
tgctgctgggaaactattct

SEQ ID NO: 145459 - DNA, 20 bp, synthetic construct
  source 1..20: mol_type = other DNA
gtgctgctgggaaactattc

SEQ ID NO: 145460 - DNA, 20 bp, synthetic construct
  source 1..20: mol_type = other DNA
tgtgctgctgggaaactatt

SEQ ID NO: 145461 - DNA, 20 bp, synthetic construct
  source 1..20: mol_type = other DNA
ttgtgctgctgggaaactat

SEQ ID NO: 145462 - DNA, 20 bp, synthetic construct
  source 1..20: mol_type = other DNA
gttgtgctgctgggaaacta

SEQ ID NO: 145463 - DNA, 20 bp, synthetic construct
  source 1..20: mol_type = other DNA
tgttgtgctgctgggaaact

SEQ ID NO: 145464 - DNA, 20 bp, synthetic construct
  source 1..20: mol_type = other DNA
ctgttgtgctgctgggaaac

SEQ ID NO: 145465 - DNA, 20 bp, synthetic construct
  source 1..20: mol_type = other DNA
tctgttgtgctgctgggaaa

SEQ ID NO: 145466 - DNA, 20 bp, synthetic construct
  source 1..20: mol_type = other DNA
gtctgttgtgctgctgggaa

SEQ ID NO: 145467 - DNA, 20 bp, synthetic construct
  source 1..20: mol_type = other DNA
agtctgttgtgctgctggga

SEQ ID NO: 145468 - DNA, 20 bp, synthetic construct
  source 1..20: mol_type = other DNA
cagtctgttgtgctgctggg

SEQ ID NO: 145469 - DNA, 20 bp, synthetic construct
  source 1..20: mol_type = other DNA
acagtctgttgtgctgctgg

SEQ ID NO: 145470 - DNA, 20 bp, synthetic construct
  source 1..20: mol_type = other DNA
gacagtctgttgtgctgctg

SEQ ID NO: 145471 - DNA, 20 bp, synthetic construct
  source 1..20: mol_type = other DNA
agacagtctgttgtgctgct

SEQ ID NO: 145472 - DNA, 20 bp, synthetic construct
  source 1..20: mol_type = other DNA
aagacagtctgttgtgctgc

SEQ ID NO: 145473 - DNA, 20 bp, synthetic construct
  source 1..20: mol_type = other DNA
aaagacagtctgttgtgctg

SEQ ID NO: 145474 - DNA, 20 bp, synthetic construct
  source 1..20: mol_type = other DNA
taaagacagtctgttgtgct

SEQ ID NO: 145475 - DNA, 20 bp, synthetic construct
  source 1..20: mol_type = other DNA
gtaaagacagtctgttgtgc

SEQ ID NO: 145476 - DNA, 20 bp, synthetic construct
  source 1..20: mol_type = other DNA
cgtaaagacagtctgttgtg

SEQ ID NO: 145477 - DNA, 20 bp, synthetic construct
  source 1..20: mol_type = other DNA
tcgtaaagacagtctgttgt

SEQ ID NO: 145478 - DNA, 20 bp, synthetic construct
  source 1..20: mol_type = other DNA
atcgtaaagacagtctgttg

SEQ ID NO: 145479 - DNA, 20 bp, synthetic construct
  source 1..20: mol_type = other DNA
gatcgtaaagacagtctgtt

SEQ ID NO: 145480 - DNA, 20 bp, synthetic construct
  source 1..20: mol_type = other DNA
ggatcgtaaagacagtctgt

SEQ ID NO: 145481 - DNA, 20 bp, synthetic construct
  source 1..20: mol_type = other DNA
tggatcgtaaagacagtctg

SEQ ID NO: 145482 - DNA, 20 bp, synthetic construct
  source 1..20: mol_type = other DNA
atggatcgtaaagacagtct

SEQ ID NO: 145483 - DNA, 20 bp, synthetic construct
  source 1..20: mol_type = other DNA
gatggatcgtaaagacagtc

SEQ ID NO: 145484 - DNA, 20 bp, synthetic construct
  source 1..20: mol_type = other DNA
ggatggatcgtaaagacagt

SEQ ID NO: 145485 - DNA, 20 bp, synthetic construct
  source 1..20: mol_type = other DNA
aggatggatcgtaaagacag

SEQ ID NO: 145486 - DNA, 20 bp, synthetic construct
  source 1..20: mol_type = other DNA
aaggatggatcgtaaagaca

SEQ ID NO: 145487 - DNA, 20 bp, synthetic construct
  source 1..20: mol_type = other DNA
gaaggatggatcgtaaagac

SEQ ID NO: 145488 - DNA, 20 bp, synthetic construct
  source 1..20: mol_type = other DNA
agaaggatggatcgtaaaga

SEQ ID NO: 145489 - DNA, 20 bp, synthetic construct
  source 1..20: mol_type = other DNA
gagaaggatggatcgtaaag

SEQ ID NO: 145490 - DNA, 20 bp, synthetic construct
  source 1..20: mol_type = other DNA
tgagaaggatggatcgtaaa

SEQ ID NO: 145491 - DNA, 20 bp, synthetic construct
  source 1..20: mol_type = other DNA
gtgagaaggatggatcgtaa

SEQ ID NO: 145492 - DNA, 20 bp, synthetic construct
  source 1..20: mol_type = other DNA
cgtgagaaggatggatcgta

SEQ ID NO: 145493 - DNA, 20 bp, synthetic construct
  source 1..20: mol_type = other DNA
acgtgagaaggatggatcgt

SEQ ID NO: 145494 - DNA, 20 bp, synthetic construct
  source 1..20: mol_type = other DNA
aacgtgagaaggatggatcg

SEQ ID NO: 145495 - DNA, 20 bp, synthetic construct
  source 1..20: mol_type = other DNA
gaacgtgagaaggatggatc

SEQ ID NO: 145496 - DNA, 20 bp, synthetic construct
  source 1..20: mol_type = other DNA
tgaacgtgagaaggatggat

SEQ ID NO: 145497 - DNA, 20 bp, synthetic construct
  source 1..20: mol_type = other DNA
ctgaacgtgagaaggatgga

SEQ ID NO: 145498 - DNA, 20 bp, synthetic construct
  source 1..20: mol_type = other DNA
gctgaacgtgagaaggatgg

SEQ ID NO: 145499 - DNA, 20 bp, synthetic construct
  source 1..20: mol_type = other DNA
ggctgaacgtgagaaggatg

SEQ ID NO: 145500 - DNA, 20 bp, synthetic construct
  source 1..20: mol_type = other DNA
cggctgaacgtgagaaggat

SEQ ID NO: 145501 - DNA, 20 bp, synthetic construct
  source 1..20: mol_type = other DNA
ccggctgaacgtgagaagga

SEQ ID NO: 145502 - DNA, 20 bp, synthetic construct
  source 1..20: mol_type = other DNA
gccggctgaacgtgagaagg

SEQ ID NO: 145503 - DNA, 20 bp, synthetic construct
  source 1..20: mol_type = other DNA
cgccggctgaacgtgagaag

SEQ ID NO: 145504 - DNA, 20 bp, synthetic construct
  source 1..20: mol_type = other DNA
acgccggctgaacgtgagaa

SEQ ID NO: 145505 - DNA, 20 bp, synthetic construct
  source 1..20: mol_type = other DNA
tacgccggctgaacgtgaga

SEQ ID NO: 145506 - DNA, 20 bp, synthetic construct
  source 1..20: mol_type = other DNA
atacgccggctgaacgtgag

SEQ ID NO: 145507 - DNA, 20 bp, synthetic construct
  source 1..20: mol_type = other DNA
tatacgccggctgaacgtga

SEQ ID NO: 145508 - DNA, 20 bp, synthetic construct
  source 1..20: mol_type = other DNA
gtatacgccggctgaacgtg

SEQ ID NO: 145509 - DNA, 20 bp, synthetic construct
  source 1..20: mol_type = other DNA
ggtatacgccggctgaacgt

SEQ ID NO: 145510 - DNA, 20 bp, synthetic construct
  source 1..20: mol_type = other DNA
tggtatacgccggctgaacg

SEQ ID NO: 145511 - DNA, 20 bp, synthetic construct
  source 1..20: mol_type = other DNA
ttggtatacgccggctgaac

SEQ ID NO: 145512 - DNA, 20 bp, synthetic construct
  source 1..20: mol_type = other DNA
gttggtatacgccggctgaa

SEQ ID NO: 145513 - DNA, 20 bp, synthetic construct
  source 1..20: mol_type = other DNA
ggttggtatacgccggctga

SEQ ID NO: 145514 - DNA, 20 bp, synthetic construct
  source 1..20: mol_type = other DNA
gggttggtatacgccggctg

SEQ ID NO: 145515 - DNA, 20 bp, synthetic construct
  source 1..20: mol_type = other DNA
tgggttggtatacgccggct

SEQ ID NO: 145516 - DNA, 20 bp, synthetic construct
  source 1..20: mol_type = other DNA
gtgggttggtatacgccggc

SEQ ID NO: 145517 - DNA, 20 bp, synthetic construct
  source 1..20: mol_type = other DNA
ggtgggttggtatacgccgg

SEQ ID NO: 145518 - DNA, 20 bp, synthetic construct
  source 1..20: mol_type = other DNA
gggtgggttggtatacgccg

SEQ ID NO: 145519 - DNA, 20 bp, synthetic construct
  source 1..20: mol_type = other DNA
ggggtgggttggtatacgcc

SEQ ID NO: 145520 - DNA, 20 bp, synthetic construct
  source 1..20: mol_type = other DNA
tggggtgggttggtatacgc

SEQ ID NO: 145521 - DNA, 20 bp, synthetic construct
  source 1..20: mol_type = other DNA
gtggggtgggttggtatacg

SEQ ID NO: 145522 - DNA, 20 bp, synthetic construct
  source 1..20: mol_type = other DNA
tgtggggtgggttggtatac

SEQ ID NO: 145523 - DNA, 20 bp, synthetic construct
  source 1..20: mol_type = other DNA
atgtggggtgggttggtata

SEQ ID NO: 145524 - DNA, 20 bp, synthetic construct
  source 1..20: mol_type = other DNA
catgtggggtgggttggtat

SEQ ID NO: 145525 - DNA, 20 bp, synthetic construct
  source 1..20: mol_type = other DNA
ccatgtggggtgggttggta

SEQ ID NO: 145526 - DNA, 20 bp, synthetic construct
  source 1..20: mol_type = other DNA
gccatgtggggtgggttggt

SEQ ID NO: 145527 - DNA, 20 bp, synthetic construct
  source 1..20: mol_type = other DNA
ggccatgtggggtgggttgg

SEQ ID NO: 145528 - DNA, 20 bp, synthetic construct
  source 1..20: mol_type = other DNA
gggccatgtggggtgggttg

SEQ ID NO: 145529 - DNA, 20 bp, synthetic construct
  source 1..20: mol_type = other DNA
tgggccatgtggggtgggtt

SEQ ID NO: 145530 - DNA, 20 bp, synthetic construct
  source 1..20: mol_type = other DNA
gtgggccatgtggggtgggt

SEQ ID NO: 145531 - DNA, 20 bp, synthetic construct
  source 1..20: mol_type = other DNA
cgtgggccatgtggggtggg

SEQ ID NO: 145532 - DNA, 20 bp, synthetic construct
  source 1..20: mol_type = other DNA
acgtgggccatgtggggtgg

SEQ ID NO: 145533 - DNA, 20 bp, synthetic construct
  source 1..20: mol_type = other DNA
tacgtgggccatgtggggtg

SEQ ID NO: 145534 - DNA, 20 bp, synthetic construct
  source 1..20: mol_type = other DNA
gtacgtgggccatgtggggt

SEQ ID NO: 145535 - DNA, 20 bp, synthetic construct
  source 1..20: mol_type = other DNA
ggtacgtgggccatgtgggg

SEQ ID NO: 145536 - DNA, 20 bp, synthetic construct
  source 1..20: mol_type = other DNA
aggtacgtgggccatgtggg

SEQ ID NO: 145537 - DNA, 20 bp, synthetic construct
  source 1..20: mol_type = other DNA
gaggtacgtgggccatgtgg

SEQ ID NO: 145538 - DNA, 20 bp, synthetic construct
  source 1..20: mol_type = other DNA
tgaggtacgtgggccatgtg

SEQ ID NO: 145539 - DNA, 20 bp, synthetic construct
  source 1..20: mol_type = other DNA
ctgaggtacgtgggccatgt

SEQ ID NO: 145540 - DNA, 20 bp, synthetic construct
  source 1..20: mol_type = other DNA
cctgaggtacgtgggccatg

SEQ ID NO: 145541 - DNA, 20 bp, synthetic construct
  source 1..20: mol_type = other DNA
acctgaggtacgtgggccat

SEQ ID NO: 145542 - DNA, 20 bp, synthetic construct
  source 1..20: mol_type = other DNA
tacctgaggtacgtgggcca

SEQ ID NO: 145543 - DNA, 20 bp, synthetic construct
  source 1..20: mol_type = other DNA
ttacctgaggtacgtgggcc

SEQ ID NO: 145544 - DNA, 20 bp, synthetic construct
  source 1..20: mol_type = other DNA
attacctgaggtacgtgggc

SEQ ID NO: 145545 - DNA, 20 bp, synthetic construct
  source 1..20: mol_type = other DNA
tattacctgaggtacgtggg

SEQ ID NO: 145546 - DNA, 20 bp, synthetic construct
  source 1..20: mol_type = other DNA
gtattacctgaggtacgtgg

SEQ ID NO: 145547 - DNA, 20 bp, synthetic construct
  source 1..20: mol_type = other DNA
ggtattacctgaggtacgtg

SEQ ID NO: 145548 - DNA, 20 bp, synthetic construct
  source 1..20: mol_type = other DNA
tggtattacctgaggtacgt

SEQ ID NO: 145549 - DNA, 20 bp, synthetic construct
  source 1..20: mol_type = other DNA
ctggtattacctgaggtacg

SEQ ID NO: 145550 - DNA, 20 bp, synthetic construct
  source 1..20: mol_type = other DNA
gctggtattacctgaggtac

SEQ ID NO: 145551 - DNA, 20 bp, synthetic construct
  source 1..20: mol_type = other DNA
agctggtattacctgaggta

SEQ ID NO: 145552 - DNA, 20 bp, synthetic construct
  source 1..20: mol_type = other DNA
aagctggtattacctgaggt

SEQ ID NO: 145553 - DNA, 20 bp, synthetic construct
  source 1..20: mol_type = other DNA
aaagctggtattacctgagg

SEQ ID NO: 145554 - DNA, 20 bp, synthetic construct
  source 1..20: mol_type = other DNA
taaagctggtattacctgag

SEQ ID NO: 145555 - DNA, 20 bp, synthetic construct
  source 1..20: mol_type = other DNA
ctaaagctggtattacctga

SEQ ID NO: 145556 - DNA, 20 bp, synthetic construct
  source 1..20: mol_type = other DNA
gctaaagctggtattacctg

SEQ ID NO: 145557 - DNA, 20 bp, synthetic construct
  source 1..20: mol_type = other DNA
ggctaaagctggtattacct

SEQ ID NO: 145558 - DNA, 20 bp, synthetic construct
  source 1..20: mol_type = other DNA
tggctaaagctggtattacc

SEQ ID NO: 145559 - DNA, 20 bp, synthetic construct
  source 1..20: mol_type = other DNA
ttggctaaagctggtattac

SEQ ID NO: 145560 - DNA, 20 bp, synthetic construct
  source 1..20: mol_type = other DNA
gttggctaaagctggtatta

SEQ ID NO: 145561 - DNA, 20 bp, synthetic construct
  source 1..20: mol_type = other DNA
agttggctaaagctggtatt

SEQ ID NO: 145562 - DNA, 20 bp, synthetic construct
  source 1..20: mol_type = other DNA
aagttggctaaagctggtat

SEQ ID NO: 145563 - DNA, 20 bp, synthetic construct
  source 1..20: mol_type = other DNA
aaagttggctaaagctggta

SEQ ID NO: 145564 - DNA, 20 bp, synthetic construct
  source 1..20: mol_type = other DNA
gaaagttggctaaagctggt

SEQ ID NO: 145565 - DNA, 20 bp, synthetic construct
  source 1..20: mol_type = other DNA
agaaagttggctaaagctgg

SEQ ID NO: 145566 - DNA, 20 bp, synthetic construct
  source 1..20: mol_type = other DNA
cagaaagttggctaaagctg

SEQ ID NO: 145567 - DNA, 20 bp, synthetic construct
  source 1..20: mol_type = other DNA
acagaaagttggctaaagct

SEQ ID NO: 145568 - DNA, 20 bp, synthetic construct
  source 1..20: mol_type = other DNA
cacagaaagttggctaaagc

SEQ ID NO: 145569 - DNA, 20 bp, synthetic construct
  source 1..20: mol_type = other DNA
tcacagaaagttggctaaag

SEQ ID NO: 145570 - DNA, 20 bp, synthetic construct
  source 1..20: mol_type = other DNA
ttcacagaaagttggctaaa

SEQ ID NO: 145571 - DNA, 20 bp, synthetic construct
  source 1..20: mol_type = other DNA
cttcacagaaagttggctaa

SEQ ID NO: 145572 - DNA, 20 bp, synthetic construct
  source 1..20: mol_type = other DNA
ccttcacagaaagttggcta

SEQ ID NO: 145573 - DNA, 20 bp, synthetic construct
  source 1..20: mol_type = other DNA
gccttcacagaaagttggct

SEQ ID NO: 145574 - DNA, 20 bp, synthetic construct
  source 1..20: mol_type = other DNA
ggccttcacagaaagttggc

SEQ ID NO: 145575 - DNA, 20 bp, synthetic construct
  source 1..20: mol_type = other DNA
tggccttcacagaaagttgg

SEQ ID NO: 145576 - DNA, 20 bp, synthetic construct
  source 1..20: mol_type = other DNA
ttggccttcacagaaagttg

SEQ ID NO: 145577 - DNA, 20 bp, synthetic construct
  source 1..20: mol_type = other DNA
cttggccttcacagaaagtt

SEQ ID NO: 145578 - DNA, 20 bp, synthetic construct
  source 1..20: mol_type = other DNA
acttggccttcacagaaagt

SEQ ID NO: 145579 - DNA, 20 bp, synthetic construct
  source 1..20: mol_type = other DNA
tacttggccttcacagaaag

SEQ ID NO: 145580 - DNA, 20 bp, synthetic construct
  source 1..20: mol_type = other DNA
ctacttggccttcacagaaa

SEQ ID NO: 145581 - DNA, 20 bp, synthetic construct
  source 1..20: mol_type = other DNA
tctacttggccttcacagaa

SEQ ID NO: 145582 - DNA, 20 bp, synthetic construct
  source 1..20: mol_type = other DNA
ttctacttggccttcacaga

SEQ ID NO: 145583 - DNA, 20 bp, synthetic construct
  source 1..20: mol_type = other DNA
attctacttggccttcacag

SEQ ID NO: 145584 - DNA, 20 bp, synthetic construct
  source 1..20: mol_type = other DNA
cattctacttggccttcaca

SEQ ID NO: 145585 - DNA, 20 bp, synthetic construct
  source 1..20: mol_type = other DNA
acattctacttggccttcac

SEQ ID NO: 145586 - DNA, 20 bp, synthetic construct
  source 1..20: mol_type = other DNA
cacattctacttggccttca

SEQ ID NO: 145587 - DNA, 20 bp, synthetic construct
  source 1..20: mol_type = other DNA
tcacattctacttggccttc

SEQ ID NO: 145588 - DNA, 20 bp, synthetic construct
  source 1..20: mol_type = other DNA
ttcacattctacttggcctt

SEQ ID NO: 145589 - DNA, 20 bp, synthetic construct
  source 1..20: mol_type = other DNA
cttcacattctacttggcct

SEQ ID NO: 145590 - DNA, 20 bp, synthetic construct
  source 1..20: mol_type = other DNA
ccttcacattctacttggcc

SEQ ID NO: 145591 - DNA, 20 bp, synthetic construct
  source 1..20: mol_type = other DNA
accttcacattctacttggc

SEQ ID NO: 145592 - DNA, 20 bp, synthetic construct
  source 1..20: mol_type = other DNA
aaccttcacattctacttgg

SEQ ID NO: 145593 - DNA, 20 bp, synthetic construct
  source 1..20: mol_type = other DNA
taaccttcacattctacttg

SEQ ID NO: 145594 - DNA, 20 bp, synthetic construct
  source 1..20: mol_type = other DNA
ataaccttcacattctactt

SEQ ID NO: 145595 - DNA, 20 bp, synthetic construct
  source 1..20: mol_type = other DNA
gataaccttcacattctact

SEQ ID NO: 145596 - DNA, 20 bp, synthetic construct
  source 1..20: mol_type = other DNA
tgataaccttcacattctac

SEQ ID NO: 145597 - DNA, 20 bp, synthetic construct
  source 1..20: mol_type = other DNA
ctgataaccttcacattcta

SEQ ID NO: 145598 - DNA, 20 bp, synthetic construct
  source 1..20: mol_type = other DNA
actgataaccttcacattct

SEQ ID NO: 145599 - DNA, 20 bp, synthetic construct
  source 1..20: mol_type = other DNA
tactgataaccttcacattc

SEQ ID NO: 145600 - DNA, 20 bp, synthetic construct
  source 1..20: mol_type = other DNA
ttactgataaccttcacatt

SEQ ID NO: 145601 - DNA, 20 bp, synthetic construct
  source 1..20: mol_type = other DNA
cttactgataaccttcacat

SEQ ID NO: 145602 - DNA, 20 bp, synthetic construct
  source 1..20: mol_type = other DNA
gcttactgataaccttcaca

SEQ ID NO: 145603 - DNA, 20 bp, synthetic construct
  source 1..20: mol_type = other DNA
tgcttactgataaccttcac

SEQ ID NO: 145604 - DNA, 20 bp, synthetic construct
  source 1..20: mol_type = other DNA
ctgcttactgataaccttca

SEQ ID NO: 145605 - DNA, 20 bp, synthetic construct
  source 1..20: mol_type = other DNA
gctgcttactgataaccttc

SEQ ID NO: 145606 - DNA, 20 bp, synthetic construct
  source 1..20: mol_type = other DNA
agctgcttactgataacctt

SEQ ID NO: 145607 - DNA, 20 bp, synthetic construct
  source 1..20: mol_type = other DNA
tagctgcttactgataacct

SEQ ID NO: 145608 - DNA, 20 bp, synthetic construct
  source 1..20: mol_type = other DNA
ctagctgcttactgataacc

SEQ ID NO: 145609 - DNA, 20 bp, synthetic construct
  source 1..20: mol_type = other DNA
tctagctgcttactgataac

SEQ ID NO: 145610 - DNA, 20 bp, synthetic construct
  source 1..20: mol_type = other DNA
ctctagctgcttactgataa

SEQ ID NO: 145611 - DNA, 20 bp, synthetic construct
  source 1..20: mol_type = other DNA
cctctagctgcttactgata

SEQ ID NO: 145612 - DNA, 20 bp, synthetic construct
  source 1..20: mol_type = other DNA
gcctctagctgcttactgat

SEQ ID NO: 145613 - DNA, 20 bp, synthetic construct
  source 1..20: mol_type = other DNA
agcctctagctgcttactga

SEQ ID NO: 145614 - DNA, 20 bp, synthetic construct
  source 1..20: mol_type = other DNA
gagcctctagctgcttactg

SEQ ID NO: 145615 - DNA, 20 bp, synthetic construct
  source 1..20: mol_type = other DNA
agagcctctagctgcttact

SEQ ID NO: 145616 - DNA, 20 bp, synthetic construct
  source 1..20: mol_type = other DNA
gagagcctctagctgcttac

SEQ ID NO: 145617 - DNA, 20 bp, synthetic construct
  source 1..20: mol_type = other DNA
ggagagcctctagctgctta

SEQ ID NO: 145618 - DNA, 20 bp, synthetic construct
  source 1..20: mol_type = other DNA
gggagagcctctagctgctt

SEQ ID NO: 145619 - DNA, 20 bp, synthetic construct
  source 1..20: mol_type = other DNA
tgggagagcctctagctgct

SEQ ID NO: 145620 - DNA, 20 bp, synthetic construct
  source 1..20: mol_type = other DNA
ctgggagagcctctagctgc

SEQ ID NO: 145621 - DNA, 20 bp, synthetic construct
  source 1..20: mol_type = other DNA
gctgggagagcctctagctg

SEQ ID NO: 145622 - DNA, 20 bp, synthetic construct
  source 1..20: mol_type = other DNA
agctgggagagcctctagct

SEQ ID NO: 145623 - DNA, 20 bp, synthetic construct
  source 1..20: mol_type = other DNA
tagctgggagagcctctagc

SEQ ID NO: 145624 - DNA, 20 bp, synthetic construct
  source 1..20: mol_type = other DNA
ctagctgggagagcctctag

SEQ ID NO: 145625 - DNA, 20 bp, synthetic construct
  source 1..20: mol_type = other DNA
cctagctgggagagcctcta

SEQ ID NO: 145626 - DNA, 20 bp, synthetic construct
  source 1..20: mol_type = other DNA
tcctagctgggagagcctct

SEQ ID NO: 145627 - DNA, 20 bp, synthetic construct
  source 1..20: mol_type = other DNA
ttcctagctgggagagcctc

SEQ ID NO: 145628 - DNA, 20 bp, synthetic construct
  source 1..20: mol_type = other DNA
tttcctagctgggagagcct

SEQ ID NO: 145629 - DNA, 20 bp, synthetic construct
  source 1..20: mol_type = other DNA
gtttcctagctgggagagcc

SEQ ID NO: 145630 - DNA, 20 bp, synthetic construct
  source 1..20: mol_type = other DNA
ggtttcctagctgggagagc

SEQ ID NO: 145631 - DNA, 20 bp, synthetic construct
  source 1..20: mol_type = other DNA
gggtttcctagctgggagag

SEQ ID NO: 145632 - DNA, 20 bp, synthetic construct
  source 1..20: mol_type = other DNA
agggtttcctagctgggaga

SEQ ID NO: 145633 - DNA, 20 bp, synthetic construct
  source 1..20: mol_type = other DNA
cagggtttcctagctgggag

SEQ ID NO: 145634 - DNA, 20 bp, synthetic construct
  source 1..20: mol_type = other DNA
acagggtttcctagctggga

SEQ ID NO: 145635 - DNA, 20 bp, synthetic construct
  source 1..20: mol_type = other DNA
cacagggtttcctagctggg

SEQ ID NO: 145636 - DNA, 20 bp, synthetic construct
  source 1..20: mol_type = other DNA
acacagggtttcctagctgg

SEQ ID NO: 145637 - DNA, 20 bp, synthetic construct
  source 1..20: mol_type = other DNA
cacacagggtttcctagctg

SEQ ID NO: 145638 - DNA, 20 bp, synthetic construct
  source 1..20: mol_type = other DNA
acacacagggtttcctagct

SEQ ID NO: 145639 - DNA, 20 bp, synthetic construct
  source 1..20: mol_type = other DNA
gacacacagggtttcctagc

SEQ ID NO: 145640 - DNA, 20 bp, synthetic construct
  source 1..20: mol_type = other DNA
tgacacacagggtttcctag

SEQ ID NO: 145641 - DNA, 20 bp, synthetic construct
  source 1..20: mol_type = other DNA
atgacacacagggtttccta

SEQ ID NO: 145642 - DNA, 20 bp, synthetic construct
  source 1..20: mol_type = other DNA
catgacacacagggtttcct

SEQ ID NO: 145643 - DNA, 20 bp, synthetic construct
  source 1..20: mol_type = other DNA
gcatgacacacagggtttcc

SEQ ID NO: 145644 - DNA, 20 bp, synthetic construct
  source 1..20: mol_type = other DNA
ggcatgacacacagggtttc

SEQ ID NO: 145645 - DNA, 20 bp, synthetic construct
  source 1..20: mol_type = other DNA
tggcatgacacacagggttt

SEQ ID NO: 145646 - DNA, 20 bp, synthetic construct
  source 1..20: mol_type = other DNA
atggcatgacacacagggtt

SEQ ID NO: 145647 - DNA, 20 bp, synthetic construct
  source 1..20: mol_type = other DNA
aatggcatgacacacagggt

SEQ ID NO: 145648 - DNA, 20 bp, synthetic construct
  source 1..20: mol_type = other DNA
aaatggcatgacacacaggg

SEQ ID NO: 145649 - DNA, 20 bp, synthetic construct
  source 1..20: mol_type = other DNA
caaatggcatgacacacagg

SEQ ID NO: 145650 - DNA, 20 bp, synthetic construct
  source 1..20: mol_type = other DNA
gcaaatggcatgacacacag

SEQ ID NO: 145651 - DNA, 20 bp, synthetic construct
  source 1..20: mol_type = other DNA
ggcaaatggcatgacacaca

SEQ ID NO: 145652 - DNA, 20 bp, synthetic construct
  source 1..20: mol_type = other DNA
aggcaaatggcatgacacac

SEQ ID NO: 145653 - DNA, 20 bp, synthetic construct
  source 1..20: mol_type = other DNA
caggcaaatggcatgacaca

SEQ ID NO: 145654 - DNA, 20 bp, synthetic construct
  source 1..20: mol_type = other DNA
acaggcaaatggcatgacac

SEQ ID NO: 145655 - DNA, 20 bp, synthetic construct
  source 1..20: mol_type = other DNA
gacaggcaaatggcatgaca

SEQ ID NO: 145656 - DNA, 20 bp, synthetic construct
  source 1..20: mol_type = other DNA
agacaggcaaatggcatgac

SEQ ID NO: 145657 - DNA, 20 bp, synthetic construct
  source 1..20: mol_type = other DNA
gagacaggcaaatggcatga

SEQ ID NO: 145658 - DNA, 20 bp, synthetic construct
  source 1..20: mol_type = other DNA
ggagacaggcaaatggcatg

SEQ ID NO: 145659 - DNA, 20 bp, synthetic construct
  source 1..20: mol_type = other DNA
gggagacaggcaaatggcat

SEQ ID NO: 145660 - DNA, 20 bp, synthetic construct
  source 1..20: mol_type = other DNA
agggagacaggcaaatggca

SEQ ID NO: 145661 - DNA, 20 bp, synthetic construct
  source 1..20: mol_type = other DNA
aagggagacaggcaaatggc

SEQ ID NO: 145662 - DNA, 20 bp, synthetic construct
  source 1..20: mol_type = other DNA
aaagggagacaggcaaatgg

SEQ ID NO: 145663 - DNA, 20 bp, synthetic construct
  source 1..20: mol_type = other DNA
gaaagggagacaggcaaatg

SEQ ID NO: 145664 - DNA, 20 bp, synthetic construct
  source 1..20: mol_type = other DNA
ggaaagggagacaggcaaat

SEQ ID NO: 145665 - DNA, 20 bp, synthetic construct
  source 1..20: mol_type = other DNA
gggaaagggagacaggcaaa

SEQ ID NO: 145666 - DNA, 20 bp, synthetic construct
  source 1..20: mol_type = other DNA
agggaaagggagacaggcaa

SEQ ID NO: 145667 - DNA, 20 bp, synthetic construct
  source 1..20: mol_type = other DNA
gagggaaagggagacaggca

SEQ ID NO: 145668 - DNA, 20 bp, synthetic construct
  source 1..20: mol_type = other DNA
agagggaaagggagacaggc

SEQ ID NO: 145669 - DNA, 20 bp, synthetic construct
  source 1..20: mol_type = other DNA
gagagggaaagggagacagg

SEQ ID NO: 145670 - DNA, 20 bp, synthetic construct
  source 1..20: mol_type = other DNA
tgagagggaaagggagacag

SEQ ID NO: 145671 - DNA, 20 bp, synthetic construct
  source 1..20: mol_type = other DNA
ttgagagggaaagggagaca

SEQ ID NO: 145672 - DNA, 20 bp, synthetic construct
  source 1..20: mol_type = other DNA
tttgagagggaaagggagac

SEQ ID NO: 145673 - DNA, 20 bp, synthetic construct
  source 1..20: mol_type = other DNA
atttgagagggaaagggaga

SEQ ID NO: 145674 - DNA, 20 bp, synthetic construct
  source 1..20: mol_type = other DNA
tatttgagagggaaagggag

SEQ ID NO: 145675 - DNA, 20 bp, synthetic construct
  source 1..20: mol_type = other DNA
gtatttgagagggaaaggga

SEQ ID NO: 145676 - DNA, 20 bp, synthetic construct
  source 1..20: mol_type = other DNA
tgtatttgagagggaaaggg

SEQ ID NO: 145677 - DNA, 20 bp, synthetic construct
  source 1..20: mol_type = other DNA
gtgtatttgagagggaaagg

SEQ ID NO: 145678 - DNA, 20 bp, synthetic construct
  source 1..20: mol_type = other DNA
cgtgtatttgagagggaaag

SEQ ID NO: 145679 - DNA, 20 bp, synthetic construct
  source 1..20: mol_type = other DNA
acgtgtatttgagagggaaa

SEQ ID NO: 145680 - DNA, 20 bp, synthetic construct
  source 1..20: mol_type = other DNA
cacgtgtatttgagagggaa

SEQ ID NO: 145681 - DNA, 20 bp, synthetic construct
  source 1..20: mol_type = other DNA
tcacgtgtatttgagaggga

SEQ ID NO: 145682 - DNA, 20 bp, synthetic construct
  source 1..20: mol_type = other DNA
atcacgtgtatttgagaggg

SEQ ID NO: 145683 - DNA, 20 bp, synthetic construct
  source 1..20: mol_type = other DNA
gatcacgtgtatttgagagg

SEQ ID NO: 145684 - DNA, 20 bp, synthetic construct
  source 1..20: mol_type = other DNA
agatcacgtgtatttgagag

SEQ ID NO: 145685 - DNA, 20 bp, synthetic construct
  source 1..20: mol_type = other DNA
cagatcacgtgtatttgaga

SEQ ID NO: 145686 - DNA, 20 bp, synthetic construct
  source 1..20: mol_type = other DNA
ccagatcacgtgtatttgag

SEQ ID NO: 145687 - DNA, 20 bp, synthetic construct
  source 1..20: mol_type = other DNA
gccagatcacgtgtatttga

SEQ ID NO: 145688 - DNA, 20 bp, synthetic construct
  source 1..20: mol_type = other DNA
ggccagatcacgtgtatttg

SEQ ID NO: 145689 - DNA, 20 bp, synthetic construct
  source 1..20: mol_type = other DNA
gggccagatcacgtgtattt

SEQ ID NO: 145690 - DNA, 20 bp, synthetic construct
  source 1..20: mol_type = other DNA
agggccagatcacgtgtatt

SEQ ID NO: 145691 - DNA, 20 bp, synthetic construct
  source 1..20: mol_type = other DNA
tagggccagatcacgtgtat

SEQ ID NO: 145692 - DNA, 20 bp, synthetic construct
  source 1..20: mol_type = other DNA
ttagggccagatcacgtgta

SEQ ID NO: 145693 - DNA, 20 bp, synthetic construct
  source 1..20: mol_type = other DNA
cttagggccagatcacgtgt

SEQ ID NO: 145694 - DNA, 20 bp, synthetic construct
  source 1..20: mol_type = other DNA
ccttagggccagatcacgtg

SEQ ID NO: 145695 - DNA, 20 bp, synthetic construct
  source 1..20: mol_type = other DNA
cccttagggccagatcacgt

SEQ ID NO: 145696 - DNA, 20 bp, synthetic construct
  source 1..20: mol_type = other DNA
tcccttagggccagatcacg

SEQ ID NO: 145697 - DNA, 20 bp, synthetic construct
  source 1..20: mol_type = other DNA
ttcccttagggccagatcac

SEQ ID NO: 145698 - DNA, 20 bp, synthetic construct
  source 1..20: mol_type = other DNA
attcccttagggccagatca

SEQ ID NO: 145699 - DNA, 20 bp, synthetic construct
  source 1..20: mol_type = other DNA
cattcccttagggccagatc

SEQ ID NO: 145700 - DNA, 20 bp, synthetic construct
  source 1..20: mol_type = other DNA
acattcccttagggccagat

SEQ ID NO: 145701 - DNA, 20 bp, synthetic construct
  source 1..20: mol_type = other DNA
aacattcccttagggccaga

SEQ ID NO: 145702 - DNA, 20 bp, synthetic construct
  source 1..20: mol_type = other DNA
aaacattcccttagggccag

SEQ ID NO: 145703 - DNA, 20 bp, synthetic construct
  source 1..20: mol_type = other DNA
caaacattcccttagggcca

SEQ ID NO: 145704 - DNA, 20 bp, synthetic construct
  source 1..20: mol_type = other DNA
acaaacattcccttagggcc

SEQ ID NO: 145705 - DNA, 20 bp, synthetic construct
  source 1..20: mol_type = other DNA
cacaaacattcccttagggc

SEQ ID NO: 145706 - DNA, 20 bp, synthetic construct
  source 1..20: mol_type = other DNA
acacaaacattcccttaggg

SEQ ID NO: 145707 - DNA, 20 bp, synthetic construct
  source 1..20: mol_type = other DNA
cacacaaacattcccttagg

SEQ ID NO: 145708 - DNA, 20 bp, synthetic construct
  source 1..20: mol_type = other DNA
ccacacaaacattcccttag

SEQ ID NO: 145709 - DNA, 20 bp, synthetic construct
  source 1..20: mol_type = other DNA
accacacaaacattccctta

SEQ ID NO: 145710 - DNA, 20 bp, synthetic construct
  source 1..20: mol_type = other DNA
aaccacacaaacattccctt

SEQ ID NO: 145711 - DNA, 20 bp, synthetic construct
  source 1..20: mol_type = other DNA
aaaccacacaaacattccct

SEQ ID NO: 145712 - DNA, 20 bp, synthetic construct
  source 1..20: mol_type = other DNA
aaaaccacacaaacattccc

SEQ ID NO: 145713 - DNA, 20 bp, synthetic construct
  source 1..20: mol_type = other DNA
caaaaccacacaaacattcc

SEQ ID NO: 145714 - DNA, 20 bp, synthetic construct
  source 1..20: mol_type = other DNA
acaaaaccacacaaacattc

SEQ ID NO: 145715 - DNA, 20 bp, synthetic construct
  source 1..20: mol_type = other DNA
gacaaaaccacacaaacatt

SEQ ID NO: 145716 - DNA, 20 bp, synthetic construct
  source 1..20: mol_type = other DNA
tgacaaaaccacacaaacat

SEQ ID NO: 145717 - DNA, 20 bp, synthetic construct
  source 1..20: mol_type = other DNA
atgacaaaaccacacaaaca

SEQ ID NO: 145718 - DNA, 20 bp, synthetic construct
  source 1..20: mol_type = other DNA
catgacaaaaccacacaaac

SEQ ID NO: 145719 - DNA, 20 bp, synthetic construct
  source 1..20: mol_type = other DNA
ccatgacaaaaccacacaaa

SEQ ID NO: 145720 - DNA, 20 bp, synthetic construct
  source 1..20: mol_type = other DNA
cccatgacaaaaccacacaa

SEQ ID NO: 145721 - DNA, 20 bp, synthetic construct
  source 1..20: mol_type = other DNA
tcccatgacaaaaccacaca

SEQ ID NO: 145722 - DNA, 20 bp, synthetic construct
  source 1..20: mol_type = other DNA
atcccatgacaaaaccacac

SEQ ID NO: 145723 - DNA, 20 bp, synthetic construct
  source 1..20: mol_type = other DNA
gatcccatgacaaaaccaca

SEQ ID NO: 145724 - DNA, 20 bp, synthetic construct
  source 1..20: mol_type = other DNA
tgatcccatgacaaaaccac

SEQ ID NO: 145725 - DNA, 20 bp, synthetic construct
  source 1..20: mol_type = other DNA
ctgatcccatgacaaaacca

SEQ ID NO: 145726 - DNA, 20 bp, synthetic construct
  source 1..20: mol_type = other DNA
actgatcccatgacaaaacc

SEQ ID NO: 145727 - DNA, 20 bp, synthetic construct
  source 1..20: mol_type = other DNA
cactgatcccatgacaaaac

SEQ ID NO: 145728 - DNA, 20 bp, synthetic construct
  source 1..20: mol_type = other DNA
tcactgatcccatgacaaaa

SEQ ID NO: 145729 - DNA, 20 bp, synthetic construct
  source 1..20: mol_type = other DNA
ttcactgatcccatgacaaa

SEQ ID NO: 145730 - DNA, 20 bp, synthetic construct
  source 1..20: mol_type = other DNA
cttcactgatcccatgacaa

SEQ ID NO: 145731 - DNA, 20 bp, synthetic construct
  source 1..20: mol_type = other DNA
ccttcactgatcccatgaca

SEQ ID NO: 145732 - DNA, 20 bp, synthetic construct
  source 1..20: mol_type = other DNA
accttcactgatcccatgac

SEQ ID NO: 145733 - DNA, 20 bp, synthetic construct
  source 1..20: mol_type = other DNA
caccttcactgatcccatga

SEQ ID NO: 145734 - DNA, 20 bp, synthetic construct
  source 1..20: mol_type = other DNA
gcaccttcactgatcccatg

SEQ ID NO: 145735 - DNA, 20 bp, synthetic construct
  source 1..20: mol_type = other DNA
agcaccttcactgatcccat

SEQ ID NO: 145736 - DNA, 20 bp, synthetic construct
  source 1..20: mol_type = other DNA
cagcaccttcactgatccca

SEQ ID NO: 145737 - DNA, 20 bp, synthetic construct
  source 1..20: mol_type = other DNA
tcagcaccttcactgatccc

SEQ ID NO: 145738 - DNA, 20 bp, synthetic construct
  source 1..20: mol_type = other DNA
atcagcaccttcactgatcc

SEQ ID NO: 145739 - DNA, 20 bp, synthetic construct
  source 1..20: mol_type = other DNA
aatcagcaccttcactgatc

SEQ ID NO: 145740 - DNA, 20 bp, synthetic construct
  source 1..20: mol_type = other DNA
caatcagcaccttcactgat

SEQ ID NO: 145741 - DNA, 20 bp, synthetic construct
  source 1..20: mol_type = other DNA
ccaatcagcaccttcactga

SEQ ID NO: 145742 - DNA, 20 bp, synthetic construct
  source 1..20: mol_type = other DNA
accaatcagcaccttcactg

SEQ ID NO: 145743 - DNA, 20 bp, synthetic construct
  source 1..20: mol_type = other DNA
gaccaatcagcaccttcact

SEQ ID NO: 145744 - DNA, 20 bp, synthetic construct
  source 1..20: mol_type = other DNA
tgaccaatcagcaccttcac

SEQ ID NO: 145745 - DNA, 20 bp, synthetic construct
  source 1..20: mol_type = other DNA
ctgaccaatcagcaccttca

SEQ ID NO: 145746 - DNA, 20 bp, synthetic construct
  source 1..20: mol_type = other DNA
actgaccaatcagcaccttc

SEQ ID NO: 145747 - DNA, 20 bp, synthetic construct
  source 1..20: mol_type = other DNA
gactgaccaatcagcacctt

SEQ ID NO: 145748 - DNA, 20 bp, synthetic construct
  source 1..20: mol_type = other DNA
ggactgaccaatcagcacct

SEQ ID NO: 145749 - DNA, 20 bp, synthetic construct
  source 1..20: mol_type = other DNA
aggactgaccaatcagcacc

SEQ ID NO: 145750 - DNA, 20 bp, synthetic construct
  source 1..20: mol_type = other DNA
aaggactgaccaatcagcac

SEQ ID NO: 145751 - DNA, 20 bp, synthetic construct
  source 1..20: mol_type = other DNA
aaaggactgaccaatcagca

SEQ ID NO: 145752 - DNA, 20 bp, synthetic construct
  source 1..20: mol_type = other DNA
taaaggactgaccaatcagc

SEQ ID NO: 145753 - DNA, 20 bp, synthetic construct
  source 1..20: mol_type = other DNA
ctaaaggactgaccaatcag

SEQ ID NO: 145754 - DNA, 20 bp, synthetic construct
  source 1..20: mol_type = other DNA
actaaaggactgaccaatca

SEQ ID NO: 145755 - DNA, 20 bp, synthetic construct
  source 1..20: mol_type = other DNA
aactaaaggactgaccaatc

SEQ ID NO: 145756 - DNA, 20 bp, synthetic construct
  source 1..20: mol_type = other DNA
aaactaaaggactgaccaat

SEQ ID NO: 145757 - DNA, 20 bp, synthetic construct
  source 1..20: mol_type = other DNA
aaaactaaaggactgaccaa

SEQ ID NO: 145758 - DNA, 20 bp, synthetic construct
  source 1..20: mol_type = other DNA
gaaaactaaaggactgacca

SEQ ID NO: 145759 - DNA, 20 bp, synthetic construct
  source 1..20: mol_type = other DNA
ggaaaactaaaggactgacc

SEQ ID NO: 145760 - DNA, 20 bp, synthetic construct
  source 1..20: mol_type = other DNA
tggaaaactaaaggactgac

SEQ ID NO: 145761 - DNA, 20 bp, synthetic construct
  source 1..20: mol_type = other DNA
ttggaaaactaaaggactga

SEQ ID NO: 145762 - DNA, 20 bp, synthetic construct
  source 1..20: mol_type = other DNA
gttggaaaactaaaggactg

SEQ ID NO: 145763 - DNA, 20 bp, synthetic construct
  source 1..20: mol_type = other DNA
agttggaaaactaaaggact

SEQ ID NO: 145764 - DNA, 20 bp, synthetic construct
  source 1..20: mol_type = other DNA
cagttggaaaactaaaggac

SEQ ID NO: 145765 - DNA, 20 bp, synthetic construct
  source 1..20: mol_type = other DNA
tcagttggaaaactaaagga

SEQ ID NO: 145766 - DNA, 20 bp, synthetic construct
  source 1..20: mol_type = other DNA
ctcagttggaaaactaaagg

SEQ ID NO: 145767 - DNA, 20 bp, synthetic construct
  source 1..20: mol_type = other DNA
tctcagttggaaaactaaag

SEQ ID NO: 145768 - DNA, 20 bp, synthetic construct
  source 1..20: mol_type = other DNA
gtctcagttggaaaactaaa

SEQ ID NO: 145769 - DNA, 20 bp, synthetic construct
  source 1..20: mol_type = other DNA
ggtctcagttggaaaactaa

SEQ ID NO: 145770 - DNA, 20 bp, synthetic construct
  source 1..20: mol_type = other DNA
aggtctcagttggaaaacta

SEQ ID NO: 145771 - DNA, 20 bp, synthetic construct
  source 1..20: mol_type = other DNA
aaggtctcagttggaaaact

SEQ ID NO: 145772 - DNA, 20 bp, synthetic construct
  source 1..20: mol_type = other DNA
taaggtctcagttggaaaac

SEQ ID NO: 145773 - DNA, 20 bp, synthetic construct
  source 1..20: mol_type = other DNA
ttaaggtctcagttggaaaa

SEQ ID NO: 145774 - DNA, 20 bp, synthetic construct
  source 1..20: mol_type = other DNA
tttaaggtctcagttggaaa

SEQ ID NO: 145775 - DNA, 20 bp, synthetic construct
  source 1..20: mol_type = other DNA
ttttaaggtctcagttggaa

SEQ ID NO: 145776 - DNA, 20 bp, synthetic construct
  source 1..20: mol_type = other DNA
tttttaaggtctcagttgga

SEQ ID NO: 145777 - DNA, 20 bp, synthetic construct
  source 1..20: mol_type = other DNA
atttttaaggtctcagttgg

SEQ ID NO: 145778 - DNA, 20 bp, synthetic construct
  source 1..20: mol_type = other DNA
tatttttaaggtctcagttg

SEQ ID NO: 145779 - DNA, 20 bp, synthetic construct
  source 1..20: mol_type = other DNA
atatttttaaggtctcagtt

SEQ ID NO: 145780 - DNA, 20 bp, synthetic construct
  source 1..20: mol_type = other DNA
gatatttttaaggtctcagt

SEQ ID NO: 145781 - DNA, 20 bp, synthetic construct
  source 1..20: mol_type = other DNA
agatatttttaaggtctcag

SEQ ID NO: 145782 - DNA, 20 bp, synthetic construct
  source 1..20: mol_type = other DNA
aagatatttttaaggtctca

SEQ ID NO: 145783 - DNA, 20 bp, synthetic construct
  source 1..20: mol_type = other DNA
aaagatatttttaaggtctc

SEQ ID NO: 145784 - DNA, 20 bp, synthetic construct
  source 1..20: mol_type = other DNA
caaagatatttttaaggtct

SEQ ID NO: 145785 - DNA, 20 bp, synthetic construct
  source 1..20: mol_type = other DNA
tcaaagatatttttaaggtc

SEQ ID NO: 145786 - DNA, 20 bp, synthetic construct
  source 1..20: mol_type = other DNA
gtcaaagatatttttaaggt

SEQ ID NO: 145787 - DNA, 20 bp, synthetic construct
  source 1..20: mol_type = other DNA
agtcaaagatatttttaagg

SEQ ID NO: 145788 - DNA, 20 bp, synthetic construct
  source 1..20: mol_type = other DNA
gagtcaaagatatttttaag

SEQ ID NO: 145789 - DNA, 20 bp, synthetic construct
  source 1..20: mol_type = other DNA
agagtcaaagatatttttaa

SEQ ID NO: 145790 - DNA, 20 bp, synthetic construct
  source 1..20: mol_type = other DNA
cagagtcaaagatattttta

SEQ ID NO: 145791 - DNA, 20 bp, synthetic construct
  source 1..20: mol_type = other DNA
ccagagtcaaagatattttt

SEQ ID NO: 145792 - DNA, 20 bp, synthetic construct
  source 1..20: mol_type = other DNA
tccagagtcaaagatatttt

SEQ ID NO: 145793 - DNA, 20 bp, synthetic construct
  source 1..20: mol_type = other DNA
ttccagagtcaaagatattt

SEQ ID NO: 145794 - DNA, 20 bp, synthetic construct
  source 1..20: mol_type = other DNA
attccagagtcaaagatatt

SEQ ID NO: 145795 - DNA, 20 bp, synthetic construct
  source 1..20: mol_type = other DNA
cattccagagtcaaagatat

SEQ ID NO: 145796 - DNA, 20 bp, synthetic construct
  source 1..20: mol_type = other DNA
gcattccagagtcaaagata

SEQ ID NO: 145797 - DNA, 20 bp, synthetic construct
  source 1..20: mol_type = other DNA
tgcattccagagtcaaagat

SEQ ID NO: 145798 - DNA, 20 bp, synthetic construct
  source 1..20: mol_type = other DNA
ttgcattccagagtcaaaga

SEQ ID NO: 145799 - DNA, 20 bp, synthetic construct
  source 1..20: mol_type = other DNA
gttgcattccagagtcaaag

SEQ ID NO: 145800 - DNA, 20 bp, synthetic construct
  source 1..20: mol_type = other DNA
ggttgcattccagagtcaaa

SEQ ID NO: 145801 - DNA, 20 bp, synthetic construct
  source 1..20: mol_type = other DNA
gggttgcattccagagtcaa

SEQ ID NO: 145802 - DNA, 20 bp, synthetic construct
  source 1..20: mol_type = other DNA
tgggttgcattccagagtca

SEQ ID NO: 145803 - DNA, 20 bp, synthetic construct
  source 1..20: mol_type = other DNA
ctgggttgcattccagagtc

SEQ ID NO: 145804 - DNA, 20 bp, synthetic construct
  source 1..20: mol_type = other DNA
actgggttgcattccagagt

SEQ ID NO: 145805 - DNA, 20 bp, synthetic construct
  source 1..20: mol_type = other DNA
gactgggttgcattccagag

SEQ ID NO: 145806 - DNA, 20 bp, synthetic construct
  source 1..20: mol_type = other DNA
ggactgggttgcattccaga

SEQ ID NO: 145807 - DNA, 20 bp, synthetic construct
  source 1..20: mol_type = other DNA
aggactgggttgcattccag

SEQ ID NO: 145808 - DNA, 20 bp, synthetic construct
  source 1..20: mol_type = other DNA
aaggactgggttgcattcca

SEQ ID NO: 145809 - DNA, 20 bp, synthetic construct
  source 1..20: mol_type = other DNA
gaaggactgggttgcattcc

SEQ ID NO: 145810 - DNA, 20 bp, synthetic construct
  source 1..20: mol_type = other DNA
agaaggactgggttgcattc

SEQ ID NO: 145811 - DNA, 20 bp, synthetic construct
  source 1..20: mol_type = other DNA
aagaaggactgggttgcatt

SEQ ID NO: 145812 - DNA, 20 bp, synthetic construct
  source 1..20: mol_type = other DNA
aaagaaggactgggttgcat

SEQ ID NO: 145813 - DNA, 20 bp, synthetic construct
  source 1..20: mol_type = other DNA
gaaagaaggactgggttgca

SEQ ID NO: 145814 - DNA, 20 bp, synthetic construct
  source 1..20: mol_type = other DNA
ggaaagaaggactgggttgc

SEQ ID NO: 145815 - DNA, 20 bp, synthetic construct
  source 1..20: mol_type = other DNA
aggaaagaaggactgggttg

SEQ ID NO: 145816 - DNA, 20 bp, synthetic construct
  source 1..20: mol_type = other DNA
aaggaaagaaggactgggtt

SEQ ID NO: 145817 - DNA, 20 bp, synthetic construct
  source 1..20: mol_type = other DNA
aaaggaaagaaggactgggt

SEQ ID NO: 145818 - DNA, 20 bp, synthetic construct
  source 1..20: mol_type = other DNA
gaaaggaaagaaggactggg

SEQ ID NO: 145819 - DNA, 20 bp, synthetic construct
  source 1..20: mol_type = other DNA
agaaaggaaagaaggactgg

SEQ ID NO: 145820 - DNA, 20 bp, synthetic construct
  source 1..20: mol_type = other DNA
cagaaaggaaagaaggactg

SEQ ID NO: 145821 - DNA, 20 bp, synthetic construct
  source 1..20: mol_type = other DNA
acagaaaggaaagaaggact

SEQ ID NO: 145822 - DNA, 20 bp, synthetic construct
  source 1..20: mol_type = other DNA
cacagaaaggaaagaaggac

SEQ ID NO: 145823 - DNA, 20 bp, synthetic construct
  source 1..20: mol_type = other DNA
acacagaaaggaaagaagga

SEQ ID NO: 145824 - DNA, 20 bp, synthetic construct
  source 1..20: mol_type = other DNA
gacacagaaaggaaagaagg

SEQ ID NO: 145825 - DNA, 20 bp, synthetic construct
  source 1..20: mol_type = other DNA
agacacagaaaggaaagaag

SEQ ID NO: 145826 - DNA, 20 bp, synthetic construct
  source 1..20: mol_type = other DNA
cagacacagaaaggaaagaa

SEQ ID NO: 145827 - DNA, 20 bp, synthetic construct
  source 1..20: mol_type = other DNA
gcagacacagaaaggaaaga

SEQ ID NO: 145828 - DNA, 20 bp, synthetic construct
  source 1..20: mol_type = other DNA
agcagacacagaaaggaaag

SEQ ID NO: 145829 - DNA, 20 bp, synthetic construct
  source 1..20: mol_type = other DNA
aagcagacacagaaaggaaa

SEQ ID NO: 145830 - DNA, 20 bp, synthetic construct
  source 1..20: mol_type = other DNA
aaagcagacacagaaaggaa

SEQ ID NO: 145831 - DNA, 20 bp, synthetic construct
  source 1..20: mol_type = other DNA
caaagcagacacagaaagga

SEQ ID NO: 145832 - DNA, 20 bp, synthetic construct
  source 1..20: mol_type = other DNA
gcaaagcagacacagaaagg

SEQ ID NO: 145833 - DNA, 20 bp, synthetic construct
  source 1..20: mol_type = other DNA
agcaaagcagacacagaaag

SEQ ID NO: 145834 - DNA, 20 bp, synthetic construct
  source 1..20: mol_type = other DNA
tagcaaagcagacacagaaa

SEQ ID NO: 145835 - DNA, 20 bp, synthetic construct
  source 1..20: mol_type = other DNA
atagcaaagcagacacagaa

SEQ ID NO: 145836 - DNA, 20 bp, synthetic construct
  source 1..20: mol_type = other DNA
catagcaaagcagacacaga

SEQ ID NO: 145837 - DNA, 20 bp, synthetic construct
  source 1..20: mol_type = other DNA
acatagcaaagcagacacag

SEQ ID NO: 145838 - DNA, 20 bp, synthetic construct
  source 1..20: mol_type = other DNA
gacatagcaaagcagacaca

SEQ ID NO: 145839 - DNA, 20 bp, synthetic construct
  source 1..20: mol_type = other DNA
agacatagcaaagcagacac

SEQ ID NO: 145840 - DNA, 20 bp, synthetic construct
  source 1..20: mol_type = other DNA
tagacatagcaaagcagaca

SEQ ID NO: 145841 - DNA, 20 bp, synthetic construct
  source 1..20: mol_type = other DNA
atagacatagcaaagcagac

SEQ ID NO: 145842 - DNA, 20 bp, synthetic construct
  source 1..20: mol_type = other DNA
tatagacatagcaaagcaga

SEQ ID NO: 145843 - DNA, 20 bp, synthetic construct
  source 1..20: mol_type = other DNA
atatagacatagcaaagcag

SEQ ID NO: 145844 - DNA, 20 bp, synthetic construct
  source 1..20: mol_type = other DNA
tatatagacatagcaaagca

SEQ ID NO: 145845 - DNA, 20 bp, synthetic construct
  source 1..20: mol_type = other DNA
ctatatagacatagcaaagc

SEQ ID NO: 145846 - DNA, 20 bp, synthetic construct
  source 1..20: mol_type = other DNA
gctatatagacatagcaaag

SEQ ID NO: 145847 - DNA, 20 bp, synthetic construct
  source 1..20: mol_type = other DNA
ggctatatagacatagcaaa

SEQ ID NO: 145848 - DNA, 20 bp, synthetic construct
  source 1..20: mol_type = other DNA
aggctatatagacatagcaa

SEQ ID NO: 145849 - DNA, 20 bp, synthetic construct
  source 1..20: mol_type = other DNA
gaggctatatagacatagca

SEQ ID NO: 145850 - DNA, 20 bp, synthetic construct
  source 1..20: mol_type = other DNA
tgaggctatatagacatagc

SEQ ID NO: 145851 - DNA, 20 bp, synthetic construct
  source 1..20: mol_type = other DNA
gtgaggctatatagacatag

SEQ ID NO: 145852 - DNA, 20 bp, synthetic construct
  source 1..20: mol_type = other DNA
agtgaggctatatagacata

SEQ ID NO: 145853 - DNA, 20 bp, synthetic construct
  source 1..20: mol_type = other DNA
tagtgaggctatatagacat

SEQ ID NO: 145854 - DNA, 20 bp, synthetic construct
  source 1..20: mol_type = other DNA
gtagtgaggctatatagaca

SEQ ID NO: 145855 - DNA, 20 bp, synthetic construct
  source 1..20: mol_type = other DNA
agtagtgaggctatatagac

SEQ ID NO: 145856 - DNA, 20 bp, synthetic construct
  source 1..20: mol_type = other DNA
tagtagtgaggctatataga

SEQ ID NO: 145857 - DNA, 20 bp, synthetic construct
  source 1..20: mol_type = other DNA
atagtagtgaggctatatag

SEQ ID NO: 145858 - DNA, 20 bp, synthetic construct
  source 1..20: mol_type = other DNA
tatagtagtgaggctatata

SEQ ID NO: 145859 - DNA, 20 bp, synthetic construct
  source 1..20: mol_type = other DNA
atatagtagtgaggctatat

SEQ ID NO: 145860 - DNA, 20 bp, synthetic construct
  source 1..20: mol_type = other DNA
tatatagtagtgaggctata

SEQ ID NO: 145861 - DNA, 20 bp, synthetic construct
  source 1..20: mol_type = other DNA
atatatagtagtgaggctat

SEQ ID NO: 145862 - DNA, 20 bp, synthetic construct
  source 1..20: mol_type = other DNA
tatatatagtagtgaggcta

SEQ ID NO: 145863 - DNA, 20 bp, synthetic construct
  source 1..20: mol_type = other DNA
atatatatagtagtgaggct

SEQ ID NO: 145864 - DNA, 20 bp, synthetic construct
  source 1..20: mol_type = other DNA
catatatatagtagtgaggc

SEQ ID NO: 145865 - DNA, 20 bp, synthetic construct
  source 1..20: mol_type = other DNA
acatatatatagtagtgagg

SEQ ID NO: 145866 - DNA, 20 bp, synthetic construct
  source 1..20: mol_type = other DNA
cacatatatatagtagtgag

SEQ ID NO: 145867 - DNA, 20 bp, synthetic construct
  source 1..20: mol_type = other DNA
acacatatatatagtagtga

SEQ ID NO: 145868 - DNA, 20 bp, synthetic construct
  source 1..20: mol_type = other DNA
tacacatatatatagtagtg

SEQ ID NO: 145869 - DNA, 20 bp, synthetic construct
  source 1..20: mol_type = other DNA
gtacacatatatatagtagt

SEQ ID NO: 145870 - DNA, 20 bp, synthetic construct
  source 1..20: mol_type = other DNA
tgtacacatatatatagtag

SEQ ID NO: 145871 - DNA, 20 bp, synthetic construct
  source 1..20: mol_type = other DNA
atgtacacatatatatagta

SEQ ID NO: 145872 - DNA, 20 bp, synthetic construct
  source 1..20: mol_type = other DNA
tatgtacacatatatatagt

SEQ ID NO: 145873 - DNA, 20 bp, synthetic construct
  source 1..20: mol_type = other DNA
atatgtacacatatatatag

SEQ ID NO: 145874 - DNA, 20 bp, synthetic construct
  source 1..20: mol_type = other DNA
tatatgtacacatatatata

SEQ ID NO: 145875 - DNA, 20 bp, synthetic construct
  source 1..20: mol_type = other DNA
atatatgtacacatatatat

SEQ ID NO: 145876 - DNA, 20 bp, synthetic construct
  source 1..20: mol_type = other DNA
tatatatgtacacatatata

SEQ ID NO: 145877 - DNA, 20 bp, synthetic construct
  source 1..20: mol_type = other DNA
atatatatgtacacatatat

SEQ ID NO: 145878 - DNA, 20 bp, synthetic construct
  source 1..20: mol_type = other DNA
aatatatatgtacacatata

SEQ ID NO: 145879 - DNA, 20 bp, synthetic construct
  source 1..20: mol_type = other DNA
gaatatatatgtacacatat

SEQ ID NO: 145880 - DNA, 20 bp, synthetic construct
  source 1..20: mol_type = other DNA
ggaatatatatgtacacata

SEQ ID NO: 145881 - DNA, 20 bp, synthetic construct
  source 1..20: mol_type = other DNA
gggaatatatatgtacacat

SEQ ID NO: 145882 - DNA, 20 bp, synthetic construct
  source 1..20: mol_type = other DNA
ggggaatatatatgtacaca

SEQ ID NO: 145883 - DNA, 20 bp, synthetic construct
  source 1..20: mol_type = other DNA
aggggaatatatatgtacac

SEQ ID NO: 145884 - DNA, 20 bp, synthetic construct
  source 1..20: mol_type = other DNA
taggggaatatatatgtaca

SEQ ID NO: 145885 - DNA, 20 bp, synthetic construct
  source 1..20: mol_type = other DNA
gtaggggaatatatatgtac

SEQ ID NO: 145886 - DNA, 20 bp, synthetic construct
  source 1..20: mol_type = other DNA
tgtaggggaatatatatgta

SEQ ID NO: 145887 - DNA, 20 bp, synthetic construct
  source 1..20: mol_type = other DNA
gtgtaggggaatatatatgt

SEQ ID NO: 145888 - DNA, 20 bp, synthetic construct
  source 1..20: mol_type = other DNA
tgtgtaggggaatatatatg

SEQ ID NO: 145889 - DNA, 20 bp, synthetic construct
  source 1..20: mol_type = other DNA
gtgtgtaggggaatatatat

SEQ ID NO: 145890 - DNA, 20 bp, synthetic construct
  source 1..20: mol_type = other DNA
agtgtgtaggggaatatata

SEQ ID NO: 145891 - DNA, 20 bp, synthetic construct
  source 1..20: mol_type = other DNA
aagtgtgtaggggaatatat

SEQ ID NO: 145892 - DNA, 20 bp, synthetic construct
  source 1..20: mol_type = other DNA
taagtgtgtaggggaatata

SEQ ID NO: 145893 - DNA, 20 bp, synthetic construct
  source 1..20: mol_type = other DNA
gtaagtgtgtaggggaatat

SEQ ID NO: 145894 - DNA, 20 bp, synthetic construct
  source 1..20: mol_type = other DNA
ggtaagtgtgtaggggaata

SEQ ID NO: 145895 - DNA, 20 bp, synthetic construct
  source 1..20: mol_type = other DNA
aggtaagtgtgtaggggaat

SEQ ID NO: 145896 - DNA, 20 bp, synthetic construct
  source 1..20: mol_type = other DNA
aaggtaagtgtgtaggggaa

SEQ ID NO: 145897 - DNA, 20 bp, synthetic construct
  source 1..20: mol_type = other DNA
caaggtaagtgtgtagggga

SEQ ID NO: 145898 - DNA, 20 bp, synthetic construct
  source 1..20: mol_type = other DNA
ccaaggtaagtgtgtagggg

SEQ ID NO: 145899 - DNA, 20 bp, synthetic construct
  source 1..20: mol_type = other DNA
tccaaggtaagtgtgtaggg

SEQ ID NO: 145900 - DNA, 20 bp, synthetic construct
  source 1..20: mol_type = other DNA
ttccaaggtaagtgtgtagg

SEQ ID NO: 145901 - DNA, 20 bp, synthetic construct
  source 1..20: mol_type = other DNA
cttccaaggtaagtgtgtag

SEQ ID NO: 145902 - DNA, 20 bp, synthetic construct
  source 1..20: mol_type = other DNA
gcttccaaggtaagtgtgta

SEQ ID NO: 145903 - DNA, 20 bp, synthetic construct
  source 1..20: mol_type = other DNA
ggcttccaaggtaagtgtgt

SEQ ID NO: 145904 - DNA, 20 bp, synthetic construct
  source 1..20: mol_type = other DNA
tggcttccaaggtaagtgtg

SEQ ID NO: 145905 - DNA, 20 bp, synthetic construct
  source 1..20: mol_type = other DNA
ctggcttccaaggtaagtgt

SEQ ID NO: 145906 - DNA, 20 bp, synthetic construct
  source 1..20: mol_type = other DNA
cctggcttccaaggtaagtg

SEQ ID NO: 145907 - DNA, 20 bp, synthetic construct
  source 1..20: mol_type = other DNA
gcctggcttccaaggtaagt

SEQ ID NO: 145908 - DNA, 20 bp, synthetic construct
  source 1..20: mol_type = other DNA
tgcctggcttccaaggtaag

SEQ ID NO: 145909 - DNA, 20 bp, synthetic construct
  source 1..20: mol_type = other DNA
ctgcctggcttccaaggtaa

SEQ ID NO: 145910 - DNA, 20 bp, synthetic construct
  source 1..20: mol_type = other DNA
cctgcctggcttccaaggta

SEQ ID NO: 145911 - DNA, 20 bp, synthetic construct
  source 1..20: mol_type = other DNA
ccctgcctggcttccaaggt

SEQ ID NO: 145912 - DNA, 20 bp, synthetic construct
  source 1..20: mol_type = other DNA
tccctgcctggcttccaagg

SEQ ID NO: 145913 - DNA, 20 bp, synthetic construct
  source 1..20: mol_type = other DNA
atccctgcctggcttccaag

SEQ ID NO: 145914 - DNA, 20 bp, synthetic construct
  source 1..20: mol_type = other DNA
catccctgcctggcttccaa

SEQ ID NO: 145915 - DNA, 20 bp, synthetic construct
  source 1..20: mol_type = other DNA
tcatccctgcctggcttcca

SEQ ID NO: 145916 - DNA, 20 bp, synthetic construct
  source 1..20: mol_type = other DNA
atcatccctgcctggcttcc

SEQ ID NO: 145917 - DNA, 20 bp, synthetic construct
  source 1..20: mol_type = other DNA
catcatccctgcctggcttc

SEQ ID NO: 145918 - DNA, 20 bp, synthetic construct
  source 1..20: mol_type = other DNA
ccatcatccctgcctggctt

SEQ ID NO: 145919 - DNA, 20 bp, synthetic construct
  source 1..20: mol_type = other DNA
gccatcatccctgcctggct

SEQ ID NO: 145920 - DNA, 20 bp, synthetic construct
  source 1..20: mol_type = other DNA
ggccatcatccctgcctggc

SEQ ID NO: 145921 - DNA, 20 bp, synthetic construct
  source 1..20: mol_type = other DNA
aggccatcatccctgcctgg

SEQ ID NO: 145922 - DNA, 20 bp, synthetic construct
  source 1..20: mol_type = other DNA
aaggccatcatccctgcctg

SEQ ID NO: 145923 - DNA, 20 bp, synthetic construct
  source 1..20: mol_type = other DNA
gaaggccatcatccctgcct

SEQ ID NO: 145924 - DNA, 20 bp, synthetic construct
  source 1..20: mol_type = other DNA
tgaaggccatcatccctgcc

SEQ ID NO: 145925 - DNA, 20 bp, synthetic construct
  source 1..20: mol_type = other DNA
gtgaaggccatcatccctgc

SEQ ID NO: 145926 - DNA, 20 bp, synthetic construct
  source 1..20: mol_type = other DNA
tgtgaaggccatcatccctg

SEQ ID NO: 145927 - DNA, 20 bp, synthetic construct
  source 1..20: mol_type = other DNA
ctgtgaaggccatcatccct

SEQ ID NO: 145928 - DNA, 20 bp, synthetic construct
  source 1..20: mol_type = other DNA
tctgtgaaggccatcatccc

SEQ ID NO: 145929 - DNA, 20 bp, synthetic construct
  source 1..20: mol_type = other DNA
ctctgtgaaggccatcatcc

SEQ ID NO: 145930 - DNA, 20 bp, synthetic construct
  source 1..20: mol_type = other DNA
actctgtgaaggccatcatc

SEQ ID NO: 145931 - DNA, 20 bp, synthetic construct
  source 1..20: mol_type = other DNA
gactctgtgaaggccatcat

SEQ ID NO: 145932 - DNA, 20 bp, synthetic construct
  source 1..20: mol_type = other DNA
agactctgtgaaggccatca

SEQ ID NO: 145933 - DNA, 20 bp, synthetic construct
  source 1..20: mol_type = other DNA
gagactctgtgaaggccatc

SEQ ID NO: 145934 - DNA, 20 bp, synthetic construct
  source 1..20: mol_type = other DNA
tgagactctgtgaaggccat

SEQ ID NO: 145935 - DNA, 20 bp, synthetic construct
  source 1..20: mol_type = other DNA
ctgagactctgtgaaggcca

SEQ ID NO: 145936 - DNA, 20 bp, synthetic construct
  source 1..20: mol_type = other DNA
gctgagactctgtgaaggcc

SEQ ID NO: 145937 - DNA, 20 bp, synthetic construct
  source 1..20: mol_type = other DNA
agctgagactctgtgaaggc

SEQ ID NO: 145938 - DNA, 20 bp, synthetic construct
  source 1..20: mol_type = other DNA
gagctgagactctgtgaagg

SEQ ID NO: 145939 - DNA, 20 bp, synthetic construct
  source 1..20: mol_type = other DNA
agagctgagactctgtgaag

SEQ ID NO: 145940 - DNA, 20 bp, synthetic construct
  source 1..20: mol_type = other DNA
gagagctgagactctgtgaa

SEQ ID NO: 145941 - DNA, 20 bp, synthetic construct
  source 1..20: mol_type = other DNA
ggagagctgagactctgtga

SEQ ID NO: 145942 - DNA, 20 bp, synthetic construct
  source 1..20: mol_type = other DNA
cggagagctgagactctgtg

SEQ ID NO: 145943 - DNA, 20 bp, synthetic construct
  source 1..20: mol_type = other DNA
tcggagagctgagactctgt

SEQ ID NO: 145944 - DNA, 20 bp, synthetic construct
  source 1..20: mol_type = other DNA
ttcggagagctgagactctg

SEQ ID NO: 145945 - DNA, 20 bp, synthetic construct
  source 1..20: mol_type = other DNA
cttcggagagctgagactct

SEQ ID NO: 145946 - DNA, 20 bp, synthetic construct
  source 1..20: mol_type = other DNA
acttcggagagctgagactc

SEQ ID NO: 145947 - DNA, 20 bp, synthetic construct
  source 1..20: mol_type = other DNA
cacttcggagagctgagact

SEQ ID NO: 145948 - DNA, 20 bp, synthetic construct
  source 1..20: mol_type = other DNA
tcacttcggagagctgagac

SEQ ID NO: 145949 - DNA, 20 bp, synthetic construct
  source 1..20: mol_type = other DNA
gtcacttcggagagctgaga

SEQ ID NO: 145950 - DNA, 20 bp, synthetic construct
  source 1..20: mol_type = other DNA
agtcacttcggagagctgag

SEQ ID NO: 145951 - DNA, 20 bp, synthetic construct
  source 1..20: mol_type = other DNA
tagtcacttcggagagctga

SEQ ID NO: 145952 - DNA, 20 bp, synthetic construct
  source 1..20: mol_type = other DNA
gtagtcacttcggagagctg

SEQ ID NO: 145953 - DNA, 20 bp, synthetic construct
  source 1..20: mol_type = other DNA
ggtagtcacttcggagagct

SEQ ID NO: 145954 - DNA, 20 bp, synthetic construct
  source 1..20: mol_type = other DNA
cggtagtcacttcggagagc

SEQ ID NO: 145955 - DNA, 20 bp, synthetic construct
  source 1..20: mol_type = other DNA
ccggtagtcacttcggagag

SEQ ID NO: 145956 - DNA, 20 bp, synthetic construct
  source 1..20: mol_type = other DNA
cccggtagtcacttcggaga

SEQ ID NO: 145957 - DNA, 20 bp, synthetic construct
  source 1..20: mol_type = other DNA
ccccggtagtcacttcggag

SEQ ID NO: 145958 - DNA, 20 bp, synthetic construct
  source 1..20: mol_type = other DNA
gccccggtagtcacttcgga

SEQ ID NO: 145959 - DNA, 20 bp, synthetic construct
  source 1..20: mol_type = other DNA
ggccccggtagtcacttcgg

SEQ ID NO: 145960 - DNA, 20 bp, synthetic construct
  source 1..20: mol_type = other DNA
aggccccggtagtcacttcg

SEQ ID NO: 145961 - DNA, 20 bp, synthetic construct
  source 1..20: mol_type = other DNA
caggccccggtagtcacttc

SEQ ID NO: 145962 - DNA, 20 bp, synthetic construct
  source 1..20: mol_type = other DNA
acaggccccggtagtcactt

SEQ ID NO: 145963 - DNA, 20 bp, synthetic construct
  source 1..20: mol_type = other DNA
gacaggccccggtagtcact

SEQ ID NO: 145964 - DNA, 20 bp, synthetic construct
  source 1..20: mol_type = other DNA
tgacaggccccggtagtcac

SEQ ID NO: 145965 - DNA, 20 bp, synthetic construct
  source 1..20: mol_type = other DNA
ttgacaggccccggtagtca

SEQ ID NO: 145966 - DNA, 20 bp, synthetic construct
  source 1..20: mol_type = other DNA
gttgacaggccccggtagtc

SEQ ID NO: 145967 - DNA, 20 bp, synthetic construct
  source 1..20: mol_type = other DNA
agttgacaggccccggtagt

SEQ ID NO: 145968 - DNA, 20 bp, synthetic construct
  source 1..20: mol_type = other DNA
aagttgacaggccccggtag

SEQ ID NO: 145969 - DNA, 20 bp, synthetic construct
  source 1..20: mol_type = other DNA
caagttgacaggccccggta

SEQ ID NO: 145970 - DNA, 20 bp, synthetic construct
  source 1..20: mol_type = other DNA
tcaagttgacaggccccggt

SEQ ID NO: 145971 - DNA, 20 bp, synthetic construct
  source 1..20: mol_type = other DNA
atcaagttgacaggccccgg

SEQ ID NO: 145972 - DNA, 20 bp, synthetic construct
  source 1..20: mol_type = other DNA
aatcaagttgacaggccccg

SEQ ID NO: 145973 - DNA, 20 bp, synthetic construct
  source 1..20: mol_type = other DNA
caatcaagttgacaggcccc

SEQ ID NO: 145974 - DNA, 20 bp, synthetic construct
  source 1..20: mol_type = other DNA
acaatcaagttgacaggccc

SEQ ID NO: 145975 - DNA, 20 bp, synthetic construct
  source 1..20: mol_type = other DNA
aacaatcaagttgacaggcc

SEQ ID NO: 145976 - DNA, 20 bp, synthetic construct
  source 1..20: mol_type = other DNA
taacaatcaagttgacaggc

SEQ ID NO: 145977 - DNA, 20 bp, synthetic construct
  source 1..20: mol_type = other DNA
gtaacaatcaagttgacagg

SEQ ID NO: 145978 - DNA, 20 bp, synthetic construct
  source 1..20: mol_type = other DNA
agtaacaatcaagttgacag

SEQ ID NO: 145979 - DNA, 20 bp, synthetic construct
  source 1..20: mol_type = other DNA
gagtaacaatcaagttgaca

SEQ ID NO: 145980 - DNA, 20 bp, synthetic construct
  source 1..20: mol_type = other DNA
tgagtaacaatcaagttgac

SEQ ID NO: 145981 - DNA, 20 bp, synthetic construct
  source 1..20: mol_type = other DNA
gtgagtaacaatcaagttga

SEQ ID NO: 145982 - DNA, 20 bp, synthetic construct
  source 1..20: mol_type = other DNA
tgtgagtaacaatcaagttg

SEQ ID NO: 145983 - DNA, 20 bp, synthetic construct
  source 1..20: mol_type = other DNA
atgtgagtaacaatcaagtt

SEQ ID NO: 145984 - DNA, 20 bp, synthetic construct
  source 1..20: mol_type = other DNA
catgtgagtaacaatcaagt

SEQ ID NO: 145985 - DNA, 20 bp, synthetic construct
  source 1..20: mol_type = other DNA
tcatgtgagtaacaatcaag

SEQ ID NO: 145986 - DNA, 20 bp, synthetic construct
  source 1..20: mol_type = other DNA
ctcatgtgagtaacaatcaa

SEQ ID NO: 145987 - DNA, 20 bp, synthetic construct
  source 1..20: mol_type = other DNA
actcatgtgagtaacaatca

SEQ ID NO: 145988 - DNA, 20 bp, synthetic construct
  source 1..20: mol_type = other DNA
aactcatgtgagtaacaatc

SEQ ID NO: 145989 - DNA, 20 bp, synthetic construct
  source 1..20: mol_type = other DNA
gaactcatgtgagtaacaat

SEQ ID NO: 145990 - DNA, 20 bp, synthetic construct
  source 1..20: mol_type = other DNA
ggaactcatgtgagtaacaa

SEQ ID NO: 145991 - DNA, 20 bp, synthetic construct
  source 1..20: mol_type = other DNA
tggaactcatgtgagtaaca

SEQ ID NO: 145992 - DNA, 20 bp, synthetic construct
  source 1..20: mol_type = other DNA
ctggaactcatgtgagtaac

SEQ ID NO: 145993 - DNA, 20 bp, synthetic construct
  source 1..20: mol_type = other DNA
tctggaactcatgtgagtaa

SEQ ID NO: 145994 - DNA, 20 bp, synthetic construct
  source 1..20: mol_type = other DNA
gtctggaactcatgtgagta

SEQ ID NO: 145995 - DNA, 20 bp, synthetic construct
  source 1..20: mol_type = other DNA
tgtctggaactcatgtgagt

SEQ ID NO: 145996 - DNA, 20 bp, synthetic construct
  source 1..20: mol_type = other DNA
gtgtctggaactcatgtgag

SEQ ID NO: 145997 - DNA, 20 bp, synthetic construct
  source 1..20: mol_type = other DNA
tgtgtctggaactcatgtga

SEQ ID NO: 145998 - DNA, 20 bp, synthetic construct
  source 1..20: mol_type = other DNA
atgtgtctggaactcatgtg

SEQ ID NO: 145999 - DNA, 20 bp, synthetic construct
  source 1..20: mol_type = other DNA
gatgtgtctggaactcatgt

SEQ ID NO: 146000 - DNA, 20 bp, synthetic construct
  source 1..20: mol_type = other DNA
agatgtgtctggaactcatg

SEQ ID NO: 146001 - DNA, 20 bp, synthetic construct
  source 1..20: mol_type = other DNA
gagatgtgtctggaactcat

SEQ ID NO: 146002 - DNA, 20 bp, synthetic construct
  source 1..20: mol_type = other DNA
agagatgtgtctggaactca

SEQ ID NO: 146003 - DNA, 20 bp, synthetic construct
  source 1..20: mol_type = other DNA
gagagatgtgtctggaactc

SEQ ID NO: 146004 - DNA, 20 bp, synthetic construct
  source 1..20: mol_type = other DNA
ggagagatgtgtctggaact

SEQ ID NO: 146005 - DNA, 20 bp, synthetic construct
  source 1..20: mol_type = other DNA
tggagagatgtgtctggaac

SEQ ID NO: 146006 - DNA, 20 bp, synthetic construct
  source 1..20: mol_type = other DNA
ttggagagatgtgtctggaa

SEQ ID NO: 146007 - DNA, 20 bp, synthetic construct
  source 1..20: mol_type = other DNA
attggagagatgtgtctgga

SEQ ID NO: 146008 - DNA, 20 bp, synthetic construct
  source 1..20: mol_type = other DNA
aattggagagatgtgtctgg

SEQ ID NO: 146009 - DNA, 20 bp, synthetic construct
  source 1..20: mol_type = other DNA
caattggagagatgtgtctg

SEQ ID NO: 146010 - DNA, 20 bp, synthetic construct
  source 1..20: mol_type = other DNA
acaattggagagatgtgtct

SEQ ID NO: 146011 - DNA, 20 bp, synthetic construct
  source 1..20: mol_type = other DNA
aacaattggagagatgtgtc

SEQ ID NO: 146012 - DNA, 20 bp, synthetic construct
  source 1..20: mol_type = other DNA
aaacaattggagagatgtgt

SEQ ID NO: 146013 - DNA, 20 bp, synthetic construct
  source 1..20: mol_type = other DNA
aaaacaattggagagatgtg

SEQ ID NO: 146014 - DNA, 20 bp, synthetic construct
  source 1..20: mol_type = other DNA
gaaaacaattggagagatgt

SEQ ID NO: 146015 - DNA, 20 bp, synthetic construct
  source 1..20: mol_type = other DNA
ggaaaacaattggagagatg

SEQ ID NO: 146016 - DNA, 20 bp, synthetic construct
  source 1..20: mol_type = other DNA
gggaaaacaattggagagat

SEQ ID NO: 146017 - DNA, 20 bp, synthetic construct
  source 1..20: mol_type = other DNA
agggaaaacaattggagaga

SEQ ID NO: 146018 - DNA, 20 bp, synthetic construct
  source 1..20: mol_type = other DNA
cagggaaaacaattggagag

SEQ ID NO: 146019 - DNA, 20 bp, synthetic construct
  source 1..20: mol_type = other DNA
ccagggaaaacaattggaga

SEQ ID NO: 146020 - DNA, 20 bp, synthetic construct
  source 1..20: mol_type = other DNA
accagggaaaacaattggag

SEQ ID NO: 146021 - DNA, 20 bp, synthetic construct
  source 1..20: mol_type = other DNA
aaccagggaaaacaattgga

SEQ ID NO: 146022 - DNA, 20 bp, synthetic construct
  source 1..20: mol_type = other DNA
taaccagggaaaacaattgg

SEQ ID NO: 146023 - DNA, 20 bp, synthetic construct
  source 1..20: mol_type = other DNA
ataaccagggaaaacaattg

SEQ ID NO: 146024 - DNA, 20 bp, synthetic construct
  source 1..20: mol_type = other DNA
gataaccagggaaaacaatt

SEQ ID NO: 146025 - DNA, 20 bp, synthetic construct
  source 1..20: mol_type = other DNA
ggataaccagggaaaacaat

SEQ ID NO: 146026 - DNA, 20 bp, synthetic construct
  source 1..20: mol_type = other DNA
tggataaccagggaaaacaa

SEQ ID NO: 146027 - DNA, 20 bp, synthetic construct
  source 1..20: mol_type = other DNA
atggataaccagggaaaaca

SEQ ID NO: 146028 - DNA, 20 bp, synthetic construct
  source 1..20: mol_type = other DNA
tatggataaccagggaaaac

SEQ ID NO: 146029 - DNA, 20 bp, synthetic construct
  source 1..20: mol_type = other DNA
atatggataaccagggaaaa

SEQ ID NO: 146030 - DNA, 20 bp, synthetic construct
  source 1..20: mol_type = other DNA
tatatggataaccagggaaa

SEQ ID NO: 146031 - DNA, 20 bp, synthetic construct
  source 1..20: mol_type = other DNA
atatatggataaccagggaa

SEQ ID NO: 146032 - DNA, 20 bp, synthetic construct
  source 1..20: mol_type = other DNA
gatatatggataaccaggga

SEQ ID NO: 146033 - DNA, 20 bp, synthetic construct
  source 1..20: mol_type = other DNA
agatatatggataaccaggg

SEQ ID NO: 146034 - DNA, 20 bp, synthetic construct
  source 1..20: mol_type = other DNA
cagatatatggataaccagg

SEQ ID NO: 146035 - DNA, 20 bp, synthetic construct
  source 1..20: mol_type = other DNA
gcagatatatggataaccag

SEQ ID NO: 146036 - DNA, 20 bp, synthetic construct
  source 1..20: mol_type = other DNA
agcagatatatggataacca

SEQ ID NO: 146037 - DNA, 20 bp, synthetic construct
  source 1..20: mol_type = other DNA
aagcagatatatggataacc

SEQ ID NO: 146038 - DNA, 20 bp, synthetic construct
  source 1..20: mol_type = other DNA
aaagcagatatatggataac

SEQ ID NO: 146039 - DNA, 20 bp, synthetic construct
  source 1..20: mol_type = other DNA
caaagcagatatatggataa

SEQ ID NO: 146040 - DNA, 20 bp, synthetic construct
  source 1..20: mol_type = other DNA
tcaaagcagatatatggata

SEQ ID NO: 146041 - DNA, 20 bp, synthetic construct
  source 1..20: mol_type = other DNA
gtcaaagcagatatatggat

SEQ ID NO: 146042 - DNA, 20 bp, synthetic construct
  source 1..20: mol_type = other DNA
ggtcaaagcagatatatgga

SEQ ID NO: 146043 - DNA, 20 bp, synthetic construct
  source 1..20: mol_type = other DNA
tggtcaaagcagatatatgg

SEQ ID NO: 146044 - DNA, 20 bp, synthetic construct
  source 1..20: mol_type = other DNA
atggtcaaagcagatatatg

SEQ ID NO: 146045 - DNA, 20 bp, synthetic construct
  source 1..20: mol_type = other DNA
tatggtcaaagcagatatat

SEQ ID NO: 146046 - DNA, 20 bp, synthetic construct
  source 1..20: mol_type = other DNA
ttatggtcaaagcagatata

SEQ ID NO: 146047 - DNA, 20 bp, synthetic construct
  source 1..20: mol_type = other DNA
cttatggtcaaagcagatat

SEQ ID NO: 146048 - DNA, 20 bp, synthetic construct
  source 1..20: mol_type = other DNA
acttatggtcaaagcagata

SEQ ID NO: 146049 - DNA, 20 bp, synthetic construct
  source 1..20: mol_type = other DNA
aacttatggtcaaagcagat

SEQ ID NO: 146050 - DNA, 20 bp, synthetic construct
  source 1..20: mol_type = other DNA
caacttatggtcaaagcaga

SEQ ID NO: 146051 - DNA, 20 bp, synthetic construct
  source 1..20: mol_type = other DNA
acaacttatggtcaaagcag

SEQ ID NO: 146052 - DNA, 20 bp, synthetic construct
  source 1..20: mol_type = other DNA
tacaacttatggtcaaagca

SEQ ID NO: 146053 - DNA, 20 bp, synthetic construct
  source 1..20: mol_type = other DNA
gtacaacttatggtcaaagc

SEQ ID NO: 146054 - DNA, 20 bp, synthetic construct
  source 1..20: mol_type = other DNA
agtacaacttatggtcaaag

SEQ ID NO: 146055 - DNA, 20 bp, synthetic construct
  source 1..20: mol_type = other DNA
gagtacaacttatggtcaaa

SEQ ID NO: 146056 - DNA, 20 bp, synthetic construct
  source 1..20: mol_type = other DNA
agagtacaacttatggtcaa

SEQ ID NO: 146057 - DNA, 20 bp, synthetic construct
  source 1..20: mol_type = other DNA
aagagtacaacttatggtca

SEQ ID NO: 146058 - DNA, 20 bp, synthetic construct
  source 1..20: mol_type = other DNA
caagagtacaacttatggtc

SEQ ID NO: 146059 - DNA, 20 bp, synthetic construct
  source 1..20: mol_type = other DNA
tcaagagtacaacttatggt

SEQ ID NO: 146060 - DNA, 20 bp, synthetic construct
  source 1..20: mol_type = other DNA
ctcaagagtacaacttatgg

SEQ ID NO: 146061 - DNA, 20 bp, synthetic construct
  source 1..20: mol_type = other DNA
tctcaagagtacaacttatg

SEQ ID NO: 146062 - DNA, 20 bp, synthetic construct
  source 1..20: mol_type = other DNA
ctctcaagagtacaacttat

SEQ ID NO: 146063 - DNA, 20 bp, synthetic construct
  source 1..20: mol_type = other DNA
cctctcaagagtacaactta

SEQ ID NO: 146064 - DNA, 20 bp, synthetic construct
  source 1..20: mol_type = other DNA
ccctctcaagagtacaactt

SEQ ID NO: 146065 - DNA, 20 bp, synthetic construct
  source 1..20: mol_type = other DNA
gccctctcaagagtacaact

SEQ ID NO: 146066 - DNA, 20 bp, synthetic construct
  source 1..20: mol_type = other DNA
agccctctcaagagtacaac

SEQ ID NO: 146067 - DNA, 20 bp, synthetic construct
  source 1..20: mol_type = other DNA
aagccctctcaagagtacaa

SEQ ID NO: 146068 - DNA, 20 bp, synthetic construct
  source 1..20: mol_type = other DNA
caagccctctcaagagtaca

SEQ ID NO: 146069 - DNA, 20 bp, synthetic construct
  source 1..20: mol_type = other DNA
ccaagccctctcaagagtac

SEQ ID NO: 146070 - DNA, 20 bp, synthetic construct
  source 1..20: mol_type = other DNA
gccaagccctctcaagagta

SEQ ID NO: 146071 - DNA, 20 bp, synthetic construct
  source 1..20: mol_type = other DNA
ggccaagccctctcaagagt

SEQ ID NO: 146072 - DNA, 20 bp, synthetic construct
  source 1..20: mol_type = other DNA
aggccaagccctctcaagag

SEQ ID NO: 146073 - DNA, 20 bp, synthetic construct
  source 1..20: mol_type = other DNA
aaggccaagccctctcaaga

SEQ ID NO: 146074 - DNA, 20 bp, synthetic construct
  source 1..20: mol_type = other DNA
caaggccaagccctctcaag

SEQ ID NO: 146075 - DNA, 20 bp, synthetic construct
  source 1..20: mol_type = other DNA
ccaaggccaagccctctcaa

SEQ ID NO: 146076 - DNA, 20 bp, synthetic construct
  source 1..20: mol_type = other DNA
tccaaggccaagccctctca

SEQ ID NO: 146077 - DNA, 20 bp, synthetic construct
  source 1..20: mol_type = other DNA
gtccaaggccaagccctctc

SEQ ID NO: 146078 - DNA, 20 bp, synthetic construct
  source 1..20: mol_type = other DNA
tgtccaaggccaagccctct

SEQ ID NO: 146079 - DNA, 20 bp, synthetic construct
  source 1..20: mol_type = other DNA
atgtccaaggccaagccctc

SEQ ID NO: 146080 - DNA, 20 bp, synthetic construct
  source 1..20: mol_type = other DNA
aatgtccaaggccaagccct

SEQ ID NO: 146081 - DNA, 20 bp, synthetic construct
  source 1..20: mol_type = other DNA
caatgtccaaggccaagccc

SEQ ID NO: 146082 - DNA, 20 bp, synthetic construct
  source 1..20: mol_type = other DNA
ccaatgtccaaggccaagcc

SEQ ID NO: 146083 - DNA, 20 bp, synthetic construct
  source 1..20: mol_type = other DNA
accaatgtccaaggccaagc

SEQ ID NO: 146084 - DNA, 20 bp, synthetic construct
  source 1..20: mol_type = other DNA
caccaatgtccaaggccaag

SEQ ID NO: 146085 - DNA, 20 bp, synthetic construct
  source 1..20: mol_type = other DNA
gcaccaatgtccaaggccaa

SEQ ID NO: 146086 - DNA, 20 bp, synthetic construct
  source 1..20: mol_type = other DNA
tgcaccaatgtccaaggcca

SEQ ID NO: 146087 - DNA, 20 bp, synthetic construct
  source 1..20: mol_type = other DNA
ctgcaccaatgtccaaggcc

SEQ ID NO: 146088 - DNA, 20 bp, synthetic construct
  source 1..20: mol_type = other DNA
actgcaccaatgtccaaggc

SEQ ID NO: 146089 - DNA, 20 bp, synthetic construct
  source 1..20: mol_type = other DNA
cactgcaccaatgtccaagg

SEQ ID NO: 146090 - DNA, 20 bp, synthetic construct
  source 1..20: mol_type = other DNA
acactgcaccaatgtccaag

SEQ ID NO: 146091 - DNA, 20 bp, synthetic construct
  source 1..20: mol_type = other DNA
tacactgcaccaatgtccaa

SEQ ID NO: 146092 - DNA, 20 bp, synthetic construct
  source 1..20: mol_type = other DNA
ttacactgcaccaatgtcca

SEQ ID NO: 146093 - DNA, 20 bp, synthetic construct
  source 1..20: mol_type = other DNA
gttacactgcaccaatgtcc

SEQ ID NO: 146094 - DNA, 20 bp, synthetic construct
  source 1..20: mol_type = other DNA
agttacactgcaccaatgtc

SEQ ID NO: 146095 - DNA, 20 bp, synthetic construct
  source 1..20: mol_type = other DNA
tagttacactgcaccaatgt

SEQ ID NO: 146096 - DNA, 20 bp, synthetic construct
  source 1..20: mol_type = other DNA
ctagttacactgcaccaatg

SEQ ID NO: 146097 - DNA, 20 bp, synthetic construct
  source 1..20: mol_type = other DNA
tctagttacactgcaccaat

SEQ ID NO: 146098 - DNA, 20 bp, synthetic construct
  source 1..20: mol_type = other DNA
ttctagttacactgcaccaa

SEQ ID NO: 146099 - DNA, 20 bp, synthetic construct
  source 1..20: mol_type = other DNA
cttctagttacactgcacca

SEQ ID NO: 146100 - DNA, 20 bp, synthetic construct
  source 1..20: mol_type = other DNA
gcttctagttacactgcacc

SEQ ID NO: 146101 - DNA, 20 bp, synthetic construct
  source 1..20: mol_type = other DNA
agcttctagttacactgcac

SEQ ID NO: 146102 - DNA, 20 bp, synthetic construct
  source 1..20: mol_type = other DNA
cagcttctagttacactgca

SEQ ID NO: 146103 - DNA, 20 bp, synthetic construct
  source 1..20: mol_type = other DNA
ccagcttctagttacactgc

SEQ ID NO: 146104 - DNA, 20 bp, synthetic construct
  source 1..20: mol_type = other DNA
tccagcttctagttacactg

SEQ ID NO: 146105 - DNA, 20 bp, synthetic construct
  source 1..20: mol_type = other DNA
ttccagcttctagttacact

SEQ ID NO: 146106 - DNA, 20 bp, synthetic construct
  source 1..20: mol_type = other DNA
cttccagcttctagttacac

SEQ ID NO: 146107 - DNA, 20 bp, synthetic construct
  source 1..20: mol_type = other DNA
gcttccagcttctagttaca

SEQ ID NO: 146108 - DNA, 20 bp, synthetic construct
  source 1..20: mol_type = other DNA
tgcttccagcttctagttac

SEQ ID NO: 146109 - DNA, 20 bp, synthetic construct
  source 1..20: mol_type = other DNA
gtgcttccagcttctagtta

SEQ ID NO: 146110 - DNA, 20 bp, synthetic construct
  source 1..20: mol_type = other DNA
ggtgcttccagcttctagtt

SEQ ID NO: 146111 - DNA, 20 bp, synthetic construct
  source 1..20: mol_type = other DNA
gggtgcttccagcttctagt

SEQ ID NO: 146112 - DNA, 20 bp, synthetic construct
  source 1..20: mol_type = other DNA
tgggtgcttccagcttctag

SEQ ID NO: 146113 - DNA, 20 bp, synthetic construct
  source 1..20: mol_type = other DNA
ctgggtgcttccagcttcta

SEQ ID NO: 146114 - DNA, 20 bp, synthetic construct
  source 1..20: mol_type = other DNA
cctgggtgcttccagcttct

SEQ ID NO: 146115 - DNA, 20 bp, synthetic construct
  source 1..20: mol_type = other DNA
acctgggtgcttccagcttc

SEQ ID NO: 146116 - DNA, 20 bp, synthetic construct
  source 1..20: mol_type = other DNA
cacctgggtgcttccagctt

SEQ ID NO: 146117 - DNA, 20 bp, synthetic construct
  source 1..20: mol_type = other DNA
ccacctgggtgcttccagct

SEQ ID NO: 146118 - DNA, 20 bp, synthetic construct
  source 1..20: mol_type = other DNA
accacctgggtgcttccagc

SEQ ID NO: 146119 - DNA, 20 bp, synthetic construct
  source 1..20: mol_type = other DNA
gaccacctgggtgcttccag

SEQ ID NO: 146120 - DNA, 20 bp, synthetic construct
  source 1..20: mol_type = other DNA
ggaccacctgggtgcttcca

SEQ ID NO: 146121 - DNA, 20 bp, synthetic construct
  source 1..20: mol_type = other DNA
gggaccacctgggtgcttcc

SEQ ID NO: 146122 - DNA, 20 bp, synthetic construct
  source 1..20: mol_type = other DNA
tgggaccacctgggtgcttc

SEQ ID NO: 146123 - DNA, 20 bp, synthetic construct
  source 1..20: mol_type = other DNA
atgggaccacctgggtgctt

SEQ ID NO: 146124 - DNA, 20 bp, synthetic construct
  source 1..20: mol_type = other DNA
aatgggaccacctgggtgct

SEQ ID NO: 146125 - DNA, 20 bp, synthetic construct
  source 1..20: mol_type = other DNA
aaatgggaccacctgggtgc

SEQ ID NO: 146126 - DNA, 20 bp, synthetic construct
  source 1..20: mol_type = other DNA
aaaatgggaccacctgggtg

SEQ ID NO: 146127 - DNA, 20 bp, synthetic construct
  source 1..20: mol_type = other DNA
aaaaatgggaccacctgggt

SEQ ID NO: 146128 - DNA, 20 bp, synthetic construct
  source 1..20: mol_type = other DNA
gaaaaatgggaccacctggg

SEQ ID NO: 146129 - DNA, 20 bp, synthetic construct
  source 1..20: mol_type = other DNA
agaaaaatgggaccacctgg

SEQ ID NO: 146130 - DNA, 20 bp, synthetic construct
  source 1..20: mol_type = other DNA
aagaaaaatgggaccacctg

SEQ ID NO: 146131 - DNA, 20 bp, synthetic construct
  source 1..20: mol_type = other DNA
aaagaaaaatgggaccacct

SEQ ID NO: 146132 - DNA, 20 bp, synthetic construct
  source 1..20: mol_type = other DNA
taaagaaaaatgggaccacc

SEQ ID NO: 146133 - DNA, 20 bp, synthetic construct
  source 1..20: mol_type = other DNA
ttaaagaaaaatgggaccac

SEQ ID NO: 146134 - DNA, 20 bp, synthetic construct
  source 1..20: mol_type = other DNA
cttaaagaaaaatgggacca

SEQ ID NO: 146135 - DNA, 20 bp, synthetic construct
  source 1..20: mol_type = other DNA
tcttaaagaaaaatgggacc

SEQ ID NO: 146136 - DNA, 20 bp, synthetic construct
  source 1..20: mol_type = other DNA
ctcttaaagaaaaatgggac

SEQ ID NO: 146137 - DNA, 20 bp, synthetic construct
  source 1..20: mol_type = other DNA
gctcttaaagaaaaatggga

SEQ ID NO: 146138 - DNA, 20 bp, synthetic construct
  source 1..20: mol_type = other DNA
tgctcttaaagaaaaatggg

SEQ ID NO: 146139 - DNA, 20 bp, synthetic construct
  source 1..20: mol_type = other DNA
ctgctcttaaagaaaaatgg

SEQ ID NO: 146140 - DNA, 20 bp, synthetic construct
  source 1..20: mol_type = other DNA
gctgctcttaaagaaaaatg

SEQ ID NO: 146141 - DNA, 20 bp, synthetic construct
  source 1..20: mol_type = other DNA
ggctgctcttaaagaaaaat

SEQ ID NO: 146142 - DNA, 20 bp, synthetic construct
  source 1..20: mol_type = other DNA
gggctgctcttaaagaaaaa

SEQ ID NO: 146143 - DNA, 20 bp, synthetic construct
  source 1..20: mol_type = other DNA
agggctgctcttaaagaaaa

SEQ ID NO: 146144 - DNA, 20 bp, synthetic construct
  source 1..20: mol_type = other DNA
cagggctgctcttaaagaaa

SEQ ID NO: 146145 - DNA, 20 bp, synthetic construct
  source 1..20: mol_type = other DNA
ccagggctgctcttaaagaa

SEQ ID NO: 146146 - DNA, 20 bp, synthetic construct
  source 1..20: mol_type = other DNA
tccagggctgctcttaaaga

SEQ ID NO: 146147 - DNA, 20 bp, synthetic construct
  source 1..20: mol_type = other DNA
ttccagggctgctcttaaag

SEQ ID NO: 146148 - DNA, 20 bp, synthetic construct
  source 1..20: mol_type = other DNA
cttccagggctgctcttaaa

SEQ ID NO: 146149 - DNA, 20 bp, synthetic construct
  source 1..20: mol_type = other DNA
gcttccagggctgctcttaa

SEQ ID NO: 146150 - DNA, 20 bp, synthetic construct
  source 1..20: mol_type = other DNA
tgcttccagggctgctctta

SEQ ID NO: 146151 - DNA, 20 bp, synthetic construct
  source 1..20: mol_type = other DNA
gtgcttccagggctgctctt

SEQ ID NO: 146152 - DNA, 20 bp, synthetic construct
  source 1..20: mol_type = other DNA
agtgcttccagggctgctct

SEQ ID NO: 146153 - DNA, 20 bp, synthetic construct
  source 1..20: mol_type = other DNA
aagtgcttccagggctgctc

SEQ ID NO: 146154 - DNA, 20 bp, synthetic construct
  source 1..20: mol_type = other DNA
aaagtgcttccagggctgct

SEQ ID NO: 146155 - DNA, 20 bp, synthetic construct
  source 1..20: mol_type = other DNA
caaagtgcttccagggctgc

SEQ ID NO: 146156 - DNA, 20 bp, synthetic construct
  source 1..20: mol_type = other DNA
ccaaagtgcttccagggctg

SEQ ID NO: 146157 - DNA, 20 bp, synthetic construct
  source 1..20: mol_type = other DNA
tccaaagtgcttccagggct

SEQ ID NO: 146158 - DNA, 20 bp, synthetic construct
  source 1..20: mol_type = other DNA
ctccaaagtgcttccagggc

SEQ ID NO: 146159 - DNA, 20 bp, synthetic construct
  source 1..20: mol_type = other DNA
gctccaaagtgcttccaggg

SEQ ID NO: 146160 - DNA, 20 bp, synthetic construct
  source 1..20: mol_type = other DNA
agctccaaagtgcttccagg

SEQ ID NO: 146161 - DNA, 20 bp, synthetic construct
  source 1..20: mol_type = other DNA
gagctccaaagtgcttccag

SEQ ID NO: 146162 - DNA, 20 bp, synthetic construct
  source 1..20: mol_type = other DNA
tgagctccaaagtgcttcca

SEQ ID NO: 146163 - DNA, 20 bp, synthetic construct
  source 1..20: mol_type = other DNA
gtgagctccaaagtgcttcc

SEQ ID NO: 146164 - DNA, 20 bp, synthetic construct
  source 1..20: mol_type = other DNA
ggtgagctccaaagtgcttc

SEQ ID NO: 146165 - DNA, 20 bp, synthetic construct
  source 1..20: mol_type = other DNA
aggtgagctccaaagtgctt

SEQ ID NO: 146166 - DNA, 20 bp, synthetic construct
  source 1..20: mol_type = other DNA
gaggtgagctccaaagtgct

SEQ ID NO: 146167 - DNA, 20 bp, synthetic construct
  source 1..20: mol_type = other DNA
ggaggtgagctccaaagtgc

SEQ ID NO: 146168 - DNA, 20 bp, synthetic construct
  source 1..20: mol_type = other DNA
tggaggtgagctccaaagtg

SEQ ID NO: 146169 - DNA, 20 bp, synthetic construct
  source 1..20: mol_type = other DNA
ctggaggtgagctccaaagt

SEQ ID NO: 146170 - DNA, 20 bp, synthetic construct
  source 1..20: mol_type = other DNA
actggaggtgagctccaaag

SEQ ID NO: 146171 - DNA, 20 bp, synthetic construct
  source 1..20: mol_type = other DNA
cactggaggtgagctccaaa

SEQ ID NO: 146172 - DNA, 20 bp, synthetic construct
  source 1..20: mol_type = other DNA
acactggaggtgagctccaa

SEQ ID NO: 146173 - DNA, 20 bp, synthetic construct
  source 1..20: mol_type = other DNA
tacactggaggtgagctcca

SEQ ID NO: 146174 - DNA, 20 bp, synthetic construct
  source 1..20: mol_type = other DNA
ttacactggaggtgagctcc

SEQ ID NO: 146175 - DNA, 20 bp, synthetic construct
  source 1..20: mol_type = other DNA
cttacactggaggtgagctc

SEQ ID NO: 146176 - DNA, 20 bp, synthetic construct
  source 1..20: mol_type = other DNA
gcttacactggaggtgagct

SEQ ID NO: 146177 - DNA, 20 bp, synthetic construct
  source 1..20: mol_type = other DNA
agcttacactggaggtgagc

SEQ ID NO: 146178 - DNA, 20 bp, synthetic construct
  source 1..20: mol_type = other DNA
cagcttacactggaggtgag

SEQ ID NO: 146179 - DNA, 20 bp, synthetic construct
  source 1..20: mol_type = other DNA
gcagcttacactggaggtga

SEQ ID NO: 146180 - DNA, 20 bp, synthetic construct
  source 1..20: mol_type = other DNA
agcagcttacactggaggtg

SEQ ID NO: 146181 - DNA, 20 bp, synthetic construct
  source 1..20: mol_type = other DNA
tagcagcttacactggaggt

SEQ ID NO: 146182 - DNA, 20 bp, synthetic construct
  source 1..20: mol_type = other DNA
gtagcagcttacactggagg

SEQ ID NO: 146183 - DNA, 20 bp, synthetic construct
  source 1..20: mol_type = other DNA
tgtagcagcttacactggag

SEQ ID NO: 146184 - DNA, 20 bp, synthetic construct
  source 1..20: mol_type = other DNA
ctgtagcagcttacactgga

SEQ ID NO: 146185 - DNA, 20 bp, synthetic construct
  source 1..20: mol_type = other DNA
cctgtagcagcttacactgg

SEQ ID NO: 146186 - DNA, 20 bp, synthetic construct
  source 1..20: mol_type = other DNA
acctgtagcagcttacactg

SEQ ID NO: 146187 - DNA, 20 bp, synthetic construct
  source 1..20: mol_type = other DNA
cacctgtagcagcttacact

SEQ ID NO: 146188 - DNA, 20 bp, synthetic construct
  source 1..20: mol_type = other DNA
tcacctgtagcagcttacac

SEQ ID NO: 146189 - DNA, 20 bp, synthetic construct
  source 1..20: mol_type = other DNA
ttcacctgtagcagcttaca

SEQ ID NO: 146190 - DNA, 20 bp, synthetic construct
  source 1..20: mol_type = other DNA
tttcacctgtagcagcttac

SEQ ID NO: 146191 - DNA, 20 bp, synthetic construct
  source 1..20: mol_type = other DNA
ctttcacctgtagcagctta

SEQ ID NO: 146192 - DNA, 20 bp, synthetic construct
  source 1..20: mol_type = other DNA
cctttcacctgtagcagctt

SEQ ID NO: 146193 - DNA, 20 bp, synthetic construct
  source 1..20: mol_type = other DNA
acctttcacctgtagcagct

SEQ ID NO: 146194 - DNA, 20 bp, synthetic construct
  source 1..20: mol_type = other DNA
cacctttcacctgtagcagc

SEQ ID NO: 146195 - DNA, 20 bp, synthetic construct
  source 1..20: mol_type = other DNA
acacctttcacctgtagcag

SEQ ID NO: 146196 - DNA, 20 bp, synthetic construct
  source 1..20: mol_type = other DNA
cacacctttcacctgtagca

SEQ ID NO: 146197 - DNA, 20 bp, synthetic construct
  source 1..20: mol_type = other DNA
gcacacctttcacctgtagc

SEQ ID NO: 146198 - DNA, 20 bp, synthetic construct
  source 1..20: mol_type = other DNA
agcacacctttcacctgtag

SEQ ID NO: 146199 - DNA, 20 bp, synthetic construct
  source 1..20: mol_type = other DNA
aagcacacctttcacctgta

SEQ ID NO: 146200 - DNA, 20 bp, synthetic construct
  source 1..20: mol_type = other DNA
caagcacacctttcacctgt

SEQ ID NO: 146201 - DNA, 20 bp, synthetic construct
  source 1..20: mol_type = other DNA
gcaagcacacctttcacctg

SEQ ID NO: 146202 - DNA, 20 bp, synthetic construct
  source 1..20: mol_type = other DNA
ggcaagcacacctttcacct

SEQ ID NO: 146203 - DNA, 20 bp, synthetic construct
  source 1..20: mol_type = other DNA
tggcaagcacacctttcacc

SEQ ID NO: 146204 - DNA, 20 bp, synthetic construct
  source 1..20: mol_type = other DNA
atggcaagcacacctttcac

SEQ ID NO: 146205 - DNA, 20 bp, synthetic construct
  source 1..20: mol_type = other DNA
gatggcaagcacacctttca

SEQ ID NO: 146206 - DNA, 20 bp, synthetic construct
  source 1..20: mol_type = other DNA
agatggcaagcacacctttc

SEQ ID NO: 146207 - DNA, 20 bp, synthetic construct
  source 1..20: mol_type = other DNA
gagatggcaagcacaccttt

SEQ ID NO: 146208 - DNA, 20 bp, synthetic construct
  source 1..20: mol_type = other DNA
tgagatggcaagcacacctt

SEQ ID NO: 146209 - DNA, 20 bp, synthetic construct
  source 1..20: mol_type = other DNA
ctgagatggcaagcacacct

SEQ ID NO: 146210 - DNA, 20 bp, synthetic construct
  source 1..20: mol_type = other DNA
actgagatggcaagcacacc

SEQ ID NO: 146211 - DNA, 20 bp, synthetic construct
  source 1..20: mol_type = other DNA
cactgagatggcaagcacac

SEQ ID NO: 146212 - DNA, 20 bp, synthetic construct
  source 1..20: mol_type = other DNA
ccactgagatggcaagcaca

SEQ ID NO: 146213 - DNA, 20 bp, synthetic construct
  source 1..20: mol_type = other DNA
accactgagatggcaagcac

SEQ ID NO: 146214 - DNA, 20 bp, synthetic construct
  source 1..20: mol_type = other DNA
aaccactgagatggcaagca

SEQ ID NO: 146215 - DNA, 20 bp, synthetic construct
  source 1..20: mol_type = other DNA
caaccactgagatggcaagc

SEQ ID NO: 146216 - DNA, 20 bp, synthetic construct
  source 1..20: mol_type = other DNA
gcaaccactgagatggcaag

SEQ ID NO: 146217 - DNA, 20 bp, synthetic construct
  source 1..20: mol_type = other DNA
agcaaccactgagatggcaa

SEQ ID NO: 146218 - DNA, 20 bp, synthetic construct
  source 1..20: mol_type = other DNA
cagcaaccactgagatggca

SEQ ID NO: 146219 - DNA, 20 bp, synthetic construct
  source 1..20: mol_type = other DNA
acagcaaccactgagatggc

SEQ ID NO: 146220 - DNA, 20 bp, synthetic construct
  source 1..20: mol_type = other DNA
gacagcaaccactgagatgg

SEQ ID NO: 146221 - DNA, 20 bp, synthetic construct
  source 1..20: mol_type = other DNA
agacagcaaccactgagatg

SEQ ID NO: 146222 - DNA, 20 bp, synthetic construct
  source 1..20: mol_type = other DNA
cagacagcaaccactgagat

SEQ ID NO: 146223 - DNA, 20 bp, synthetic construct
  source 1..20: mol_type = other DNA
gcagacagcaaccactgaga

SEQ ID NO: 146224 - DNA, 20 bp, synthetic construct
  source 1..20: mol_type = other DNA
tgcagacagcaaccactgag

SEQ ID NO: 146225 - DNA, 20 bp, synthetic construct
  source 1..20: mol_type = other DNA
atgcagacagcaaccactga

SEQ ID NO: 146226 - DNA, 20 bp, synthetic construct
  source 1..20: mol_type = other DNA
gatgcagacagcaaccactg

SEQ ID NO: 146227 - DNA, 20 bp, synthetic construct
  source 1..20: mol_type = other DNA
tgatgcagacagcaaccact

SEQ ID NO: 146228 - DNA, 20 bp, synthetic construct
  source 1..20: mol_type = other DNA
ctgatgcagacagcaaccac

SEQ ID NO: 146229 - DNA, 20 bp, synthetic construct
  source 1..20: mol_type = other DNA
gctgatgcagacagcaacca

SEQ ID NO: 146230 - DNA, 20 bp, synthetic construct
  source 1..20: mol_type = other DNA
agctgatgcagacagcaacc

SEQ ID NO: 146231 - DNA, 20 bp, synthetic construct
  source 1..20: mol_type = other DNA
cagctgatgcagacagcaac

SEQ ID NO: 146232 - DNA, 20 bp, synthetic construct
  source 1..20: mol_type = other DNA
gcagctgatgcagacagcaa

SEQ ID NO: 146233 - DNA, 20 bp, synthetic construct
  source 1..20: mol_type = other DNA
agcagctgatgcagacagca

SEQ ID NO: 146234 - DNA, 20 bp, synthetic construct
  source 1..20: mol_type = other DNA
cagcagctgatgcagacagc

SEQ ID NO: 146235 - DNA, 20 bp, synthetic construct
  source 1..20: mol_type = other DNA
tcagcagctgatgcagacag

SEQ ID NO: 146236 - DNA, 20 bp, synthetic construct
  source 1..20: mol_type = other DNA
gtcagcagctgatgcagaca

SEQ ID NO: 146237 - DNA, 20 bp, synthetic construct
  source 1..20: mol_type = other DNA
tgtcagcagctgatgcagac

SEQ ID NO: 146238 - DNA, 20 bp, synthetic construct
  source 1..20: mol_type = other DNA
ttgtcagcagctgatgcaga

SEQ ID NO: 146239 - DNA, 20 bp, synthetic construct
  source 1..20: mol_type = other DNA
tttgtcagcagctgatgcag

SEQ ID NO: 146240 - DNA, 20 bp, synthetic construct
  source 1..20: mol_type = other DNA
ctttgtcagcagctgatgca

SEQ ID NO: 146241 - DNA, 20 bp, synthetic construct
  source 1..20: mol_type = other DNA
cctttgtcagcagctgatgc

SEQ ID NO: 146242 - DNA, 20 bp, synthetic construct
  source 1..20: mol_type = other DNA
acctttgtcagcagctgatg

SEQ ID NO: 146243 - DNA, 20 bp, synthetic construct
  source 1..20: mol_type = other DNA
gacctttgtcagcagctgat

SEQ ID NO: 146244 - DNA, 20 bp, synthetic construct
  source 1..20: mol_type = other DNA
ggacctttgtcagcagctga

SEQ ID NO: 146245 - DNA, 20 bp, synthetic construct
  source 1..20: mol_type = other DNA
gggacctttgtcagcagctg

SEQ ID NO: 146246 - DNA, 20 bp, synthetic construct
  source 1..20: mol_type = other DNA
agggacctttgtcagcagct

SEQ ID NO: 146247 - DNA, 20 bp, synthetic construct
  source 1..20: mol_type = other DNA
cagggacctttgtcagcagc

SEQ ID NO: 146248 - DNA, 20 bp, synthetic construct
  source 1..20: mol_type = other DNA
gcagggacctttgtcagcag

SEQ ID NO: 146249 - DNA, 20 bp, synthetic construct
  source 1..20: mol_type = other DNA
tgcagggacctttgtcagca

SEQ ID NO: 146250 - DNA, 20 bp, synthetic construct
  source 1..20: mol_type = other DNA
gtgcagggacctttgtcagc

SEQ ID NO: 146251 - DNA, 20 bp, synthetic construct
  source 1..20: mol_type = other DNA
agtgcagggacctttgtcag

SEQ ID NO: 146252 - DNA, 20 bp, synthetic construct
  source 1..20: mol_type = other DNA
gagtgcagggacctttgtca

SEQ ID NO: 146253 - DNA, 20 bp, synthetic construct
  source 1..20: mol_type = other DNA
ggagtgcagggacctttgtc

SEQ ID NO: 146254 - DNA, 20 bp, synthetic construct
  source 1..20: mol_type = other DNA
tggagtgcagggacctttgt

SEQ ID NO: 146255 - DNA, 20 bp, synthetic construct
  source 1..20: mol_type = other DNA
ctggagtgcagggacctttg

SEQ ID NO: 146256 - DNA, 20 bp, synthetic construct
  source 1..20: mol_type = other DNA
cctggagtgcagggaccttt

SEQ ID NO: 146257 - DNA, 20 bp, synthetic construct
  source 1..20: mol_type = other DNA
ccctggagtgcagggacctt

SEQ ID NO: 146258 - DNA, 20 bp, synthetic construct
  source 1..20: mol_type = other DNA
gccctggagtgcagggacct

SEQ ID NO: 146259 - DNA, 20 bp, synthetic construct
  source 1..20: mol_type = other DNA
ggccctggagtgcagggacc

SEQ ID NO: 146260 - DNA, 20 bp, synthetic construct
  source 1..20: mol_type = other DNA
gggccctggagtgcagggac

SEQ ID NO: 146261 - DNA, 20 bp, synthetic construct
  source 1..20: mol_type = other DNA
tgggccctggagtgcaggga

SEQ ID NO: 146262 - DNA, 20 bp, synthetic construct
  source 1..20: mol_type = other DNA
ctgggccctggagtgcaggg

SEQ ID NO: 146263 - DNA, 20 bp, synthetic construct
  source 1..20: mol_type = other DNA
cctgggccctggagtgcagg

SEQ ID NO: 146264 - DNA, 20 bp, synthetic construct
  source 1..20: mol_type = other DNA
ccctgggccctggagtgcag

SEQ ID NO: 146265 - DNA, 20 bp, synthetic construct
  source 1..20: mol_type = other DNA
cccctgggccctggagtgca

SEQ ID NO: 146266 - DNA, 20 bp, synthetic construct
  source 1..20: mol_type = other DNA
tcccctgggccctggagtgc

SEQ ID NO: 146267 - DNA, 20 bp, synthetic construct
  source 1..20: mol_type = other DNA
atcccctgggccctggagtg

SEQ ID NO: 146268 - DNA, 20 bp, synthetic construct
  source 1..20: mol_type = other DNA
aatcccctgggccctggagt

SEQ ID NO: 146269 - DNA, 20 bp, synthetic construct
  source 1..20: mol_type = other DNA
caatcccctgggccctggag

SEQ ID NO: 146270 - DNA, 20 bp, synthetic construct
  source 1..20: mol_type = other DNA
acaatcccctgggccctgga

SEQ ID NO: 146271 - DNA, 20 bp, synthetic construct
  source 1..20: mol_type = other DNA
gacaatcccctgggccctgg

SEQ ID NO: 146272 - DNA, 20 bp, synthetic construct
  source 1..20: mol_type = other DNA
agacaatcccctgggccctg

SEQ ID NO: 146273 - DNA, 20 bp, synthetic construct
  source 1..20: mol_type = other DNA
aagacaatcccctgggccct

SEQ ID NO: 146274 - DNA, 20 bp, synthetic construct
  source 1..20: mol_type = other DNA
taagacaatcccctgggccc

SEQ ID NO: 146275 - DNA, 20 bp, synthetic construct
  source 1..20: mol_type = other DNA
ttaagacaatcccctgggcc

SEQ ID NO: 146276 - DNA, 20 bp, synthetic construct
  source 1..20: mol_type = other DNA
attaagacaatcccctgggc

SEQ ID NO: 146277 - DNA, 20 bp, synthetic construct
  source 1..20: mol_type = other DNA
cattaagacaatcccctggg

SEQ ID NO: 146278 - DNA, 20 bp, synthetic construct
  source 1..20: mol_type = other DNA
tcattaagacaatcccctgg

SEQ ID NO: 146279 - DNA, 20 bp, synthetic construct
  source 1..20: mol_type = other DNA
ctcattaagacaatcccctg

SEQ ID NO: 146280 - DNA, 20 bp, synthetic construct
  source 1..20: mol_type = other DNA
cctcattaagacaatcccct

SEQ ID NO: 146281 - DNA, 20 bp, synthetic construct
  source 1..20: mol_type = other DNA
tcctcattaagacaatcccc

SEQ ID NO: 146282 - DNA, 20 bp, synthetic construct
  source 1..20: mol_type = other DNA
ctcctcattaagacaatccc

SEQ ID NO: 146283 - DNA, 20 bp, synthetic construct
  source 1..20: mol_type = other DNA
tctcctcattaagacaatcc

SEQ ID NO: 146284 - DNA, 20 bp, synthetic construct
  source 1..20: mol_type = other DNA
ttctcctcattaagacaatc

SEQ ID NO: 146285 - DNA, 20 bp, synthetic construct
  source 1..20: mol_type = other DNA
cttctcctcattaagacaat

SEQ ID NO: 146286 - DNA, 20 bp, synthetic construct
  source 1..20: mol_type = other DNA
ccttctcctcattaagacaa

SEQ ID NO: 146287 - DNA, 20 bp, synthetic construct
  source 1..20: mol_type = other DNA
tccttctcctcattaagaca

SEQ ID NO: 146288 - DNA, 20 bp, synthetic construct
  source 1..20: mol_type = other DNA
ctccttctcctcattaagac

SEQ ID NO: 146289 - DNA, 20 bp, synthetic construct
  source 1..20: mol_type = other DNA
gctccttctcctcattaaga

SEQ ID NO: 146290 - DNA, 20 bp, synthetic construct
  source 1..20: mol_type = other DNA
agctccttctcctcattaag

SEQ ID NO: 146291 - DNA, 20 bp, synthetic construct
  source 1..20: mol_type = other DNA
cagctccttctcctcattaa

SEQ ID NO: 146292 - DNA, 20 bp, synthetic construct
  source 1..20: mol_type = other DNA
gcagctccttctcctcatta

SEQ ID NO: 146293 - DNA, 20 bp, synthetic construct
  source 1..20: mol_type = other DNA
tgcagctccttctcctcatt

SEQ ID NO: 146294 - DNA, 20 bp, synthetic construct
  source 1..20: mol_type = other DNA
gtgcagctccttctcctcat

SEQ ID NO: 146295 - DNA, 20 bp, synthetic construct
  source 1..20: mol_type = other DNA
agtgcagctccttctcctca

SEQ ID NO: 146296 - DNA, 20 bp, synthetic construct
  source 1..20: mol_type = other DNA
cagtgcagctccttctcctc

SEQ ID NO: 146297 - DNA, 20 bp, synthetic construct
  source 1..20: mol_type = other DNA
tcagtgcagctccttctcct

SEQ ID NO: 146298 - DNA, 20 bp, synthetic construct
  source 1..20: mol_type = other DNA
ttcagtgcagctccttctcc

SEQ ID NO: 146299 - DNA, 20 bp, synthetic construct
  source 1..20: mol_type = other DNA
cttcagtgcagctccttctc

SEQ ID NO: 146300 - DNA, 20 bp, synthetic construct
  source 1..20: mol_type = other DNA
acttcagtgcagctccttct

SEQ ID NO: 146301 - DNA, 20 bp, synthetic construct
  source 1..20: mol_type = other DNA
aacttcagtgcagctccttc

SEQ ID NO: 146302 - DNA, 20 bp, synthetic construct
  source 1..20: mol_type = other DNA
caacttcagtgcagctcctt

SEQ ID NO: 146303 - DNA, 20 bp, synthetic construct
  source 1..20: mol_type = other DNA
ccaacttcagtgcagctcct

SEQ ID NO: 146304 - DNA, 20 bp, synthetic construct
  source 1..20: mol_type = other DNA
cccaacttcagtgcagctcc

SEQ ID NO: 146305 - DNA, 20 bp, synthetic construct
  source 1..20: mol_type = other DNA
gcccaacttcagtgcagctc

SEQ ID NO: 146306 - DNA, 20 bp, synthetic construct
  source 1..20: mol_type = other DNA
agcccaacttcagtgcagct

SEQ ID NO: 146307 - DNA, 20 bp, synthetic construct
  source 1..20: mol_type = other DNA
gagcccaacttcagtgcagc

SEQ ID NO: 146308 - DNA, 20 bp, synthetic construct
  source 1..20: mol_type = other DNA
agagcccaacttcagtgcag

SEQ ID NO: 146309 - DNA, 20 bp, synthetic construct
  source 1..20: mol_type = other DNA
tagagcccaacttcagtgca

SEQ ID NO: 146310 - DNA, 20 bp, synthetic construct
  source 1..20: mol_type = other DNA
ttagagcccaacttcagtgc

SEQ ID NO: 146311 - DNA, 20 bp, synthetic construct
  source 1..20: mol_type = other DNA
gttagagcccaacttcagtg

SEQ ID NO: 146312 - DNA, 20 bp, synthetic construct
  source 1..20: mol_type = other DNA
cgttagagcccaacttcagt

SEQ ID NO: 146313 - DNA, 20 bp, synthetic construct
  source 1..20: mol_type = other DNA
gcgttagagcccaacttcag

SEQ ID NO: 146314 - DNA, 20 bp, synthetic construct
  source 1..20: mol_type = other DNA
agcgttagagcccaacttca

SEQ ID NO: 146315 - DNA, 20 bp, synthetic construct
  source 1..20: mol_type = other DNA
cagcgttagagcccaacttc

SEQ ID NO: 146316 - DNA, 20 bp, synthetic construct
  source 1..20: mol_type = other DNA
ccagcgttagagcccaactt

SEQ ID NO: 146317 - DNA, 20 bp, synthetic construct
  source 1..20: mol_type = other DNA
gccagcgttagagcccaact

SEQ ID NO: 146318 - DNA, 20 bp, synthetic construct
  source 1..20: mol_type = other DNA
ggccagcgttagagcccaac

SEQ ID NO: 146319 - DNA, 20 bp, synthetic construct
  source 1..20: mol_type = other DNA
aggccagcgttagagcccaa

SEQ ID NO: 146320 - DNA, 20 bp, synthetic construct
  source 1..20: mol_type = other DNA
aaggccagcgttagagccca

SEQ ID NO: 146321 - DNA, 20 bp, synthetic construct
  source 1..20: mol_type = other DNA
caaggccagcgttagagccc

SEQ ID NO: 146322 - DNA, 20 bp, synthetic construct
  source 1..20: mol_type = other DNA
tcaaggccagcgttagagcc

SEQ ID NO: 146323 - DNA, 20 bp, synthetic construct
  source 1..20: mol_type = other DNA
ctcaaggccagcgttagagc

SEQ ID NO: 146324 - DNA, 20 bp, synthetic construct
  source 1..20: mol_type = other DNA
cctcaaggccagcgttagag

SEQ ID NO: 146325 - DNA, 20 bp, synthetic construct
  source 1..20: mol_type = other DNA
gcctcaaggccagcgttaga

SEQ ID NO: 146326 - DNA, 20 bp, synthetic construct
  source 1..20: mol_type = other DNA
ggcctcaaggccagcgttag

SEQ ID NO: 146327 - DNA, 20 bp, synthetic construct
  source 1..20: mol_type = other DNA
gggcctcaaggccagcgtta

SEQ ID NO: 146328 - DNA, 20 bp, synthetic construct
  source 1..20: mol_type = other DNA
agggcctcaaggccagcgtt

SEQ ID NO: 146329 - DNA, 20 bp, synthetic construct
  source 1..20: mol_type = other DNA
gagggcctcaaggccagcgt

SEQ ID NO: 146330 - DNA, 20 bp, synthetic construct
  source 1..20: mol_type = other DNA
ggagggcctcaaggccagcg

SEQ ID NO: 146331 - DNA, 20 bp, synthetic construct
  source 1..20: mol_type = other DNA
gggagggcctcaaggccagc

SEQ ID NO: 146332 - DNA, 20 bp, synthetic construct
  source 1..20: mol_type = other DNA
agggagggcctcaaggccag

SEQ ID NO: 146333 - DNA, 20 bp, synthetic construct
  source 1..20: mol_type = other DNA
cagggagggcctcaaggcca

SEQ ID NO: 146334 - DNA, 20 bp, synthetic construct
  source 1..20: mol_type = other DNA
ccagggagggcctcaaggcc

SEQ ID NO: 146335 - DNA, 20 bp, synthetic construct
  source 1..20: mol_type = other DNA
cccagggagggcctcaaggc

SEQ ID NO: 146336 - DNA, 20 bp, synthetic construct
  source 1..20: mol_type = other DNA
ccccagggagggcctcaagg

SEQ ID NO: 146337 - DNA, 20 bp, synthetic construct
  source 1..20: mol_type = other DNA
gccccagggagggcctcaag

SEQ ID NO: 146338 - DNA, 20 bp, synthetic construct
  source 1..20: mol_type = other DNA
agccccagggagggcctcaa

SEQ ID NO: 146339 - DNA, 20 bp, synthetic construct
  source 1..20: mol_type = other DNA
cagccccagggagggcctca

SEQ ID NO: 146340 - DNA, 20 bp, synthetic construct
  source 1..20: mol_type = other DNA
acagccccagggagggcctc

SEQ ID NO: 146341 - DNA, 20 bp, synthetic construct
  source 1..20: mol_type = other DNA
aacagccccagggagggcct

SEQ ID NO: 146342 - DNA, 20 bp, synthetic construct
  source 1..20: mol_type = other DNA
taacagccccagggagggcc

SEQ ID NO: 146343 - DNA, 20 bp, synthetic construct
  source 1..20: mol_type = other DNA
gtaacagccccagggagggc

SEQ ID NO: 146344 - DNA, 20 bp, synthetic construct
  source 1..20: mol_type = other DNA
cgtaacagccccagggaggg

SEQ ID NO: 146345 - DNA, 20 bp, synthetic construct
  source 1..20: mol_type = other DNA
ccgtaacagccccagggagg

SEQ ID NO: 146346 - DNA, 20 bp, synthetic construct
  source 1..20: mol_type = other DNA
cccgtaacagccccagggag

SEQ ID NO: 146347 - DNA, 20 bp, synthetic construct
  source 1..20: mol_type = other DNA
acccgtaacagccccaggga

SEQ ID NO: 146348 - DNA, 20 bp, synthetic construct
  source 1..20: mol_type = other DNA
cacccgtaacagccccaggg

SEQ ID NO: 146349 - DNA, 20 bp, synthetic construct
  source 1..20: mol_type = other DNA
tcacccgtaacagccccagg

SEQ ID NO: 146350 - DNA, 20 bp, synthetic construct
  source 1..20: mol_type = other DNA
ttcacccgtaacagccccag

SEQ ID NO: 146351 - DNA, 20 bp, synthetic construct
  source 1..20: mol_type = other DNA
attcacccgtaacagcccca

SEQ ID NO: 146352 - DNA, 20 bp, synthetic construct
  source 1..20: mol_type = other DNA
aattcacccgtaacagcccc

SEQ ID NO: 146353 - DNA, 20 bp, synthetic construct
  source 1..20: mol_type = other DNA
caattcacccgtaacagccc

SEQ ID NO: 146354 - DNA, 20 bp, synthetic construct
  source 1..20: mol_type = other DNA
ccaattcacccgtaacagcc

SEQ ID NO: 146355 - DNA, 20 bp, synthetic construct
  source 1..20: mol_type = other DNA
gccaattcacccgtaacagc

SEQ ID NO: 146356 - DNA, 20 bp, synthetic construct
  source 1..20: mol_type = other DNA
agccaattcacccgtaacag

SEQ ID NO: 146357 - DNA, 20 bp, synthetic construct
  source 1..20: mol_type = other DNA
cagccaattcacccgtaaca

SEQ ID NO: 146358 - DNA, 20 bp, synthetic construct
  source 1..20: mol_type = other DNA
acagccaattcacccgtaac

SEQ ID NO: 146359 - DNA, 20 bp, synthetic construct
  source 1..20: mol_type = other DNA
tacagccaattcacccgtaa

SEQ ID NO: 146360 - DNA, 20 bp, synthetic construct
  source 1..20: mol_type = other DNA
atacagccaattcacccgta

SEQ ID NO: 146361 - DNA, 20 bp, synthetic construct
  source 1..20: mol_type = other DNA
aatacagccaattcacccgt

SEQ ID NO: 146362 - DNA, 20 bp, synthetic construct
  source 1..20: mol_type = other DNA
taatacagccaattcacccg

SEQ ID NO: 146363 - DNA, 20 bp, synthetic construct
  source 1..20: mol_type = other DNA
ctaatacagccaattcaccc

SEQ ID NO: 146364 - DNA, 20 bp, synthetic construct
  source 1..20: mol_type = other DNA
tctaatacagccaattcacc

SEQ ID NO: 146365 - DNA, 20 bp, synthetic construct
  source 1..20: mol_type = other DNA
atctaatacagccaattcac

SEQ ID NO: 146366 - DNA, 20 bp, synthetic construct
  source 1..20: mol_type = other DNA
catctaatacagccaattca

SEQ ID NO: 146367 - DNA, 20 bp, synthetic construct
  source 1..20: mol_type = other DNA
acatctaatacagccaattc

SEQ ID NO: 146368 - DNA, 20 bp, synthetic construct
  source 1..20: mol_type = other DNA
gacatctaatacagccaatt

SEQ ID NO: 146369 - DNA, 20 bp, synthetic construct
  source 1..20: mol_type = other DNA
agacatctaatacagccaat

SEQ ID NO: 146370 - DNA, 20 bp, synthetic construct
  source 1..20: mol_type = other DNA
gagacatctaatacagccaa

SEQ ID NO: 146371 - DNA, 20 bp, synthetic construct
  source 1..20: mol_type = other DNA
agagacatctaatacagcca

SEQ ID NO: 146372 - DNA, 20 bp, synthetic construct
  source 1..20: mol_type = other DNA
cagagacatctaatacagcc

SEQ ID NO: 146373 - DNA, 20 bp, synthetic construct
  source 1..20: mol_type = other DNA
gcagagacatctaatacagc

SEQ ID NO: 146374 - DNA, 20 bp, synthetic construct
  source 1..20: mol_type = other DNA
agcagagacatctaatacag

SEQ ID NO: 146375 - DNA, 20 bp, synthetic construct
  source 1..20: mol_type = other DNA
tagcagagacatctaataca

SEQ ID NO: 146376 - DNA, 20 bp, synthetic construct
  source 1..20: mol_type = other DNA
gtagcagagacatctaatac

SEQ ID NO: 146377 - DNA, 20 bp, synthetic construct
  source 1..20: mol_type = other DNA
agtagcagagacatctaata

SEQ ID NO: 146378 - DNA, 20 bp, synthetic construct
  source 1..20: mol_type = other DNA
aagtagcagagacatctaat

SEQ ID NO: 146379 - DNA, 20 bp, synthetic construct
  source 1..20: mol_type = other DNA
aaagtagcagagacatctaa

SEQ ID NO: 146380 - DNA, 20 bp, synthetic construct
  source 1..20: mol_type = other DNA
gaaagtagcagagacatcta

SEQ ID NO: 146381 - DNA, 20 bp, synthetic construct
  source 1..20: mol_type = other DNA
tgaaagtagcagagacatct

SEQ ID NO: 146382 - DNA, 20 bp, synthetic construct
  source 1..20: mol_type = other DNA
atgaaagtagcagagacatc

SEQ ID NO: 146383 - DNA, 20 bp, synthetic construct
  source 1..20: mol_type = other DNA
tatgaaagtagcagagacat

SEQ ID NO: 146384 - DNA, 20 bp, synthetic construct
  source 1..20: mol_type = other DNA
ttatgaaagtagcagagaca

SEQ ID NO: 146385 - DNA, 20 bp, synthetic construct
  source 1..20: mol_type = other DNA
gttatgaaagtagcagagac

SEQ ID NO: 146386 - DNA, 20 bp, synthetic construct
  source 1..20: mol_type = other DNA
tgttatgaaagtagcagaga

SEQ ID NO: 146387 - DNA, 20 bp, synthetic construct
  source 1..20: mol_type = other DNA
ctgttatgaaagtagcagag

SEQ ID NO: 146388 - DNA, 20 bp, synthetic construct
  source 1..20: mol_type = other DNA
tctgttatgaaagtagcaga

SEQ ID NO: 146389 - DNA, 20 bp, synthetic construct
  source 1..20: mol_type = other DNA
ttctgttatgaaagtagcag

SEQ ID NO: 146390 - DNA, 20 bp, synthetic construct
  source 1..20: mol_type = other DNA
gttctgttatgaaagtagca

SEQ ID NO: 146391 - DNA, 20 bp, synthetic construct
  source 1..20: mol_type = other DNA
agttctgttatgaaagtagc

SEQ ID NO: 146392 - DNA, 20 bp, synthetic construct
  source 1..20: mol_type = other DNA
gagttctgttatgaaagtag

SEQ ID NO: 146393 - DNA, 20 bp, synthetic construct
  source 1..20: mol_type = other DNA
agagttctgttatgaaagta

SEQ ID NO: 146394 - DNA, 20 bp, synthetic construct
  source 1..20: mol_type = other DNA
gagagttctgttatgaaagt

SEQ ID NO: 146395 - DNA, 20 bp, synthetic construct
  source 1..20: mol_type = other DNA
agagagttctgttatgaaag

SEQ ID NO: 146396 - DNA, 20 bp, synthetic construct
  source 1..20: mol_type = other DNA
cagagagttctgttatgaaa

SEQ ID NO: 146397 - DNA, 20 bp, synthetic construct
  source 1..20: mol_type = other DNA
tcagagagttctgttatgaa

SEQ ID NO: 146398 - DNA, 20 bp, synthetic construct
  source 1..20: mol_type = other DNA
ctcagagagttctgttatga

SEQ ID NO: 146399 - DNA, 20 bp, synthetic construct
  source 1..20: mol_type = other DNA
cctcagagagttctgttatg

SEQ ID NO: 146400 - DNA, 20 bp, synthetic construct
  source 1..20: mol_type = other DNA
gcctcagagagttctgttat

SEQ ID NO: 146401 - DNA, 20 bp, synthetic construct
  source 1..20: mol_type = other DNA
cgcctcagagagttctgtta

SEQ ID NO: 146402 - DNA, 20 bp, synthetic construct
  source 1..20: mol_type = other DNA
ccgcctcagagagttctgtt

SEQ ID NO: 146403 - DNA, 20 bp, synthetic construct
  source 1..20: mol_type = other DNA
cccgcctcagagagttctgt

SEQ ID NO: 146404 - DNA, 20 bp, synthetic construct
  source 1..20: mol_type = other DNA
acccgcctcagagagttctg

SEQ ID NO: 146405 - DNA, 20 bp, synthetic construct
  source 1..20: mol_type = other DNA
gacccgcctcagagagttct

SEQ ID NO: 146406 - DNA, 20 bp, synthetic construct
  source 1..20: mol_type = other DNA
agacccgcctcagagagttc

SEQ ID NO: 146407 - DNA, 20 bp, synthetic construct
  source 1..20: mol_type = other DNA
tagacccgcctcagagagtt

SEQ ID NO: 146408 - DNA, 20 bp, synthetic construct
  source 1..20: mol_type = other DNA
ttagacccgcctcagagagt

SEQ ID NO: 146409 - DNA, 20 bp, synthetic construct
  source 1..20: mol_type = other DNA
cttagacccgcctcagagag

SEQ ID NO: 146410 - DNA, 20 bp, synthetic construct
  source 1..20: mol_type = other DNA
acttagacccgcctcagaga

SEQ ID NO: 146411 - DNA, 20 bp, synthetic construct
  source 1..20: mol_type = other DNA
cacttagacccgcctcagag

SEQ ID NO: 146412 - DNA, 20 bp, synthetic construct
  source 1..20: mol_type = other DNA
tcacttagacccgcctcaga

SEQ ID NO: 146413 - DNA, 20 bp, synthetic construct
  source 1..20: mol_type = other DNA
ctcacttagacccgcctcag

SEQ ID NO: 146414 - DNA, 20 bp, synthetic construct
  source 1..20: mol_type = other DNA
tctcacttagacccgcctca

SEQ ID NO: 146415 - DNA, 20 bp, synthetic construct
  source 1..20: mol_type = other DNA
gtctcacttagacccgcctc

SEQ ID NO: 146416 - DNA, 20 bp, synthetic construct
  source 1..20: mol_type = other DNA
ggtctcacttagacccgcct

SEQ ID NO: 146417 - DNA, 20 bp, synthetic construct
  source 1..20: mol_type = other DNA
aggtctcacttagacccgcc

SEQ ID NO: 146418 - DNA, 20 bp, synthetic construct
  source 1..20: mol_type = other DNA
caggtctcacttagacccgc

SEQ ID NO: 146419 - DNA, 20 bp, synthetic construct
  source 1..20: mol_type = other DNA
gcaggtctcacttagacccg

SEQ ID NO: 146420 - DNA, 20 bp, synthetic construct
  source 1..20: mol_type = other DNA
ggcaggtctcacttagaccc

SEQ ID NO: 146421 - DNA, 20 bp, synthetic construct
  source 1..20: mol_type = other DNA
tggcaggtctcacttagacc

SEQ ID NO: 146422 - DNA, 20 bp, synthetic construct
  source 1..20: mol_type = other DNA
gtggcaggtctcacttagac

SEQ ID NO: 146423 - DNA, 20 bp, synthetic construct
  source 1..20: mol_type = other DNA
tgtggcaggtctcacttaga

SEQ ID NO: 146424 - DNA, 20 bp, synthetic construct
  source 1..20: mol_type = other DNA
ttgtggcaggtctcacttag

SEQ ID NO: 146425 - DNA, 20 bp, synthetic construct
  source 1..20: mol_type = other DNA
attgtggcaggtctcactta

SEQ ID NO: 146426 - DNA, 20 bp, synthetic construct
  source 1..20: mol_type = other DNA
cattgtggcaggtctcactt

SEQ ID NO: 146427 - DNA, 20 bp, synthetic construct
  source 1..20: mol_type = other DNA
tcattgtggcaggtctcact

SEQ ID NO: 146428 - DNA, 20 bp, synthetic construct
  source 1..20: mol_type = other DNA
ttcattgtggcaggtctcac

SEQ ID NO: 146429 - DNA, 20 bp, synthetic construct
  source 1..20: mol_type = other DNA
attcattgtggcaggtctca

SEQ ID NO: 146430 - DNA, 20 bp, synthetic construct
  source 1..20: mol_type = other DNA
aattcattgtggcaggtctc

SEQ ID NO: 146431 - DNA, 20 bp, synthetic construct
  source 1..20: mol_type = other DNA
gaattcattgtggcaggtct

SEQ ID NO: 146432 - DNA, 20 bp, synthetic construct
  source 1..20: mol_type = other DNA
ggaattcattgtggcaggtc

SEQ ID NO: 146433 - DNA, 20 bp, synthetic construct
  source 1..20: mol_type = other DNA
tggaattcattgtggcaggt

SEQ ID NO: 146434 - DNA, 20 bp, synthetic construct
  source 1..20: mol_type = other DNA
atggaattcattgtggcagg

SEQ ID NO: 146435 - DNA, 20 bp, synthetic construct
  source 1..20: mol_type = other DNA
aatggaattcattgtggcag

SEQ ID NO: 146436 - DNA, 20 bp, synthetic construct
  source 1..20: mol_type = other DNA
aaatggaattcattgtggca

SEQ ID NO: 146437 - DNA, 20 bp, synthetic construct
  source 1..20: mol_type = other DNA
gaaatggaattcattgtggc

SEQ ID NO: 146438 - DNA, 20 bp, synthetic construct
  source 1..20: mol_type = other DNA
ggaaatggaattcattgtgg

SEQ ID NO: 146439 - DNA, 20 bp, synthetic construct
  source 1..20: mol_type = other DNA
aggaaatggaattcattgtg

SEQ ID NO: 146440 - DNA, 20 bp, synthetic construct
  source 1..20: mol_type = other DNA
caggaaatggaattcattgt

SEQ ID NO: 146441 - DNA, 20 bp, synthetic construct
  source 1..20: mol_type = other DNA
acaggaaatggaattcattg

SEQ ID NO: 146442 - DNA, 20 bp, synthetic construct
  source 1..20: mol_type = other DNA
aacaggaaatggaattcatt

SEQ ID NO: 146443 - DNA, 20 bp, synthetic construct
  source 1..20: mol_type = other DNA
taacaggaaatggaattcat

SEQ ID NO: 146444 - DNA, 20 bp, synthetic construct
  source 1..20: mol_type = other DNA
ttaacaggaaatggaattca

SEQ ID NO: 146445 - DNA, 20 bp, synthetic construct
  source 1..20: mol_type = other DNA
tttaacaggaaatggaattc

SEQ ID NO: 146446 - DNA, 20 bp, synthetic construct
  source 1..20: mol_type = other DNA
atttaacaggaaatggaatt

SEQ ID NO: 146447 - DNA, 20 bp, synthetic construct
  source 1..20: mol_type = other DNA
tatttaacaggaaatggaat

SEQ ID NO: 146448 - DNA, 20 bp, synthetic construct
  source 1..20: mol_type = other DNA
ctatttaacaggaaatggaa

SEQ ID NO: 146449 - DNA, 20 bp, synthetic construct
  source 1..20: mol_type = other DNA
actatttaacaggaaatgga

SEQ ID NO: 146450 - DNA, 20 bp, synthetic construct
  source 1..20: mol_type = other DNA
cactatttaacaggaaatgg

SEQ ID NO: 146451 - DNA, 20 bp, synthetic construct
  source 1..20: mol_type = other DNA
gcactatttaacaggaaatg

SEQ ID NO: 146452 - DNA, 20 bp, synthetic construct
  source 1..20: mol_type = other DNA
cgcactatttaacaggaaat

SEQ ID NO: 146453 - DNA, 20 bp, synthetic construct
  source 1..20: mol_type = other DNA
gcgcactatttaacaggaaa

SEQ ID NO: 146454 - DNA, 20 bp, synthetic construct
  source 1..20: mol_type = other DNA
ggcgcactatttaacaggaa

SEQ ID NO: 146455 - DNA, 20 bp, synthetic construct
  source 1..20: mol_type = other DNA
tggcgcactatttaacagga

SEQ ID NO: 146456 - DNA, 20 bp, synthetic construct
  source 1..20: mol_type = other DNA
ctggcgcactatttaacagg

SEQ ID NO: 146457 - DNA, 20 bp, synthetic construct
  source 1..20: mol_type = other DNA
actggcgcactatttaacag

SEQ ID NO: 146458 - DNA, 20 bp, synthetic construct
  source 1..20: mol_type = other DNA
cactggcgcactatttaaca

SEQ ID NO: 146459 - DNA, 20 bp, synthetic construct
  source 1..20: mol_type = other DNA
tcactggcgcactatttaac

SEQ ID NO: 146460 - DNA, 20 bp, synthetic construct
  source 1..20: mol_type = other DNA
ctcactggcgcactatttaa

SEQ ID NO: 146461 - DNA, 20 bp, synthetic construct
  source 1..20: mol_type = other DNA
cctcactggcgcactattta

SEQ ID NO: 146462 - DNA, 20 bp, synthetic construct
  source 1..20: mol_type = other DNA
gcctcactggcgcactattt

SEQ ID NO: 146463 - DNA, 20 bp, synthetic construct
  source 1..20: mol_type = other DNA
agcctcactggcgcactatt

SEQ ID NO: 146464 - DNA, 20 bp, synthetic construct
  source 1..20: mol_type = other DNA
gagcctcactggcgcactat

SEQ ID NO: 146465 - DNA, 20 bp, synthetic construct
  source 1..20: mol_type = other DNA
agagcctcactggcgcacta

SEQ ID NO: 146466 - DNA, 20 bp, synthetic construct
  source 1..20: mol_type = other DNA
cagagcctcactggcgcact

SEQ ID NO: 146467 - DNA, 20 bp, synthetic construct
  source 1..20: mol_type = other DNA
ccagagcctcactggcgcac

SEQ ID NO: 146468 - DNA, 20 bp, synthetic construct
  source 1..20: mol_type = other DNA
gccagagcctcactggcgca

SEQ ID NO: 146469 - DNA, 20 bp, synthetic construct
  source 1..20: mol_type = other DNA
tgccagagcctcactggcgc

SEQ ID NO: 146470 - DNA, 20 bp, synthetic construct
  source 1..20: mol_type = other DNA
ttgccagagcctcactggcg

SEQ ID NO: 146471 - DNA, 20 bp, synthetic construct
  source 1..20: mol_type = other DNA
cttgccagagcctcactggc

SEQ ID NO: 146472 - DNA, 20 bp, synthetic construct
  source 1..20: mol_type = other DNA
ccttgccagagcctcactgg

SEQ ID NO: 146473 - DNA, 20 bp, synthetic construct
  source 1..20: mol_type = other DNA
accttgccagagcctcactg

SEQ ID NO: 146474 - DNA, 20 bp, synthetic construct
  source 1..20: mol_type = other DNA
caccttgccagagcctcact

SEQ ID NO: 146475 - DNA, 20 bp, synthetic construct
  source 1..20: mol_type = other DNA
acaccttgccagagcctcac

SEQ ID NO: 146476 - DNA, 20 bp, synthetic construct
  source 1..20: mol_type = other DNA
cacaccttgccagagcctca

SEQ ID NO: 146477 - DNA, 20 bp, synthetic construct
  source 1..20: mol_type = other DNA
ccacaccttgccagagcctc

SEQ ID NO: 146478 - DNA, 20 bp, synthetic construct
  source 1..20: mol_type = other DNA
cccacaccttgccagagcct

SEQ ID NO: 146479 - DNA, 20 bp, synthetic construct
  source 1..20: mol_type = other DNA
gcccacaccttgccagagcc

SEQ ID NO: 146480 - DNA, 20 bp, synthetic construct
  source 1..20: mol_type = other DNA
agcccacaccttgccagagc

SEQ ID NO: 146481 - DNA, 20 bp, synthetic construct
  source 1..20: mol_type = other DNA
tagcccacaccttgccagag

SEQ ID NO: 146482 - DNA, 20 bp, synthetic construct
  source 1..20: mol_type = other DNA
ctagcccacaccttgccaga

SEQ ID NO: 146483 - DNA, 20 bp, synthetic construct
  source 1..20: mol_type = other DNA
tctagcccacaccttgccag

SEQ ID NO: 146484 - DNA, 20 bp, synthetic construct
  source 1..20: mol_type = other DNA
ctctagcccacaccttgcca

SEQ ID NO: 146485 - DNA, 20 bp, synthetic construct
  source 1..20: mol_type = other DNA
tctctagcccacaccttgcc

SEQ ID NO: 146486 - DNA, 20 bp, synthetic construct
  source 1..20: mol_type = other DNA
atctctagcccacaccttgc

SEQ ID NO: 146487 - DNA, 20 bp, synthetic construct
  source 1..20: mol_type = other DNA
catctctagcccacaccttg

SEQ ID NO: 146488 - DNA, 20 bp, synthetic construct
  source 1..20: mol_type = other DNA
gcatctctagcccacacctt

SEQ ID NO: 146489 - DNA, 20 bp, synthetic construct
  source 1..20: mol_type = other DNA
cgcatctctagcccacacct

SEQ ID NO: 146490 - DNA, 20 bp, synthetic construct
  source 1..20: mol_type = other DNA
tcgcatctctagcccacacc

SEQ ID NO: 146491 - DNA, 20 bp, synthetic construct
  source 1..20: mol_type = other DNA
gtcgcatctctagcccacac

SEQ ID NO: 146492 - DNA, 20 bp, synthetic construct
  source 1..20: mol_type = other DNA
agtcgcatctctagcccaca

SEQ ID NO: 146493 - DNA, 20 bp, synthetic construct
  source 1..20: mol_type = other DNA
gagtcgcatctctagcccac

SEQ ID NO: 146494 - DNA, 20 bp, synthetic construct
  source 1..20: mol_type = other DNA
tgagtcgcatctctagccca

SEQ ID NO: 146495 - DNA, 20 bp, synthetic construct
  source 1..20: mol_type = other DNA
ctgagtcgcatctctagccc

SEQ ID NO: 146496 - DNA, 20 bp, synthetic construct
  source 1..20: mol_type = other DNA
actgagtcgcatctctagcc

SEQ ID NO: 146497 - DNA, 20 bp, synthetic construct
  source 1..20: mol_type = other DNA
aactgagtcgcatctctagc

SEQ ID NO: 146498 - DNA, 20 bp, synthetic construct
  source 1..20: mol_type = other DNA
caactgagtcgcatctctag

SEQ ID NO: 146499 - DNA, 20 bp, synthetic construct
  source 1..20: mol_type = other DNA
ccaactgagtcgcatctcta

SEQ ID NO: 146500 - DNA, 20 bp, synthetic construct
  source 1..20: mol_type = other DNA
tccaactgagtcgcatctct

SEQ ID NO: 146501 - DNA, 20 bp, synthetic construct
  source 1..20: mol_type = other DNA
atccaactgagtcgcatctc

SEQ ID NO: 146502 - DNA, 20 bp, synthetic construct
  source 1..20: mol_type = other DNA
gatccaactgagtcgcatct

SEQ ID NO: 146503 - DNA, 20 bp, synthetic construct
  source 1..20: mol_type = other DNA
agatccaactgagtcgcatc

SEQ ID NO: 146504 - DNA, 20 bp, synthetic construct
  source 1..20: mol_type = other DNA
tagatccaactgagtcgcat

SEQ ID NO: 146505 - DNA, 20 bp, synthetic construct
  source 1..20: mol_type = other DNA
atagatccaactgagtcgca

SEQ ID NO: 146506 - DNA, 20 bp, synthetic construct
  source 1..20: mol_type = other DNA
gatagatccaactgagtcgc

SEQ ID NO: 146507 - DNA, 20 bp, synthetic construct
  source 1..20: mol_type = other DNA
agatagatccaactgagtcg

SEQ ID NO: 146508 - DNA, 20 bp, synthetic construct
  source 1..20: mol_type = other DNA
gagatagatccaactgagtc

SEQ ID NO: 146509 - DNA, 20 bp, synthetic construct
  source 1..20: mol_type = other DNA
agagatagatccaactgagt

SEQ ID NO: 146510 - DNA, 20 bp, synthetic construct
  source 1..20: mol_type = other DNA
gagagatagatccaactgag

SEQ ID NO: 146511 - DNA, 20 bp, synthetic construct
  source 1..20: mol_type = other DNA
tgagagatagatccaactga

SEQ ID NO: 146512 - DNA, 20 bp, synthetic construct
  source 1..20: mol_type = other DNA
ctgagagatagatccaactg

SEQ ID NO: 146513 - DNA, 20 bp, synthetic construct
  source 1..20: mol_type = other DNA
tctgagagatagatccaact

SEQ ID NO: 146514 - DNA, 20 bp, synthetic construct
  source 1..20: mol_type = other DNA
ttctgagagatagatccaac

SEQ ID NO: 146515 - DNA, 20 bp, synthetic construct
  source 1..20: mol_type = other DNA
cttctgagagatagatccaa

SEQ ID NO: 146516 - DNA, 20 bp, synthetic construct
  source 1..20: mol_type = other DNA
ccttctgagagatagatcca

SEQ ID NO: 146517 - DNA, 20 bp, synthetic construct
  source 1..20: mol_type = other DNA
gccttctgagagatagatcc

SEQ ID NO: 146518 - DNA, 20 bp, synthetic construct
  source 1..20: mol_type = other DNA
agccttctgagagatagatc

SEQ ID NO: 146519 - DNA, 20 bp, synthetic construct
  source 1..20: mol_type = other DNA
tagccttctgagagatagat

SEQ ID NO: 146520 - DNA, 20 bp, synthetic construct
  source 1..20: mol_type = other DNA
gtagccttctgagagataga

SEQ ID NO: 146521 - DNA, 20 bp, synthetic construct
  source 1..20: mol_type = other DNA
ggtagccttctgagagatag

SEQ ID NO: 146522 - DNA, 20 bp, synthetic construct
  source 1..20: mol_type = other DNA
aggtagccttctgagagata

SEQ ID NO: 146523 - DNA, 20 bp, synthetic construct
  source 1..20: mol_type = other DNA
aaggtagccttctgagagat

SEQ ID NO: 146524 - DNA, 20 bp, synthetic construct
  source 1..20: mol_type = other DNA
caaggtagccttctgagaga

SEQ ID NO: 146525 - DNA, 20 bp, synthetic construct
  source 1..20: mol_type = other DNA
acaaggtagccttctgagag

SEQ ID NO: 146526 - DNA, 20 bp, synthetic construct
  source 1..20: mol_type = other DNA
tacaaggtagccttctgaga

SEQ ID NO: 146527 - DNA, 20 bp, synthetic construct
  source 1..20: mol_type = other DNA
ttacaaggtagccttctgag

SEQ ID NO: 146528 - DNA, 20 bp, synthetic construct
  source 1..20: mol_type = other DNA
cttacaaggtagccttctga

SEQ ID NO: 146529 - DNA, 20 bp, synthetic construct
  source 1..20: mol_type = other DNA
acttacaaggtagccttctg

SEQ ID NO: 146530 - DNA, 20 bp, synthetic construct
  source 1..20: mol_type = other DNA
tacttacaaggtagccttct

SEQ ID NO: 146531 - DNA, 20 bp, synthetic construct
  source 1..20: mol_type = other DNA
ctacttacaaggtagccttc

SEQ ID NO: 146532 - DNA, 20 bp, synthetic construct
  source 1..20: mol_type = other DNA
tctacttacaaggtagcctt

SEQ ID NO: 146533 - DNA, 20 bp, synthetic construct
  source 1..20: mol_type = other DNA
ctctacttacaaggtagcct

SEQ ID NO: 146534 - DNA, 20 bp, synthetic construct
  source 1..20: mol_type = other DNA
actctacttacaaggtagcc

SEQ ID NO: 146535 - DNA, 20 bp, synthetic construct
  source 1..20: mol_type = other DNA
aactctacttacaaggtagc

SEQ ID NO: 146536 - DNA, 20 bp, synthetic construct
  source 1..20: mol_type = other DNA
gaactctacttacaaggtag

SEQ ID NO: 146537 - DNA, 20 bp, synthetic construct
  source 1..20: mol_type = other DNA
ggaactctacttacaaggta

SEQ ID NO: 146538 - DNA, 20 bp, synthetic construct
  source 1..20: mol_type = other DNA
tggaactctacttacaaggt

SEQ ID NO: 146539 - DNA, 20 bp, synthetic construct
  source 1..20: mol_type = other DNA
gtggaactctacttacaagg

SEQ ID NO: 146540 - DNA, 20 bp, synthetic construct
  source 1..20: mol_type = other DNA
tgtggaactctacttacaag

SEQ ID NO: 146541 - DNA, 20 bp, synthetic construct
  source 1..20: mol_type = other DNA
ctgtggaactctacttacaa

SEQ ID NO: 146542 - DNA, 20 bp, synthetic construct
  source 1..20: mol_type = other DNA
gctgtggaactctacttaca

SEQ ID NO: 146543 - DNA, 20 bp, synthetic construct
  source 1..20: mol_type = other DNA
agctgtggaactctacttac

SEQ ID NO: 146544 - DNA, 20 bp, synthetic construct
  source 1..20: mol_type = other DNA
gagctgtggaactctactta

SEQ ID NO: 146545 - DNA, 20 bp, synthetic construct
  source 1..20: mol_type = other DNA
agagctgtggaactctactt

SEQ ID NO: 146546 - DNA, 20 bp, synthetic construct
  source 1..20: mol_type = other DNA
cagagctgtggaactctact

SEQ ID NO: 146547 - DNA, 20 bp, synthetic construct
  source 1..20: mol_type = other DNA
ccagagctgtggaactctac

SEQ ID NO: 146548 - DNA, 20 bp, synthetic construct
  source 1..20: mol_type = other DNA
cccagagctgtggaactcta

SEQ ID NO: 146549 - DNA, 20 bp, synthetic construct
  source 1..20: mol_type = other DNA
tcccagagctgtggaactct

SEQ ID NO: 146550 - DNA, 20 bp, synthetic construct
  source 1..20: mol_type = other DNA
ttcccagagctgtggaactc

SEQ ID NO: 146551 - DNA, 20 bp, synthetic construct
  source 1..20: mol_type = other DNA
cttcccagagctgtggaact

SEQ ID NO: 146552 - DNA, 20 bp, synthetic construct
  source 1..20: mol_type = other DNA
acttcccagagctgtggaac

SEQ ID NO: 146553 - DNA, 20 bp, synthetic construct
  source 1..20: mol_type = other DNA
aacttcccagagctgtggaa

SEQ ID NO: 146554 - DNA, 20 bp, synthetic construct
  source 1..20: mol_type = other DNA
aaacttcccagagctgtgga

SEQ ID NO: 146555 - DNA, 20 bp, synthetic construct
  source 1..20: mol_type = other DNA
caaacttcccagagctgtgg

SEQ ID NO: 146556 - DNA, 20 bp, synthetic construct
  source 1..20: mol_type = other DNA
ccaaacttcccagagctgtg

SEQ ID NO: 146557 - DNA, 20 bp, synthetic construct
  source 1..20: mol_type = other DNA
cccaaacttcccagagctgt

SEQ ID NO: 146558 - DNA, 20 bp, synthetic construct
  source 1..20: mol_type = other DNA
gcccaaacttcccagagctg

SEQ ID NO: 146559 - DNA, 20 bp, synthetic construct
  source 1..20: mol_type = other DNA
cgcccaaacttcccagagct

SEQ ID NO: 146560 - DNA, 20 bp, synthetic construct
  source 1..20: mol_type = other DNA
acgcccaaacttcccagagc

SEQ ID NO: 146561 - DNA, 20 bp, synthetic construct
  source 1..20: mol_type = other DNA
gacgcccaaacttcccagag

SEQ ID NO: 146562 - DNA, 20 bp, synthetic construct
  source 1..20: mol_type = other DNA
ggacgcccaaacttcccaga

SEQ ID NO: 146563 - DNA, 20 bp, synthetic construct
  source 1..20: mol_type = other DNA
aggacgcccaaacttcccag

SEQ ID NO: 146564 - DNA, 20 bp, synthetic construct
  source 1..20: mol_type = other DNA
gaggacgcccaaacttccca

SEQ ID NO: 146565 - DNA, 20 bp, synthetic construct
  source 1..20: mol_type = other DNA
tgaggacgcccaaacttccc

SEQ ID NO: 146566 - DNA, 20 bp, synthetic construct
  source 1..20: mol_type = other DNA
gtgaggacgcccaaacttcc

SEQ ID NO: 146567 - DNA, 20 bp, synthetic construct
  source 1..20: mol_type = other DNA
ggtgaggacgcccaaacttc

SEQ ID NO: 146568 - DNA, 20 bp, synthetic construct
  source 1..20: mol_type = other DNA
gggtgaggacgcccaaactt

SEQ ID NO: 146569 - DNA, 20 bp, synthetic construct
  source 1..20: mol_type = other DNA
agggtgaggacgcccaaact

SEQ ID NO: 146570 - DNA, 20 bp, synthetic construct
  source 1..20: mol_type = other DNA
cagggtgaggacgcccaaac

SEQ ID NO: 146571 - DNA, 20 bp, synthetic construct
  source 1..20: mol_type = other DNA
gcagggtgaggacgcccaaa

SEQ ID NO: 146572 - DNA, 20 bp, synthetic construct
  source 1..20: mol_type = other DNA
tgcagggtgaggacgcccaa

SEQ ID NO: 146573 - DNA, 20 bp, synthetic construct
  source 1..20: mol_type = other DNA
ttgcagggtgaggacgccca

SEQ ID NO: 146574 - DNA, 20 bp, synthetic construct
  source 1..20: mol_type = other DNA
tttgcagggtgaggacgccc

SEQ ID NO: 146575 - DNA, 20 bp, synthetic construct
  source 1..20: mol_type = other DNA
ctttgcagggtgaggacgcc

SEQ ID NO: 146576 - DNA, 20 bp, synthetic construct
  source 1..20: mol_type = other DNA
actttgcagggtgaggacgc

SEQ ID NO: 146577 - DNA, 20 bp, synthetic construct
  source 1..20: mol_type = other DNA
aactttgcagggtgaggacg

SEQ ID NO: 146578 - DNA, 20 bp, synthetic construct
  source 1..20: mol_type = other DNA
aaactttgcagggtgaggac

SEQ ID NO: 146579 - DNA, 20 bp, synthetic construct
  source 1..20: mol_type = other DNA
taaactttgcagggtgagga

SEQ ID NO: 146580 - DNA, 20 bp, synthetic construct
  source 1..20: mol_type = other DNA
ctaaactttgcagggtgagg

SEQ ID NO: 146581 - DNA, 20 bp, synthetic construct
  source 1..20: mol_type = other DNA
cctaaactttgcagggtgag

SEQ ID NO: 146582 - DNA, 20 bp, synthetic construct
  source 1..20: mol_type = other DNA
acctaaactttgcagggtga

SEQ ID NO: 146583 - DNA, 20 bp, synthetic construct
  source 1..20: mol_type = other DNA
aacctaaactttgcagggtg

SEQ ID NO: 146584 - DNA, 20 bp, synthetic construct
  source 1..20: mol_type = other DNA
gaacctaaactttgcagggt

SEQ ID NO: 146585 - DNA, 20 bp, synthetic construct
  source 1..20: mol_type = other DNA
agaacctaaactttgcaggg

SEQ ID NO: 146586 - DNA, 20 bp, synthetic construct
  source 1..20: mol_type = other DNA
cagaacctaaactttgcagg

SEQ ID NO: 146587 - DNA, 20 bp, synthetic construct
  source 1..20: mol_type = other DNA
acagaacctaaactttgcag

SEQ ID NO: 146588 - DNA, 20 bp, synthetic construct
  source 1..20: mol_type = other DNA
cacagaacctaaactttgca

SEQ ID NO: 146589 - DNA, 20 bp, synthetic construct
  source 1..20: mol_type = other DNA
ccacagaacctaaactttgc

SEQ ID NO: 146590 - DNA, 20 bp, synthetic construct
  source 1..20: mol_type = other DNA
accacagaacctaaactttg

SEQ ID NO: 146591 - DNA, 20 bp, synthetic construct
  source 1..20: mol_type = other DNA
caccacagaacctaaacttt

SEQ ID NO: 146592 - DNA, 20 bp, synthetic construct
  source 1..20: mol_type = other DNA
acaccacagaacctaaactt

SEQ ID NO: 146593 - DNA, 20 bp, synthetic construct
  source 1..20: mol_type = other DNA
tacaccacagaacctaaact

SEQ ID NO: 146594 - DNA, 20 bp, synthetic construct
  source 1..20: mol_type = other DNA
ctacaccacagaacctaaac

SEQ ID NO: 146595 - DNA, 20 bp, synthetic construct
  source 1..20: mol_type = other DNA
gctacaccacagaacctaaa

SEQ ID NO: 146596 - DNA, 20 bp, synthetic construct
  source 1..20: mol_type = other DNA
cgctacaccacagaacctaa

SEQ ID NO: 146597 - DNA, 20 bp, synthetic construct
  source 1..20: mol_type = other DNA
gcgctacaccacagaaccta

SEQ ID NO: 146598 - DNA, 20 bp, synthetic construct
  source 1..20: mol_type = other DNA
tgcgctacaccacagaacct

SEQ ID NO: 146599 - DNA, 20 bp, synthetic construct
  source 1..20: mol_type = other DNA
gtgcgctacaccacagaacc

SEQ ID NO: 146600 - DNA, 20 bp, synthetic construct
  source 1..20: mol_type = other DNA
agtgcgctacaccacagaac

SEQ ID NO: 146601 - DNA, 20 bp, synthetic construct
  source 1..20: mol_type = other DNA
cagtgcgctacaccacagaa

SEQ ID NO: 146602 - DNA, 20 bp, synthetic construct
  source 1..20: mol_type = other DNA
gcagtgcgctacaccacaga

SEQ ID NO: 146603 - DNA, 20 bp, synthetic construct
  source 1..20: mol_type = other DNA
tgcagtgcgctacaccacag

SEQ ID NO: 146604 - DNA, 20 bp, synthetic construct
  source 1..20: mol_type = other DNA
ctgcagtgcgctacaccaca

SEQ ID NO: 146605 - DNA, 20 bp, synthetic construct
  source 1..20: mol_type = other DNA
actgcagtgcgctacaccac

SEQ ID NO: 146606 - DNA, 20 bp, synthetic construct
  source 1..20: mol_type = other DNA
aactgcagtgcgctacacca

SEQ ID NO: 146607 - DNA, 20 bp, synthetic construct
  source 1..20: mol_type = other DNA
caactgcagtgcgctacacc

SEQ ID NO: 146608 - DNA, 20 bp, synthetic construct
  source 1..20: mol_type = other DNA
tcaactgcagtgcgctacac

SEQ ID NO: 146609 - DNA, 20 bp, synthetic construct
  source 1..20: mol_type = other DNA
atcaactgcagtgcgctaca

SEQ ID NO: 146610 - DNA, 20 bp, synthetic construct
  source 1..20: mol_type = other DNA
aatcaactgcagtgcgctac

SEQ ID NO: 146611 - DNA, 20 bp, synthetic construct
  source 1..20: mol_type = other DNA
aaatcaactgcagtgcgcta

SEQ ID NO: 146612 - DNA, 20 bp, synthetic construct
  source 1..20: mol_type = other DNA
caaatcaactgcagtgcgct

SEQ ID NO: 146613 - DNA, 20 bp, synthetic construct
  source 1..20: mol_type = other DNA
gcaaatcaactgcagtgcgc

SEQ ID NO: 146614 - DNA, 20 bp, synthetic construct
  source 1..20: mol_type = other DNA
agcaaatcaactgcagtgcg

SEQ ID NO: 146615 - DNA, 20 bp, synthetic construct
  source 1..20: mol_type = other DNA
aagcaaatcaactgcagtgc

SEQ ID NO: 146616 - DNA, 20 bp, synthetic construct
  source 1..20: mol_type = other DNA
aaagcaaatcaactgcagtg

SEQ ID NO: 146617 - DNA, 20 bp, synthetic construct
  source 1..20: mol_type = other DNA
aaaagcaaatcaactgcagt

SEQ ID NO: 146618 - DNA, 20 bp, synthetic construct
  source 1..20: mol_type = other DNA
aaaaagcaaatcaactgcag

SEQ ID NO: 146619 - DNA, 20 bp, synthetic construct
  source 1..20: mol_type = other DNA
caaaaagcaaatcaactgca

SEQ ID NO: 146620 - DNA, 20 bp, synthetic construct
  source 1..20: mol_type = other DNA
tcaaaaagcaaatcaactgc

SEQ ID NO: 146621 - DNA, 20 bp, synthetic construct
  source 1..20: mol_type = other DNA
atcaaaaagcaaatcaactg

SEQ ID NO: 146622 - DNA, 20 bp, synthetic construct
  source 1..20: mol_type = other DNA
tatcaaaaagcaaatcaact

SEQ ID NO: 146623 - DNA, 20 bp, synthetic construct
  source 1..20: mol_type = other DNA
ctatcaaaaagcaaatcaac

SEQ ID NO: 146624 - DNA, 20 bp, synthetic construct
  source 1..20: mol_type = other DNA
actatcaaaaagcaaatcaa

SEQ ID NO: 146625 - DNA, 20 bp, synthetic construct
  source 1..20: mol_type = other DNA
cactatcaaaaagcaaatca

SEQ ID NO: 146626 - DNA, 20 bp, synthetic construct
  source 1..20: mol_type = other DNA
ccactatcaaaaagcaaatc

SEQ ID NO: 146627 - DNA, 20 bp, synthetic construct
  source 1..20: mol_type = other DNA
cccactatcaaaaagcaaat

SEQ ID NO: 146628 - DNA, 20 bp, synthetic construct
  source 1..20: mol_type = other DNA
ccccactatcaaaaagcaaa

SEQ ID NO: 146629 - DNA, 20 bp, synthetic construct
  source 1..20: mol_type = other DNA
tccccactatcaaaaagcaa

SEQ ID NO: 146630 - DNA, 20 bp, synthetic construct
  source 1..20: mol_type = other DNA
ctccccactatcaaaaagca

SEQ ID NO: 146631 - DNA, 20 bp, synthetic construct
  source 1..20: mol_type = other DNA
cctccccactatcaaaaagc

SEQ ID NO: 146632 - DNA, 20 bp, synthetic construct
  source 1..20: mol_type = other DNA
ccctccccactatcaaaaag

SEQ ID NO: 146633 - DNA, 20 bp, synthetic construct
  source 1..20: mol_type = other DNA
tccctccccactatcaaaaa

SEQ ID NO: 146634 - DNA, 20 bp, synthetic construct
  source 1..20: mol_type = other DNA
ttccctccccactatcaaaa

SEQ ID NO: 146635 - DNA, 20 bp, synthetic construct
  source 1..20: mol_type = other DNA
cttccctccccactatcaaa

SEQ ID NO: 146636 - DNA, 20 bp, synthetic construct
  source 1..20: mol_type = other DNA
gcttccctccccactatcaa

SEQ ID NO: 146637 - DNA, 20 bp, synthetic construct
  source 1..20: mol_type = other DNA
ggcttccctccccactatca

SEQ ID NO: 146638 - DNA, 20 bp, synthetic construct
  source 1..20: mol_type = other DNA
cggcttccctccccactatc

SEQ ID NO: 146639 - DNA, 20 bp, synthetic construct
  source 1..20: mol_type = other DNA
ccggcttccctccccactat

SEQ ID NO: 146640 - DNA, 20 bp, synthetic construct
  source 1..20: mol_type = other DNA
accggcttccctccccacta

SEQ ID NO: 146641 - DNA, 20 bp, synthetic construct
  source 1..20: mol_type = other DNA
aaccggcttccctccccact

SEQ ID NO: 146642 - DNA, 20 bp, synthetic construct
  source 1..20: mol_type = other DNA
aaaccggcttccctccccac

SEQ ID NO: 146643 - DNA, 20 bp, synthetic construct
  source 1..20: mol_type = other DNA
caaaccggcttccctcccca

SEQ ID NO: 146644 - DNA, 20 bp, synthetic construct
  source 1..20: mol_type = other DNA
ccaaaccggcttccctcccc

SEQ ID NO: 146645 - DNA, 20 bp, synthetic construct
  source 1..20: mol_type = other DNA
accaaaccggcttccctccc

SEQ ID NO: 146646 - DNA, 20 bp, synthetic construct
  source 1..20: mol_type = other DNA
gaccaaaccggcttccctcc

SEQ ID NO: 146647 - DNA, 20 bp, synthetic construct
  source 1..20: mol_type = other DNA
ggaccaaaccggcttccctc

SEQ ID NO: 146648 - DNA, 20 bp, synthetic construct
  source 1..20: mol_type = other DNA
cggaccaaaccggcttccct

SEQ ID NO: 146649 - DNA, 20 bp, synthetic construct
  source 1..20: mol_type = other DNA
acggaccaaaccggcttccc

SEQ ID NO: 146650 - DNA, 20 bp, synthetic construct
  source 1..20: mol_type = other DNA
cacggaccaaaccggcttcc

SEQ ID NO: 146651 - DNA, 20 bp, synthetic construct
  source 1..20: mol_type = other DNA
acacggaccaaaccggcttc

SEQ ID NO: 146652 - DNA, 20 bp, synthetic construct
  source 1..20: mol_type = other DNA
cacacggaccaaaccggctt

SEQ ID NO: 146653 - DNA, 20 bp, synthetic construct
  source 1..20: mol_type = other DNA
ccacacggaccaaaccggct

SEQ ID NO: 146654 - DNA, 20 bp, synthetic construct
  source 1..20: mol_type = other DNA
cccacacggaccaaaccggc

SEQ ID NO: 146655 - DNA, 20 bp, synthetic construct
  source 1..20: mol_type = other DNA
gcccacacggaccaaaccgg

SEQ ID NO: 146656 - DNA, 20 bp, synthetic construct
  source 1..20: mol_type = other DNA
ggcccacacggaccaaaccg

SEQ ID NO: 146657 - DNA, 20 bp, synthetic construct
  source 1..20: mol_type = other DNA
tggcccacacggaccaaacc

SEQ ID NO: 146658 - DNA, 20 bp, synthetic construct
  source 1..20: mol_type = other DNA
ctggcccacacggaccaaac

SEQ ID NO: 146659 - DNA, 20 bp, synthetic construct
  source 1..20: mol_type = other DNA
gctggcccacacggaccaaa

SEQ ID NO: 146660 - DNA, 20 bp, synthetic construct
  source 1..20: mol_type = other DNA
cgctggcccacacggaccaa

SEQ ID NO: 146661 - DNA, 20 bp, synthetic construct
  source 1..20: mol_type = other DNA
acgctggcccacacggacca

SEQ ID NO: 146662 - DNA, 20 bp, synthetic construct
  source 1..20: mol_type = other DNA
cacgctggcccacacggacc

SEQ ID NO: 146663 - DNA, 20 bp, synthetic construct
  source 1..20: mol_type = other DNA
ccacgctggcccacacggac

SEQ ID NO: 146664 - DNA, 20 bp, synthetic construct
  source 1..20: mol_type = other DNA
accacgctggcccacacgga

SEQ ID NO: 146665 - DNA, 20 bp, synthetic construct
  source 1..20: mol_type = other DNA
aaccacgctggcccacacgg

SEQ ID NO: 146666 - DNA, 20 bp, synthetic construct
  source 1..20: mol_type = other DNA
aaaccacgctggcccacacg

SEQ ID NO: 146667 - DNA, 20 bp, synthetic construct
  source 1..20: mol_type = other DNA
caaaccacgctggcccacac

SEQ ID NO: 146668 - DNA, 20 bp, synthetic construct
  source 1..20: mol_type = other DNA
ccaaaccacgctggcccaca

SEQ ID NO: 146669 - DNA, 20 bp, synthetic construct
  source 1..20: mol_type = other DNA
accaaaccacgctggcccac

SEQ ID NO: 146670 - DNA, 20 bp, synthetic construct
  source 1..20: mol_type = other DNA
caccaaaccacgctggccca

SEQ ID NO: 146671 - DNA, 20 bp, synthetic construct
  source 1..20: mol_type = other DNA
ccaccaaaccacgctggccc

SEQ ID NO: 146672 - DNA, 20 bp, synthetic construct
  source 1..20: mol_type = other DNA
tccaccaaaccacgctggcc

SEQ ID NO: 146673 - DNA, 20 bp, synthetic construct
  source 1..20: mol_type = other DNA
ctccaccaaaccacgctggc

SEQ ID NO: 146674 - DNA, 20 bp, synthetic construct
  source 1..20: mol_type = other DNA
actccaccaaaccacgctgg

SEQ ID NO: 146675 - DNA, 20 bp, synthetic construct
  source 1..20: mol_type = other DNA
gactccaccaaaccacgctg

SEQ ID NO: 146676 - DNA, 20 bp, synthetic construct
  source 1..20: mol_type = other DNA
tgactccaccaaaccacgct

SEQ ID NO: 146677 - DNA, 20 bp, synthetic construct
  source 1..20: mol_type = other DNA
ctgactccaccaaaccacgc

SEQ ID NO: 146678 - DNA, 20 bp, synthetic construct
  source 1..20: mol_type = other DNA
gctgactccaccaaaccacg

SEQ ID NO: 146679 - DNA, 20 bp, synthetic construct
  source 1..20: mol_type = other DNA
agctgactccaccaaaccac

SEQ ID NO: 146680 - DNA, 20 bp, synthetic construct
  source 1..20: mol_type = other DNA
aagctgactccaccaaacca

SEQ ID NO: 146681 - DNA, 20 bp, synthetic construct
  source 1..20: mol_type = other DNA
gaagctgactccaccaaacc

SEQ ID NO: 146682 - DNA, 20 bp, synthetic construct
  source 1..20: mol_type = other DNA
tgaagctgactccaccaaac

SEQ ID NO: 146683 - DNA, 20 bp, synthetic construct
  source 1..20: mol_type = other DNA
atgaagctgactccaccaaa

SEQ ID NO: 146684 - DNA, 20 bp, synthetic construct
  source 1..20: mol_type = other DNA
tatgaagctgactccaccaa

SEQ ID NO: 146685 - DNA, 20 bp, synthetic construct
  source 1..20: mol_type = other DNA
ttatgaagctgactccacca

SEQ ID NO: 146686 - DNA, 20 bp, synthetic construct
  source 1..20: mol_type = other DNA
cttatgaagctgactccacc

SEQ ID NO: 146687 - DNA, 20 bp, synthetic construct
  source 1..20: mol_type = other DNA
tcttatgaagctgactccac

SEQ ID NO: 146688 - DNA, 20 bp, synthetic construct
  source 1..20: mol_type = other DNA
ctcttatgaagctgactcca

SEQ ID NO: 146689 - DNA, 20 bp, synthetic construct
  source 1..20: mol_type = other DNA
gctcttatgaagctgactcc

SEQ ID NO: 146690 - DNA, 20 bp, synthetic construct
  source 1..20: mol_type = other DNA
agctcttatgaagctgactc

SEQ ID NO: 146691 - DNA, 20 bp, synthetic construct
  source 1..20: mol_type = other DNA
cagctcttatgaagctgact

SEQ ID NO: 146692 - DNA, 20 bp, synthetic construct
  source 1..20: mol_type = other DNA
ccagctcttatgaagctgac

SEQ ID NO: 146693 - DNA, 20 bp, synthetic construct
  source 1..20: mol_type = other DNA
cccagctcttatgaagctga

SEQ ID NO: 146694 - DNA, 20 bp, synthetic construct
  source 1..20: mol_type = other DNA
ccccagctcttatgaagctg

SEQ ID NO: 146695 - DNA, 20 bp, synthetic construct
  source 1..20: mol_type = other DNA
accccagctcttatgaagct

SEQ ID NO: 146696 - DNA, 20 bp, synthetic construct
  source 1..20: mol_type = other DNA
gaccccagctcttatgaagc

SEQ ID NO: 146697 - DNA, 20 bp, synthetic construct
  source 1..20: mol_type = other DNA
ggaccccagctcttatgaag

SEQ ID NO: 146698 - DNA, 20 bp, synthetic construct
  source 1..20: mol_type = other DNA
aggaccccagctcttatgaa

SEQ ID NO: 146699 - DNA, 20 bp, synthetic construct
  source 1..20: mol_type = other DNA
caggaccccagctcttatga

SEQ ID NO: 146700 - DNA, 20 bp, synthetic construct
  source 1..20: mol_type = other DNA
acaggaccccagctcttatg

SEQ ID NO: 146701 - DNA, 20 bp, synthetic construct
  source 1..20: mol_type = other DNA
tacaggaccccagctcttat

SEQ ID NO: 146702 - DNA, 20 bp, synthetic construct
  source 1..20: mol_type = other DNA
ctacaggaccccagctctta

SEQ ID NO: 146703 - DNA, 20 bp, synthetic construct
  source 1..20: mol_type = other DNA
cctacaggaccccagctctt

SEQ ID NO: 146704 - DNA, 20 bp, synthetic construct
  source 1..20: mol_type = other DNA
acctacaggaccccagctct

SEQ ID NO: 146705 - DNA, 20 bp, synthetic construct
  source 1..20: mol_type = other DNA
cacctacaggaccccagctc

SEQ ID NO: 146706 - DNA, 20 bp, synthetic construct
  source 1..20: mol_type = other DNA
acacctacaggaccccagct

SEQ ID NO: 146707 - DNA, 20 bp, synthetic construct
  source 1..20: mol_type = other DNA
gacacctacaggaccccagc

SEQ ID NO: 146708 - DNA, 20 bp, synthetic construct
  source 1..20: mol_type = other DNA
agacacctacaggaccccag

SEQ ID NO: 146709 - DNA, 20 bp, synthetic construct
  source 1..20: mol_type = other DNA
tagacacctacaggacccca

SEQ ID NO: 146710 - DNA, 20 bp, synthetic construct
  source 1..20: mol_type = other DNA
gtagacacctacaggacccc

SEQ ID NO: 146711 - DNA, 20 bp, synthetic construct
  source 1..20: mol_type = other DNA
ggtagacacctacaggaccc

SEQ ID NO: 146712 - DNA, 20 bp, synthetic construct
  source 1..20: mol_type = other DNA
tggtagacacctacaggacc

SEQ ID NO: 146713 - DNA, 20 bp, synthetic construct
  source 1..20: mol_type = other DNA
ctggtagacacctacaggac

SEQ ID NO: 146714 - DNA, 20 bp, synthetic construct
  source 1..20: mol_type = other DNA
tctggtagacacctacagga

SEQ ID NO: 146715 - DNA, 20 bp, synthetic construct
  source 1..20: mol_type = other DNA
ctctggtagacacctacagg

SEQ ID NO: 146716 - DNA, 20 bp, synthetic construct
  source 1..20: mol_type = other DNA
cctctggtagacacctacag

SEQ ID NO: 146717 - DNA, 20 bp, synthetic construct
  source 1..20: mol_type = other DNA
gcctctggtagacacctaca

SEQ ID NO: 146718 - DNA, 20 bp, synthetic construct
  source 1..20: mol_type = other DNA
agcctctggtagacacctac

SEQ ID NO: 146719 - DNA, 20 bp, synthetic construct
  source 1..20: mol_type = other DNA
cagcctctggtagacaccta

SEQ ID NO: 146720 - DNA, 20 bp, synthetic construct
  source 1..20: mol_type = other DNA
ccagcctctggtagacacct

SEQ ID NO: 146721 - DNA, 20 bp, synthetic construct
  source 1..20: mol_type = other DNA
accagcctctggtagacacc

SEQ ID NO: 146722 - DNA, 20 bp, synthetic construct
  source 1..20: mol_type = other DNA
caccagcctctggtagacac

SEQ ID NO: 146723 - DNA, 20 bp, synthetic construct
  source 1..20: mol_type = other DNA
ccaccagcctctggtagaca

SEQ ID NO: 146724 - DNA, 20 bp, synthetic construct
  source 1..20: mol_type = other DNA
gccaccagcctctggtagac

SEQ ID NO: 146725 - DNA, 20 bp, synthetic construct
  source 1..20: mol_type = other DNA
agccaccagcctctggtaga

SEQ ID NO: 146726 - DNA, 20 bp, synthetic construct
  source 1..20: mol_type = other DNA
tagccaccagcctctggtag

SEQ ID NO: 146727 - DNA, 20 bp, synthetic construct
  source 1..20: mol_type = other DNA
ttagccaccagcctctggta

SEQ ID NO: 146728 - DNA, 20 bp, synthetic construct
  source 1..20: mol_type = other DNA
cttagccaccagcctctggt

SEQ ID NO: 146729 - DNA, 20 bp, synthetic construct
  source 1..20: mol_type = other DNA
acttagccaccagcctctgg

SEQ ID NO: 146730 - DNA, 20 bp, synthetic construct
  source 1..20: mol_type = other DNA
tacttagccaccagcctctg

SEQ ID NO: 146731 - DNA, 20 bp, synthetic construct
  source 1..20: mol_type = other DNA
ctacttagccaccagcctct

SEQ ID NO: 146732 - DNA, 20 bp, synthetic construct
  source 1..20: mol_type = other DNA
cctacttagccaccagcctc

SEQ ID NO: 146733 - DNA, 20 bp, synthetic construct
  source 1..20: mol_type = other DNA
gcctacttagccaccagcct

SEQ ID NO: 146734 - DNA, 20 bp, synthetic construct
  source 1..20: mol_type = other DNA
tgcctacttagccaccagcc

SEQ ID NO: 146735 - DNA, 20 bp, synthetic construct
  source 1..20: mol_type = other DNA
atgcctacttagccaccagc

SEQ ID NO: 146736 - DNA, 20 bp, synthetic construct
  source 1..20: mol_type = other DNA
catgcctacttagccaccag

SEQ ID NO: 146737 - DNA, 20 bp, synthetic construct
  source 1..20: mol_type = other DNA
acatgcctacttagccacca

SEQ ID NO: 146738 - DNA, 20 bp, synthetic construct
  source 1..20: mol_type = other DNA
cacatgcctacttagccacc

SEQ ID NO: 146739 - DNA, 20 bp, synthetic construct
  source 1..20: mol_type = other DNA
tcacatgcctacttagccac

SEQ ID NO: 146740 - DNA, 20 bp, synthetic construct
  source 1..20: mol_type = other DNA
ttcacatgcctacttagcca

SEQ ID NO: 146741 - DNA, 20 bp, synthetic construct
  source 1..20: mol_type = other DNA
gttcacatgcctacttagcc

SEQ ID NO: 146742 - DNA, 20 bp, synthetic construct
  source 1..20: mol_type = other DNA
agttcacatgcctacttagc

SEQ ID NO: 146743 - DNA, 20 bp, synthetic construct
  source 1..20: mol_type = other DNA
aagttcacatgcctacttag

SEQ ID NO: 146744 - DNA, 20 bp, synthetic construct
  source 1..20: mol_type = other DNA
taagttcacatgcctactta

SEQ ID NO: 146745 - DNA, 20 bp, synthetic construct
  source 1..20: mol_type = other DNA
gtaagttcacatgcctactt

SEQ ID NO: 146746 - DNA, 20 bp, synthetic construct
  source 1..20: mol_type = other DNA
tgtaagttcacatgcctact

SEQ ID NO: 146747 - DNA, 20 bp, synthetic construct
  source 1..20: mol_type = other DNA
atgtaagttcacatgcctac

SEQ ID NO: 146748 - DNA, 20 bp, synthetic construct
  source 1..20: mol_type = other DNA
catgtaagttcacatgccta

SEQ ID NO: 146749 - DNA, 20 bp, synthetic construct
  source 1..20: mol_type = other DNA
acatgtaagttcacatgcct

SEQ ID NO: 146750 - DNA, 20 bp, synthetic construct
  source 1..20: mol_type = other DNA
tacatgtaagttcacatgcc

SEQ ID NO: 146751 - DNA, 20 bp, synthetic construct
  source 1..20: mol_type = other DNA
ttacatgtaagttcacatgc

SEQ ID NO: 146752 - DNA, 20 bp, synthetic construct
  source 1..20: mol_type = other DNA
cttacatgtaagttcacatg

SEQ ID NO: 146753 - DNA, 20 bp, synthetic construct
  source 1..20: mol_type = other DNA
acttacatgtaagttcacat

SEQ ID NO: 146754 - DNA, 20 bp, synthetic construct
  source 1..20: mol_type = other DNA
gacttacatgtaagttcaca

SEQ ID NO: 146755 - DNA, 20 bp, synthetic construct
  source 1..20: mol_type = other DNA
tgacttacatgtaagttcac

SEQ ID NO: 146756 - DNA, 20 bp, synthetic construct
  source 1..20: mol_type = other DNA
ctgacttacatgtaagttca

SEQ ID NO: 146757 - DNA, 20 bp, synthetic construct
  source 1..20: mol_type = other DNA
cctgacttacatgtaagttc

SEQ ID NO: 146758 - DNA, 20 bp, synthetic construct
  source 1..20: mol_type = other DNA
ccctgacttacatgtaagtt

SEQ ID NO: 146759 - DNA, 20 bp, synthetic construct
  source 1..20: mol_type = other DNA
tccctgacttacatgtaagt

SEQ ID NO: 146760 - DNA, 20 bp, synthetic construct
  source 1..20: mol_type = other DNA
atccctgacttacatgtaag

SEQ ID NO: 146761 - DNA, 20 bp, synthetic construct
  source 1..20: mol_type = other DNA
gatccctgacttacatgtaa

SEQ ID NO: 146762 - DNA, 20 bp, synthetic construct
  source 1..20: mol_type = other DNA
ggatccctgacttacatgta

SEQ ID NO: 146763 - DNA, 20 bp, synthetic construct
  source 1..20: mol_type = other DNA
gggatccctgacttacatgt

SEQ ID NO: 146764 - DNA, 20 bp, synthetic construct
  source 1..20: mol_type = other DNA
agggatccctgacttacatg

SEQ ID NO: 146765 - DNA, 20 bp, synthetic construct
  source 1..20: mol_type = other DNA
tagggatccctgacttacat

SEQ ID NO: 146766 - DNA, 20 bp, synthetic construct
  source 1..20: mol_type = other DNA
ttagggatccctgacttaca

SEQ ID NO: 146767 - DNA, 20 bp, synthetic construct
  source 1..20: mol_type = other DNA
tttagggatccctgacttac

SEQ ID NO: 146768 - DNA, 20 bp, synthetic construct
  source 1..20: mol_type = other DNA
ttttagggatccctgactta

SEQ ID NO: 146769 - DNA, 20 bp, synthetic construct
  source 1..20: mol_type = other DNA
gttttagggatccctgactt

SEQ ID NO: 146770 - DNA, 20 bp, synthetic construct
  source 1..20: mol_type = other DNA
ggttttagggatccctgact

SEQ ID NO: 146771 - DNA, 20 bp, synthetic construct
  source 1..20: mol_type = other DNA
aggttttagggatccctgac

SEQ ID NO: 146772 - DNA, 20 bp, synthetic construct
  source 1..20: mol_type = other DNA
gaggttttagggatccctga

SEQ ID NO: 146773 - DNA, 20 bp, synthetic construct
  source 1..20: mol_type = other DNA
tgaggttttagggatccctg

SEQ ID NO: 146774 - DNA, 20 bp, synthetic construct
  source 1..20: mol_type = other DNA
gtgaggttttagggatccct

SEQ ID NO: 146775 - DNA, 20 bp, synthetic construct
  source 1..20: mol_type = other DNA
agtgaggttttagggatccc

SEQ ID NO: 146776 - DNA, 20 bp, synthetic construct
  source 1..20: mol_type = other DNA
gagtgaggttttagggatcc

SEQ ID NO: 146777 - DNA, 20 bp, synthetic construct
  source 1..20: mol_type = other DNA
agagtgaggttttagggatc

SEQ ID NO: 146778 - DNA, 20 bp, synthetic construct
  source 1..20: mol_type = other DNA
cagagtgaggttttagggat

SEQ ID NO: 146779 - DNA, 20 bp, synthetic construct
  source 1..20: mol_type = other DNA
acagagtgaggttttaggga

SEQ ID NO: 146780 - DNA, 20 bp, synthetic construct
  source 1..20: mol_type = other DNA
aacagagtgaggttttaggg

SEQ ID NO: 146781 - DNA, 20 bp, synthetic construct
  source 1..20: mol_type = other DNA
aaacagagtgaggttttagg

SEQ ID NO: 146782 - DNA, 20 bp, synthetic construct
  source 1..20: mol_type = other DNA
aaaacagagtgaggttttag

SEQ ID NO: 146783 - DNA, 20 bp, synthetic construct
  source 1..20: mol_type = other DNA
aaaaacagagtgaggtttta

SEQ ID NO: 146784 - DNA, 20 bp, synthetic construct
  source 1..20: mol_type = other DNA
caaaaacagagtgaggtttt

SEQ ID NO: 146785 - DNA, 20 bp, synthetic construct
  source 1..20: mol_type = other DNA
acaaaaacagagtgaggttt

SEQ ID NO: 146786 - DNA, 20 bp, synthetic construct
  source 1..20: mol_type = other DNA
cacaaaaacagagtgaggtt

SEQ ID NO: 146787 - DNA, 20 bp, synthetic construct
  source 1..20: mol_type = other DNA
gcacaaaaacagagtgaggt

SEQ ID NO: 146788 - DNA, 20 bp, synthetic construct
  source 1..20: mol_type = other DNA
agcacaaaaacagagtgagg

SEQ ID NO: 146789 - DNA, 20 bp, synthetic construct
  source 1..20: mol_type = other DNA
cagcacaaaaacagagtgag

SEQ ID NO: 146790 - DNA, 20 bp, synthetic construct
  source 1..20: mol_type = other DNA
tcagcacaaaaacagagtga

SEQ ID NO: 146791 - DNA, 20 bp, synthetic construct
  source 1..20: mol_type = other DNA
ttcagcacaaaaacagagtg

SEQ ID NO: 146792 - DNA, 20 bp, synthetic construct
  source 1..20: mol_type = other DNA
tttcagcacaaaaacagagt

SEQ ID NO: 146793 - DNA, 20 bp, synthetic construct
  source 1..20: mol_type = other DNA
ctttcagcacaaaaacagag

SEQ ID NO: 146794 - DNA, 20 bp, synthetic construct
  source 1..20: mol_type = other DNA
cctttcagcacaaaaacaga

SEQ ID NO: 146795 - DNA, 20 bp, synthetic construct
  source 1..20: mol_type = other DNA
ccctttcagcacaaaaacag

SEQ ID NO: 146796 - DNA, 20 bp, synthetic construct
  source 1..20: mol_type = other DNA
gccctttcagcacaaaaaca

SEQ ID NO: 146797 - DNA, 20 bp, synthetic construct
  source 1..20: mol_type = other DNA
tgccctttcagcacaaaaac

SEQ ID NO: 146798 - DNA, 20 bp, synthetic construct
  source 1..20: mol_type = other DNA
ttgccctttcagcacaaaaa

SEQ ID NO: 146799 - DNA, 20 bp, synthetic construct
  source 1..20: mol_type = other DNA
tttgccctttcagcacaaaa

SEQ ID NO: 146800 - DNA, 20 bp, synthetic construct
  source 1..20: mol_type = other DNA
ttttgccctttcagcacaaa

SEQ ID NO: 146801 - DNA, 20 bp, synthetic construct
  source 1..20: mol_type = other DNA
tttttgccctttcagcacaa

SEQ ID NO: 146802 - DNA, 20 bp, synthetic construct
  source 1..20: mol_type = other DNA
ctttttgccctttcagcaca

SEQ ID NO: 146803 - DNA, 20 bp, synthetic construct
  source 1..20: mol_type = other DNA
cctttttgccctttcagcac

SEQ ID NO: 146804 - DNA, 20 bp, synthetic construct
  source 1..20: mol_type = other DNA
acctttttgccctttcagca

SEQ ID NO: 146805 - DNA, 20 bp, synthetic construct
  source 1..20: mol_type = other DNA
aacctttttgccctttcagc

SEQ ID NO: 146806 - DNA, 20 bp, synthetic construct
  source 1..20: mol_type = other DNA
taacctttttgccctttcag

SEQ ID NO: 146807 - DNA, 20 bp, synthetic construct
  source 1..20: mol_type = other DNA
ttaacctttttgccctttca

SEQ ID NO: 146808 - DNA, 20 bp, synthetic construct
  source 1..20: mol_type = other DNA
gttaacctttttgccctttc

SEQ ID NO: 146809 - DNA, 20 bp, synthetic construct
  source 1..20: mol_type = other DNA
tgttaacctttttgcccttt

SEQ ID NO: 146810 - DNA, 20 bp, synthetic construct
  source 1..20: mol_type = other DNA
gtgttaacctttttgccctt

SEQ ID NO: 146811 - DNA, 20 bp, synthetic construct
  source 1..20: mol_type = other DNA
tgtgttaacctttttgccct

SEQ ID NO: 146812 - DNA, 20 bp, synthetic construct
  source 1..20: mol_type = other DNA
ctgtgttaacctttttgccc

SEQ ID NO: 146813 - DNA, 20 bp, synthetic construct
  source 1..20: mol_type = other DNA
cctgtgttaacctttttgcc

SEQ ID NO: 146814 - DNA, 20 bp, synthetic construct
  source 1..20: mol_type = other DNA
ccctgtgttaacctttttgc

SEQ ID NO: 146815 - DNA, 20 bp, synthetic construct
  source 1..20: mol_type = other DNA
tccctgtgttaacctttttg

SEQ ID NO: 146816 - DNA, 20 bp, synthetic construct
  source 1..20: mol_type = other DNA
ttccctgtgttaaccttttt

SEQ ID NO: 146817 - DNA, 20 bp, synthetic construct
  source 1..20: mol_type = other DNA
cttccctgtgttaacctttt

SEQ ID NO: 146818 - DNA, 20 bp, synthetic construct
  source 1..20: mol_type = other DNA
gcttccctgtgttaaccttt

SEQ ID NO: 146819 - DNA, 20 bp, synthetic construct
  source 1..20: mol_type = other DNA
agcttccctgtgttaacctt

SEQ ID NO: 146820 - DNA, 20 bp, synthetic construct
  source 1..20: mol_type = other DNA
gagcttccctgtgttaacct

SEQ ID NO: 146821 - DNA, 20 bp, synthetic construct
  source 1..20: mol_type = other DNA
tgagcttccctgtgttaacc

SEQ ID NO: 146822 - DNA, 20 bp, synthetic construct
  source 1..20: mol_type = other DNA
ttgagcttccctgtgttaac

SEQ ID NO: 146823 - DNA, 20 bp, synthetic construct
  source 1..20: mol_type = other DNA
tttgagcttccctgtgttaa

SEQ ID NO: 146824 - DNA, 20 bp, synthetic construct
  source 1..20: mol_type = other DNA
atttgagcttccctgtgtta

SEQ ID NO: 146825 - DNA, 20 bp, synthetic construct
  source 1..20: mol_type = other DNA
aatttgagcttccctgtgtt

SEQ ID NO: 146826 - DNA, 20 bp, synthetic construct
  source 1..20: mol_type = other DNA
aaatttgagcttccctgtgt

SEQ ID NO: 146827 - DNA, 20 bp, synthetic construct
  source 1..20: mol_type = other DNA
caaatttgagcttccctgtg

SEQ ID NO: 146828 - DNA, 20 bp, synthetic construct
  source 1..20: mol_type = other DNA
gcaaatttgagcttccctgt

SEQ ID NO: 146829 - DNA, 20 bp, synthetic construct
  source 1..20: mol_type = other DNA
ggcaaatttgagcttccctg

SEQ ID NO: 146830 - DNA, 20 bp, synthetic construct
  source 1..20: mol_type = other DNA
tggcaaatttgagcttccct

SEQ ID NO: 146831 - DNA, 20 bp, synthetic construct
  source 1..20: mol_type = other DNA
atggcaaatttgagcttccc

SEQ ID NO: 146832 - DNA, 20 bp, synthetic construct
  source 1..20: mol_type = other DNA
catggcaaatttgagcttcc

SEQ ID NO: 146833 - DNA, 20 bp, synthetic construct
  source 1..20: mol_type = other DNA
acatggcaaatttgagcttc

SEQ ID NO: 146834 - DNA, 20 bp, synthetic construct
  source 1..20: mol_type = other DNA
cacatggcaaatttgagctt

SEQ ID NO: 146835 - DNA, 20 bp, synthetic construct
  source 1..20: mol_type = other DNA
gcacatggcaaatttgagct

SEQ ID NO: 146836 - DNA, 20 bp, synthetic construct
  source 1..20: mol_type = other DNA
ggcacatggcaaatttgagc

SEQ ID NO: 146837 - DNA, 20 bp, synthetic construct
  source 1..20: mol_type = other DNA
gggcacatggcaaatttgag

SEQ ID NO: 146838 - DNA, 20 bp, synthetic construct
  source 1..20: mol_type = other DNA
cgggcacatggcaaatttga

SEQ ID NO: 146839 - DNA, 20 bp, synthetic construct
  source 1..20: mol_type = other DNA
acgggcacatggcaaatttg

SEQ ID NO: 146840 - DNA, 20 bp, synthetic construct
  source 1..20: mol_type = other DNA
aacgggcacatggcaaattt

SEQ ID NO: 146841 - DNA, 20 bp, synthetic construct
  source 1..20: mol_type = other DNA
aaacgggcacatggcaaatt

SEQ ID NO: 146842 - DNA, 20 bp, synthetic construct
  source 1..20: mol_type = other DNA
caaacgggcacatggcaaat

SEQ ID NO: 146843 - DNA, 20 bp, synthetic construct
  source 1..20: mol_type = other DNA
tcaaacgggcacatggcaaa

SEQ ID NO: 146844 - DNA, 20 bp, synthetic construct
  source 1..20: mol_type = other DNA
ttcaaacgggcacatggcaa

SEQ ID NO: 146845 - DNA, 20 bp, synthetic construct
  source 1..20: mol_type = other DNA
attcaaacgggcacatggca

SEQ ID NO: 146846 - DNA, 20 bp, synthetic construct
  source 1..20: mol_type = other DNA
tattcaaacgggcacatggc

SEQ ID NO: 146847 - DNA, 20 bp, synthetic construct
  source 1..20: mol_type = other DNA
atattcaaacgggcacatgg

SEQ ID NO: 146848 - DNA, 20 bp, synthetic construct
  source 1..20: mol_type = other DNA
catattcaaacgggcacatg

SEQ ID NO: 146849 - DNA, 20 bp, synthetic construct
  source 1..20: mol_type = other DNA
acatattcaaacgggcacat

SEQ ID NO: 146850 - DNA, 20 bp, synthetic construct
  source 1..20: mol_type = other DNA
cacatattcaaacgggcaca

SEQ ID NO: 146851 - DNA, 20 bp, synthetic construct
  source 1..20: mol_type = other DNA
tcacatattcaaacgggcac

SEQ ID NO: 146852 - DNA, 20 bp, synthetic construct
  source 1..20: mol_type = other DNA
ctcacatattcaaacgggca

SEQ ID NO: 146853 - DNA, 20 bp, synthetic construct
  source 1..20: mol_type = other DNA
tctcacatattcaaacgggc

SEQ ID NO: 146854 - DNA, 20 bp, synthetic construct
  source 1..20: mol_type = other DNA
ctctcacatattcaaacggg

SEQ ID NO: 146855 - DNA, 20 bp, synthetic construct
  source 1..20: mol_type = other DNA
actctcacatattcaaacgg

SEQ ID NO: 146856 - DNA, 20 bp, synthetic construct
  source 1..20: mol_type = other DNA
tactctcacatattcaaacg

SEQ ID NO: 146857 - DNA, 20 bp, synthetic construct
  source 1..20: mol_type = other DNA
ttactctcacatattcaaac

SEQ ID NO: 146858 - DNA, 20 bp, synthetic construct
  source 1..20: mol_type = other DNA
tttactctcacatattcaaa

SEQ ID NO: 146859 - DNA, 20 bp, synthetic construct
  source 1..20: mol_type = other DNA
ttttactctcacatattcaa

SEQ ID NO: 146860 - DNA, 20 bp, synthetic construct
  source 1..20: mol_type = other DNA
tttttactctcacatattca

SEQ ID NO: 146861 - DNA, 20 bp, synthetic construct
  source 1..20: mol_type = other DNA
gtttttactctcacatattc

SEQ ID NO: 146862 - DNA, 20 bp, synthetic construct
  source 1..20: mol_type = other DNA
cgtttttactctcacatatt

SEQ ID NO: 146863 - DNA, 20 bp, synthetic construct
  source 1..20: mol_type = other DNA
ccgtttttactctcacatat

SEQ ID NO: 146864 - DNA, 20 bp, synthetic construct
  source 1..20: mol_type = other DNA
gccgtttttactctcacata

SEQ ID NO: 146865 - DNA, 20 bp, synthetic construct
  source 1..20: mol_type = other DNA
tgccgtttttactctcacat

SEQ ID NO: 146866 - DNA, 20 bp, synthetic construct
  source 1..20: mol_type = other DNA
atgccgtttttactctcaca

SEQ ID NO: 146867 - DNA, 20 bp, synthetic construct
  source 1..20: mol_type = other DNA
aatgccgtttttactctcac

SEQ ID NO: 146868 - DNA, 20 bp, synthetic construct
  source 1..20: mol_type = other DNA
aaatgccgtttttactctca

SEQ ID NO: 146869 - DNA, 20 bp, synthetic construct
  source 1..20: mol_type = other DNA
gaaatgccgtttttactctc

SEQ ID NO: 146870 - DNA, 20 bp, synthetic construct
  source 1..20: mol_type = other DNA
tgaaatgccgtttttactct

SEQ ID NO: 146871 - DNA, 20 bp, synthetic construct
  source 1..20: mol_type = other DNA
atgaaatgccgtttttactc

SEQ ID NO: 146872 - DNA, 20 bp, synthetic construct
  source 1..20: mol_type = other DNA
gatgaaatgccgtttttact

SEQ ID NO: 146873 - DNA, 20 bp, synthetic construct
  source 1..20: mol_type = other DNA
ggatgaaatgccgtttttac

SEQ ID NO: 146874 - DNA, 20 bp, synthetic construct
  source 1..20: mol_type = other DNA
tggatgaaatgccgttttta

SEQ ID NO: 146875 - DNA, 20 bp, synthetic construct
  source 1..20: mol_type = other DNA
ttggatgaaatgccgttttt

SEQ ID NO: 146876 - DNA, 20 bp, synthetic construct
  source 1..20: mol_type = other DNA
cttggatgaaatgccgtttt

SEQ ID NO: 146877 - DNA, 20 bp, synthetic construct
  source 1..20: mol_type = other DNA
ccttggatgaaatgccgttt

SEQ ID NO: 146878 - DNA, 20 bp, synthetic construct
  source 1..20: mol_type = other DNA
gccttggatgaaatgccgtt

SEQ ID NO: 146879 - DNA, 20 bp, synthetic construct
  source 1..20: mol_type = other DNA
agccttggatgaaatgccgt

SEQ ID NO: 146880 - DNA, 20 bp, synthetic construct
  source 1..20: mol_type = other DNA
aagccttggatgaaatgccg

SEQ ID NO: 146881 - DNA, 20 bp, synthetic construct
  source 1..20: mol_type = other DNA
taagccttggatgaaatgcc

SEQ ID NO: 146882 - DNA, 20 bp, synthetic construct
  source 1..20: mol_type = other DNA
ataagccttggatgaaatgc

SEQ ID NO: 146883 - DNA, 20 bp, synthetic construct
  source 1..20: mol_type = other DNA
gataagccttggatgaaatg

SEQ ID NO: 146884 - DNA, 20 bp, synthetic construct
  source 1..20: mol_type = other DNA
cgataagccttggatgaaat

SEQ ID NO: 146885 - DNA, 20 bp, synthetic construct
  source 1..20: mol_type = other DNA
acgataagccttggatgaaa

SEQ ID NO: 146886 - DNA, 20 bp, synthetic construct
  source 1..20: mol_type = other DNA
tacgataagccttggatgaa

SEQ ID NO: 146887 - DNA, 20 bp, synthetic construct
  source 1..20: mol_type = other DNA
ctacgataagccttggatga

SEQ ID NO: 146888 - DNA, 20 bp, synthetic construct
  source 1..20: mol_type = other DNA
actacgataagccttggatg

SEQ ID NO: 146889 - DNA, 20 bp, synthetic construct
  source 1..20: mol_type = other DNA
gactacgataagccttggat

SEQ ID NO: 146890 - DNA, 20 bp, synthetic construct
  source 1..20: mol_type = other DNA
agactacgataagccttgga

SEQ ID NO: 146891 - DNA, 20 bp, synthetic construct
  source 1..20: mol_type = other DNA
tagactacgataagccttgg

SEQ ID NO: 146892 - DNA, 20 bp, synthetic construct
  source 1..20: mol_type = other DNA
ctagactacgataagccttg

SEQ ID NO: 146893 - DNA, 20 bp, synthetic construct
  source 1..20: mol_type = other DNA
tctagactacgataagcctt

SEQ ID NO: 146894 - DNA, 20 bp, synthetic construct
  source 1..20: mol_type = other DNA
ttctagactacgataagcct

SEQ ID NO: 146895 - DNA, 20 bp, synthetic construct
  source 1..20: mol_type = other DNA
gttctagactacgataagcc

SEQ ID NO: 146896 - DNA, 20 bp, synthetic construct
  source 1..20: mol_type = other DNA
tgttctagactacgataagc

SEQ ID NO: 146897 - DNA, 20 bp, synthetic construct
  source 1..20: mol_type = other DNA
ctgttctagactacgataag

SEQ ID NO: 146898 - DNA, 20 bp, synthetic construct
  source 1..20: mol_type = other DNA
actgttctagactacgataa

SEQ ID NO: 146899 - DNA, 20 bp, synthetic construct
  source 1..20: mol_type = other DNA
cactgttctagactacgata

SEQ ID NO: 146900 - DNA, 20 bp, synthetic construct
  source 1..20: mol_type = other DNA
gcactgttctagactacgat

SEQ ID NO: 146901 - DNA, 20 bp, synthetic construct
  source 1..20: mol_type = other DNA
tgcactgttctagactacga

SEQ ID NO: 146902 - DNA, 20 bp, synthetic construct
  source 1..20: mol_type = other DNA
gtgcactgttctagactacg

SEQ ID NO: 146903 - DNA, 20 bp, synthetic construct
  source 1..20: mol_type = other DNA
tgtgcactgttctagactac

SEQ ID NO: 146904 - DNA, 20 bp, synthetic construct
  source 1..20: mol_type = other DNA
ctgtgcactgttctagacta

SEQ ID NO: 146905 - DNA, 20 bp, synthetic construct
  source 1..20: mol_type = other DNA
actgtgcactgttctagact

SEQ ID NO: 146906 - DNA, 20 bp, synthetic construct
  source 1..20: mol_type = other DNA
cactgtgcactgttctagac

SEQ ID NO: 146907 - DNA, 20 bp, synthetic construct
  source 1..20: mol_type = other DNA
acactgtgcactgttctaga

SEQ ID NO: 146908 - DNA, 20 bp, synthetic construct
  source 1..20: mol_type = other DNA
cacactgtgcactgttctag

SEQ ID NO: 146909 - DNA, 20 bp, synthetic construct
  source 1..20: mol_type = other DNA
ccacactgtgcactgttcta

SEQ ID NO: 146910 - DNA, 20 bp, synthetic construct
  source 1..20: mol_type = other DNA
cccacactgtgcactgttct

SEQ ID NO: 146911 - DNA, 20 bp, synthetic construct
  source 1..20: mol_type = other DNA
tcccacactgtgcactgttc

SEQ ID NO: 146912 - DNA, 20 bp, synthetic construct
  source 1..20: mol_type = other DNA
ttcccacactgtgcactgtt

SEQ ID NO: 146913 - DNA, 20 bp, synthetic construct
  source 1..20: mol_type = other DNA
tttcccacactgtgcactgt

SEQ ID NO: 146914 - DNA, 20 bp, synthetic construct
  source 1..20: mol_type = other DNA
ttttcccacactgtgcactg

SEQ ID NO: 146915 - DNA, 20 bp, synthetic construct
  source 1..20: mol_type = other DNA
tttttcccacactgtgcact

SEQ ID NO: 146916 - DNA, 20 bp, synthetic construct
  source 1..20: mol_type = other DNA
ctttttcccacactgtgcac

SEQ ID NO: 146917 - DNA, 20 bp, synthetic construct
  source 1..20: mol_type = other DNA
cctttttcccacactgtgca

SEQ ID NO: 146918 - DNA, 20 bp, synthetic construct
  source 1..20: mol_type = other DNA
tcctttttcccacactgtgc

SEQ ID NO: 146919 - DNA, 20 bp, synthetic construct
  source 1..20: mol_type = other DNA
ttcctttttcccacactgtg

SEQ ID NO: 146920 - DNA, 20 bp, synthetic construct
  source 1..20: mol_type = other DNA
tttcctttttcccacactgt

SEQ ID NO: 146921 - DNA, 20 bp, synthetic construct
  source 1..20: mol_type = other DNA
gtttcctttttcccacactg

SEQ ID NO: 146922 - DNA, 20 bp, synthetic construct
  source 1..20: mol_type = other DNA
tgtttcctttttcccacact

SEQ ID NO: 146923 - DNA, 20 bp, synthetic construct
  source 1..20: mol_type = other DNA
ttgtttcctttttcccacac

SEQ ID NO: 146924 - DNA, 20 bp, synthetic construct
  source 1..20: mol_type = other DNA
cttgtttcctttttcccaca

SEQ ID NO: 146925 - DNA, 20 bp, synthetic construct
  source 1..20: mol_type = other DNA
ccttgtttcctttttcccac

SEQ ID NO: 146926 - DNA, 20 bp, synthetic construct
  source 1..20: mol_type = other DNA
cccttgtttcctttttccca

SEQ ID NO: 146927 - DNA, 20 bp, synthetic construct
  source 1..20: mol_type = other DNA
gcccttgtttcctttttccc

SEQ ID NO: 146928 - DNA, 20 bp, synthetic construct
  source 1..20: mol_type = other DNA
agcccttgtttcctttttcc

SEQ ID NO: 146929 - DNA, 20 bp, synthetic construct
  source 1..20: mol_type = other DNA
gagcccttgtttcctttttc

SEQ ID NO: 146930 - DNA, 20 bp, synthetic construct
  source 1..20: mol_type = other DNA
agagcccttgtttccttttt

SEQ ID NO: 146931 - DNA, 20 bp, synthetic construct
  source 1..20: mol_type = other DNA
aagagcccttgtttcctttt

SEQ ID NO: 146932 - DNA, 20 bp, synthetic construct
  source 1..20: mol_type = other DNA
gaagagcccttgtttccttt

SEQ ID NO: 146933 - DNA, 20 bp, synthetic construct
  source 1..20: mol_type = other DNA
ggaagagcccttgtttcctt

SEQ ID NO: 146934 - DNA, 20 bp, synthetic construct
  source 1..20: mol_type = other DNA
aggaagagcccttgtttcct

SEQ ID NO: 146935 - DNA, 20 bp, synthetic construct
  source 1..20: mol_type = other DNA
caggaagagcccttgtttcc

SEQ ID NO: 146936 - DNA, 20 bp, synthetic construct
  source 1..20: mol_type = other DNA
ccaggaagagcccttgtttc

SEQ ID NO: 146937 - DNA, 20 bp, synthetic construct
  source 1..20: mol_type = other DNA
gccaggaagagcccttgttt

SEQ ID NO: 146938 - DNA, 20 bp, synthetic construct
  source 1..20: mol_type = other DNA
ggccaggaagagcccttgtt

SEQ ID NO: 146939 - DNA, 20 bp, synthetic construct
  source 1..20: mol_type = other DNA
gggccaggaagagcccttgt

SEQ ID NO: 146940 - DNA, 20 bp, synthetic construct
  source 1..20: mol_type = other DNA
agggccaggaagagcccttg

SEQ ID NO: 146941 - DNA, 20 bp, synthetic construct
  source 1..20: mol_type = other DNA
cagggccaggaagagccctt

SEQ ID NO: 146942 - DNA, 20 bp, synthetic construct
  source 1..20: mol_type = other DNA
gcagggccaggaagagccct

SEQ ID NO: 146943 - DNA, 20 bp, synthetic construct
  source 1..20: mol_type = other DNA
ggcagggccaggaagagccc

SEQ ID NO: 146944 - DNA, 20 bp, synthetic construct
  source 1..20: mol_type = other DNA
tggcagggccaggaagagcc

SEQ ID NO: 146945 - DNA, 20 bp, synthetic construct
  source 1..20: mol_type = other DNA
ttggcagggccaggaagagc

SEQ ID NO: 146946 - DNA, 20 bp, synthetic construct
  source 1..20: mol_type = other DNA
gttggcagggccaggaagag

SEQ ID NO: 146947 - DNA, 20 bp, synthetic construct
  source 1..20: mol_type = other DNA
ggttggcagggccaggaaga

SEQ ID NO: 146948 - DNA, 20 bp, synthetic construct
  source 1..20: mol_type = other DNA
gggttggcagggccaggaag

SEQ ID NO: 146949 - DNA, 20 bp, synthetic construct
  source 1..20: mol_type = other DNA
ggggttggcagggccaggaa

SEQ ID NO: 146950 - DNA, 20 bp, synthetic construct
  source 1..20: mol_type = other DNA
gggggttggcagggccagga

SEQ ID NO: 146951 - DNA, 20 bp, synthetic construct
  source 1..20: mol_type = other DNA
agggggttggcagggccagg

SEQ ID NO: 146952 - DNA, 20 bp, synthetic construct
  source 1..20: mol_type = other DNA
cagggggttggcagggccag

SEQ ID NO: 146953 - DNA, 20 bp, synthetic construct
  source 1..20: mol_type = other DNA
gcagggggttggcagggcca

SEQ ID NO: 146954 - DNA, 20 bp, synthetic construct
  source 1..20: mol_type = other DNA
tgcagggggttggcagggcc

SEQ ID NO: 146955 - DNA, 20 bp, synthetic construct
  source 1..20: mol_type = other DNA
ctgcagggggttggcagggc

SEQ ID NO: 146956 - DNA, 20 bp, synthetic construct
  source 1..20: mol_type = other DNA
tctgcagggggttggcaggg

SEQ ID NO: 146957 - DNA, 20 bp, synthetic construct
  source 1..20: mol_type = other DNA
ctctgcagggggttggcagg

SEQ ID NO: 146958 - DNA, 20 bp, synthetic construct
  source 1..20: mol_type = other DNA
gctctgcagggggttggcag

SEQ ID NO: 146959 - DNA, 20 bp, synthetic construct
  source 1..20: mol_type = other DNA
agctctgcagggggttggca

SEQ ID NO: 146960 - DNA, 20 bp, synthetic construct
  source 1..20: mol_type = other DNA
cagctctgcagggggttggc

SEQ ID NO: 146961 - DNA, 20 bp, synthetic construct
  source 1..20: mol_type = other DNA
ccagctctgcagggggttgg

SEQ ID NO: 146962 - DNA, 20 bp, synthetic construct
  source 1..20: mol_type = other DNA
tccagctctgcagggggttg

SEQ ID NO: 146963 - DNA, 20 bp, synthetic construct
  source 1..20: mol_type = other DNA
ttccagctctgcagggggtt

SEQ ID NO: 146964 - DNA, 20 bp, synthetic construct
  source 1..20: mol_type = other DNA
attccagctctgcagggggt

SEQ ID NO: 146965 - DNA, 20 bp, synthetic construct
  source 1..20: mol_type = other DNA
gattccagctctgcaggggg

SEQ ID NO: 146966 - DNA, 20 bp, synthetic construct
  source 1..20: mol_type = other DNA
ggattccagctctgcagggg

SEQ ID NO: 146967 - DNA, 20 bp, synthetic construct
  source 1..20: mol_type = other DNA
tggattccagctctgcaggg

SEQ ID NO: 146968 - DNA, 20 bp, synthetic construct
  source 1..20: mol_type = other DNA
ctggattccagctctgcagg

SEQ ID NO: 146969 - DNA, 20 bp, synthetic construct
  source 1..20: mol_type = other DNA
gctggattccagctctgcag

SEQ ID NO: 146970 - DNA, 20 bp, synthetic construct
  source 1..20: mol_type = other DNA
agctggattccagctctgca

SEQ ID NO: 146971 - DNA, 20 bp, synthetic construct
  source 1..20: mol_type = other DNA
cagctggattccagctctgc

SEQ ID NO: 146972 - DNA, 20 bp, synthetic construct
  source 1..20: mol_type = other DNA
acagctggattccagctctg

SEQ ID NO: 146973 - DNA, 20 bp, synthetic construct
  source 1..20: mol_type = other DNA
aacagctggattccagctct

SEQ ID NO: 146974 - DNA, 20 bp, synthetic construct
  source 1..20: mol_type = other DNA
aaacagctggattccagctc

SEQ ID NO: 146975 - DNA, 20 bp, synthetic construct
  source 1..20: mol_type = other DNA
caaacagctggattccagct

SEQ ID NO: 146976 - DNA, 20 bp, synthetic construct
  source 1..20: mol_type = other DNA
ccaaacagctggattccagc

SEQ ID NO: 146977 - DNA, 20 bp, synthetic construct
  source 1..20: mol_type = other DNA
cccaaacagctggattccag

SEQ ID NO: 146978 - DNA, 20 bp, synthetic construct
  source 1..20: mol_type = other DNA
gcccaaacagctggattcca

SEQ ID NO: 146979 - DNA, 20 bp, synthetic construct
  source 1..20: mol_type = other DNA
agcccaaacagctggattcc

SEQ ID NO: 146980 - DNA, 20 bp, synthetic construct
  source 1..20: mol_type = other DNA
cagcccaaacagctggattc

SEQ ID NO: 146981 - DNA, 20 bp, synthetic construct
  source 1..20: mol_type = other DNA
tcagcccaaacagctggatt

SEQ ID NO: 146982 - DNA, 20 bp, synthetic construct
  source 1..20: mol_type = other DNA
gtcagcccaaacagctggat

SEQ ID NO: 146983 - DNA, 20 bp, synthetic construct
  source 1..20: mol_type = other DNA
agtcagcccaaacagctgga

SEQ ID NO: 146984 - DNA, 20 bp, synthetic construct
  source 1..20: mol_type = other DNA
tagtcagcccaaacagctgg

SEQ ID NO: 146985 - DNA, 20 bp, synthetic construct
  source 1..20: mol_type = other DNA
ttagtcagcccaaacagctg

SEQ ID NO: 146986 - DNA, 20 bp, synthetic construct
  source 1..20: mol_type = other DNA
tttagtcagcccaaacagct

SEQ ID NO: 146987 - DNA, 20 bp, synthetic construct
  source 1..20: mol_type = other DNA
ttttagtcagcccaaacagc

SEQ ID NO: 146988 - DNA, 20 bp, synthetic construct
  source 1..20: mol_type = other DNA
attttagtcagcccaaacag

SEQ ID NO: 146989 - DNA, 20 bp, synthetic construct
  source 1..20: mol_type = other DNA
gattttagtcagcccaaaca

SEQ ID NO: 146990 - DNA, 20 bp, synthetic construct
  source 1..20: mol_type = other DNA
tgattttagtcagcccaaac

SEQ ID NO: 146991 - DNA, 20 bp, synthetic construct
  source 1..20: mol_type = other DNA
gtgattttagtcagcccaaa

SEQ ID NO: 146992 - DNA, 20 bp, synthetic construct
  source 1..20: mol_type = other DNA
ggtgattttagtcagcccaa

SEQ ID NO: 146993 - DNA, 20 bp, synthetic construct
  source 1..20: mol_type = other DNA
aggtgattttagtcagccca

SEQ ID NO: 146994 - DNA, 20 bp, synthetic construct
  source 1..20: mol_type = other DNA
aaggtgattttagtcagccc

SEQ ID NO: 146995 - DNA, 20 bp, synthetic construct
  source 1..20: mol_type = other DNA
aaaggtgattttagtcagcc

SEQ ID NO: 146996 - DNA, 20 bp, synthetic construct
  source 1..20: mol_type = other DNA
gaaaggtgattttagtcagc

SEQ ID NO: 146997 - DNA, 20 bp, synthetic construct
  source 1..20: mol_type = other DNA
ggaaaggtgattttagtcag

SEQ ID NO: 146998 - DNA, 20 bp, synthetic construct
  source 1..20: mol_type = other DNA
tggaaaggtgattttagtca

SEQ ID NO: 146999 - DNA, 20 bp, synthetic construct
  source 1..20: mol_type = other DNA
ttggaaaggtgattttagtc

SEQ ID NO: 147000 - DNA, 20 bp, synthetic construct
  source 1..20: mol_type = other DNA
gttggaaaggtgattttagt

SEQ ID NO: 147001 - DNA, 20 bp, synthetic construct
  source 1..20: mol_type = other DNA
agttggaaaggtgattttag

SEQ ID NO: 147002 - DNA, 20 bp, synthetic construct
  source 1..20: mol_type = other DNA
aagttggaaaggtgatttta

SEQ ID NO: 147003 - DNA, 20 bp, synthetic construct
  source 1..20: mol_type = other DNA
caagttggaaaggtgatttt

SEQ ID NO: 147004 - DNA, 20 bp, synthetic construct
  source 1..20: mol_type = other DNA
tcaagttggaaaggtgattt

SEQ ID NO: 147005 - DNA, 20 bp, synthetic construct
  source 1..20: mol_type = other DNA
gtcaagttggaaaggtgatt

SEQ ID NO: 147006 - DNA, 20 bp, synthetic construct
  source 1..20: mol_type = other DNA
tgtcaagttggaaaggtgat

SEQ ID NO: 147007 - DNA, 20 bp, synthetic construct
  source 1..20: mol_type = other DNA
ctgtcaagttggaaaggtga

SEQ ID NO: 147008 - DNA, 20 bp, synthetic construct
  source 1..20: mol_type = other DNA
actgtcaagttggaaaggtg

SEQ ID NO: 147009 - DNA, 20 bp, synthetic construct
  source 1..20: mol_type = other DNA
cactgtcaagttggaaaggt

SEQ ID NO: 147010 - DNA, 20 bp, synthetic construct
  source 1..20: mol_type = other DNA
tcactgtcaagttggaaagg

SEQ ID NO: 147011 - DNA, 20 bp, synthetic construct
  source 1..20: mol_type = other DNA
ctcactgtcaagttggaaag

SEQ ID NO: 147012 - DNA, 20 bp, synthetic construct
  source 1..20: mol_type = other DNA
actcactgtcaagttggaaa

SEQ ID NO: 147013 - DNA, 20 bp, synthetic construct
  source 1..20: mol_type = other DNA
cactcactgtcaagttggaa

SEQ ID NO: 147014 - DNA, 20 bp, synthetic construct
  source 1..20: mol_type = other DNA
tcactcactgtcaagttgga

SEQ ID NO: 147015 - DNA, 20 bp, synthetic construct
  source 1..20: mol_type = other DNA
ctcactcactgtcaagttgg

SEQ ID NO: 147016 - DNA, 20 bp, synthetic construct
  source 1..20: mol_type = other DNA
tctcactcactgtcaagttg

SEQ ID NO: 147017 - DNA, 20 bp, synthetic construct
  source 1..20: mol_type = other DNA
gtctcactcactgtcaagtt

SEQ ID NO: 147018 - DNA, 20 bp, synthetic construct
  source 1..20: mol_type = other DNA
ggtctcactcactgtcaagt

SEQ ID NO: 147019 - DNA, 20 bp, synthetic construct
  source 1..20: mol_type = other DNA
tggtctcactcactgtcaag

SEQ ID NO: 147020 - DNA, 20 bp, synthetic construct
  source 1..20: mol_type = other DNA
ctggtctcactcactgtcaa

SEQ ID NO: 147021 - DNA, 20 bp, synthetic construct
  source 1..20: mol_type = other DNA
cctggtctcactcactgtca

SEQ ID NO: 147022 - DNA, 20 bp, synthetic construct
  source 1..20: mol_type = other DNA
acctggtctcactcactgtc

SEQ ID NO: 147023 - DNA, 20 bp, synthetic construct
  source 1..20: mol_type = other DNA
aacctggtctcactcactgt

SEQ ID NO: 147024 - DNA, 20 bp, synthetic construct
  source 1..20: mol_type = other DNA
caacctggtctcactcactg

SEQ ID NO: 147025 - DNA, 20 bp, synthetic construct
  source 1..20: mol_type = other DNA
tcaacctggtctcactcact

SEQ ID NO: 147026 - DNA, 20 bp, synthetic construct
  source 1..20: mol_type = other DNA
ttcaacctggtctcactcac

SEQ ID NO: 147027 - DNA, 20 bp, synthetic construct
  source 1..20: mol_type = other DNA
gttcaacctggtctcactca

SEQ ID NO: 147028 - DNA, 20 bp, synthetic construct
  source 1..20: mol_type = other DNA
agttcaacctggtctcactc

SEQ ID NO: 147029 - DNA, 20 bp, synthetic construct
  source 1..20: mol_type = other DNA
aagttcaacctggtctcact

SEQ ID NO: 147030 - DNA, 20 bp, synthetic construct
  source 1..20: mol_type = other DNA
caagttcaacctggtctcac

SEQ ID NO: 147031 - DNA, 20 bp, synthetic construct
  source 1..20: mol_type = other DNA
ccaagttcaacctggtctca

SEQ ID NO: 147032 - DNA, 20 bp, synthetic construct
  source 1..20: mol_type = other DNA
accaagttcaacctggtctc

SEQ ID NO: 147033 - DNA, 20 bp, synthetic construct
  source 1..20: mol_type = other DNA
taccaagttcaacctggtct

SEQ ID NO: 147034 - DNA, 20 bp, synthetic construct
  source 1..20: mol_type = other DNA
gtaccaagttcaacctggtc

SEQ ID NO: 147035 - DNA, 20 bp, synthetic construct
  source 1..20: mol_type = other DNA
tgtaccaagttcaacctggt

SEQ ID NO: 147036 - DNA, 20 bp, synthetic construct
  source 1..20: mol_type = other DNA
ctgtaccaagttcaacctgg

SEQ ID NO: 147037 - DNA, 20 bp, synthetic construct
  source 1..20: mol_type = other DNA
tctgtaccaagttcaacctg

SEQ ID NO: 147038 - DNA, 20 bp, synthetic construct
  source 1..20: mol_type = other DNA
ctctgtaccaagttcaacct

SEQ ID NO: 147039 - DNA, 20 bp, synthetic construct
  source 1..20: mol_type = other DNA
tctctgtaccaagttcaacc

SEQ ID NO: 147040 - DNA, 20 bp, synthetic construct
  source 1..20: mol_type = other DNA
gtctctgtaccaagttcaac

SEQ ID NO: 147041 - DNA, 20 bp, synthetic construct
  source 1..20: mol_type = other DNA
cgtctctgtaccaagttcaa

SEQ ID NO: 147042 - DNA, 20 bp, synthetic construct
  source 1..20: mol_type = other DNA
gcgtctctgtaccaagttca

SEQ ID NO: 147043 - DNA, 20 bp, synthetic construct
  source 1..20: mol_type = other DNA
agcgtctctgtaccaagttc

SEQ ID NO: 147044 - DNA, 20 bp, synthetic construct
  source 1..20: mol_type = other DNA
cagcgtctctgtaccaagtt

SEQ ID NO: 147045 - DNA, 20 bp, synthetic construct
  source 1..20: mol_type = other DNA
ccagcgtctctgtaccaagt

SEQ ID NO: 147046 - DNA, 20 bp, synthetic construct
  source 1..20: mol_type = other DNA
cccagcgtctctgtaccaag

SEQ ID NO: 147047 - DNA, 20 bp, synthetic construct
  source 1..20: mol_type = other DNA
gcccagcgtctctgtaccaa

SEQ ID NO: 147048 - DNA, 20 bp, synthetic construct
  source 1..20: mol_type = other DNA
agcccagcgtctctgtacca

SEQ ID NO: 147049 - DNA, 20 bp, synthetic construct
  source 1..20: mol_type = other DNA
cagcccagcgtctctgtacc

SEQ ID NO: 147050 - DNA, 20 bp, synthetic construct
  source 1..20: mol_type = other DNA
ccagcccagcgtctctgtac

SEQ ID NO: 147051 - DNA, 20 bp, synthetic construct
  source 1..20: mol_type = other DNA
gccagcccagcgtctctgta

SEQ ID NO: 147052 - DNA, 20 bp, synthetic construct
  source 1..20: mol_type = other DNA
ggccagcccagcgtctctgt

SEQ ID NO: 147053 - DNA, 20 bp, synthetic construct
  source 1..20: mol_type = other DNA
gggccagcccagcgtctctg

SEQ ID NO: 147054 - DNA, 20 bp, synthetic construct
  source 1..20: mol_type = other DNA
tgggccagcccagcgtctct

SEQ ID NO: 147055 - DNA, 20 bp, synthetic construct
  source 1..20: mol_type = other DNA
ctgggccagcccagcgtctc

SEQ ID NO: 147056 - DNA, 20 bp, synthetic construct
  source 1..20: mol_type = other DNA
tctgggccagcccagcgtct

SEQ ID NO: 147057 - DNA, 20 bp, synthetic construct
  source 1..20: mol_type = other DNA
atctgggccagcccagcgtc

SEQ ID NO: 147058 - DNA, 20 bp, synthetic construct
  source 1..20: mol_type = other DNA
catctgggccagcccagcgt

SEQ ID NO: 147059 - DNA, 20 bp, synthetic construct
  source 1..20: mol_type = other DNA
tcatctgggccagcccagcg

SEQ ID NO: 147060 - DNA, 20 bp, synthetic construct
  source 1..20: mol_type = other DNA
gtcatctgggccagcccagc

SEQ ID NO: 147061 - DNA, 20 bp, synthetic construct
  source 1..20: mol_type = other DNA
agtcatctgggccagcccag

SEQ ID NO: 147062 - DNA, 20 bp, synthetic construct
  source 1..20: mol_type = other DNA
aagtcatctgggccagccca

SEQ ID NO: 147063 - DNA, 20 bp, synthetic construct
  source 1..20: mol_type = other DNA
gaagtcatctgggccagccc

SEQ ID NO: 147064 - DNA, 20 bp, synthetic construct
  source 1..20: mol_type = other DNA
tgaagtcatctgggccagcc

SEQ ID NO: 147065 - DNA, 20 bp, synthetic construct
  source 1..20: mol_type = other DNA
ctgaagtcatctgggccagc

SEQ ID NO: 147066 - DNA, 20 bp, synthetic construct
  source 1..20: mol_type = other DNA
cctgaagtcatctgggccag

SEQ ID NO: 147067 - DNA, 20 bp, synthetic construct
  source 1..20: mol_type = other DNA
acctgaagtcatctgggcca

SEQ ID NO: 147068 - DNA, 20 bp, synthetic construct
  source 1..20: mol_type = other DNA
aacctgaagtcatctgggcc

SEQ ID NO: 147069 - DNA, 20 bp, synthetic construct
  source 1..20: mol_type = other DNA
taacctgaagtcatctgggc

SEQ ID NO: 147070 - DNA, 20 bp, synthetic construct
  source 1..20: mol_type = other DNA
gtaacctgaagtcatctggg

SEQ ID NO: 147071 - DNA, 20 bp, synthetic construct
  source 1..20: mol_type = other DNA
agtaacctgaagtcatctgg

SEQ ID NO: 147072 - DNA, 20 bp, synthetic construct
  source 1..20: mol_type = other DNA
gagtaacctgaagtcatctg

SEQ ID NO: 147073 - DNA, 20 bp, synthetic construct
  source 1..20: mol_type = other DNA
ggagtaacctgaagtcatct

SEQ ID NO: 147074 - DNA, 20 bp, synthetic construct
  source 1..20: mol_type = other DNA
aggagtaacctgaagtcatc

SEQ ID NO: 147075 - DNA, 20 bp, synthetic construct
  source 1..20: mol_type = other DNA
aaggagtaacctgaagtcat

SEQ ID NO: 147076 - DNA, 20 bp, synthetic construct
  source 1..20: mol_type = other DNA
aaaggagtaacctgaagtca

SEQ ID NO: 147077 - DNA, 20 bp, synthetic construct
  source 1..20: mol_type = other DNA
gaaaggagtaacctgaagtc

SEQ ID NO: 147078 - DNA, 20 bp, synthetic construct
  source 1..20: mol_type = other DNA
ggaaaggagtaacctgaagt

SEQ ID NO: 147079 - DNA, 20 bp, synthetic construct
  source 1..20: mol_type = other DNA
tggaaaggagtaacctgaag

SEQ ID NO: 147080 - DNA, 20 bp, synthetic construct
  source 1..20: mol_type = other DNA
atggaaaggagtaacctgaa

SEQ ID NO: 147081 - DNA, 20 bp, synthetic construct
  source 1..20: mol_type = other DNA
gatggaaaggagtaacctga

SEQ ID NO: 147082 - DNA, 20 bp, synthetic construct
  source 1..20: mol_type = other DNA
agatggaaaggagtaacctg

SEQ ID NO: 147083 - DNA, 20 bp, synthetic construct
  source 1..20: mol_type = other DNA
gagatggaaaggagtaacct

SEQ ID NO: 147084 - DNA, 20 bp, synthetic construct
  source 1..20: mol_type = other DNA
tgagatggaaaggagtaacc

SEQ ID NO: 147085 - DNA, 20 bp, synthetic construct
  source 1..20: mol_type = other DNA
gtgagatggaaaggagtaac

SEQ ID NO: 147086 - DNA, 20 bp, synthetic construct
  source 1..20: mol_type = other DNA
agtgagatggaaaggagtaa

SEQ ID NO: 147087 - DNA, 20 bp, synthetic construct
  source 1..20: mol_type = other DNA
cagtgagatggaaaggagta

SEQ ID NO: 147088 - DNA, 20 bp, synthetic construct
  source 1..20: mol_type = other DNA
ccagtgagatggaaaggagt

SEQ ID NO: 147089 - DNA, 20 bp, synthetic construct
  source 1..20: mol_type = other DNA
tccagtgagatggaaaggag

SEQ ID NO: 147090 - DNA, 20 bp, synthetic construct
  source 1..20: mol_type = other DNA
ctccagtgagatggaaagga

SEQ ID NO: 147091 - DNA, 20 bp, synthetic construct
  source 1..20: mol_type = other DNA
gctccagtgagatggaaagg

SEQ ID NO: 147092 - DNA, 20 bp, synthetic construct
  source 1..20: mol_type = other DNA
ggctccagtgagatggaaag

SEQ ID NO: 147093 - DNA, 20 bp, synthetic construct
  source 1..20: mol_type = other DNA
tggctccagtgagatggaaa

SEQ ID NO: 147094 - DNA, 20 bp, synthetic construct
  source 1..20: mol_type = other DNA
atggctccagtgagatggaa

SEQ ID NO: 147095 - DNA, 20 bp, synthetic construct
  source 1..20: mol_type = other DNA
aatggctccagtgagatgga

SEQ ID NO: 147096 - DNA, 20 bp, synthetic construct
  source 1..20: mol_type = other DNA
taatggctccagtgagatgg

SEQ ID NO: 147097 - DNA, 20 bp, synthetic construct
  source 1..20: mol_type = other DNA
ttaatggctccagtgagatg

SEQ ID NO: 147098 - DNA, 20 bp, synthetic construct
  source 1..20: mol_type = other DNA
tttaatggctccagtgagat

SEQ ID NO: 147099 - DNA, 20 bp, synthetic construct
  source 1..20: mol_type = other DNA
ttttaatggctccagtgaga

SEQ ID NO: 147100 - DNA, 20 bp, synthetic construct
  source 1..20: mol_type = other DNA
tttttaatggctccagtgag

SEQ ID NO: 147101 - DNA, 20 bp, synthetic construct
  source 1..20: mol_type = other DNA
gtttttaatggctccagtga

SEQ ID NO: 147102 - DNA, 20 bp, synthetic construct
  source 1..20: mol_type = other DNA
agtttttaatggctccagtg

SEQ ID NO: 147103 - DNA, 20 bp, synthetic construct
  source 1..20: mol_type = other DNA
gagtttttaatggctccagt

SEQ ID NO: 147104 - DNA, 20 bp, synthetic construct
  source 1..20: mol_type = other DNA
ggagtttttaatggctccag

SEQ ID NO: 147105 - DNA, 20 bp, synthetic construct
  source 1..20: mol_type = other DNA
tggagtttttaatggctcca

SEQ ID NO: 147106 - DNA, 20 bp, synthetic construct
  source 1..20: mol_type = other DNA
ttggagtttttaatggctcc

SEQ ID NO: 147107 - DNA, 20 bp, synthetic construct
  source 1..20: mol_type = other DNA
gttggagtttttaatggctc

SEQ ID NO: 147108 - DNA, 20 bp, synthetic construct
  source 1..20: mol_type = other DNA
agttggagtttttaatggct

SEQ ID NO: 147109 - DNA, 20 bp, synthetic construct
  source 1..20: mol_type = other DNA
gagttggagtttttaatggc

SEQ ID NO: 147110 - DNA, 20 bp, synthetic construct
  source 1..20: mol_type = other DNA
ggagttggagtttttaatgg

SEQ ID NO: 147111 - DNA, 20 bp, synthetic construct
  source 1..20: mol_type = other DNA
aggagttggagtttttaatg

SEQ ID NO: 147112 - DNA, 20 bp, synthetic construct
  source 1..20: mol_type = other DNA
gaggagttggagtttttaat

SEQ ID NO: 147113 - DNA, 20 bp, synthetic construct
  source 1..20: mol_type = other DNA
ggaggagttggagtttttaa

SEQ ID NO: 147114 - DNA, 20 bp, synthetic construct
  source 1..20: mol_type = other DNA
aggaggagttggagttttta

SEQ ID NO: 147115 - DNA, 20 bp, synthetic construct
  source 1..20: mol_type = other DNA
gaggaggagttggagttttt

SEQ ID NO: 147116 - DNA, 20 bp, synthetic construct
  source 1..20: mol_type = other DNA
ggaggaggagttggagtttt

SEQ ID NO: 147117 - DNA, 20 bp, synthetic construct
  source 1..20: mol_type = other DNA
aggaggaggagttggagttt

SEQ ID NO: 147118 - DNA, 20 bp, synthetic construct
  source 1..20: mol_type = other DNA
gaggaggaggagttggagtt

SEQ ID NO: 147119 - DNA, 20 bp, synthetic construct
  source 1..20: mol_type = other DNA
ggaggaggaggagttggagt

SEQ ID NO: 147120 - DNA, 20 bp, synthetic construct
  source 1..20: mol_type = other DNA
aggaggaggaggagttggag

SEQ ID NO: 147121 - DNA, 20 bp, synthetic construct
  source 1..20: mol_type = other DNA
gaggaggaggaggagttgga

SEQ ID NO: 147122 - DNA, 20 bp, synthetic construct
  source 1..20: mol_type = other DNA
ggaggaggaggaggagttgg

SEQ ID NO: 147123 - DNA, 20 bp, synthetic construct
  source 1..20: mol_type = other DNA
aggaggaggaggaggagttg

SEQ ID NO: 147124 - DNA, 20 bp, synthetic construct
  source 1..20: mol_type = other DNA
caggaggaggaggaggagtt

SEQ ID NO: 147125 - DNA, 20 bp, synthetic construct
  source 1..20: mol_type = other DNA
gcaggaggaggaggaggagt

SEQ ID NO: 147126 - DNA, 20 bp, synthetic construct
  source 1..20: mol_type = other DNA
agcaggaggaggaggaggag

SEQ ID NO: 147127 - DNA, 20 bp, synthetic construct
  source 1..20: mol_type = other DNA
gagcaggaggaggaggagga

SEQ ID NO: 147128 - DNA, 20 bp, synthetic construct
  source 1..20: mol_type = other DNA
ggagcaggaggaggaggagg

SEQ ID NO: 147129 - DNA, 20 bp, synthetic construct
  source 1..20: mol_type = other DNA
tggagcaggaggaggaggag

SEQ ID NO: 147130 - DNA, 20 bp, synthetic construct
  source 1..20: mol_type = other DNA
atggagcaggaggaggagga

SEQ ID NO: 147131 - DNA, 20 bp, synthetic construct
  source 1..20: mol_type = other DNA
gatggagcaggaggaggagg

SEQ ID NO: 147132 - DNA, 20 bp, synthetic construct
  source 1..20: mol_type = other DNA
tgatggagcaggaggaggag

SEQ ID NO: 147133 - DNA, 20 bp, synthetic construct
  source 1..20: mol_type = other DNA
ctgatggagcaggaggagga

SEQ ID NO: 147134 - DNA, 20 bp, synthetic construct
  source 1..20: mol_type = other DNA
gctgatggagcaggaggagg

SEQ ID NO: 147135 - DNA, 20 bp, synthetic construct
  source 1..20: mol_type = other DNA
tgctgatggagcaggaggag

SEQ ID NO: 147136 - DNA, 20 bp, synthetic construct
  source 1..20: mol_type = other DNA
atgctgatggagcaggagga

SEQ ID NO: 147137 - DNA, 20 bp, synthetic construct
  source 1..20: mol_type = other DNA
tatgctgatggagcaggagg

SEQ ID NO: 147138 - DNA, 20 bp, synthetic construct
  source 1..20: mol_type = other DNA
atatgctgatggagcaggag

SEQ ID NO: 147139 - DNA, 20 bp, synthetic construct
  source 1..20: mol_type = other DNA
gatatgctgatggagcagga

SEQ ID NO: 147140 - DNA, 20 bp, synthetic construct
  source 1..20: mol_type = other DNA
agatatgctgatggagcagg

SEQ ID NO: 147141 - DNA, 20 bp, synthetic construct
  source 1..20: mol_type = other DNA
gagatatgctgatggagcag

SEQ ID NO: 147142 - DNA, 20 bp, synthetic construct
  source 1..20: mol_type = other DNA
agagatatgctgatggagca

SEQ ID NO: 147143 - DNA, 20 bp, synthetic construct
  source 1..20: mol_type = other DNA
cagagatatgctgatggagc

SEQ ID NO: 147144 - DNA, 20 bp, synthetic construct
  source 1..20: mol_type = other DNA
tcagagatatgctgatggag

SEQ ID NO: 147145 - DNA, 20 bp, synthetic construct
  source 1..20: mol_type = other DNA
ctcagagatatgctgatgga

SEQ ID NO: 147146 - DNA, 20 bp, synthetic construct
  source 1..20: mol_type = other DNA
tctcagagatatgctgatgg

SEQ ID NO: 147147 - DNA, 20 bp, synthetic construct
  source 1..20: mol_type = other DNA
ctctcagagatatgctgatg

SEQ ID NO: 147148 - DNA, 20 bp, synthetic construct
  source 1..20: mol_type = other DNA
tctctcagagatatgctgat

SEQ ID NO: 147149 - DNA, 20 bp, synthetic construct
  source 1..20: mol_type = other DNA
ctctctcagagatatgctga

SEQ ID NO: 147150 - DNA, 20 bp, synthetic construct
  source 1..20: mol_type = other DNA
actctctcagagatatgctg

SEQ ID NO: 147151 - DNA, 20 bp, synthetic construct
  source 1..20: mol_type = other DNA
gactctctcagagatatgct

SEQ ID NO: 147152 - DNA, 20 bp, synthetic construct
  source 1..20: mol_type = other DNA
tgactctctcagagatatgc

SEQ ID NO: 147153 - DNA, 20 bp, synthetic construct
  source 1..20: mol_type = other DNA
gtgactctctcagagatatg

SEQ ID NO: 147154 - DNA, 20 bp, synthetic construct
  source 1..20: mol_type = other DNA
cgtgactctctcagagatat

SEQ ID NO: 147155 - DNA, 20 bp, synthetic construct
  source 1..20: mol_type = other DNA
ccgtgactctctcagagata

SEQ ID NO: 147156 - DNA, 20 bp, synthetic construct
  source 1..20: mol_type = other DNA
cccgtgactctctcagagat

SEQ ID NO: 147157 - DNA, 20 bp, synthetic construct
  source 1..20: mol_type = other DNA
ccccgtgactctctcagaga

SEQ ID NO: 147158 - DNA, 20 bp, synthetic construct
  source 1..20: mol_type = other DNA
cccccgtgactctctcagag

SEQ ID NO: 147159 - DNA, 20 bp, synthetic construct
  source 1..20: mol_type = other DNA
gcccccgtgactctctcaga

SEQ ID NO: 147160 - DNA, 20 bp, synthetic construct
  source 1..20: mol_type = other DNA
ggcccccgtgactctctcag

SEQ ID NO: 147161 - DNA, 20 bp, synthetic construct
  source 1..20: mol_type = other DNA
aggcccccgtgactctctca

SEQ ID NO: 147162 - DNA, 20 bp, synthetic construct
  source 1..20: mol_type = other DNA
taggcccccgtgactctctc

SEQ ID NO: 147163 - DNA, 20 bp, synthetic construct
  source 1..20: mol_type = other DNA
ttaggcccccgtgactctct

SEQ ID NO: 147164 - DNA, 20 bp, synthetic construct
  source 1..20: mol_type = other DNA
cttaggcccccgtgactctc

SEQ ID NO: 147165 - DNA, 20 bp, synthetic construct
  source 1..20: mol_type = other DNA
tcttaggcccccgtgactct

SEQ ID NO: 147166 - DNA, 20 bp, synthetic construct
  source 1..20: mol_type = other DNA
ctcttaggcccccgtgactc

SEQ ID NO: 147167 - DNA, 20 bp, synthetic construct
  source 1..20: mol_type = other DNA
actcttaggcccccgtgact

SEQ ID NO: 147168 - DNA, 20 bp, synthetic construct
  source 1..20: mol_type = other DNA
gactcttaggcccccgtgac

SEQ ID NO: 147169 - DNA, 20 bp, synthetic construct
  source 1..20: mol_type = other DNA
agactcttaggcccccgtga

SEQ ID NO: 147170 - DNA, 20 bp, synthetic construct
  source 1..20: mol_type = other DNA
gagactcttaggcccccgtg

SEQ ID NO: 147171 - DNA, 20 bp, synthetic construct
  source 1..20: mol_type = other DNA
agagactcttaggcccccgt

SEQ ID NO: 147172 - DNA, 20 bp, synthetic construct
  source 1..20: mol_type = other DNA
aagagactcttaggcccccg

SEQ ID NO: 147173 - DNA, 20 bp, synthetic construct
  source 1..20: mol_type = other DNA
aaagagactcttaggccccc

SEQ ID NO: 147174 - DNA, 20 bp, synthetic construct
  source 1..20: mol_type = other DNA
aaaagagactcttaggcccc

SEQ ID NO: 147175 - DNA, 20 bp, synthetic construct
  source 1..20: mol_type = other DNA
gaaaagagactcttaggccc

SEQ ID NO: 147176 - DNA, 20 bp, synthetic construct
  source 1..20: mol_type = other DNA
tgaaaagagactcttaggcc

SEQ ID NO: 147177 - DNA, 20 bp, synthetic construct
  source 1..20: mol_type = other DNA
gtgaaaagagactcttaggc

SEQ ID NO: 147178 - DNA, 20 bp, synthetic construct
  source 1..20: mol_type = other DNA
agtgaaaagagactcttagg

SEQ ID NO: 147179 - DNA, 20 bp, synthetic construct
  source 1..20: mol_type = other DNA
cagtgaaaagagactcttag

SEQ ID NO: 147180 - DNA, 20 bp, synthetic construct
  source 1..20: mol_type = other DNA
gcagtgaaaagagactctta

SEQ ID NO: 147181 - DNA, 20 bp, synthetic construct
  source 1..20: mol_type = other DNA
ggcagtgaaaagagactctt

SEQ ID NO: 147182 - DNA, 20 bp, synthetic construct
  source 1..20: mol_type = other DNA
aggcagtgaaaagagactct

SEQ ID NO: 147183 - DNA, 20 bp, synthetic construct
  source 1..20: mol_type = other DNA
caggcagtgaaaagagactc

SEQ ID NO: 147184 - DNA, 20 bp, synthetic construct
  source 1..20: mol_type = other DNA
ccaggcagtgaaaagagact

SEQ ID NO: 147185 - DNA, 20 bp, synthetic construct
  source 1..20: mol_type = other DNA
accaggcagtgaaaagagac

SEQ ID NO: 147186 - DNA, 20 bp, synthetic construct
  source 1..20: mol_type = other DNA
caccaggcagtgaaaagaga

SEQ ID NO: 147187 - DNA, 20 bp, synthetic construct
  source 1..20: mol_type = other DNA
tcaccaggcagtgaaaagag

SEQ ID NO: 147188 - DNA, 20 bp, synthetic construct
  source 1..20: mol_type = other DNA
ctcaccaggcagtgaaaaga

SEQ ID NO: 147189 - DNA, 20 bp, synthetic construct
  source 1..20: mol_type = other DNA
gctcaccaggcagtgaaaag

SEQ ID NO: 147190 - DNA, 20 bp, synthetic construct
  source 1..20: mol_type = other DNA
tgctcaccaggcagtgaaaa

SEQ ID NO: 147191 - DNA, 20 bp, synthetic construct
  source 1..20: mol_type = other DNA
ctgctcaccaggcagtgaaa

SEQ ID NO: 147192 - DNA, 20 bp, synthetic construct
  source 1..20: mol_type = other DNA
tctgctcaccaggcagtgaa

SEQ ID NO: 147193 - DNA, 20 bp, synthetic construct
  source 1..20: mol_type = other DNA
gtctgctcaccaggcagtga

SEQ ID NO: 147194 - DNA, 20 bp, synthetic construct
  source 1..20: mol_type = other DNA
ggtctgctcaccaggcagtg

SEQ ID NO: 147195 - DNA, 20 bp, synthetic construct
  source 1..20: mol_type = other DNA
tggtctgctcaccaggcagt

SEQ ID NO: 147196 - DNA, 20 bp, synthetic construct
  source 1..20: mol_type = other DNA
ctggtctgctcaccaggcag

SEQ ID NO: 147197 - DNA, 20 bp, synthetic construct
  source 1..20: mol_type = other DNA
tctggtctgctcaccaggca

SEQ ID NO: 147198 - DNA, 20 bp, synthetic construct
  source 1..20: mol_type = other DNA
ttctggtctgctcaccaggc

SEQ ID NO: 147199 - DNA, 20 bp, synthetic construct
  source 1..20: mol_type = other DNA
cttctggtctgctcaccagg

SEQ ID NO: 147200 - DNA, 20 bp, synthetic construct
  source 1..20: mol_type = other DNA
gcttctggtctgctcaccag

SEQ ID NO: 147201 - DNA, 20 bp, synthetic construct
  source 1..20: mol_type = other DNA
tgcttctggtctgctcacca

SEQ ID NO: 147202 - DNA, 20 bp, synthetic construct
  source 1..20: mol_type = other DNA
ctgcttctggtctgctcacc

SEQ ID NO: 147203 - DNA, 20 bp, synthetic construct
  source 1..20: mol_type = other DNA
tctgcttctggtctgctcac

SEQ ID NO: 147204 - DNA, 20 bp, synthetic construct
  source 1..20: mol_type = other DNA
ctctgcttctggtctgctca

SEQ ID NO: 147205 - DNA, 20 bp, synthetic construct
  source 1..20: mol_type = other DNA
cctctgcttctggtctgctc

SEQ ID NO: 147206 - DNA, 20 bp, synthetic construct
  source 1..20: mol_type = other DNA
ccctctgcttctggtctgct

SEQ ID NO: 147207 - DNA, 20 bp, synthetic construct
  source 1..20: mol_type = other DNA
tccctctgcttctggtctgc

SEQ ID NO: 147208 - DNA, 20 bp, synthetic construct
  source 1..20: mol_type = other DNA
ctccctctgcttctggtctg

SEQ ID NO: 147209 - DNA, 20 bp, synthetic construct
  source 1..20: mol_type = other DNA
tctccctctgcttctggtct

SEQ ID NO: 147210 - DNA, 20 bp, synthetic construct
  source 1..20: mol_type = other DNA
ctctccctctgcttctggtc

SEQ ID NO: 147211 - DNA, 20 bp, synthetic construct
  source 1..20: mol_type = other DNA
tctctccctctgcttctggt

SEQ ID NO: 147212 - DNA, 20 bp, synthetic construct
  source 1..20: mol_type = other DNA
ctctctccctctgcttctgg

SEQ ID NO: 147213 - DNA, 20 bp, synthetic construct
  source 1..20: mol_type = other DNA
cctctctccctctgcttctg

SEQ ID NO: 147214 - DNA, 20 bp, synthetic construct
  source 1..20: mol_type = other DNA
gcctctctccctctgcttct

SEQ ID NO: 147215 - DNA, 20 bp, synthetic construct
  source 1..20: mol_type = other DNA
tgcctctctccctctgcttc

SEQ ID NO: 147216 - DNA, 20 bp, synthetic construct
  source 1..20: mol_type = other DNA
ttgcctctctccctctgctt

SEQ ID NO: 147217 - DNA, 20 bp, synthetic construct
  source 1..20: mol_type = other DNA
tttgcctctctccctctgct

SEQ ID NO: 147218 - DNA, 20 bp, synthetic construct
  source 1..20: mol_type = other DNA
atttgcctctctccctctgc

SEQ ID NO: 147219 - DNA, 20 bp, synthetic construct
  source 1..20: mol_type = other DNA
catttgcctctctccctctg

SEQ ID NO: 147220 - DNA, 20 bp, synthetic construct
  source 1..20: mol_type = other DNA
tcatttgcctctctccctct

SEQ ID NO: 147221 - DNA, 20 bp, synthetic construct
  source 1..20: mol_type = other DNA
ttcatttgcctctctccctc

SEQ ID NO: 147222 - DNA, 20 bp, synthetic construct
  source 1..20: mol_type = other DNA
gttcatttgcctctctccct

SEQ ID NO: 147223 - DNA, 20 bp, synthetic construct
  source 1..20: mol_type = other DNA
tgttcatttgcctctctccc

SEQ ID NO: 147224 - DNA, 20 bp, synthetic construct
  source 1..20: mol_type = other DNA
ctgttcatttgcctctctcc

SEQ ID NO: 147225 - DNA, 20 bp, synthetic construct
  source 1..20: mol_type = other DNA
tctgttcatttgcctctctc

SEQ ID NO: 147226 - DNA, 20 bp, synthetic construct
  source 1..20: mol_type = other DNA
ctctgttcatttgcctctct

SEQ ID NO: 147227 - DNA, 20 bp, synthetic construct
  source 1..20: mol_type = other DNA
cctctgttcatttgcctctc

SEQ ID NO: 147228 - DNA, 20 bp, synthetic construct
  source 1..20: mol_type = other DNA
acctctgttcatttgcctct

SEQ ID NO: 147229 - DNA, 20 bp, synthetic construct
  source 1..20: mol_type = other DNA
gacctctgttcatttgcctc

SEQ ID NO: 147230 - DNA, 20 bp, synthetic construct
  source 1..20: mol_type = other DNA
ggacctctgttcatttgcct

SEQ ID NO: 147231 - DNA, 20 bp, synthetic construct
  source 1..20: mol_type = other DNA
tggacctctgttcatttgcc

SEQ ID NO: 147232 - DNA, 20 bp, synthetic construct
  source 1..20: mol_type = other DNA
ttggacctctgttcatttgc

SEQ ID NO: 147233 - DNA, 20 bp, synthetic construct
  source 1..20: mol_type = other DNA
cttggacctctgttcatttg

SEQ ID NO: 147234 - DNA, 20 bp, synthetic construct
  source 1..20: mol_type = other DNA
acttggacctctgttcattt

SEQ ID NO: 147235 - DNA, 20 bp, synthetic construct
  source 1..20: mol_type = other DNA
tacttggacctctgttcatt

SEQ ID NO: 147236 - DNA, 20 bp, synthetic construct
  source 1..20: mol_type = other DNA
ttacttggacctctgttcat

SEQ ID NO: 147237 - DNA, 20 bp, synthetic construct
  source 1..20: mol_type = other DNA
attacttggacctctgttca

SEQ ID NO: 147238 - DNA, 20 bp, synthetic construct
  source 1..20: mol_type = other DNA
aattacttggacctctgttc

SEQ ID NO: 147239 - DNA, 20 bp, synthetic construct
  source 1..20: mol_type = other DNA
gaattacttggacctctgtt

SEQ ID NO: 147240 - DNA, 20 bp, synthetic construct
  source 1..20: mol_type = other DNA
tgaattacttggacctctgt

SEQ ID NO: 147241 - DNA, 20 bp, synthetic construct
  source 1..20: mol_type = other DNA
gtgaattacttggacctctg

SEQ ID NO: 147242 - DNA, 20 bp, synthetic construct
  source 1..20: mol_type = other DNA
tgtgaattacttggacctct

SEQ ID NO: 147243 - DNA, 20 bp, synthetic construct
  source 1..20: mol_type = other DNA
atgtgaattacttggacctc

SEQ ID NO: 147244 - DNA, 20 bp, synthetic construct
  source 1..20: mol_type = other DNA
tatgtgaattacttggacct

SEQ ID NO: 147245 - DNA, 20 bp, synthetic construct
  source 1..20: mol_type = other DNA
gtatgtgaattacttggacc

SEQ ID NO: 147246 - DNA, 20 bp, synthetic construct
  source 1..20: mol_type = other DNA
agtatgtgaattacttggac

SEQ ID NO: 147247 - DNA, 20 bp, synthetic construct
  source 1..20: mol_type = other DNA
aagtatgtgaattacttgga

SEQ ID NO: 147248 - DNA, 20 bp, synthetic construct
  source 1..20: mol_type = other DNA
caagtatgtgaattacttgg

SEQ ID NO: 147249 - DNA, 20 bp, synthetic construct
  source 1..20: mol_type = other DNA
tcaagtatgtgaattacttg

SEQ ID NO: 147250 - DNA, 20 bp, synthetic construct
  source 1..20: mol_type = other DNA
gtcaagtatgtgaattactt

SEQ ID NO: 147251 - DNA, 20 bp, synthetic construct
  source 1..20: mol_type = other DNA
agtcaagtatgtgaattact

SEQ ID NO: 147252 - DNA, 20 bp, synthetic construct
  source 1..20: mol_type = other DNA
cagtcaagtatgtgaattac

SEQ ID NO: 147253 - DNA, 20 bp, synthetic construct
  source 1..20: mol_type = other DNA
acagtcaagtatgtgaatta

SEQ ID NO: 147254 - DNA, 20 bp, synthetic construct
  source 1..20: mol_type = other DNA
cacagtcaagtatgtgaatt

SEQ ID NO: 147255 - DNA, 20 bp, synthetic construct
  source 1..20: mol_type = other DNA
tcacagtcaagtatgtgaat

SEQ ID NO: 147256 - DNA, 20 bp, synthetic construct
  source 1..20: mol_type = other DNA
gtcacagtcaagtatgtgaa

SEQ ID NO: 147257 - DNA, 20 bp, synthetic construct
  source 1..20: mol_type = other DNA
tgtcacagtcaagtatgtga

SEQ ID NO: 147258 - DNA, 20 bp, synthetic construct
  source 1..20: mol_type = other DNA
ctgtcacagtcaagtatgtg

SEQ ID NO: 147259 - DNA, 20 bp, synthetic construct
  source 1..20: mol_type = other DNA
actgtcacagtcaagtatgt

SEQ ID NO: 147260 - DNA, 20 bp, synthetic construct
  source 1..20: mol_type = other DNA
gactgtcacagtcaagtatg

SEQ ID NO: 147261 - DNA, 20 bp, synthetic construct
  source 1..20: mol_type = other DNA
agactgtcacagtcaagtat

SEQ ID NO: 147262 - DNA, 20 bp, synthetic construct
  source 1..20: mol_type = other DNA
gagactgtcacagtcaagta

SEQ ID NO: 147263 - DNA, 20 bp, synthetic construct
  source 1..20: mol_type = other DNA
agagactgtcacagtcaagt

SEQ ID NO: 147264 - DNA, 20 bp, synthetic construct
  source 1..20: mol_type = other DNA
cagagactgtcacagtcaag

SEQ ID NO: 147265 - DNA, 20 bp, synthetic construct
  source 1..20: mol_type = other DNA
gcagagactgtcacagtcaa

SEQ ID NO: 147266 - DNA, 20 bp, synthetic construct
  source 1..20: mol_type = other DNA
agcagagactgtcacagtca

SEQ ID NO: 147267 - DNA, 20 bp, synthetic construct
  source 1..20: mol_type = other DNA
aagcagagactgtcacagtc

SEQ ID NO: 147268 - DNA, 20 bp, synthetic construct
  source 1..20: mol_type = other DNA
taagcagagactgtcacagt

SEQ ID NO: 147269 - DNA, 20 bp, synthetic construct
  source 1..20: mol_type = other DNA
ataagcagagactgtcacag

SEQ ID NO: 147270 - DNA, 20 bp, synthetic construct
  source 1..20: mol_type = other DNA
aataagcagagactgtcaca

SEQ ID NO: 147271 - DNA, 20 bp, synthetic construct
  source 1..20: mol_type = other DNA
taataagcagagactgtcac

SEQ ID NO: 147272 - DNA, 20 bp, synthetic construct
  source 1..20: mol_type = other DNA
ttaataagcagagactgtca

SEQ ID NO: 147273 - DNA, 20 bp, synthetic construct
  source 1..20: mol_type = other DNA
attaataagcagagactgtc

SEQ ID NO: 147274 - DNA, 20 bp, synthetic construct
  source 1..20: mol_type = other DNA
cattaataagcagagactgt

SEQ ID NO: 147275 - DNA, 20 bp, synthetic construct
  source 1..20: mol_type = other DNA
acattaataagcagagactg

SEQ ID NO: 147276 - DNA, 20 bp, synthetic construct
  source 1..20: mol_type = other DNA
tacattaataagcagagact

SEQ ID NO: 147277 - DNA, 20 bp, synthetic construct
  source 1..20: mol_type = other DNA
ttacattaataagcagagac

SEQ ID NO: 147278 - DNA, 20 bp, synthetic construct
  source 1..20: mol_type = other DNA
attacattaataagcagaga

SEQ ID NO: 147279 - DNA, 20 bp, synthetic construct
  source 1..20: mol_type = other DNA
gattacattaataagcagag

SEQ ID NO: 147280 - DNA, 20 bp, synthetic construct
  source 1..20: mol_type = other DNA
agattacattaataagcaga

SEQ ID NO: 147281 - DNA, 20 bp, synthetic construct
  source 1..20: mol_type = other DNA
cagattacattaataagcag

SEQ ID NO: 147282 - DNA, 20 bp, synthetic construct
  source 1..20: mol_type = other DNA
acagattacattaataagca

SEQ ID NO: 147283 - DNA, 20 bp, synthetic construct
  source 1..20: mol_type = other DNA
aacagattacattaataagc

SEQ ID NO: 147284 - DNA, 20 bp, synthetic construct
  source 1..20: mol_type = other DNA
aaacagattacattaataag

SEQ ID NO: 147285 - DNA, 20 bp, synthetic construct
  source 1..20: mol_type = other DNA
aaaacagattacattaataa

SEQ ID NO: 147286 - DNA, 20 bp, synthetic construct
  source 1..20: mol_type = other DNA
gaaaacagattacattaata

SEQ ID NO: 147287 - DNA, 20 bp, synthetic construct
  source 1..20: mol_type = other DNA
ggaaaacagattacattaat

SEQ ID NO: 147288 - DNA, 20 bp, synthetic construct
  source 1..20: mol_type = other DNA
aggaaaacagattacattaa

SEQ ID NO: 147289 - DNA, 20 bp, synthetic construct
  source 1..20: mol_type = other DNA
taggaaaacagattacatta

SEQ ID NO: 147290 - DNA, 20 bp, synthetic construct
  source 1..20: mol_type = other DNA
ataggaaaacagattacatt

SEQ ID NO: 147291 - DNA, 20 bp, synthetic construct
  source 1..20: mol_type = other DNA
aataggaaaacagattacat

SEQ ID NO: 147292 - DNA, 20 bp, synthetic construct
  source 1..20: mol_type = other DNA
aaataggaaaacagattaca

SEQ ID NO: 147293 - DNA, 20 bp, synthetic construct
  source 1..20: mol_type = other DNA
caaataggaaaacagattac

SEQ ID NO: 147294 - DNA, 20 bp, synthetic construct
  source 1..20: mol_type = other DNA
tcaaataggaaaacagatta

SEQ ID NO: 147295 - DNA, 20 bp, synthetic construct
  source 1..20: mol_type = other DNA
ttcaaataggaaaacagatt

SEQ ID NO: 147296 - DNA, 20 bp, synthetic construct
  source 1..20: mol_type = other DNA
tttcaaataggaaaacagat

SEQ ID NO: 147297 - DNA, 20 bp, synthetic construct
  source 1..20: mol_type = other DNA
ctttcaaataggaaaacaga

SEQ ID NO: 147298 - DNA, 20 bp, synthetic construct
  source 1..20: mol_type = other DNA
cctttcaaataggaaaacag

SEQ ID NO: 147299 - DNA, 20 bp, synthetic construct
  source 1..20: mol_type = other DNA
ccctttcaaataggaaaaca

SEQ ID NO: 147300 - DNA, 20 bp, synthetic construct
  source 1..20: mol_type = other DNA
tccctttcaaataggaaaac

SEQ ID NO: 147301 - DNA, 20 bp, synthetic construct
  source 1..20: mol_type = other DNA
atccctttcaaataggaaaa

SEQ ID NO: 147302 - DNA, 20 bp, synthetic construct
  source 1..20: mol_type = other DNA
catccctttcaaataggaaa

SEQ ID NO: 147303 - DNA, 20 bp, synthetic construct
  source 1..20: mol_type = other DNA
acatccctttcaaataggaa

SEQ ID NO: 147304 - DNA, 20 bp, synthetic construct
  source 1..20: mol_type = other DNA
aacatccctttcaaatagga

SEQ ID NO: 147305 - DNA, 20 bp, synthetic construct
  source 1..20: mol_type = other DNA
taacatccctttcaaatagg

SEQ ID NO: 147306 - DNA, 20 bp, synthetic construct
  source 1..20: mol_type = other DNA
ataacatccctttcaaatag

SEQ ID NO: 147307 - DNA, 20 bp, synthetic construct
  source 1..20: mol_type = other DNA
gataacatccctttcaaata

SEQ ID NO: 147308 - DNA, 20 bp, synthetic construct
  source 1..20: mol_type = other DNA
agataacatccctttcaaat

SEQ ID NO: 147309 - DNA, 20 bp, synthetic construct
  source 1..20: mol_type = other DNA
cagataacatccctttcaaa

SEQ ID NO: 147310 - DNA, 20 bp, synthetic construct
  source 1..20: mol_type = other DNA
gcagataacatccctttcaa

SEQ ID NO: 147311 - DNA, 20 bp, synthetic construct
  source 1..20: mol_type = other DNA
tgcagataacatccctttca

SEQ ID NO: 147312 - DNA, 20 bp, synthetic construct
  source 1..20: mol_type = other DNA
ttgcagataacatccctttc

SEQ ID NO: 147313 - DNA, 20 bp, synthetic construct
  source 1..20: mol_type = other DNA
tttgcagataacatcccttt

SEQ ID NO: 147314 - DNA, 20 bp, synthetic construct
  source 1..20: mol_type = other DNA
ttttgcagataacatccctt

SEQ ID NO: 147315 - DNA, 20 bp, synthetic construct
  source 1..20: mol_type = other DNA
gttttgcagataacatccct

SEQ ID NO: 147316 - DNA, 20 bp, synthetic construct
  source 1..20: mol_type = other DNA
agttttgcagataacatccc

SEQ ID NO: 147317 - DNA, 20 bp, synthetic construct
  source 1..20: mol_type = other DNA
tagttttgcagataacatcc

SEQ ID NO: 147318 - DNA, 20 bp, synthetic construct
  source 1..20: mol_type = other DNA
gtagttttgcagataacatc

SEQ ID NO: 147319 - DNA, 20 bp, synthetic construct
  source 1..20: mol_type = other DNA
ggtagttttgcagataacat

SEQ ID NO: 147320 - DNA, 20 bp, synthetic construct
  source 1..20: mol_type = other DNA
aggtagttttgcagataaca

SEQ ID NO: 147321 - DNA, 20 bp, synthetic construct
  source 1..20: mol_type = other DNA
gaggtagttttgcagataac

SEQ ID NO: 147322 - DNA, 20 bp, synthetic construct
  source 1..20: mol_type = other DNA
tgaggtagttttgcagataa

SEQ ID NO: 147323 - DNA, 20 bp, synthetic construct
  source 1..20: mol_type = other DNA
ctgaggtagttttgcagata

SEQ ID NO: 147324 - DNA, 20 bp, synthetic construct
  source 1..20: mol_type = other DNA
cctgaggtagttttgcagat

SEQ ID NO: 147325 - DNA, 20 bp, synthetic construct
  source 1..20: mol_type = other DNA
gcctgaggtagttttgcaga

SEQ ID NO: 147326 - DNA, 20 bp, synthetic construct
  source 1..20: mol_type = other DNA
ggcctgaggtagttttgcag

SEQ ID NO: 147327 - DNA, 20 bp, synthetic construct
  source 1..20: mol_type = other DNA
gggcctgaggtagttttgca

SEQ ID NO: 147328 - DNA, 20 bp, synthetic construct
  source 1..20: mol_type = other DNA
ggggcctgaggtagttttgc

SEQ ID NO: 147329 - DNA, 20 bp, synthetic construct
  source 1..20: mol_type = other DNA
tggggcctgaggtagttttg

SEQ ID NO: 147330 - DNA, 20 bp, synthetic construct
  source 1..20: mol_type = other DNA
gtggggcctgaggtagtttt

SEQ ID NO: 147331 - DNA, 20 bp, synthetic construct
  source 1..20: mol_type = other DNA
tgtggggcctgaggtagttt

SEQ ID NO: 147332 - DNA, 20 bp, synthetic construct
  source 1..20: mol_type = other DNA
atgtggggcctgaggtagtt

SEQ ID NO: 147333 - DNA, 20 bp, synthetic construct
  source 1..20: mol_type = other DNA
catgtggggcctgaggtagt

SEQ ID NO: 147334 - DNA, 20 bp, synthetic construct
  source 1..20: mol_type = other DNA
ccatgtggggcctgaggtag

SEQ ID NO: 147335 - DNA, 20 bp, synthetic construct
  source 1..20: mol_type = other DNA
gccatgtggggcctgaggta

SEQ ID NO: 147336 - DNA, 20 bp, synthetic construct
  source 1..20: mol_type = other DNA
tgccatgtggggcctgaggt

SEQ ID NO: 147337 - DNA, 20 bp, synthetic construct
  source 1..20: mol_type = other DNA
ctgccatgtggggcctgagg

SEQ ID NO: 147338 - DNA, 20 bp, synthetic construct
  source 1..20: mol_type = other DNA
gctgccatgtggggcctgag

SEQ ID NO: 147339 - DNA, 20 bp, synthetic construct
  source 1..20: mol_type = other DNA
ggctgccatgtggggcctga

SEQ ID NO: 147340 - DNA, 20 bp, synthetic construct
  source 1..20: mol_type = other DNA
aggctgccatgtggggcctg

SEQ ID NO: 147341 - DNA, 20 bp, synthetic construct
  source 1..20: mol_type = other DNA
caggctgccatgtggggcct

SEQ ID NO: 147342 - DNA, 20 bp, synthetic construct
  source 1..20: mol_type = other DNA
tcaggctgccatgtggggcc

SEQ ID NO: 147343 - DNA, 20 bp, synthetic construct
  source 1..20: mol_type = other DNA
atcaggctgccatgtggggc

SEQ ID NO: 147344 - DNA, 20 bp, synthetic construct
  source 1..20: mol_type = other DNA
aatcaggctgccatgtgggg

SEQ ID NO: 147345 - DNA, 20 bp, synthetic construct
  source 1..20: mol_type = other DNA
gaatcaggctgccatgtggg

SEQ ID NO: 147346 - DNA, 20 bp, synthetic construct
  source 1..20: mol_type = other DNA
agaatcaggctgccatgtgg

SEQ ID NO: 147347 - DNA, 20 bp, synthetic construct
  source 1..20: mol_type = other DNA
cagaatcaggctgccatgtg

SEQ ID NO: 147348 - DNA, 20 bp, synthetic construct
  source 1..20: mol_type = other DNA
tcagaatcaggctgccatgt

SEQ ID NO: 147349 - DNA, 20 bp, synthetic construct
  source 1..20: mol_type = other DNA
ttcagaatcaggctgccatg

SEQ ID NO: 147350 - DNA, 20 bp, synthetic construct
  source 1..20: mol_type = other DNA
cttcagaatcaggctgccat

SEQ ID NO: 147351 - DNA, 20 bp, synthetic construct
  source 1..20: mol_type = other DNA
gcttcagaatcaggctgcca

SEQ ID NO: 147352 - DNA, 20 bp, synthetic construct
  source 1..20: mol_type = other DNA
tgcttcagaatcaggctgcc

SEQ ID NO: 147353 - DNA, 20 bp, synthetic construct
  source 1..20: mol_type = other DNA
atgcttcagaatcaggctgc

SEQ ID NO: 147354 - DNA, 20 bp, synthetic construct
  source 1..20: mol_type = other DNA
gatgcttcagaatcaggctg

SEQ ID NO: 147355 - DNA, 20 bp, synthetic construct
  source 1..20: mol_type = other DNA
tgatgcttcagaatcaggct

SEQ ID NO: 147356 - DNA, 20 bp, synthetic construct
  source 1..20: mol_type = other DNA
atgatgcttcagaatcaggc

SEQ ID NO: 147357 - DNA, 20 bp, synthetic construct
  source 1..20: mol_type = other DNA
aatgatgcttcagaatcagg

SEQ ID NO: 147358 - DNA, 20 bp, synthetic construct
  source 1..20: mol_type = other DNA
caatgatgcttcagaatcag

SEQ ID NO: 147359 - DNA, 20 bp, synthetic construct
  source 1..20: mol_type = other DNA
tcaatgatgcttcagaatca

SEQ ID NO: 147360 - DNA, 20 bp, synthetic construct
  source 1..20: mol_type = other DNA
ttcaatgatgcttcagaatc

SEQ ID NO: 147361 - DNA, 20 bp, synthetic construct
  source 1..20: mol_type = other DNA
attcaatgatgcttcagaat

SEQ ID NO: 147362 - DNA, 20 bp, synthetic construct
  source 1..20: mol_type = other DNA
gattcaatgatgcttcagaa

SEQ ID NO: 147363 - DNA, 20 bp, synthetic construct
  source 1..20: mol_type = other DNA
agattcaatgatgcttcaga

SEQ ID NO: 147364 - DNA, 20 bp, synthetic construct
  source 1..20: mol_type = other DNA
aagattcaatgatgcttcag

SEQ ID NO: 147365 - DNA, 20 bp, synthetic construct
  source 1..20: mol_type = other DNA
caagattcaatgatgcttca

SEQ ID NO: 147366 - DNA, 20 bp, synthetic construct
  source 1..20: mol_type = other DNA
acaagattcaatgatgcttc

SEQ ID NO: 147367 - DNA, 20 bp, synthetic construct
  source 1..20: mol_type = other DNA
tacaagattcaatgatgctt

SEQ ID NO: 147368 - DNA, 20 bp, synthetic construct
  source 1..20: mol_type = other DNA
atacaagattcaatgatgct

SEQ ID NO: 147369 - DNA, 20 bp, synthetic construct
  source 1..20: mol_type = other DNA
catacaagattcaatgatgc

SEQ ID NO: 147370 - DNA, 20 bp, synthetic construct
  source 1..20: mol_type = other DNA
tcatacaagattcaatgatg

SEQ ID NO: 147371 - DNA, 20 bp, synthetic construct
  source 1..20: mol_type = other DNA
atcatacaagattcaatgat

SEQ ID NO: 147372 - DNA, 20 bp, synthetic construct
  source 1..20: mol_type = other DNA
tatcatacaagattcaatga

SEQ ID NO: 147373 - DNA, 20 bp, synthetic construct
  source 1..20: mol_type = other DNA
atatcatacaagattcaatg

SEQ ID NO: 147374 - DNA, 20 bp, synthetic construct
  source 1..20: mol_type = other DNA
aatatcatacaagattcaat

SEQ ID NO: 147375 - DNA, 20 bp, synthetic construct
  source 1..20: mol_type = other DNA
taatatcatacaagattcaa

SEQ ID NO: 147376 - DNA, 20 bp, synthetic construct
  source 1..20: mol_type = other DNA
ttaatatcatacaagattca

SEQ ID NO: 147377 - DNA, 20 bp, synthetic construct
  source 1..20: mol_type = other DNA
cttaatatcatacaagattc

SEQ ID NO: 147378 - DNA, 20 bp, synthetic construct
  source 1..20: mol_type = other DNA
acttaatatcatacaagatt

SEQ ID NO: 147379 - DNA, 20 bp, synthetic construct
  source 1..20: mol_type = other DNA
aacttaatatcatacaagat

SEQ ID NO: 147380 - DNA, 20 bp, synthetic construct
  source 1..20: mol_type = other DNA
caacttaatatcatacaaga

SEQ ID NO: 147381 - DNA, 20 bp, synthetic construct
  source 1..20: mol_type = other DNA
tcaacttaatatcatacaag

SEQ ID NO: 147382 - DNA, 20 bp, synthetic construct
  source 1..20: mol_type = other DNA
ctcaacttaatatcatacaa

SEQ ID NO: 147383 - DNA, 20 bp, synthetic construct
  source 1..20: mol_type = other DNA
tctcaacttaatatcataca

SEQ ID NO: 147384 - DNA, 20 bp, synthetic construct
  source 1..20: mol_type = other DNA
ttctcaacttaatatcatac

SEQ ID NO: 147385 - DNA, 20 bp, synthetic construct
  source 1..20: mol_type = other DNA
tttctcaacttaatatcata

SEQ ID NO: 147386 - DNA, 20 bp, synthetic construct
  source 1..20: mol_type = other DNA
ctttctcaacttaatatcat

SEQ ID NO: 147387 - DNA, 20 bp, synthetic construct
  source 1..20: mol_type = other DNA
gctttctcaacttaatatca

SEQ ID NO: 147388 - DNA, 20 bp, synthetic construct
  source 1..20: mol_type = other DNA
agctttctcaacttaatatc

SEQ ID NO: 147389 - DNA, 20 bp, synthetic construct
  source 1..20: mol_type = other DNA
cagctttctcaacttaatat

SEQ ID NO: 147390 - DNA, 20 bp, synthetic construct
  source 1..20: mol_type = other DNA
gcagctttctcaacttaata

SEQ ID NO: 147391 - DNA, 20 bp, synthetic construct
  source 1..20: mol_type = other DNA
ggcagctttctcaacttaat

SEQ ID NO: 147392 - DNA, 20 bp, synthetic construct
  source 1..20: mol_type = other DNA
gggcagctttctcaacttaa

SEQ ID NO: 147393 - DNA, 20 bp, synthetic construct
  source 1..20: mol_type = other DNA
agggcagctttctcaactta

SEQ ID NO: 147394 - DNA, 20 bp, synthetic construct
  source 1..20: mol_type = other DNA
aagggcagctttctcaactt

SEQ ID NO: 147395 - DNA, 20 bp, synthetic construct
  source 1..20: mol_type = other DNA
caagggcagctttctcaact

SEQ ID NO: 147396 - DNA, 20 bp, synthetic construct
  source 1..20: mol_type = other DNA
ccaagggcagctttctcaac

SEQ ID NO: 147397 - DNA, 20 bp, synthetic construct
  source 1..20: mol_type = other DNA
tccaagggcagctttctcaa

SEQ ID NO: 147398 - DNA, 20 bp, synthetic construct
  source 1..20: mol_type = other DNA
atccaagggcagctttctca

SEQ ID NO: 147399 - DNA, 20 bp, synthetic construct
  source 1..20: mol_type = other DNA
gatccaagggcagctttctc

SEQ ID NO: 147400 - DNA, 20 bp, synthetic construct
  source 1..20: mol_type = other DNA
ggatccaagggcagctttct

SEQ ID NO: 147401 - DNA, 20 bp, synthetic construct
  source 1..20: mol_type = other DNA
tggatccaagggcagctttc

SEQ ID NO: 147402 - DNA, 20 bp, synthetic construct
  source 1..20: mol_type = other DNA
ctggatccaagggcagcttt

SEQ ID NO: 147403 - DNA, 20 bp, synthetic construct
  source 1..20: mol_type = other DNA
actggatccaagggcagctt

SEQ ID NO: 147404 - DNA, 20 bp, synthetic construct
  source 1..20: mol_type = other DNA
cactggatccaagggcagct

SEQ ID NO: 147405 - DNA, 20 bp, synthetic construct
  source 1..20: mol_type = other DNA
acactggatccaagggcagc

SEQ ID NO: 147406 - DNA, 20 bp, synthetic construct
  source 1..20: mol_type = other DNA
gacactggatccaagggcag

SEQ ID NO: 147407 - DNA, 20 bp, synthetic construct
  source 1..20: mol_type = other DNA
agacactggatccaagggca

SEQ ID NO: 147408 - DNA, 20 bp, synthetic construct
  source 1..20: mol_type = other DNA
tagacactggatccaagggc

SEQ ID NO: 147409 - DNA, 20 bp, synthetic construct
  source 1..20: mol_type = other DNA
ttagacactggatccaaggg

SEQ ID NO: 147410 - DNA, 20 bp, synthetic construct
  source 1..20: mol_type = other DNA
attagacactggatccaagg

SEQ ID NO: 147411 - DNA, 20 bp, synthetic construct
  source 1..20: mol_type = other DNA
gattagacactggatccaag

SEQ ID NO: 147412 - DNA, 20 bp, synthetic construct
  source 1..20: mol_type = other DNA
agattagacactggatccaa

SEQ ID NO: 147413 - DNA, 20 bp, synthetic construct
  source 1..20: mol_type = other DNA
aagattagacactggatcca

SEQ ID NO: 147414 - DNA, 20 bp, synthetic construct
  source 1..20: mol_type = other DNA
aaagattagacactggatcc

SEQ ID NO: 147415 - DNA, 20 bp, synthetic construct
  source 1..20: mol_type = other DNA
caaagattagacactggatc

SEQ ID NO: 147416 - DNA, 20 bp, synthetic construct
  source 1..20: mol_type = other DNA
acaaagattagacactggat

SEQ ID NO: 147417 - DNA, 20 bp, synthetic construct
  source 1..20: mol_type = other DNA
cacaaagattagacactgga

SEQ ID NO: 147418 - DNA, 20 bp, synthetic construct
  source 1..20: mol_type = other DNA
tcacaaagattagacactgg

SEQ ID NO: 147419 - DNA, 20 bp, synthetic construct
  source 1..20: mol_type = other DNA
ttcacaaagattagacactg

SEQ ID NO: 147420 - DNA, 20 bp, synthetic construct
  source 1..20: mol_type = other DNA
cttcacaaagattagacact

SEQ ID NO: 147421 - DNA, 20 bp, synthetic construct
  source 1..20: mol_type = other DNA
tcttcacaaagattagacac

SEQ ID NO: 147422 - DNA, 20 bp, synthetic construct
  source 1..20: mol_type = other DNA
atcttcacaaagattagaca

SEQ ID NO: 147423 - DNA, 20 bp, synthetic construct
  source 1..20: mol_type = other DNA
gatcttcacaaagattagac

SEQ ID NO: 147424 - DNA, 20 bp, synthetic construct
  source 1..20: mol_type = other DNA
agatcttcacaaagattaga

SEQ ID NO: 147425 - DNA, 20 bp, synthetic construct
  source 1..20: mol_type = other DNA
aagatcttcacaaagattag

SEQ ID NO: 147426 - DNA, 20 bp, synthetic construct
  source 1..20: mol_type = other DNA
taagatcttcacaaagatta

SEQ ID NO: 147427 - DNA, 20 bp, synthetic construct
  source 1..20: mol_type = other DNA
gtaagatcttcacaaagatt

SEQ ID NO: 147428 - DNA, 20 bp, synthetic construct
  source 1..20: mol_type = other DNA
ggtaagatcttcacaaagat

SEQ ID NO: 147429 - DNA, 20 bp, synthetic construct
  source 1..20: mol_type = other DNA
gggtaagatcttcacaaaga

SEQ ID NO: 147430 - DNA, 20 bp, synthetic construct
  source 1..20: mol_type = other DNA
ggggtaagatcttcacaaag

SEQ ID NO: 147431 - DNA, 20 bp, synthetic construct
  source 1..20: mol_type = other DNA
tggggtaagatcttcacaaa

SEQ ID NO: 147432 - DNA, 20 bp, synthetic construct
  source 1..20: mol_type = other DNA
atggggtaagatcttcacaa

SEQ ID NO: 147433 - DNA, 20 bp, synthetic construct
  source 1..20: mol_type = other DNA
tatggggtaagatcttcaca

SEQ ID NO: 147434 - DNA, 20 bp, synthetic construct
  source 1..20: mol_type = other DNA
gtatggggtaagatcttcac

SEQ ID NO: 147435 - DNA, 20 bp, synthetic construct
  source 1..20: mol_type = other DNA
tgtatggggtaagatcttca

SEQ ID NO: 147436 - DNA, 20 bp, synthetic construct
  source 1..20: mol_type = other DNA
atgtatggggtaagatcttc

SEQ ID NO: 147437 - DNA, 20 bp, synthetic construct
  source 1..20: mol_type = other DNA
tatgtatggggtaagatctt

SEQ ID NO: 147438 - DNA, 20 bp, synthetic construct
  source 1..20: mol_type = other DNA
ctatgtatggggtaagatct

SEQ ID NO: 147439 - DNA, 20 bp, synthetic construct
  source 1..20: mol_type = other DNA
tctatgtatggggtaagatc

SEQ ID NO: 147440 - DNA, 20 bp, synthetic construct
  source 1..20: mol_type = other DNA
ttctatgtatggggtaagat

SEQ ID NO: 147441 - DNA, 20 bp, synthetic construct
  source 1..20: mol_type = other DNA
attctatgtatggggtaaga

SEQ ID NO: 147442 - DNA, 20 bp, synthetic construct
  source 1..20: mol_type = other DNA
tattctatgtatggggtaag

SEQ ID NO: 147443 - DNA, 20 bp, synthetic construct
  source 1..20: mol_type = other DNA
gtattctatgtatggggtaa

SEQ ID NO: 147444 - DNA, 20 bp, synthetic construct
  source 1..20: mol_type = other DNA
tgtattctatgtatggggta

SEQ ID NO: 147445 - DNA, 20 bp, synthetic construct
  source 1..20: mol_type = other DNA
ttgtattctatgtatggggt

SEQ ID NO: 147446 - DNA, 20 bp, synthetic construct
  source 1..20: mol_type = other DNA
attgtattctatgtatgggg

SEQ ID NO: 147447 - DNA, 20 bp, synthetic construct
  source 1..20: mol_type = other DNA
cattgtattctatgtatggg

SEQ ID NO: 147448 - DNA, 20 bp, synthetic construct
  source 1..20: mol_type = other DNA
tcattgtattctatgtatgg

SEQ ID NO: 147449 - DNA, 20 bp, synthetic construct
  source 1..20: mol_type = other DNA
atcattgtattctatgtatg

SEQ ID NO: 147450 - DNA, 20 bp, synthetic construct
  source 1..20: mol_type = other DNA
gatcattgtattctatgtat

SEQ ID NO: 147451 - DNA, 20 bp, synthetic construct
  source 1..20: mol_type = other DNA
tgatcattgtattctatgta

SEQ ID NO: 147452 - DNA, 20 bp, synthetic construct
  source 1..20: mol_type = other DNA
ctgatcattgtattctatgt

SEQ ID NO: 147453 - DNA, 20 bp, synthetic construct
  source 1..20: mol_type = other DNA
tctgatcattgtattctatg

SEQ ID NO: 147454 - DNA, 20 bp, synthetic construct
  source 1..20: mol_type = other DNA
ttctgatcattgtattctat

SEQ ID NO: 147455 - DNA, 20 bp, synthetic construct
  source 1..20: mol_type = other DNA
tttctgatcattgtattcta

SEQ ID NO: 147456 - DNA, 20 bp, synthetic construct
  source 1..20: mol_type = other DNA
atttctgatcattgtattct

SEQ ID NO: 147457 - DNA, 20 bp, synthetic construct
  source 1..20: mol_type = other DNA
catttctgatcattgtattc

SEQ ID NO: 147458 - DNA, 20 bp, synthetic construct
  source 1..20: mol_type = other DNA
acatttctgatcattgtatt

SEQ ID NO: 147459 - DNA, 20 bp, synthetic construct
  source 1..20: mol_type = other DNA
gacatttctgatcattgtat

SEQ ID NO: 147460 - DNA, 20 bp, synthetic construct
  source 1..20: mol_type = other DNA
tgacatttctgatcattgta

SEQ ID NO: 147461 - DNA, 20 bp, synthetic construct
  source 1..20: mol_type = other DNA
ttgacatttctgatcattgt

SEQ ID NO: 147462 - DNA, 20 bp, synthetic construct
  source 1..20: mol_type = other DNA
cttgacatttctgatcattg

SEQ ID NO: 147463 - DNA, 20 bp, synthetic construct
  source 1..20: mol_type = other DNA
ccttgacatttctgatcatt

SEQ ID NO: 147464 - DNA, 20 bp, synthetic construct
  source 1..20: mol_type = other DNA
cccttgacatttctgatcat

SEQ ID NO: 147465 - DNA, 20 bp, synthetic construct
  source 1..20: mol_type = other DNA
acccttgacatttctgatca

SEQ ID NO: 147466 - DNA, 20 bp, synthetic construct
  source 1..20: mol_type = other DNA
aacccttgacatttctgatc

SEQ ID NO: 147467 - DNA, 20 bp, synthetic construct
  source 1..20: mol_type = other DNA
taacccttgacatttctgat

SEQ ID NO: 147468 - DNA, 20 bp, synthetic construct
  source 1..20: mol_type = other DNA
ctaacccttgacatttctga

SEQ ID NO: 147469 - DNA, 20 bp, synthetic construct
  source 1..20: mol_type = other DNA
cctaacccttgacatttctg

SEQ ID NO: 147470 - DNA, 20 bp, synthetic construct
  source 1..20: mol_type = other DNA
tcctaacccttgacatttct

SEQ ID NO: 147471 - DNA, 20 bp, synthetic construct
  source 1..20: mol_type = other DNA
gtcctaacccttgacatttc

SEQ ID NO: 147472 - DNA, 20 bp, synthetic construct
  source 1..20: mol_type = other DNA
tgtcctaacccttgacattt

SEQ ID NO: 147473 - DNA, 20 bp, synthetic construct
  source 1..20: mol_type = other DNA
ctgtcctaacccttgacatt

SEQ ID NO: 147474 - DNA, 20 bp, synthetic construct
  source 1..20: mol_type = other DNA
gctgtcctaacccttgacat

SEQ ID NO: 147475 - DNA, 20 bp, synthetic construct
  source 1..20: mol_type = other DNA
tgctgtcctaacccttgaca

SEQ ID NO: 147476 - DNA, 20 bp, synthetic construct
  source 1..20: mol_type = other DNA
gtgctgtcctaacccttgac

SEQ ID NO: 147477 - DNA, 20 bp, synthetic construct
  source 1..20: mol_type = other DNA
tgtgctgtcctaacccttga

SEQ ID NO: 147478 - DNA, 20 bp, synthetic construct
  source 1..20: mol_type = other DNA
ctgtgctgtcctaacccttg

SEQ ID NO: 147479 - DNA, 20 bp, synthetic construct
  source 1..20: mol_type = other DNA
gctgtgctgtcctaaccctt

SEQ ID NO: 147480 - DNA, 20 bp, synthetic construct
  source 1..20: mol_type = other DNA
ggctgtgctgtcctaaccct

SEQ ID NO: 147481 - DNA, 20 bp, synthetic construct
  source 1..20: mol_type = other DNA
gggctgtgctgtcctaaccc

SEQ ID NO: 147482 - DNA, 20 bp, synthetic construct
  source 1..20: mol_type = other DNA
agggctgtgctgtcctaacc

SEQ ID NO: 147483 - DNA, 20 bp, synthetic construct
  source 1..20: mol_type = other DNA
cagggctgtgctgtcctaac

SEQ ID NO: 147484 - DNA, 20 bp, synthetic construct
  source 1..20: mol_type = other DNA
tcagggctgtgctgtcctaa

SEQ ID NO: 147485 - DNA, 20 bp, synthetic construct
  source 1..20: mol_type = other DNA
gtcagggctgtgctgtccta

SEQ ID NO: 147486 - DNA, 20 bp, synthetic construct
  source 1..20: mol_type = other DNA
agtcagggctgtgctgtcct

SEQ ID NO: 147487 - DNA, 20 bp, synthetic construct
  source 1..20: mol_type = other DNA
aagtcagggctgtgctgtcc

SEQ ID NO: 147488 - DNA, 20 bp, synthetic construct
  source 1..20: mol_type = other DNA
gaagtcagggctgtgctgtc

SEQ ID NO: 147489 - DNA, 20 bp, synthetic construct
  source 1..20: mol_type = other DNA
agaagtcagggctgtgctgt

SEQ ID NO: 147490 - DNA, 20 bp, synthetic construct
  source 1..20: mol_type = other DNA
tagaagtcagggctgtgctg

SEQ ID NO: 147491 - DNA, 20 bp, synthetic construct
  source 1..20: mol_type = other DNA
gtagaagtcagggctgtgct

SEQ ID NO: 147492 - DNA, 20 bp, synthetic construct
  source 1..20: mol_type = other DNA
ggtagaagtcagggctgtgc

SEQ ID NO: 147493 - DNA, 20 bp, synthetic construct
  source 1..20: mol_type = other DNA
gggtagaagtcagggctgtg

SEQ ID NO: 147494 - DNA, 20 bp, synthetic construct
  source 1..20: mol_type = other DNA
tgggtagaagtcagggctgt

SEQ ID NO: 147495 - DNA, 20 bp, synthetic construct
  source 1..20: mol_type = other DNA
ctgggtagaagtcagggctg

SEQ ID NO: 147496 - DNA, 20 bp, synthetic construct
  source 1..20: mol_type = other DNA
cctgggtagaagtcagggct

SEQ ID NO: 147497 - DNA, 20 bp, synthetic construct
  source 1..20: mol_type = other DNA
gcctgggtagaagtcagggc

SEQ ID NO: 147498 - DNA, 20 bp, synthetic construct
  source 1..20: mol_type = other DNA
agcctgggtagaagtcaggg

SEQ ID NO: 147499 - DNA, 20 bp, synthetic construct
  source 1..20: mol_type = other DNA
gagcctgggtagaagtcagg

SEQ ID NO: 147500 - DNA, 20 bp, synthetic construct
  source 1..20: mol_type = other DNA
tgagcctgggtagaagtcag

SEQ ID NO: 147501 - DNA, 20 bp, synthetic construct
  source 1..20: mol_type = other DNA
gtgagcctgggtagaagtca

SEQ ID NO: 147502 - DNA, 20 bp, synthetic construct
  source 1..20: mol_type = other DNA
agtgagcctgggtagaagtc

SEQ ID NO: 147503 - DNA, 20 bp, synthetic construct
  source 1..20: mol_type = other DNA
aagtgagcctgggtagaagt

SEQ ID NO: 147504 - DNA, 20 bp, synthetic construct
  source 1..20: mol_type = other DNA
caagtgagcctgggtagaag

SEQ ID NO: 147505 - DNA, 20 bp, synthetic construct
  source 1..20: mol_type = other DNA
acaagtgagcctgggtagaa

SEQ ID NO: 147506 - DNA, 20 bp, synthetic construct
  source 1..20: mol_type = other DNA
aacaagtgagcctgggtaga

SEQ ID NO: 147507 - DNA, 20 bp, synthetic construct
  source 1..20: mol_type = other DNA
caacaagtgagcctgggtag

SEQ ID NO: 147508 - DNA, 20 bp, synthetic construct
  source 1..20: mol_type = other DNA
gcaacaagtgagcctgggta

SEQ ID NO: 147509 - DNA, 20 bp, synthetic construct
  source 1..20: mol_type = other DNA
ggcaacaagtgagcctgggt

SEQ ID NO: 147510 - DNA, 20 bp, synthetic construct
  source 1..20: mol_type = other DNA
aggcaacaagtgagcctggg

SEQ ID NO: 147511 - DNA, 20 bp, synthetic construct
  source 1..20: mol_type = other DNA
caggcaacaagtgagcctgg

SEQ ID NO: 147512 - DNA, 20 bp, synthetic construct
  source 1..20: mol_type = other DNA
gcaggcaacaagtgagcctg

SEQ ID NO: 147513 - DNA, 20 bp, synthetic construct
  source 1..20: mol_type = other DNA
agcaggcaacaagtgagcct

SEQ ID NO: 147514 - DNA, 20 bp, synthetic construct
  source 1..20: mol_type = other DNA
gagcaggcaacaagtgagcc

SEQ ID NO: 147515 - DNA, 20 bp, synthetic construct
  source 1..20: mol_type = other DNA
ggagcaggcaacaagtgagc

SEQ ID NO: 147516 - DNA, 20 bp, synthetic construct
  source 1..20: mol_type = other DNA
gggagcaggcaacaagtgag

SEQ ID NO: 147517 - DNA, 20 bp, synthetic construct
  source 1..20: mol_type = other DNA
agggagcaggcaacaagtga

SEQ ID NO: 147518 - DNA, 20 bp, synthetic construct
  source 1..20: mol_type = other DNA
cagggagcaggcaacaagtg

SEQ ID NO: 147519 - DNA, 20 bp, synthetic construct
  source 1..20: mol_type = other DNA
tcagggagcaggcaacaagt

SEQ ID NO: 147520 - DNA, 20 bp, synthetic construct
  source 1..20: mol_type = other DNA
gtcagggagcaggcaacaag

SEQ ID NO: 147521 - DNA, 20 bp, synthetic construct
  source 1..20: mol_type = other DNA
ggtcagggagcaggcaacaa

SEQ ID NO: 147522 - DNA, 20 bp, synthetic construct
  source 1..20: mol_type = other DNA
gggtcagggagcaggcaaca

SEQ ID NO: 147523 - DNA, 20 bp, synthetic construct
  source 1..20: mol_type = other DNA
agggtcagggagcaggcaac

SEQ ID NO: 147524 - DNA, 20 bp, synthetic construct
  source 1..20: mol_type = other DNA
aagggtcagggagcaggcaa

SEQ ID NO: 147525 - DNA, 20 bp, synthetic construct
  source 1..20: mol_type = other DNA
caagggtcagggagcaggca

SEQ ID NO: 147526 - DNA, 20 bp, synthetic construct
  source 1..20: mol_type = other DNA
gcaagggtcagggagcaggc

SEQ ID NO: 147527 - DNA, 20 bp, synthetic construct
  source 1..20: mol_type = other DNA
tgcaagggtcagggagcagg

SEQ ID NO: 147528 - DNA, 20 bp, synthetic construct
  source 1..20: mol_type = other DNA
ctgcaagggtcagggagcag

SEQ ID NO: 147529 - DNA, 20 bp, synthetic construct
  source 1..20: mol_type = other DNA
cctgcaagggtcagggagca

SEQ ID NO: 147530 - DNA, 20 bp, synthetic construct
  source 1..20: mol_type = other DNA
tcctgcaagggtcagggagc

SEQ ID NO: 147531 - DNA, 20 bp, synthetic construct
  source 1..20: mol_type = other DNA
atcctgcaagggtcagggag

SEQ ID NO: 147532 - DNA, 20 bp, synthetic construct
  source 1..20: mol_type = other DNA
gatcctgcaagggtcaggga

SEQ ID NO: 147533 - DNA, 20 bp, synthetic construct
  source 1..20: mol_type = other DNA
agatcctgcaagggtcaggg

SEQ ID NO: 147534 - DNA, 20 bp, synthetic construct
  source 1..20: mol_type = other DNA
cagatcctgcaagggtcagg

SEQ ID NO: 147535 - DNA, 20 bp, synthetic construct
  source 1..20: mol_type = other DNA
gcagatcctgcaagggtcag

SEQ ID NO: 147536 - DNA, 20 bp, synthetic construct
  source 1..20: mol_type = other DNA
ggcagatcctgcaagggtca

SEQ ID NO: 147537 - DNA, 20 bp, synthetic construct
  source 1..20: mol_type = other DNA
gggcagatcctgcaagggtc

SEQ ID NO: 147538 - DNA, 20 bp, synthetic construct
  source 1..20: mol_type = other DNA
tgggcagatcctgcaagggt

SEQ ID NO: 147539 - DNA, 20 bp, synthetic construct
  source 1..20: mol_type = other DNA
ttgggcagatcctgcaaggg

SEQ ID NO: 147540 - DNA, 20 bp, synthetic construct
  source 1..20: mol_type = other DNA
tttgggcagatcctgcaagg

SEQ ID NO: 147541 - DNA, 20 bp, synthetic construct
  source 1..20: mol_type = other DNA
ctttgggcagatcctgcaag

SEQ ID NO: 147542 - DNA, 20 bp, synthetic construct
  source 1..20: mol_type = other DNA
cctttgggcagatcctgcaa

SEQ ID NO: 147543 - DNA, 20 bp, synthetic construct
  source 1..20: mol_type = other DNA
acctttgggcagatcctgca

SEQ ID NO: 147544 - DNA, 20 bp, synthetic construct
  source 1..20: mol_type = other DNA
cacctttgggcagatcctgc

SEQ ID NO: 147545 - DNA, 20 bp, synthetic construct
  source 1..20: mol_type = other DNA
tcacctttgggcagatcctg

SEQ ID NO: 147546 - DNA, 20 bp, synthetic construct
  source 1..20: mol_type = other DNA
ttcacctttgggcagatcct

SEQ ID NO: 147547 - DNA, 20 bp, synthetic construct
  source 1..20: mol_type = other DNA
cttcacctttgggcagatcc

SEQ ID NO: 147548 - DNA, 20 bp, synthetic construct
  source 1..20: mol_type = other DNA
gcttcacctttgggcagatc

SEQ ID NO: 147549 - DNA, 20 bp, synthetic construct
  source 1..20: mol_type = other DNA
cgcttcacctttgggcagat

SEQ ID NO: 147550 - DNA, 20 bp, synthetic construct
  source 1..20: mol_type = other DNA
gcgcttcacctttgggcaga

SEQ ID NO: 147551 - DNA, 20 bp, synthetic construct
  source 1..20: mol_type = other DNA
cgcgcttcacctttgggcag

SEQ ID NO: 147552 - DNA, 20 bp, synthetic construct
  source 1..20: mol_type = other DNA
acgcgcttcacctttgggca

SEQ ID NO: 147553 - DNA, 20 bp, synthetic construct
  source 1..20: mol_type = other DNA
gacgcgcttcacctttgggc

SEQ ID NO: 147554 - DNA, 20 bp, synthetic construct
  source 1..20: mol_type = other DNA
agacgcgcttcacctttggg

SEQ ID NO: 147555 - DNA, 20 bp, synthetic construct
  source 1..20: mol_type = other DNA
aagacgcgcttcacctttgg

SEQ ID NO: 147556 - DNA, 20 bp, synthetic construct
  source 1..20: mol_type = other DNA
gaagacgcgcttcacctttg

SEQ ID NO: 147557 - DNA, 20 bp, synthetic construct
  source 1..20: mol_type = other DNA
tgaagacgcgcttcaccttt

SEQ ID NO: 147558 - DNA, 20 bp, synthetic construct
  source 1..20: mol_type = other DNA
ctgaagacgcgcttcacctt

SEQ ID NO: 147559 - DNA, 20 bp, synthetic construct
  source 1..20: mol_type = other DNA
cctgaagacgcgcttcacct

SEQ ID NO: 147560 - DNA, 20 bp, synthetic construct
  source 1..20: mol_type = other DNA
acctgaagacgcgcttcacc

SEQ ID NO: 147561 - DNA, 20 bp, synthetic construct
  source 1..20: mol_type = other DNA
gacctgaagacgcgcttcac

SEQ ID NO: 147562 - DNA, 20 bp, synthetic construct
  source 1..20: mol_type = other DNA
tgacctgaagacgcgcttca

SEQ ID NO: 147563 - DNA, 20 bp, synthetic construct
  source 1..20: mol_type = other DNA
ttgacctgaagacgcgcttc

SEQ ID NO: 147564 - DNA, 20 bp, synthetic construct
  source 1..20: mol_type = other DNA
attgacctgaagacgcgctt

SEQ ID NO: 147565 - DNA, 20 bp, synthetic construct
  source 1..20: mol_type = other DNA
tattgacctgaagacgcgct

SEQ ID NO: 147566 - DNA, 20 bp, synthetic construct
  source 1..20: mol_type = other DNA
ctattgacctgaagacgcgc

SEQ ID NO: 147567 - DNA, 20 bp, synthetic construct
  source 1..20: mol_type = other DNA
tctattgacctgaagacgcg

SEQ ID NO: 147568 - DNA, 20 bp, synthetic construct
  source 1..20: mol_type = other DNA
atctattgacctgaagacgc

SEQ ID NO: 147569 - DNA, 20 bp, synthetic construct
  source 1..20: mol_type = other DNA
tatctattgacctgaagacg

SEQ ID NO: 147570 - DNA, 20 bp, synthetic construct
  source 1..20: mol_type = other DNA
ttatctattgacctgaagac

SEQ ID NO: 147571 - DNA, 20 bp, synthetic construct
  source 1..20: mol_type = other DNA
attatctattgacctgaaga

SEQ ID NO: 147572 - DNA, 20 bp, synthetic construct
  source 1..20: mol_type = other DNA
gattatctattgacctgaag

SEQ ID NO: 147573 - DNA, 20 bp, synthetic construct
  source 1..20: mol_type = other DNA
agattatctattgacctgaa

SEQ ID NO: 147574 - DNA, 20 bp, synthetic construct
  source 1..20: mol_type = other DNA
tagattatctattgacctga

SEQ ID NO: 147575 - DNA, 20 bp, synthetic construct
  source 1..20: mol_type = other DNA
gtagattatctattgacctg

SEQ ID NO: 147576 - DNA, 20 bp, synthetic construct
  source 1..20: mol_type = other DNA
agtagattatctattgacct

SEQ ID NO: 147577 - DNA, 20 bp, synthetic construct
  source 1..20: mol_type = other DNA
tagtagattatctattgacc

SEQ ID NO: 147578 - DNA, 20 bp, synthetic construct
  source 1..20: mol_type = other DNA
ctagtagattatctattgac

SEQ ID NO: 147579 - DNA, 20 bp, synthetic construct
  source 1..20: mol_type = other DNA
tctagtagattatctattga

SEQ ID NO: 147580 - DNA, 20 bp, synthetic construct
  source 1..20: mol_type = other DNA
ctctagtagattatctattg

SEQ ID NO: 147581 - DNA, 20 bp, synthetic construct
  source 1..20: mol_type = other DNA
tctctagtagattatctatt

SEQ ID NO: 147582 - DNA, 20 bp, synthetic construct
  source 1..20: mol_type = other DNA
atctctagtagattatctat

SEQ ID NO: 147583 - DNA, 20 bp, synthetic construct
  source 1..20: mol_type = other DNA
aatctctagtagattatcta

SEQ ID NO: 147584 - DNA, 20 bp, synthetic construct
  source 1..20: mol_type = other DNA
caatctctagtagattatct

SEQ ID NO: 147585 - DNA, 20 bp, synthetic construct
  source 1..20: mol_type = other DNA
acaatctctagtagattatc

SEQ ID NO: 147586 - DNA, 20 bp, synthetic construct
  source 1..20: mol_type = other DNA
gacaatctctagtagattat

SEQ ID NO: 147587 - DNA, 20 bp, synthetic construct
  source 1..20: mol_type = other DNA
ggacaatctctagtagatta

SEQ ID NO: 147588 - DNA, 20 bp, synthetic construct
  source 1..20: mol_type = other DNA
gggacaatctctagtagatt

SEQ ID NO: 147589 - DNA, 20 bp, synthetic construct
  source 1..20: mol_type = other DNA
ggggacaatctctagtagat

SEQ ID NO: 147590 - DNA, 20 bp, synthetic construct
  source 1..20: mol_type = other DNA
tggggacaatctctagtaga

SEQ ID NO: 147591 - DNA, 20 bp, synthetic construct
  source 1..20: mol_type = other DNA
ctggggacaatctctagtag

SEQ ID NO: 147592 - DNA, 20 bp, synthetic construct
  source 1..20: mol_type = other DNA
tctggggacaatctctagta

SEQ ID NO: 147593 - DNA, 20 bp, synthetic construct
  source 1..20: mol_type = other DNA
ctctggggacaatctctagt

SEQ ID NO: 147594 - DNA, 20 bp, synthetic construct
  source 1..20: mol_type = other DNA
tctctggggacaatctctag

SEQ ID NO: 147595 - DNA, 20 bp, synthetic construct
  source 1..20: mol_type = other DNA
ttctctggggacaatctcta

SEQ ID NO: 147596 - DNA, 20 bp, synthetic construct
  source 1..20: mol_type = other DNA
gttctctggggacaatctct

SEQ ID NO: 147597 - DNA, 20 bp, synthetic construct
  source 1..20: mol_type = other DNA
tgttctctggggacaatctc

SEQ ID NO: 147598 - DNA, 20 bp, synthetic construct
  source 1..20: mol_type = other DNA
ctgttctctggggacaatct

SEQ ID NO: 147599 - DNA, 20 bp, synthetic construct
  source 1..20: mol_type = other DNA
tctgttctctggggacaatc

SEQ ID NO: 147600 - DNA, 20 bp, synthetic construct
  source 1..20: mol_type = other DNA
ttctgttctctggggacaat

SEQ ID NO: 147601 - DNA, 20 bp, synthetic construct
  source 1..20: mol_type = other DNA
gttctgttctctggggacaa

SEQ ID NO: 147602 - DNA, 20 bp, synthetic construct
  source 1..20: mol_type = other DNA
agttctgttctctggggaca

SEQ ID NO: 147603 - DNA, 20 bp, synthetic construct
  source 1..20: mol_type = other DNA
cagttctgttctctggggac

SEQ ID NO: 147604 - DNA, 20 bp, synthetic construct
  source 1..20: mol_type = other DNA
ccagttctgttctctgggga

SEQ ID NO: 147605 - DNA, 20 bp, synthetic construct
  source 1..20: mol_type = other DNA
cccagttctgttctctgggg

SEQ ID NO: 147606 - DNA, 20 bp, synthetic construct
  source 1..20: mol_type = other DNA
gcccagttctgttctctggg

SEQ ID NO: 147607 - DNA, 20 bp, synthetic construct
  source 1..20: mol_type = other DNA
ggcccagttctgttctctgg

SEQ ID NO: 147608 - DNA, 20 bp, synthetic construct
  source 1..20: mol_type = other DNA
gggcccagttctgttctctg

SEQ ID NO: 147609 - DNA, 20 bp, synthetic construct
  source 1..20: mol_type = other DNA
agggcccagttctgttctct

SEQ ID NO: 147610 - DNA, 20 bp, synthetic construct
  source 1..20: mol_type = other DNA
cagggcccagttctgttctc

SEQ ID NO: 147611 - DNA, 20 bp, synthetic construct
  source 1..20: mol_type = other DNA
tcagggcccagttctgttct

SEQ ID NO: 147612 - DNA, 20 bp, synthetic construct
  source 1..20: mol_type = other DNA
ctcagggcccagttctgttc

SEQ ID NO: 147613 - DNA, 20 bp, synthetic construct
  source 1..20: mol_type = other DNA
cctcagggcccagttctgtt

SEQ ID NO: 147614 - DNA, 20 bp, synthetic construct
  source 1..20: mol_type = other DNA
gcctcagggcccagttctgt

SEQ ID NO: 147615 - DNA, 20 bp, synthetic construct
  source 1..20: mol_type = other DNA
ggcctcagggcccagttctg

SEQ ID NO: 147616 - DNA, 20 bp, synthetic construct
  source 1..20: mol_type = other DNA
gggcctcagggcccagttct

SEQ ID NO: 147617 - DNA, 20 bp, synthetic construct
  source 1..20: mol_type = other DNA
tgggcctcagggcccagttc

SEQ ID NO: 147618 - DNA, 20 bp, synthetic construct
  source 1..20: mol_type = other DNA
gtgggcctcagggcccagtt

SEQ ID NO: 147619 - DNA, 20 bp, synthetic construct
  source 1..20: mol_type = other DNA
ggtgggcctcagggcccagt

SEQ ID NO: 147620 - DNA, 20 bp, synthetic construct
  source 1..20: mol_type = other DNA
cggtgggcctcagggcccag

SEQ ID NO: 147621 - DNA, 20 bp, synthetic construct
  source 1..20: mol_type = other DNA
acggtgggcctcagggccca

SEQ ID NO: 147622 - DNA, 20 bp, synthetic construct
  source 1..20: mol_type = other DNA
aacggtgggcctcagggccc

SEQ ID NO: 147623 - DNA, 20 bp, synthetic construct
  source 1..20: mol_type = other DNA
caacggtgggcctcagggcc

SEQ ID NO: 147624 - DNA, 20 bp, synthetic construct
  source 1..20: mol_type = other DNA
gcaacggtgggcctcagggc

SEQ ID NO: 147625 - DNA, 20 bp, synthetic construct
  source 1..20: mol_type = other DNA
ggcaacggtgggcctcaggg

SEQ ID NO: 147626 - DNA, 20 bp, synthetic construct
  source 1..20: mol_type = other DNA
gggcaacggtgggcctcagg

SEQ ID NO: 147627 - DNA, 20 bp, synthetic construct
  source 1..20: mol_type = other DNA
agggcaacggtgggcctcag

SEQ ID NO: 147628 - DNA, 20 bp, synthetic construct
  source 1..20: mol_type = other DNA
aagggcaacggtgggcctca

SEQ ID NO: 147629 - DNA, 20 bp, synthetic construct
  source 1..20: mol_type = other DNA
aaagggcaacggtgggcctc

SEQ ID NO: 147630 - DNA, 20 bp, synthetic construct
  source 1..20: mol_type = other DNA
gaaagggcaacggtgggcct

SEQ ID NO: 147631 - DNA, 20 bp, synthetic construct
  source 1..20: mol_type = other DNA
ggaaagggcaacggtgggcc

SEQ ID NO: 147632 - DNA, 20 bp, synthetic construct
  source 1..20: mol_type = other DNA
aggaaagggcaacggtgggc

SEQ ID NO: 147633 - DNA, 20 bp, synthetic construct
  source 1..20: mol_type = other DNA
caggaaagggcaacggtggg

SEQ ID NO: 147634 - DNA, 20 bp, synthetic construct
  source 1..20: mol_type = other DNA
tcaggaaagggcaacggtgg

SEQ ID NO: 147635 - DNA, 20 bp, synthetic construct
  source 1..20: mol_type = other DNA
ctcaggaaagggcaacggtg

SEQ ID NO: 147636 - DNA, 20 bp, synthetic construct
  source 1..20: mol_type = other DNA
tctcaggaaagggcaacggt

SEQ ID NO: 147637 - DNA, 20 bp, synthetic construct
  source 1..20: mol_type = other DNA
ctctcaggaaagggcaacgg

SEQ ID NO: 147638 - DNA, 20 bp, synthetic construct
  source 1..20: mol_type = other DNA
actctcaggaaagggcaacg

SEQ ID NO: 147639 - DNA, 20 bp, synthetic construct
  source 1..20: mol_type = other DNA
gactctcaggaaagggcaac

SEQ ID NO: 147640 - DNA, 20 bp, synthetic construct
  source 1..20: mol_type = other DNA
ggactctcaggaaagggcaa

SEQ ID NO: 147641 - DNA, 20 bp, synthetic construct
  source 1..20: mol_type = other DNA
gggactctcaggaaagggca

SEQ ID NO: 147642 - DNA, 20 bp, synthetic construct
  source 1..20: mol_type = other DNA
tgggactctcaggaaagggc

SEQ ID NO: 147643 - DNA, 20 bp, synthetic construct
  source 1..20: mol_type = other DNA
ctgggactctcaggaaaggg

SEQ ID NO: 147644 - DNA, 20 bp, synthetic construct
  source 1..20: mol_type = other DNA
gctgggactctcaggaaagg

SEQ ID NO: 147645 - DNA, 20 bp, synthetic construct
  source 1..20: mol_type = other DNA
ggctgggactctcaggaaag

SEQ ID NO: 147646 - DNA, 20 bp, synthetic construct
  source 1..20: mol_type = other DNA
gggctgggactctcaggaaa

SEQ ID NO: 147647 - DNA, 20 bp, synthetic construct
  source 1..20: mol_type = other DNA
tgggctgggactctcaggaa

SEQ ID NO: 147648 - DNA, 20 bp, synthetic construct
  source 1..20: mol_type = other DNA
ctgggctgggactctcagga

SEQ ID NO: 147649 - DNA, 20 bp, synthetic construct
  source 1..20: mol_type = other DNA
actgggctgggactctcagg

SEQ ID NO: 147650 - DNA, 20 bp, synthetic construct
  source 1..20: mol_type = other DNA
cactgggctgggactctcag

SEQ ID NO: 147651 - DNA, 20 bp, synthetic construct
  source 1..20: mol_type = other DNA
tcactgggctgggactctca

SEQ ID NO: 147652 - DNA, 20 bp, synthetic construct
  source 1..20: mol_type = other DNA
ttcactgggctgggactctc

SEQ ID NO: 147653 - DNA, 20 bp, synthetic construct
  source 1..20: mol_type = other DNA
tttcactgggctgggactct

SEQ ID NO: 147654 - DNA, 20 bp, synthetic construct
  source 1..20: mol_type = other DNA
ctttcactgggctgggactc

SEQ ID NO: 147655 - DNA, 20 bp, synthetic construct
  source 1..20: mol_type = other DNA
cctttcactgggctgggact

SEQ ID NO: 147656 - DNA, 20 bp, synthetic construct
  source 1..20: mol_type = other DNA
tcctttcactgggctgggac

SEQ ID NO: 147657 - DNA, 20 bp, synthetic construct
  source 1..20: mol_type = other DNA
ttcctttcactgggctggga

SEQ ID NO: 147658 - DNA, 20 bp, synthetic construct
  source 1..20: mol_type = other DNA
gttcctttcactgggctggg

SEQ ID NO: 147659 - DNA, 20 bp, synthetic construct
  source 1..20: mol_type = other DNA
tgttcctttcactgggctgg

SEQ ID NO: 147660 - DNA, 20 bp, synthetic construct
  source 1..20: mol_type = other DNA
gtgttcctttcactgggctg

SEQ ID NO: 147661 - DNA, 20 bp, synthetic construct
  source 1..20: mol_type = other DNA
tgtgttcctttcactgggct

SEQ ID NO: 147662 - DNA, 20 bp, synthetic construct
  source 1..20: mol_type = other DNA
ctgtgttcctttcactgggc

SEQ ID NO: 147663 - DNA, 20 bp, synthetic construct
  source 1..20: mol_type = other DNA
actgtgttcctttcactggg

SEQ ID NO: 147664 - DNA, 20 bp, synthetic construct
  source 1..20: mol_type = other DNA
aactgtgttcctttcactgg

SEQ ID NO: 147665 - DNA, 20 bp, synthetic construct
  source 1..20: mol_type = other DNA
caactgtgttcctttcactg

SEQ ID NO: 147666 - DNA, 20 bp, synthetic construct
  source 1..20: mol_type = other DNA
tcaactgtgttcctttcact

SEQ ID NO: 147667 - DNA, 20 bp, synthetic construct
  source 1..20: mol_type = other DNA
gtcaactgtgttcctttcac

SEQ ID NO: 147668 - DNA, 20 bp, synthetic construct
  source 1..20: mol_type = other DNA
tgtcaactgtgttcctttca

SEQ ID NO: 147669 - DNA, 20 bp, synthetic construct
  source 1..20: mol_type = other DNA
atgtcaactgtgttcctttc

SEQ ID NO: 147670 - DNA, 20 bp, synthetic construct
  source 1..20: mol_type = other DNA
catgtcaactgtgttccttt

SEQ ID NO: 147671 - DNA, 20 bp, synthetic construct
  source 1..20: mol_type = other DNA
acatgtcaactgtgttcctt

SEQ ID NO: 147672 - DNA, 20 bp, synthetic construct
  source 1..20: mol_type = other DNA
aacatgtcaactgtgttcct

SEQ ID NO: 147673 - DNA, 20 bp, synthetic construct
  source 1..20: mol_type = other DNA
caacatgtcaactgtgttcc

SEQ ID NO: 147674 - DNA, 20 bp, synthetic construct
  source 1..20: mol_type = other DNA
acaacatgtcaactgtgttc

SEQ ID NO: 147675 - DNA, 20 bp, synthetic construct
  source 1..20: mol_type = other DNA
aacaacatgtcaactgtgtt

SEQ ID NO: 147676 - DNA, 20 bp, synthetic construct
  source 1..20: mol_type = other DNA
caacaacatgtcaactgtgt

SEQ ID NO: 147677 - DNA, 20 bp, synthetic construct
  source 1..20: mol_type = other DNA
tcaacaacatgtcaactgtg

SEQ ID NO: 147678 - DNA, 20 bp, synthetic construct
  source 1..20: mol_type = other DNA
ttcaacaacatgtcaactgt

SEQ ID NO: 147679 - DNA, 20 bp, synthetic construct
  source 1..20: mol_type = other DNA
cttcaacaacatgtcaactg

SEQ ID NO: 147680 - DNA, 20 bp, synthetic construct
  source 1..20: mol_type = other DNA
gcttcaacaacatgtcaact

SEQ ID NO: 147681 - DNA, 20 bp, synthetic construct
  source 1..20: mol_type = other DNA
ggcttcaacaacatgtcaac

SEQ ID NO: 147682 - DNA, 20 bp, synthetic construct
  source 1..20: mol_type = other DNA
cggcttcaacaacatgtcaa

SEQ ID NO: 147683 - DNA, 20 bp, synthetic construct
  source 1..20: mol_type = other DNA
ccggcttcaacaacatgtca

SEQ ID NO: 147684 - DNA, 20 bp, synthetic construct
  source 1..20: mol_type = other DNA
tccggcttcaacaacatgtc

SEQ ID NO: 147685 - DNA, 20 bp, synthetic construct
  source 1..20: mol_type = other DNA
ctccggcttcaacaacatgt

SEQ ID NO: 147686 - DNA, 20 bp, synthetic construct
  source 1..20: mol_type = other DNA
tctccggcttcaacaacatg

SEQ ID NO: 147687 - DNA, 20 bp, synthetic construct
  source 1..20: mol_type = other DNA
atctccggcttcaacaacat

SEQ ID NO: 147688 - DNA, 20 bp, synthetic construct
  source 1..20: mol_type = other DNA
catctccggcttcaacaaca

SEQ ID NO: 147689 - DNA, 20 bp, synthetic construct
  source 1..20: mol_type = other DNA
acatctccggcttcaacaac

SEQ ID NO: 147690 - DNA, 20 bp, synthetic construct
  source 1..20: mol_type = other DNA
aacatctccggcttcaacaa

SEQ ID NO: 147691 - DNA, 20 bp, synthetic construct
  source 1..20: mol_type = other DNA
caacatctccggcttcaaca

SEQ ID NO: 147692 - DNA, 20 bp, synthetic construct
  source 1..20: mol_type = other DNA
gcaacatctccggcttcaac

SEQ ID NO: 147693 - DNA, 20 bp, synthetic construct
  source 1..20: mol_type = other DNA
ggcaacatctccggcttcaa

SEQ ID NO: 147694 - DNA, 20 bp, synthetic construct
  source 1..20: mol_type = other DNA
aggcaacatctccggcttca

SEQ ID NO: 147695 - DNA, 20 bp, synthetic construct
  source 1..20: mol_type = other DNA
caggcaacatctccggcttc

SEQ ID NO: 147696 - DNA, 20 bp, synthetic construct
  source 1..20: mol_type = other DNA
acaggcaacatctccggctt

SEQ ID NO: 147697 - DNA, 20 bp, synthetic construct
  source 1..20: mol_type = other DNA
tacaggcaacatctccggct

SEQ ID NO: 147698 - DNA, 20 bp, synthetic construct
  source 1..20: mol_type = other DNA
atacaggcaacatctccggc

SEQ ID NO: 147699 - DNA, 20 bp, synthetic construct
  source 1..20: mol_type = other DNA
catacaggcaacatctccgg

SEQ ID NO: 147700 - DNA, 20 bp, synthetic construct
  source 1..20: mol_type = other DNA
gcatacaggcaacatctccg

SEQ ID NO: 147701 - DNA, 20 bp, synthetic construct
  source 1..20: mol_type = other DNA
cgcatacaggcaacatctcc

SEQ ID NO: 147702 - DNA, 20 bp, synthetic construct
  source 1..20: mol_type = other DNA
acgcatacaggcaacatctc

SEQ ID NO: 147703 - DNA, 20 bp, synthetic construct
  source 1..20: mol_type = other DNA
tacgcatacaggcaacatct

SEQ ID NO: 147704 - DNA, 20 bp, synthetic construct
  source 1..20: mol_type = other DNA
ttacgcatacaggcaacatc

SEQ ID NO: 147705 - DNA, 20 bp, synthetic construct
  source 1..20: mol_type = other DNA
tttacgcatacaggcaacat

SEQ ID NO: 147706 - DNA, 20 bp, synthetic construct
  source 1..20: mol_type = other DNA
ttttacgcatacaggcaaca

SEQ ID NO: 147707 - DNA, 20 bp, synthetic construct
  source 1..20: mol_type = other DNA
cttttacgcatacaggcaac

SEQ ID NO: 147708 - DNA, 20 bp, synthetic construct
  source 1..20: mol_type = other DNA
tcttttacgcatacaggcaa

SEQ ID NO: 147709 - DNA, 20 bp, synthetic construct
  source 1..20: mol_type = other DNA
ctcttttacgcatacaggca

SEQ ID NO: 147710 - DNA, 20 bp, synthetic construct
  source 1..20: mol_type = other DNA
gctcttttacgcatacaggc

SEQ ID NO: 147711 - DNA, 20 bp, synthetic construct
  source 1..20: mol_type = other DNA
agctcttttacgcatacagg

SEQ ID NO: 147712 - DNA, 20 bp, synthetic construct
  source 1..20: mol_type = other DNA
gagctcttttacgcatacag

SEQ ID NO: 147713 - DNA, 20 bp, synthetic construct
  source 1..20: mol_type = other DNA
agagctcttttacgcataca

SEQ ID NO: 147714 - DNA, 20 bp, synthetic construct
  source 1..20: mol_type = other DNA
gagagctcttttacgcatac

SEQ ID NO: 147715 - DNA, 20 bp, synthetic construct
  source 1..20: mol_type = other DNA
agagagctcttttacgcata

SEQ ID NO: 147716 - DNA, 20 bp, synthetic construct
  source 1..20: mol_type = other DNA
cagagagctcttttacgcat

SEQ ID NO: 147717 - DNA, 20 bp, synthetic construct
  source 1..20: mol_type = other DNA
acagagagctcttttacgca

SEQ ID NO: 147718 - DNA, 20 bp, synthetic construct
  source 1..20: mol_type = other DNA
aacagagagctcttttacgc

SEQ ID NO: 147719 - DNA, 20 bp, synthetic construct
  source 1..20: mol_type = other DNA
aaacagagagctcttttacg

SEQ ID NO: 147720 - DNA, 20 bp, synthetic construct
  source 1..20: mol_type = other DNA
gaaacagagagctcttttac

SEQ ID NO: 147721 - DNA, 20 bp, synthetic construct
  source 1..20: mol_type = other DNA
tgaaacagagagctctttta

SEQ ID NO: 147722 - DNA, 20 bp, synthetic construct
  source 1..20: mol_type = other DNA
ctgaaacagagagctctttt

SEQ ID NO: 147723 - DNA, 20 bp, synthetic construct
  source 1..20: mol_type = other DNA
cctgaaacagagagctcttt

SEQ ID NO: 147724 - DNA, 20 bp, synthetic construct
  source 1..20: mol_type = other DNA
gcctgaaacagagagctctt

SEQ ID NO: 147725 - DNA, 20 bp, synthetic construct
  source 1..20: mol_type = other DNA
agcctgaaacagagagctct

SEQ ID NO: 147726 - DNA, 20 bp, synthetic construct
  source 1..20: mol_type = other DNA
gagcctgaaacagagagctc

SEQ ID NO: 147727 - DNA, 20 bp, synthetic construct
  source 1..20: mol_type = other DNA
tgagcctgaaacagagagct

SEQ ID NO: 147728 - DNA, 20 bp, synthetic construct
  source 1..20: mol_type = other DNA
atgagcctgaaacagagagc

SEQ ID NO: 147729 - DNA, 20 bp, synthetic construct
  source 1..20: mol_type = other DNA
catgagcctgaaacagagag

SEQ ID NO: 147730 - DNA, 20 bp, synthetic construct
  source 1..20: mol_type = other DNA
acatgagcctgaaacagaga

SEQ ID NO: 147731 - DNA, 20 bp, synthetic construct
  source 1..20: mol_type = other DNA
tacatgagcctgaaacagag

SEQ ID NO: 147732 - DNA, 20 bp, synthetic construct
  source 1..20: mol_type = other DNA
gtacatgagcctgaaacaga

SEQ ID NO: 147733 - DNA, 20 bp, synthetic construct
  source 1..20: mol_type = other DNA
tgtacatgagcctgaaacag

SEQ ID NO: 147734 - DNA, 20 bp, synthetic construct
  source 1..20: mol_type = other DNA
ctgtacatgagcctgaaaca

SEQ ID NO: 147735 - DNA, 20 bp, synthetic construct
  source 1..20: mol_type = other DNA
actgtacatgagcctgaaac

SEQ ID NO: 147736 - DNA, 20 bp, synthetic construct
  source 1..20: mol_type = other DNA
gactgtacatgagcctgaaa

SEQ ID NO: 147737 - DNA, 20 bp, synthetic construct
  source 1..20: mol_type = other DNA
tgactgtacatgagcctgaa

SEQ ID NO: 147738 - DNA, 20 bp, synthetic construct
  source 1..20: mol_type = other DNA
ctgactgtacatgagcctga

SEQ ID NO: 147739 - DNA, 20 bp, synthetic construct
  source 1..20: mol_type = other DNA
cctgactgtacatgagcctg

SEQ ID NO: 147740 - DNA, 20 bp, synthetic construct
  source 1..20: mol_type = other DNA
tcctgactgtacatgagcct

SEQ ID NO: 147741 - DNA, 20 bp, synthetic construct
  source 1..20: mol_type = other DNA
ttcctgactgtacatgagcc

SEQ ID NO: 147742 - DNA, 20 bp, synthetic construct
  source 1..20: mol_type = other DNA
attcctgactgtacatgagc

SEQ ID NO: 147743 - DNA, 20 bp, synthetic construct
  source 1..20: mol_type = other DNA
cattcctgactgtacatgag

SEQ ID NO: 147744 - DNA, 20 bp, synthetic construct
  source 1..20: mol_type = other DNA
ccattcctgactgtacatga

SEQ ID NO: 147745 - DNA, 20 bp, synthetic construct
  source 1..20: mol_type = other DNA
accattcctgactgtacatg

SEQ ID NO: 147746 - DNA, 20 bp, synthetic construct
  source 1..20: mol_type = other DNA
aaccattcctgactgtacat

SEQ ID NO: 147747 - DNA, 20 bp, synthetic construct
  source 1..20: mol_type = other DNA
gaaccattcctgactgtaca

SEQ ID NO: 147748 - DNA, 20 bp, synthetic construct
  source 1..20: mol_type = other DNA
ggaaccattcctgactgtac

SEQ ID NO: 147749 - DNA, 20 bp, synthetic construct
  source 1..20: mol_type = other DNA
aggaaccattcctgactgta

SEQ ID NO: 147750 - DNA, 20 bp, synthetic construct
  source 1..20: mol_type = other DNA
aaggaaccattcctgactgt

SEQ ID NO: 147751 - DNA, 20 bp, synthetic construct
  source 1..20: mol_type = other DNA
gaaggaaccattcctgactg

SEQ ID NO: 147752 - DNA, 20 bp, synthetic construct
  source 1..20: mol_type = other DNA
agaaggaaccattcctgact

SEQ ID NO: 147753 - DNA, 20 bp, synthetic construct
  source 1..20: mol_type = other DNA
gagaaggaaccattcctgac

SEQ ID NO: 147754 - DNA, 20 bp, synthetic construct
  source 1..20: mol_type = other DNA
tgagaaggaaccattcctga

SEQ ID NO: 147755 - DNA, 20 bp, synthetic construct
  source 1..20: mol_type = other DNA
atgagaaggaaccattcctg

SEQ ID NO: 147756 - DNA, 20 bp, synthetic construct
  source 1..20: mol_type = other DNA
gatgagaaggaaccattcct

SEQ ID NO: 147757 - DNA, 20 bp, synthetic construct
  source 1..20: mol_type = other DNA
ggatgagaaggaaccattcc

SEQ ID NO: 147758 - DNA, 20 bp, synthetic construct
  source 1..20: mol_type = other DNA
tggatgagaaggaaccattc

SEQ ID NO: 147759 - DNA, 20 bp, synthetic construct
  source 1..20: mol_type = other DNA
ttggatgagaaggaaccatt

SEQ ID NO: 147760 - DNA, 20 bp, synthetic construct
  source 1..20: mol_type = other DNA
gttggatgagaaggaaccat

SEQ ID NO: 147761 - DNA, 20 bp, synthetic construct
  source 1..20: mol_type = other DNA
agttggatgagaaggaacca

SEQ ID NO: 147762 - DNA, 20 bp, synthetic construct
  source 1..20: mol_type = other DNA
cagttggatgagaaggaacc

SEQ ID NO: 147763 - DNA, 20 bp, synthetic construct
  source 1..20: mol_type = other DNA
gcagttggatgagaaggaac

SEQ ID NO: 147764 - DNA, 20 bp, synthetic construct
  source 1..20: mol_type = other DNA
ggcagttggatgagaaggaa

SEQ ID NO: 147765 - DNA, 20 bp, synthetic construct
  source 1..20: mol_type = other DNA
gggcagttggatgagaagga

SEQ ID NO: 147766 - DNA, 20 bp, synthetic construct
  source 1..20: mol_type = other DNA
tgggcagttggatgagaagg

SEQ ID NO: 147767 - DNA, 20 bp, synthetic construct
  source 1..20: mol_type = other DNA
atgggcagttggatgagaag

SEQ ID NO: 147768 - DNA, 20 bp, synthetic construct
  source 1..20: mol_type = other DNA
catgggcagttggatgagaa

SEQ ID NO: 147769 - DNA, 20 bp, synthetic construct
  source 1..20: mol_type = other DNA
gcatgggcagttggatgaga

SEQ ID NO: 147770 - DNA, 20 bp, synthetic construct
  source 1..20: mol_type = other DNA
cgcatgggcagttggatgag

SEQ ID NO: 147771 - DNA, 20 bp, synthetic construct
  source 1..20: mol_type = other DNA
gcgcatgggcagttggatga

SEQ ID NO: 147772 - DNA, 20 bp, synthetic construct
  source 1..20: mol_type = other DNA
ggcgcatgggcagttggatg

SEQ ID NO: 147773 - DNA, 20 bp, synthetic construct
  source 1..20: mol_type = other DNA
tggcgcatgggcagttggat

SEQ ID NO: 147774 - DNA, 20 bp, synthetic construct
  source 1..20: mol_type = other DNA
ttggcgcatgggcagttgga

SEQ ID NO: 147775 - DNA, 20 bp, synthetic construct
  source 1..20: mol_type = other DNA
attggcgcatgggcagttgg

SEQ ID NO: 147776 - DNA, 20 bp, synthetic construct
  source 1..20: mol_type = other DNA
cattggcgcatgggcagttg

SEQ ID NO: 147777 - DNA, 20 bp, synthetic construct
  source 1..20: mol_type = other DNA
tcattggcgcatgggcagtt

SEQ ID NO: 147778 - DNA, 20 bp, synthetic construct
  source 1..20: mol_type = other DNA
atcattggcgcatgggcagt

SEQ ID NO: 147779 - DNA, 20 bp, synthetic construct
  source 1..20: mol_type = other DNA
catcattggcgcatgggcag

SEQ ID NO: 147780 - DNA, 20 bp, synthetic construct
  source 1..20: mol_type = other DNA
gcatcattggcgcatgggca

SEQ ID NO: 147781 - DNA, 20 bp, synthetic construct
  source 1..20: mol_type = other DNA
agcatcattggcgcatgggc

SEQ ID NO: 147782 - DNA, 20 bp, synthetic construct
  source 1..20: mol_type = other DNA
tagcatcattggcgcatggg

SEQ ID NO: 147783 - DNA, 20 bp, synthetic construct
  source 1..20: mol_type = other DNA
ttagcatcattggcgcatgg

SEQ ID NO: 147784 - DNA, 20 bp, synthetic construct
  source 1..20: mol_type = other DNA
attagcatcattggcgcatg

SEQ ID NO: 147785 - DNA, 20 bp, synthetic construct
  source 1..20: mol_type = other DNA
cattagcatcattggcgcat

SEQ ID NO: 147786 - DNA, 20 bp, synthetic construct
  source 1..20: mol_type = other DNA
tcattagcatcattggcgca

SEQ ID NO: 147787 - DNA, 20 bp, synthetic construct
  source 1..20: mol_type = other DNA
gtcattagcatcattggcgc

SEQ ID NO: 147788 - DNA, 20 bp, synthetic construct
  source 1..20: mol_type = other DNA
cgtcattagcatcattggcg

SEQ ID NO: 147789 - DNA, 20 bp, synthetic construct
  source 1..20: mol_type = other DNA
tcgtcattagcatcattggc

SEQ ID NO: 147790 - DNA, 20 bp, synthetic construct
  source 1..20: mol_type = other DNA
gtcgtcattagcatcattgg

SEQ ID NO: 147791 - DNA, 20 bp, synthetic construct
  source 1..20: mol_type = other DNA
tgtcgtcattagcatcattg

SEQ ID NO: 147792 - DNA, 20 bp, synthetic construct
  source 1..20: mol_type = other DNA
gtgtcgtcattagcatcatt

SEQ ID NO: 147793 - DNA, 20 bp, synthetic construct
  source 1..20: mol_type = other DNA
tgtgtcgtcattagcatcat

SEQ ID NO: 147794 - DNA, 20 bp, synthetic construct
  source 1..20: mol_type = other DNA
ctgtgtcgtcattagcatca

SEQ ID NO: 147795 - DNA, 20 bp, synthetic construct
  source 1..20: mol_type = other DNA
gctgtgtcgtcattagcatc

SEQ ID NO: 147796 - DNA, 20 bp, synthetic construct
  source 1..20: mol_type = other DNA
ggctgtgtcgtcattagcat

SEQ ID NO: 147797 - DNA, 20 bp, synthetic construct
  source 1..20: mol_type = other DNA
tggctgtgtcgtcattagca

SEQ ID NO: 147798 - DNA, 20 bp, synthetic construct
  source 1..20: mol_type = other DNA
gtggctgtgtcgtcattagc

SEQ ID NO: 147799 - DNA, 20 bp, synthetic construct
  source 1..20: mol_type = other DNA
ggtggctgtgtcgtcattag

SEQ ID NO: 147800 - DNA, 20 bp, synthetic construct
  source 1..20: mol_type = other DNA
gggtggctgtgtcgtcatta

SEQ ID NO: 147801 - DNA, 20 bp, synthetic construct
  source 1..20: mol_type = other DNA
cgggtggctgtgtcgtcatt

SEQ ID NO: 147802 - DNA, 20 bp, synthetic construct
  source 1..20: mol_type = other DNA
ccgggtggctgtgtcgtcat

SEQ ID NO: 147803 - DNA, 20 bp, synthetic construct
  source 1..20: mol_type = other DNA
gccgggtggctgtgtcgtca

SEQ ID NO: 147804 - DNA, 20 bp, synthetic construct
  source 1..20: mol_type = other DNA
cgccgggtggctgtgtcgtc

SEQ ID NO: 147805 - DNA, 20 bp, synthetic construct
  source 1..20: mol_type = other DNA
ccgccgggtggctgtgtcgt

SEQ ID NO: 147806 - DNA, 20 bp, synthetic construct
  source 1..20: mol_type = other DNA
accgccgggtggctgtgtcg

SEQ ID NO: 147807 - DNA, 20 bp, synthetic construct
  source 1..20: mol_type = other DNA
gaccgccgggtggctgtgtc

SEQ ID NO: 147808 - DNA, 20 bp, synthetic construct
  source 1..20: mol_type = other DNA
ggaccgccgggtggctgtgt

SEQ ID NO: 147809 - DNA, 20 bp, synthetic construct
  source 1..20: mol_type = other DNA
gggaccgccgggtggctgtg

SEQ ID NO: 147810 - DNA, 20 bp, synthetic construct
  source 1..20: mol_type = other DNA
ggggaccgccgggtggctgt

SEQ ID NO: 147811 - DNA, 20 bp, synthetic construct
  source 1..20: mol_type = other DNA
tggggaccgccgggtggctg

SEQ ID NO: 147812 - DNA, 20 bp, synthetic construct
  source 1..20: mol_type = other DNA
ctggggaccgccgggtggct

SEQ ID NO: 147813 - DNA, 20 bp, synthetic construct
  source 1..20: mol_type = other DNA
cctggggaccgccgggtggc

SEQ ID NO: 147814 - DNA, 20 bp, synthetic construct
  source 1..20: mol_type = other DNA
gcctggggaccgccgggtgg

SEQ ID NO: 147815 - DNA, 20 bp, synthetic construct
  source 1..20: mol_type = other DNA
ggcctggggaccgccgggtg

SEQ ID NO: 147816 - DNA, 20 bp, synthetic construct
  source 1..20: mol_type = other DNA
cggcctggggaccgccgggt

SEQ ID NO: 147817 - DNA, 20 bp, synthetic construct
  source 1..20: mol_type = other DNA
gcggcctggggaccgccggg

SEQ ID NO: 147818 - DNA, 20 bp, synthetic construct
  source 1..20: mol_type = other DNA
ggcggcctggggaccgccgg

SEQ ID NO: 147819 - DNA, 20 bp, synthetic construct
  source 1..20: mol_type = other DNA
gggcggcctggggaccgccg

SEQ ID NO: 147820 - DNA, 20 bp, synthetic construct
  source 1..20: mol_type = other DNA
agggcggcctggggaccgcc

SEQ ID NO: 147821 - DNA, 20 bp, synthetic construct
  source 1..20: mol_type = other DNA
gagggcggcctggggaccgc

SEQ ID NO: 147822 - DNA, 20 bp, synthetic construct
  source 1..20: mol_type = other DNA
cgagggcggcctggggaccg

SEQ ID NO: 147823 - DNA, 20 bp, synthetic construct
  source 1..20: mol_type = other DNA
gcgagggcggcctggggacc

SEQ ID NO: 147824 - DNA, 20 bp, synthetic construct
  source 1..20: mol_type = other DNA
agcgagggcggcctggggac

SEQ ID NO: 147825 - DNA, 20 bp, synthetic construct
  source 1..20: mol_type = other DNA
gagcgagggcggcctgggga

SEQ ID NO: 147826 - DNA, 20 bp, synthetic construct
  source 1..20: mol_type = other DNA
tgagcgagggcggcctgggg

SEQ ID NO: 147827 - DNA, 20 bp, synthetic construct
  source 1..20: mol_type = other DNA
ttgagcgagggcggcctggg

SEQ ID NO: 147828 - DNA, 20 bp, synthetic construct
  source 1..20: mol_type = other DNA
tttgagcgagggcggcctgg

SEQ ID NO: 147829 - DNA, 20 bp, synthetic construct
  source 1..20: mol_type = other DNA
ctttgagcgagggcggcctg

SEQ ID NO: 147830 - DNA, 20 bp, synthetic construct
  source 1..20: mol_type = other DNA
actttgagcgagggcggcct

SEQ ID NO: 147831 - DNA, 20 bp, synthetic construct
  source 1..20: mol_type = other DNA
cactttgagcgagggcggcc

SEQ ID NO: 147832 - DNA, 20 bp, synthetic construct
  source 1..20: mol_type = other DNA
gcactttgagcgagggcggc

SEQ ID NO: 147833 - DNA, 20 bp, synthetic construct
  source 1..20: mol_type = other DNA
tgcactttgagcgagggcgg

SEQ ID NO: 147834 - DNA, 20 bp, synthetic construct
  source 1..20: mol_type = other DNA
gtgcactttgagcgagggcg

SEQ ID NO: 147835 - DNA, 20 bp, synthetic construct
  source 1..20: mol_type = other DNA
agtgcactttgagcgagggc

SEQ ID NO: 147836 - DNA, 20 bp, synthetic construct
  source 1..20: mol_type = other DNA
tagtgcactttgagcgaggg

SEQ ID NO: 147837 - DNA, 20 bp, synthetic construct
  source 1..20: mol_type = other DNA
gtagtgcactttgagcgagg

SEQ ID NO: 147838 - DNA, 20 bp, synthetic construct
  source 1..20: mol_type = other DNA
tgtagtgcactttgagcgag

SEQ ID NO: 147839 - DNA, 20 bp, synthetic construct
  source 1..20: mol_type = other DNA
ctgtagtgcactttgagcga

SEQ ID NO: 147840 - DNA, 20 bp, synthetic construct
  source 1..20: mol_type = other DNA
gctgtagtgcactttgagcg

SEQ ID NO: 147841 - DNA, 20 bp, synthetic construct
  source 1..20: mol_type = other DNA
ggctgtagtgcactttgagc

SEQ ID NO: 147842 - DNA, 20 bp, synthetic construct
  source 1..20: mol_type = other DNA
gggctgtagtgcactttgag

SEQ ID NO: 147843 - DNA, 20 bp, synthetic construct
  source 1..20: mol_type = other DNA
tgggctgtagtgcactttga

SEQ ID NO: 147844 - DNA, 20 bp, synthetic construct
  source 1..20: mol_type = other DNA
atgggctgtagtgcactttg

SEQ ID NO: 147845 - DNA, 20 bp, synthetic construct
  source 1..20: mol_type = other DNA
aatgggctgtagtgcacttt

SEQ ID NO: 147846 - DNA, 20 bp, synthetic construct
  source 1..20: mol_type = other DNA
gaatgggctgtagtgcactt

SEQ ID NO: 147847 - DNA, 20 bp, synthetic construct
  source 1..20: mol_type = other DNA
ggaatgggctgtagtgcact

SEQ ID NO: 147848 - DNA, 20 bp, synthetic construct
  source 1..20: mol_type = other DNA
tggaatgggctgtagtgcac

SEQ ID NO: 147849 - DNA, 20 bp, synthetic construct
  source 1..20: mol_type = other DNA
ctggaatgggctgtagtgca

SEQ ID NO: 147850 - DNA, 20 bp, synthetic construct
  source 1..20: mol_type = other DNA
actggaatgggctgtagtgc

SEQ ID NO: 147851 - DNA, 20 bp, synthetic construct
  source 1..20: mol_type = other DNA
gactggaatgggctgtagtg

SEQ ID NO: 147852 - DNA, 20 bp, synthetic construct
  source 1..20: mol_type = other DNA
agactggaatgggctgtagt

SEQ ID NO: 147853 - DNA, 20 bp, synthetic construct
  source 1..20: mol_type = other DNA
gagactggaatgggctgtag

SEQ ID NO: 147854 - DNA, 20 bp, synthetic construct
  source 1..20: mol_type = other DNA
cgagactggaatgggctgta

SEQ ID NO: 147855 - DNA, 20 bp, synthetic construct
  source 1..20: mol_type = other DNA
tcgagactggaatgggctgt

SEQ ID NO: 147856 - DNA, 20 bp, synthetic construct
  source 1..20: mol_type = other DNA
gtcgagactggaatgggctg

SEQ ID NO: 147857 - DNA, 20 bp, synthetic construct
  source 1..20: mol_type = other DNA
tgtcgagactggaatgggct

SEQ ID NO: 147858 - DNA, 20 bp, synthetic construct
  source 1..20: mol_type = other DNA
ttgtcgagactggaatgggc

SEQ ID NO: 147859 - DNA, 20 bp, synthetic construct
  source 1..20: mol_type = other DNA
gttgtcgagactggaatggg

SEQ ID NO: 147860 - DNA, 20 bp, synthetic construct
  source 1..20: mol_type = other DNA
tgttgtcgagactggaatgg

SEQ ID NO: 147861 - DNA, 20 bp, synthetic construct
  source 1..20: mol_type = other DNA
ctgttgtcgagactggaatg

SEQ ID NO: 147862 - DNA, 20 bp, synthetic construct
  source 1..20: mol_type = other DNA
gctgttgtcgagactggaat

SEQ ID NO: 147863 - DNA, 20 bp, synthetic construct
  source 1..20: mol_type = other DNA
cgctgttgtcgagactggaa

SEQ ID NO: 147864 - DNA, 20 bp, synthetic construct
  source 1..20: mol_type = other DNA
gcgctgttgtcgagactgga

SEQ ID NO: 147865 - DNA, 20 bp, synthetic construct
  source 1..20: mol_type = other DNA
tgcgctgttgtcgagactgg

SEQ ID NO: 147866 - DNA, 20 bp, synthetic construct
  source 1..20: mol_type = other DNA
atgcgctgttgtcgagactg

SEQ ID NO: 147867 - DNA, 20 bp, synthetic construct
  source 1..20: mol_type = other DNA
aatgcgctgttgtcgagact

SEQ ID NO: 147868 - DNA, 20 bp, synthetic construct
  source 1..20: mol_type = other DNA
aaatgcgctgttgtcgagac

SEQ ID NO: 147869 - DNA, 20 bp, synthetic construct
  source 1..20: mol_type = other DNA
gaaatgcgctgttgtcgaga

SEQ ID NO: 147870 - DNA, 20 bp, synthetic construct
  source 1..20: mol_type = other DNA
ggaaatgcgctgttgtcgag

SEQ ID NO: 147871 - DNA, 20 bp, synthetic construct
  source 1..20: mol_type = other DNA
gggaaatgcgctgttgtcga

SEQ ID NO: 147872 - DNA, 20 bp, synthetic construct
  source 1..20: mol_type = other DNA
ggggaaatgcgctgttgtcg

SEQ ID NO: 147873 - DNA, 20 bp, synthetic construct
  source 1..20: mol_type = other DNA
aggggaaatgcgctgttgtc

SEQ ID NO: 147874 - DNA, 20 bp, synthetic construct
  source 1..20: mol_type = other DNA
taggggaaatgcgctgttgt

SEQ ID NO: 147875 - DNA, 20 bp, synthetic construct
  source 1..20: mol_type = other DNA
ataggggaaatgcgctgttg

SEQ ID NO: 147876 - DNA, 20 bp, synthetic construct
  source 1..20: mol_type = other DNA
tataggggaaatgcgctgtt

SEQ ID NO: 147877 - DNA, 20 bp, synthetic construct
  source 1..20: mol_type = other DNA
atataggggaaatgcgctgt

SEQ ID NO: 147878 - DNA, 20 bp, synthetic construct
  source 1..20: mol_type = other DNA
catataggggaaatgcgctg

SEQ ID NO: 147879 - DNA, 20 bp, synthetic construct
  source 1..20: mol_type = other DNA
tcatataggggaaatgcgct

SEQ ID NO: 147880 - DNA, 20 bp, synthetic construct
  source 1..20: mol_type = other DNA
gtcatataggggaaatgcgc

SEQ ID NO: 147881 - DNA, 20 bp, synthetic construct
  source 1..20: mol_type = other DNA
cgtcatataggggaaatgcg

SEQ ID NO: 147882 - DNA, 20 bp, synthetic construct
  source 1..20: mol_type = other DNA
gcgtcatataggggaaatgc

SEQ ID NO: 147883 - DNA, 20 bp, synthetic construct
  source 1..20: mol_type = other DNA
tgcgtcatataggggaaatg

SEQ ID NO: 147884 - DNA, 20 bp, synthetic construct
  source 1..20: mol_type = other DNA
gtgcgtcatataggggaaat

SEQ ID NO: 147885 - DNA, 20 bp, synthetic construct
  source 1..20: mol_type = other DNA
ggtgcgtcatataggggaaa

SEQ ID NO: 147886 - DNA, 20 bp, synthetic construct
  source 1..20: mol_type = other DNA
gggtgcgtcatataggggaa

SEQ ID NO: 147887 - DNA, 20 bp, synthetic construct
  source 1..20: mol_type = other DNA
agggtgcgtcatatagggga

SEQ ID NO: 147888 - DNA, 20 bp, synthetic construct
  source 1..20: mol_type = other DNA
aagggtgcgtcatatagggg

SEQ ID NO: 147889 - DNA, 20 bp, synthetic construct
  source 1..20: mol_type = other DNA
gaagggtgcgtcatataggg

SEQ ID NO: 147890 - DNA, 20 bp, synthetic construct
  source 1..20: mol_type = other DNA
tgaagggtgcgtcatatagg

SEQ ID NO: 147891 - DNA, 20 bp, synthetic construct
  source 1..20: mol_type = other DNA
ctgaagggtgcgtcatatag

SEQ ID NO: 147892 - DNA, 20 bp, synthetic construct
  source 1..20: mol_type = other DNA
cctgaagggtgcgtcatata

SEQ ID NO: 147893 - DNA, 20 bp, synthetic construct
  source 1..20: mol_type = other DNA
acctgaagggtgcgtcatat

SEQ ID NO: 147894 - DNA, 20 bp, synthetic construct
  source 1..20: mol_type = other DNA
cacctgaagggtgcgtcata

SEQ ID NO: 147895 - DNA, 20 bp, synthetic construct
  source 1..20: mol_type = other DNA
tcacctgaagggtgcgtcat

SEQ ID NO: 147896 - DNA, 20 bp, synthetic construct
  source 1..20: mol_type = other DNA
ctcacctgaagggtgcgtca

SEQ ID NO: 147897 - DNA, 20 bp, synthetic construct
  source 1..20: mol_type = other DNA
cctcacctgaagggtgcgtc

SEQ ID NO: 147898 - DNA, 20 bp, synthetic construct
  source 1..20: mol_type = other DNA
gcctcacctgaagggtgcgt

SEQ ID NO: 147899 - DNA, 20 bp, synthetic construct
  source 1..20: mol_type = other DNA
cgcctcacctgaagggtgcg

SEQ ID NO: 147900 - DNA, 20 bp, synthetic construct
  source 1..20: mol_type = other DNA
acgcctcacctgaagggtgc

SEQ ID NO: 147901 - DNA, 20 bp, synthetic construct
  source 1..20: mol_type = other DNA
cacgcctcacctgaagggtg

SEQ ID NO: 147902 - DNA, 20 bp, synthetic construct
  source 1..20: mol_type = other DNA
acacgcctcacctgaagggt

SEQ ID NO: 147903 - DNA, 20 bp, synthetic construct
  source 1..20: mol_type = other DNA
cacacgcctcacctgaaggg

SEQ ID NO: 147904 - DNA, 20 bp, synthetic construct
  source 1..20: mol_type = other DNA
acacacgcctcacctgaagg

SEQ ID NO: 147905 - DNA, 20 bp, synthetic construct
  source 1..20: mol_type = other DNA
cacacacgcctcacctgaag

SEQ ID NO: 147906 - DNA, 20 bp, synthetic construct
  source 1..20: mol_type = other DNA
acacacacgcctcacctgaa

SEQ ID NO: 147907 - DNA, 20 bp, synthetic construct
  source 1..20: mol_type = other DNA
cacacacacgcctcacctga

SEQ ID NO: 147908 - DNA, 20 bp, synthetic construct
  source 1..20: mol_type = other DNA
gcacacacacgcctcacctg

SEQ ID NO: 147909 - DNA, 20 bp, synthetic construct
  source 1..20: mol_type = other DNA
tgcacacacacgcctcacct

SEQ ID NO: 147910 - DNA, 20 bp, synthetic construct
  source 1..20: mol_type = other DNA
ctgcacacacacgcctcacc

SEQ ID NO: 147911 - DNA, 20 bp, synthetic construct
  source 1..20: mol_type = other DNA
cctgcacacacacgcctcac

SEQ ID NO: 147912 - DNA, 20 bp, synthetic construct
  source 1..20: mol_type = other DNA
ccctgcacacacacgcctca

SEQ ID NO: 147913 - DNA, 20 bp, synthetic construct
  source 1..20: mol_type = other DNA
cccctgcacacacacgcctc

SEQ ID NO: 147914 - DNA, 20 bp, synthetic construct
  source 1..20: mol_type = other DNA
gcccctgcacacacacgcct

SEQ ID NO: 147915 - DNA, 20 bp, synthetic construct
  source 1..20: mol_type = other DNA
ggcccctgcacacacacgcc

SEQ ID NO: 147916 - DNA, 20 bp, synthetic construct
  source 1..20: mol_type = other DNA
cggcccctgcacacacacgc

SEQ ID NO: 147917 - DNA, 20 bp, synthetic construct
  source 1..20: mol_type = other DNA
gcggcccctgcacacacacg

SEQ ID NO: 147918 - DNA, 20 bp, synthetic construct
  source 1..20: mol_type = other DNA
ggcggcccctgcacacacac

SEQ ID NO: 147919 - DNA, 20 bp, synthetic construct
  source 1..20: mol_type = other DNA
cggcggcccctgcacacaca

SEQ ID NO: 147920 - DNA, 20 bp, synthetic construct
  source 1..20: mol_type = other DNA
ccggcggcccctgcacacac

SEQ ID NO: 147921 - DNA, 20 bp, synthetic construct
  source 1..20: mol_type = other DNA
cccggcggcccctgcacaca

SEQ ID NO: 147922 - DNA, 20 bp, synthetic construct
  source 1..20: mol_type = other DNA
ccccggcggcccctgcacac

SEQ ID NO: 147923 - DNA, 20 bp, synthetic construct
  source 1..20: mol_type = other DNA
gccccggcggcccctgcaca

SEQ ID NO: 147924 - DNA, 20 bp, synthetic construct
  source 1..20: mol_type = other DNA
tgccccggcggcccctgcac

SEQ ID NO: 147925 - DNA, 20 bp, synthetic construct
  source 1..20: mol_type = other DNA
gtgccccggcggcccctgca

SEQ ID NO: 147926 - DNA, 20 bp, synthetic construct
  source 1..20: mol_type = other DNA
ggtgccccggcggcccctgc

SEQ ID NO: 147927 - DNA, 20 bp, synthetic construct
  source 1..20: mol_type = other DNA
gggtgccccggcggcccctg

SEQ ID NO: 147928 - DNA, 20 bp, synthetic construct
  source 1..20: mol_type = other DNA
ggggtgccccggcggcccct

SEQ ID NO: 147929 - DNA, 20 bp, synthetic construct
  source 1..20: mol_type = other DNA
tggggtgccccggcggcccc

SEQ ID NO: 147930 - DNA, 20 bp, synthetic construct
  source 1..20: mol_type = other DNA
ttggggtgccccggcggccc

SEQ ID NO: 147931 - DNA, 20 bp, synthetic construct
  source 1..20: mol_type = other DNA
tttggggtgccccggcggcc

SEQ ID NO: 147932 - DNA, 20 bp, synthetic construct
  source 1..20: mol_type = other DNA
ctttggggtgccccggcggc

SEQ ID NO: 147933 - DNA, 20 bp, synthetic construct
  source 1..20: mol_type = other DNA
gctttggggtgccccggcgg

SEQ ID NO: 147934 - DNA, 20 bp, synthetic construct
  source 1..20: mol_type = other DNA
tgctttggggtgccccggcg

SEQ ID NO: 147935 - DNA, 20 bp, synthetic construct
  source 1..20: mol_type = other DNA
atgctttggggtgccccggc

SEQ ID NO: 147936 - DNA, 20 bp, synthetic construct
  source 1..20: mol_type = other DNA
aatgctttggggtgccccgg

SEQ ID NO: 147937 - DNA, 20 bp, synthetic construct
  source 1..20: mol_type = other DNA
gaatgctttggggtgccccg

SEQ ID NO: 147938 - DNA, 20 bp, synthetic construct
  source 1..20: mol_type = other DNA
agaatgctttggggtgcccc

SEQ ID NO: 147939 - DNA, 20 bp, synthetic construct
  source 1..20: mol_type = other DNA
cagaatgctttggggtgccc

SEQ ID NO: 147940 - DNA, 20 bp, synthetic construct
  source 1..20: mol_type = other DNA
gcagaatgctttggggtgcc

SEQ ID NO: 147941 - DNA, 20 bp, synthetic construct
  source 1..20: mol_type = other DNA
agcagaatgctttggggtgc

SEQ ID NO: 147942 - DNA, 20 bp, synthetic construct
  source 1..20: mol_type = other DNA
gagcagaatgctttggggtg

SEQ ID NO: 147943 - DNA, 20 bp, synthetic construct
  source 1..20: mol_type = other DNA
cgagcagaatgctttggggt

SEQ ID NO: 147944 - DNA, 20 bp, synthetic construct
  source 1..20: mol_type = other DNA
gcgagcagaatgctttgggg

SEQ ID NO: 147945 - DNA, 20 bp, synthetic construct
  source 1..20: mol_type = other DNA
tgcgagcagaatgctttggg

SEQ ID NO: 147946 - DNA, 20 bp, synthetic construct
  source 1..20: mol_type = other DNA
gtgcgagcagaatgctttgg

SEQ ID NO: 147947 - DNA, 20 bp, synthetic construct
  source 1..20: mol_type = other DNA
tgtgcgagcagaatgctttg

SEQ ID NO: 147948 - DNA, 20 bp, synthetic construct
  source 1..20: mol_type = other DNA
ctgtgcgagcagaatgcttt

SEQ ID NO: 147949 - DNA, 20 bp, synthetic construct
  source 1..20: mol_type = other DNA
cctgtgcgagcagaatgctt

SEQ ID NO: 147950 - DNA, 20 bp, synthetic construct
  source 1..20: mol_type = other DNA
acctgtgcgagcagaatgct

SEQ ID NO: 147951 - DNA, 20 bp, synthetic construct
  source 1..20: mol_type = other DNA
cacctgtgcgagcagaatgc

SEQ ID NO: 147952 - DNA, 20 bp, synthetic construct
  source 1..20: mol_type = other DNA
ccacctgtgcgagcagaatg

SEQ ID NO: 147953 - DNA, 20 bp, synthetic construct
  source 1..20: mol_type = other DNA
tccacctgtgcgagcagaat

SEQ ID NO: 147954 - DNA, 20 bp, synthetic construct
  source 1..20: mol_type = other DNA
ttccacctgtgcgagcagaa

SEQ ID NO: 147955 - DNA, 20 bp, synthetic construct
  source 1..20: mol_type = other DNA
attccacctgtgcgagcaga

SEQ ID NO: 147956 - DNA, 20 bp, synthetic construct
  source 1..20: mol_type = other DNA
cattccacctgtgcgagcag

SEQ ID NO: 147957 - DNA, 20 bp, synthetic construct
  source 1..20: mol_type = other DNA
ccattccacctgtgcgagca

SEQ ID NO: 147958 - DNA, 20 bp, synthetic construct
  source 1..20: mol_type = other DNA
gccattccacctgtgcgagc

SEQ ID NO: 147959 - DNA, 20 bp, synthetic construct
  source 1..20: mol_type = other DNA
tgccattccacctgtgcgag

SEQ ID NO: 147960 - DNA, 20 bp, synthetic construct
  source 1..20: mol_type = other DNA
ctgccattccacctgtgcga

SEQ ID NO: 147961 - DNA, 20 bp, synthetic construct
  source 1..20: mol_type = other DNA
cctgccattccacctgtgcg

SEQ ID NO: 147962 - DNA, 20 bp, synthetic construct
  source 1..20: mol_type = other DNA
gcctgccattccacctgtgc

SEQ ID NO: 147963 - DNA, 20 bp, synthetic construct
  source 1..20: mol_type = other DNA
tgcctgccattccacctgtg

SEQ ID NO: 147964 - DNA, 20 bp, synthetic construct
  source 1..20: mol_type = other DNA
ctgcctgccattccacctgt

SEQ ID NO: 147965 - DNA, 20 bp, synthetic construct
  source 1..20: mol_type = other DNA
cctgcctgccattccacctg

SEQ ID NO: 147966 - DNA, 20 bp, synthetic construct
  source 1..20: mol_type = other DNA
ccctgcctgccattccacct

SEQ ID NO: 147967 - DNA, 20 bp, synthetic construct
  source 1..20: mol_type = other DNA
gccctgcctgccattccacc

SEQ ID NO: 147968 - DNA, 20 bp, synthetic construct
  source 1..20: mol_type = other DNA
ggccctgcctgccattccac

SEQ ID NO: 147969 - DNA, 20 bp, synthetic construct
  source 1..20: mol_type = other DNA
tggccctgcctgccattcca

SEQ ID NO: 147970 - DNA, 20 bp, synthetic construct
  source 1..20: mol_type = other DNA
ctggccctgcctgccattcc

SEQ ID NO: 147971 - DNA, 20 bp, synthetic construct
  source 1..20: mol_type = other DNA
actggccctgcctgccattc

SEQ ID NO: 147972 - DNA, 20 bp, synthetic construct
  source 1..20: mol_type = other DNA
cactggccctgcctgccatt

SEQ ID NO: 147973 - DNA, 20 bp, synthetic construct
  source 1..20: mol_type = other DNA
gcactggccctgcctgccat

SEQ ID NO: 147974 - DNA, 20 bp, synthetic construct
  source 1..20: mol_type = other DNA
agcactggccctgcctgcca

SEQ ID NO: 147975 - DNA, 20 bp, synthetic construct
  source 1..20: mol_type = other DNA
aagcactggccctgcctgcc

SEQ ID NO: 147976 - DNA, 20 bp, synthetic construct
  source 1..20: mol_type = other DNA
gaagcactggccctgcctgc

SEQ ID NO: 147977 - DNA, 20 bp, synthetic construct
  source 1..20: mol_type = other DNA
tgaagcactggccctgcctg

SEQ ID NO: 147978 - DNA, 20 bp, synthetic construct
  source 1..20: mol_type = other DNA
ttgaagcactggccctgcct

SEQ ID NO: 147979 - DNA, 20 bp, synthetic construct
  source 1..20: mol_type = other DNA
cttgaagcactggccctgcc

SEQ ID NO: 147980 - DNA, 20 bp, synthetic construct
  source 1..20: mol_type = other DNA
gcttgaagcactggccctgc

SEQ ID NO: 147981 - DNA, 20 bp, synthetic construct
  source 1..20: mol_type = other DNA
ggcttgaagcactggccctg

SEQ ID NO: 147982 - DNA, 20 bp, synthetic construct
  source 1..20: mol_type = other DNA
gggcttgaagcactggccct

SEQ ID NO: 147983 - DNA, 20 bp, synthetic construct
  source 1..20: mol_type = other DNA
ggggcttgaagcactggccc

SEQ ID NO: 147984 - DNA, 20 bp, synthetic construct
  source 1..20: mol_type = other DNA
cggggcttgaagcactggcc

SEQ ID NO: 147985 - DNA, 20 bp, synthetic construct
  source 1..20: mol_type = other DNA
gcggggcttgaagcactggc

SEQ ID NO: 147986 - DNA, 20 bp, synthetic construct
  source 1..20: mol_type = other DNA
tgcggggcttgaagcactgg

SEQ ID NO: 147987 - DNA, 20 bp, synthetic construct
  source 1..20: mol_type = other DNA
atgcggggcttgaagcactg

SEQ ID NO: 147988 - DNA, 20 bp, synthetic construct
  source 1..20: mol_type = other DNA
aatgcggggcttgaagcact

SEQ ID NO: 147989 - DNA, 20 bp, synthetic construct
  source 1..20: mol_type = other DNA
aaatgcggggcttgaagcac

SEQ ID NO: 147990 - DNA, 20 bp, synthetic construct
  source 1..20: mol_type = other DNA
caaatgcggggcttgaagca

SEQ ID NO: 147991 - DNA, 20 bp, synthetic construct
  source 1..20: mol_type = other DNA
tcaaatgcggggcttgaagc

SEQ ID NO: 147992 - DNA, 20 bp, synthetic construct
  source 1..20: mol_type = other DNA
ctcaaatgcggggcttgaag

SEQ ID NO: 147993 - DNA, 20 bp, synthetic construct
  source 1..20: mol_type = other DNA
tctcaaatgcggggcttgaa

SEQ ID NO: 147994 - DNA, 20 bp, synthetic construct
  source 1..20: mol_type = other DNA
ttctcaaatgcggggcttga

SEQ ID NO: 147995 - DNA, 20 bp, synthetic construct
  source 1..20: mol_type = other DNA
gttctcaaatgcggggcttg

SEQ ID NO: 147996 - DNA, 20 bp, synthetic construct
  source 1..20: mol_type = other DNA
agttctcaaatgcggggctt

SEQ ID NO: 147997 - DNA, 20 bp, synthetic construct
  source 1..20: mol_type = other DNA
tagttctcaaatgcggggct

SEQ ID NO: 147998 - DNA, 20 bp, synthetic construct
  source 1..20: mol_type = other DNA
ctagttctcaaatgcggggc

SEQ ID NO: 147999 - DNA, 20 bp, synthetic construct
  source 1..20: mol_type = other DNA
gctagttctcaaatgcgggg

SEQ ID NO: 148000 - DNA, 20 bp, synthetic construct
  source 1..20: mol_type = other DNA
tgctagttctcaaatgcggg

SEQ ID NO: 148001 - DNA, 20 bp, synthetic construct
  source 1..20: mol_type = other DNA
ttgctagttctcaaatgcgg

SEQ ID NO: 148002 - DNA, 20 bp, synthetic construct
  source 1..20: mol_type = other DNA
cttgctagttctcaaatgcg

SEQ ID NO: 148003 - DNA, 20 bp, synthetic construct
  source 1..20: mol_type = other DNA
tcttgctagttctcaaatgc

SEQ ID NO: 148004 - DNA, 20 bp, synthetic construct
  source 1..20: mol_type = other DNA
gtcttgctagttctcaaatg

SEQ ID NO: 148005 - DNA, 20 bp, synthetic construct
  source 1..20: mol_type = other DNA
ggtcttgctagttctcaaat

SEQ ID NO: 148006 - DNA, 20 bp, synthetic construct
  source 1..20: mol_type = other DNA
gggtcttgctagttctcaaa

SEQ ID NO: 148007 - DNA, 20 bp, synthetic construct
  source 1..20: mol_type = other DNA
cgggtcttgctagttctcaa

SEQ ID NO: 148008 - DNA, 20 bp, synthetic construct
  source 1..20: mol_type = other DNA
acgggtcttgctagttctca

SEQ ID NO: 148009 - DNA, 20 bp, synthetic construct
  source 1..20: mol_type = other DNA
gacgggtcttgctagttctc

SEQ ID NO: 148010 - DNA, 20 bp, synthetic construct
  source 1..20: mol_type = other DNA
ggacgggtcttgctagttct

SEQ ID NO: 148011 - DNA, 20 bp, synthetic construct
  source 1..20: mol_type = other DNA
tggacgggtcttgctagttc

SEQ ID NO: 148012 - DNA, 20 bp, synthetic construct
  source 1..20: mol_type = other DNA
ctggacgggtcttgctagtt

SEQ ID NO: 148013 - DNA, 20 bp, synthetic construct
  source 1..20: mol_type = other DNA
cctggacgggtcttgctagt

SEQ ID NO: 148014 - DNA, 20 bp, synthetic construct
  source 1..20: mol_type = other DNA
tcctggacgggtcttgctag

SEQ ID NO: 148015 - DNA, 20 bp, synthetic construct
  source 1..20: mol_type = other DNA
ctcctggacgggtcttgcta

SEQ ID NO: 148016 - DNA, 20 bp, synthetic construct
  source 1..20: mol_type = other DNA
actcctggacgggtcttgct

SEQ ID NO: 148017 - DNA, 20 bp, synthetic construct
  source 1..20: mol_type = other DNA
cactcctggacgggtcttgc

SEQ ID NO: 148018 - DNA, 20 bp, synthetic construct
  source 1..20: mol_type = other DNA
acactcctggacgggtcttg

SEQ ID NO: 148019 - DNA, 20 bp, synthetic construct
  source 1..20: mol_type = other DNA
cacactcctggacgggtctt

SEQ ID NO: 148020 - DNA, 20 bp, synthetic construct
  source 1..20: mol_type = other DNA
gcacactcctggacgggtct

SEQ ID NO: 148021 - DNA, 20 bp, synthetic construct
  source 1..20: mol_type = other DNA
tgcacactcctggacgggtc

SEQ ID NO: 148022 - DNA, 20 bp, synthetic construct
  source 1..20: mol_type = other DNA
gtgcacactcctggacgggt

SEQ ID NO: 148023 - DNA, 20 bp, synthetic construct
  source 1..20: mol_type = other DNA
tgtgcacactcctggacggg

SEQ ID NO: 148024 - DNA, 20 bp, synthetic construct
  source 1..20: mol_type = other DNA
ctgtgcacactcctggacgg

SEQ ID NO: 148025 - DNA, 20 bp, synthetic construct
  source 1..20: mol_type = other DNA
cctgtgcacactcctggacg

SEQ ID NO: 148026 - DNA, 20 bp, synthetic construct
  source 1..20: mol_type = other DNA
tcctgtgcacactcctggac

SEQ ID NO: 148027 - DNA, 20 bp, synthetic construct
  source 1..20: mol_type = other DNA
ctcctgtgcacactcctgga

SEQ ID NO: 148028 - DNA, 20 bp, synthetic construct
  source 1..20: mol_type = other DNA
cctcctgtgcacactcctgg

SEQ ID NO: 148029 - DNA, 20 bp, synthetic construct
  source 1..20: mol_type = other DNA
ccctcctgtgcacactcctg

SEQ ID NO: 148030 - DNA, 20 bp, synthetic construct
  source 1..20: mol_type = other DNA
tccctcctgtgcacactcct

SEQ ID NO: 148031 - DNA, 20 bp, synthetic construct
  source 1..20: mol_type = other DNA
gtccctcctgtgcacactcc

SEQ ID NO: 148032 - DNA, 20 bp, synthetic construct
  source 1..20: mol_type = other DNA
agtccctcctgtgcacactc

SEQ ID NO: 148033 - DNA, 20 bp, synthetic construct
  source 1..20: mol_type = other DNA
cagtccctcctgtgcacact

SEQ ID NO: 148034 - DNA, 20 bp, synthetic construct
  source 1..20: mol_type = other DNA
acagtccctcctgtgcacac

SEQ ID NO: 148035 - DNA, 20 bp, synthetic construct
  source 1..20: mol_type = other DNA
cacagtccctcctgtgcaca

SEQ ID NO: 148036 - DNA, 20 bp, synthetic construct
  source 1..20: mol_type = other DNA
tcacagtccctcctgtgcac

SEQ ID NO: 148037 - DNA, 20 bp, synthetic construct
  source 1..20: mol_type = other DNA
gtcacagtccctcctgtgca

SEQ ID NO: 148038 - DNA, 20 bp, synthetic construct
  source 1..20: mol_type = other DNA
cgtcacagtccctcctgtgc

SEQ ID NO: 148039 - DNA, 20 bp, synthetic construct
  source 1..20: mol_type = other DNA
tcgtcacagtccctcctgtg

SEQ ID NO: 148040 - DNA, 20 bp, synthetic construct
  source 1..20: mol_type = other DNA
atcgtcacagtccctcctgt

SEQ ID NO: 148041 - DNA, 20 bp, synthetic construct
  source 1..20: mol_type = other DNA
gatcgtcacagtccctcctg

SEQ ID NO: 148042 - DNA, 20 bp, synthetic construct
  source 1..20: mol_type = other DNA
tgatcgtcacagtccctcct

SEQ ID NO: 148043 - DNA, 20 bp, synthetic construct
  source 1..20: mol_type = other DNA
ctgatcgtcacagtccctcc

SEQ ID NO: 148044 - DNA, 20 bp, synthetic construct
  source 1..20: mol_type = other DNA
actgatcgtcacagtccctc

SEQ ID NO: 148045 - DNA, 20 bp, synthetic construct
  source 1..20: mol_type = other DNA
aactgatcgtcacagtccct

SEQ ID NO: 148046 - DNA, 20 bp, synthetic construct
  source 1..20: mol_type = other DNA
gaactgatcgtcacagtccc

SEQ ID NO: 148047 - DNA, 20 bp, synthetic construct
  source 1..20: mol_type = other DNA
tgaactgatcgtcacagtcc

SEQ ID NO: 148048 - DNA, 20 bp, synthetic construct
  source 1..20: mol_type = other DNA
ctgaactgatcgtcacagtc

SEQ ID NO: 148049 - DNA, 20 bp, synthetic construct
  source 1..20: mol_type = other DNA
gctgaactgatcgtcacagt

SEQ ID NO: 148050 - DNA, 20 bp, synthetic construct
  source 1..20: mol_type = other DNA
tgctgaactgatcgtcacag

SEQ ID NO: 148051 - DNA, 20 bp, synthetic construct
  source 1..20: mol_type = other DNA
atgctgaactgatcgtcaca

SEQ ID NO: 148052 - DNA, 20 bp, synthetic construct
  source 1..20: mol_type = other DNA
gatgctgaactgatcgtcac

SEQ ID NO: 148053 - DNA, 20 bp, synthetic construct
  source 1..20: mol_type = other DNA
tgatgctgaactgatcgtca

SEQ ID NO: 148054 - DNA, 20 bp, synthetic construct
  source 1..20: mol_type = other DNA
ctgatgctgaactgatcgtc

SEQ ID NO: 148055 - DNA, 20 bp, synthetic construct
  source 1..20: mol_type = other DNA
cctgatgctgaactgatcgt

SEQ ID NO: 148056 - DNA, 20 bp, synthetic construct
  source 1..20: mol_type = other DNA
ccctgatgctgaactgatcg

SEQ ID NO: 148057 - DNA, 20 bp, synthetic construct
  source 1..20: mol_type = other DNA
gccctgatgctgaactgatc

SEQ ID NO: 148058 - DNA, 20 bp, synthetic construct
  source 1..20: mol_type = other DNA
ggccctgatgctgaactgat

SEQ ID NO: 148059 - DNA, 20 bp, synthetic construct
  source 1..20: mol_type = other DNA
aggccctgatgctgaactga

SEQ ID NO: 148060 - DNA, 20 bp, synthetic construct
  source 1..20: mol_type = other DNA
caggccctgatgctgaactg

SEQ ID NO: 148061 - DNA, 20 bp, synthetic construct
  source 1..20: mol_type = other DNA
tcaggccctgatgctgaact

SEQ ID NO: 148062 - DNA, 20 bp, synthetic construct
  source 1..20: mol_type = other DNA
ctcaggccctgatgctgaac

SEQ ID NO: 148063 - DNA, 20 bp, synthetic construct
  source 1..20: mol_type = other DNA
cctcaggccctgatgctgaa

SEQ ID NO: 148064 - DNA, 20 bp, synthetic construct
  source 1..20: mol_type = other DNA
gcctcaggccctgatgctga

SEQ ID NO: 148065 - DNA, 20 bp, synthetic construct
  source 1..20: mol_type = other DNA
agcctcaggccctgatgctg

SEQ ID NO: 148066 - DNA, 20 bp, synthetic construct
  source 1..20: mol_type = other DNA
aagcctcaggccctgatgct

SEQ ID NO: 148067 - DNA, 20 bp, synthetic construct
  source 1..20: mol_type = other DNA
gaagcctcaggccctgatgc

SEQ ID NO: 148068 - DNA, 20 bp, synthetic construct
  source 1..20: mol_type = other DNA
ggaagcctcaggccctgatg

SEQ ID NO: 148069 - DNA, 20 bp, synthetic construct
  source 1..20: mol_type = other DNA
cggaagcctcaggccctgat

SEQ ID NO: 148070 - DNA, 20 bp, synthetic construct
  source 1..20: mol_type = other DNA
ccggaagcctcaggccctga

SEQ ID NO: 148071 - DNA, 20 bp, synthetic construct
  source 1..20: mol_type = other DNA
cccggaagcctcaggccctg

SEQ ID NO: 148072 - DNA, 20 bp, synthetic construct
  source 1..20: mol_type = other DNA
tcccggaagcctcaggccct

SEQ ID NO: 148073 - DNA, 20 bp, synthetic construct
  source 1..20: mol_type = other DNA
ctcccggaagcctcaggccc

SEQ ID NO: 148074 - DNA, 20 bp, synthetic construct
  source 1..20: mol_type = other DNA
gctcccggaagcctcaggcc

SEQ ID NO: 148075 - DNA, 20 bp, synthetic construct
  source 1..20: mol_type = other DNA
ggctcccggaagcctcaggc

SEQ ID NO: 148076 - DNA, 20 bp, synthetic construct
  source 1..20: mol_type = other DNA
cggctcccggaagcctcagg

SEQ ID NO: 148077 - DNA, 20 bp, synthetic construct
  source 1..20: mol_type = other DNA
tcggctcccggaagcctcag

SEQ ID NO: 148078 - DNA, 20 bp, synthetic construct
  source 1..20: mol_type = other DNA
ctcggctcccggaagcctca

SEQ ID NO: 148079 - DNA, 20 bp, synthetic construct
  source 1..20: mol_type = other DNA
actcggctcccggaagcctc

SEQ ID NO: 148080 - DNA, 20 bp, synthetic construct
  source 1..20: mol_type = other DNA
gactcggctcccggaagcct

SEQ ID NO: 148081 - DNA, 20 bp, synthetic construct
  source 1..20: mol_type = other DNA
agactcggctcccggaagcc

SEQ ID NO: 148082 - DNA, 20 bp, synthetic construct
  source 1..20: mol_type = other DNA
cagactcggctcccggaagc

SEQ ID NO: 148083 - DNA, 20 bp, synthetic construct
  source 1..20: mol_type = other DNA
acagactcggctcccggaag

SEQ ID NO: 148084 - DNA, 20 bp, synthetic construct
  source 1..20: mol_type = other DNA
cacagactcggctcccggaa

SEQ ID NO: 148085 - DNA, 20 bp, synthetic construct
  source 1..20: mol_type = other DNA
acacagactcggctcccgga

SEQ ID NO: 148086 - DNA, 20 bp, synthetic construct
  source 1..20: mol_type = other DNA
cacacagactcggctcccgg

SEQ ID NO: 148087 - DNA, 20 bp, synthetic construct
  source 1..20: mol_type = other DNA
acacacagactcggctcccg

SEQ ID NO: 148088 - DNA, 20 bp, synthetic construct
  source 1..20: mol_type = other DNA
cacacacagactcggctccc

SEQ ID NO: 148089 - DNA, 20 bp, synthetic construct
  source 1..20: mol_type = other DNA
acacacacagactcggctcc

SEQ ID NO: 148090 - DNA, 20 bp, synthetic construct
  source 1..20: mol_type = other DNA
aacacacacagactcggctc

SEQ ID NO: 148091 - DNA, 20 bp, synthetic construct
  source 1..20: mol_type = other DNA
gaacacacacagactcggct

SEQ ID NO: 148092 - DNA, 20 bp, synthetic construct
  source 1..20: mol_type = other DNA
agaacacacacagactcggc

SEQ ID NO: 148093 - DNA, 20 bp, synthetic construct
  source 1..20: mol_type = other DNA
cagaacacacacagactcgg

SEQ ID NO: 148094 - DNA, 20 bp, synthetic construct
  source 1..20: mol_type = other DNA
tcagaacacacacagactcg

SEQ ID NO: 148095 - DNA, 20 bp, synthetic construct
  source 1..20: mol_type = other DNA
atcagaacacacacagactc

SEQ ID NO: 148096 - DNA, 20 bp, synthetic construct
  source 1..20: mol_type = other DNA
catcagaacacacacagact

SEQ ID NO: 148097 - DNA, 20 bp, synthetic construct
  source 1..20: mol_type = other DNA
ccatcagaacacacacagac

SEQ ID NO: 148098 - DNA, 20 bp, synthetic construct
  source 1..20: mol_type = other DNA
accatcagaacacacacaga

SEQ ID NO: 148099 - DNA, 20 bp, synthetic construct
  source 1..20: mol_type = other DNA
taccatcagaacacacacag

SEQ ID NO: 148100 - DNA, 20 bp, synthetic construct
  source 1..20: mol_type = other DNA
ataccatcagaacacacaca

SEQ ID NO: 148101 - DNA, 20 bp, synthetic construct
  source 1..20: mol_type = other DNA
tataccatcagaacacacac

SEQ ID NO: 148102 - DNA, 20 bp, synthetic construct
  source 1..20: mol_type = other DNA
gtataccatcagaacacaca

SEQ ID NO: 148103 - DNA, 20 bp, synthetic construct
  source 1..20: mol_type = other DNA
tgtataccatcagaacacac

SEQ ID NO: 148104 - DNA, 20 bp, synthetic construct
  source 1..20: mol_type = other DNA
ctgtataccatcagaacaca

SEQ ID NO: 148105 - DNA, 20 bp, synthetic construct
  source 1..20: mol_type = other DNA
cctgtataccatcagaacac

SEQ ID NO: 148106 - DNA, 20 bp, synthetic construct
  source 1..20: mol_type = other DNA
tcctgtataccatcagaaca

SEQ ID NO: 148107 - DNA, 20 bp, synthetic construct
  source 1..20: mol_type = other DNA
atcctgtataccatcagaac

SEQ ID NO: 148108 - DNA, 20 bp, synthetic construct
  source 1..20: mol_type = other DNA
aatcctgtataccatcagaa

SEQ ID NO: 148109 - DNA, 20 bp, synthetic construct
  source 1..20: mol_type = other DNA
aaatcctgtataccatcaga

SEQ ID NO: 148110 - DNA, 20 bp, synthetic construct
  source 1..20: mol_type = other DNA
caaatcctgtataccatcag

SEQ ID NO: 148111 - DNA, 20 bp, synthetic construct
  source 1..20: mol_type = other DNA
ccaaatcctgtataccatca

SEQ ID NO: 148112 - DNA, 20 bp, synthetic construct
  source 1..20: mol_type = other DNA
gccaaatcctgtataccatc

SEQ ID NO: 148113 - DNA, 20 bp, synthetic construct
  source 1..20: mol_type = other DNA
agccaaatcctgtataccat

SEQ ID NO: 148114 - DNA, 20 bp, synthetic construct
  source 1..20: mol_type = other DNA
aagccaaatcctgtatacca

SEQ ID NO: 148115 - DNA, 20 bp, synthetic construct
  source 1..20: mol_type = other DNA
caagccaaatcctgtatacc

SEQ ID NO: 148116 - DNA, 20 bp, synthetic construct
  source 1..20: mol_type = other DNA
tcaagccaaatcctgtatac

SEQ ID NO: 148117 - DNA, 20 bp, synthetic construct
  source 1..20: mol_type = other DNA
atcaagccaaatcctgtata

SEQ ID NO: 148118 - DNA, 20 bp, synthetic construct
  source 1..20: mol_type = other DNA
catcaagccaaatcctgtat

SEQ ID NO: 148119 - DNA, 20 bp, synthetic construct
  source 1..20: mol_type = other DNA
tcatcaagccaaatcctgta

SEQ ID NO: 148120 - DNA, 20 bp, synthetic construct
  source 1..20: mol_type = other DNA
ctcatcaagccaaatcctgt

SEQ ID NO: 148121 - DNA, 20 bp, synthetic construct
  source 1..20: mol_type = other DNA
tctcatcaagccaaatcctg

SEQ ID NO: 148122 - DNA, 20 bp, synthetic construct
  source 1..20: mol_type = other DNA
ttctcatcaagccaaatcct

SEQ ID NO: 148123 - DNA, 20 bp, synthetic construct
  source 1..20: mol_type = other DNA
cttctcatcaagccaaatcc

SEQ ID NO: 148124 - DNA, 20 bp, synthetic construct
  source 1..20: mol_type = other DNA
gcttctcatcaagccaaatc

SEQ ID NO: 148125 - DNA, 20 bp, synthetic construct
  source 1..20: mol_type = other DNA
tgcttctcatcaagccaaat

SEQ ID NO: 148126 - DNA, 20 bp, synthetic construct
  source 1..20: mol_type = other DNA
ctgcttctcatcaagccaaa

SEQ ID NO: 148127 - DNA, 20 bp, synthetic construct
  source 1..20: mol_type = other DNA
gctgcttctcatcaagccaa

SEQ ID NO: 148128 - DNA, 20 bp, synthetic construct
  source 1..20: mol_type = other DNA
tgctgcttctcatcaagcca

SEQ ID NO: 148129 - DNA, 20 bp, synthetic construct
  source 1..20: mol_type = other DNA
ctgctgcttctcatcaagcc

SEQ ID NO: 148130 - DNA, 20 bp, synthetic construct
  source 1..20: mol_type = other DNA
gctgctgcttctcatcaagc

SEQ ID NO: 148131 - DNA, 20 bp, synthetic construct
  source 1..20: mol_type = other DNA
tgctgctgcttctcatcaag

SEQ ID NO: 148132 - DNA, 20 bp, synthetic construct
  source 1..20: mol_type = other DNA
ctgctgctgcttctcatcaa

SEQ ID NO: 148133 - DNA, 20 bp, synthetic construct
  source 1..20: mol_type = other DNA
gctgctgctgcttctcatca

SEQ ID NO: 148134 - DNA, 20 bp, synthetic construct
  source 1..20: mol_type = other DNA
tgctgctgctgcttctcatc

SEQ ID NO: 148135 - DNA, 20 bp, synthetic construct
  source 1..20: mol_type = other DNA
ctgctgctgctgcttctcat

SEQ ID NO: 148136 - DNA, 20 bp, synthetic construct
  source 1..20: mol_type = other DNA
gctgctgctgctgcttctca

SEQ ID NO: 148137 - DNA, 20 bp, synthetic construct
  source 1..20: mol_type = other DNA
tgctgctgctgctgcttctc

SEQ ID NO: 148138 - DNA, 20 bp, synthetic construct
  source 1..20: mol_type = other DNA
ttgctgctgctgctgcttct

SEQ ID NO: 148139 - DNA, 20 bp, synthetic construct
  source 1..20: mol_type = other DNA
gttgctgctgctgctgcttc

SEQ ID NO: 148140 - DNA, 20 bp, synthetic construct
  source 1..20: mol_type = other DNA
tgttgctgctgctgctgctt

SEQ ID NO: 148141 - DNA, 20 bp, synthetic construct
  source 1..20: mol_type = other DNA
ctgttgctgctgctgctgct

SEQ ID NO: 148142 - DNA, 20 bp, synthetic construct
  source 1..20: mol_type = other DNA
gctgttgctgctgctgctgc

SEQ ID NO: 148143 - DNA, 20 bp, synthetic construct
  source 1..20: mol_type = other DNA
tgctgttgctgctgctgctg

SEQ ID NO: 148144 - DNA, 20 bp, synthetic construct
  source 1..20: mol_type = other DNA
ctgctgttgctgctgctgct

SEQ ID NO: 148145 - DNA, 20 bp, synthetic construct
  source 1..20: mol_type = other DNA
gctgctgttgctgctgctgc

SEQ ID NO: 148146 - DNA, 20 bp, synthetic construct
  source 1..20: mol_type = other DNA
ggctgctgttgctgctgctg

SEQ ID NO: 148147 - DNA, 20 bp, synthetic construct
  source 1..20: mol_type = other DNA
aggctgctgttgctgctgct

SEQ ID NO: 148148 - DNA, 20 bp, synthetic construct
  source 1..20: mol_type = other DNA
caggctgctgttgctgctgc

SEQ ID NO: 148149 - DNA, 20 bp, synthetic construct
  source 1..20: mol_type = other DNA
tcaggctgctgttgctgctg

SEQ ID NO: 148150 - DNA, 20 bp, synthetic construct
  source 1..20: mol_type = other DNA
atcaggctgctgttgctgct

SEQ ID NO: 148151 - DNA, 20 bp, synthetic construct
  source 1..20: mol_type = other DNA
catcaggctgctgttgctgc

SEQ ID NO: 148152 - DNA, 20 bp, synthetic construct
  source 1..20: mol_type = other DNA
gcatcaggctgctgttgctg

SEQ ID NO: 148153 - DNA, 20 bp, synthetic construct
  source 1..20: mol_type = other DNA
tgcatcaggctgctgttgct

SEQ ID NO: 148154 - DNA, 20 bp, synthetic construct
  source 1..20: mol_type = other DNA
atgcatcaggctgctgttgc

SEQ ID NO: 148155 - DNA, 20 bp, synthetic construct
  source 1..20: mol_type = other DNA
catgcatcaggctgctgttg

SEQ ID NO: 148156 - DNA, 20 bp, synthetic construct
  source 1..20: mol_type = other DNA
gcatgcatcaggctgctgtt

SEQ ID NO: 148157 - DNA, 20 bp, synthetic construct
  source 1..20: mol_type = other DNA
ggcatgcatcaggctgctgt

SEQ ID NO: 148158 - DNA, 20 bp, synthetic construct
  source 1..20: mol_type = other DNA
aggcatgcatcaggctgctg

SEQ ID NO: 148159 - DNA, 20 bp, synthetic construct
  source 1..20: mol_type = other DNA
taggcatgcatcaggctgct

SEQ ID NO: 148160 - DNA, 20 bp, synthetic construct
  source 1..20: mol_type = other DNA
ctaggcatgcatcaggctgc

SEQ ID NO: 148161 - DNA, 20 bp, synthetic construct
  source 1..20: mol_type = other DNA
cctaggcatgcatcaggctg

SEQ ID NO: 148162 - DNA, 20 bp, synthetic construct
  source 1..20: mol_type = other DNA
tcctaggcatgcatcaggct

SEQ ID NO: 148163 - DNA, 20 bp, synthetic construct
  source 1..20: mol_type = other DNA
gtcctaggcatgcatcaggc

SEQ ID NO: 148164 - DNA, 20 bp, synthetic construct
  source 1..20: mol_type = other DNA
agtcctaggcatgcatcagg

SEQ ID NO: 148165 - DNA, 20 bp, synthetic construct
  source 1..20: mol_type = other DNA
gagtcctaggcatgcatcag

SEQ ID NO: 148166 - DNA, 20 bp, synthetic construct
  source 1..20: mol_type = other DNA
tgagtcctaggcatgcatca

SEQ ID NO: 148167 - DNA, 20 bp, synthetic construct
  source 1..20: mol_type = other DNA
ctgagtcctaggcatgcatc

SEQ ID NO: 148168 - DNA, 20 bp, synthetic construct
  source 1..20: mol_type = other DNA
actgagtcctaggcatgcat

SEQ ID NO: 148169 - DNA, 20 bp, synthetic construct
  source 1..20: mol_type = other DNA
aactgagtcctaggcatgca

SEQ ID NO: 148170 - DNA, 20 bp, synthetic construct
  source 1..20: mol_type = other DNA
caactgagtcctaggcatgc

SEQ ID NO: 148171 - DNA, 20 bp, synthetic construct
  source 1..20: mol_type = other DNA
ccaactgagtcctaggcatg

SEQ ID NO: 148172 - DNA, 20 bp, synthetic construct
  source 1..20: mol_type = other DNA
gccaactgagtcctaggcat

SEQ ID NO: 148173 - DNA, 20 bp, synthetic construct
  source 1..20: mol_type = other DNA
ggccaactgagtcctaggca

SEQ ID NO: 148174 - DNA, 20 bp, synthetic construct
  source 1..20: mol_type = other DNA
aggccaactgagtcctaggc

SEQ ID NO: 148175 - DNA, 20 bp, synthetic construct
  source 1..20: mol_type = other DNA
aaggccaactgagtcctagg

SEQ ID NO: 148176 - DNA, 20 bp, synthetic construct
  source 1..20: mol_type = other DNA
gaaggccaactgagtcctag

SEQ ID NO: 148177 - DNA, 20 bp, synthetic construct
  source 1..20: mol_type = other DNA
ggaaggccaactgagtccta

SEQ ID NO: 148178 - DNA, 20 bp, synthetic construct
  source 1..20: mol_type = other DNA
aggaaggccaactgagtcct

SEQ ID NO: 148179 - DNA, 20 bp, synthetic construct
  source 1..20: mol_type = other DNA
aaggaaggccaactgagtcc

SEQ ID NO: 148180 - DNA, 20 bp, synthetic construct
  source 1..20: mol_type = other DNA
caaggaaggccaactgagtc

SEQ ID NO: 148181 - DNA, 20 bp, synthetic construct
  source 1..20: mol_type = other DNA
acaaggaaggccaactgagt

SEQ ID NO: 148182 - DNA, 20 bp, synthetic construct
  source 1..20: mol_type = other DNA
aacaaggaaggccaactgag

SEQ ID NO: 148183 - DNA, 20 bp, synthetic construct
  source 1..20: mol_type = other DNA
taacaaggaaggccaactga

SEQ ID NO: 148184 - DNA, 20 bp, synthetic construct
  source 1..20: mol_type = other DNA
ataacaaggaaggccaactg

SEQ ID NO: 148185 - DNA, 20 bp, synthetic construct
  source 1..20: mol_type = other DNA
cataacaaggaaggccaact

SEQ ID NO: 148186 - DNA, 20 bp, synthetic construct
  source 1..20: mol_type = other DNA
tcataacaaggaaggccaac

SEQ ID NO: 148187 - DNA, 20 bp, synthetic construct
  source 1..20: mol_type = other DNA
gtcataacaaggaaggccaa

SEQ ID NO: 148188 - DNA, 20 bp, synthetic construct
  source 1..20: mol_type = other DNA
tgtcataacaaggaaggcca

SEQ ID NO: 148189 - DNA, 20 bp, synthetic construct
  source 1..20: mol_type = other DNA
ctgtcataacaaggaaggcc

SEQ ID NO: 148190 - DNA, 20 bp, synthetic construct
  source 1..20: mol_type = other DNA
cctgtcataacaaggaaggc

SEQ ID NO: 148191 - DNA, 20 bp, synthetic construct
  source 1..20: mol_type = other DNA
gcctgtcataacaaggaagg

SEQ ID NO: 148192 - DNA, 20 bp, synthetic construct
  source 1..20: mol_type = other DNA
agcctgtcataacaaggaag

SEQ ID NO: 148193 - DNA, 20 bp, synthetic construct
  source 1..20: mol_type = other DNA
cagcctgtcataacaaggaa

SEQ ID NO: 148194 - DNA, 20 bp, synthetic construct
  source 1..20: mol_type = other DNA
ccagcctgtcataacaagga

SEQ ID NO: 148195 - DNA, 20 bp, synthetic construct
  source 1..20: mol_type = other DNA
tccagcctgtcataacaagg

SEQ ID NO: 148196 - DNA, 20 bp, synthetic construct
  source 1..20: mol_type = other DNA
gtccagcctgtcataacaag

SEQ ID NO: 148197 - DNA, 20 bp, synthetic construct
  source 1..20: mol_type = other DNA
tgtccagcctgtcataacaa

SEQ ID NO: 148198 - DNA, 20 bp, synthetic construct
  source 1..20: mol_type = other DNA
ctgtccagcctgtcataaca

SEQ ID NO: 148199 - DNA, 20 bp, synthetic construct
  source 1..20: mol_type = other DNA
cctgtccagcctgtcataac

SEQ ID NO: 148200 - DNA, 20 bp, synthetic construct
  source 1..20: mol_type = other DNA
ccctgtccagcctgtcataa

SEQ ID NO: 148201 - DNA, 20 bp, synthetic construct
  source 1..20: mol_type = other DNA
gccctgtccagcctgtcata

SEQ ID NO: 148202 - DNA, 20 bp, synthetic construct
  source 1..20: mol_type = other DNA
tgccctgtccagcctgtcat

SEQ ID NO: 148203 - DNA, 20 bp, synthetic construct
  source 1..20: mol_type = other DNA
ctgccctgtccagcctgtca

SEQ ID NO: 148204 - DNA, 20 bp, synthetic construct
  source 1..20: mol_type = other DNA
actgccctgtccagcctgtc

SEQ ID NO: 148205 - DNA, 20 bp, synthetic construct
  source 1..20: mol_type = other DNA
cactgccctgtccagcctgt

SEQ ID NO: 148206 - DNA, 20 bp, synthetic construct
  source 1..20: mol_type = other DNA
acactgccctgtccagcctg

SEQ ID NO: 148207 - DNA, 20 bp, synthetic construct
  source 1..20: mol_type = other DNA
aacactgccctgtccagcct

SEQ ID NO: 148208 - DNA, 20 bp, synthetic construct
  source 1..20: mol_type = other DNA
aaacactgccctgtccagcc

SEQ ID NO: 148209 - DNA, 20 bp, synthetic construct
  source 1..20: mol_type = other DNA
aaaacactgccctgtccagc

SEQ ID NO: 148210 - DNA, 20 bp, synthetic construct
  source 1..20: mol_type = other DNA
gaaaacactgccctgtccag

SEQ ID NO: 148211 - DNA, 20 bp, synthetic construct
  source 1..20: mol_type = other DNA
ggaaaacactgccctgtcca

SEQ ID NO: 148212 - DNA, 20 bp, synthetic construct
  source 1..20: mol_type = other DNA
aggaaaacactgccctgtcc

SEQ ID NO: 148213 - DNA, 20 bp, synthetic construct
  source 1..20: mol_type = other DNA
aaggaaaacactgccctgtc

SEQ ID NO: 148214 - DNA, 20 bp, synthetic construct
  source 1..20: mol_type = other DNA
gaaggaaaacactgccctgt

SEQ ID NO: 148215 - DNA, 20 bp, synthetic construct
  source 1..20: mol_type = other DNA
ggaaggaaaacactgccctg

SEQ ID NO: 148216 - DNA, 20 bp, synthetic construct
  source 1..20: mol_type = other DNA
aggaaggaaaacactgccct

SEQ ID NO: 148217 - DNA, 20 bp, synthetic construct
  source 1..20: mol_type = other DNA
caggaaggaaaacactgccc

SEQ ID NO: 148218 - DNA, 20 bp, synthetic construct
  source 1..20: mol_type = other DNA
tcaggaaggaaaacactgcc

SEQ ID NO: 148219 - DNA, 20 bp, synthetic construct
  source 1..20: mol_type = other DNA
ctcaggaaggaaaacactgc

SEQ ID NO: 148220 - DNA, 20 bp, synthetic construct
  source 1..20: mol_type = other DNA
actcaggaaggaaaacactg

SEQ ID NO: 148221 - DNA, 20 bp, synthetic construct
  source 1..20: mol_type = other DNA
gactcaggaaggaaaacact

SEQ ID NO: 148222 - DNA, 20 bp, synthetic construct
  source 1..20: mol_type = other DNA
ggactcaggaaggaaaacac

SEQ ID NO: 148223 - DNA, 20 bp, synthetic construct
  source 1..20: mol_type = other DNA
gggactcaggaaggaaaaca

SEQ ID NO: 148224 - DNA, 20 bp, synthetic construct
  source 1..20: mol_type = other DNA
tgggactcaggaaggaaaac

SEQ ID NO: 148225 - DNA, 20 bp, synthetic construct
  source 1..20: mol_type = other DNA
ttgggactcaggaaggaaaa

SEQ ID NO: 148226 - DNA, 20 bp, synthetic construct
  source 1..20: mol_type = other DNA
tttgggactcaggaaggaaa

SEQ ID NO: 148227 - DNA, 20 bp, synthetic construct
  source 1..20: mol_type = other DNA
ttttgggactcaggaaggaa

SEQ ID NO: 148228 - DNA, 20 bp, synthetic construct
  source 1..20: mol_type = other DNA
cttttgggactcaggaagga

SEQ ID NO: 148229 - DNA, 20 bp, synthetic construct
  source 1..20: mol_type = other DNA
acttttgggactcaggaagg

SEQ ID NO: 148230 - DNA, 20 bp, synthetic construct
  source 1..20: mol_type = other DNA
gacttttgggactcaggaag

SEQ ID NO: 148231 - DNA, 20 bp, synthetic construct
  source 1..20: mol_type = other DNA
agacttttgggactcaggaa

SEQ ID NO: 148232 - DNA, 20 bp, synthetic construct
  source 1..20: mol_type = other DNA
cagacttttgggactcagga

SEQ ID NO: 148233 - DNA, 20 bp, synthetic construct
  source 1..20: mol_type = other DNA
tcagacttttgggactcagg

SEQ ID NO: 148234 - DNA, 20 bp, synthetic construct
  source 1..20: mol_type = other DNA
gtcagacttttgggactcag

SEQ ID NO: 148235 - DNA, 20 bp, synthetic construct
  source 1..20: mol_type = other DNA
tgtcagacttttgggactca

SEQ ID NO: 148236 - DNA, 20 bp, synthetic construct
  source 1..20: mol_type = other DNA
atgtcagacttttgggactc

SEQ ID NO: 148237 - DNA, 20 bp, synthetic construct
  source 1..20: mol_type = other DNA
catgtcagacttttgggact

SEQ ID NO: 148238 - DNA, 20 bp, synthetic construct
  source 1..20: mol_type = other DNA
acatgtcagacttttgggac

SEQ ID NO: 148239 - DNA, 20 bp, synthetic construct
  source 1..20: mol_type = other DNA
cacatgtcagacttttggga

SEQ ID NO: 148240 - DNA, 20 bp, synthetic construct
  source 1..20: mol_type = other DNA
ccacatgtcagacttttggg

SEQ ID NO: 148241 - DNA, 20 bp, synthetic construct
  source 1..20: mol_type = other DNA
cccacatgtcagacttttgg

SEQ ID NO: 148242 - DNA, 20 bp, synthetic construct
  source 1..20: mol_type = other DNA
ccccacatgtcagacttttg

SEQ ID NO: 148243 - DNA, 20 bp, synthetic construct
  source 1..20: mol_type = other DNA
cccccacatgtcagactttt

SEQ ID NO: 148244 - DNA, 20 bp, synthetic construct
  source 1..20: mol_type = other DNA
ccccccacatgtcagacttt

SEQ ID NO: 148245 - DNA, 20 bp, synthetic construct
  source 1..20: mol_type = other DNA
accccccacatgtcagactt

SEQ ID NO: 148246 - DNA, 20 bp, synthetic construct
  source 1..20: mol_type = other DNA
aaccccccacatgtcagact

SEQ ID NO: 148247 - DNA, 20 bp, synthetic construct
  source 1..20: mol_type = other DNA
taaccccccacatgtcagac

SEQ ID NO: 148248 - DNA, 20 bp, synthetic construct
  source 1..20: mol_type = other DNA
ataaccccccacatgtcaga

SEQ ID NO: 148249 - DNA, 20 bp, synthetic construct
  source 1..20: mol_type = other DNA
aataaccccccacatgtcag

SEQ ID NO: 148250 - DNA, 20 bp, synthetic construct
  source 1..20: mol_type = other DNA
taataaccccccacatgtca

SEQ ID NO: 148251 - DNA, 20 bp, synthetic construct
  source 1..20: mol_type = other DNA
gtaataaccccccacatgtc

SEQ ID NO: 148252 - DNA, 20 bp, synthetic construct
  source 1..20: mol_type = other DNA
ggtaataaccccccacatgt

SEQ ID NO: 148253 - DNA, 20 bp, synthetic construct
  source 1..20: mol_type = other DNA
tggtaataaccccccacatg

SEQ ID NO: 148254 - DNA, 20 bp, synthetic construct
  source 1..20: mol_type = other DNA
atggtaataaccccccacat

SEQ ID NO: 148255 - DNA, 20 bp, synthetic construct
  source 1..20: mol_type = other DNA
catggtaataaccccccaca

SEQ ID NO: 148256 - DNA, 20 bp, synthetic construct
  source 1..20: mol_type = other DNA
ccatggtaataaccccccac

SEQ ID NO: 148257 - DNA, 20 bp, synthetic construct
  source 1..20: mol_type = other DNA
gccatggtaataacccccca

SEQ ID NO: 148258 - DNA, 20 bp, synthetic construct
  source 1..20: mol_type = other DNA
tgccatggtaataacccccc

SEQ ID NO: 148259 - DNA, 20 bp, synthetic construct
  source 1..20: mol_type = other DNA
ctgccatggtaataaccccc

SEQ ID NO: 148260 - DNA, 20 bp, synthetic construct
  source 1..20: mol_type = other DNA
tctgccatggtaataacccc

SEQ ID NO: 148261 - DNA, 20 bp, synthetic construct
  source 1..20: mol_type = other DNA
ctctgccatggtaataaccc

SEQ ID NO: 148262 - DNA, 20 bp, synthetic construct
  source 1..20: mol_type = other DNA
actctgccatggtaataacc

SEQ ID NO: 148263 - DNA, 20 bp, synthetic construct
  source 1..20: mol_type = other DNA
aactctgccatggtaataac

SEQ ID NO: 148264 - DNA, 20 bp, synthetic construct
  source 1..20: mol_type = other DNA
aaactctgccatggtaataa

SEQ ID NO: 148265 - DNA, 20 bp, synthetic construct
  source 1..20: mol_type = other DNA
caaactctgccatggtaata

SEQ ID NO: 148266 - DNA, 20 bp, synthetic construct
  source 1..20: mol_type = other DNA
tcaaactctgccatggtaat

SEQ ID NO: 148267 - DNA, 20 bp, synthetic construct
  source 1..20: mol_type = other DNA
atcaaactctgccatggtaa

SEQ ID NO: 148268 - DNA, 20 bp, synthetic construct
  source 1..20: mol_type = other DNA
aatcaaactctgccatggta

SEQ ID NO: 148269 - DNA, 20 bp, synthetic construct
  source 1..20: mol_type = other DNA
caatcaaactctgccatggt

SEQ ID NO: 148270 - DNA, 20 bp, synthetic construct
  source 1..20: mol_type = other DNA
acaatcaaactctgccatgg

SEQ ID NO: 148271 - DNA, 20 bp, synthetic construct
  source 1..20: mol_type = other DNA
tacaatcaaactctgccatg

SEQ ID NO: 148272 - DNA, 20 bp, synthetic construct
  source 1..20: mol_type = other DNA
ctacaatcaaactctgccat

SEQ ID NO: 148273 - DNA, 20 bp, synthetic construct
  source 1..20: mol_type = other DNA
gctacaatcaaactctgcca

SEQ ID NO: 148274 - DNA, 20 bp, synthetic construct
  source 1..20: mol_type = other DNA
agctacaatcaaactctgcc

SEQ ID NO: 148275 - DNA, 20 bp, synthetic construct
  source 1..20: mol_type = other DNA
gagctacaatcaaactctgc

SEQ ID NO: 148276 - DNA, 20 bp, synthetic construct
  source 1..20: mol_type = other DNA
agagctacaatcaaactctg

SEQ ID NO: 148277 - DNA, 20 bp, synthetic construct
  source 1..20: mol_type = other DNA
cagagctacaatcaaactct

SEQ ID NO: 148278 - DNA, 20 bp, synthetic construct
  source 1..20: mol_type = other DNA
ccagagctacaatcaaactc

SEQ ID NO: 148279 - DNA, 20 bp, synthetic construct
  source 1..20: mol_type = other DNA
tccagagctacaatcaaact

SEQ ID NO: 148280 - DNA, 20 bp, synthetic construct
  source 1..20: mol_type = other DNA
ctccagagctacaatcaaac

SEQ ID NO: 148281 - DNA, 20 bp, synthetic construct
  source 1..20: mol_type = other DNA
tctccagagctacaatcaaa

SEQ ID NO: 148282 - DNA, 20 bp, synthetic construct
  source 1..20: mol_type = other DNA
ttctccagagctacaatcaa

SEQ ID NO: 148283 - DNA, 20 bp, synthetic construct
  source 1..20: mol_type = other DNA
cttctccagagctacaatca

SEQ ID NO: 148284 - DNA, 20 bp, synthetic construct
  source 1..20: mol_type = other DNA
tcttctccagagctacaatc

SEQ ID NO: 148285 - DNA, 20 bp, synthetic construct
  source 1..20: mol_type = other DNA
atcttctccagagctacaat

SEQ ID NO: 148286 - DNA, 20 bp, synthetic construct
  source 1..20: mol_type = other DNA
tatcttctccagagctacaa

SEQ ID NO: 148287 - DNA, 20 bp, synthetic construct
  source 1..20: mol_type = other DNA
gtatcttctccagagctaca

SEQ ID NO: 148288 - DNA, 20 bp, synthetic construct
  source 1..20: mol_type = other DNA
agtatcttctccagagctac

SEQ ID NO: 148289 - DNA, 20 bp, synthetic construct
  source 1..20: mol_type = other DNA
cagtatcttctccagagcta

SEQ ID NO: 148290 - DNA, 20 bp, synthetic construct
  source 1..20: mol_type = other DNA
gcagtatcttctccagagct

SEQ ID NO: 148291 - DNA, 20 bp, synthetic construct
  source 1..20: mol_type = other DNA
agcagtatcttctccagagc

SEQ ID NO: 148292 - DNA, 20 bp, synthetic construct
  source 1..20: mol_type = other DNA
cagcagtatcttctccagag

SEQ ID NO: 148293 - DNA, 20 bp, synthetic construct
  source 1..20: mol_type = other DNA
tcagcagtatcttctccaga

SEQ ID NO: 148294 - DNA, 20 bp, synthetic construct
  source 1..20: mol_type = other DNA
ctcagcagtatcttctccag

SEQ ID NO: 148295 - DNA, 20 bp, synthetic construct
  source 1..20: mol_type = other DNA
tctcagcagtatcttctcca

SEQ ID NO: 148296 - DNA, 20 bp, synthetic construct
  source 1..20: mol_type = other DNA
ttctcagcagtatcttctcc

SEQ ID NO: 148297 - DNA, 20 bp, synthetic construct
  source 1..20: mol_type = other DNA
tttctcagcagtatcttctc

SEQ ID NO: 148298 - DNA, 20 bp, synthetic construct
  source 1..20: mol_type = other DNA
ctttctcagcagtatcttct

SEQ ID NO: 148299 - DNA, 20 bp, synthetic construct
  source 1..20: mol_type = other DNA
gctttctcagcagtatcttc

SEQ ID NO: 148300 - DNA, 20 bp, synthetic construct
  source 1..20: mol_type = other DNA
cgctttctcagcagtatctt

SEQ ID NO: 148301 - DNA, 20 bp, synthetic construct
  source 1..20: mol_type = other DNA
gcgctttctcagcagtatct

SEQ ID NO: 148302 - DNA, 20 bp, synthetic construct
  source 1..20: mol_type = other DNA
agcgctttctcagcagtatc

SEQ ID NO: 148303 - DNA, 20 bp, synthetic construct
  source 1..20: mol_type = other DNA
cagcgctttctcagcagtat

SEQ ID NO: 148304 - DNA, 20 bp, synthetic construct
  source 1..20: mol_type = other DNA
acagcgctttctcagcagta

SEQ ID NO: 148305 - DNA, 20 bp, synthetic construct
  source 1..20: mol_type = other DNA
cacagcgctttctcagcagt

SEQ ID NO: 148306 - DNA, 20 bp, synthetic construct
  source 1..20: mol_type = other DNA
ccacagcgctttctcagcag

SEQ ID NO: 148307 - DNA, 20 bp, synthetic construct
  source 1..20: mol_type = other DNA
tccacagcgctttctcagca

SEQ ID NO: 148308 - DNA, 20 bp, synthetic construct
  source 1..20: mol_type = other DNA
atccacagcgctttctcagc

SEQ ID NO: 148309 - DNA, 20 bp, synthetic construct
  source 1..20: mol_type = other DNA
catccacagcgctttctcag

SEQ ID NO: 148310 - DNA, 20 bp, synthetic construct
  source 1..20: mol_type = other DNA
ccatccacagcgctttctca

SEQ ID NO: 148311 - DNA, 20 bp, synthetic construct
  source 1..20: mol_type = other DNA
tccatccacagcgctttctc

SEQ ID NO: 148312 - DNA, 20 bp, synthetic construct
  source 1..20: mol_type = other DNA
gtccatccacagcgctttct

SEQ ID NO: 148313 - DNA, 20 bp, synthetic construct
  source 1..20: mol_type = other DNA
agtccatccacagcgctttc

SEQ ID NO: 148314 - DNA, 20 bp, synthetic construct
  source 1..20: mol_type = other DNA
cagtccatccacagcgcttt

SEQ ID NO: 148315 - DNA, 20 bp, synthetic construct
  source 1..20: mol_type = other DNA
ccagtccatccacagcgctt

SEQ ID NO: 148316 - DNA, 20 bp, synthetic construct
  source 1..20: mol_type = other DNA
gccagtccatccacagcgct

SEQ ID NO: 148317 - DNA, 20 bp, synthetic construct
  source 1..20: mol_type = other DNA
agccagtccatccacagcgc

SEQ ID NO: 148318 - DNA, 20 bp, synthetic construct
  source 1..20: mol_type = other DNA
aagccagtccatccacagcg

SEQ ID NO: 148319 - DNA, 20 bp, synthetic construct
  source 1..20: mol_type = other DNA
aaagccagtccatccacagc

SEQ ID NO: 148320 - DNA, 20 bp, synthetic construct
  source 1..20: mol_type = other DNA
caaagccagtccatccacag

SEQ ID NO: 148321 - DNA, 20 bp, synthetic construct
  source 1..20: mol_type = other DNA
tcaaagccagtccatccaca

SEQ ID NO: 148322 - DNA, 20 bp, synthetic construct
  source 1..20: mol_type = other DNA
ctcaaagccagtccatccac

SEQ ID NO: 148323 - DNA, 20 bp, synthetic construct
  source 1..20: mol_type = other DNA
actcaaagccagtccatcca

SEQ ID NO: 148324 - DNA, 20 bp, synthetic construct
  source 1..20: mol_type = other DNA
cactcaaagccagtccatcc

SEQ ID NO: 148325 - DNA, 20 bp, synthetic construct
  source 1..20: mol_type = other DNA
acactcaaagccagtccatc

SEQ ID NO: 148326 - DNA, 20 bp, synthetic construct
  source 1..20: mol_type = other DNA
tacactcaaagccagtccat

SEQ ID NO: 148327 - DNA, 20 bp, synthetic construct
  source 1..20: mol_type = other DNA
ctacactcaaagccagtcca

SEQ ID NO: 148328 - DNA, 20 bp, synthetic construct
  source 1..20: mol_type = other DNA
gctacactcaaagccagtcc

SEQ ID NO: 148329 - DNA, 20 bp, synthetic construct
  source 1..20: mol_type = other DNA
cgctacactcaaagccagtc

SEQ ID NO: 148330 - DNA, 20 bp, synthetic construct
  source 1..20: mol_type = other DNA
acgctacactcaaagccagt

SEQ ID NO: 148331 - DNA, 20 bp, synthetic construct
  source 1..20: mol_type = other DNA
aacgctacactcaaagccag

SEQ ID NO: 148332 - DNA, 20 bp, synthetic construct
  source 1..20: mol_type = other DNA
taacgctacactcaaagcca

SEQ ID NO: 148333 - DNA, 20 bp, synthetic construct
  source 1..20: mol_type = other DNA
ctaacgctacactcaaagcc

SEQ ID NO: 148334 - DNA, 20 bp, synthetic construct
  source 1..20: mol_type = other DNA
gctaacgctacactcaaagc

SEQ ID NO: 148335 - DNA, 20 bp, synthetic construct
  source 1..20: mol_type = other DNA
ggctaacgctacactcaaag

SEQ ID NO: 148336 - DNA, 20 bp, synthetic construct
  source 1..20: mol_type = other DNA
gggctaacgctacactcaaa

SEQ ID NO: 148337 - DNA, 20 bp, synthetic construct
  source 1..20: mol_type = other DNA
ggggctaacgctacactcaa

SEQ ID NO: 148338 - DNA, 20 bp, synthetic construct
  source 1..20: mol_type = other DNA
tggggctaacgctacactca

SEQ ID NO: 148339 - DNA, 20 bp, synthetic construct
  source 1..20: mol_type = other DNA
ctggggctaacgctacactc

SEQ ID NO: 148340 - DNA, 20 bp, synthetic construct
  source 1..20: mol_type = other DNA
gctggggctaacgctacact

SEQ ID NO: 148341 - DNA, 20 bp, synthetic construct
  source 1..20: mol_type = other DNA
ggctggggctaacgctacac

SEQ ID NO: 148342 - DNA, 20 bp, synthetic construct
  source 1..20: mol_type = other DNA
gggctggggctaacgctaca

SEQ ID NO: 148343 - DNA, 20 bp, synthetic construct
  source 1..20: mol_type = other DNA
ggggctggggctaacgctac

SEQ ID NO: 148344 - DNA, 20 bp, synthetic construct
  source 1..20: mol_type = other DNA
aggggctggggctaacgcta

SEQ ID NO: 148345 - DNA, 20 bp, synthetic construct
  source 1..20: mol_type = other DNA
caggggctggggctaacgct

SEQ ID NO: 148346 - DNA, 20 bp, synthetic construct
  source 1..20: mol_type = other DNA
tcaggggctggggctaacgc

SEQ ID NO: 148347 - DNA, 20 bp, synthetic construct
  source 1..20: mol_type = other DNA
ttcaggggctggggctaacg

SEQ ID NO: 148348 - DNA, 20 bp, synthetic construct
  source 1..20: mol_type = other DNA
gttcaggggctggggctaac

SEQ ID NO: 148349 - DNA, 20 bp, synthetic construct
  source 1..20: mol_type = other DNA
tgttcaggggctggggctaa

SEQ ID NO: 148350 - DNA, 20 bp, synthetic construct
  source 1..20: mol_type = other DNA
ctgttcaggggctggggcta

SEQ ID NO: 148351 - DNA, 20 bp, synthetic construct
  source 1..20: mol_type = other DNA
cctgttcaggggctggggct

SEQ ID NO: 148352 - DNA, 20 bp, synthetic construct
  source 1..20: mol_type = other DNA
ccctgttcaggggctggggc

SEQ ID NO: 148353 - DNA, 20 bp, synthetic construct
  source 1..20: mol_type = other DNA
cccctgttcaggggctgggg

SEQ ID NO: 148354 - DNA, 20 bp, synthetic construct
  source 1..20: mol_type = other DNA
tcccctgttcaggggctggg

SEQ ID NO: 148355 - DNA, 20 bp, synthetic construct
  source 1..20: mol_type = other DNA
ctcccctgttcaggggctgg

SEQ ID NO: 148356 - DNA, 20 bp, synthetic construct
  source 1..20: mol_type = other DNA
tctcccctgttcaggggctg

SEQ ID NO: 148357 - DNA, 20 bp, synthetic construct
  source 1..20: mol_type = other DNA
ctctcccctgttcaggggct

SEQ ID NO: 148358 - DNA, 20 bp, synthetic construct
  source 1..20: mol_type = other DNA
gctctcccctgttcaggggc

SEQ ID NO: 148359 - DNA, 20 bp, synthetic construct
  source 1..20: mol_type = other DNA
cgctctcccctgttcagggg

SEQ ID NO: 148360 - DNA, 20 bp, synthetic construct
  source 1..20: mol_type = other DNA
gcgctctcccctgttcaggg

SEQ ID NO: 148361 - DNA, 20 bp, synthetic construct
  source 1..20: mol_type = other DNA
ggcgctctcccctgttcagg

SEQ ID NO: 148362 - DNA, 20 bp, synthetic construct
  source 1..20: mol_type = other DNA
gggcgctctcccctgttcag

SEQ ID NO: 148363 - DNA, 20 bp, synthetic construct
  source 1..20: mol_type = other DNA
agggcgctctcccctgttca

SEQ ID NO: 148364 - DNA, 20 bp, synthetic construct
  source 1..20: mol_type = other DNA
cagggcgctctcccctgttc

SEQ ID NO: 148365 - DNA, 20 bp, synthetic construct
  source 1..20: mol_type = other DNA
acagggcgctctcccctgtt

SEQ ID NO: 148366 - DNA, 20 bp, synthetic construct
  source 1..20: mol_type = other DNA
cacagggcgctctcccctgt

SEQ ID NO: 148367 - DNA, 20 bp, synthetic construct
  source 1..20: mol_type = other DNA
tcacagggcgctctcccctg

SEQ ID NO: 148368 - DNA, 20 bp, synthetic construct
  source 1..20: mol_type = other DNA
atcacagggcgctctcccct

SEQ ID NO: 148369 - DNA, 20 bp, synthetic construct
  source 1..20: mol_type = other DNA
aatcacagggcgctctcccc

SEQ ID NO: 148370 - DNA, 20 bp, synthetic construct
  source 1..20: mol_type = other DNA
caatcacagggcgctctccc

SEQ ID NO: 148371 - DNA, 20 bp, synthetic construct
  source 1..20: mol_type = other DNA
acaatcacagggcgctctcc

SEQ ID NO: 148372 - DNA, 20 bp, synthetic construct
  source 1..20: mol_type = other DNA
cacaatcacagggcgctctc

SEQ ID NO: 148373 - DNA, 20 bp, synthetic construct
  source 1..20: mol_type = other DNA
gcacaatcacagggcgctct

SEQ ID NO: 148374 - DNA, 20 bp, synthetic construct
  source 1..20: mol_type = other DNA
agcacaatcacagggcgctc

SEQ ID NO: 148375 - DNA, 20 bp, synthetic construct
  source 1..20: mol_type = other DNA
gagcacaatcacagggcgct

SEQ ID NO: 148376 - DNA, 20 bp, synthetic construct
  source 1..20: mol_type = other DNA
agagcacaatcacagggcgc

SEQ ID NO: 148377 - DNA, 20 bp, synthetic construct
  source 1..20: mol_type = other DNA
tagagcacaatcacagggcg

SEQ ID NO: 148378 - DNA, 20 bp, synthetic construct
  source 1..20: mol_type = other DNA
gtagagcacaatcacagggc

SEQ ID NO: 148379 - DNA, 20 bp, synthetic construct
  source 1..20: mol_type = other DNA
agtagagcacaatcacaggg

SEQ ID NO: 148380 - DNA, 20 bp, synthetic construct
  source 1..20: mol_type = other DNA
tagtagagcacaatcacagg

SEQ ID NO: 148381 - DNA, 20 bp, synthetic construct
  source 1..20: mol_type = other DNA
gtagtagagcacaatcacag

SEQ ID NO: 148382 - DNA, 20 bp, synthetic construct
  source 1..20: mol_type = other DNA
agtagtagagcacaatcaca

SEQ ID NO: 148383 - DNA, 20 bp, synthetic construct
  source 1..20: mol_type = other DNA
aagtagtagagcacaatcac

SEQ ID NO: 148384 - DNA, 20 bp, synthetic construct
  source 1..20: mol_type = other DNA
caagtagtagagcacaatca

SEQ ID NO: 148385 - DNA, 20 bp, synthetic construct
  source 1..20: mol_type = other DNA
tcaagtagtagagcacaatc

SEQ ID NO: 148386 - DNA, 20 bp, synthetic construct
  source 1..20: mol_type = other DNA
atcaagtagtagagcacaat

SEQ ID NO: 148387 - DNA, 20 bp, synthetic construct
  source 1..20: mol_type = other DNA
catcaagtagtagagcacaa

SEQ ID NO: 148388 - DNA, 20 bp, synthetic construct
  source 1..20: mol_type = other DNA
ccatcaagtagtagagcaca

SEQ ID NO: 148389 - DNA, 20 bp, synthetic construct
  source 1..20: mol_type = other DNA
gccatcaagtagtagagcac

SEQ ID NO: 148390 - DNA, 20 bp, synthetic construct
  source 1..20: mol_type = other DNA
agccatcaagtagtagagca

SEQ ID NO: 148391 - DNA, 20 bp, synthetic construct
  source 1..20: mol_type = other DNA
cagccatcaagtagtagagc

SEQ ID NO: 148392 - DNA, 20 bp, synthetic construct
  source 1..20: mol_type = other DNA
gcagccatcaagtagtagag

SEQ ID NO: 148393 - DNA, 20 bp, synthetic construct
  source 1..20: mol_type = other DNA
ggcagccatcaagtagtaga

SEQ ID NO: 148394 - DNA, 20 bp, synthetic construct
  source 1..20: mol_type = other DNA
tggcagccatcaagtagtag

SEQ ID NO: 148395 - DNA, 20 bp, synthetic construct
  source 1..20: mol_type = other DNA
atggcagccatcaagtagta

SEQ ID NO: 148396 - DNA, 20 bp, synthetic construct
  source 1..20: mol_type = other DNA
catggcagccatcaagtagt

SEQ ID NO: 148397 - DNA, 20 bp, synthetic construct
  source 1..20: mol_type = other DNA
ccatggcagccatcaagtag

SEQ ID NO: 148398 - DNA, 20 bp, synthetic construct
  source 1..20: mol_type = other DNA
gccatggcagccatcaagta

SEQ ID NO: 148399 - DNA, 20 bp, synthetic construct
  source 1..20: mol_type = other DNA
cgccatggcagccatcaagt

SEQ ID NO: 148400 - DNA, 20 bp, synthetic construct
  source 1..20: mol_type = other DNA
tcgccatggcagccatcaag

SEQ ID NO: 148401 - DNA, 20 bp, synthetic construct
  source 1..20: mol_type = other DNA
atcgccatggcagccatcaa

SEQ ID NO: 148402 - DNA, 20 bp, synthetic construct
  source 1..20: mol_type = other DNA
tatcgccatggcagccatca

SEQ ID NO: 148403 - DNA, 20 bp, synthetic construct
  source 1..20: mol_type = other DNA
gtatcgccatggcagccatc

SEQ ID NO: 148404 - DNA, 20 bp, synthetic construct
  source 1..20: mol_type = other DNA
agtatcgccatggcagccat

SEQ ID NO: 148405 - DNA, 20 bp, synthetic construct
  source 1..20: mol_type = other DNA
aagtatcgccatggcagcca

SEQ ID NO: 148406 - DNA, 20 bp, synthetic construct
  source 1..20: mol_type = other DNA
gaagtatcgccatggcagcc

SEQ ID NO: 148407 - DNA, 20 bp, synthetic construct
  source 1..20: mol_type = other DNA
tgaagtatcgccatggcagc

SEQ ID NO: 148408 - DNA, 20 bp, synthetic construct
  source 1..20: mol_type = other DNA
gtgaagtatcgccatggcag

SEQ ID NO: 148409 - DNA, 20 bp, synthetic construct
  source 1..20: mol_type = other DNA
tgtgaagtatcgccatggca

SEQ ID NO: 148410 - DNA, 20 bp, synthetic construct
  source 1..20: mol_type = other DNA
ctgtgaagtatcgccatggc

SEQ ID NO: 148411 - DNA, 20 bp, synthetic construct
  source 1..20: mol_type = other DNA
actgtgaagtatcgccatgg

SEQ ID NO: 148412 - DNA, 20 bp, synthetic construct
  source 1..20: mol_type = other DNA
gactgtgaagtatcgccatg

SEQ ID NO: 148413 - DNA, 20 bp, synthetic construct
  source 1..20: mol_type = other DNA
agactgtgaagtatcgccat

SEQ ID NO: 148414 - DNA, 20 bp, synthetic construct
  source 1..20: mol_type = other DNA
cagactgtgaagtatcgcca

SEQ ID NO: 148415 - DNA, 20 bp, synthetic construct
  source 1..20: mol_type = other DNA
tcagactgtgaagtatcgcc

SEQ ID NO: 148416 - DNA, 20 bp, synthetic construct
  source 1..20: mol_type = other DNA
gtcagactgtgaagtatcgc

SEQ ID NO: 148417 - DNA, 20 bp, synthetic construct
  source 1..20: mol_type = other DNA
ggtcagactgtgaagtatcg

SEQ ID NO: 148418 - DNA, 20 bp, synthetic construct
  source 1..20: mol_type = other DNA
aggtcagactgtgaagtatc

SEQ ID NO: 148419 - DNA, 20 bp, synthetic construct
  source 1..20: mol_type = other DNA
caggtcagactgtgaagtat

SEQ ID NO: 148420 - DNA, 20 bp, synthetic construct
  source 1..20: mol_type = other DNA
acaggtcagactgtgaagta

SEQ ID NO: 148421 - DNA, 20 bp, synthetic construct
  source 1..20: mol_type = other DNA
aacaggtcagactgtgaagt

SEQ ID NO: 148422 - DNA, 20 bp, synthetic construct
  source 1..20: mol_type = other DNA
taacaggtcagactgtgaag

SEQ ID NO: 148423 - DNA, 20 bp, synthetic construct
  source 1..20: mol_type = other DNA
ataacaggtcagactgtgaa

SEQ ID NO: 148424 - DNA, 20 bp, synthetic construct
  source 1..20: mol_type = other DNA
aataacaggtcagactgtga

SEQ ID NO: 148425 - DNA, 20 bp, synthetic construct
  source 1..20: mol_type = other DNA
gaataacaggtcagactgtg

SEQ ID NO: 148426 - DNA, 20 bp, synthetic construct
  source 1..20: mol_type = other DNA
agaataacaggtcagactgt

SEQ ID NO: 148427 - DNA, 20 bp, synthetic construct
  source 1..20: mol_type = other DNA
cagaataacaggtcagactg

SEQ ID NO: 148428 - DNA, 20 bp, synthetic construct
  source 1..20: mol_type = other DNA
tcagaataacaggtcagact

SEQ ID NO: 148429 - DNA, 20 bp, synthetic construct
  source 1..20: mol_type = other DNA
ttcagaataacaggtcagac

SEQ ID NO: 148430 - DNA, 20 bp, synthetic construct
  source 1..20: mol_type = other DNA
tttcagaataacaggtcaga

SEQ ID NO: 148431 - DNA, 20 bp, synthetic construct
  source 1..20: mol_type = other DNA
ctttcagaataacaggtcag

SEQ ID NO: 148432 - DNA, 20 bp, synthetic construct
  source 1..20: mol_type = other DNA
gctttcagaataacaggtca

SEQ ID NO: 148433 - DNA, 20 bp, synthetic construct
  source 1..20: mol_type = other DNA
tgctttcagaataacaggtc

SEQ ID NO: 148434 - DNA, 20 bp, synthetic construct
  source 1..20: mol_type = other DNA
ttgctttcagaataacaggt

SEQ ID NO: 148435 - DNA, 20 bp, synthetic construct
  source 1..20: mol_type = other DNA
attgctttcagaataacagg

SEQ ID NO: 148436 - DNA, 20 bp, synthetic construct
  source 1..20: mol_type = other DNA
tattgctttcagaataacag

SEQ ID NO: 148437 - DNA, 20 bp, synthetic construct
  source 1..20: mol_type = other DNA
gtattgctttcagaataaca

SEQ ID NO: 148438 - DNA, 20 bp, synthetic construct
  source 1..20: mol_type = other DNA
agtattgctttcagaataac

SEQ ID NO: 148439 - DNA, 20 bp, synthetic construct
  source 1..20: mol_type = other DNA
cagtattgctttcagaataa

SEQ ID NO: 148440 - DNA, 20 bp, synthetic construct
  source 1..20: mol_type = other DNA
ccagtattgctttcagaata

SEQ ID NO: 148441 - DNA, 20 bp, synthetic construct
  source 1..20: mol_type = other DNA
accagtattgctttcagaat

SEQ ID NO: 148442 - DNA, 20 bp, synthetic construct
  source 1..20: mol_type = other DNA
caccagtattgctttcagaa

SEQ ID NO: 148443 - DNA, 20 bp, synthetic construct
  source 1..20: mol_type = other DNA
gcaccagtattgctttcaga

SEQ ID NO: 148444 - DNA, 20 bp, synthetic construct
  source 1..20: mol_type = other DNA
agcaccagtattgctttcag

SEQ ID NO: 148445 - DNA, 20 bp, synthetic construct
  source 1..20: mol_type = other DNA
aagcaccagtattgctttca

SEQ ID NO: 148446 - DNA, 20 bp, synthetic construct
  source 1..20: mol_type = other DNA
caagcaccagtattgctttc

SEQ ID NO: 148447 - DNA, 20 bp, synthetic construct
  source 1..20: mol_type = other DNA
ccaagcaccagtattgcttt

SEQ ID NO: 148448 - DNA, 20 bp, synthetic construct
  source 1..20: mol_type = other DNA
gccaagcaccagtattgctt

SEQ ID NO: 148449 - DNA, 20 bp, synthetic construct
  source 1..20: mol_type = other DNA
agccaagcaccagtattgct

SEQ ID NO: 148450 - DNA, 20 bp, synthetic construct
  source 1..20: mol_type = other DNA
tagccaagcaccagtattgc

SEQ ID NO: 148451 - DNA, 20 bp, synthetic construct
  source 1..20: mol_type = other DNA
ttagccaagcaccagtattg

SEQ ID NO: 148452 - DNA, 20 bp, synthetic construct
  source 1..20: mol_type = other DNA
attagccaagcaccagtatt

SEQ ID NO: 148453 - DNA, 20 bp, synthetic construct
  source 1..20: mol_type = other DNA
tattagccaagcaccagtat

SEQ ID NO: 148454 - DNA, 20 bp, synthetic construct
  source 1..20: mol_type = other DNA
atattagccaagcaccagta

SEQ ID NO: 148455 - DNA, 20 bp, synthetic construct
  source 1..20: mol_type = other DNA
aatattagccaagcaccagt

SEQ ID NO: 148456 - DNA, 20 bp, synthetic construct
  source 1..20: mol_type = other DNA
aaatattagccaagcaccag

SEQ ID NO: 148457 - DNA, 20 bp, synthetic construct
  source 1..20: mol_type = other DNA
caaatattagccaagcacca

SEQ ID NO: 148458 - DNA, 20 bp, synthetic construct
  source 1..20: mol_type = other DNA
ccaaatattagccaagcacc

SEQ ID NO: 148459 - DNA, 20 bp, synthetic construct
  source 1..20: mol_type = other DNA
cccaaatattagccaagcac

SEQ ID NO: 148460 - DNA, 20 bp, synthetic construct
  source 1..20: mol_type = other DNA
ccccaaatattagccaagca

SEQ ID NO: 148461 - DNA, 20 bp, synthetic construct
  source 1..20: mol_type = other DNA
tccccaaatattagccaagc

SEQ ID NO: 148462 - DNA, 20 bp, synthetic construct
  source 1..20: mol_type = other DNA
ctccccaaatattagccaag

SEQ ID NO: 148463 - DNA, 20 bp, synthetic construct
  source 1..20: mol_type = other DNA
cctccccaaatattagccaa

SEQ ID NO: 148464 - DNA, 20 bp, synthetic construct
  source 1..20: mol_type = other DNA
ccctccccaaatattagcca

SEQ ID NO: 148465 - DNA, 20 bp, synthetic construct
  source 1..20: mol_type = other DNA
cccctccccaaatattagcc

SEQ ID NO: 148466 - DNA, 20 bp, synthetic construct
  source 1..20: mol_type = other DNA
ccccctccccaaatattagc

SEQ ID NO: 148467 - DNA, 20 bp, synthetic construct
  source 1..20: mol_type = other DNA
accccctccccaaatattag

SEQ ID NO: 148468 - DNA, 20 bp, synthetic construct
  source 1..20: mol_type = other DNA
aaccccctccccaaatatta

SEQ ID NO: 148469 - DNA, 20 bp, synthetic construct
  source 1..20: mol_type = other DNA
aaaccccctccccaaatatt

SEQ ID NO: 148470 - DNA, 20 bp, synthetic construct
  source 1..20: mol_type = other DNA
caaaccccctccccaaatat

SEQ ID NO: 148471 - DNA, 20 bp, synthetic construct
  source 1..20: mol_type = other DNA
acaaaccccctccccaaata

SEQ ID NO: 148472 - DNA, 20 bp, synthetic construct
  source 1..20: mol_type = other DNA
aacaaaccccctccccaaat

SEQ ID NO: 148473 - DNA, 20 bp, synthetic construct
  source 1..20: mol_type = other DNA
taacaaaccccctccccaaa

SEQ ID NO: 148474 - DNA, 20 bp, synthetic construct
  source 1..20: mol_type = other DNA
ttaacaaaccccctccccaa

SEQ ID NO: 148475 - DNA, 20 bp, synthetic construct
  source 1..20: mol_type = other DNA
cttaacaaaccccctcccca

SEQ ID NO: 148476 - DNA, 20 bp, synthetic construct
  source 1..20: mol_type = other DNA
ccttaacaaaccccctcccc

SEQ ID NO: 148477 - DNA, 20 bp, synthetic construct
  source 1..20: mol_type = other DNA
gccttaacaaaccccctccc

SEQ ID NO: 148478 - DNA, 20 bp, synthetic construct
  source 1..20: mol_type = other DNA
ggccttaacaaaccccctcc

SEQ ID NO: 148479 - DNA, 20 bp, synthetic construct
  source 1..20: mol_type = other DNA
aggccttaacaaaccccctc

SEQ ID NO: 148480 - DNA, 20 bp, synthetic construct
  source 1..20: mol_type = other DNA
aaggccttaacaaaccccct

SEQ ID NO: 148481 - DNA, 20 bp, synthetic construct
  source 1..20: mol_type = other DNA
aaaggccttaacaaaccccc

SEQ ID NO: 148482 - DNA, 20 bp, synthetic construct
  source 1..20: mol_type = other DNA
aaaaggccttaacaaacccc

SEQ ID NO: 148483 - DNA, 20 bp, synthetic construct
  source 1..20: mol_type = other DNA
aaaaaggccttaacaaaccc

SEQ ID NO: 148484 - DNA, 20 bp, synthetic construct
  source 1..20: mol_type = other DNA
aaaaaaggccttaacaaacc

SEQ ID NO: 148485 - DNA, 20 bp, synthetic construct
  source 1..20: mol_type = other DNA
aaaaaaaggccttaacaaac

SEQ ID NO: 148486 - DNA, 20 bp, synthetic construct
  source 1..20: mol_type = other DNA
gaaaaaaaggccttaacaaa

SEQ ID NO: 148487 - DNA, 20 bp, synthetic construct
  source 1..20: mol_type = other DNA
agaaaaaaaggccttaacaa

SEQ ID NO: 148488 - DNA, 20 bp, synthetic construct
  source 1..20: mol_type = other DNA
tagaaaaaaaggccttaaca

SEQ ID NO: 148489 - DNA, 20 bp, synthetic construct
  source 1..20: mol_type = other DNA
gtagaaaaaaaggccttaac

SEQ ID NO: 148490 - DNA, 20 bp, synthetic construct
  source 1..20: mol_type = other DNA
ggtagaaaaaaaggccttaa

SEQ ID NO: 148491 - DNA, 20 bp, synthetic construct
  source 1..20: mol_type = other DNA
gggtagaaaaaaaggcctta

SEQ ID NO: 148492 - DNA, 20 bp, synthetic construct
  source 1..20: mol_type = other DNA
ggggtagaaaaaaaggcctt

SEQ ID NO: 148493 - DNA, 20 bp, synthetic construct
  source 1..20: mol_type = other DNA
tggggtagaaaaaaaggcct

SEQ ID NO: 148494 - DNA, 20 bp, synthetic construct
  source 1..20: mol_type = other DNA
atggggtagaaaaaaaggcc

SEQ ID NO: 148495 - DNA, 20 bp, synthetic construct
  source 1..20: mol_type = other DNA
catggggtagaaaaaaaggc

SEQ ID NO: 148496 - DNA, 20 bp, synthetic construct
  source 1..20: mol_type = other DNA
tcatggggtagaaaaaaagg

SEQ ID NO: 148497 - DNA, 20 bp, synthetic construct
  source 1..20: mol_type = other DNA
ttcatggggtagaaaaaaag

SEQ ID NO: 148498 - DNA, 20 bp, synthetic construct
  source 1..20: mol_type = other DNA
gttcatggggtagaaaaaaa

SEQ ID NO: 148499 - DNA, 20 bp, synthetic construct
  source 1..20: mol_type = other DNA
tgttcatggggtagaaaaaa

SEQ ID NO: 148500 - DNA, 20 bp, synthetic construct
  source 1..20: mol_type = other DNA
ttgttcatggggtagaaaaa

SEQ ID NO: 148501 - DNA, 20 bp, synthetic construct
  source 1..20: mol_type = other DNA
cttgttcatggggtagaaaa

SEQ ID NO: 148502 - DNA, 20 bp, synthetic construct
  source 1..20: mol_type = other DNA
acttgttcatggggtagaaa

SEQ ID NO: 148503 - DNA, 20 bp, synthetic construct
  source 1..20: mol_type = other DNA
gacttgttcatggggtagaa

SEQ ID NO: 148504 - DNA, 20 bp, synthetic construct
  source 1..20: mol_type = other DNA
agacttgttcatggggtaga

SEQ ID NO: 148505 - DNA, 20 bp, synthetic construct
  source 1..20: mol_type = other DNA
aagacttgttcatggggtag

SEQ ID NO: 148506 - DNA, 20 bp, synthetic construct
  source 1..20: mol_type = other DNA
gaagacttgttcatggggta

SEQ ID NO: 148507 - DNA, 20 bp, synthetic construct
  source 1..20: mol_type = other DNA
agaagacttgttcatggggt

SEQ ID NO: 148508 - DNA, 20 bp, synthetic construct
  source 1..20: mol_type = other DNA
cagaagacttgttcatgggg

SEQ ID NO: 148509 - DNA, 20 bp, synthetic construct
  source 1..20: mol_type = other DNA
ccagaagacttgttcatggg

SEQ ID NO: 148510 - DNA, 20 bp, synthetic construct
  source 1..20: mol_type = other DNA
cccagaagacttgttcatgg

SEQ ID NO: 148511 - DNA, 20 bp, synthetic construct
  source 1..20: mol_type = other DNA
tcccagaagacttgttcatg

SEQ ID NO: 148512 - DNA, 20 bp, synthetic construct
  source 1..20: mol_type = other DNA
ctcccagaagacttgttcat

SEQ ID NO: 148513 - DNA, 20 bp, synthetic construct
  source 1..20: mol_type = other DNA
actcccagaagacttgttca

SEQ ID NO: 148514 - DNA, 20 bp, synthetic construct
  source 1..20: mol_type = other DNA
aactcccagaagacttgttc

SEQ ID NO: 148515 - DNA, 20 bp, synthetic construct
  source 1..20: mol_type = other DNA
aaactcccagaagacttgtt

SEQ ID NO: 148516 - DNA, 20 bp, synthetic construct
  source 1..20: mol_type = other DNA
aaaactcccagaagacttgt

SEQ ID NO: 148517 - DNA, 20 bp, synthetic construct
  source 1..20: mol_type = other DNA
taaaactcccagaagacttg

SEQ ID NO: 148518 - DNA, 20 bp, synthetic construct
  source 1..20: mol_type = other DNA
ataaaactcccagaagactt

SEQ ID NO: 148519 - DNA, 20 bp, synthetic construct
  source 1..20: mol_type = other DNA
gataaaactcccagaagact

SEQ ID NO: 148520 - DNA, 20 bp, synthetic construct
  source 1..20: mol_type = other DNA
agataaaactcccagaagac

SEQ ID NO: 148521 - DNA, 20 bp, synthetic construct
  source 1..20: mol_type = other DNA
cagataaaactcccagaaga

SEQ ID NO: 148522 - DNA, 20 bp, synthetic construct
  source 1..20: mol_type = other DNA
tcagataaaactcccagaag

SEQ ID NO: 148523 - DNA, 20 bp, synthetic construct
  source 1..20: mol_type = other DNA
ttcagataaaactcccagaa

SEQ ID NO: 148524 - DNA, 20 bp, synthetic construct
  source 1..20: mol_type = other DNA
cttcagataaaactcccaga

SEQ ID NO: 148525 - DNA, 20 bp, synthetic construct
  source 1..20: mol_type = other DNA
acttcagataaaactcccag

SEQ ID NO: 148526 - DNA, 20 bp, synthetic construct
  source 1..20: mol_type = other DNA
cacttcagataaaactccca

SEQ ID NO: 148527 - DNA, 20 bp, synthetic construct
  source 1..20: mol_type = other DNA
ccacttcagataaaactccc

SEQ ID NO: 148528 - DNA, 20 bp, synthetic construct
  source 1..20: mol_type = other DNA
accacttcagataaaactcc

SEQ ID NO: 148529 - DNA, 20 bp, synthetic construct
  source 1..20: mol_type = other DNA
aaccacttcagataaaactc

SEQ ID NO: 148530 - DNA, 20 bp, synthetic construct
  source 1..20: mol_type = other DNA
aaaccacttcagataaaact

SEQ ID NO: 148531 - DNA, 20 bp, synthetic construct
  source 1..20: mol_type = other DNA
aaaaccacttcagataaaac

SEQ ID NO: 148532 - DNA, 20 bp, synthetic construct
  source 1..20: mol_type = other DNA
taaaaccacttcagataaaa

SEQ ID NO: 148533 - DNA, 20 bp, synthetic construct
  source 1..20: mol_type = other DNA
gtaaaaccacttcagataaa

SEQ ID NO: 148534 - DNA, 20 bp, synthetic construct
  source 1..20: mol_type = other DNA
cgtaaaaccacttcagataa

SEQ ID NO: 148535 - DNA, 20 bp, synthetic construct
  source 1..20: mol_type = other DNA
acgtaaaaccacttcagata

SEQ ID NO: 148536 - DNA, 20 bp, synthetic construct
  source 1..20: mol_type = other DNA
gacgtaaaaccacttcagat

SEQ ID NO: 148537 - DNA, 20 bp, synthetic construct
  source 1..20: mol_type = other DNA
agacgtaaaaccacttcaga

SEQ ID NO: 148538 - DNA, 20 bp, synthetic construct
  source 1..20: mol_type = other DNA
cagacgtaaaaccacttcag

SEQ ID NO: 148539 - DNA, 20 bp, synthetic construct
  source 1..20: mol_type = other DNA
tcagacgtaaaaccacttca

SEQ ID NO: 148540 - DNA, 20 bp, synthetic construct
  source 1..20: mol_type = other DNA
gtcagacgtaaaaccacttc

SEQ ID NO: 148541 - DNA, 20 bp, synthetic construct
  source 1..20: mol_type = other DNA
agtcagacgtaaaaccactt

SEQ ID NO: 148542 - DNA, 20 bp, synthetic construct
  source 1..20: mol_type = other DNA
cagtcagacgtaaaaccact

SEQ ID NO: 148543 - DNA, 20 bp, synthetic construct
  source 1..20: mol_type = other DNA
ccagtcagacgtaaaaccac

SEQ ID NO: 148544 - DNA, 20 bp, synthetic construct
  source 1..20: mol_type = other DNA
accagtcagacgtaaaacca

SEQ ID NO: 148545 - DNA, 20 bp, synthetic construct
  source 1..20: mol_type = other DNA
aaccagtcagacgtaaaacc

SEQ ID NO: 148546 - DNA, 20 bp, synthetic construct
  source 1..20: mol_type = other DNA
aaaccagtcagacgtaaaac

SEQ ID NO: 148547 - DNA, 20 bp, synthetic construct
  source 1..20: mol_type = other DNA
caaaccagtcagacgtaaaa

SEQ ID NO: 148548 - DNA, 20 bp, synthetic construct
  source 1..20: mol_type = other DNA
acaaaccagtcagacgtaaa

SEQ ID NO: 148549 - DNA, 20 bp, synthetic construct
  source 1..20: mol_type = other DNA
aacaaaccagtcagacgtaa

SEQ ID NO: 148550 - DNA, 20 bp, synthetic construct
  source 1..20: mol_type = other DNA
aaacaaaccagtcagacgta

SEQ ID NO: 148551 - DNA, 20 bp, synthetic construct
  source 1..20: mol_type = other DNA
gaaacaaaccagtcagacgt

SEQ ID NO: 148552 - DNA, 20 bp, synthetic construct
  source 1..20: mol_type = other DNA
agaaacaaaccagtcagacg

SEQ ID NO: 148553 - DNA, 20 bp, synthetic construct
  source 1..20: mol_type = other DNA
tagaaacaaaccagtcagac

SEQ ID NO: 148554 - DNA, 20 bp, synthetic construct
  source 1..20: mol_type = other DNA
gtagaaacaaaccagtcaga

SEQ ID NO: 148555 - DNA, 20 bp, synthetic construct
  source 1..20: mol_type = other DNA
ggtagaaacaaaccagtcag

SEQ ID NO: 148556 - DNA, 20 bp, synthetic construct
  source 1..20: mol_type = other DNA
gggtagaaacaaaccagtca

SEQ ID NO: 148557 - DNA, 20 bp, synthetic construct
  source 1..20: mol_type = other DNA
tgggtagaaacaaaccagtc

SEQ ID NO: 148558 - DNA, 20 bp, synthetic construct
  source 1..20: mol_type = other DNA
gtgggtagaaacaaaccagt

SEQ ID NO: 148559 - DNA, 20 bp, synthetic construct
  source 1..20: mol_type = other DNA
ggtgggtagaaacaaaccag

SEQ ID NO: 148560 - DNA, 20 bp, synthetic construct
  source 1..20: mol_type = other DNA
gggtgggtagaaacaaacca

SEQ ID NO: 148561 - DNA, 20 bp, synthetic construct
  source 1..20: mol_type = other DNA
tgggtgggtagaaacaaacc

SEQ ID NO: 148562 - DNA, 20 bp, synthetic construct
  source 1..20: mol_type = other DNA
gtgggtgggtagaaacaaac

SEQ ID NO: 148563 - DNA, 20 bp, synthetic construct
  source 1..20: mol_type = other DNA
ggtgggtgggtagaaacaaa

SEQ ID NO: 148564 - DNA, 20 bp, synthetic construct
  source 1..20: mol_type = other DNA
gggtgggtgggtagaaacaa

SEQ ID NO: 148565 - DNA, 20 bp, synthetic construct
  source 1..20: mol_type = other DNA
tgggtgggtgggtagaaaca

SEQ ID NO: 148566 - DNA, 20 bp, synthetic construct
  source 1..20: mol_type = other DNA
ttgggtgggtgggtagaaac

SEQ ID NO: 148567 - DNA, 20 bp, synthetic construct
  source 1..20: mol_type = other DNA
gttgggtgggtgggtagaaa

SEQ ID NO: 148568 - DNA, 20 bp, synthetic construct
  source 1..20: mol_type = other DNA
ggttgggtgggtgggtagaa

SEQ ID NO: 148569 - DNA, 20 bp, synthetic construct
  source 1..20: mol_type = other DNA
gggttgggtgggtgggtaga

SEQ ID NO: 148570 - DNA, 20 bp, synthetic construct
  source 1..20: mol_type = other DNA
agggttgggtgggtgggtag

SEQ ID NO: 148571 - DNA, 20 bp, synthetic construct
  source 1..20: mol_type = other DNA
gagggttgggtgggtgggta

SEQ ID NO: 148572 - DNA, 20 bp, synthetic construct
  source 1..20: mol_type = other DNA
ggagggttgggtgggtgggt

SEQ ID NO: 148573 - DNA, 20 bp, synthetic construct
  source 1..20: mol_type = other DNA
gggagggttgggtgggtggg

SEQ ID NO: 148574 - DNA, 20 bp, synthetic construct
  source 1..20: mol_type = other DNA
ggggagggttgggtgggtgg

SEQ ID NO: 148575 - DNA, 20 bp, synthetic construct
  source 1..20: mol_type = other DNA
tggggagggttgggtgggtg

SEQ ID NO: 148576 - DNA, 20 bp, synthetic construct
  source 1..20: mol_type = other DNA
gtggggagggttgggtgggt

SEQ ID NO: 148577 - DNA, 20 bp, synthetic construct
  source 1..20: mol_type = other DNA
agtggggagggttgggtggg

SEQ ID NO: 148578 - DNA, 20 bp, synthetic construct
  source 1..20: mol_type = other DNA
aagtggggagggttgggtgg

SEQ ID NO: 148579 - DNA, 20 bp, synthetic construct
  source 1..20: mol_type = other DNA
aaagtggggagggttgggtg

SEQ ID NO: 148580 - DNA, 20 bp, synthetic construct
  source 1..20: mol_type = other DNA
caaagtggggagggttgggt

SEQ ID NO: 148581 - DNA, 20 bp, synthetic construct
  source 1..20: mol_type = other DNA
ccaaagtggggagggttggg

SEQ ID NO: 148582 - DNA, 20 bp, synthetic construct
  source 1..20: mol_type = other DNA
accaaagtggggagggttgg

SEQ ID NO: 148583 - DNA, 20 bp, synthetic construct
  source 1..20: mol_type = other DNA
caccaaagtggggagggttg

SEQ ID NO: 148584 - DNA, 20 bp, synthetic construct
  source 1..20: mol_type = other DNA
gcaccaaagtggggagggtt

SEQ ID NO: 148585 - DNA, 20 bp, synthetic construct
  source 1..20: mol_type = other DNA
tgcaccaaagtggggagggt

SEQ ID NO: 148586 - DNA, 20 bp, synthetic construct
  source 1..20: mol_type = other DNA
ctgcaccaaagtggggaggg

SEQ ID NO: 148587 - DNA, 20 bp, synthetic construct
  source 1..20: mol_type = other DNA
tctgcaccaaagtggggagg

SEQ ID NO: 148588 - DNA, 20 bp, synthetic construct
  source 1..20: mol_type = other DNA
atctgcaccaaagtggggag

SEQ ID NO: 148589 - DNA, 20 bp, synthetic construct
  source 1..20: mol_type = other DNA
catctgcaccaaagtgggga

SEQ ID NO: 148590 - DNA, 20 bp, synthetic construct
  source 1..20: mol_type = other DNA
ccatctgcaccaaagtgggg

SEQ ID NO: 148591 - DNA, 20 bp, synthetic construct
  source 1..20: mol_type = other DNA
cccatctgcaccaaagtggg

SEQ ID NO: 148592 - DNA, 20 bp, synthetic construct
  source 1..20: mol_type = other DNA
tcccatctgcaccaaagtgg

SEQ ID NO: 148593 - DNA, 20 bp, synthetic construct
  source 1..20: mol_type = other DNA
ctcccatctgcaccaaagtg

SEQ ID NO: 148594 - DNA, 20 bp, synthetic construct
  source 1..20: mol_type = other DNA
cctcccatctgcaccaaagt

SEQ ID NO: 148595 - DNA, 20 bp, synthetic construct
  source 1..20: mol_type = other DNA
ccctcccatctgcaccaaag

SEQ ID NO: 148596 - DNA, 20 bp, synthetic construct
  source 1..20: mol_type = other DNA
cccctcccatctgcaccaaa

SEQ ID NO: 148597 - DNA, 20 bp, synthetic construct
  source 1..20: mol_type = other DNA
ccccctcccatctgcaccaa

SEQ ID NO: 148598 - DNA, 20 bp, synthetic construct
  source 1..20: mol_type = other DNA
tccccctcccatctgcacca

SEQ ID NO: 148599 - DNA, 20 bp, synthetic construct
  source 1..20: mol_type = other DNA
ttccccctcccatctgcacc

SEQ ID NO: 148600 - DNA, 20 bp, synthetic construct
  source 1..20: mol_type = other DNA
tttccccctcccatctgcac

SEQ ID NO: 148601 - DNA, 20 bp, synthetic construct
  source 1..20: mol_type = other DNA
ttttccccctcccatctgca

SEQ ID NO: 148602 - DNA, 20 bp, synthetic construct
  source 1..20: mol_type = other DNA
cttttccccctcccatctgc

SEQ ID NO: 148603 - DNA, 20 bp, synthetic construct
  source 1..20: mol_type = other DNA
gcttttccccctcccatctg

SEQ ID NO: 148604 - DNA, 20 bp, synthetic construct
  source 1..20: mol_type = other DNA
cgcttttccccctcccatct

SEQ ID NO: 148605 - DNA, 20 bp, synthetic construct
  source 1..20: mol_type = other DNA
tcgcttttccccctcccatc

SEQ ID NO: 148606 - DNA, 20 bp, synthetic construct
  source 1..20: mol_type = other DNA
ttcgcttttccccctcccat

SEQ ID NO: 148607 - DNA, 20 bp, synthetic construct
  source 1..20: mol_type = other DNA
attcgcttttccccctccca

SEQ ID NO: 148608 - DNA, 20 bp, synthetic construct
  source 1..20: mol_type = other DNA
aattcgcttttccccctccc

SEQ ID NO: 148609 - DNA, 20 bp, synthetic construct
  source 1..20: mol_type = other DNA
gaattcgcttttccccctcc

SEQ ID NO: 148610 - DNA, 20 bp, synthetic construct
  source 1..20: mol_type = other DNA
tgaattcgcttttccccctc

SEQ ID NO: 148611 - DNA, 20 bp, synthetic construct
  source 1..20: mol_type = other DNA
ttgaattcgcttttccccct

SEQ ID NO: 148612 - DNA, 20 bp, synthetic construct
  source 1..20: mol_type = other DNA
attgaattcgcttttccccc

SEQ ID NO: 148613 - DNA, 20 bp, synthetic construct
  source 1..20: mol_type = other DNA
aattgaattcgcttttcccc

SEQ ID NO: 148614 - DNA, 20 bp, synthetic construct
  source 1..20: mol_type = other DNA
aaattgaattcgcttttccc

SEQ ID NO: 148615 - DNA, 20 bp, synthetic construct
  source 1..20: mol_type = other DNA
aaaattgaattcgcttttcc

SEQ ID NO: 148616 - DNA, 20 bp, synthetic construct
  source 1..20: mol_type = other DNA
caaaattgaattcgcttttc

SEQ ID NO: 148617 - DNA, 20 bp, synthetic construct
  source 1..20: mol_type = other DNA
tcaaaattgaattcgctttt

SEQ ID NO: 148618 - DNA, 20 bp, synthetic construct
  source 1..20: mol_type = other DNA
ctcaaaattgaattcgcttt

SEQ ID NO: 148619 - DNA, 20 bp, synthetic construct
  source 1..20: mol_type = other DNA
actcaaaattgaattcgctt

SEQ ID NO: 148620 - DNA, 20 bp, synthetic construct
  source 1..20: mol_type = other DNA
aactcaaaattgaattcgct

SEQ ID NO: 148621 - DNA, 20 bp, synthetic construct
  source 1..20: mol_type = other DNA
aaactcaaaattgaattcgc

SEQ ID NO: 148622 - DNA, 20 bp, synthetic construct
  source 1..20: mol_type = other DNA
aaaactcaaaattgaattcg

SEQ ID NO: 148623 - DNA, 20 bp, synthetic construct
  source 1..20: mol_type = other DNA
caaaactcaaaattgaattc

SEQ ID NO: 148624 - DNA, 20 bp, synthetic construct
  source 1..20: mol_type = other DNA
acaaaactcaaaattgaatt

SEQ ID NO: 148625 - DNA, 20 bp, synthetic construct
  source 1..20: mol_type = other DNA
aacaaaactcaaaattgaat

SEQ ID NO: 148626 - DNA, 20 bp, synthetic construct
  source 1..20: mol_type = other DNA
gaacaaaactcaaaattgaa

SEQ ID NO: 148627 - DNA, 20 bp, synthetic construct
  source 1..20: mol_type = other DNA
tgaacaaaactcaaaattga

SEQ ID NO: 148628 - DNA, 20 bp, synthetic construct
  source 1..20: mol_type = other DNA
ctgaacaaaactcaaaattg

SEQ ID NO: 148629 - DNA, 20 bp, synthetic construct
  source 1..20: mol_type = other DNA
gctgaacaaaactcaaaatt

SEQ ID NO: 148630 - DNA, 20 bp, synthetic construct
  source 1..20: mol_type = other DNA
agctgaacaaaactcaaaat

SEQ ID NO: 148631 - DNA, 20 bp, synthetic construct
  source 1..20: mol_type = other DNA
tagctgaacaaaactcaaaa

SEQ ID NO: 148632 - DNA, 20 bp, synthetic construct
  source 1..20: mol_type = other DNA
ctagctgaacaaaactcaaa

SEQ ID NO: 148633 - DNA, 20 bp, synthetic construct
  source 1..20: mol_type = other DNA
gctagctgaacaaaactcaa

SEQ ID NO: 148634 - DNA, 20 bp, synthetic construct
  source 1..20: mol_type = other DNA
tgctagctgaacaaaactca

SEQ ID NO: 148635 - DNA, 20 bp, synthetic construct
  source 1..20: mol_type = other DNA
gtgctagctgaacaaaactc

SEQ ID NO: 148636 - DNA, 20 bp, synthetic construct
  source 1..20: mol_type = other DNA
cgtgctagctgaacaaaact

SEQ ID NO: 148637 - DNA, 20 bp, synthetic construct
  source 1..20: mol_type = other DNA
tcgtgctagctgaacaaaac

SEQ ID NO: 148638 - DNA, 20 bp, synthetic construct
  source 1..20: mol_type = other DNA
ctcgtgctagctgaacaaaa

SEQ ID NO: 148639 - DNA, 20 bp, synthetic construct
  source 1..20: mol_type = other DNA
cctcgtgctagctgaacaaa

SEQ ID NO: 148640 - DNA, 20 bp, synthetic construct
  source 1..20: mol_type = other DNA
tcctcgtgctagctgaacaa

SEQ ID NO: 148641 - DNA, 20 bp, synthetic construct
  source 1..20: mol_type = other DNA
atcctcgtgctagctgaaca

SEQ ID NO: 148642 - DNA, 20 bp, synthetic construct
  source 1..20: mol_type = other DNA
tatcctcgtgctagctgaac

SEQ ID NO: 148643 - DNA, 20 bp, synthetic construct
  source 1..20: mol_type = other DNA
ctatcctcgtgctagctgaa

SEQ ID NO: 148644 - DNA, 20 bp, synthetic construct
  source 1..20: mol_type = other DNA
actatcctcgtgctagctga

SEQ ID NO: 148645 - DNA, 20 bp, synthetic construct
  source 1..20: mol_type = other DNA
aactatcctcgtgctagctg

SEQ ID NO: 148646 - DNA, 20 bp, synthetic construct
  source 1..20: mol_type = other DNA
aaactatcctcgtgctagct

SEQ ID NO: 148647 - DNA, 20 bp, synthetic construct
  source 1..20: mol_type = other DNA
taaactatcctcgtgctagc

SEQ ID NO: 148648 - DNA, 20 bp, synthetic construct
  source 1..20: mol_type = other DNA
gtaaactatcctcgtgctag

SEQ ID NO: 148649 - DNA, 20 bp, synthetic construct
  source 1..20: mol_type = other DNA
tgtaaactatcctcgtgcta

SEQ ID NO: 148650 - DNA, 20 bp, synthetic construct
  source 1..20: mol_type = other DNA
ttgtaaactatcctcgtgct

SEQ ID NO: 148651 - DNA, 20 bp, synthetic construct
  source 1..20: mol_type = other DNA
attgtaaactatcctcgtgc

SEQ ID NO: 148652 - DNA, 20 bp, synthetic construct
  source 1..20: mol_type = other DNA
gattgtaaactatcctcgtg

SEQ ID NO: 148653 - DNA, 20 bp, synthetic construct
  source 1..20: mol_type = other DNA
tgattgtaaactatcctcgt

SEQ ID NO: 148654 - DNA, 20 bp, synthetic construct
  source 1..20: mol_type = other DNA
atgattgtaaactatcctcg

SEQ ID NO: 148655 - DNA, 20 bp, synthetic construct
  source 1..20: mol_type = other DNA
catgattgtaaactatcctc

SEQ ID NO: 148656 - DNA, 20 bp, synthetic construct
  source 1..20: mol_type = other DNA
acatgattgtaaactatcct

SEQ ID NO: 148657 - DNA, 20 bp, synthetic construct
  source 1..20: mol_type = other DNA
cacatgattgtaaactatcc

SEQ ID NO: 148658 - DNA, 20 bp, synthetic construct
  source 1..20: mol_type = other DNA
gcacatgattgtaaactatc

SEQ ID NO: 148659 - DNA, 20 bp, synthetic construct
  source 1..20: mol_type = other DNA
agcacatgattgtaaactat

SEQ ID NO: 148660 - DNA, 20 bp, synthetic construct
  source 1..20: mol_type = other DNA
cagcacatgattgtaaacta

SEQ ID NO: 148661 - DNA, 20 bp, synthetic construct
  source 1..20: mol_type = other DNA
gcagcacatgattgtaaact

SEQ ID NO: 148662 - DNA, 20 bp, synthetic construct
  source 1..20: mol_type = other DNA
tgcagcacatgattgtaaac

SEQ ID NO: 148663 - DNA, 20 bp, synthetic construct
  source 1..20: mol_type = other DNA
ctgcagcacatgattgtaaa

SEQ ID NO: 148664 - DNA, 20 bp, synthetic construct
  source 1..20: mol_type = other DNA
tctgcagcacatgattgtaa

SEQ ID NO: 148665 - DNA, 20 bp, synthetic construct
  source 1..20: mol_type = other DNA
ctctgcagcacatgattgta

SEQ ID NO: 148666 - DNA, 20 bp, synthetic construct
  source 1..20: mol_type = other DNA
tctctgcagcacatgattgt

SEQ ID NO: 148667 - DNA, 20 bp, synthetic construct
  source 1..20: mol_type = other DNA
gtctctgcagcacatgattg

SEQ ID NO: 148668 - DNA, 20 bp, synthetic construct
  source 1..20: mol_type = other DNA
tgtctctgcagcacatgatt

SEQ ID NO: 148669 - DNA, 20 bp, synthetic construct
  source 1..20: mol_type = other DNA
gtgtctctgcagcacatgat

SEQ ID NO: 148670 - DNA, 20 bp, synthetic construct
  source 1..20: mol_type = other DNA
agtgtctctgcagcacatga

SEQ ID NO: 148671 - DNA, 20 bp, synthetic construct
  source 1..20: mol_type = other DNA
tagtgtctctgcagcacatg

SEQ ID NO: 148672 - DNA, 20 bp, synthetic construct
  source 1..20: mol_type = other DNA
ctagtgtctctgcagcacat

SEQ ID NO: 148673 - DNA, 20 bp, synthetic construct
  source 1..20: mol_type = other DNA
cctagtgtctctgcagcaca

SEQ ID NO: 148674 - DNA, 20 bp, synthetic construct
  source 1..20: mol_type = other DNA
gcctagtgtctctgcagcac

SEQ ID NO: 148675 - DNA, 20 bp, synthetic construct
  source 1..20: mol_type = other DNA
agcctagtgtctctgcagca

SEQ ID NO: 148676 - DNA, 20 bp, synthetic construct
  source 1..20: mol_type = other DNA
cagcctagtgtctctgcagc

SEQ ID NO: 148677 - DNA, 20 bp, synthetic construct
  source 1..20: mol_type = other DNA
tcagcctagtgtctctgcag

SEQ ID NO: 148678 - DNA, 20 bp, synthetic construct
  source 1..20: mol_type = other DNA
atcagcctagtgtctctgca

SEQ ID NO: 148679 - DNA, 20 bp, synthetic construct
  source 1..20: mol_type = other DNA
catcagcctagtgtctctgc

SEQ ID NO: 148680 - DNA, 20 bp, synthetic construct
  source 1..20: mol_type = other DNA
acatcagcctagtgtctctg

SEQ ID NO: 148681 - DNA, 20 bp, synthetic construct
  source 1..20: mol_type = other DNA
cacatcagcctagtgtctct

SEQ ID NO: 148682 - DNA, 20 bp, synthetic construct
  source 1..20: mol_type = other DNA
acacatcagcctagtgtctc

SEQ ID NO: 148683 - DNA, 20 bp, synthetic construct
  source 1..20: mol_type = other DNA
cacacatcagcctagtgtct

SEQ ID NO: 148684 - DNA, 20 bp, synthetic construct
  source 1..20: mol_type = other DNA
ccacacatcagcctagtgtc

SEQ ID NO: 148685 - DNA, 20 bp, synthetic construct
  source 1..20: mol_type = other DNA
accacacatcagcctagtgt

SEQ ID NO: 148686 - DNA, 20 bp, synthetic construct
  source 1..20: mol_type = other DNA
caccacacatcagcctagtg

SEQ ID NO: 148687 - DNA, 20 bp, synthetic construct
  source 1..20: mol_type = other DNA
acaccacacatcagcctagt

SEQ ID NO: 148688 - DNA, 20 bp, synthetic construct
  source 1..20: mol_type = other DNA
aacaccacacatcagcctag

SEQ ID NO: 148689 - DNA, 20 bp, synthetic construct
  source 1..20: mol_type = other DNA
caacaccacacatcagccta

SEQ ID NO: 148690 - DNA, 20 bp, synthetic construct
  source 1..20: mol_type = other DNA
gcaacaccacacatcagcct

SEQ ID NO: 148691 - DNA, 20 bp, synthetic construct
  source 1..20: mol_type = other DNA
ggcaacaccacacatcagcc

SEQ ID NO: 148692 - DNA, 20 bp, synthetic construct
  source 1..20: mol_type = other DNA
tggcaacaccacacatcagc

SEQ ID NO: 148693 - DNA, 20 bp, synthetic construct
  source 1..20: mol_type = other DNA
ctggcaacaccacacatcag

SEQ ID NO: 148694 - DNA, 20 bp, synthetic construct
  source 1..20: mol_type = other DNA
actggcaacaccacacatca

SEQ ID NO: 148695 - DNA, 20 bp, synthetic construct
  source 1..20: mol_type = other DNA
aactggcaacaccacacatc

SEQ ID NO: 148696 - DNA, 20 bp, synthetic construct
  source 1..20: mol_type = other DNA
aaactggcaacaccacacat

SEQ ID NO: 148697 - DNA, 20 bp, synthetic construct
  source 1..20: mol_type = other DNA
aaaactggcaacaccacaca

SEQ ID NO: 148698 - DNA, 20 bp, synthetic construct
  source 1..20: mol_type = other DNA
gaaaactggcaacaccacac

SEQ ID NO: 148699 - DNA, 20 bp, synthetic construct
  source 1..20: mol_type = other DNA
agaaaactggcaacaccaca

SEQ ID NO: 148700 - DNA, 20 bp, synthetic construct
  source 1..20: mol_type = other DNA
cagaaaactggcaacaccac

SEQ ID NO: 148701 - DNA, 20 bp, synthetic construct
  source 1..20: mol_type = other DNA
acagaaaactggcaacacca

SEQ ID NO: 148702 - DNA, 20 bp, synthetic construct
  source 1..20: mol_type = other DNA
aacagaaaactggcaacacc

SEQ ID NO: 148703 - DNA, 20 bp, synthetic construct
  source 1..20: mol_type = other DNA
aaacagaaaactggcaacac

SEQ ID NO: 148704 - DNA, 20 bp, synthetic construct
  source 1..20: mol_type = other DNA
gaaacagaaaactggcaaca

SEQ ID NO: 148705 - DNA, 20 bp, synthetic construct
  source 1..20: mol_type = other DNA
tgaaacagaaaactggcaac

SEQ ID NO: 148706 - DNA, 20 bp, synthetic construct
  source 1..20: mol_type = other DNA
ttgaaacagaaaactggcaa

SEQ ID NO: 148707 - DNA, 20 bp, synthetic construct
  source 1..20: mol_type = other DNA
attgaaacagaaaactggca

SEQ ID NO: 148708 - DNA, 20 bp, synthetic construct
  source 1..20: mol_type = other DNA
cattgaaacagaaaactggc

SEQ ID NO: 148709 - DNA, 20 bp, synthetic construct
  source 1..20: mol_type = other DNA
acattgaaacagaaaactgg

SEQ ID NO: 148710 - DNA, 20 bp, synthetic construct
  source 1..20: mol_type = other DNA
aacattgaaacagaaaactg

SEQ ID NO: 148711 - DNA, 20 bp, synthetic construct
  source 1..20: mol_type = other DNA
gaacattgaaacagaaaact

SEQ ID NO: 148712 - DNA, 20 bp, synthetic construct
  source 1..20: mol_type = other DNA
cgaacattgaaacagaaaac

SEQ ID NO: 148713 - DNA, 20 bp, synthetic construct
  source 1..20: mol_type = other DNA
gcgaacattgaaacagaaaa

SEQ ID NO: 148714 - DNA, 20 bp, synthetic construct
  source 1..20: mol_type = other DNA
agcgaacattgaaacagaaa

SEQ ID NO: 148715 - DNA, 20 bp, synthetic construct
  source 1..20: mol_type = other DNA
aagcgaacattgaaacagaa

SEQ ID NO: 148716 - DNA, 20 bp, synthetic construct
  source 1..20: mol_type = other DNA
aaagcgaacattgaaacaga

SEQ ID NO: 148717 - DNA, 20 bp, synthetic construct
  source 1..20: mol_type = other DNA
aaaagcgaacattgaaacag

SEQ ID NO: 148718 - DNA, 20 bp, synthetic construct
  source 1..20: mol_type = other DNA
gaaaagcgaacattgaaaca

SEQ ID NO: 148719 - DNA, 20 bp, synthetic construct
  source 1..20: mol_type = other DNA
agaaaagcgaacattgaaac

SEQ ID NO: 148720 - DNA, 20 bp, synthetic construct
  source 1..20: mol_type = other DNA
aagaaaagcgaacattgaaa

SEQ ID NO: 148721 - DNA, 20 bp, synthetic construct
  source 1..20: mol_type = other DNA
aaagaaaagcgaacattgaa

SEQ ID NO: 148722 - DNA, 20 bp, synthetic construct
  source 1..20: mol_type = other DNA
aaaagaaaagcgaacattga

SEQ ID NO: 148723 - DNA, 20 bp, synthetic construct
  source 1..20: mol_type = other DNA
aaaaagaaaagcgaacattg

SEQ ID NO: 148724 - DNA, 20 bp, synthetic construct
  source 1..20: mol_type = other DNA
taaaaagaaaagcgaacatt

SEQ ID NO: 148725 - DNA, 20 bp, synthetic construct
  source 1..20: mol_type = other DNA
gtaaaaagaaaagcgaacat

SEQ ID NO: 148726 - DNA, 20 bp, synthetic construct
  source 1..20: mol_type = other DNA
tgtaaaaagaaaagcgaaca

SEQ ID NO: 148727 - DNA, 20 bp, synthetic construct
  source 1..20: mol_type = other DNA
ctgtaaaaagaaaagcgaac

SEQ ID NO: 148728 - DNA, 20 bp, synthetic construct
  source 1..20: mol_type = other DNA
actgtaaaaagaaaagcgaa

SEQ ID NO: 148729 - DNA, 20 bp, synthetic construct
  source 1..20: mol_type = other DNA
tactgtaaaaagaaaagcga

SEQ ID NO: 148730 - DNA, 20 bp, synthetic construct
  source 1..20: mol_type = other DNA
gtactgtaaaaagaaaagcg

SEQ ID NO: 148731 - DNA, 20 bp, synthetic construct
  source 1..20: mol_type = other DNA
tgtactgtaaaaagaaaagc

SEQ ID NO: 148732 - DNA, 20 bp, synthetic construct
  source 1..20: mol_type = other DNA
ttgtactgtaaaaagaaaag

SEQ ID NO: 148733 - DNA, 20 bp, synthetic construct
  source 1..20: mol_type = other DNA
cttgtactgtaaaaagaaaa

SEQ ID NO: 148734 - DNA, 20 bp, synthetic construct
  source 1..20: mol_type = other DNA
gcttgtactgtaaaaagaaa

SEQ ID NO: 148735 - DNA, 20 bp, synthetic construct
  source 1..20: mol_type = other DNA
ggcttgtactgtaaaaagaa

SEQ ID NO: 148736 - DNA, 20 bp, synthetic construct
  source 1..20: mol_type = other DNA
gggcttgtactgtaaaaaga

SEQ ID NO: 148737 - DNA, 20 bp, synthetic construct
  source 1..20: mol_type = other DNA
tgggcttgtactgtaaaaag

SEQ ID NO: 148738 - DNA, 20 bp, synthetic construct
  source 1..20: mol_type = other DNA
gtgggcttgtactgtaaaaa

SEQ ID NO: 148739 - DNA, 20 bp, synthetic construct
  source 1..20: mol_type = other DNA
ggtgggcttgtactgtaaaa

SEQ ID NO: 148740 - DNA, 20 bp, synthetic construct
  source 1..20: mol_type = other DNA
tggtgggcttgtactgtaaa

SEQ ID NO: 148741 - DNA, 20 bp, synthetic construct
  source 1..20: mol_type = other DNA
gtggtgggcttgtactgtaa

SEQ ID NO: 148742 - DNA, 20 bp, synthetic construct
  source 1..20: mol_type = other DNA
ggtggtgggcttgtactgta

SEQ ID NO: 148743 - DNA, 20 bp, synthetic construct
  source 1..20: mol_type = other DNA
tggtggtgggcttgtactgt

SEQ ID NO: 148744 - DNA, 20 bp, synthetic construct
  source 1..20: mol_type = other DNA
ttggtggtgggcttgtactg

SEQ ID NO: 148745 - DNA, 20 bp, synthetic construct
  source 1..20: mol_type = other DNA
gttggtggtgggcttgtact

SEQ ID NO: 148746 - DNA, 20 bp, synthetic construct
  source 1..20: mol_type = other DNA
tgttggtggtgggcttgtac

SEQ ID NO: 148747 - DNA, 20 bp, synthetic construct
  source 1..20: mol_type = other DNA
ctgttggtggtgggcttgta

SEQ ID NO: 148748 - DNA, 20 bp, synthetic construct
  source 1..20: mol_type = other DNA
gctgttggtggtgggcttgt

SEQ ID NO: 148749 - DNA, 20 bp, synthetic construct
  source 1..20: mol_type = other DNA
tgctgttggtggtgggcttg

SEQ ID NO: 148750 - DNA, 20 bp, synthetic construct
  source 1..20: mol_type = other DNA
ctgctgttggtggtgggctt

SEQ ID NO: 148751 - DNA, 20 bp, synthetic construct
  source 1..20: mol_type = other DNA
actgctgttggtggtgggct

SEQ ID NO: 148752 - DNA, 20 bp, synthetic construct
  source 1..20: mol_type = other DNA
aactgctgttggtggtgggc

SEQ ID NO: 148753 - DNA, 20 bp, synthetic construct
  source 1..20: mol_type = other DNA
caactgctgttggtggtggg

SEQ ID NO: 148754 - DNA, 20 bp, synthetic construct
  source 1..20: mol_type = other DNA
acaactgctgttggtggtgg

SEQ ID NO: 148755 - DNA, 20 bp, synthetic construct
  source 1..20: mol_type = other DNA
tacaactgctgttggtggtg

SEQ ID NO: 148756 - DNA, 20 bp, synthetic construct
  source 1..20: mol_type = other DNA
ttacaactgctgttggtggt

SEQ ID NO: 148757 - DNA, 20 bp, synthetic construct
  source 1..20: mol_type = other DNA
cttacaactgctgttggtgg

SEQ ID NO: 148758 - DNA, 20 bp, synthetic construct
  source 1..20: mol_type = other DNA
ccttacaactgctgttggtg

SEQ ID NO: 148759 - DNA, 20 bp, synthetic construct
  source 1..20: mol_type = other DNA
gccttacaactgctgttggt

SEQ ID NO: 148760 - DNA, 20 bp, synthetic construct
  source 1..20: mol_type = other DNA
agccttacaactgctgttgg

SEQ ID NO: 148761 - DNA, 20 bp, synthetic construct
  source 1..20: mol_type = other DNA
cagccttacaactgctgttg

SEQ ID NO: 148762 - DNA, 20 bp, synthetic construct
  source 1..20: mol_type = other DNA
gcagccttacaactgctgtt

SEQ ID NO: 148763 - DNA, 20 bp, synthetic construct
  source 1..20: mol_type = other DNA
ggcagccttacaactgctgt

SEQ ID NO: 148764 - DNA, 20 bp, synthetic construct
  source 1..20: mol_type = other DNA
gggcagccttacaactgctg

SEQ ID NO: 148765 - DNA, 20 bp, synthetic construct
  source 1..20: mol_type = other DNA
agggcagccttacaactgct

SEQ ID NO: 148766 - DNA, 20 bp, synthetic construct
  source 1..20: mol_type = other DNA
cagggcagccttacaactgc

SEQ ID NO: 148767 - DNA, 20 bp, synthetic construct
  source 1..20: mol_type = other DNA
ccagggcagccttacaactg

SEQ ID NO: 148768 - DNA, 20 bp, synthetic construct
  source 1..20: mol_type = other DNA
tccagggcagccttacaact

SEQ ID NO: 148769 - DNA, 20 bp, synthetic construct
  source 1..20: mol_type = other DNA
ctccagggcagccttacaac

SEQ ID NO: 148770 - DNA, 20 bp, synthetic construct
  source 1..20: mol_type = other DNA
cctccagggcagccttacaa

SEQ ID NO: 148771 - DNA, 20 bp, synthetic construct
  source 1..20: mol_type = other DNA
tcctccagggcagccttaca

SEQ ID NO: 148772 - DNA, 20 bp, synthetic construct
  source 1..20: mol_type = other DNA
ttcctccagggcagccttac

SEQ ID NO: 148773 - DNA, 20 bp, synthetic construct
  source 1..20: mol_type = other DNA
gttcctccagggcagcctta

SEQ ID NO: 148774 - DNA, 20 bp, synthetic construct
  source 1..20: mol_type = other DNA
ggttcctccagggcagcctt

SEQ ID NO: 148775 - DNA, 20 bp, synthetic construct
  source 1..20: mol_type = other DNA
cggttcctccagggcagcct

SEQ ID NO: 148776 - DNA, 20 bp, synthetic construct
  source 1..20: mol_type = other DNA
tcggttcctccagggcagcc

SEQ ID NO: 148777 - DNA, 20 bp, synthetic construct
  source 1..20: mol_type = other DNA
ttcggttcctccagggcagc

SEQ ID NO: 148778 - DNA, 20 bp, synthetic construct
  source 1..20: mol_type = other DNA
tttcggttcctccagggcag

SEQ ID NO: 148779 - DNA, 20 bp, synthetic construct
  source 1..20: mol_type = other DNA
ctttcggttcctccagggca

SEQ ID NO: 148780 - DNA, 20 bp, synthetic construct
  source 1..20: mol_type = other DNA
cctttcggttcctccagggc

SEQ ID NO: 148781 - DNA, 20 bp, synthetic construct
  source 1..20: mol_type = other DNA
gcctttcggttcctccaggg

SEQ ID NO: 148782 - DNA, 20 bp, synthetic construct
  source 1..20: mol_type = other DNA
ggcctttcggttcctccagg

SEQ ID NO: 148783 - DNA, 20 bp, synthetic construct
  source 1..20: mol_type = other DNA
tggcctttcggttcctccag

SEQ ID NO: 148784 - DNA, 20 bp, synthetic construct
  source 1..20: mol_type = other DNA
ttggcctttcggttcctcca

SEQ ID NO: 148785 - DNA, 20 bp, synthetic construct
  source 1..20: mol_type = other DNA
tttggcctttcggttcctcc

SEQ ID NO: 148786 - DNA, 20 bp, synthetic construct
  source 1..20: mol_type = other DNA
atttggcctttcggttcctc

SEQ ID NO: 148787 - DNA, 20 bp, synthetic construct
  source 1..20: mol_type = other DNA
aatttggcctttcggttcct

SEQ ID NO: 148788 - DNA, 20 bp, synthetic construct
  source 1..20: mol_type = other DNA
gaatttggcctttcggttcc

SEQ ID NO: 148789 - DNA, 20 bp, synthetic construct
  source 1..20: mol_type = other DNA
ggaatttggcctttcggttc

SEQ ID NO: 148790 - DNA, 20 bp, synthetic construct
  source 1..20: mol_type = other DNA
gggaatttggcctttcggtt

SEQ ID NO: 148791 - DNA, 20 bp, synthetic construct
  source 1..20: mol_type = other DNA
agggaatttggcctttcggt

SEQ ID NO: 148792 - DNA, 20 bp, synthetic construct
  source 1..20: mol_type = other DNA
gagggaatttggcctttcgg

SEQ ID NO: 148793 - DNA, 20 bp, synthetic construct
  source 1..20: mol_type = other DNA
ggagggaatttggcctttcg

SEQ ID NO: 148794 - DNA, 20 bp, synthetic construct
  source 1..20: mol_type = other DNA
aggagggaatttggcctttc

SEQ ID NO: 148795 - DNA, 20 bp, synthetic construct
  source 1..20: mol_type = other DNA
gaggagggaatttggccttt

SEQ ID NO: 148796 - DNA, 20 bp, synthetic construct
  source 1..20: mol_type = other DNA
ggaggagggaatttggcctt

SEQ ID NO: 148797 - DNA, 20 bp, synthetic construct
  source 1..20: mol_type = other DNA
gggaggagggaatttggcct

SEQ ID NO: 148798 - DNA, 20 bp, synthetic construct
  source 1..20: mol_type = other DNA
agggaggagggaatttggcc

SEQ ID NO: 148799 - DNA, 20 bp, synthetic construct
  source 1..20: mol_type = other DNA
aagggaggagggaatttggc

SEQ ID NO: 148800 - DNA, 20 bp, synthetic construct
  source 1..20: mol_type = other DNA
gaagggaggagggaatttgg

SEQ ID NO: 148801 - DNA, 20 bp, synthetic construct
  source 1..20: mol_type = other DNA
agaagggaggagggaatttg

SEQ ID NO: 148802 - DNA, 20 bp, synthetic construct
  source 1..20: mol_type = other DNA
tagaagggaggagggaattt

SEQ ID NO: 148803 - DNA, 20 bp, synthetic construct
  source 1..20: mol_type = other DNA
gtagaagggaggagggaatt

SEQ ID NO: 148804 - DNA, 20 bp, synthetic construct
  source 1..20: mol_type = other DNA
agtagaagggaggagggaat

SEQ ID NO: 148805 - DNA, 20 bp, synthetic construct
  source 1..20: mol_type = other DNA
cagtagaagggaggagggaa

SEQ ID NO: 148806 - DNA, 20 bp, synthetic construct
  source 1..20: mol_type = other DNA
gcagtagaagggaggaggga

SEQ ID NO: 148807 - DNA, 20 bp, synthetic construct
  source 1..20: mol_type = other DNA
agcagtagaagggaggaggg

SEQ ID NO: 148808 - DNA, 20 bp, synthetic construct
  source 1..20: mol_type = other DNA
aagcagtagaagggaggagg

SEQ ID NO: 148809 - DNA, 20 bp, synthetic construct
  source 1..20: mol_type = other DNA
gaagcagtagaagggaggag

SEQ ID NO: 148810 - DNA, 20 bp, synthetic construct
  source 1..20: mol_type = other DNA
agaagcagtagaagggagga

SEQ ID NO: 148811 - DNA, 20 bp, synthetic construct
  source 1..20: mol_type = other DNA
tagaagcagtagaagggagg

SEQ ID NO: 148812 - DNA, 20 bp, synthetic construct
  source 1..20: mol_type = other DNA
gtagaagcagtagaagggag

SEQ ID NO: 148813 - DNA, 20 bp, synthetic construct
  source 1..20: mol_type = other DNA
ggtagaagcagtagaaggga

SEQ ID NO: 148814 - DNA, 20 bp, synthetic construct
  source 1..20: mol_type = other DNA
tggtagaagcagtagaaggg

SEQ ID NO: 148815 - DNA, 20 bp, synthetic construct
  source 1..20: mol_type = other DNA
ttggtagaagcagtagaagg

SEQ ID NO: 148816 - DNA, 20 bp, synthetic construct
  source 1..20: mol_type = other DNA
gttggtagaagcagtagaag

SEQ ID NO: 148817 - DNA, 20 bp, synthetic construct
  source 1..20: mol_type = other DNA
agttggtagaagcagtagaa

SEQ ID NO: 148818 - DNA, 20 bp, synthetic construct
  source 1..20: mol_type = other DNA
cagttggtagaagcagtaga

SEQ ID NO: 148819 - DNA, 20 bp, synthetic construct
  source 1..20: mol_type = other DNA
ccagttggtagaagcagtag

SEQ ID NO: 148820 - DNA, 20 bp, synthetic construct
  source 1..20: mol_type = other DNA
tccagttggtagaagcagta

SEQ ID NO: 148821 - DNA, 20 bp, synthetic construct
  source 1..20: mol_type = other DNA
ttccagttggtagaagcagt

SEQ ID NO: 148822 - DNA, 20 bp, synthetic construct
  source 1..20: mol_type = other DNA
cttccagttggtagaagcag

SEQ ID NO: 148823 - DNA, 20 bp, synthetic construct
  source 1..20: mol_type = other DNA
gcttccagttggtagaagca

SEQ ID NO: 148824 - DNA, 20 bp, synthetic construct
  source 1..20: mol_type = other DNA
tgcttccagttggtagaagc

SEQ ID NO: 148825 - DNA, 20 bp, synthetic construct
  source 1..20: mol_type = other DNA
gtgcttccagttggtagaag

SEQ ID NO: 148826 - DNA, 20 bp, synthetic construct
  source 1..20: mol_type = other DNA
tgtgcttccagttggtagaa

SEQ ID NO: 148827 - DNA, 20 bp, synthetic construct
  source 1..20: mol_type = other DNA
ctgtgcttccagttggtaga

SEQ ID NO: 148828 - DNA, 20 bp, synthetic construct
  source 1..20: mol_type = other DNA
tctgtgcttccagttggtag

SEQ ID NO: 148829 - DNA, 20 bp, synthetic construct
  source 1..20: mol_type = other DNA
ttctgtgcttccagttggta

SEQ ID NO: 148830 - DNA, 20 bp, synthetic construct
  source 1..20: mol_type = other DNA
tttctgtgcttccagttggt

SEQ ID NO: 148831 - DNA, 20 bp, synthetic construct
  source 1..20: mol_type = other DNA
ttttctgtgcttccagttgg

SEQ ID NO: 148832 - DNA, 20 bp, synthetic construct
  source 1..20: mol_type = other DNA
gttttctgtgcttccagttg

SEQ ID NO: 148833 - DNA, 20 bp, synthetic construct
  source 1..20: mol_type = other DNA
agttttctgtgcttccagtt

SEQ ID NO: 148834 - DNA, 20 bp, synthetic construct
  source 1..20: mol_type = other DNA
tagttttctgtgcttccagt

SEQ ID NO: 148835 - DNA, 20 bp, synthetic construct
  source 1..20: mol_type = other DNA
ctagttttctgtgcttccag

SEQ ID NO: 148836 - DNA, 20 bp, synthetic construct
  source 1..20: mol_type = other DNA
tctagttttctgtgcttcca

SEQ ID NO: 148837 - DNA, 20 bp, synthetic construct
  source 1..20: mol_type = other DNA
ttctagttttctgtgcttcc

SEQ ID NO: 148838 - DNA, 20 bp, synthetic construct
  source 1..20: mol_type = other DNA
attctagttttctgtgcttc

SEQ ID NO: 148839 - DNA, 20 bp, synthetic construct
  source 1..20: mol_type = other DNA
aattctagttttctgtgctt

SEQ ID NO: 148840 - DNA, 20 bp, synthetic construct
  source 1..20: mol_type = other DNA
aaattctagttttctgtgct

SEQ ID NO: 148841 - DNA, 20 bp, synthetic construct
  source 1..20: mol_type = other DNA
gaaattctagttttctgtgc

SEQ ID NO: 148842 - DNA, 20 bp, synthetic construct
  source 1..20: mol_type = other DNA
tgaaattctagttttctgtg

SEQ ID NO: 148843 - DNA, 20 bp, synthetic construct
  source 1..20: mol_type = other DNA
atgaaattctagttttctgt

SEQ ID NO: 148844 - DNA, 20 bp, synthetic construct
  source 1..20: mol_type = other DNA
aatgaaattctagttttctg

SEQ ID NO: 148845 - DNA, 20 bp, synthetic construct
  source 1..20: mol_type = other DNA
aaatgaaattctagttttct

SEQ ID NO: 148846 - DNA, 20 bp, synthetic construct
  source 1..20: mol_type = other DNA
taaatgaaattctagttttc

SEQ ID NO: 148847 - DNA, 20 bp, synthetic construct
  source 1..20: mol_type = other DNA
ataaatgaaattctagtttt

SEQ ID NO: 148848 - DNA, 20 bp, synthetic construct
  source 1..20: mol_type = other DNA
aataaatgaaattctagttt

SEQ ID NO: 148849 - DNA, 20 bp, synthetic construct
  source 1..20: mol_type = other DNA
aaataaatgaaattctagtt

SEQ ID NO: 148850 - DNA, 20 bp, synthetic construct
  source 1..20: mol_type = other DNA
aaaataaatgaaattctagt

SEQ ID NO: 148851 - DNA, 20 bp, synthetic construct
  source 1..20: mol_type = other DNA
caaaataaatgaaattctag

SEQ ID NO: 148852 - DNA, 20 bp, synthetic construct
  source 1..20: mol_type = other DNA
acaaaataaatgaaattcta

SEQ ID NO: 148853 - DNA, 20 bp, synthetic construct
  source 1..20: mol_type = other DNA
aacaaaataaatgaaattct

SEQ ID NO: 148854 - DNA, 20 bp, synthetic construct
  source 1..20: mol_type = other DNA
aaacaaaataaatgaaattc

SEQ ID NO: 148855 - DNA, 20 bp, synthetic construct
  source 1..20: mol_type = other DNA
aaaacaaaataaatgaaatt

SEQ ID NO: 148856 - DNA, 20 bp, synthetic construct
  source 1..20: mol_type = other DNA
aaaaacaaaataaatgaaat

SEQ ID NO: 148857 - DNA, 20 bp, synthetic construct
  source 1..20: mol_type = other DNA
taaaaacaaaataaatgaaa

SEQ ID NO: 148858 - DNA, 20 bp, synthetic construct
  source 1..20: mol_type = other DNA
ttaaaaacaaaataaatgaa

SEQ ID NO: 148859 - DNA, 20 bp, synthetic construct
  source 1..20: mol_type = other DNA
tttaaaaacaaaataaatga

SEQ ID NO: 148860 - DNA, 20 bp, synthetic construct
  source 1..20: mol_type = other DNA
ttttaaaaacaaaataaatg

SEQ ID NO: 148861 - DNA, 20 bp, synthetic construct
  source 1..20: mol_type = other DNA
attttaaaaacaaaataaat

SEQ ID NO: 148862 - DNA, 20 bp, synthetic construct
  source 1..20: mol_type = other DNA
tattttaaaaacaaaataaa

SEQ ID NO: 148863 - DNA, 20 bp, synthetic construct
  source 1..20: mol_type = other DNA
atattttaaaaacaaaataa

SEQ ID NO: 148864 - DNA, 20 bp, synthetic construct
  source 1..20: mol_type = other DNA
tatattttaaaaacaaaata

SEQ ID NO: 148865 - DNA, 20 bp, synthetic construct
  source 1..20: mol_type = other DNA
atatattttaaaaacaaaat

SEQ ID NO: 148866 - DNA, 20 bp, synthetic construct
  source 1..20: mol_type = other DNA
tatatattttaaaaacaaaa

SEQ ID NO: 148867 - DNA, 20 bp, synthetic construct
  source 1..20: mol_type = other DNA
atatatattttaaaaacaaa

SEQ ID NO: 148868 - DNA, 20 bp, synthetic construct
  source 1..20: mol_type = other DNA
catatatattttaaaaacaa

SEQ ID NO: 148869 - DNA, 20 bp, synthetic construct
  source 1..20: mol_type = other DNA
acatatatattttaaaaaca

SEQ ID NO: 148870 - DNA, 20 bp, synthetic construct
  source 1..20: mol_type = other DNA
aacatatatattttaaaaac

SEQ ID NO: 148871 - DNA, 20 bp, synthetic construct
  source 1..20: mol_type = other DNA
caacatatatattttaaaaa

SEQ ID NO: 148872 - DNA, 20 bp, synthetic construct
  source 1..20: mol_type = other DNA
tcaacatatatattttaaaa

SEQ ID NO: 148873 - DNA, 20 bp, synthetic construct
  source 1..20: mol_type = other DNA
atcaacatatatattttaaa

SEQ ID NO: 148874 - DNA, 20 bp, synthetic construct
  source 1..20: mol_type = other DNA
aatcaacatatatattttaa

SEQ ID NO: 148875 - DNA, 20 bp, synthetic construct
  source 1..20: mol_type = other DNA
aaatcaacatatatatttta

SEQ ID NO: 148876 - DNA, 20 bp, synthetic construct
  source 1..20: mol_type = other DNA
gaaatcaacatatatatttt

SEQ ID NO: 148877 - DNA, 20 bp, synthetic construct
  source 1..20: mol_type = other DNA
agaaatcaacatatatattt

SEQ ID NO: 148878 - DNA, 20 bp, synthetic construct
  source 1..20: mol_type = other DNA
aagaaatcaacatatatatt

SEQ ID NO: 148879 - DNA, 20 bp, synthetic construct
  source 1..20: mol_type = other DNA
caagaaatcaacatatatat

SEQ ID NO: 148880 - DNA, 20 bp, synthetic construct
  source 1..20: mol_type = other DNA
acaagaaatcaacatatata

SEQ ID NO: 148881 - DNA, 20 bp, synthetic construct
  source 1..20: mol_type = other DNA
tacaagaaatcaacatatat

SEQ ID NO: 148882 - DNA, 20 bp, synthetic construct
  source 1..20: mol_type = other DNA
ttacaagaaatcaacatata

SEQ ID NO: 148883 - DNA, 20 bp, synthetic construct
  source 1..20: mol_type = other DNA
gttacaagaaatcaacatat

SEQ ID NO: 148884 - DNA, 20 bp, synthetic construct
  source 1..20: mol_type = other DNA
tgttacaagaaatcaacata

SEQ ID NO: 148885 - DNA, 20 bp, synthetic construct
  source 1..20: mol_type = other DNA
atgttacaagaaatcaacat

SEQ ID NO: 148886 - DNA, 20 bp, synthetic construct
  source 1..20: mol_type = other DNA
gatgttacaagaaatcaaca

SEQ ID NO: 148887 - DNA, 20 bp, synthetic construct
  source 1..20: mol_type = other DNA
ggatgttacaagaaatcaac

SEQ ID NO: 148888 - DNA, 20 bp, synthetic construct
  source 1..20: mol_type = other DNA
tggatgttacaagaaatcaa

SEQ ID NO: 148889 - DNA, 20 bp, synthetic construct
  source 1..20: mol_type = other DNA
ttggatgttacaagaaatca

SEQ ID NO: 148890 - DNA, 20 bp, synthetic construct
  source 1..20: mol_type = other DNA
attggatgttacaagaaatc

SEQ ID NO: 148891 - DNA, 20 bp, synthetic construct
  source 1..20: mol_type = other DNA
tattggatgttacaagaaat

SEQ ID NO: 148892 - DNA, 20 bp, synthetic construct
  source 1..20: mol_type = other DNA
ctattggatgttacaagaaa

SEQ ID NO: 148893 - DNA, 20 bp, synthetic construct
  source 1..20: mol_type = other DNA
cctattggatgttacaagaa

SEQ ID NO: 148894 - DNA, 20 bp, synthetic construct
  source 1..20: mol_type = other DNA
tcctattggatgttacaaga

SEQ ID NO: 148895 - DNA, 20 bp, synthetic construct
  source 1..20: mol_type = other DNA
ttcctattggatgttacaag

SEQ ID NO: 148896 - DNA, 20 bp, synthetic construct
  source 1..20: mol_type = other DNA
attcctattggatgttacaa

SEQ ID NO: 148897 - DNA, 20 bp, synthetic construct
  source 1..20: mol_type = other DNA
cattcctattggatgttaca

SEQ ID NO: 148898 - DNA, 20 bp, synthetic construct
  source 1..20: mol_type = other DNA
gcattcctattggatgttac

SEQ ID NO: 148899 - DNA, 20 bp, synthetic construct
  source 1..20: mol_type = other DNA
agcattcctattggatgtta

SEQ ID NO: 148900 - DNA, 20 bp, synthetic construct
  source 1..20: mol_type = other DNA
tagcattcctattggatgtt

SEQ ID NO: 148901 - DNA, 20 bp, synthetic construct
  source 1..20: mol_type = other DNA
ttagcattcctattggatgt

SEQ ID NO: 148902 - DNA, 20 bp, synthetic construct
  source 1..20: mol_type = other DNA
gttagcattcctattggatg

SEQ ID NO: 148903 - DNA, 20 bp, synthetic construct
  source 1..20: mol_type = other DNA
tgttagcattcctattggat

SEQ ID NO: 148904 - DNA, 20 bp, synthetic construct
  source 1..20: mol_type = other DNA
ctgttagcattcctattgga

SEQ ID NO: 148905 - DNA, 20 bp, synthetic construct
  source 1..20: mol_type = other DNA
actgttagcattcctattgg

SEQ ID NO: 148906 - DNA, 20 bp, synthetic construct
  source 1..20: mol_type = other DNA
aactgttagcattcctattg

SEQ ID NO: 148907 - DNA, 20 bp, synthetic construct
  source 1..20: mol_type = other DNA
gaactgttagcattcctatt

SEQ ID NO: 148908 - DNA, 20 bp, synthetic construct
  source 1..20: mol_type = other DNA
tgaactgttagcattcctat

SEQ ID NO: 148909 - DNA, 20 bp, synthetic construct
  source 1..20: mol_type = other DNA
gtgaactgttagcattccta

SEQ ID NO: 148910 - DNA, 20 bp, synthetic construct
  source 1..20: mol_type = other DNA
agtgaactgttagcattcct

SEQ ID NO: 148911 - DNA, 20 bp, synthetic construct
  source 1..20: mol_type = other DNA
aagtgaactgttagcattcc

SEQ ID NO: 148912 - DNA, 20 bp, synthetic construct
  source 1..20: mol_type = other DNA
caagtgaactgttagcattc

SEQ ID NO: 148913 - DNA, 20 bp, synthetic construct
  source 1..20: mol_type = other DNA
gcaagtgaactgttagcatt

SEQ ID NO: 148914 - DNA, 20 bp, synthetic construct
  source 1..20: mol_type = other DNA
tgcaagtgaactgttagcat

SEQ ID NO: 148915 - DNA, 20 bp, synthetic construct
  source 1..20: mol_type = other DNA
ctgcaagtgaactgttagca

SEQ ID NO: 148916 - DNA, 20 bp, synthetic construct
  source 1..20: mol_type = other DNA
actgcaagtgaactgttagc

SEQ ID NO: 148917 - DNA, 20 bp, synthetic construct
  source 1..20: mol_type = other DNA
cactgcaagtgaactgttag

SEQ ID NO: 148918 - DNA, 20 bp, synthetic construct
  source 1..20: mol_type = other DNA
ccactgcaagtgaactgtta

SEQ ID NO: 148919 - DNA, 20 bp, synthetic construct
  source 1..20: mol_type = other DNA
tccactgcaagtgaactgtt

SEQ ID NO: 148920 - DNA, 20 bp, synthetic construct
  source 1..20: mol_type = other DNA
ttccactgcaagtgaactgt

SEQ ID NO: 148921 - DNA, 20 bp, synthetic construct
  source 1..20: mol_type = other DNA
cttccactgcaagtgaactg

SEQ ID NO: 148922 - DNA, 20 bp, synthetic construct
  source 1..20: mol_type = other DNA
tcttccactgcaagtgaact

SEQ ID NO: 148923 - DNA, 20 bp, synthetic construct
  source 1..20: mol_type = other DNA
atcttccactgcaagtgaac

SEQ ID NO: 148924 - DNA, 20 bp, synthetic construct
  source 1..20: mol_type = other DNA
tatcttccactgcaagtgaa

SEQ ID NO: 148925 - DNA, 20 bp, synthetic construct
  source 1..20: mol_type = other DNA
gtatcttccactgcaagtga

SEQ ID NO: 148926 - DNA, 20 bp, synthetic construct
  source 1..20: mol_type = other DNA
agtatcttccactgcaagtg

SEQ ID NO: 148927 - DNA, 20 bp, synthetic construct
  source 1..20: mol_type = other DNA
aagtatcttccactgcaagt

SEQ ID NO: 148928 - DNA, 20 bp, synthetic construct
  source 1..20: mol_type = other DNA
caagtatcttccactgcaag

SEQ ID NO: 148929 - DNA, 20 bp, synthetic construct
  source 1..20: mol_type = other DNA
ccaagtatcttccactgcaa

SEQ ID NO: 148930 - DNA, 20 bp, synthetic construct
  source 1..20: mol_type = other DNA
tccaagtatcttccactgca

SEQ ID NO: 148931 - DNA, 20 bp, synthetic construct
  source 1..20: mol_type = other DNA
gtccaagtatcttccactgc

SEQ ID NO: 148932 - DNA, 20 bp, synthetic construct
  source 1..20: mol_type = other DNA
ggtccaagtatcttccactg

SEQ ID NO: 148933 - DNA, 20 bp, synthetic construct
  source 1..20: mol_type = other DNA
cggtccaagtatcttccact

SEQ ID NO: 148934 - DNA, 20 bp, synthetic construct
  source 1..20: mol_type = other DNA
tcggtccaagtatcttccac

SEQ ID NO: 148935 - DNA, 20 bp, synthetic construct
  source 1..20: mol_type = other DNA
ctcggtccaagtatcttcca

SEQ ID NO: 148936 - DNA, 20 bp, synthetic construct
  source 1..20: mol_type = other DNA
actcggtccaagtatcttcc

SEQ ID NO: 148937 - DNA, 20 bp, synthetic construct
  source 1..20: mol_type = other DNA
tactcggtccaagtatcttc

SEQ ID NO: 148938 - DNA, 20 bp, synthetic construct
  source 1..20: mol_type = other DNA
ctactcggtccaagtatctt

SEQ ID NO: 148939 - DNA, 20 bp, synthetic construct
  source 1..20: mol_type = other DNA
tctactcggtccaagtatct

SEQ ID NO: 148940 - DNA, 20 bp, synthetic construct
  source 1..20: mol_type = other DNA
ctctactcggtccaagtatc

SEQ ID NO: 148941 - DNA, 20 bp, synthetic construct
  source 1..20: mol_type = other DNA
cctctactcggtccaagtat

SEQ ID NO: 148942 - DNA, 20 bp, synthetic construct
  source 1..20: mol_type = other DNA
gcctctactcggtccaagta

SEQ ID NO: 148943 - DNA, 20 bp, synthetic construct
  source 1..20: mol_type = other DNA
tgcctctactcggtccaagt

SEQ ID NO: 148944 - DNA, 20 bp, synthetic construct
  source 1..20: mol_type = other DNA
atgcctctactcggtccaag

SEQ ID NO: 148945 - DNA, 20 bp, synthetic construct
  source 1..20: mol_type = other DNA
aatgcctctactcggtccaa

SEQ ID NO: 148946 - DNA, 20 bp, synthetic construct
  source 1..20: mol_type = other DNA
aaatgcctctactcggtcca

SEQ ID NO: 148947 - DNA, 20 bp, synthetic construct
  source 1..20: mol_type = other DNA
taaatgcctctactcggtcc

SEQ ID NO: 148948 - DNA, 20 bp, synthetic construct
  source 1..20: mol_type = other DNA
ctaaatgcctctactcggtc

SEQ ID NO: 148949 - DNA, 20 bp, synthetic construct
  source 1..20: mol_type = other DNA
cctaaatgcctctactcggt

SEQ ID NO: 148950 - DNA, 20 bp, synthetic construct
  source 1..20: mol_type = other DNA
tcctaaatgcctctactcgg

SEQ ID NO: 148951 - DNA, 20 bp, synthetic construct
  source 1..20: mol_type = other DNA
ttcctaaatgcctctactcg

SEQ ID NO: 148952 - DNA, 20 bp, synthetic construct
  source 1..20: mol_type = other DNA
gttcctaaatgcctctactc

SEQ ID NO: 148953 - DNA, 20 bp, synthetic construct
  source 1..20: mol_type = other DNA
agttcctaaatgcctctact

SEQ ID NO: 148954 - DNA, 20 bp, synthetic construct
  source 1..20: mol_type = other DNA
aagttcctaaatgcctctac

SEQ ID NO: 148955 - DNA, 20 bp, synthetic construct
  source 1..20: mol_type = other DNA
caagttcctaaatgcctcta

SEQ ID NO: 148956 - DNA, 20 bp, synthetic construct
  source 1..20: mol_type = other DNA
ccaagttcctaaatgcctct

SEQ ID NO: 148957 - DNA, 20 bp, synthetic construct
  source 1..20: mol_type = other DNA
cccaagttcctaaatgcctc

SEQ ID NO: 148958 - DNA, 20 bp, synthetic construct
  source 1..20: mol_type = other DNA
ccccaagttcctaaatgcct

SEQ ID NO: 148959 - DNA, 20 bp, synthetic construct
  source 1..20: mol_type = other DNA
cccccaagttcctaaatgcc

SEQ ID NO: 148960 - DNA, 20 bp, synthetic construct
  source 1..20: mol_type = other DNA
gcccccaagttcctaaatgc

SEQ ID NO: 148961 - DNA, 20 bp, synthetic construct
  source 1..20: mol_type = other DNA
agcccccaagttcctaaatg

SEQ ID NO: 148962 - DNA, 20 bp, synthetic construct
  source 1..20: mol_type = other DNA
tagcccccaagttcctaaat

SEQ ID NO: 148963 - DNA, 20 bp, synthetic construct
  source 1..20: mol_type = other DNA
atagcccccaagttcctaaa

SEQ ID NO: 148964 - DNA, 20 bp, synthetic construct
  source 1..20: mol_type = other DNA
aatagcccccaagttcctaa

SEQ ID NO: 148965 - DNA, 20 bp, synthetic construct
  source 1..20: mol_type = other DNA
gaatagcccccaagttccta

SEQ ID NO: 148966 - DNA, 20 bp, synthetic construct
  source 1..20: mol_type = other DNA
ggaatagcccccaagttcct

SEQ ID NO: 148967 - DNA, 20 bp, synthetic construct
  source 1..20: mol_type = other DNA
tggaatagcccccaagttcc

SEQ ID NO: 148968 - DNA, 20 bp, synthetic construct
  source 1..20: mol_type = other DNA
atggaatagcccccaagttc

SEQ ID NO: 148969 - DNA, 20 bp, synthetic construct
  source 1..20: mol_type = other DNA
tatggaatagcccccaagtt

SEQ ID NO: 148970 - DNA, 20 bp, synthetic construct
  source 1..20: mol_type = other DNA
ttatggaatagcccccaagt

SEQ ID NO: 148971 - DNA, 20 bp, synthetic construct
  source 1..20: mol_type = other DNA
attatggaatagcccccaag

SEQ ID NO: 148972 - DNA, 20 bp, synthetic construct
  source 1..20: mol_type = other DNA
aattatggaatagcccccaa

SEQ ID NO: 148973 - DNA, 20 bp, synthetic construct
  source 1..20: mol_type = other DNA
gaattatggaatagccccca

SEQ ID NO: 148974 - DNA, 20 bp, synthetic construct
  source 1..20: mol_type = other DNA
ggaattatggaatagccccc

SEQ ID NO: 148975 - DNA, 20 bp, synthetic construct
  source 1..20: mol_type = other DNA
tggaattatggaatagcccc

SEQ ID NO: 148976 - DNA, 20 bp, synthetic construct
  source 1..20: mol_type = other DNA
atggaattatggaatagccc

SEQ ID NO: 148977 - DNA, 20 bp, synthetic construct
  source 1..20: mol_type = other DNA
tatggaattatggaatagcc

SEQ ID NO: 148978 - DNA, 20 bp, synthetic construct
  source 1..20: mol_type = other DNA
atatggaattatggaatagc

SEQ ID NO: 148979 - DNA, 20 bp, synthetic construct
  source 1..20: mol_type = other DNA
catatggaattatggaatag

SEQ ID NO: 148980 - DNA, 20 bp, synthetic construct
  source 1..20: mol_type = other DNA
gcatatggaattatggaata

SEQ ID NO: 148981 - DNA, 20 bp, synthetic construct
  source 1..20: mol_type = other DNA
agcatatggaattatggaat

SEQ ID NO: 148982 - DNA, 20 bp, synthetic construct
  source 1..20: mol_type = other DNA
cagcatatggaattatggaa

SEQ ID NO: 148983 - DNA, 20 bp, synthetic construct
  source 1..20: mol_type = other DNA
acagcatatggaattatgga

SEQ ID NO: 148984 - DNA, 20 bp, synthetic construct
  source 1..20: mol_type = other DNA
aacagcatatggaattatgg

SEQ ID NO: 148985 - DNA, 20 bp, synthetic construct
  source 1..20: mol_type = other DNA
aaacagcatatggaattatg

SEQ ID NO: 148986 - DNA, 20 bp, synthetic construct
  source 1..20: mol_type = other DNA
gaaacagcatatggaattat

SEQ ID NO: 148987 - DNA, 20 bp, synthetic construct
  source 1..20: mol_type = other DNA
tgaaacagcatatggaatta

SEQ ID NO: 148988 - DNA, 20 bp, synthetic construct
  source 1..20: mol_type = other DNA
ctgaaacagcatatggaatt

SEQ ID NO: 148989 - DNA, 20 bp, synthetic construct
  source 1..20: mol_type = other DNA
tctgaaacagcatatggaat

SEQ ID NO: 148990 - DNA, 20 bp, synthetic construct
  source 1..20: mol_type = other DNA
ctctgaaacagcatatggaa

SEQ ID NO: 148991 - DNA, 20 bp, synthetic construct
  source 1..20: mol_type = other DNA
actctgaaacagcatatgga

SEQ ID NO: 148992 - DNA, 20 bp, synthetic construct
  source 1..20: mol_type = other DNA
gactctgaaacagcatatgg

SEQ ID NO: 148993 - DNA, 20 bp, synthetic construct
  source 1..20: mol_type = other DNA
ggactctgaaacagcatatg

SEQ ID NO: 148994 - DNA, 20 bp, synthetic construct
  source 1..20: mol_type = other DNA
gggactctgaaacagcatat

SEQ ID NO: 148995 - DNA, 20 bp, synthetic construct
  source 1..20: mol_type = other DNA
cgggactctgaaacagcata

SEQ ID NO: 148996 - DNA, 20 bp, synthetic construct
  source 1..20: mol_type = other DNA
gcgggactctgaaacagcat

SEQ ID NO: 148997 - DNA, 20 bp, synthetic construct
  source 1..20: mol_type = other DNA
tgcgggactctgaaacagca

SEQ ID NO: 148998 - DNA, 20 bp, synthetic construct
  source 1..20: mol_type = other DNA
ctgcgggactctgaaacagc

SEQ ID NO: 148999 - DNA, 20 bp, synthetic construct
  source 1..20: mol_type = other DNA
cctgcgggactctgaaacag

SEQ ID NO: 149000 - DNA, 20 bp, synthetic construct
  source 1..20: mol_type = other DNA
acctgcgggactctgaaaca

SEQ ID NO: 149001 - DNA, 20 bp, synthetic construct
  source 1..20: mol_type = other DNA
tacctgcgggactctgaaac

SEQ ID NO: 149002 - DNA, 20 bp, synthetic construct
  source 1..20: mol_type = other DNA
gtacctgcgggactctgaaa

SEQ ID NO: 149003 - DNA, 20 bp, synthetic construct
  source 1..20: mol_type = other DNA
ggtacctgcgggactctgaa

SEQ ID NO: 149004 - DNA, 20 bp, synthetic construct
  source 1..20: mol_type = other DNA
gggtacctgcgggactctga

SEQ ID NO: 149005 - DNA, 20 bp, synthetic construct
  source 1..20: mol_type = other DNA
ggggtacctgcgggactctg

SEQ ID NO: 149006 - DNA, 20 bp, synthetic construct
  source 1..20: mol_type = other DNA
tggggtacctgcgggactct

SEQ ID NO: 149007 - DNA, 20 bp, synthetic construct
  source 1..20: mol_type = other DNA
ctggggtacctgcgggactc

SEQ ID NO: 149008 - DNA, 20 bp, synthetic construct
  source 1..20: mol_type = other DNA
gctggggtacctgcgggact

SEQ ID NO: 149009 - DNA, 20 bp, synthetic construct
  source 1..20: mol_type = other DNA
agctggggtacctgcgggac

SEQ ID NO: 149010 - DNA, 20 bp, synthetic construct
  source 1..20: mol_type = other DNA
gagctggggtacctgcggga

SEQ ID NO: 149011 - DNA, 20 bp, synthetic construct
  source 1..20: mol_type = other DNA
agagctggggtacctgcggg

SEQ ID NO: 149012 - DNA, 20 bp, synthetic construct
  source 1..20: mol_type = other DNA
cagagctggggtacctgcgg

SEQ ID NO: 149013 - DNA, 20 bp, synthetic construct
  source 1..20: mol_type = other DNA
gcagagctggggtacctgcg

SEQ ID NO: 149014 - DNA, 20 bp, synthetic construct
  source 1..20: mol_type = other DNA
agcagagctggggtacctgc

SEQ ID NO: 149015 - DNA, 20 bp, synthetic construct
  source 1..20: mol_type = other DNA
aagcagagctggggtacctg

SEQ ID NO: 149016 - DNA, 20 bp, synthetic construct
  source 1..20: mol_type = other DNA
caagcagagctggggtacct

SEQ ID NO: 149017 - DNA, 20 bp, synthetic construct
  source 1..20: mol_type = other DNA
gcaagcagagctggggtacc

SEQ ID NO: 149018 - DNA, 20 bp, synthetic construct
  source 1..20: mol_type = other DNA
ggcaagcagagctggggtac

SEQ ID NO: 149019 - DNA, 20 bp, synthetic construct
  source 1..20: mol_type = other DNA
cggcaagcagagctggggta

SEQ ID NO: 149020 - DNA, 20 bp, synthetic construct
  source 1..20: mol_type = other DNA
tcggcaagcagagctggggt

SEQ ID NO: 149021 - DNA, 20 bp, synthetic construct
  source 1..20: mol_type = other DNA
ttcggcaagcagagctgggg

SEQ ID NO: 149022 - DNA, 20 bp, synthetic construct
  source 1..20: mol_type = other DNA
tttcggcaagcagagctggg

SEQ ID NO: 149023 - DNA, 20 bp, synthetic construct
  source 1..20: mol_type = other DNA
gtttcggcaagcagagctgg

SEQ ID NO: 149024 - DNA, 20 bp, synthetic construct
  source 1..20: mol_type = other DNA
agtttcggcaagcagagctg

SEQ ID NO: 149025 - DNA, 20 bp, synthetic construct
  source 1..20: mol_type = other DNA
cagtttcggcaagcagagct

SEQ ID NO: 149026 - DNA, 20 bp, synthetic construct
  source 1..20: mol_type = other DNA
ccagtttcggcaagcagagc

SEQ ID NO: 149027 - DNA, 20 bp, synthetic construct
  source 1..20: mol_type = other DNA
tccagtttcggcaagcagag

SEQ ID NO: 149028 - DNA, 20 bp, synthetic construct
  source 1..20: mol_type = other DNA
ttccagtttcggcaagcaga

SEQ ID NO: 149029 - DNA, 20 bp, synthetic construct
  source 1..20: mol_type = other DNA
cttccagtttcggcaagcag

SEQ ID NO: 149030 - DNA, 20 bp, synthetic construct
  source 1..20: mol_type = other DNA
acttccagtttcggcaagca

SEQ ID NO: 149031 - DNA, 20 bp, synthetic construct
  source 1..20: mol_type = other DNA
aacttccagtttcggcaagc

SEQ ID NO: 149032 - DNA, 20 bp, synthetic construct
  source 1..20: mol_type = other DNA
taacttccagtttcggcaag

SEQ ID NO: 149033 - DNA, 20 bp, synthetic construct
  source 1..20: mol_type = other DNA
ataacttccagtttcggcaa

SEQ ID NO: 149034 - DNA, 20 bp, synthetic construct
  source 1..20: mol_type = other DNA
aataacttccagtttcggca

SEQ ID NO: 149035 - DNA, 20 bp, synthetic construct
  source 1..20: mol_type = other DNA
aaataacttccagtttcggc

SEQ ID NO: 149036 - DNA, 20 bp, synthetic construct
  source 1..20: mol_type = other DNA
taaataacttccagtttcgg

SEQ ID NO: 149037 - DNA, 20 bp, synthetic construct
  source 1..20: mol_type = other DNA
ataaataacttccagtttcg

SEQ ID NO: 149038 - DNA, 20 bp, synthetic construct
  source 1..20: mol_type = other DNA
aataaataacttccagtttc

SEQ ID NO: 149039 - DNA, 20 bp, synthetic construct
  source 1..20: mol_type = other DNA
aaataaataacttccagttt

SEQ ID NO: 149040 - DNA, 20 bp, synthetic construct
  source 1..20: mol_type = other DNA
aaaataaataacttccagtt

SEQ ID NO: 149041 - DNA, 20 bp, synthetic construct
  source 1..20: mol_type = other DNA
aaaaataaataacttccagt

SEQ ID NO: 149042 - DNA, 20 bp, synthetic construct
  source 1..20: mol_type = other DNA
aaaaaataaataacttccag

SEQ ID NO: 149043 - DNA, 20 bp, synthetic construct
  source 1..20: mol_type = other DNA
taaaaaataaataacttcca

SEQ ID NO: 149044 - DNA, 20 bp, synthetic construct
  source 1..20: mol_type = other DNA
ttaaaaaataaataacttcc

SEQ ID NO: 149045 - DNA, 20 bp, synthetic construct
  source 1..20: mol_type = other DNA
attaaaaaataaataacttc

SEQ ID NO: 149046 - DNA, 20 bp, synthetic construct
  source 1..20: mol_type = other DNA
tattaaaaaataaataactt

SEQ ID NO: 149047 - DNA, 20 bp, synthetic construct
  source 1..20: mol_type = other DNA
ttattaaaaaataaataact

SEQ ID NO: 149048 - DNA, 20 bp, synthetic construct
  source 1..20: mol_type = other DNA
gttattaaaaaataaataac

SEQ ID NO: 149049 - DNA, 20 bp, synthetic construct
  source 1..20: mol_type = other DNA
ggttattaaaaaataaataa

SEQ ID NO: 149050 - DNA, 20 bp, synthetic construct
  source 1..20: mol_type = other DNA
gggttattaaaaaataaata

SEQ ID NO: 149051 - DNA, 20 bp, synthetic construct
  source 1..20: mol_type = other DNA
agggttattaaaaaataaat

SEQ ID NO: 149052 - DNA, 20 bp, synthetic construct
  source 1..20: mol_type = other DNA
aagggttattaaaaaataaa

SEQ ID NO: 149053 - DNA, 20 bp, synthetic construct
  source 1..20: mol_type = other DNA
caagggttattaaaaaataa

SEQ ID NO: 149054 - DNA, 20 bp, synthetic construct
  source 1..20: mol_type = other DNA
tcaagggttattaaaaaata

SEQ ID NO: 149055 - DNA, 20 bp, synthetic construct
  source 1..20: mol_type = other DNA
ttcaagggttattaaaaaat

SEQ ID NO: 149056 - DNA, 20 bp, synthetic construct
  source 1..20: mol_type = other DNA
tttcaagggttattaaaaaa

SEQ ID NO: 149057 - DNA, 20 bp, synthetic construct
  source 1..20: mol_type = other DNA
ctttcaagggttattaaaaa

SEQ ID NO: 149058 - DNA, 20 bp, synthetic construct
  source 1..20: mol_type = other DNA
actttcaagggttattaaaa

SEQ ID NO: 149059 - DNA, 20 bp, synthetic construct
  source 1..20: mol_type = other DNA
gactttcaagggttattaaa

SEQ ID NO: 149060 - DNA, 20 bp, synthetic construct
  source 1..20: mol_type = other DNA
tgactttcaagggttattaa

SEQ ID NO: 149061 - DNA, 20 bp, synthetic construct
  source 1..20: mol_type = other DNA
atgactttcaagggttatta

SEQ ID NO: 149062 - DNA, 20 bp, synthetic construct
  source 1..20: mol_type = other DNA
catgactttcaagggttatt

SEQ ID NO: 149063 - DNA, 20 bp, synthetic construct
  source 1..20: mol_type = other DNA
tcatgactttcaagggttat

SEQ ID NO: 149064 - DNA, 20 bp, synthetic construct
  source 1..20: mol_type = other DNA
ttcatgactttcaagggtta

SEQ ID NO: 149065 - DNA, 20 bp, synthetic construct
  source 1..20: mol_type = other DNA
gttcatgactttcaagggtt

SEQ ID NO: 149066 - DNA, 20 bp, synthetic construct
  source 1..20: mol_type = other DNA
tgttcatgactttcaagggt

SEQ ID NO: 149067 - DNA, 20 bp, synthetic construct
  source 1..20: mol_type = other DNA
gtgttcatgactttcaaggg

SEQ ID NO: 149068 - DNA, 20 bp, synthetic construct
  source 1..20: mol_type = other DNA
tgtgttcatgactttcaagg

SEQ ID NO: 149069 - DNA, 20 bp, synthetic construct
  source 1..20: mol_type = other DNA
atgtgttcatgactttcaag

SEQ ID NO: 149070 - DNA, 20 bp, synthetic construct
  source 1..20: mol_type = other DNA
gatgtgttcatgactttcaa

SEQ ID NO: 149071 - DNA, 20 bp, synthetic construct
  source 1..20: mol_type = other DNA
tgatgtgttcatgactttca

SEQ ID NO: 149072 - DNA, 20 bp, synthetic construct
  source 1..20: mol_type = other DNA
ctgatgtgttcatgactttc

SEQ ID NO: 149073 - DNA, 20 bp, synthetic construct
  source 1..20: mol_type = other DNA
gctgatgtgttcatgacttt

SEQ ID NO: 149074 - DNA, 20 bp, synthetic construct
  source 1..20: mol_type = other DNA
agctgatgtgttcatgactt

SEQ ID NO: 149075 - DNA, 20 bp, synthetic construct
  source 1..20: mol_type = other DNA
tagctgatgtgttcatgact

SEQ ID NO: 149076 - DNA, 20 bp, synthetic construct
  source 1..20: mol_type = other DNA
ctagctgatgtgttcatgac

SEQ ID NO: 149077 - DNA, 20 bp, synthetic construct
  source 1..20: mol_type = other DNA
gctagctgatgtgttcatga

SEQ ID NO: 149078 - DNA, 20 bp, synthetic construct
  source 1..20: mol_type = other DNA
tgctagctgatgtgttcatg

SEQ ID NO: 149079 - DNA, 20 bp, synthetic construct
  source 1..20: mol_type = other DNA
ttgctagctgatgtgttcat

SEQ ID NO: 149080 - DNA, 20 bp, synthetic construct
  source 1..20: mol_type = other DNA
tttgctagctgatgtgttca

SEQ ID NO: 149081 - DNA, 20 bp, synthetic construct
  source 1..20: mol_type = other DNA
ttttgctagctgatgtgttc

SEQ ID NO: 149082 - DNA, 20 bp, synthetic construct
  source 1..20: mol_type = other DNA
cttttgctagctgatgtgtt

SEQ ID NO: 149083 - DNA, 20 bp, synthetic construct
  source 1..20: mol_type = other DNA
tcttttgctagctgatgtgt

SEQ ID NO: 149084 - DNA, 20 bp, synthetic construct
  source 1..20: mol_type = other DNA
ttcttttgctagctgatgtg

SEQ ID NO: 149085 - DNA, 20 bp, synthetic construct
  source 1..20: mol_type = other DNA
cttcttttgctagctgatgt

SEQ ID NO: 149086 - DNA, 20 bp, synthetic construct
  source 1..20: mol_type = other DNA
acttcttttgctagctgatg

SEQ ID NO: 149087 - DNA, 20 bp, synthetic construct
  source 1..20: mol_type = other DNA
tacttcttttgctagctgat

SEQ ID NO: 149088 - DNA, 20 bp, synthetic construct
  source 1..20: mol_type = other DNA
ttacttcttttgctagctga

SEQ ID NO: 149089 - DNA, 20 bp, synthetic construct
  source 1..20: mol_type = other DNA
gttacttcttttgctagctg

SEQ ID NO: 149090 - DNA, 20 bp, synthetic construct
  source 1..20: mol_type = other DNA
tgttacttcttttgctagct

SEQ ID NO: 149091 - DNA, 20 bp, synthetic construct
  source 1..20: mol_type = other DNA
ttgttacttcttttgctagc

SEQ ID NO: 149092 - DNA, 20 bp, synthetic construct
  source 1..20: mol_type = other DNA
cttgttacttcttttgctag

SEQ ID NO: 149093 - DNA, 20 bp, synthetic construct
  source 1..20: mol_type = other DNA
tcttgttacttcttttgcta

SEQ ID NO: 149094 - DNA, 20 bp, synthetic construct
  source 1..20: mol_type = other DNA
ctcttgttacttcttttgct

SEQ ID NO: 149095 - DNA, 20 bp, synthetic construct
  source 1..20: mol_type = other DNA
actcttgttacttcttttgc

SEQ ID NO: 149096 - DNA, 20 bp, synthetic construct
  source 1..20: mol_type = other DNA
cactcttgttacttcttttg

SEQ ID NO: 149097 - DNA, 20 bp, synthetic construct
  source 1..20: mol_type = other DNA
tcactcttgttacttctttt

SEQ ID NO: 149098 - DNA, 20 bp, synthetic construct
  source 1..20: mol_type = other DNA
atcactcttgttacttcttt

SEQ ID NO: 149099 - DNA, 20 bp, synthetic construct
  source 1..20: mol_type = other DNA
aatcactcttgttacttctt

SEQ ID NO: 149100 - DNA, 20 bp, synthetic construct
  source 1..20: mol_type = other DNA
gaatcactcttgttacttct

SEQ ID NO: 149101 - DNA, 20 bp, synthetic construct
  source 1..20: mol_type = other DNA
agaatcactcttgttacttc

SEQ ID NO: 149102 - DNA, 20 bp, synthetic construct
  source 1..20: mol_type = other DNA
aagaatcactcttgttactt

SEQ ID NO: 149103 - DNA, 20 bp, synthetic construct
  source 1..20: mol_type = other DNA
caagaatcactcttgttact

SEQ ID NO: 149104 - DNA, 20 bp, synthetic construct
  source 1..20: mol_type = other DNA
gcaagaatcactcttgttac

SEQ ID NO: 149105 - DNA, 20 bp, synthetic construct
  source 1..20: mol_type = other DNA
agcaagaatcactcttgtta

SEQ ID NO: 149106 - DNA, 20 bp, synthetic construct
  source 1..20: mol_type = other DNA
cagcaagaatcactcttgtt

SEQ ID NO: 149107 - DNA, 20 bp, synthetic construct
  source 1..20: mol_type = other DNA
gcagcaagaatcactcttgt

SEQ ID NO: 149108 - DNA, 20 bp, synthetic construct
  source 1..20: mol_type = other DNA
agcagcaagaatcactcttg

SEQ ID NO: 149109 - DNA, 20 bp, synthetic construct
  source 1..20: mol_type = other DNA
tagcagcaagaatcactctt

SEQ ID NO: 149110 - DNA, 20 bp, synthetic construct
  source 1..20: mol_type = other DNA
atagcagcaagaatcactct

SEQ ID NO: 149111 - DNA, 20 bp, synthetic construct
  source 1..20: mol_type = other DNA
aatagcagcaagaatcactc

SEQ ID NO: 149112 - DNA, 20 bp, synthetic construct
  source 1..20: mol_type = other DNA
taatagcagcaagaatcact

SEQ ID NO: 149113 - DNA, 20 bp, synthetic construct
  source 1..20: mol_type = other DNA
gtaatagcagcaagaatcac

SEQ ID NO: 149114 - DNA, 20 bp, synthetic construct
  source 1..20: mol_type = other DNA
agtaatagcagcaagaatca

SEQ ID NO: 149115 - DNA, 20 bp, synthetic construct
  source 1..20: mol_type = other DNA
cagtaatagcagcaagaatc

SEQ ID NO: 149116 - DNA, 20 bp, synthetic construct
  source 1..20: mol_type = other DNA
gcagtaatagcagcaagaat

SEQ ID NO: 149117 - DNA, 20 bp, synthetic construct
  source 1..20: mol_type = other DNA
agcagtaatagcagcaagaa

SEQ ID NO: 149118 - DNA, 20 bp, synthetic construct
  source 1..20: mol_type = other DNA
tagcagtaatagcagcaaga

SEQ ID NO: 149119 - DNA, 20 bp, synthetic construct
  source 1..20: mol_type = other DNA
ttagcagtaatagcagcaag

SEQ ID NO: 149120 - DNA, 20 bp, synthetic construct
  source 1..20: mol_type = other DNA
tttagcagtaatagcagcaa

SEQ ID NO: 149121 - DNA, 20 bp, synthetic construct
  source 1..20: mol_type = other DNA
ttttagcagtaatagcagca

SEQ ID NO: 149122 - DNA, 20 bp, synthetic construct
  source 1..20: mol_type = other DNA
tttttagcagtaatagcagc

SEQ ID NO: 149123 - DNA, 20 bp, synthetic construct
  source 1..20: mol_type = other DNA
ttttttagcagtaatagcag

SEQ ID NO: 149124 - DNA, 20 bp, synthetic construct
  source 1..20: mol_type = other DNA
tttttttagcagtaatagca

SEQ ID NO: 149125 - DNA, 20 bp, synthetic construct
  source 1..20: mol_type = other DNA
ttttttttagcagtaatagc

SEQ ID NO: 149126 - DNA, 20 bp, synthetic construct
  source 1..20: mol_type = other DNA
tttttttttagcagtaatag

SEQ ID NO: 149127 - DNA, 20 bp, synthetic construct
  source 1..20: mol_type = other DNA
ttttttttttagcagtaata

SEQ ID NO: 149128 - DNA, 20 bp, synthetic construct
  source 1..20: mol_type = other DNA
tttttttttttagcagtaat

SEQ ID NO: 149129 - DNA, 20 bp, synthetic construct
  source 1..20: mol_type = other DNA
ttttttttttttagcagtaa

SEQ ID NO: 149130 - DNA, 20 bp, synthetic construct
  source 1..20: mol_type = other DNA
tttttttttttttagcagta

SEQ ID NO: 149131 - DNA, 20 bp, synthetic construct
  source 1..20: mol_type = other DNA
ttttttttttttttagcagt

SEQ ID NO: 149132 - DNA, 20 bp, synthetic construct
  source 1..20: mol_type = other DNA
tttttttttttttttagcag

SEQ ID NO: 149133 - DNA, 20 bp, synthetic construct
  source 1..20: mol_type = other DNA
ttttttttttttttttagca

SEQ ID NO: 149134 - DNA, 20 bp, synthetic construct
  source 1..20: mol_type = other DNA
tttttttttttttttttagc

SEQ ID NO: 149135 - DNA, 20 bp, synthetic construct
  source 1..20: mol_type = other DNA
ttttttttttttttttttag

SEQ ID NO: 149136 - DNA, 20 bp, synthetic construct
  source 1..20: mol_type = other DNA
ttttttttttttttttttta

SEQ ID NO: 149137 - DNA, 20 bp, synthetic construct
  source 1..20: mol_type = other DNA
tttttttttttttttttttt

SEQ ID NO: 149138 - DNA, 20 bp, synthetic construct
  source 1..20: mol_type = other DNA
tttttttttttttttttttt

SEQ ID NO: 149139 - DNA, 20 bp, synthetic construct
  source 1..20: mol_type = other DNA
attttttttttttttttttt

SEQ ID NO: 149140 - DNA, 20 bp, synthetic construct
  source 1..20: mol_type = other DNA
gatttttttttttttttttt

SEQ ID NO: 149141 - DNA, 20 bp, synthetic construct
  source 1..20: mol_type = other DNA
tgattttttttttttttttt

SEQ ID NO: 149142 - DNA, 20 bp, synthetic construct
  source 1..20: mol_type = other DNA
ttgatttttttttttttttt

SEQ ID NO: 149143 - DNA, 20 bp, synthetic construct
  source 1..20: mol_type = other DNA
cttgattttttttttttttt

SEQ ID NO: 149144 - DNA, 20 bp, synthetic construct
  source 1..20: mol_type = other DNA
tcttgatttttttttttttt

SEQ ID NO: 149145 - DNA, 20 bp, synthetic construct
  source 1..20: mol_type = other DNA
gtcttgattttttttttttt

SEQ ID NO: 149146 - DNA, 20 bp, synthetic construct
  source 1..20: mol_type = other DNA
agtcttgatttttttttttt

SEQ ID NO: 149147 - DNA, 20 bp, synthetic construct
  source 1..20: mol_type = other DNA
aagtcttgattttttttttt

SEQ ID NO: 149148 - DNA, 20 bp, synthetic construct
  source 1..20: mol_type = other DNA
caagtcttgatttttttttt

SEQ ID NO: 149149 - DNA, 20 bp, synthetic construct
  source 1..20: mol_type = other DNA
ccaagtcttgattttttttt

SEQ ID NO: 149150 - DNA, 20 bp, synthetic construct
  source 1..20: mol_type = other DNA
tccaagtcttgatttttttt

SEQ ID NO: 149151 - DNA, 20 bp, synthetic construct
  source 1..20: mol_type = other DNA
ttccaagtcttgattttttt

SEQ ID NO: 149152 - DNA, 20 bp, synthetic construct
  source 1..20: mol_type = other DNA
gttccaagtcttgatttttt

SEQ ID NO: 149153 - DNA, 20 bp, synthetic construct
  source 1..20: mol_type = other DNA
cgttccaagtcttgattttt

SEQ ID NO: 149154 - DNA, 20 bp, synthetic construct
  source 1..20: mol_type = other DNA
gcgttccaagtcttgatttt

SEQ ID NO: 149155 - DNA, 20 bp, synthetic construct
  source 1..20: mol_type = other DNA
ggcgttccaagtcttgattt

SEQ ID NO: 149156 - DNA, 20 bp, synthetic construct
  source 1..20: mol_type = other DNA
gggcgttccaagtcttgatt

SEQ ID NO: 149157 - DNA, 20 bp, synthetic construct
  source 1..20: mol_type = other DNA
agggcgttccaagtcttgat

SEQ ID NO: 149158 - DNA, 20 bp, synthetic construct
  source 1..20: mol_type = other DNA
aagggcgttccaagtcttga

SEQ ID NO: 149159 - DNA, 20 bp, synthetic construct
  source 1..20: mol_type = other DNA
aaagggcgttccaagtcttg

SEQ ID NO: 149160 - DNA, 20 bp, synthetic construct
  source 1..20: mol_type = other DNA
aaaagggcgttccaagtctt

SEQ ID NO: 149161 - DNA, 20 bp, synthetic construct
  source 1..20: mol_type = other DNA
taaaagggcgttccaagtct

SEQ ID NO: 149162 - DNA, 20 bp, synthetic construct
  source 1..20: mol_type = other DNA
gtaaaagggcgttccaagtc

SEQ ID NO: 149163 - DNA, 20 bp, synthetic construct
  source 1..20: mol_type = other DNA
agtaaaagggcgttccaagt

SEQ ID NO: 149164 - DNA, 20 bp, synthetic construct
  source 1..20: mol_type = other DNA
tagtaaaagggcgttccaag

SEQ ID NO: 149165 - DNA, 20 bp, synthetic construct
  source 1..20: mol_type = other DNA
ttagtaaaagggcgttccaa

SEQ ID NO: 149166 - DNA, 20 bp, synthetic construct
  source 1..20: mol_type = other DNA
tttagtaaaagggcgttcca

SEQ ID NO: 149167 - DNA, 20 bp, synthetic construct
  source 1..20: mol_type = other DNA
gtttagtaaaagggcgttcc

SEQ ID NO: 149168 - DNA, 20 bp, synthetic construct
  source 1..20: mol_type = other DNA
agtttagtaaaagggcgttc

SEQ ID NO: 149169 - DNA, 20 bp, synthetic construct
  source 1..20: mol_type = other DNA
aagtttagtaaaagggcgtt

SEQ ID NO: 149170 - DNA, 20 bp, synthetic construct
  source 1..20: mol_type = other DNA
caagtttagtaaaagggcgt

SEQ ID NO: 149171 - DNA, 20 bp, synthetic construct
  source 1..20: mol_type = other DNA
tcaagtttagtaaaagggcg

SEQ ID NO: 149172 - DNA, 20 bp, synthetic construct
  source 1..20: mol_type = other DNA
gtcaagtttagtaaaagggc

SEQ ID NO: 149173 - DNA, 20 bp, synthetic construct
  source 1..20: mol_type = other DNA
tgtcaagtttagtaaaaggg

SEQ ID NO: 149174 - DNA, 20 bp, synthetic construct
  source 1..20: mol_type = other DNA
ttgtcaagtttagtaaaagg

SEQ ID NO: 149175 - DNA, 20 bp, synthetic construct
  source 1..20: mol_type = other DNA
tttgtcaagtttagtaaaag

SEQ ID NO: 149176 - DNA, 20 bp, synthetic construct
  source 1..20: mol_type = other DNA
ctttgtcaagtttagtaaaa

SEQ ID NO: 149177 - DNA, 20 bp, synthetic construct
  source 1..20: mol_type = other DNA
actttgtcaagtttagtaaa

SEQ ID NO: 149178 - DNA, 20 bp, synthetic construct
  source 1..20: mol_type = other DNA
aactttgtcaagtttagtaa

SEQ ID NO: 149179 - DNA, 20 bp, synthetic construct
  source 1..20: mol_type = other DNA
aaactttgtcaagtttagta

SEQ ID NO: 149180 - DNA, 20 bp, synthetic construct
  source 1..20: mol_type = other DNA
gaaactttgtcaagtttagt

SEQ ID NO: 149181 - DNA, 20 bp, synthetic construct
  source 1..20: mol_type = other DNA
tgaaactttgtcaagtttag

SEQ ID NO: 149182 - DNA, 20 bp, synthetic construct
  source 1..20: mol_type = other DNA
ctgaaactttgtcaagttta

SEQ ID NO: 149183 - DNA, 20 bp, synthetic construct
  source 1..20: mol_type = other DNA
actgaaactttgtcaagttt

SEQ ID NO: 149184 - DNA, 20 bp, synthetic construct
  source 1..20: mol_type = other DNA
tactgaaactttgtcaagtt

SEQ ID NO: 149185 - DNA, 20 bp, synthetic construct
  source 1..20: mol_type = other DNA
ttactgaaactttgtcaagt

SEQ ID NO: 149186 - DNA, 20 bp, synthetic construct
  source 1..20: mol_type = other DNA
tttactgaaactttgtcaag

SEQ ID NO: 149187 - DNA, 20 bp, synthetic construct
  source 1..20: mol_type = other DNA
atttactgaaactttgtcaa

SEQ ID NO: 149188 - DNA, 20 bp, synthetic construct
  source 1..20: mol_type = other DNA
aatttactgaaactttgtca

SEQ ID NO: 149189 - DNA, 20 bp, synthetic construct
  source 1..20: mol_type = other DNA
gaatttactgaaactttgtc

SEQ ID NO: 149190 - DNA, 20 bp, synthetic construct
  source 1..20: mol_type = other DNA
agaatttactgaaactttgt

SEQ ID NO: 149191 - DNA, 20 bp, synthetic construct
  source 1..20: mol_type = other DNA
aagaatttactgaaactttg

SEQ ID NO: 149192 - DNA, 20 bp, synthetic construct
  source 1..20: mol_type = other DNA
taagaatttactgaaacttt

SEQ ID NO: 149193 - DNA, 20 bp, synthetic construct
  source 1..20: mol_type = other DNA
gtaagaatttactgaaactt

SEQ ID NO: 149194 - DNA, 20 bp, synthetic construct
  source 1..20: mol_type = other DNA
ggtaagaatttactgaaact

SEQ ID NO: 149195 - DNA, 20 bp, synthetic construct
  source 1..20: mol_type = other DNA
cggtaagaatttactgaaac

SEQ ID NO: 149196 - DNA, 20 bp, synthetic construct
  source 1..20: mol_type = other DNA
acggtaagaatttactgaaa

SEQ ID NO: 149197 - DNA, 20 bp, synthetic construct
  source 1..20: mol_type = other DNA
gacggtaagaatttactgaa

SEQ ID NO: 149198 - DNA, 20 bp, synthetic construct
  source 1..20: mol_type = other DNA
tgacggtaagaatttactga

SEQ ID NO: 149199 - DNA, 20 bp, synthetic construct
  source 1..20: mol_type = other DNA
ttgacggtaagaatttactg

SEQ ID NO: 149200 - DNA, 20 bp, synthetic construct
  source 1..20: mol_type = other DNA
tttgacggtaagaatttact

SEQ ID NO: 149201 - DNA, 20 bp, synthetic construct
  source 1..20: mol_type = other DNA
gtttgacggtaagaatttac

SEQ ID NO: 149202 - DNA, 20 bp, synthetic construct
  source 1..20: mol_type = other DNA
agtttgacggtaagaattta

SEQ ID NO: 149203 - DNA, 20 bp, synthetic construct
  source 1..20: mol_type = other DNA
cagtttgacggtaagaattt

SEQ ID NO: 149204 - DNA, 20 bp, synthetic construct
  source 1..20: mol_type = other DNA
tcagtttgacggtaagaatt

SEQ ID NO: 149205 - DNA, 20 bp, synthetic construct
  source 1..20: mol_type = other DNA
gtcagtttgacggtaagaat

SEQ ID NO: 149206 - DNA, 20 bp, synthetic construct
  source 1..20: mol_type = other DNA
cgtcagtttgacggtaagaa

SEQ ID NO: 149207 - DNA, 20 bp, synthetic construct
  source 1..20: mol_type = other DNA
ccgtcagtttgacggtaaga

SEQ ID NO: 149208 - DNA, 20 bp, synthetic construct
  source 1..20: mol_type = other DNA
tccgtcagtttgacggtaag

SEQ ID NO: 149209 - DNA, 20 bp, synthetic construct
  source 1..20: mol_type = other DNA
atccgtcagtttgacggtaa

SEQ ID NO: 149210 - DNA, 20 bp, synthetic construct
  source 1..20: mol_type = other DNA
aatccgtcagtttgacggta

SEQ ID NO: 149211 - DNA, 20 bp, synthetic construct
  source 1..20: mol_type = other DNA
taatccgtcagtttgacggt

SEQ ID NO: 149212 - DNA, 20 bp, synthetic construct
  source 1..20: mol_type = other DNA
ataatccgtcagtttgacgg

SEQ ID NO: 149213 - DNA, 20 bp, synthetic construct
  source 1..20: mol_type = other DNA
aataatccgtcagtttgacg

SEQ ID NO: 149214 - DNA, 20 bp, synthetic construct
  source 1..20: mol_type = other DNA
taataatccgtcagtttgac

SEQ ID NO: 149215 - DNA, 20 bp, synthetic construct
  source 1..20: mol_type = other DNA
ataataatccgtcagtttga

SEQ ID NO: 149216 - DNA, 20 bp, synthetic construct
  source 1..20: mol_type = other DNA
aataataatccgtcagtttg

SEQ ID NO: 149217 - DNA, 20 bp, synthetic construct
  source 1..20: mol_type = other DNA
aaataataatccgtcagttt

SEQ ID NO: 149218 - DNA, 20 bp, synthetic construct
  source 1..20: mol_type = other DNA
taaataataatccgtcagtt

SEQ ID NO: 149219 - DNA, 20 bp, synthetic construct
  source 1..20: mol_type = other DNA
ataaataataatccgtcagt

SEQ ID NO: 149220 - DNA, 20 bp, synthetic construct
  source 1..20: mol_type = other DNA
tataaataataatccgtcag

SEQ ID NO: 149221 - DNA, 20 bp, synthetic construct
  source 1..20: mol_type = other DNA
ttataaataataatccgtca

SEQ ID NO: 149222 - DNA, 20 bp, synthetic construct
  source 1..20: mol_type = other DNA
tttataaataataatccgtc

SEQ ID NO: 149223 - DNA, 20 bp, synthetic construct
  source 1..20: mol_type = other DNA
atttataaataataatccgt

SEQ ID NO: 149224 - DNA, 20 bp, synthetic construct
  source 1..20: mol_type = other DNA
gatttataaataataatccg

SEQ ID NO: 149225 - DNA, 20 bp, synthetic construct
  source 1..20: mol_type = other DNA
tgatttataaataataatcc

SEQ ID NO: 149226 - DNA, 20 bp, synthetic construct
  source 1..20: mol_type = other DNA
ttgatttataaataataatc

SEQ ID NO: 149227 - DNA, 20 bp, synthetic construct
  source 1..20: mol_type = other DNA
cttgatttataaataataat

SEQ ID NO: 149228 - DNA, 20 bp, synthetic construct
  source 1..20: mol_type = other DNA
acttgatttataaataataa

SEQ ID NO: 149229 - DNA, 20 bp, synthetic construct
  source 1..20: mol_type = other DNA
aacttgatttataaataata

SEQ ID NO: 149230 - DNA, 20 bp, synthetic construct
  source 1..20: mol_type = other DNA
aaacttgatttataaataat

SEQ ID NO: 149231 - DNA, 20 bp, synthetic construct
  source 1..20: mol_type = other DNA
caaacttgatttataaataa

SEQ ID NO: 149232 - DNA, 20 bp, synthetic construct
  source 1..20: mol_type = other DNA
tcaaacttgatttataaata

SEQ ID NO: 149233 - DNA, 20 bp, synthetic construct
  source 1..20: mol_type = other DNA
atcaaacttgatttataaat

SEQ ID NO: 149234 - DNA, 20 bp, synthetic construct
  source 1..20: mol_type = other DNA
catcaaacttgatttataaa

SEQ ID NO: 149235 - DNA, 20 bp, synthetic construct
  source 1..20: mol_type = other DNA
tcatcaaacttgatttataa

SEQ ID NO: 149236 - DNA, 20 bp, synthetic construct
  source 1..20: mol_type = other DNA
ctcatcaaacttgatttata

SEQ ID NO: 149237 - DNA, 20 bp, synthetic construct
  source 1..20: mol_type = other DNA
cctcatcaaacttgatttat

SEQ ID NO: 149238 - DNA, 20 bp, synthetic construct
  source 1..20: mol_type = other DNA
acctcatcaaacttgattta

SEQ ID NO: 149239 - DNA, 20 bp, synthetic construct
  source 1..20: mol_type = other DNA
cacctcatcaaacttgattt

SEQ ID NO: 149240 - DNA, 20 bp, synthetic construct
  source 1..20: mol_type = other DNA
tcacctcatcaaacttgatt

SEQ ID NO: 149241 - DNA, 20 bp, synthetic construct
  source 1..20: mol_type = other DNA
atcacctcatcaaacttgat

SEQ ID NO: 149242 - DNA, 20 bp, synthetic construct
  source 1..20: mol_type = other DNA
gatcacctcatcaaacttga

SEQ ID NO: 149243 - DNA, 20 bp, synthetic construct
  source 1..20: mol_type = other DNA
tgatcacctcatcaaacttg

SEQ ID NO: 149244 - DNA, 20 bp, synthetic construct
  source 1..20: mol_type = other DNA
gtgatcacctcatcaaactt

SEQ ID NO: 149245 - DNA, 20 bp, synthetic construct
  source 1..20: mol_type = other DNA
agtgatcacctcatcaaact

SEQ ID NO: 149246 - DNA, 20 bp, synthetic construct
  source 1..20: mol_type = other DNA
cagtgatcacctcatcaaac

SEQ ID NO: 149247 - DNA, 20 bp, synthetic construct
  source 1..20: mol_type = other DNA
acagtgatcacctcatcaaa

SEQ ID NO: 149248 - DNA, 20 bp, synthetic construct
  source 1..20: mol_type = other DNA
gacagtgatcacctcatcaa

SEQ ID NO: 149249 - DNA, 20 bp, synthetic construct
  source 1..20: mol_type = other DNA
agacagtgatcacctcatca

SEQ ID NO: 149250 - DNA, 20 bp, synthetic construct
  source 1..20: mol_type = other DNA
tagacagtgatcacctcatc

SEQ ID NO: 149251 - DNA, 20 bp, synthetic construct
  source 1..20: mol_type = other DNA
gtagacagtgatcacctcat

SEQ ID NO: 149252 - DNA, 20 bp, synthetic construct
  source 1..20: mol_type = other DNA
tgtagacagtgatcacctca

SEQ ID NO: 149253 - DNA, 20 bp, synthetic construct
  source 1..20: mol_type = other DNA
ctgtagacagtgatcacctc

SEQ ID NO: 149254 - DNA, 20 bp, synthetic construct
  source 1..20: mol_type = other DNA
actgtagacagtgatcacct

SEQ ID NO: 149255 - DNA, 20 bp, synthetic construct
  source 1..20: mol_type = other DNA
cactgtagacagtgatcacc

SEQ ID NO: 149256 - DNA, 20 bp, synthetic construct
  source 1..20: mol_type = other DNA
ccactgtagacagtgatcac

SEQ ID NO: 149257 - DNA, 20 bp, synthetic construct
  source 1..20: mol_type = other DNA
accactgtagacagtgatca

SEQ ID NO: 149258 - DNA, 20 bp, synthetic construct
  source 1..20: mol_type = other DNA
aaccactgtagacagtgatc

SEQ ID NO: 149259 - DNA, 20 bp, synthetic construct
  source 1..20: mol_type = other DNA
gaaccactgtagacagtgat

SEQ ID NO: 149260 - DNA, 20 bp, synthetic construct
  source 1..20: mol_type = other DNA
tgaaccactgtagacagtga

SEQ ID NO: 149261 - DNA, 20 bp, synthetic construct
  source 1..20: mol_type = other DNA
ttgaaccactgtagacagtg

SEQ ID NO: 149262 - DNA, 20 bp, synthetic construct
  source 1..20: mol_type = other DNA
gttgaaccactgtagacagt

SEQ ID NO: 149263 - DNA, 20 bp, synthetic construct
  source 1..20: mol_type = other DNA
agttgaaccactgtagacag

SEQ ID NO: 149264 - DNA, 20 bp, synthetic construct
  source 1..20: mol_type = other DNA
aagttgaaccactgtagaca

SEQ ID NO: 149265 - DNA, 20 bp, synthetic construct
  source 1..20: mol_type = other DNA
aaagttgaaccactgtagac

SEQ ID NO: 149266 - DNA, 20 bp, synthetic construct
  source 1..20: mol_type = other DNA
aaaagttgaaccactgtaga

SEQ ID NO: 149267 - DNA, 20 bp, synthetic construct
  source 1..20: mol_type = other DNA
taaaagttgaaccactgtag

SEQ ID NO: 149268 - DNA, 20 bp, synthetic construct
  source 1..20: mol_type = other DNA
ttaaaagttgaaccactgta

SEQ ID NO: 149269 - DNA, 20 bp, synthetic construct
  source 1..20: mol_type = other DNA
cttaaaagttgaaccactgt

SEQ ID NO: 149270 - DNA, 20 bp, synthetic construct
  source 1..20: mol_type = other DNA
acttaaaagttgaaccactg

SEQ ID NO: 149271 - DNA, 20 bp, synthetic construct
  source 1..20: mol_type = other DNA
aacttaaaagttgaaccact

SEQ ID NO: 149272 - DNA, 20 bp, synthetic construct
  source 1..20: mol_type = other DNA
taacttaaaagttgaaccac

SEQ ID NO: 149273 - DNA, 20 bp, synthetic construct
  source 1..20: mol_type = other DNA
ttaacttaaaagttgaacca

SEQ ID NO: 149274 - DNA, 20 bp, synthetic construct
  source 1..20: mol_type = other DNA
cttaacttaaaagttgaacc

SEQ ID NO: 149275 - DNA, 20 bp, synthetic construct
  source 1..20: mol_type = other DNA
ccttaacttaaaagttgaac

SEQ ID NO: 149276 - DNA, 20 bp, synthetic construct
  source 1..20: mol_type = other DNA
cccttaacttaaaagttgaa

SEQ ID NO: 149277 - DNA, 20 bp, synthetic construct
  source 1..20: mol_type = other DNA
tcccttaacttaaaagttga

SEQ ID NO: 149278 - DNA, 20 bp, synthetic construct
  source 1..20: mol_type = other DNA
ttcccttaacttaaaagttg

SEQ ID NO: 149279 - DNA, 20 bp, synthetic construct
  source 1..20: mol_type = other DNA
tttcccttaacttaaaagtt

SEQ ID NO: 149280 - DNA, 20 bp, synthetic construct
  source 1..20: mol_type = other DNA
ttttcccttaacttaaaagt

SEQ ID NO: 149281 - DNA, 20 bp, synthetic construct
  source 1..20: mol_type = other DNA
tttttcccttaacttaaaag

SEQ ID NO: 149282 - DNA, 20 bp, synthetic construct
  source 1..20: mol_type = other DNA
gtttttcccttaacttaaaa

SEQ ID NO: 149283 - DNA, 20 bp, synthetic construct
  source 1..20: mol_type = other DNA
agtttttcccttaacttaaa

SEQ ID NO: 149284 - DNA, 20 bp, synthetic construct
  source 1..20: mol_type = other DNA
aagtttttcccttaacttaa

SEQ ID NO: 149285 - DNA, 20 bp, synthetic construct
  source 1..20: mol_type = other DNA
aaagtttttcccttaactta

SEQ ID NO: 149286 - DNA, 20 bp, synthetic construct
  source 1..20: mol_type = other DNA
aaaagtttttcccttaactt

SEQ ID NO: 149287 - DNA, 20 bp, synthetic construct
  source 1..20: mol_type = other DNA
taaaagtttttcccttaact

SEQ ID NO: 149288 - DNA, 20 bp, synthetic construct
  source 1..20: mol_type = other DNA
gtaaaagtttttcccttaac

SEQ ID NO: 149289 - DNA, 20 bp, synthetic construct
  source 1..20: mol_type = other DNA
agtaaaagtttttcccttaa

SEQ ID NO: 149290 - DNA, 20 bp, synthetic construct
  source 1..20: mol_type = other DNA
aagtaaaagtttttccctta

SEQ ID NO: 149291 - DNA, 20 bp, synthetic construct
  source 1..20: mol_type = other DNA
aaagtaaaagtttttccctt

SEQ ID NO: 149292 - DNA, 20 bp, synthetic construct
  source 1..20: mol_type = other DNA
caaagtaaaagtttttccct

SEQ ID NO: 149293 - DNA, 20 bp, synthetic construct
  source 1..20: mol_type = other DNA
acaaagtaaaagtttttccc

SEQ ID NO: 149294 - DNA, 20 bp, synthetic construct
  source 1..20: mol_type = other DNA
tacaaagtaaaagtttttcc

SEQ ID NO: 149295 - DNA, 20 bp, synthetic construct
  source 1..20: mol_type = other DNA
ctacaaagtaaaagtttttc

SEQ ID NO: 149296 - DNA, 20 bp, synthetic construct
  source 1..20: mol_type = other DNA
tctacaaagtaaaagttttt

SEQ ID NO: 149297 - DNA, 20 bp, synthetic construct
  source 1..20: mol_type = other DNA
atctacaaagtaaaagtttt

SEQ ID NO: 149298 - DNA, 20 bp, synthetic construct
  source 1..20: mol_type = other DNA
tatctacaaagtaaaagttt

SEQ ID NO: 149299 - DNA, 20 bp, synthetic construct
  source 1..20: mol_type = other DNA
ttatctacaaagtaaaagtt

SEQ ID NO: 149300 - DNA, 20 bp, synthetic construct
  source 1..20: mol_type = other DNA
attatctacaaagtaaaagt

SEQ ID NO: 149301 - DNA, 20 bp, synthetic construct
  source 1..20: mol_type = other DNA
tattatctacaaagtaaaag

SEQ ID NO: 149302 - DNA, 20 bp, synthetic construct
  source 1..20: mol_type = other DNA
atattatctacaaagtaaaa

SEQ ID NO: 149303 - DNA, 20 bp, synthetic construct
  source 1..20: mol_type = other DNA
tatattatctacaaagtaaa

SEQ ID NO: 149304 - DNA, 20 bp, synthetic construct
  source 1..20: mol_type = other DNA
ttatattatctacaaagtaa

SEQ ID NO: 149305 - DNA, 20 bp, synthetic construct
  source 1..20: mol_type = other DNA
tttatattatctacaaagta

SEQ ID NO: 149306 - DNA, 20 bp, synthetic construct
  source 1..20: mol_type = other DNA
ttttatattatctacaaagt

SEQ ID NO: 149307 - DNA, 20 bp, synthetic construct
  source 1..20: mol_type = other DNA
attttatattatctacaaag

SEQ ID NO: 149308 - DNA, 20 bp, synthetic construct
  source 1..20: mol_type = other DNA
tattttatattatctacaaa

SEQ ID NO: 149309 - DNA, 20 bp, synthetic construct
  source 1..20: mol_type = other DNA
ttattttatattatctacaa

SEQ ID NO: 149310 - DNA, 20 bp, synthetic construct
  source 1..20: mol_type = other DNA
tttattttatattatctaca

SEQ ID NO: 149311 - DNA, 20 bp, synthetic construct
  source 1..20: mol_type = other DNA
ttttattttatattatctac

SEQ ID NO: 149312 - DNA, 20 bp, synthetic construct
  source 1..20: mol_type = other DNA
tttttattttatattatcta

SEQ ID NO: 149313 - DNA, 20 bp, synthetic construct
  source 1..20: mol_type = other DNA
gtttttattttatattatct

SEQ ID NO: 149314 - DNA, 20 bp, synthetic construct
  source 1..20: mol_type = other DNA
agtttttattttatattatc

SEQ ID NO: 149315 - DNA, 20 bp, synthetic construct
  source 1..20: mol_type = other DNA
aagtttttattttatattat

SEQ ID NO: 149316 - DNA, 20 bp, synthetic construct
  source 1..20: mol_type = other DNA
taagtttttattttatatta

SEQ ID NO: 149317 - DNA, 20 bp, synthetic construct
  source 1..20: mol_type = other DNA
ttaagtttttattttatatt

SEQ ID NO: 149318 - DNA, 20 bp, synthetic construct
  source 1..20: mol_type = other DNA
tttaagtttttattttatat

SEQ ID NO: 149319 - DNA, 20 bp, synthetic construct
  source 1..20: mol_type = other DNA
ttttaagtttttattttata

SEQ ID NO: 149320 - DNA, 20 bp, synthetic construct
  source 1..20: mol_type = other DNA
tttttaagtttttattttat

SEQ ID NO: 149321 - DNA, 20 bp, synthetic construct
  source 1..20: mol_type = other DNA
ttttttaagtttttatttta

SEQ ID NO: 149322 - DNA, 20 bp, synthetic construct
  source 1..20: mol_type = other DNA
tttttttaagtttttatttt

SEQ ID NO: 149323 - DNA, 20 bp, synthetic construct
  source 1..20: mol_type = other DNA
ttttttttaagtttttattt

SEQ ID NO: 149324 - DNA, 20 bp, synthetic construct
  source 1..20: mol_type = other DNA
attttttttaagtttttatt

SEQ ID NO: 149325 - DNA, 20 bp, synthetic construct
  source 1..20: mol_type = other DNA
aattttttttaagtttttat

SEQ ID NO: 149326 - DNA, 20 bp, synthetic construct
  source 1..20: mol_type = other DNA
aaattttttttaagttttta

SEQ ID NO: 149327 - DNA, 20 bp, synthetic construct
  source 1..20: mol_type = other DNA
taaattttttttaagttttt

SEQ ID NO: 149328 - DNA, 20 bp, synthetic construct
  source 1..20: mol_type = other DNA
ttaaattttttttaagtttt

SEQ ID NO: 149329 - DNA, 20 bp, synthetic construct
  source 1..20: mol_type = other DNA
tttaaattttttttaagttt

SEQ ID NO: 149330 - DNA, 20 bp, synthetic construct
  source 1..20: mol_type = other DNA
ttttaaattttttttaagtt

SEQ ID NO: 149331 - DNA, 20 bp, synthetic construct
  source 1..20: mol_type = other DNA
tttttaaattttttttaagt

SEQ ID NO: 149332 - DNA, 20 bp, synthetic construct
  source 1..20: mol_type = other DNA
ttttttaaattttttttaag

SEQ ID NO: 149333 - DNA, 20 bp, synthetic construct
  source 1..20: mol_type = other DNA
attttttaaattttttttaa

SEQ ID NO: 149334 - DNA, 20 bp, synthetic construct
  source 1..20: mol_type = other DNA
tattttttaaatttttttta

SEQ ID NO: 149335 - DNA, 20 bp, synthetic construct
  source 1..20: mol_type = other DNA
ttattttttaaatttttttt

SEQ ID NO: 149336 - DNA, 20 bp, synthetic construct
  source 1..20: mol_type = other DNA
tttattttttaaattttttt

SEQ ID NO: 149337 - DNA, 20 bp, synthetic construct
  source 1..20: mol_type = other DNA
ttttattttttaaatttttt

SEQ ID NO: 149338 - DNA, 20 bp, synthetic construct
  source 1..20: mol_type = other DNA
tttttattttttaaattttt

SEQ ID NO: 149339 - DNA, 20 bp, synthetic construct
  source 1..20: mol_type = other DNA
ttttttattttttaaatttt

SEQ ID NO: 149340 - DNA, 20 bp, synthetic construct
  source 1..20: mol_type = other DNA
tttttttattttttaaattt

SEQ ID NO: 149341 - DNA, 20 bp, synthetic construct
  source 1..20: mol_type = other DNA
ctttttttattttttaaatt

SEQ ID NO: 149342 - DNA, 20 bp, synthetic construct
  source 1..20: mol_type = other DNA
actttttttattttttaaat

SEQ ID NO: 149343 - DNA, 20 bp, synthetic construct
  source 1..20: mol_type = other DNA
aactttttttattttttaaa

SEQ ID NO: 149344 - DNA, 20 bp, synthetic construct
  source 1..20: mol_type = other DNA
aaactttttttattttttaa

SEQ ID NO: 149345 - DNA, 20 bp, synthetic construct
  source 1..20: mol_type = other DNA
aaaactttttttatttttta

SEQ ID NO: 149346 - DNA, 20 bp, synthetic construct
  source 1..20: mol_type = other DNA
taaaactttttttatttttt

SEQ ID NO: 149347 - DNA, 20 bp, synthetic construct
  source 1..20: mol_type = other DNA
ttaaaactttttttattttt

SEQ ID NO: 149348 - DNA, 20 bp, synthetic construct
  source 1..20: mol_type = other DNA
tttaaaactttttttatttt

SEQ ID NO: 149349 - DNA, 20 bp, synthetic construct
  source 1..20: mol_type = other DNA
ttttaaaactttttttattt

SEQ ID NO: 149350 - DNA, 20 bp, synthetic construct
  source 1..20: mol_type = other DNA
tttttaaaactttttttatt

SEQ ID NO: 149351 - DNA, 20 bp, synthetic construct
  source 1..20: mol_type = other DNA
gtttttaaaactttttttat

SEQ ID NO: 149352 - DNA, 20 bp, synthetic construct
  source 1..20: mol_type = other DNA
agtttttaaaacttttttta

SEQ ID NO: 149353 - DNA, 20 bp, synthetic construct
  source 1..20: mol_type = other DNA
cagtttttaaaacttttttt

SEQ ID NO: 149354 - DNA, 20 bp, synthetic construct
  source 1..20: mol_type = other DNA
tcagtttttaaaactttttt

SEQ ID NO: 149355 - DNA, 163192 bp, Homo sapiens
  source 1..163192: mol_type = genomic DNA
ccagcactttgggaggccaaggcaggcagatcacttgaggtgaggagttctggccaacacgaaaaaatgtcgtctctactaaaaatacaaaaattagctggacatggtggtgagtgcctataatcccagctacatggaaggctgagcggggaggatcacttgaacccaggaggtggaggttacagtgaactgagattgtgccactgcattccagcctgggcaagacagcaagactctgcctaaaaacaaacaaacaaatcccccaaaactaacaaaaattagctgggtgtggtggtgcacgcctgtagtccctgatactctgaaggctgagatgggaggattgctcgggaccgcctgggaggcagacgctgcagtgagccagactgtggaactgtactccagcctggttggcagagtaagaccctgtctcgaaaaaaaaaaaaaaaagtattgttttaaaattcaggtggggaggatttcacagtgtctgaacaccaggaggcaagaatcatttgggaccgccatagaggctgcctgacacaccacttcttttaaggtgcattactctaatatatatatatatatatattatttttttgagatggagtgtcactctgtcaccaggctggagtgcagtggcatgatcttgactcactgcaacctctgcctgccaggttcaagcgattctcctgcctcagcctcccgagtagttaggactacaggcgcacaccaccatgcccagctaatttttgtattttcttttttttgagacagagtctcgctctgttgcccaggctggagtgcagtggcgccatctcacctcactgcaagctccgcctcccgagttcatgccattctcctgcctcagcctcccaagtagctgggactacaggcgcccgccaccacacccacctatttttttgtatttttagtagagacggggtttcactgtgttagccaggatggccttgatctcctgacctcgtgatctgcccgccttggcctcccaaagtgctgggattacaggtgtgagccaccatgcctggctaatttttgtatttttaatagagacagggtttcaccatgttggcaaggatggtctcgatctcttgacctcaggtgatcagcccacctcagtctcccaaagtgctgggattacaggcatgagccaccgtgcccagcctactctgatattttcatataaagcttaagccttctgaagtccagagaaaaggtagtttccataaataaataaataaaataaaaataactaaataaacttaccacatcacccaacaatttcgtttgtaggaaccaacccaagataaatgaaaacatatatccacatgaagatatatgttcacaaatgttcatagcagcattattatttttctttcttcttctttgtgtgtgtgtgtgtgtgttttagcaactctattaactgaacgagacagggtcttggtctgttgcccaggctagagtgcagtggcgcattcgtagctcacagcaacctcgatctcctgggctcaagcggtccttctgcttcagcctccctagtagctgggactataggtgcgtgtcaccatgaccagctaatttttttttttttttttttttggagacagagtattgctgtgtcacccaggcttcagtgcaatggtgcaatctcggctcactgtaacctccgcctcctgggttcaagcaattctcctgcctcagcctcccaagtagctgagattacaggtgcccgccaccacgcctggctaattttttgtatttttagtagagacgggatttcaccatgtaggccaggctggtctcgaactcctgatctcaggtgatccacccacctcggcctcccaaagtgctgggattataggcatgagccaccacgcccagccaaccagctaattttttatttttaaagtttttcatagagacagggtctctctatgttgcccaggctggtttcaaactccggggtattcaagtgatcctcccatctcggtatcctaaagtgttgggattacaggagtgagccaccaatctcagccccagcagcattttcataatactcaaaaagttgacacaatctaaacatccacaattggaaagtagacacaaaatgtggtatgtccatacatggaatatgacatagcaataataaggaatgaaatactgctacatgccacaaccttagataaacctcaaaaacattatgacaaatgaaagaaggcagacacaaaaggctgcatgctgtaagattctacttatgtgaaaaatctggacaaatccatagagagaaaatgtagatgagtggttgcctggggctaaggatgggaaccaaactgcccaccatcgtgaaggatctttttggggtaatggaaatgttctgaaattagtggcaatggttgtgcaaatttactgtgtaaatttactgagaatcattaaattgtacacaaaataggtgaatttcatagtatgtaaattatatcttgataaaactattaagtttttattcaatggtagtgagttaaaacaaactttctcagctatgtcagcttcaggccttctttttttttaattttgaaaaattttttatggagaggagggtctcactatgttgcccaggctggtctcctactccttggttcaaaggatctgcctgccttggccttccaaagtgctgggattataggtgtaggccactgtatccagcctaggccttcttattcaacttccatcgacctgaaacttactattttttttttgagacggagtctcgctctgtcgcccaggctggagtgcagtggtgtgatctccgctcactgcaagcaccgcctcccaggttcacaccattctcctgcctcagcctcccaagtagctgggactacaggtgcgcatcaccacacccagctaatttttgtatttttagtagagatgggctctactaaaaattggccaggctggtctcgaactcctgacctcaggtgatccaccggccactgcctcccaaagtgctgggattacaggcgtgagccaccacactggccaaaacttgttcttaagattgtattctgggaccttgattccaatcagagaaaagtgattgtatttttttatttttattttttttagataaagtttcgctcttgttgcccaggctggagtgcagtggtgccctctttggtcactgtaacctccgcctcctgggttcaagcgattctcctgcctcagcatcctgcgtagctgagatcacagatgcccaccaccacgcccagctaattttttcgtatttttagtagcgatggggtttcaccatgttggccacgctggtcttgaactcctgacctcaggtgatccatccgcctcggcctcccagagtgctgggattacaggtgtgagccaccgcgccaggccaagtgtttgtatttctattaaagaaagaatataacgggacaccattgacgacctgctccattgcaggcctccttgctgttcctcagactcccccctcagagcctttgccctcgctgtgccctccacctggagcgtttctccccaggatcctcatgcccatgctcatttgggtccctgccccatgtcaccctctccaggagcttcccctcacagcagccctggcctgtaccacagccgggtacaggtatttttttgtttcaactggttttttagttccagtttcctttaggttactttatttatttatttatttatttattttttgagacggagtctcgctctgtcgcccaggctggagtgcatgatctcggctgactgcaacctccacctcccggattcaagcaattctcctgtatcagcctcccgagtagctgggattacaggcgcccaccaccacacccggctaatttttatatttttggtagagacggggtttcaccatgttggctaggctaggttaatttttaaagggttttgcaatggtcccttgatctactttttaccttagatgggaaataaaactgatttcctacattggcagaatacaatgatcatttttgcctggactatctaggaggttaatttcagttggactactgaaaactgctggttcaatcattctccacgtttatctaagtctttacctttatctggacagttctaggacattgaggggaattttggtgtttcttcccctattatttcctgaagtcatttcactttaaaaaacaatagattcactgctcaaaaaaaaaaaaaaaagttacctactttctacttgcttccagtttaactgcaacacattttaaaaagagtctactgtgctggctgggtaagttaaattaaaacttctaaagggtccaaggtctaaagttcgcacattgttttgaggtcggctctgtctctaccgagggagatcccattatccgtagttctaccagtcccaatcccatatatttcctttagaatctcatgaatgaggaaaaagaagttcaagtgagggaacataggttcaaatgaaggtcagatacctaaaagagttttctggtgactgtgcgcggctggggtggaaaaagtggggaaaaggtacccagatgtgggtggccccggagggttgctccactccagccccggcagggcaggacagcgcggcctgcctggtagatgccccgagccactggagcgcctactgtgtggcgggcgggggacggcaggaaaacggcaggatgctgtgtcccctgaatctggcagggttctaggtgctttacacgtagcaagacacattctccgccccaaggcactcgcagtcagtccattttctgggttgcatcaggtgggggcaaactaggtccccgcagaagtgaagatgctgaaggaatacagtaggagaagaaatgcttctctcctgtcctccacaccaggcaggccccagaggctgagaccgacacgccctccccgaagggcagacccgccttgaggaaggcggatccgggtagggaccgccgcctggccctcacccgacccccgagaaagcaacccagcgcgccgcccgctcctcacgtgtccctcccggccccggggccacctcacgttctgcttccgtctgacccctccgacttccggtaaagagtccctatccgcacctccgctcccacccggcgcctcggcgcgcccgccctccgatgcgctcagcggccgcagctcctcggagtcccgcggtggccaccgagtctcgccgcttcgccgcagccaggtggcccgggtggcgctcgctccagcggccggcgcggcggagcgggcggggcggcggtggcgcggccccgggaccgtatccctccgccgcccctcccccgcccggccccggcccccctccctcccggcagagctcgcctccctccgcctcagactgttttggtagcaacggcaacggcggcggcgcgtttcggcccggctcccggcggctccttggtctcggcgggcctccccgccccttcgtcgtcctccttctccccctcgccagcccgggcgcccctccggccgcgccaacccgcgcctccccgctcggcgcccgcgcgtccccgccgcgttccggcgtctccttggcgcgcccggctcccggctgtccccgcccggcgtgcgagccggtgtatgggcccctcaccatgtcgctgaagccccagcagcagcagcagcagcagcagcagcagcagcagcagcaacagcagcagcagcagcagcagcagcagccgccgcccgcggctgccaatgtccgcaagcccggcggcagcggccttctagcgtcgcccgccgccgcgccttcgccgtcctcgtcctcggtctcctcgtcctcggccacggctccctcctcggtggtcgcggcgacctccggcggcgggaggcccggcctgggcaggtgggtgtcggcaccccagccccctccgctccgggcccggcgtcccctcccccgcggcccgcgccgccgtccccgccccgtgacccgccgggctacccggggtgggctgggggccggcagcgcgggggagactcgctcgggcctgagccccgaggctcggccggtgggcgcagccggggtcctctgggattgtcaggcctgtccagcctcccgcagcatccccgccccctcccccggcggtcaagatggagggagcgggcggcctcccctccccacgcgtgttgggaggggttctcgggtagcggcgatggtcagccccggctcccccttccgcacgatcctccgcccgcagcgtggggatgctcgggcagctcctccactcccggtttaggtgtgaacgttggaggggtctggaggctgtggtggcgttttccggaacatgtccccctccatgggggacatctctggaggggagaagttagggccgcgtcccccgtgccggttaaaggggtaggcaccgggctcctccggaatcatcagggtctgtcggggctctctccccgccccctccgagtcctgggaaagatcggaggacggggtggagacaagtgggccttggcccccgcacccctctgcgttcgtgtccgaggcggcggcgggggctcccgaactcccctgaaatcgtggggctccatgtggcctccggcagcgttccaccctcccccacctggggaagggaaggggtggggagtgcccggccccgtcccggccttcctccttcccccgccagacctctccggcgcgcgggtggtggccgatccgcattgctgttcgaggccgcagtggagaaggcgcctgtggaacatcggtgggtgagggctggacccaggctggaccctggagatccggggtggcggtgctggtggcagggggcgggcaccctgcgcacttatcccaacccccgccccaatttcggaaatgctaggagagagagattgcagcaggggacgtggtcgggttcctgaaggcagaaaggcgggtgtttactagcgtctttttccctcctaagccggggttgtagtaggggctgggggctcagtgttgtcccggctaactgggtttgactcgagggtgtgtttgtgcaggagggcctgttgggggtggcgggcggttgtcagttcgtatttcacgaactaagaaaatgcttagtgttcaaagggagaaggaaacgtcaatagactccattccattgtggccggtgtccttaacttcgggagtgccgccagagcttaccaagggcacgcaagtccatttcccttgtgcctcaagtccatccgtgttgtaggcactactgtgccttctttaggcctaggccgccggcttgacggcgggtgaccggcgtcctccttaaataggcatcttgggctttggaaggtggaataagaggatttttcattcacccgagttttctttttgaaaacacattttcagcaacccatttccaaagaatttttatttacagcagaaattccccatcaagaggaatcagctggtttttaaggaattctgctgccttcaaagggggcggaaacagtcggttatttgactttacacgccccgcccccccttccccttctctgagtctgaagcatcccaaacactacttagccaaactagttcagatgaagtgatcgtttccccaagtagggtaacttcagtttccctttttcgttggcatctagcgaaaaatgaaaaaatttaaaatacaacttttatagaaaaggatgtattctgtttttactttcttaggtattaggaagagatttggcagataattcaacatgttcaaatatataaacattaaaactaaggttattaagttgcattgactactaggcttaaaaattagattataagagaatttgctcctgagtagtttgagtgatcaaagatatttggaatgttttagtaccacaaggtcttttttctgttccttgaggctttacaacaatttaaggttaatttagatttttccttgctttaagttcttttacttgagacctaaatggcagcccttattctttctgatgaataggtgaaattttgtttactgtgttggatttgtgtaatgtgaagttttattcttgaacagatcgttaatgtacttgtagaattactttgaatttgaatcactttcctgcattccttgtaaataagtttcagcttctagaatctcctcacttaggtttgtgcgtatcaacagtgaaaataagtctctgagagcaagggtgaaaaaaaatgcagcattcggtttgacaagtttcgagatagcaaaatatgcttgaaagtctggaaattcacatctgctttaagaaacatttcataatttgactttgtgtgtgtgtgtgtgaatagtttttcatgactttcagaagtgatttattttgttctttgttatatatatttttgaaggtggctgttttaggaaagataatgtaatcacaatattagaacataattttactgtaatctaattttgtgtgtgtgtgtgtgtgtgtgtgtgtgtgtgtgtgtgtgttttggatggaatctcactctgtcgcccaggctggagtgcagtggcctgatctcagcttactgcagtctctgtctcctgggttcatttaagtgattctccagcctcagcctccccagtagctgggattacaggttcgtgctaccacacctggctaatttttttgtatttttagtgaggacgggattttgccatgttggccaggctggtctcgaactcctgacctcaagtgatccgcctgccttggcctcccaaagtgctgggattacaggcgtgagctactgcccctggccaatttttgtatttttagtagagatggggtttcaccatgttggccaggctggtctcgaactcctcctgacctcaagtgattcgccagcctcggcctcccaaagtgccaggattacaggcaggaatgagccactgcccccaaccatcagtctaattcttatttttgctttttaccttttcatttttatgtagtagaggtgattgtgtatgttattttgtagttagcttttttcccctgaacgttgtattgtaaatgtaaatttttttttttttttttgagacagagtctcggtgtttgcccagtctgaagtgcagtggtacgatctcagctcactgcagcctctgactcctgggttcaagcgattctcccacctcagcctcttgagtagctggggctacaggaatgttccaccacgcttggctaatttttgtatttttggtagagacaaggtttcaccatgttggccagtttggtctcgtactaccgacctcaggtgatgcgcccgcctcggcctcccaaagtgctgggattgcaggcgtgagccactgcgcccggctgtaaggtttttacttaaccattctattgttgggaattgggtttccacttttttgttatagatagtggtgcagtgaacatttttaaatagctttttgcttcagtgtaattatttccttagagaaagttaccaagagtggttttactagttcagagggcttcaggatttttatggctcttgctagcggtgctctattattctttagaagacttgtattacttccagtgtcaagaaggttgctcttccatggaatggtttctttgtagtttgtcaaatattgtggggaatttttaaaggaaaaattgcatttttactgtcaagtgcatatattattaagtgcttttgttagttactggattattgatatttgagtttaatttggttcctctgaggatttaataaggtaatatatgtgaagatgttttgaaacctgtaaccattattattaatgagggtacttggtttatctgtcgtgctgatagtactgagtaaagtgcaggaatgaaattcctgaggaactgttctaaagctttgttgttgttgttaacctttctttttcatctgaaagtgttttttattagctgctagcctatgaccaagttatttttggtaacttttttgtaatttcatggcactattgggaattttcgctggttgactcttcttcttctacattcccttccccattaaaaataaaaatatggatttacaattgttactctattcctaaacctaaataatatgacattagaattgcttgggatacaggattcagtctgaataaaatatttttcttttagtgattttcagcttagtatttttactgcttctttctcttgaggcattgcaacttaaaaattgtgctgtttagccaggcgcctgtaatcccagctacttgggaggctgaggcaggagcatcacttgagcccaggaggcggaggttgcagtcagctgagattgtgccactgcactccagcctgggagacagagtgagactctatctcaaaaaaaaaaaaaatgtgctgtgatttaatgtagttgttcatcatgcttccatttaaatttcagtgagactgttcatcttttgcagttaaatatcttgtagaagggcctaaaatatctacgttgaatacagctttattgaagcatctatgtacatggggtttttgggatgaatcagtgaataaagcaaacatattgtccttttggagtttacattctaatgtgactaggcagacaatgagacattaaattaccagcctatgtataatagtgtataagagctatggaattagaagaaagcagattaaaggtatagggagtgtggggaggggaatgagttacaattttaaatggattgggggaacttaattgaggagctaacatttgagcaaagatttgaaggttgggtatttagccgtttgctttttatctaggttaattagtcatgtggcttcattagtaatttataaggtttaaatggcatcatcctttgttattcttttatgtgcacattgatactaaccatctctgaagttagaccaaaaaagttaattgacattgagggtcattagaggtaaattgtagatggctattactaaccaaagagacatgttttgtttttcttttgggcttacgtattttacctaattagtttagtttttgtttcaagtatgtggagaaaataaactttttaagtttgggccaaaacttgctttggttttctttttctttttctttttttttttttaagagaaaaatgtaagcctgtagttgcttaaagattccacattctgaaacagtgaaaacatgggatcagtcatggtgttcctttttttggttaaatgtaaacttgtattttcagtgttactctaattagcaatggtttatacttctacataagggatgttaactcatattgtagctatttaatagccatatattttgacttaaaggaggatctcaaggccaggcgcggtggctcatacctgtaatcccagcactttaggaggctgaggcgggtggatcacctggggtcaggagtttgagactagtctggccaacatggtgaaacccccatctctactaaaaatacaaaaattagccgggcatggtggtgggcgcctgtaatcccagcttcttgggaggctgagggaagagaattgcttgatcccggaggttgcaatgagtgcggaggttgcagtgagctgagatcatgccattacactccagcctgggcaacagagcgagactctgtctcaaaacaaacaaacaaacaaaaaaaggaggatctcatttttttgtcctaaatagctacagccgtgttagaactgtcaccttagcaaagtattgtttttttactttgaaacgaattttaaggttttagaagattgttctctagaattacaattttctgttttgactagtgatagtattttgatgttgtgtaaatagttgagcatgaacaaaaccctatttttttttttagctatttcaagtgattgtgacaacttcaacggagatgtaaacagtttattaacagtcacacctattatcttttttttttttttttttttttgagacggagtcttgctctgtcgcccaggctggagtgcagtggcacgatctctgcttactgcaacctttgcctcccgggttcaagtgattctcctgcctcagcctcctgagtagctgggtctacatgcgcacaccaccacgcctggctaatttttgtatttttagtagagacagggtttcaccatgttggctagaatggtctcaaactcctgacctcaggtgatccacctgcctcagcctcccaaagttctgggattacaggcatgagccaccgtgcttggccgctgccgtatctttttaaatgaaagtacttgtgttttttttgtttttttccaaaggatatctgggtcatctatgatgttactgttaccatctaagggtttttttgtttgtttttgagacagagtctctgtcgcccaggctggagtgcagtggcgtgatcttggctcactgcaacctccgcctcccaggttcaagcaattctcctgccttagccctcccgaatagctgggattacaggcacccgccaccatgcctggctaagttttgcatttttagtagatatggagtttcaccatgttggccaggctgctcttgaactcctgacctcaggtgattcgcttgcctcggcctcccaaagtgctgggattacaggcgtgagccacccccgcccagcctcatgagctaaggtgttttttttttttttgagacagttttgctctttcccaggctggagtgcagtggtgcaatctcagctcactgcaacctctgtttcccgggttcaagcgattctcctgcctcagccttctgagtagctgagattacaggtgcctgctaccccactcagctaatttttgtatttttagcagagacagggtttcaccatgttggttaggctcatctcgaactcctgaccttaagcgatccacctgccttggcctcccaaagtgctgggattataggcatgagccaccgtgcgcagcctaccctgtctcttaaaaaacagtaacaacaacaacaacaacaaaaaatcctaaatcttaaaaatggaaggcaaaaactctaagctttgagagattaggggacttgcccaaagcaatatttgtaggattttattacacctctccctttatttatttttttagagtcaaggtctccctctgtcacccaggctggagtgcagcctcaatctatggggccaagcatttctcctgtcttagcctcctgagtagctggaactacaggtgtacaccagctggctaacatttaaattttttgtagagacagggtcctgccatgttgcccagattggtctcaaactcctgggctcaagtgatcctcctgcctcagcttcccaaagtgctgagattacaggtgtgagccactgcaccgagccccctccctttatttttatttttaaattttaagttctggggcccctcccttgaaataaatagaaacgtaatatatacacaagatcatgctgtgtattttaaggcaatggtcctcaacctttttaacactagggaccggttttgtggaagatggtttttccataggggcaggggatgattttgagatgaaactgttccaccggccgggcacggtggctcacgcctgtaatcccagcactttgggaggccgaggcgggcagatcacgaggtcaggagatcgagaccatcctggctaacatggtgaaacccccctctactaaaaatacaaaaaaattagctgggcgcggtggagggcgcctgtagtcacagctactccggaggccgaggcaagagaatggcatgaaacccgggaggcagagcttgcagtgagctgagatagcaccactgtacttcagcctgggggacaaagtgagactccgtctaaaaaaaaaaaaattgttccacctcagatcattatgcatttgttagattctcataaagagcatacaacctacatctcttgctatatgcagttcccagtagggtttgtgcttctataagaacctaatgctgcacctgatctaacaggtggggctcaggtgctaatgctcacacagctcctgttgtgcagtctggttcctaacaggcctgtttttttttttttaattagatggagtctcgctctgtcaccaggctggagtgcagtggcacgatctcagctcactgcaacctctgcctcccgggttcaagcgattctcctgccttagcctcccatgtagttggtactacaggcgcacactgtgatgcccagctaatttttgtatttttagtagagacggggtttcaccatgttggccaggatggtgtcgatctcctgaccttgtgatccgcccaacagcctcccaaagtgctggaattacaggcgtgagctgctgcgtccggccccctaacaggcttgttttatggaatacagtcacggacagtacttgcccttcaggatatctttttgtaaccttgattttggcttgctaaaataggaggtctattttcttttctttgtttttaatgtatgtggttctgtacttacgtggtgtgaaatctacataaatgttaaatccttggttatttatttattttgagacagagtctcactctgtcacccagtctggaaagcagtggcataatctcggctcactgtaacctccacttcccaggttccagtgattctcctgcctcagcctcctgagtagctgggattacaggcatgcaccactacacctggcaaatttttgtatttttttttagtagagatggggtttcaccatgttggccaggctcgtcttgaactcctgaccttaggtgatctgcctgtcttggcctcccaaagttttgggattacagcatgagccactgcgcctcgccttatttttttgagacaggttctagctctgtcacccaggcgggagtgcagtggtgccatcatggctcattgcaacctcgagttctcaggcccaagtgatcctcctatctcagcctcctgagtagctgggaccacaggcatgcgccactatgcccagcaaaatttttgtttcactctgttgcctagggtggggtgcagtggcaggatatcggctcagtgcaacctctgcctcttgcgttcaaatgattctcatgcctcagcctcccgagtagctgggattataggcatgcgccactacacctggctaatttttgtattattggtagagatggggttttatcatgttggccaggctggtctcgaactcccgacctcaggtgatccatataccttggcctcctgaagtgctggaattacaggcataagccactgcgcctagcttttttgtttgtttttattttgtagggacagagattttacctgttgcccaggatggccttgaattcctgacctcaaacaatttgccctccttggcctcccaaggtgctgggattacaggtgtgagccactatgcctggctggttttttaaattattattattgtttgtgtgtgtgtgttgcaggatcttaccctgtcacccaggctggaatgcagtgatgtgatctcggcttactgcaacctccgcctcctaggttcaagtgattgtcctgcctcagcctcctgagtagctgggataacagctgtgtgccaccatgcctggctaatttttgtatttttagtagagatggggtttcatcatgttggccaggctggtctcgaactcctgaccttagatgatccacccgcctcgtcctcccaaagtgctgggattacaggtgtgagccaccgtgaccagtttggtttagtttttttttttttttttttttttttttttttttgagaaatctcgctctgtcgcccaggctagagtgcggtgacacaatctcagctcactgcaagctccacctcccaggttcatgccattctcctgcctcagcctcccgagtagctgggactacatgcgcccgccaccatgcccggctaattttttttatgcattttaagtagagatggggtttcactgtgttagccaggattgtctcaatctcccgacctcttgatctgcccgcctcggcttcccaaagtgctgggattataggcatgagccaccgcgtccggcctggtttggtattttttttatgagtctgggttgtttatgaaaacttgtcacagctgttaaccttaactttttttttttcttttttttccgagacggagtctcgctctgtcacctaggctggagtgcagtggtgcgatctcggctcattgcaacctctgcctcccaggttaaagcgatttttctgcctcagcctcctgagtagctgggactgcaggcacgcaccatctcgcctggctaatttttgtattttagtagagatggggtttcaccatattggccaggctggtctggaacttctggcctcaagtgatccacctgccttggcctcccatgcctggcaaccttaactttttatttgctggtaattatttgtgtttgcattcatgtgaaaatttgaaattctcattaacatttaaagattcttacatagattgcttgtaattttaaccctgaagttgtgtcaagtgactttacaatgtcaatttgttttatttatttatttatttatttatttatttatttttgtgataggatctggctctgttgctaaggctggagtgcagtgttgcaaatacggctcactgcaacctctgtctcccgggttcaagccatcctcccacctcagcctcccaagtagttggaactactggtgcgccccacagtgcctgcctagtttttttgtattttcagtagatgtggagttttgccatgttgatcttgaactcatggcctcgagtgatccaccccacttaggcctcctaacatgctggtgttacaggtgtgagccactgtgtccagcccgaaaatgtcagtttcgtgccatgattaatagctaactacattttgggaatgtaataaaatttcattctataatgaagtctttgtaaaactcattagttgtggtatgaggcttgtcggcaatataagtgaacgtggtttatttttattaactgtatcagaactttagaatgttggtctcctgaaaccattgccttgagaggctttattgaacagtgttgccaatgatcagtttttttttaaatttccttttttttgagactgagtcttaccctgttggccaggttggagtatagtggtatggtcatggctcactgcagcctcaacatcctgggctcaagcagtcctcctacctcagtctcccgagtagctggaactacaggtgtatgccaccatgcctggcttttgtatattttgtagagacagggtttagccatgttgcccaggctggtctcaaactcttaaattcaaatgatccacccacctagttttcccaaagtgctttaattacatgtgtgaggcaccgtggctggccaggtcaaatatttttcattgacgtttttcatattgctttttaaagtcatgttaaaatattcttaataatttttctaagtggaattaatcttgattataattttagttttttataaagggcgggttttgaaacaagtactgcatttttcttttcgggtttataaacatttgctgtggactttgtgcagttaactattttcattcctgaaacacatttcgaaatcaggaattgaagactaaatgtcttttcactgaagcttgagcagattttagaaaggggagttcttttttttttttttttttttggtagaaatgggggtcttgttatgttgcccaggctggcctccaacttctgggcttaaactgtcctcctgctttagcctctggtctggagagttctttatggcctctttgagaacttttactttacacatgattctatctagctttcttttctgatgtacatattggcagcaagtagaaaagcaatgttttcagaggcagatatattaacagcaatgagaaataacagtagcgtgatagaaagttgaaagacttagctgggtgcggtggctcacgcttgtaatcccagcactttgggaggccaaggagggtggatcacttgaggtcaggagttcgagaccagtctggccaacatggtgaaaccctgtctctactgaaaaacagaaaaagggccgggcgtggtggctcacccctgtaatcccagcactttgggaggttgaggagggcggattacaaggtcaagagattgagaccattctggccaacagggtgaaaccccatctctactaaaaatacaaaaaaattaaatgggcgtggtgatgtgtgcctgtagtcccagctactcgggaggctgaggcaggagaattgcttgaacccgggaggcagaggttgcagtgagccgagatcgggccactgcactgacgacagagggagactccgtctaaaaaaaaaaaaaaaaaaaaaaaaccagacttggggctgggcgggcgcctgtaatcccagctacttgggaggctgaggcaggagaatcgcttgaacccgggaggtgaaggttgcagtgagctcagattgtgccactgtgccccagcctgggccacagagcagagtgagactctgtctcaaaaaaaaaaaaaaagtttggaagactggtggctgggcatggtggctcacacctgtaatcccaacactttgggaggctgaagcaggcagattacctgagcccaggagttcaagtccagcctgggcaacacagggaaaccccatctcaacaaaaaatattaatacaaaaaatttagccagtcatggtcgtgcacttctgtagtctcagctacttgggaggctgaggcaggtggttcacttaagtctggatgtcgaggtgagccatgattgcaccactgcactccagcctgggcgttaaaatgagaccttatctcaaaaaaacaaagcaaagagcctgggaactactaaaatgggaactactaaaaaacagacacaagagctcaacaagtataccattctgggaggtttttttttttttttttttttttttttttgagatggagttttgctcttgtcacccaggctggagtgcaatggcgccatctctgctcactgtagttccgcctcccaggttcaagcagttctcctgcctgactcctgagtagctgggagtacagatattggtcacacaccgggttaatttttgtatttttagtagagacggggtttccccattttggccaggctggtctcgaactcctgacctcaggtgatccgcctgcttcagcctcccaaagtgccgggaccacaggcgtgagccaccgcacctggctttttttttttgacatagaatcttgttctgttgcccaggctggagtgcaatggtacaatcttggcccactgcaacctctgcctcccagcttctagcgattttcctgcctctgactcctgagtagctgggattacgggtgcccgccaccacacccggataatttttgtatttttagtagagatggggttttgccatattggccaggccggtcttgaactcctgacctcagatgatccacctgcctaggcctcccaaagtgccgggattacaggcgtgagccaccactcccggcctgggagttttgactgtaagtttatagctgtatatcttaggccctaagggcattactgttttatagcacagtgtagttagttaatgtgctcataatggtgactcataacaccaggttaaatgattttttatatctcccaaagaagtatttttcaatctgcagatcatgaccccttagtagattgtgaaacacattagtggattatgacaagcatttttagaaaaatgaaaaagaataagaagtgttaggatgcattgcattattgaaataattgtttttgagatggagtttcgctcttagttgccgaggctggagtgcaatggcccgatctgcctcccgggttcaagtgattctcctacctcagcctcctgagtagctgggattacagacatgctccaccatgcctggctaattttgtatttagttttagtagagatggggtttctccatgttggtcaggctggtcttgaactcctgacctcaggtgatccacttgcctcggcctcccaaagtgctggggatacaggcatgaacccctgtgcccggcctaatttttgtatttttagtagagatggggtttcaccatgttggccaggatagtcttgatctcttgacctcgtaatctgcccacctcgactcccaaagtgctgggattacaggtgtgagccactgcacccagctgccaagaattgttttaagctttggtttgagttaatgtatatataccgcattgtaattcaaaatgtaatttttggccaactctgggcacattgcctatggactagtcctgctctgccacgagcagcaacagttcaatgaattttttttttttttttttttttttttttttttttgagacagggtctctgtcaccaaggctagaatgtagtggtgcagtctcggctcactgcaacctctgtttcctgggctcaagcgatcctcccacctcagcctcctgagtagctgggagtacaggagcacgctaccatgcctggctaatttttgtattttttgaagagatgaggttttgccatgttgttcaggctagtcttgaactctggagctcagatgatccacccaccttggtgtccagaaatgctgggattacagggatgagccaccgtgcctagccaaaaatttttttttaagtaattttttattgatatagtcaaaaaagttactgctttagagccagagaaacgcagtaaaaggattgagaaagagttttgaggttatatctaagctagggttgtcagatttggcaaatagaaatacaggacactcagttaaatttgaatttttgatgaacattgaccagttttttagtataattgtgtattaaattgcatagaaaaaagttatttatctaaagttgaaatttaactgagcatcttgtattttatctggcaactccagtctaagctggaatcatggttcactgttttttttttttttttttttttttgagtcggagtcttgctgtgttgcccaggctggagtgcaatggtgcgatcttggctcactgcaacctccacctcctgtgttcaagtgattctcctgcctcagcctcctgaatagttgggattacaggcacccaccaccatgcccagctaatttttatatttttagtagagacggggttttcgccatgttgttcaggctggtcttgaactcctgacctcaggtggtccgcccacctgggcctcccaacgtgctgggattacaggcatgatctaccgtgcctggccatggttcactcttcagtaactaaaatttaagctctatgaaagcaggaactttgttttgttcactattgattgtatccctatttcttgaatggttggcacttaactgcttggtcacatgtttgaatgggcaagttactcagccactctcaggcttagtttatttacctattaaaagagaaagaatatcttccttggctgggcgcggtggctcacgcctataatcccagcactttgggaggctgaggcgggtggatcacgaggtcaggagatcgagaccaacctgggcaacattgtgaaacctcatctctactaaaatagaaaaaattagctgggcatggtggtgcgcatctgtagtcccagctactcgagaggctgaggcaggggaatcgcttgaacccaggaggtggaggttgcagtgagccaagattgtgccactgcactccagcctgggcgacagaacgagactctgtctccaaaaaaaaaaaaaaaacaaacaaaaaaaaaaactgagatactggccgggcgcggtggctcgtgcctgtaatcccagcactttggaaggccgaggcgggtggatcacgaggtcaggagatcgagaccgtcctgcctaacatggggaaaccctgtctctactaaaaatacaaaaaattagccaggcgtggtggcgggcgcctgtaatcccagctacttgggaggctgaggcaggagaatggcgtgaacccgggaggcagagcttgcagtgagcggagatggtgccactgcactccagcctgctgggcgacagagcgagactccgtctcaaacaaacaaacaaacaaacaaaaaaactgagatactaaagtcttaatattttctgtttttatgtatttattttttgagatgggatcttgctgtattgcccaggttggagtacagtattgtgatcatggcttattgcagcctttaactcctgggttcaagtgatcctcccacctcagcctcctgagtagctgggaccacaggcacatgcaacatcacaccctgcagttctttttttttttttgagacaccgtctcgctttgtcacccaggctgcagtgcgtggtgcaatttctgctcactctaacctccacctcccgagttcaagcagttctgcctcagcctcctgagtagcttgggaccacatgtgtgtgccatcatgcctggttaattttttgtatttttagtagtgacagggtcttaccatgttgcccaggttggtctcaaactcctgagctcaagtgatctgcccgccttcgcctcccaaagtgtctgcgccctacaatttaaaaaaatttttgtagagacagtctcactgttacccgggctggttttgaacttctgccctcaagtactcctcttgccttggcctcccaaagtattgaaattaaggccatgaggcagcacacccagcctaaattcttcttatgttctgttcttggcacatagtagatgttcaacaatgtagagtcaaacgcatttggagttggaatggctctggtgttttttttttttttttaaaccagaaacacgtgcagtttattgaatgccattgtagaaaagtgtgtgaggataaacggctgatagagaacttggctctgggggcagggcgaggaatggagggtggatggagtacatgggaatcagatcacgggcagagctcctggcctagataatgcctcctgatctgttgatagacttgaaagatcaacactgggatgatgctgagcagaatggtcgtaatgatgcgcacaatcagggcccagatgttcaggcacttggcggtaaaggcataggcctgggccctgatcaggtcgccaaccatcttcttgtccctagacttcacggagtaggccaatgctatgaagcccaggcagcaggagttcatgaagtgggtgttgaacagggaccagacgacatggtcgggcacggagttctcgctgtggatggggatcacggtggacattgggggagcagggttgtggggtgcccccagcacagccacctcttgctcctccttgagcatctcatagttagggggatggccgatgttggcaggagtgaagaggtttggacattgtggttcatggtgtccagggaagaccagctgtggtcgggttgctggggtggttctcagtgggcccctccctttccctggtagtttggatttctctggctctggtggttttttagtactcattctatttacgggtgaagaaattgagaccaagagggttatttaccagagtatctcatcattggctgcataactggcattagaatctgatgtacttttatttctaatacatttctttttttttttttttttttgagatggagtctcgctctgttgccgagcctagagtgcagtggggcaatcttggctccttgcaacctccacctcctgggttcaagctattcctgtctcagcctcccaagtagctgggactacaggcacctgccaccacagccggctaggttttgtattttagtagagatggggtagcaccatgttggccaggctggtctcgaactcatgacctcaggtgatccacctgcctcggcctcccagtgctgggattataggcatgagccaccatgcctggcctttctttgtcgtttcctttctttctcttcatccctcctctccttttttcccctccccgctgcctcctcctgtcttcccttctttccttcctttctctcctttttattttttcctttctttttctttctctgtctctcccaacccttcctctctccctccctccctccccttctctctccccccctccctccccttctctctccccctccccttttgttcctaagagacagggtctccttatgttgctgaggctgaccttgaactcctgagcccagatgattctgcctccttagtagctgggactacacccacctcccgttccgttgtcatcttttttttttttttcttttttggagacagaatcttcctctgttgctcagggtggagtgtagtggcacgatcatagcttactgtaactgtgtaacctcgaattcttgggctcaagcaatcatcccatcatcccacctcagcttgctgagtacctggggctacaggtgtgtaccaccatgtccggctaattacttttcttatttttaatttttcggagataggatcttgctctgttgcccaggctggtgtcaaactcctgggctcaagtgaaactcttgccttggcctcccaaagtgttgggagggattacaggcatgagccactgcacccagcctcctctttcttcccatttaactcctaaccacaccgaactttctgtctgcagagaggagcattggtcagcagttcacaaaatggctaggtgtgatggcgtgcacccatagtcccagctacttggggagctgaggtgggaggatcgctggagcccaggagttcaaggccctgggcaacacagcaagaccttatctctggctgggcccagtggctcacgcctgtaatcccagcactttgggaggctgaggtgggtggatcacctgaggtcaggagttcgagaccagcctggccaacatggtgagaccctgtgtctactaaaagtacaaaaattagccaggcacggtggcgcgctcctgtaatcccagctactcgggggggctgagacaggagaatcacttgaacccaggaggaggaggttgcagtgaaccaagaacacgccactgcactccagcctgggtgacatagtgagactcttatctcaaaaaaaaaaaaaaaaggtcgtctgtactattgcatgttagtagtttctttctgcttattgttgagtagtagtctattgtatgcatgtaccagtttgttcatctagtggtggacattgagttagcaggttttggctattaaaaataaagctggaggccgggtgcgatgtctcacgcctgtaatcccagcattttggaaggccgaggcaggcggatcacctaaggttgggagtttgagaccagcctgaccaacatggagaaaccccatctctactaaaaatacaaaattagccaggcgtggtggcgcatgcctgtaatcctagctactcaggaggctgaggcaggagaatcgcttgaacccgggaggcagaggttgtggtgagccaagattgcaccattgcactccagcctgggcatcaagagtgaaactccgtctcaaaaaaataaataaataaagctggtatgaatatttatgtacaggttttgtgtgaacatatgattttatttctcttggttggaatgcatagaaatgagattgctgggttttgtggcaagtgtttatttttccagggtacatataatcctgtgagtgtttatttaattttaaaagtaattgctaaactgtttgctaaagtgactgctatattttctttccctagcagtgtatgaatttttttttgaggcagggtcttgctctgtcacccagggtggagtgcagtggtgcgatattgtctgactgcaacattgacctcctgggctcaagtgatcctcctgcctcagcctcctggctgggaccacaggcatgtaccaccacacctggtagtttgctttgatttttagtagagaagaggtctcactatgttgccctgggtggtgttgaactcctgggctcaagtgattcatctacctcagcctcccaaagtgctgggattatagatatgagcccctgtgcctggcctcattgtggttttaatttgcatttccctaatgcccagtgatattgagcattttttcatgtgtttatttgacattcataccatctttggtgatgagaaactatgtttatgcattgcttaatgatggggatgtgttttgagaaattttttcggtgatcttatcattgtacaaatatagagtttacttacacaagcctagatggtatacctactagacacataggctgtcgtacagagtattactcttaggctacaaatctgtatagcatgttgcggtactgaacactgttggcagatgtaacataatgttaagtatttgtgaatctaaacatatctaaacatagaaaaggtgagtaaaaatacagcgtaaaagataaaagtggtatatctgaataggtcacttaccatgaatggagcttgcaggacaggaagttgcttgggatgagtcatttatcagtggtgtgtgaatgtgcaggcctaggacattactgtatgctactgtagacaaacactgaacagttaggatacactaaattgataaatatctttcttattttgttttttgagatggagtctcgctctatcgcccaggctggagtgtagtggcgtgatgttggctcactgcagtctctgccttctgggttcaagcgattctcctgcctcaacctcctgaatagctgggattacaggtgcgtgccaccacacctggctaatttttgtatttttagtagagacgggggtttcaccatgttggccaggctggtctcgaactcctgacctcaggtgatccacccgccgtggcctcccaaagtgctgggattacagatgtgagccaccgcacctggccagagatgaggtcttgctgtattgcccagggcgttgaactcctgggctccagcaatcctcccacctcagcttcccacgtagctgggactgtgggtgcacgccatcatgcctagccgttttgtgaactgttgaccaatgctcttttctgcagacagaaagttcactgtggttaggagttaagacttttaacctctgacctcaagtgatctgcccaccttgacctcccaaagtgctgggattacaggtgtgagccatcacgcctggtcaaaaatatctttctttaagagtaaatttaccttaacttactggttgatcattgtatataggtctgttgttaattgaaacatgcgggccgggcccggtggctcatgcctgtaatcccagcactttgggaggccgaggcgggtggatcacaaggtcaggagatcgagaccatcctggctaacacggtgaaaccccgtctctactaaaaatactaaaaattaaccgggtgtggtggcgggcgcctgtaatcccagctactcgggaggctgaggcaggagaatggcgtgaacccgggaggcggagcttgcagtgagccgagatcgtgccactgcactccagcctgggcaacagagcgagactctgtctcaaaataaataaataaataaataaataattgaaacatgcggtgcatgtgtttatttgcgatctgacttgtttggaaatatttgcattatcttccttctagatttagagcatcttgacagtaggaacaagtgttttgtacaactttgtatgcttagtaagttatcaattaacttgtcgtggccaggcgcagtggctcacgactgtaatcccagcactttgggaggccgaggcgggcagatcacctgaggtcaggagttcgagaccagcgtggccaacgtggtgaaaccctgggtttgtttgtttgtttatttatttatttattttttggagacggagtctcgctctgtcgcccaggctggagtgcagtggcgtgatctcggctcactgcaacctccgactcccaggttcatgccattctcctgcctcagcctcccaagtagctgggactacaggagcccgccaccatgcctggctaatttttttatttttagtagagatggggtttcgccgtgttatctgggatggtctcgaactcctgactttgtgatccgcccgcctcggcctcccaaagttctgggattacaggcgtgagccaccacacctggcctaccctgtgtttattacaaatacacaaattggccatttgtgcgtggctcatctacagtctcagtgactcagaaggctgaggcaggagaatctcttgaacccgggaggcagaggttgcagtgagcagagatcgtgccactgtacttcagcctgggtgacagagtgagactgtgtctcaaaataataataataatttgttgaatatgtgactgttggtttaatttttatttttatgagatggagtctcactctgttgcccaggttggagtacagtggcgtgcagtggcgcaatcttagctcactgcaacctccgcctcctgtgttcaggtgattcagcctcccaagtacctgagactacagacgtgcactaccgtgcctgactaatttttgtatttttagtagaaatggggtttcaccatgttggtcagcctggtctcaaactcctattctcaagtgatccgcctacctcgaccttccaaagtggcggaattataggtgtgagccgtggtgcccggccagactattggtttggtttggtgtgatgttatgttatgttatgttatgttatgttatgttatgttatgttatgttattttaagacagagtttgtctcttgtcgcccaggctggagtgcagcggcatgatctcggcttactgcaacctccgcctcccaggttcaagtgattctcctgtcttagcctcccaagtagctgggattacaggcgcccaccaccgtgcctggctaatttttgtatttttagtagagacagggtttcaccatcttggccaggctgttctggaactcctgacctcatgatccacccgccttggcctcccaaagtgctgggattacaggcgtgagccactgcgcctggctgactattggttttattattaagcagtagtagttgaccctgtcatgtagaaagcatggcatttataggcataccacgtttaatttcctcccctttttttatttttggagtacctcctgcttgtgaggcttgggaatacagtagtgaataagccagatgaggtctctctctttttggagcttatgtggtagtatagactaggcagaaagttctcattgcccctgccaccttatggcattgaggtgtttgagatgctgatgtttacttctgtctcataaaatcttgaaaggagttcttttagatgaagaggaaaacaaaatcagaagaatgggcctgggtcatgtctgtaaacctccccacgtcatggggaggctgaaatgggaagggccaggagttcaagaccaggctgagaaacataacaagaccccatctctacaaaaaatattttttaattaatgggggatggcagcacacacctgtagtcgcagctactacgaggctgaagcgagaggattgcttgagctcaggagttaaagattgcaggagctatgatcacagcactgcgctccagcccctcttatcagcagtctggtatgttgctaagggtcttgttctttttagtgcttcagggacagccactggctatgcccagaaataagtatgtttgagaagctttctgacctcagcttgaaaaattgattagggtcataattaaaaagggagggaaacaggattgagtgaaccggacgctaccgtgagtttattctcccagggcatacataatctcatgtgattaccacatagccctgttagataatctgttatcctgtcctcattttacccatgaggaaatgaaggcccagagaggttaaatgacctattcaaattcactcagaaggtggcagagatgagttactatcattgtattttggatctctggaaagaaagaaaactagtgatggtattaaaaaatgttattaatagtttcttttaatcaaccaggaacttgagtcactagcttctctgggtgaaggactatacttcaacagtatgaaaaacggaaaagaaaatgaggaattttggctgggcacagtggctcacacctgtaattctagcactttgggaagccaagggaggagggtcgcttgagctcaggaattcaagatcagcctaggcaacatagtgaggccccatctctacaaaaataaattagctgggcatggtggtgcatgcgtatagtctcagctacttgggaggctgactcaggagggtcacttaaacccaggaattggaggttgcagtgagctatgattgcgccactgtataccatcccaggcgacagagtgagaccctatccccccaccgccaaaaaaaagaaaagaaaatgaggaatttacatttgtgacagatacggaattcagggaatttagttgttcatagtctataaatgctataagaagtctccatacctttttttttttttttttttttttttggagacagagtcttgctctgtcgcccaggctggagtgcagtggtgcgatcttggctcactacaagctctgcctctcgggttcacgccattctcctgcctccacctcccgagtagctgggactacaggtgcccgccaccacgcccggctaatttttttgtatttttggtagagatgaggtttcactgtgttagccacagatcccgacctcatgatctgtctgcctcagcctcccaaagtgctgggattgcaggcttgaatcaccgcacccggccggaagtctccatactttttaacccaatctaaaatggtaaggaaatatataagaatgtctatttattattaaattttttctatataaaacatttcagaaaataaagactagcatttctgagccaagtggtagtagtggccattttttctggaaaaaaaaaaaaaaagaaagaaaaaacacatttagctatctatgatgtgaaaagatgaacattttatttaggtaataaatgttatgtcataaaataccatttattgtgtgcctattaggtttcaggagagctgtgccaagagcattacttgtatatcttttaagccttacaacagcccagcctgtcaggctggtagtgccatatctgttttacagatgaggaagtgatggattggagaaattaaggaaattgcctttaggtcaaagagataggaagtgacaaagctgagatttttaaccttgtgagatttcaaagtctttgctttttaataactgttccattgcttctaatatagagatatgacaaaaacaagtaaaaatcagtgaagaaggctgggagcagtcgcttatgcctgtaatcccagcagtttgggaggccgaggcgtgtggatcgcctgaggtcaggaatttgagaccagcctggccaacatgacaaaactccgtctctactaaaaatacaaaaaagttagccaggcgtggtgacaagcacctgtaatcccagctactcagtaggctgaggcaaggagaatcgcttgaacctgggaggtggaggttgcagtgagctgagatcgctccattgcactccagcgtaggcaacaaagcaagactccgtctcaaaaaataaataaataaataaataaaaataataacaataatgaagaaaacaatccggtgattattgtcagcaataaaatttcttcaatcaaccatgctttagtcctggcagttctctatcagtgagtttcaatcaaaaagtttgtttataatttttttttttttaaaattttgaaatttggaaacaacatcataaatgatggttagttttctgcagctccctattttggcagatagtctgttgttactcataattaatttgaactaaaaagtagtgttgtacgatatcatgggctgtgaatgtgtttgtgacttgatctgagaacccacacaccacttaggatgcttctgtaggaaaattagagtatggaactcacttgcccacgctttccctgtctcagtccatgttggtaggctgcaaagtctggggctagaaggacactgaacaagacttcagcagtacatgttagtcttccagagggaaggaatataatagttgagagaataattcctttcctctgtgactttaggcaaattcttggctatgctgttatttatttgggccaaacaatatcaggaggttgtacattttattcttaattactgcgatacattaattttatccatgggtttaacctagcctaccttttgctgttagacttcaactctacttgtgttgggttacccctctgcttaaaaatcaccctattcccaagcctgagggagtctaccttcaaagctttctatgacctaatccaaggcctgtcaaacttcgtaaagggccagatagtaaatttgttttttttttttgagatggagttttgctcttgtcacccaggctggagtgcaatggtgccatcttggctcactgcaacctctgcctcccaggttcaagtgattctcctgcctcagcctctcaagtagctggggttataggcatgtgccaccacgctcggctaatttctttgtatttagtagagatgggggtttcaccattttggtcaggctggtctcgaactcctgacctcaggtgatccacctgctgcggcctcccaaagtgctgggattaccagtgtgaaccaccgtgcccagcccgatagtaaatattttaggctttgcagtccatatacagtcccatttttttgtgtatgtttgcacgttttctttacatattttaaaagcccctttttttttttttttgagacagagtcttgctgtgttgctcaggctggagtgcagtggtgcaatcttggctcactgcaacctctgcctcctgggttcaggcgattctcctgtctcagcttcccgagtaactgggattacaggcacatgctgccacgcccagctaatttttgtatttttagtaaagatggggtttcgccacattggccaggctggtctcctgatctcaggtgatctgcccacctctgcctcccaaagtgctgggattacaggtgtgagccaccgtgcctgacctaaaagctctttacagtgtaaaaaatattctgagctttaagccatgtgaaaataggccatgggcatttgctgacccctaatagaactccattttacctttctgatcatgtttcccattaactcttcaaaaatatgacctccatttaaatcaagatggtctccttcctcactgcttgtggaggtccagtgcccagtgtctgcctcttgcttgctcctccatcattgttctgccattcgagatcctcatacttaccctttaagatctagcccaaattttccatgaaactaattctaataattaaaaacttcctgtagaacttaactttgtctagtacaagttagctttcttattcagtagtagcttactataaattacaagaataaaaagattaccattttccctcacactgttttgtggagaatgcctaaagttactttttctttttacaggtcagtattcctatttggcatcctaatcccctttcccaaatctgaattttgggatttgaagcttgcatttgagattatgatttgtcttccttgttgtacacaggagcagggactttacaattagtattcgcatccctgctccttcatacttcgtgatgtaaggcaagttattttcacttatgcttaagtttcttcccctgtaaaaaggggatggaagaggattaaatgaattaaacatgtaacacgcttaaagcaatgcctggcaagtaataagtgctcagtaacttttagctgttcttattagcatgtttggaaaccagtagaaactacaccagcaagttaaggttgaaaagtggtattgatgggcttggggtagtacagtatgaatggctacagtttagcgtttcattaagtttgtatattcattaattcattacacatttgatgctgtcagactaggacagagacaaagatgaatgaaacattatctctgcttccaggttacccagtgtagtagagaaggcaggcatgcagatagtttaaattggtagcactgggaggggactgccatgggtgggcagtgaagaaaaagggcttcaaaataatgagagttgagatggatcttcaaggaagataagcagttttcagtaaggccatgaagagaggaggaagttccaggcgggaagagtttgtgctaaagtacagggattgctatacacatggtgtatgtagaaaaaatttggttcacagtgtgatagaagaattggagggggtcctcactgaaagtaaggaaacacatttggaagaatatgtttcagttagaaaatgaaatgagcttaaagtaaacgctaataaggtttttaaaatgtaaaatttcaacgtatttagaaagagaacagctggatgaatcttatgtacctgtcactcagctttagcagttatcagtaaatggccaacgttgtttcagctatactcccctctcctccactgatagtcttttgaaggggaatacaattgttttgtggcctccagaaagggataagtttatgagcaacgggtagatcgttgggagagacttgagtttcctgtcaggaagcattcttggtgcataagtcagaggtgatatgaatgccgtggaagggggtggcttactgtctggagaactcgagaagatgggaatgggcactgtccagtattgtggctacttccacacatggttctttaaatttaaaattatgttgattaaaatttaaatatttcagttcctcagccatactaatcgtatttcaagtgcttagctgccacatgtgcctaatggctgcaatattggacagcatgacataggacatcttcatcattgtacaaagttctcttggacagcatgggactagagccctaagatccttttctacctgagttgtttggattttttggtgtgtctaggttggatctagttgttcatggcttcatgaccaagccttttatccctttctctagagggactcaaggggtaaaggcactgaaggggtaaaacttcatatgaagagtgtggtggtggtggtggtgttttaagacagggtctcgctctgtcactcaggctggagtccagtggcatgatcctggctcactgcagcctcgacttcctgggcttaagtgatcctcccacctcagctcccaagtaactggaactgtaggcatgagccaccacacctgcctaatttttaaaactttctgtagagacgagatttcgccatgttgtccaggctggtctcaaattcctggactcaccttggcctcccagagtgctgggattgcaggtgtgggccactgcgactggccttttttttctcctttactactctagtgtatgctggaatatgaggaaataattatattagctagcagttattaaacacttaataacataccaggcactgttttaagctatgcgatctgtatggaatattacttaatttccacaaccttatgaaaagatactattttttttcttttgagaaggtactattttcatcttcatttcatagatgttgaaattgaaacacagagagctgaagtcacaggattaaggccacagagctgagaagtgatggagccggaatttgaacccaagcaattaatgctgatattagttcttgtgtgaatggtaattgttttgaaacaatgatcctagatgattatatgaccggattaatctggcagttgttctgtgtgaatttagagttgccttcccacctcagtttcctaaaaacaaaacaaaacaaaacaaaacaaaaaaaactctagcttcactgtgtttgggttgtcatggcctaccccctcttgccacctcatttgactcaactttttagggagaaaatattcaatacgtggtataggatttccctttctaataataatgtaaacaacaacaagaagtctgaaattggaagaacaaaatgactcacctaagtgagttaaccttaagaggtggaacttgatttctagattttagttaattgtctaactgatgtactaaatattagttacttaagtattaaaacgggtagacataatagttggggagctgctgtagagggggtagtttgagaaggcttctttcaggaggtgacatttaagttggtaactaacaagaaaggggcagccatgtgaatagctggagggaagagcattcttacagttttactggaagggggttagaggtatgtggtacccttatgccaaagaaaattagttacttctatacaaccagtctgattctagaaacctggatcaatgaaatattttgattatataaaaaaatctgttacccaggtcttgttgaaatagcattagaaactactgaaggacatatagaggaggagtgttgaaaaatggtgatggatgagcagaatggtgaaaaataaaaagacatgaagctctataattatattgtatggtgacagtaccaatagagattgcatgttttttctccccagtttttttttttgttttgttttttgtttttgagacagagtctcactgtgtcactcaggctggagtgcattgtcgtgatattggcttactgcaacctctgcttcctgggttcaagcgattctcctgcctcagcctcctgagtagctgggattacaggcatgtgccaccacgcccggctaatttttgtatttttatttgagaggggatttcaccatgttggcaaggctggtcttgagttcctgacctcagataatccacctgcctcagcctcccaaagtgccgggattacaggtgtgagccactgcgcccggcctcccccagttgttgaaacaataatggaaggtaattttattcttagattatttaatgtttttcagttatcaggatgtgttagattgtttgtgtatattgttttgcttgttaattaagtaacacagtgaataagacagacaaacatacgaaaatgtacatttattttatttttttgagacagtctgttgcccaggctggagtgcagtggcccaatctcggcccactgcaacctctgcctcctgagttgaagcgattctcttgtgtcagcctcatgagtagctggggccatgggtgcacgccaccatacccggctaatttttatatttttagtagagatggggtttcaccatattggccaggctggtctcgaattcctgacctcaggtgatctgcccgccttggtctcccaaagtgctgggactacaggcatgagccactgtgccaggccatttcatttttggaacgttcttttttttttttgaaatggggtctcgctctgtctcccaggctggagtgcagtggctcaatctcagcttactgcaacctctgccttccgggttcaagtgattctcctgcctcagcctcctgagtatctgggactacaggtgcatgccaccacgccaggctaatttttgtatttttagtagagacggggtttcaccatattggtgaggctggtcttgaactcctggcttcgtgatctgcccgcctcaacttcgcaaagtgctgggattacaagtgtgagccaccacgcccggcctgtttctggaatattcataatcttttgttgtcatttcaacagtgctcacagcagcttcaccaggtgtagattccatcttaagaaaccactttctttgcttatccatgagaagcaacacctcatctattcaagttttatcatgagattgcagcaattcagttacatcttctgaccccacttctaattttagttctcttgcttttttaccacatctgcagttacttgctctactgaagtcctgaacccctcaaaatcattcatgagtattagaagcaatttcctggttgggcacggtggctcatgcctgtaatcccagtactttgggaggccaaggagggcggatcacctgaagtcaggagttcaagaccagtctggcaaacgtggtgaaaccccgtttctactaaaaatacaaaaattagcggggatgtggtggcgggcgcctataatcccagctacttgggagactgaggcaggagaatcgcttgaacctgggaggtggaggttgcagtgagttgagattgtgcccttgcactccagcctgggcaacaggagcgaaactctatcttaaaaaaaaaaaaaaagaaaagcaatttcctctaaaactcctgttaatgttgatgttttaacctcctcccatgctcatggatggcattctcagtggcatctagaatggtgaatactttttagaaagttttcaatttattttgccatcagagaatggctatgaatggcagtagtagccttacagaatgtatttctttttttttttttctttttttttgagatggagttttttttgctcttgtcacccaggctggagtgcagtggcatgctatctcggctcaccgcaacctccgcctcccgggttcaagcaattctcctgcctcagcctcctgagtagctgggattacaggcatgcaccaccatgcccacctaattttgtatttttagtagaggcggggtttctccatgttggtcaggctggtcttgaactcccgatctcaggtgatctgcctgcctcggccttccgaagtgttgagattacaggcgtgagccaccgcgcccggccgtatttcttaaataaaatggcttaaacgtcaaaattatcccttgatccctgggctatggactgattcttgtgttagcagttatgaaaacatttatgtccttgtacattcccatcatagctttttgtcaatgagaagtaattttttttttttttttgagacagaatctcactctgtttcccagcgtggagtgcagtggcatgatctcagctcagtgcatcctacaactctgaggttcaagcaattctcgtgcctcagcttactgagtagctgggattacaggcgcccaccaccacgtctggctaatttttgtatttttagtagagatggggtttcacgatgttggccaggctgggctcgaactcctggcttcaagtgatccacctgccttggcctcccaaagtgctgggattgtaggtgtgagccactatgcctggcctaattggcctaatttcaatattgttatatctcagggaatagagaggcacgaggagaaagagagacaagctgactgctggttcgtggagtagtcataacacacaacatttattaagattgctgtcttatatggaccgtttgtggtgccttaaaagaaatcagggtaacatcaacgattactgattacagattactataacagatacaataataattgtaaattattatttacaattgtaaaatacaatcttttctttattatttacaattattgtaaaatacaatctgattacagattactataacgtatacaataatagtggaaaagtttgaaaatattgtgagatttatgagaatgtgacacaggcgcaaagagagcacatgttactggaaatacggcactaatggacttgcccgactcggggtttccacagacggtcagcttgtcaaaaatgcagcatctgtgaatttcaataaagcaaagcagaataaaatgaggtatgcatgtattgccatcacatgtacactagtaaaatacgttttttttttcagtaggtggatcaacctcaaattttaatataaagcattacttaaaggagaatatggggacattcatgacatttcttatatgtacataaaacttcatgaaaataatttaatgctatccagcagtttattttagaagtactggaggctaggcatggtgtcttatgcctgtaatcccagcactttgggaggctgaggtaggaggatcacttgagttcaggagctggagaccagcttgggcaatatagtgcgaccccatctctacaaaagagaaaagaagtactggagtgttgcagctcttacagaatttgtctagcaggttttccagtctttaccagaaatgcccccatgcagaagtagtaaatactgattcatgtaaaataataaacaactttatctttcagtttttaaaagacagggtcttgtaacgttgcccagactggcctttaattcctgggctcaagcgatcctctcacctgagccttttgagtagctgagactacaggctgcacctctgcacctggctctgcttgatttttaattgttgtattgctgttgcagctatgtttttttttttcttcagtgtgaggatgggcaaactttttatgtaaagtctcaggtaataagtattttaggctctagggccatatagcttctctgttgcatatcctttttttttttttccatttcccctcaaattccttttaccataagcaactcttgaggaacataaaaatcattcttagcccagaagccagaccaaaacaggttgtgggctgtagtgtcctgacccctgatttaaagattgatagctttgaaatggaaagttttaactttctttttttttctttcccttgttctgattgggctgttaattcattaggtatttactcagtgtgtatcatatgaggcatgattcctctgctaattttggtagtggtagaaagatacttttgccaagcttggttgttaggttttcatttgtccaagagttcctgaccaagtgtgaatggatgttgaaatcaaggtgtttctttggccacacaatgtgcctttgggggctatatctatgtgcttctggtaccttcttttaattttcacaaagacactgcttgccgaccacactgttttgtctaatgtggggctatgaccccctggaagaggcatcattttctgattttcacagaagcataatatggtcaggtgatggtcctgagtagtgggtatatgacagatacactagtaattataatacagatctaaactggagagttgaaaacagcatcgtatatttgattgagataatcgaaggaagacttcctgaaaagatggcatttgagtttcaaggctgagtaggattaagtattattatttaaaaaatgccttggacaatgcattaaatagagttaacaaatcacatcacttatagtctccaattaaaaacattttacttaaacataattttagacttttagaaaaattgcaaagatattataaagaattctcctatatatctcacctgtattcttcaagtaacattttaccatattcaccttaacattttctctgtattggtaattgtatatgtaagatttaatataaaataaaaattcttattaaacatatgagagacatgatgcctctttagccctaaatacttcaacttgtatgtactaataacaagggcattctatttcaaaaccacagtacagttgtcaaaataaggaaattaataattgtgtcaaactgttattctgtttatagaccttctaatgtcctttaaaacaatcaacaaatcaacatttttctggtcaagaaccagtaaatatgtatattctacatatatatatacacatatatatacacacatatattctacatatatatgtggaatatacgtatttactccctctgtccaagaaccaatccaggattgttaccttcggttatcatgtatctttggtctcctttaatccaaagcagtttctttgtcttttatgacttgacacttttgaagattacaggttattttgtagactgtccctcaactagggtttatctgaggtttccttatgattagattcagatatttatttttggcaggaatacaacagaaatgatttgtgtgtttttctcattgcatgatatcagaaagtgcattgtatatatttatcccattactggggttgttaactttgatcacttggttagagttgtgtctactaagtttcttcactataaagttatttttcacttggtcatttcatcagtatcttgtggggagttactttgtggttatataaatactctgtttctactttcccttactatatttagcttctgtggacacttttgcctgaaacagttatttactatggtgttaccaagtagtgatgcccttttcttccatcattctgtctacatttttttttttttttttttttttttgagatggagtttcgctcttattgcccaggctggagtgcggtggcctgatcttggctcactgcaacctctgcctcccgggttcaagcagttctcctgcgtcagcctcccgagtagctgggattacagacatgcgccaccactcctggctaattttgtatgttcagtagagacaggatttttccatgttggtcaggctggtctccaactcccgacctcaggtgatccacccacctcagcctcccagagtgctaggattacaggcgtgagctgccacaccaggccttctttttctcttttaagagatagagtcctgctttgtcaccaaggctggagtgcagtggcatgatgatagttcactgcagcctcaaactcctgggctcaagtgaacctcccatctgtagctgggactacaggcacctgcataacacctgactgttttttaaaactattttagagatggggtcttgcgaagttgctcaggatggtcttgaactccgggtcttaagtggtccttctgcctcagcctctggattagttggcattacaggcatgagccattgtacctggcaagtgcatattttctttttttttttttaaggtggagtctcgaggccgggcgcagtggctcacacctgtaatcccagcactttggaaggccgaggtgggtggatcaagaggtcaggagatcgagaccatcctggctaacatggtgaaaccctgtctctactaaaaatacaaaaaattaactgggcatggtggcacacgcctgtagtcccagctactcgggaggctgaggcaggagaattgcttgaacccaggaggtggaggttgcagtgagtcaagatcatgccactgcactccagcctgagcgacagaggtagactctgtctcaaaaaaaacagaaagacggagtcttgctctgtcacccaggctgcattgcagtggcatgaactccgcctcctgagttcaagcaattcttgtgcctcagcctcccaagtagctgggattacagacatgtgccaccacacgtggctaatttttatagttttagtagaggtggagtttcaccatgttggctaggctggtcttgaactcctgacttcaggtgatccacccgccttggcctcttgaagtggtgggattatgagtgtgagccactgtgcccagccaagtgagtatttgcttatgtagtattttaattttatgatttttttttctttgagacggaggtttgctcttgttgcccaagctggagtacagtggtgccatctcggctcactgcagcctccacctcctgggttcaagccgttctcctccctcagccacctcctcctgaatagttgggattataggcgcctgccaccatgcctggctaattttttgtatatctagtagtgatggagtttgagcatgttgccaggctggtcttgaacctctgacctcaggtgatccacctgccttggcctcccaaagtgctgggattaaggcatgagccaccatgcccggccagagactgttcatttattttttttttttgaggcggagtctcgctgtattgcccaggctggagtgcagtggcacaatctcggctcactgcaagctccgcctcccaagttcacaccattgtcctgccttagcctcctgagtagctgggactacaggtgcctgccaccacgcctggctaattttgtttttgtatttttagtagagatggggtttcagcccgccttggcctcctggagtgctgggattacaggcgtgagtcagggcgcctggccaatcataccttcttttactgcattaattatggttttctttcgttcttaaaacatgtttatagtgaccacttttgaaattcttattaagtcagacatctggttatacaagcaatttctattgcctacttctttttccagtgggtggggttatactttcctgtgtcttagcttgtcgtttttttttttgttgttgaaaactggacattttaagtaatgtagtaactctggatacctcattagcctatggttgggggtggtggttgttactgttatttgcttatttgtctaatgactggctgaatgattttagtgttctatccttcttccctccctgtacagtgtgacacgtctgatgctagttttcttgggatgcagccttgggtatgcctaccatcactctagaatcacagtgattttggcatggctttgtctcttttcctgactgtacccagctgttaagctacactaattactaggtgatgctgtgtagtcatttcttggtgtccttgggggattggtcccaggacccccccgttggatataaaaatttatggatgctctagtccctcataaaatggcacagtatttgcatataccggtgcacatcctcctgtatgctttgtcatttctagattacttataatacctaatatggtgtaaacactaggtaaatagttgttatatattttttatttgtcttatttttattgtatttatttttaagtgtttttaatctcgagtgattgaatctgaggatgtgaaatctgcagatatggagggcctgcattgttttccgtggagctttgggcctaaactgctccacagactgatctgatcaaatttgcgcttctttgaagggatagtttctgagatcagtgtttgaaatttgttccaatccacagaggagtcctcccagctctctttccctagttctggccaccaaactagacaactacaatttagcacttatctccaatgattctcctcctaccaagtgcctttgaaagcatcattaactctttcataccttgttgcaaatgaaatttctttgggaagagattgtgagttttttttctcctaaattatggtgcaatataagtaatataccattttaacaattttaagtgtattaagtgttttttttttttgtagtttttttttttttgttttttgagatagtcttgctctgtcgcccaggctggagtgcagtggcacgatctcggctcactggaacctccacttcccgggttcaagtgattctctggtctcagcctccccaaatatctgggattacaggtgtgcaccaccacgcctggctaatttttctatttttagtagaaacggggtttcaccatattggtcaggctggtcttgaacttctgagctcgtgatccacccacctcggcctcccaaagtgctgggattacaggccttagccaccacacctggcctatgcattgcttttatatgtattttaaaattcataagttctcctcctatgatgtttttgtcccatgtgatttatttgttaaaccgtcatctttggccgggcgtggtagctcacgcctgtaatcccagcactttgggaggctgaggtgggtggatcacaaggttaagagatcaagaccatcctggccaacatggtgaaaccccgtctctactaagaatacaaaaattatctgggcatggtgacgcgtacctgtagtcctagctacctgggaggcggaggttgcagtgagccaagatcgtgccactgcactccagcctggcgacagagtgagactctgtctcagaaaaaaaaaaaaacaaaaaactgtcattttttatgttgcatttactgcattctggatttaaactgtgaggaacctcatggtatcagttaatatattcttccatcttaatgtttctcgtaaactggtagatctgtaaacttgattaggtctatcctattgtatcacatcagaagcagaaggtgcttttttttttttttaagggaaattgtgtgaaagtagacagaatggtaaagtgaacccctgcacacctatcacccagctttaatagttatcagctcataccattcttgtttgatttacaaccccattcatttctcccttctgtattattattatttagttaattattttttgagacagggttttgctctgtcaccaatgctggagtgcagtggcataatcacagctcactgctgtcttgacctcctgggctcaagtgatcctcccacctcaccctaccaagtagcggggaccacaggcgtgtgccaccatgcctggctagttttttattttttgtagaaacagggttttgctttgttgcccagactgatctcaaactccggcactcaagtgatcctcctgcctcagcctcctaaagtgctgggattacaagcatgagctaccacattcagcatgtaaatttctttatattaatttgactggcattttaagtcacacttgaatttcatatttggcaactattaaaagcatagagtcctggatattagtgttttgttaaacctgatctatctaatcataaatatacttaggtctaaaatatgctcttggcctttgtttattgcggttcagtatttgttactatattaaatagtaaaatatttggtttgagatactaatgaaaagattaaaagtaaagcataacttgaatggatacaaaaagaaacaagaatttagacttcagtggatttcagagaatactgcttcgatatgctaacattcctgttgggtgtccaaccgtgtcatagatcagtggaaattagtggtttctgcactttactgtactgtttttttatatgataatattttcctggttgaatgattcgttcttttgagtaaactccatggtcaaacaattactttttattagtcaaagatgtaaccacataatcactaaaaagaacagtgtgacttatttaaaggggattatgtttttaagtcttttatatagctttgtagggaggccatatgagtttaaggacagttcgtggcatttgttcaaggttttgtaacttggcatctcagcagccaccaggataccagatcatcgttctaagtaagatttaggcattttagccttcatgtacagactataagtacacccccccacacccctaccaaaactgtaaattcaaatgatgtttgaaaaagcatagaatttttgttaggcgaggtagtttattccttgtgatacagttccagagaggcagcataacctaggaatgaaaaacttagacgtggaatcagatacacctggtttaaataccagctctactgctcatgaactggatgattttggtcaagatacttgactgctgaggttcagtttcctcacctgtaaagtagaggtgatagattagacatgttgcatgtgaagtacttagtatggtgtctggttttgtagtaagatctataaaagataaattattagtcatattccttagacttcaggaatttatctctgtgccatgtttgaggcaaacagttacagaattagaatgttagaaatgaaaggaatcctagatgtcatttaattcaagtccattgttttctggatgagagaagaaagtgaggaaaagtgacagagttggagaccaagctaggactggcctcagaatgttaagagtactcttctagggatcgaccagtcgtgttactagactttttggatctgaattgtgcttttccttgaatgttttgaattttggcttgagtgttgtgattattttattaaaatgagattccagtcctattgtcatgactaatgtttatgagaaatataacatttcactttaatgatgttttttaattattctaaggggcctaatctttttcagtggaataagctttaggttgtattatattctataattcacttgaaaatagaattcatctttacttgacagccaaattttgtgtactgcatcttttctgagggagagagttggcaaggaaaggcacttgttacaacgatccacacatatagacgcatattatttagaaatgaaagtgctttgaatgatttagcttattttcagtttttttttttctgcagttgtaatcatatgacctgtttttctttctttttttttttttgagacagagtcttgctctgtcaccccggctggagtacaatggggcggtctcagctcactgcaacctccacctcccaggttcaggcgattcttctgcctcagcctccctagtagctgggactacaggcgcatgccaccacacctggctaatttttttattcttagtagagatggggtttcactgtgttagccaggatggtctcgaactcctgaccttgtgatctgcccacctctgcctcccaaagtgctgggattacaggcatgagccactgcgcccggcccatatgacctgtttttcttttatagatgggggagaaatatgggaagtgacttggtgtcagtcatctgtgttggttaaatcaagaatataatccgtgttttgcttctgaatagctctttataacagtgattggttactttgggagtaaagattattatttagagacagagtcttgctttgtcgcccaggctagactgcagtggaatgatcgtagcctactgcagcctcagactcctggactctggtgatcctgcctcagcctcctgagtagctaggactagaggtgcatgccacatgcctggctataattattattaatttacgtttagcattagtttttttcttccagtaggctattttactttatttatttgattttgatgaagtttgattatttctagtttgcttccttctatgacccctacctgttgtgggtctccaggcaagcagtgcataggtagagccatccttaggtagcctttagacttaatattaggtgagctctccccacagatagcctctcctttatttgaatggaattatattttaagtttggaaatatttttcagcttatttagcctgttgaatttaataaaaataatatttaatcttttcagaggtcgaaacagtaacaaaggactgcctcagtctacggtgagtaactttaatgttacttattggggaaaattagtagctaaaacatgatctctaaccacagaccaaatgccaaggcaaaagattcccttcttttgaattttgtcatagataacttgactgtttaagtatgttattagcctatatgtgtttttttaatgactctgtataaaatgtacaattacttgttgtattagtccattcttacactgctaataaagatatacctaagactgggtaatttataaaggaaagaggtttaattgactcatgctctgcattgctggggaggcctcaggaaacttacaatcatggtggaaggggaagcaaacacatccttcttcacatagcgacaggagagagaagtgctgagcaaagcagggaaagccccttataaaaccatcagatctcctgagaactcactcactatcatgagagcagcgtaggggaaactgcccccatgattcagttatctccacctggtcttgcccttgacacacgagaattattataattaaagataagatttgggtggggacacagaaccaaaccatatcatttgtaaatagtatttttgtcacgtgtaataacaagaacaagtcgcttgttcttttctaaatgactaagtgcaaatctaagtgaaaaacctccaaaagatacgtagaacaccaagagtggagtctgcagagttctttatgctttttattttgaattaatgtgctttttttctgctgctttcatttttctcctttggctttctggtcttaaattttggaatgttatcaatgaaattgaaccggacatgaagggcagaaactataagtcccacatgatggaagaaataaatgagaagctatcacaaatttttgagactttgcctttattagattgttttacaagaatcaggaagatatacacgtatatggtagtaatatggagtagtgtggttgatcagacttaagcactgtcactgatgctgatatgctgggagaacctagtcagggttcttctatgaaggtatgacctggcttcctaccccatttatttatacttcacccttcttagggtacatttctgtgagttttaacaattgcatacaatcagtgtaactaccaccacaatcaagttaatagaacagtttcattgcccaccaaaatccctcaaatcacttttcagtgaaccctcctctctctccaaccattgatttgtcttccatccttacggtttgtgtccttcctcctctatggaagtttactcttgcttttttatgtcatgtttagtcaaaacaccattagttggtttgactgataacacttgaaaacctgaccttctgttccttctgttctctatggaagcaaaatattaaataaacaaaatcttcccttaatacatgtaagatatcataaacctaactaaacattttgcaacaaataataaacgttagctttatatgcaaatgtaaatacaggctgagcatccctaatcggaaatgctccaaaatttcatattttgaattagggatgttcaagcactaagtataatgcaaatatccccaaatccgaaaaaaatccgcagtctaaaatacttctggtcccaagcattttagatgaggaagattcagtttgtactaatttctaatagttttttttttttttaatattccagatttcttttgatggaatctatgcaaatatgaggatggttcatatacttacatcagttgttgtaagttattagattattggggataaactgccttgggggtagaataaagtaattccatgaagttaaaatgtggataaatgattgtcaaagtaacattgcttagatcatgtttagtcaggatgatttagagaaatagattagaactccttttatccagtctaatataattcattgtaaaagtacagttggtcctctgcatctgtgggttccatattcatggattcagccaaccttggatcaaaaatatttgttaaaaaggccaggcacagtgactcacgcctgtaatcccagcactttgggagtttgaggtgggcagatggcttgagctcacaagtttaagaccagcctgggcaacatggcagaactccgtctctacaaaaagtaaaaaaactagccgaacgtggtggtacgtgcctgtagtcctagtgacttgggaggctgacgtgggaggattgtttgagcctgggaggtggaggtttcactgagctgagataatgcccctgcactcagcctggtcaacagtgccagacagaccccttctcaaaaaaaaaaattttttttttttttttttttttttttttttttgagaaaaaagaggcatggttgcgtctgaaccaaagatgtacggacgtttttcttgtcattattcctaaaacaatacagtatgacaatttacatagcatttacattatattaggtattacaagtaatttagggatagtttaaagtatttgggagaatgtgcttagttatatgcaaatactattacattttatgtaagtgacttaagtattatgtaattcggtatctgaaggaggtcctggaaccagtcccctaccaataacaacagatagctgtattcttgttaaccctgctgtgtgtgtaaaataatgttagtagttgattgtcttttgtacattattttgtcacttaaaatagctggggtcagaaatgtttgacttcagtattaaaattcgtactgcaaactctgagtagagcctcctgaagaatttcaagagttcagtgtattgttaatgttttgaaatttttttattgttttgttagtgaatacctaatattgaatgaagcctgatgaggtataaaaagtaaaatgaaaacaaatatccctggtgaccgggtagtatactgtttctttgataaataaattatatgtttttagggctccaaatgtgaagtacaagtgaaaaatggaggtatatatgaaggagtttttaaaacttacagtccgaaggtaatttttactttttttctttttcttacaaagtaaaagaacattttcatagtcagtgttttacctagtttttaaagccactttgaatgattttacttctcagtttcaaatactgattattttatagactggtttgtgtaatcagagaggcttcttgatgtgtgtgcttattaaaatatttcaaccatttttaagcattgtgagctaatagagggatgtggtggtttgttttttcctcttaaaaattattattaatgtacttaagacaaaccatagaaacaaaaaacatttagatatgaggatttttaaatgatggaatggataatagatcatatgcctgggaaaaagggtatgattctcttgagattatttttgtcaaaggcatataagaactggtaccttgatgagctaaagaattcctaacaaattttattttgtaaaggtttggagtacttacttgtgtttttcattttagtgtgatttggtacttgatgccgcacatgagaaaagtacagaatccagttcggggccgaaacgtgaagaaataatggagagtattttgttcaaatgttcagactttgttgtggtacagtttaaagatatggactccagttatgcaaaaagaggtgggttttgatttcctaaatatgcctcatggtttattagatttattcaagcaaagattttcacagtgatcttacaaactttttttaaagaaatatctgggctgggtatggcggctcattcctgtaatcttagcacttagggaggctgaggcgggtggatcacctgaggtcaggagttcgagaccagcctggccaacatggcgaaaccccgtctctactaaaaatacaaaaatttatttttgtgtgtggtggcgtgcgcctatagtcctagctactagggaggctgagacagaattgcttgaacccaggaggcagaggttgcagtgagctgataccgcaccactgcactccagcctgggtgacagagcaagactccgtttcaaaaaaaaaaagaaagaaaaaagaaatatctactttctagaatagcccaagtaaggtaattttttagaaaaatgagaatgttaatgcatttttgttggaaaacaattagaactttagagaaaaattaaatagagtttttgtgatctcttaaaaaattagtttgtaaagcattttctacagttttgtggtcaagaatgctactgattatattcaactgaaaatttcttgtcccatttggcctacaatgctttagtttataagtgggcatgtggcaaatctggaaagaaatcaaagtataaggctaaggaagaaaggtagagaacggttggtagaaaacaattgtctaatgaaaatgaaaaagggtgaagaagtagaacatacgtattttaaaaatattcagagtatgagacaaggttttgagaatttaaaagcgattatgtagttatattaaaaatttagtctctttttaagtgtccattgatgaacaaagtgggaattcctgttactcatttgcaaggcattattgagtgttcagtaacacgttgcaaggcacttctgggcaatcctgaacttggttctcaaattctttttttttttttttttgagacggagtcttgttctgtcccctgggtggagtgcagtggcacgatctcggctcactgcagcctctgcctcccaggttcaagcgattctcctgcctcagcctcctgagtagctgggactacaggcgtgtgccaccacaccaagctaatttttgtattttttgtagagacagggtttcaccatgttggccaggatggtctcgattgtttgacctcgtgatccgcccgcctcggcctcccaaagtgctggaattacaggcatgagccactgcacccagccggttctaaaattcttttatttatttgtatatgccaaattctgtagtgaaatacgtaattctgttgtaaattgtagttcagtacaatttgattttcactattcaaatctataccaaaagctgtttttattgttgggctgattcttctacactgttacttggaaataataatataccaggattctttctcttagacttaggagtctttctctttgcttgctttttcagaggctaacagtactgggtattctttaactgtcttgatatgctgatgaaagcacagtgttctgtttttgaatcttctcaaatgtccttgtctttgattcacaactttttgtcttaagaggccttcagcatcccatacaaggaaacaagtctttttttagctgctacctttggagttgattttgtttatgtctaggagcactaaattatttatacttatactattgaaatattcctctgttataaattcaaaaattgactttggaagataaaattttagttgaatttaatacatagcactctggaaagagtattggccacaacaaaaaaaaaggttccctactctattggataccaggtcatttaacagccatttacggtatgcattgtctttttgtttttatgatgaattgatatttcccaaatgtggaagagtgaatattactttgagatgtttgtgatagtccattccttgctcctcttcaaaattaatgtcattaaatttttattactttattagatcttcatttctcagataattttagttcattatagaaaggcaagaaaatacagatcagagtgacaactttgaaaatctcactctactcataaggggatgggtgtattttgctatatattacaaaattagttttcttgatgaggacatccactattggagtaatttcaggtatcttattttttcttttctctctctttttttttttttttttggagacggagtttcgctctgttgcccaggctggagtgcagtggcctgatctcggctcaccgcaacctctgcctcctgggttcaagcgattctcttgcctcagcctcccgagtagctggttactgaggcatgtgccaccatgcccggctaatttttgtatttttagtagagacggggtttcactatgttggccaggctggtcttgaactcctgaccttgtgatcctcctgccttggcctcccagagtgctgggattataggcgtgagccaccacgcctgggcaggtatcttatttcaaaacttacagtggtttagtgaattatacaattgcgtccagtgcgtagtatcctgaaaatagtattaagtcatgtgtttaggacatcaggtctcttaagctaagactatccaggcagaaattgccctcttctataaaagaagaaaagtattaattaggaagtactatcagtatggagaaaaccattttagaattattaattggcatggtttccttctttttttttttatttcgagatggagtctcactctatttcccaggctggagtgcagtggtgcgatctcggctcactgcaacctctgcctcctgggtttaagcgattctcctgcctcagcctcccgagtagctgggattataggcacataccaccatgccctgctaatttttttttttgtttgtattcttagtacagactgggtttcaccatgttggccaggccgcatggttttccttaataacaaaattaaggcatttattactgcatctagattttttttattttttattagagacttactcagattactcccaaagtaaaggaaggtatggtttaatcaatgcttcttaatgctgggttcacgtttagtcacctggggagtttttaaaaatgttctcacttctagggatcctggtttaattataattagcctgggtgaggctctggacagtcagggtgtgagctatgggtttcatgtgatgagatcccaggagtggctctgttctgtggccttgagaatttgtgctttctaggccaggtgcggtggctcactcctgtaatctcactttgggagaccaaggtgggcagatcatttgaggtcaggagttcgagaccagcctggccaacatgttgaaaccccgtctttactaaaaaagtaaaaaattagcgggacgtgatggcacatgtctataatcccagctacttggggagaggctgaggcagaagaatcgcttgaacccgggaggcagagattgcgagatcatgccactgcactccagcctgggcaacagaataaaaaaagaatttgtgctttattttcttgcctcacagtcccctttctgtctcagaattggcaactgcctgaaatagtctctgctgttatcatttgatagtacttttccacatcttgaatggatagatagagtgttttttataatagaagtggatgaatgattagagtatactaatatgacattgtattttcctaaaagatatgaattgatttcatttctgagcttttataattctcttctgtaatagtctgtcaaattattaaggttgataatattaactaaaatttgagtgcatattctatgtgccagactctgtgctaacagatttacctacatttgttcacataatcatcacaagttgtttctgtagtagatacagctattatccacgtcatagatgaggaaacaggcatatttaggaaacttgctaaagtgaggacacaaatctagcttttctactctaactcatgttcttaacattatactgcagtgacataaattatgtggtttggtttgttgtttatctcagttgtcataagtcgaattaatgtttgtttgtttgttttgagacagagtcttgctctgtcgcccaggctgggtacagtggcgtgatcttggcgcactgcaacctccacctcctgggttcaagcagttatcttgcttcagcctccctaataactgggattacaggcacgtaccaccacacccgggtaatttttgtatttttagtagagatggggttttaccatgttggccaggctgatttcaagctcctgaccttaggtgatccacccacctgggcctcccaaattgctgggattgtaggcatgaaccactgtgcccagccagtaagttccatggttgttaaaggatttctccacaaataaagctaaaagtaaaaaaaaaaaaaaaaaaaaaaaattctcaagcaatataagatgcagactattatgttgttcaagttttttttttttttttttaatctttggctttatttttggggaaaccttttttttcttttttgttttccttgggacggagttttgctcttgtcgcccaggctggagtgcaatggtgcaatcttcgctcactgcaacctccgccttctgggttcaagcgattctcctatctcagcctcccgagtagctgggattacaggcatgtgccaccatgcccggctaactttgtatttttagtagagactgggtttctccacgttggtcaggctggtcttgaactcctgacctcaggtgatccacctgcctaggcctcccaaagtgctgggatcacaagcgtgagccaccgcgcccagccagggaaacctttattttgaggcggagtctcgctctgtcacccaggctggagtgcagtggcgtgatctcagctcactgcaacctctgcttcctaggttcaagcaattcttctgcctaagcctcccgaggagctgggattataggcgtctgccaccatgcccagctaatttttatatttttagtagagacggggtttcaccatattggccaggctcttctcaaattcctgacctcatgatccacccaccttggcctcccaaagtgctaggattacaggcgtgagccaccacactcggctgctggggaaaccttttaacatgagtaaggtcagtgtgacttttaagttcttgatgctaacatcattgatttcaataaagtttaaaagttatattcatgcatatatgcaaatgaataaaaggctttgaaatagtgacttcttacggtacagtgaataagtttcctttggtctcttgaatgttatacatgttccagtttgatttactgagaaactgaaagtacctttacgtcatatgagctgtgagtcaccttggcacattcataattagaagagaccatcagattatcattggaaaatcagtttgtatttatcctttatttgaattccagtgcagacagatctgaggttctcttcattttgctaaaacttcttagggccttcagtcgcttttggctctgtattcgtgtatctttggaattgtcctgttatctctgcttgttttttacttgattttccatccatttccagtattcctttctcctctatttttttccttcattttctttctgctcttcctgttgcgccattattcatgttttcctctttactccaactcaactatggctttacttctgtttccttattccattgttcctcatactttttcctactgcttcattttctttgcagtattctcagcctagatgataggggtcagcaaatctgctcatcagtaaataaattttattgtagcatagctatgcccatgcgtttgtgcattgtctatggctgttttgatggctgtagccatagagttgagtagttgtagctgactgtaggacttgcaaagccagaaaatttgactgtctctttacagaaaagtttgccagctcttggcctaaatcatattttccgctgcatttagggctttttaggactgatcaaaaatacatgctatactggctttggtgaagtaacagaatgtgctctgtcctttaaacttacaactaattgcatgctttgattctaatactgtataatatcctgcgattcttattcatgaccattctaattggatttagtctgaagaattacttttgcttaacagattctttgtcacatttagtgaaaaatcataaaaggggaaggttggttaatggaaaagatctccatcaactaaccactaccttccttatctacaaatttatcttcttcctccgtgccatctttttttttttttttttcagatgatcttgctctgttgcccaggctggagtgcagtgatgcaatcacagctcactgcagcctcgacttcccaggctcaggtgatcctctcacctcaacctcctacataactgggactgtatgtgcacatcactatgcctgactaattttttatatttatattttttgtagagatggggtttccctgtattgcacaggctggtctcaaactgctgggcctaagagtcttcccaccttggcctcccaaagtcctgggattacatgagtcaccgcacccggcctcattattatttttcctctggttttagtagagaggatttttaagccaacttcaatcatgcccttgactctctcccttctacttacctccttgttctctttttctttttctttttttttagatggagtctcggtctgtcacccaggctgaagtgcagtggcgtgatttcagctcactgcagcctcagcctcctgagtagctggggctataggtgcctgccaccacgcccggctaatttttgtatttttagtagagatggggtttcaccatgttggccaggctggtctcgaactcctgacctcaagtgatcacctgcctcagcctcccaaagtgctgggattacaggcgtgagccaccacgcctggccatctttttttttctccttgctcttttataccacttctctgtttctgggctcttcaacatctgcctttctagttaatctttccctttagcatgaaaacctattcacttcctgctcatcctaaaaaggattcttttttgttttgttttgtttttgtttttgagacagagtctcgctcttgcccaggctggagtgcagtggcactatcttggctcactgcaagctccgcctcccgggttcacgccattctcctgcctcagcctcccgagtagctgggactacaggcacctgccaccacgcccagctaaatttttgtatttttagtagagatggggtttcaccgtgttagctaggatggtctcgatctcctgaccttgtgatccatctgcctcggcctcccaaagtgctgggattacaggcatgagccaccgcactgggcccaaaaggattctttttaatcctgaattcttctagccattatcctgcctaaggctacgattaacctctaactgccaggtcctttggaatctttttctgtctttattgctgcacttgaatgttggtttcaccctccttcagaatttcctcttctgtattttttatgtttattgatcattccttccctgcctcattcctgggcttcttttccttcacacaccccttagatgtgtgtccccagtgtttgtttctttgcctgctgctcttgccacatgacacacactgccagctaccacacacaagttccctcctatcatgtgtgtatcattgcccttataccatgttgtattaaaattatatgcttgtctcccctgttacagtttgagctctttgtgctccaagtaaagacagtgatactgtctttattatttattctcatggtctagtatagtgctttggcacatagtacaggctcaatataaatgtgtttgaataaatgaaattcagtgccttaatacacttttgtagaagcattattttatggaaagaatgaaaaagctgtaagtggtcttacatatatagtcatccagcagatacttagagagctctgggatgtgttccttgctgtgcttgttgctatggacagtacggagaaatacaagaatctattttgggtcccttttgagaacctagtgaaactgtgtacctagtgaaactgtataccctcaccctagaaaaatttacacacatgtagattttacatgtaattcttttaaaaattaattttttttcttttttttaaagaaacagggtcatgctctgtcactcaggctggaatgcagtggtgtgatcatggcttactgtagcctcgacctcctggctcaagcgactctcccacctcagcctcccaagtagctggggctacaggtgcacgccgctatgcccggctaatttttaaaaatattttatagacactggttctcactatgtttcccaggctggcctttacctcctgggttcaagcaatcctctaccttggccttcaaaagtgatgggattataggtgcaagccactgtgcccacgctaatgtaatttcatggtgttcacagtttcttcagggagttcatatacgccatgtactctattctaagcatttttagagttagagatagcaaagcacgtgaataaattcaagaaaaatggaatgttgtactgcatgacattgaatatcaaatggagtcagcgatgcaaataattgtctagattttacaaaaaaaattagcctggtgtgctggtgtgcgcctctaatcccagctactcgggaggctgagacaggagaatcatttgaacccagaaggtggaggttgcaatgagctgagatcgtaccactgcactccagcctgagtgacagagcgagactccatctcaaaaataaaaaataaaagaattgtgtagattttagtagttggaagaagttggagtgttaatgtgtaattagagaacagtgagaaataaaattctacagattgttttattctggtgtgctgttgtgttctcatatggttgtctttttggtcttgatagtgtatcagtaacagagtacgagtaacaaacagggatctcttctgaacggcgtgacattagaaaagctgtttacggcctcaactttgctgtggtttattaagacacagatatgtgttcattctggggccaagcagtaactggagagtggcacttattgaggccagtatggaggcagtacagagattattgagattaaaagaaagaaacaggtggaacggatctatgtaatggaaagctaaacagaatagttcgtggtacacagtagaaaagcattacatgtttattaagatatggtcatcttccatttattaaagttacatgttttataatttttagagtatatagaaattctctaccctatcatgtttgccaaagtcagaacaataacttcatttattaaatataaaaaaaataaaaacctctagcataaaatagaattttatttggacaaacgataaaaaaatactgtgtggtactagtaagagtaaggttgattcaagatacatgggagcagaatccaaagtgtagaaataggccaggtgcagtggctcatgcctgtaatttcaacacttttggaggctgaggcgggaggatgagttcaggagttcaagactcgccttggcaacttggcaaaaccccatctctacaaaaagtacaaaaattagccgggtgtggtggtgtactcctgtaaacccagctacttggtgggctgaggtgagaggttcacttgcagccagtaagtcaaggctgcagtgagctgtggttatgccacggcactccagctgggtgacaagcaagaccttgtctcaaaaacaaaccagccaggcgtggcggatcacctgaggtaaggagttggagaccagcctggccgacatggctctactaaaaatacaaaaattagctgggcgaggtgacgggcacctgtaatcccagctacttgggaggctgaggcaggagaatcgcttgaatccaggagacggagtttgcaatgagccgagatggtggtgctgcactccagcctgggtgacagagccagactctgtctcaaaaacaaaaataagcataggacatggggataaattgaagatttatgaagacacagctgaaggagacataaaagtagatttggctaaatggaaacatgccatactttgaatggaattatttaatactacaacgttgtcaattttcctcaaataaatctctaaagataatatattcagttttggccgggcacgttggctcacgcctgtaatcccagcactttggaaggctgaggtgggccgatcacttgaggacgggagtttgagaccagcctggccaacatggtgaaaccctgtctctactaaaaatacaaaaatcatctggacatggtggcaggtaccagctacttgggaagctgaggcaggagaattactcgaaccccgtaggtggaggttgcagtgagctgagattgcactccagccgggtgactccatctcaaaaaaaaaaaaatttttataatatatatatatatatccgtttttgtagaaattgacaaaatgattctaaagcttattagattatgtgtattaacagaagaactttggaaatttttttccacaagagtcataaaggaggacttgccctacaaaatatgtcagaattaaaacataacttgtcagctgggtgcggtggctcacgcctataattccagcactttgggaggctgaggcaggcagatcatgaccagcctgaccaacatggagaaaccccgtctctactaaaaatacaaaattagccggtcatggtggcgcatacctgtagtcccagctactcgggaggctgaggcaggagaatcgcttgaactcgggaggtggaggttgcagtgagccgagatcgcgccattgcactccagcctgggcaacaagagtaaaactctgtttcaaaaaaaaaaaaaaaaaaaaaagaattataactgtcacagtggctacgtatggagcatccaaaactgaatttatgtgggtattttattaatatgcaatatagcactttaattctggaggaaaggtggattattcagtaaatgattctgggacattggggacaaattagatacctacttcacactgataaataaaaccaaatagattaatgagaaaactgtgattaaacaaaacaacacccagactacactggagcaaatctgtgaatttgtttaattttgagtggagaaggactttataagcatgactaccagagcaaaaaaatcatgaagtaaaagatcgatacctttgattataaagagattaaagatttaggccgggtgtggtgctcacgcttgtaatcccagcactttgggaggccaaagcgggtggatcacttgaggtcaggagtttgagaccaacctggtcaacctggtgaaaccccatctctactaaaaatacaaaaaaattagtcaggcatggtagcacatgcctgtaatcccagctactcaggaggctaaggcaggagaattgcttgaatttgggaagtggaggttgcagtgagccgagattgtgccacatcactccagcttgggcgacagagtgactccatctcaaaaaaaaaaaaaaaaaagacttagacgtgtccaaaagtaccatacatttaaaaagacatgccacaaactgggaaaagtagaaaaatagttttaaaaatgaccagtgaatgtatgaaaaggtggccctcctcacttgtaatgatttaagaaatgcagtttatttttattttattgtatttttaaagaaattcagttttaaagcagtggaatatgattgtctatcagcttgcgctgaatggtaaatgtgagaaagattactactacttagtggtactgagggagttgcaaaacacttaacactgctagtgggatggtttaagtaaaacaagtagcattcttaaactctctattaggtaaagaataggtaagtaatgcatatgtttccaggacattttcagtaagactgtttactgatagggttgtgtaatgctaatatacttactatctagttttagtattatttttttctcttgtcttggatggtttcaatggagtcttatgcatgcagatatattaaaactagtaataaagcaagagaaggaatgtggataaattatctctaatttctattttgttctatttctatttcatactcctgggaaagaatattaagtgggcatgtgtacttgaacagttgttctgttttttattagaaaagaatccgaatctataaaatgttttacatatttgccagggaaacagaaaagatatttgtacagctgtaagaattggaattaatttcattttactgacttttccttaacctaattctgaacacttttgccataggtttgagaataagttgttataaaatgactactattcttcactaatagtattggcatttcaattcctaaattctgttttttgattcttgaacatttctgaatttactttttttgtcttagttcttctacagaatcattttcttcttttttctttttttatttttattttttatttttgagacagagtcttgctctgttgcccaggctggagtgcagtagcgcgatctcggctcactgcaagctccgcctcccgggttcatgccattttctcctgcctcagcctcccgggtagctgggactagaggtacccgccacagcgcccggctaattttttgtatttttagtagagacggggtttcaccgtgttagccaaggtggtctcaatctcctgacctcgtgatccatccgcctcggcctcccaaagtgctgggattacaggcatgagccatcgcacccggccttctttttttctttctctttaacttctgagctgaaaatagtaccttttataaagaagtgctcaaacgatgattggactgatttctccttatttctctctttctctctgtctctttcactctctttttagaatttttcttttttaagtagagacgaggtcccactatgttgcccaggctgtcttgaactcctgagcccaagcaatcctctttgcctcagcctcccaaagtgctcggattacaggcttaagctatcacaccaggcctaggctaatttcatattttgagatggcacaaatttctttcaggtagctagcttttcctcctcctccccacttaaaatagatcctgatccagaagcctaatggagaaaatgaaaacagaatgttcacccataaacagtatctttgtattggaatcttttctaaaacttcttttgatctttttaggagatagtgtgggaatcagcaatctagtattacgtacgtggaatctgtcaccttgtttttttaaatacagcaaacctcatgaagtgaatttccatattttttcttgttcttgttagttttgcaccactcaggctttgctgtagaatttgatgtatatttgattctgtagagcatgggctattgatcttcactcagctttcagaggaatctgattagtaagtttgagttttttattattttttagttgattttgaagtaaaatacagcaccattttaactgataccatttctaaacaattttcagttcaaattttaagttagctaatttagagcttaagaaaattgctttaaaaacataaaattactggctgggtacagtggctcattcctgtaatctcagcactttgggaggccaaggcagatgaattgcttgagcccagtagttcaagaccagcctgggcaatatggtggaaccccgtttctacaaaaaaaatacaaaaagtagccagacacggtggtatgtacctgtagtcccagctattcgggtggcagaggtgagaggatcatctgagcgcagggagattgaggctgcagtgagccaagtgagaccctggtttcaaaaaaaaaaaggttactaattgcagtgccttttatcttatttaatgggcttagtcaaactaagatgatgtattttatcttataaatgttttcccttgaattttaactgaagaatccaatttgtacctctcacaaacagaatgtattagtaaggaaaataaatactgctttttattacttaaataggatatatttttctcttagggattttttttctattttatctcactttatcgtagtgctagaaaatttaatcattcatttgagatagggagaaaattaggtttttttttttcttctattttgagacagggtctcattttgttgtccaggctggagtgcagtggcgccatcgtagctcaccataacctcaaactcatgggttcaggtgattcaccttagcctcctgattaagctgggactgcagatgtgtatcaccactcctggctaatttttgttgttattttttgtttgatgaggtctcattatgttgcccaggctggtctcaaactctgggcctcaaatgatcctcctgccccagcctcccaaagtgctgggattacaggcatgaacctctgctcccagcccattttttaaaatatattcacagcattgtgcaaccatcactacaatcaatttacattttcatcaccctgaaaagaaactctgaaccccttagcagttcctctctgtttgtttcaattttccccagctccaggcaactattgatttattgtcttcataggtttgcccattctggacattgcgtattaatggaatcatataatatatagcctttttttttcttttttttttttgaaacagagtctcactgtgtcgcccaggctggagcgcagtggcatgattgcagctcactgcatcctctgcctcccaggttgaagcgattctcctgcctcagcctcttgagtagctgggactataggcgcctgccaccacacctactaattttatatttttagtaaagacggggttgcaccatgttggccaggctggtctcgaattcctgacctcaagtgatctgcccacctcggactcccaaagtgctgggattgcagccatgagccaccgcatctggccatatatattatgataggcttgtttcacttagtatgtttcttccatgctgtagcatgtattagtacttctttctttttcatggccaaatattccattatacagttacacaggtacactacattttgtttattcatcagttggtggacattttcattgtttccaccttttgatttatacataatcctgctgcgaacagtgacttttaaagtttttgtgtgggccgggtgtggtggctcatgcctctgtaatcccagcactttgggaggctggggctggcagatcatttgaggccgggagttcgagaccagcctgcccaacatggtgaaaccctgtctctactaaaaatacaaaaatgagctgggtgtggtggcgtgcacctgtaatctcagctactagggaggctgaggcagagaatcacttgaagctgggaagccgaggctacagtgagccgagatcacgccactgcactccagcctgggtgacagagtgaaacttcatctcaaaaaaaaaaaaaaaaaaaaaaaactgcgtgtggacataggttttcaattctcatgggggtgtgtgtgtatgcatactcatacatacatacacatacctgcaagataattgctggctcgtatgctaaatctatgttgaaccttttacataactgttgggctgttttgttttctttttattattttttgaaaatagagttggggtctcactgttgcacaggctgatttcctgggcatagtggctgtatcattttacaatcctacatagctgtttccaacgtagctgtatcattttacaatcctactagcagtgtctgaggtttcttatgtttttcacatcctcaccagcatttgttattgtctgtctctttgattatacccatcctagtgggagagtaagaagtagtatctcactgtagattttttttttctgtttacaactttactttaaaaattatatatgcacacatggtaaaaagttcaaaacgtgtgtaccaaaagatttaacagtgaaaatagaaaataagtgtggtccttgttttcttccaccaaggcaaatattgttataatctcctaaacaacttgtcttccagatttctcattttcagtcaatcttgggcattgacataaagaaattcttagacattgcttttattagatcatctcatcccttgctcaaaatcttcagtggccactgttgtttacagaataaagttgggatgctatacagggcccttcccagtggaacttctctttttcaaccttatctctcattatttcccaatgtttttttttttttttttgagacggagtctcgctctgtcgcccaggctggagtgcagtggcgggatctcggctcactgcaagctccgcctcctgggttcacgccattctcctgcctcagcctcccaagtagctgggactacaggcgcccgccactacgcccggctaattttttgtatttttagtagagacggggtttcaccgttttagccgggatggtctcgatctcctgacctcgtgatccgcccacctcggcctcccaaagtgctgggattacaggcgtgagccaccgcgcccggcctatttcccaatgttaatctacttattgacctactaagctggcatgttctgtgtgttagacatcaccaactttgtgccttctttttttgtttgtttttgagttggagtctcactctgttgcccaggttggagtgcagtggcgcgatcttggctcaccacaacctctgcctcccgggttccagtgattctcctgcctgagcctcccgagaagctgagacgacaggcgcgcgccaccatgccctgctaacttttgtatttttagtagagatgggtttcactgtgtttcccaggctggtctcgaactcctgaccttgtgatccacctgccttgggctcccaaattgctgggattacaggcgtgagccaccgcggccccctgtgccttcttcttttactcctggatttaatcccaacgtgaagaatctaccttactaactagagttttagatactttttcaaaaccaagcccacatctgtcctttttagagtcttctctgaccttccctgctcattgtggtttgtttttattgcctgtaacaatggctgttaaactttacattttaaattaatttatgtttgtatgtatttatttgttgagaaagggtctctctctgtcacccctactagaatgcagtggcgccatcatggcttactgcttcctgggctcaagctgttctcccatttcagcctccccatgcaccaccctacctggctaatttttttgtttgttttttttagtttagtttttgtagagacagatgtctcactgtgttgcacaggctgatcttgaactcctgggctcacttgatcctcccatctcagcctccccaagtgctgggattacaggtgtgagtcaccatgcccagactttaacattttctttttagtatagaataggtcagtttttttccctctgatgagatcccatgctgactcttagttaaaacaaggctttggttggaagaagagctagtgatgtcctagctccctacttactccactttcccttgccttctggggtgtcctgaagacatcatagggtgtcatgaagtacagttggagaaccagtggtctccatcatgtaccaaacactcatcttcacgaagcagtatgtagtgtcttttttaccggtatattttctctctcccaatgcattaaacttttctggagttcagaaaacaaatttatagaattaaggaaatgcgtcccccccaaccatggtgtctagtatatatacagtgacttacagataacaggtgttcaacatatatatattcctttgattgatttttgaaaagtttacatgtatatattttttatatacggggtctcactctatcactgaggttggagtgtggtgatgcagatcttggctcaccgcaacctcctcctcccaggctcaagtgattctcccacctcagcctcccgagtacctgggaccacaggtgcgcatcaccatgcctggctaattttttatatttttggtagagacaggattttgccgtgttgcccaggttggtttcgaactcctgagctcaggcagtccacctgccttggcttcccaagtgtgagccaccactgaaatacttatatttttaaacttaatttatttatatttattatatttttatgtttttatattttaaaaaatatttttatactcactagacccaattttatactcctaaaccagggaataactgtttttttttctcttacataggcatgataccatagacaatgattaaaattgtaattaccattcatttcttagttttgtggctgggacactgatgtcttcaaatgttagtttgcaaatacagtcagccctctctatccatgggttacacagctgtgaattcaaccaaccatggatccaaaatatatgggaaatacgctggggctgtgggtcacacctgtaattccagcacttagggaggctgaggcagatggatcacctgaggtcaggagttcaagaccagcctggccaacatggcaaaaccctagctctactataagtacaaaaaattagctggccatggtagtgcacatgtgtaatcccagctactcgagaggttgagacaagcaatttgcttgaacctgagaagtagaggtttccatgagctgagattgtgtcactgcactccagcctgcgcaacagagtgtgagaagaaaagaaaaaaaactgtctgaaaagaaaaaaaaaaattatatgggaaatcaaaagcatctatactgaacatgtacagactttttttcttgtcattattccttaagcagtaccacaactatttccgtagcatttactttgtattaggtattataggtaacctagaggtttaaagtatgcgagagtatgcaaatactacaccactttgtatcagggacttaagcatccctggattttggtatccctagggggtattagaaccaatcccccatagatgctgaaggacaactgtagtgtgtgttggaataatttattttcaaatggatcatttggagaacactattctttaggaaacatagcctcctaagttctgttccatacatccctttcacctccacggcgttgtagcatcctgctttcatgactgtgtcatcactcggaaggaactgcttctcttccagaatgcttttcaagatctactctgaccacagctataaactttacacttctattctcttcttgcccctcacagtgttctctgttcctctaagatcttaaactctgtctactcctaatccagcctgctgggtgtggctggagaaagtcccactggggggctgattagttaggaatgtagggtttccagctcttgctggagcctcagaagagttcagcagacttttttttttttttttttccttaaacctatttctgcagccttgatgaccactccttccagtccctcacctatttgctttattcatggcagaggctctttcttcctgcttgtcagtacaaagaggcaggattcttcacctggatctgtggattctcaaagaatttgtggagagaattcagggcattgatgaccttggatgaagagaaatttacatctttatttacactaaccttcaagtgaaatttagcattttttgccatttaaaaatatgggcaacaaacaactagtagtattagcagtatttatgacttaagcacctatagaactcagttaatttcatatcgcttgatgttatgggtatctcaaattattattttatgtatatatatttttgagatggagtctcgctctgtctcccaggctgagtgcagtggtgcagtctcagcccattgcaacctctgcctcctgggttcaaacgattctcctgcctcagcctcctgagtagctgggattacaggcgcacaccaccacgcctagctaatgtttgtattttcagtagagaaggggtttcaccatattggccaggctggtcaccaactcctgacctcaagtgatccgcctgccttggcttccaaagtgctgggattacaggtgtgagccaccgcacccggcctcaaattatttttagaaacagaatcttgatatggtatccgctctggccttgaacttgtgggctcaggcagtcctcccacctcagcctcctgagtagctgggattataggcatgtgccactgcaccaggcttcaaattattatgtatgttcatcacctctttaaatttataatagttattaaacctgttactggatcttaatatttaatgctttaattaagaacatgtatgttactatgccaacagatttttttagtttttgataactgcatttcattgttacttgttctcatttgatttcctgtgtattttacgaatttaagtacattctgaatacggtttcataggcttccctaaaatattgaaggggcccatggattaagaaaaaggctaagaatccctaatctagaggctccccacagtcctcttttgtcatcatacccctaccccattctagcctgaggagcgtggctccacctgtgcccttggttttgttgttccagtccatacatcctgcacccttaactgtgtttcttatccccaacttgtttctttgtgttattcttcagtattatagtctttaatataatctgtataatacatggtgtagtagtatatgctcgtagtatacaattcagttagaacagatgagtattcaatgaaaagataatctcctctctaacccccagtcccacttccctggggaagcctgtgttcttgtgtacaattcagaaaatgtttatacacatattttttatttatttattttttgagacggagtctcgctctcgccaggttggagtgcagtggcgcaatcttggctcactacaacctccgcctccctagtagttcaagcaattcaaggttcaagcaattcgcctgcctcagcctcccgagtagctgggactataggcgtgtaccaccacgcctacctaatttttgtatttttagtagagacagggtttcaccatgttggccaggatggtctcgatctcttgacctcatgatccacccgcctcagcctcccaaagtgctgggattacagatgtgagccactgtgcccagcctgttgatttaattttaaacagagtttcgctcttgttacccaggctggagtgcaatggtgcgatctcggctcaccgcagcctctgcctcccaggttcaagtgattctcctgcttcagcctcccgagcagctgggattacaggcatgcaccaccatgcacagctatatttagtagagatgggggtttctccatgttggtcaggctggtctcgaactccggacctcaggtgatccgcccgcctcggcctcccaaagtgatgggattacaggcgtcagccactgcaccccgcctatacacatttttttgttttttgtttttttgagatggagtctcgctctgttgtccaggctggagtgcagtggcgcgatctctgctcactgcaagctctgcctccctggttcacaccattctcctgcctcagcctcccgagtagctgggattacaggcgccggccactacgcccatctaactttttgtatttttagtagagatggggtttcaccgtgttaaccaggatggtcttgatctcctgacctcgtgatctgcctgactgggcctcccaaaatgctgagattacaggcgtgagccaccgctcccagctatacacgtatttttaatgccactccagtctatgttggaaccattttacttcccctttcttattttcttcttgtgttcttgaaggcctagatcagctgttgctgataggctgtcactgtcactttagaaagcccagagccttttgttccttagaactttgtttttaattgtattgtagcactcattgtattcgattctaaaagatttgcttcatttctgtaactagtctcttacacccaggagctcctagttcctacaggaaatgctgggaattgtatcagtcaaatgtgaatccccacctcgtccagacttatgagtgcattgtaggtactcagtaagtgctaaaaatgactaaatagtcccactgataccaatctatatactgatactttatatagtatatagattggtccacatataacgatgacacataatgagaaactgtcttaaaaagttgttgaaagtgccgcaggaataggaattgatcaaaacaatatgattttttaggtttatatggaactttgatgtttgagaaaaggctgatttagttgagaagaaatggttagctgaggattttgatgacttctctggaagcacatttgagggtttgtgatgttaaatctgatgttaatgattatttcatccagttttatgtcattttatagtttttatacatttaagtatatttatttctaatgtttaacactaccattttagttatttgaccattattctggccctttaaaaaatgctcagacaagtttgaatgatttttcagaggcattattggctcagaggtaaaagaggaaagattgagaagctgaatatgtactctgtttcctgggtatggggctggggatacccagaagaggttcacacgttggtcgagacatttctttatgaccaccagcaggtggcatcaccggcccaaaatgactaagtttctgcccagaatcagaagagaaggtgttgagagcccactgctgtgggggtagcatggaggtgggatacaggggctggaggtgatacaattttgtttcttcctccaacatcgcctgctagtctagaggcttttataaattgaaaaactaattctttatcatctcatctgatggtttttatgtttttccttttttctctctatacctgtagttccttcagaaacaggtaacacttttctaatagtcacgttgtattcttgcatcttgttgttacaatgcttttgtttctcaccataggggatgatggaaaattaatattctttgacttatggcattggtaaaatctgcatgcaaattcccacagttgcctgtagattagagccagttgtttttttctcaactttgcaggaatcctggttacaacattgtactatttactaccaacagtgttttttttttttaaaatccagacttgctgggcatagtggctcatgcctgtaatctcagcgacttgggaggctgaggtgggaggattgcttgagcccagggctgcagtgattgcggcactacactccagcatgagtgacaaagaccccatctctgaaaaaacaaaaacaaaaacaaattttttttaaagaaacagaaacaaaaatccaaacttgtaaccactgtaaaacaaatcagaatttacgatagtggatattattaatagtgcagaatggatacccagatcttgcttcctttctagctaatgatgcaatgttggcctgaaatgcattacttatagccagggattttctcagcatcctgatgatatagcctcatttcgtgctaactctccacttctgcacatcttcccctaagtcctttactcatctttagaaagagctacttttggtgaaattttaaaaccaaggaatatcattctttatagaatcacacttctgtgttttccccttccccatttctgtctcgaaagcgacagactgctacataacctgtgaatacttttttttaaaaaaagtttggtattgtaaacagaagatttaagattaaaatgtagcattgagaaaaatagatttattaataatgccctcttaacacaacctaaattctggtcagtggaataaagcctgggtcctaaagttttagacgcttgcttgcttttccacactggctcttacttggggatccttttagaaatttgtttagaataatactgtaaaaacatatttaagctactttgtgtgtacatttgggatcttttggtttgaagacggcttgactcaagactttctaaatattttcacacacacacacataccctgtagtgagaaaaaaatccgtttatatggttctataaaaatctctagctgcttcgagctttaatttcttgaatcaaaagagtattgtttttaatactgagcttctatctaaataaatgctttatttacttaaatgtgtgcttttcaaaaactagtatgattaagacattaacaggatcttagacgtaaaggaacagtcctgttgcttcttccagaagataatatgactcgtttggaattttcctatagtgtagttttttgtctagtgttgtgagaattaaagggatttcaggatcttaaggtaggttattatttgatgttttcttggaacattttacattcttgaaaatacacatggctaaattaatttttgccagcaatccacataactttaagataatgtagagaagaacgtgattcaggttagtatcaaataaggtcagatttctagtgccatcagtagctttcagcaaagatgaggtgttggtaagatagcattagtctcttagaatctcttagagagattttccaaaattcagccatttctagtgaatgctccattccacccccagctgagtcctgctgctctggggaactccctcagcacactcttggctcttagaattgctagcaatgggagtagtgctgctggtggagctggcagctaagcccagaggtggattaatgcttttattccctgatgtacaggtacacacactcatacctacccacacctagtttgggataagaagaggttagaattagctaggcttgaagttccatgcttaaatttgctggctcagatttcttattttggcatcactttgcccattagggagacaatgacagttatagaagcattgccaaataaaaaatccatctggaataacctcttttgtaggagtattgtgtgtttagttgttgattcgtcccttcctcctcttagtggcaacttacagtactgggaaggaacagtggctgggagcttatattcctcagcagagccagatcagcagaagtattactccttagttcgtagtaggtggtaccctatgggtccagtcatttaaatgcaagcctgtatctacagagcgtttcctagtgccatcattgcccagtgggcctttatttagctgagtctaactcccaactagagaaaatttcctgtgccagacagcagtatggtcagctaacatgtggatgctacatttgctttcataagtcagtactcttcaataacattagtagaagagaagaggacacaaagtgagagtgtgttaataggaagtccaggtatgcctgctacctgaactttctgagacaggtaatactgtagggcctgaactttgtagcagagtggttatatatgaagaagtgggttctgggaggggttaaaccacttagaatggcttcatttactaatggcaagagtttgctgggatattgaccactgtacatagacatgaatatggaaagttaaaaacaaaatccacatatatttggctgcaagtactccgaaggtatatctaattagtgcatccattaaacaaaagagatattttaggccgggcatggttgctcacacctgtaatcccagcactttgggaggccaaggtgggtggatcacctgaggtcaggagttcgagaccagcctggccaacatggtgaaaccctgtctctgctaaaaatacaaacattagctgggcgtgttggtgggcgcctgtaatcttagctacttgggaggctgaggcaggagattcccttgaacctggaaggtggatgttgcagggagccgagatggtgtcactgcactccggtctgggtgaaagagcaagctccatctcaaaaaagaaaaaaaaaaaaagagatatttttgatggattgatagaaattttctttttctttttttttttgagacagggtctcactctgtcgccaggctggagcacagtggcgtgatctccattcattgcaacctccacctcccgggttcaaacgattctccttcctcagcctcccgagtagctgggactacaggcatgtgccaccatgcccaactaatttttgtatttttagtagagagagggtttcaccatgttggccaggatggtctcgatctcttaacctcatgatccacctgcctgggcctcccaaagtgctggtattacaggcatgagccaccacatctggccagaaattttcttggtcacttctgagacatgcagagtaattacctgtaatataatttaatgaattatgtcaatatattaaaatatgcttcatgtgggctgggcatggtggctcatgcctgtaatcccagcactttgggaggccaaggtgggggtatcactaggtcaggagatcaagaccagcctggctaacacggtgaaaccccgtctactaaaaatacaaaaaattatccgggcgtggtggtacacacctgtagtcccagctactcgggagactgaggcaggagaatcgcttgaacccgggaggcagaggttgcagtgagccgagatcacgccactgcattccagcctgggcaacagaacgagactctatctcaaaaaaaaaaaaaaaatgcttcgtgtggcttaaaattatatgaaaagaaaatacctttactgatagtcatctgtgattccatttgctaaattaaacgtgaaagcatacttttactgaatactatatattccgtatcagtttagatagcagtttatcttcacatacataagttttaagtttacctttattatagtgcattggtcttttgttttcatcaacctaaattatgttcaataaatgtttctgttagattttaagttaaacaattatgtgaaattcatttttcgtaattgttttttaacatatgtctttgttggtaattcacgtgtgtgagtgtaactgattgccagattatataaactttcaaccaaaaccattctttgcagatgcttttactgactctgctatcagtgctaaagtgaatggcgaacacaaagagaaggacctggagccctgggatgcaggtgaactcacagccaatgaggaacttgaggctttggaaaatgacgtagtaagtaacatctttgtaattattgctagactctggtcagtatgacatcctgtcacttggttgtaatttaaatgtgcttttgttgttgttgttattgtagtgagtgtatttagagcagcaggtttgttgtataactagagactttctcccaagcaatatataaagaaaaatgtttgtcattttacttgtaggggttaagcaggagtactgtctgttcttgtggatgctcatgaattacttctttgtgattaaaataaataataagaagtagcttaaattaaaattagaaaccatgggaaatgccggtgtgttttgctttaacacccagccaaataaggtagcctaaggaaagtggtgtcttaattgttgacttcacctagagaagaggttgaagtaggacattttaagcctcttgtctgaagaaaaggttgtcattaagataaataattaggttacattggaattaaagcattacataaatttcttggtcttaaatttggattattctccacaaaattcttttatttctaaaacgcctcttgtcacatactagttttgtttctctctttaatgcattatctgtacttgaagtgcttagctgggtatgctggcacatgcctgcagtcccagctacttgggaggctgaagcaggaggatcacttgagcccaggagttggagtccagcctgaatgacataaggagaccccttctctaagaaataaaaataaaaacaaatacttaataaagactctgtctttaggatagagagcatagagatataaagcaaagtgtcttgccaaaaatgagtgttatggtaccaatatttgagtagaatgaagaatcttccattgagtagaaagagaatttgtaacatatctgtgtttgatgtttaaggcataacagcttaataatgacactcttcctcagacaggaagcctgaaatgtcctactttgacctaaagtctagtaataaaactggacatacacaggcaacatgtcattaattctcaaactttaacaaatcatatataacctaatataatggttctcaagtctgtacatcacgtcacctgtatgaaaaatatgaggaaacagagacttcttttacactattggtgaggtggataaattgatagagtctttctggagagaatctggcaatgctaatcaaaatttaaaatgcacatacactttgttccagcagttctatctctagtaatttatttttgccctcatatatccataagacatgcaaataattatatgtgaagattttttttttttctttttctgcagagacagggttttaccatgttgcccagggtgatctggaactcctgagctcaggtaatccacccacctcagcctcccaaagtgctgggattacaggtgtgagccatcatgcctgaccaggatttttttttttttcagcattatttcttttgttgttgttgctgttgttttgagagatggagtctcactctgtcacccagactggagtgcagtggtgcgatctcggctccctgtaacctccacctcctgggttcaagtgattctactgcctcagctttccaagcagctgggactataggcgtgcgccaccacacccagctaatttttgtatttttagtagagacggggtttcaccatatgttggccaggctggtcttgaactcctgacctcaggtgatctgcccacctcggcctcccaaagtgctgagattataggcgtgaaccaccatgcctggccatagcattatttctaatagtgaaaaattggaaacatgctaagtgtctatcaatatagcatgagttagatttatgatgtcaccattcaattgaaacactacatatctcccaaaaagaatggtgttccaatatggaaagatatctaagatttattaagagaaaaagcacattgcagaacactgggatcctatttgcttttttttttctttttttgagacagagtcttgctctgtcacactgcaacctccgcctcccgggttcaagcgattctcctgcctcagcctcctgagtagctgccaccatgcccagctaatttttgtgtttttagtagagaaggggtttcaccatgtttgtcaggctggtcttgaactcctgaactcgtgatccacctgcctcagcctcccaaagtgctgcgattactggcatgagccaccgcacctggccatgaaatttttttttttttttaaagagctgttcatattcttattgcctagaagatgtctgaaattacacccaagaaactctttttgagacggagtcttgctctgttgtccaggctggagtgcaatggcgtgatcttggctcactgaaacctctgccttccaggttcaagcgattctcctgcttcagccttctgagtagctgggactacaagcgcccgccaccacatctggctaattttttgtatttttagtagagacagggtttcaacatgttggccaggctggtcccgaactcctaatctcaggtgatccacccaccttggcctctcaaagtgctgggattacaggcatgagccactgcgcccggctgaaactctttttttttcttttaagatggagtctcgctctgtcgcccagacttgagtgcagtggtgtgatctcagctcactgcaagctctgcctcccgggttcacaccattctcctgccctagcctcccaagtagctgggactacaggctcccgccaccacacctggctaattttttgtatttttagtagagacagggtttcaccatgttagccagcatggtctcaatctcctgacttcgtgatcctcctgcctcggcctcccaaagtgctgggataccaggcatgagccaccgtgcccggccagaactcttaatagtagttatttatgcacgctgggattggaagacatttactttttactggatgtctttccgtattgtgtgcttttttttttttttttttatgtagggcatacattacttaagtaattttaaagcctccataagtaagtgtgatttcctgcccatgtgtttggcaaaaggaattgcattggtggtagacttacattatagtcttacctggagtagcacaggaggacccaaggttaataggtgaacttcgaggcaagccttagcattgaggttgccatcagcattgcttggttgatgtgttcattcttctgggatggattacaacctttactggactttatacttttcaccagtaaggctttaaaaaaggagttgaaacattagagaataattatccaggcagtaatattcactggtaaatagtcttccagcctgtggcccaattggttgattcttttacgttaaagaatgcagcctcagctgctctgcctatggagtaggattcttttatttactttcttaataaacttgcttgcccctggctcccccccaccaaaaaaagaaggcagcctcccttttgcgaatggtaatttcctatagtttcctcgtagaattgtggagttacctatgctgaggttataggttagggtattgagatccagagttgccacttctgaggtgtcacaactgctaatggtaaaaccatttctaaagcccagttcttgtgactttgtccagtgattgcctgttcaccgtttcatgctgccttcccatttgagcattcccaggaggaaggggaggttgccagggacctagtaccatagtccgaccttggaatcgttgaatatgagggaaagcgttggcttctcccttctttctcccaaacattggaagtatttttggctgttaaaaagcaccccttgttccatgtggaatcccttgtttaaaagaagtaaaatatgtacctcctgtcctccacagacctgaggaccagtgtgatctcaagaaggttacaggtaaatgtagatgtctctaactgaaaggtggcttttacaggttagagaaaagagagaaccctgatctgaaggctattttatgaagtaattaaaatgttctaaactttaaaaataactgctcaaataattgtgttgtatagttacttatcaactggaggggctgataagtatttttctaaaacatttttaaggaaattttttcctattttctaatttgctaattttgctcaagtagtttgttagatattgttaatatagatgttggttataactgaatgaaagggaacaactactttgacattttgaaaaacaagcttcattttcttctagtctaatggatgggatcccaatgatatgtttcgatataatgaagaaaattatggtgtagtgtctacgtatgatagcagtttatcttcgtatacgtaagtttgaaaagtttgtttttattttagtgcatttgtctttgattttcatcagcttaatttatgatgaataaatgtttgttagtttttaagttaaacaattacatgaaataatttttctcttattaccaactgtgataaatttccattaaaaaaagggaataaatgtagtttgcctataccctgtttttatgctctaaacaaattttggttttgtctttttttttcttttgagagggaatctcgctgtgtctccaggctggagtgcagtggtgcaatctcggctcactgcaacctctgcatcccgggttcaagcgattctcctgcctcagcctcccgagtagctgggactataggcgcgtgctaccatgcccatctaatttctgtatttttagtagagacggggtttcaccatgttggccaggatagtctcgatctcttcacctcgtgatccacctgcctcggcctcccaaagtgctgggattacaggtgtgagccactgtgcctggccggttttgtcttctaagttgttaaaaaatatctaaatttgcaagggcagagattatggtgaacagtttaaccagtttttgaaatatgttcctctggagaaaaggtaacagaaaaaaaagttagaattttgatttataaatacacagatcactataacttttagttttagttttagttttagtttctgtttttaccagtattctaaactctaaactttcttagtagttgattatgacagatacataaactgtggctttaaaggactcattttgcttttcttttcctcatgtttcagagtgcccttagaaagagataactcagaagaatttttaaaacgggaagcaagggcaaaccagttagcagaagaaattgagtcaagtgcccagtacaaagctcgagtggccctggaaaatgatgataggagtgaggaagaaaaatacacagcagttcagagaaattccagtgaacgtgaggggcacagcataaacactaggtatttaaaggaaatcatgatgcagtattttggatacacaactcaaggtctgtgtgagacggtgtattgttattatatttcctcttcctttaatatagcttaggtagagaatgcaagtagaattggtttaagatctgttagagaaaaggttatggtgatcttggaaaatatgcttttgagagtaagctctgtggagccaagtgttggtatatcacggtgagcaatccaagatcttgaagagcttgttaaaatagttatctggtgggggacacgtgtaacaatcacagcagtacaatatgatttgcttggttaaaggcatgttcaaagtactaggaacatacagaatgaggaggagctagcataacctgtagagtcagagaaaacctcattgaggaggtgacattttgtgataagataatagggtctttgacacttagagaagagttgggagaagagtttatcacctgatgaaaagccatgtacaagcatggctatgagaaaatttggccagctcaggagagggctggttgttgcatgtgtctggaacacaggatctgtgtcaggtgcagcagtggcagttgatagtaggaactgaggtcattaaaggacttggcatgtcatgctaaagagcaccctgttggaaggagatggggtgaataaaccctggggcattgaggactggctgagacacagagaacagttagtgcactgaaatagttcaactgtgagaatttggtaaccacctagttaagggatgagcctgaggtttatttgataactaagtgacttaatggatgtactggtaagagagagaggaaacatggagcaagtttgaggggaaaaacagtgactccgtttgtgcagctaattgcatatgtgggcttgtgggtctttcatttattcataaacgtgttgagaaatacctgctacctatctagtaaagtaagagatgcatcctctcttaaaggcagtcagcttagagtctggtgatttgaattgacatgtccactgatagatgttgacactgtgagactggcggttcagtttgaggtttcatcagcattgccgatattggagccatgaaaaaccaaagaacagccagtgagagaagagatctcagagaaaataaaattgagaaagtgaaggacaaaaaatgttgtgaagatagaccaagattgatggaatcagccatagagaggtcaagtgggatgagaatgagcacgcatctgttaaactttgtgcttaggagcagaatctaagggaagggacagtccagaggttagaactcagggtaagatggaagaacaggggcatctgggagtgaggcagtttggtttagtgtagaacctttttgtaacaagcattcccttctgtctagatgacttttagatatgtttcattggcttggtaccttttagaataaaatgatttagaggatctctcattttcagggaaaataaatatattcctcctggacaaagaaatagagaagtcatatcctggggaagtgggagacagaattcaccgcgtatgggccagcctggatcgggctccatgccatcaagatccacttctcacacttcagatttcaacccgaattctggttcagaccaaagagtagttaatggaggcaagtattttgaccagacttgtcaatatcattgataaaatagttttctaaatacttaaaatacttaaaatagtttacataactgatatgaatgtgcactttaatgatttggtgagtagctttcacttcagcattacttaaaattggcttttgtggatattaaattagtaaaacattgtatatgtcattgacatatatattatttagcatgatgaaatattcatgatgtactaagataaagtgctacatttaacccaagacaatcacttggccaaaaacacttcacatataaagaaattggaaactttgggtaggttctcaattttaaaaacactggataataaaattttttagacataatttatatggaaaattctaacctatgtgcaacactgtggttaatatagatcaattttcattatttgtttctatattatgcttacttcaagaaaggatctgaggtaacttataatacaagacatgatcaagagtcatgtgaagaaagtgactagagaaatttgcttaaaaaacaacaaaaacaacccttagtctaagggtggatgttacagtttagcaacttaagtaaaagaaacctgaatctttagtaggaagacattttttactctacctctaaatctaggttgaatatatcttgtaggttgtggatcttttccataaatcagggatactgaacaacagttctatggatggtatggaaatagtaatagcaatagtatgttactaactttgtgggaaaagagtggacattcaattttagctatttaaatttggaaagttagatgaaaatagagaacactaagtttccaatttcatttgttttcattgagtcttttctccagaattcctctccaaatggacactcttgagtattttcagtacttaatattgggggtgaaatttctttgctcactgaggaaagattttagttgtttataaacagaattttaaagttaaaaaacctgaagggggctgagaaatatatgatacttaagtgtgtggaaccctatggagaggagacctggactgtttgataagattaaggtaagtgatatgtaatgttaaatactagctgtatctttacctaggcatatccatcagtataaatttatttggtgatgactgctttgtagttgcagtatttattaagcagtcgcttagataagtgtttaactgtataaattatttagaaggtctccctttttctagtttaatgaggtcaagactttttttttgaaatagcaatgaatattatcatttgatactcacaggagtcacaaactctagaagagtaatgttttatttctacttaaatgggacttgcttaataagattccaaactgagttctgggttcaagtgtaaacctgatgaaaatcatagataattgtaaggaaccagcatttctaattggatataatagctactgcttattttcgttatgcctcagagttaaaactaatacagtaaataatcttactcctgagtaggaattattgtgatttattatgtgaaattatctagtgtatgttatattcctttaaacaaccagttactgagaaacagttatagaagcaggattaataggcaaagtcttaactgtcttcttcaatagtgtgtatagatcctaattaaccctttgggaacgtgtattcatttaaacagacttaatcttaaggaggttaaagtaaaatgtgaatttatgtcagttaagttatgctaaaacttatcacaaatcaaatgactgtcctcaaagggttaaaatgtacaagaaatcatttttgtcattttactttttttctgtttacttttttccctcatttttttctttagtttttatactttccttcatatcatttgttctgtcaggtgttccctggccatcgccttgcccatctccttcctctcgcccaccttctcgctaccagtcaggtcccaactctcttccacctcgggcagccacccctacacggccgccctccaggcccccctcgcggccatccagacccccgtctcacccctctgctcatggttctccagctcctgtctctactatgcctaaacgcatgtcttcagaaggtacaataccacaatttgttcatgtttttgtttgtctttgtttaactcctatgtgagtttataattacaaaatagtttcctcttcattatttaataacctataatttctgtgttttaactttagtttattaaaactatttctattaaccttttgttcattagagagaaatttgataaatgtgtgaagctataaactctcttgaattgttgttaaaaagggggtttatctctgcctgataattatgcttctttacagccccagaagggtctgccccacagccttccccctccttatttgcactgtatacagtagttaaacaaatgaactttcttcagccagtcttgaacttaggttcattttacagctctttggccaaggtcctagtgaaccttcctattggccataagcagggatggtgttttctgggtcttttttgagagcgacagcccatgtagctgactttgcgtgtctgcccttagattaaagtagttgatttttagaatgccagaagaattctaaatttaactgagtaatttttttaaagttagctttgcaatcttacatagtgaaaggctgctttaatctggaagaagtccttgatctgagataaaattgataaaaacgacatatgaatttgaatatttagctatttctttcctcgtcaaaaataagaataaaatcttgtaattcttattcagtatttggcgctaaatccatcattgccacatatcaaatacagggatatgttgtagaaaggtaacattctaatttaaatgccacccatatattaaaaacctgttttctgaatcataatgtccttttgatactagttctgaatatttgtgttaaaattttaatctgatttgttcattaaaattagttaatattgcttatgttgggactaataaagttttccgcacaaaatgtgtttctcctgcttccctggagaaaactgtattggctacttttaaataaattgttaccatctaagcaggcaggtcatatgactttgactgaagcatctaaccttgaagagcaagttccactgattttcaaggtgacttctttgctcaaaagggccttaatagtggtcactaaatgcaaaattctgttgatatttttcttgtagtccatcatttgagtaagcgatgtttatttaatgagaatatattaaataaaacatgatcattaatgactgtgaacatctttattacattaagatttaaggactgctcatgtattaacttcacacagaaatatactttctgtgtcattcagagatgttgaatatttccatttgaaaattatagtgtataacattagcattcttctaaagatcatgttcgtgtttaaattcctgttggaagccaggcatggtggctaacgcctgtaatctcagcactttgggaggctgaggcaggtggatcacttgaggtcaggagtttgagaccagcctggccaacatggtgaaacctcgtctctactaaaaatacccagctacttgggaggctgaggcaggagaatcacttgaacctgggaggcagaggttgcagtgagttgagatcgtaccactgcactccagcctgggcgacagagacagactctgtcttataaaaataaaaataaaataataattctattggcaacatatattaatttgaagttctaaagagtttggcagccgggtgagagagtgaggagatttggctttgacattagggaagttttcgcttggtgttaacaccagtaggcttctctgatgagggccattctgtccactcttttacctgatagattggtctaatgcacagtagactgatttagaaagagtagtcactagtggcatggcagaatcaataatgtagaattttgacaattcatatagtgctgatttctcccccaaatgtcagttattttggtcatctattaatagactaatacaagtcatccctttaatagaattttcagctcacagcctgctaagcctaagaaactgcttacaggttactgcttactgttttaagccgagttttaaaattgatgatcatgatagaagagataaataaactaaaattttagagaaatttaagaagggtatgtacatatgttttagtggtatcggggtgtatagggattaatagtcttctgtttaaattttttttttctaattttagaagtaatgtagaaaattcgggtcagggaaaggtaaaatatatggaaagttaaaaatattttatcatgtagtcataatttctagtaacatatttctttacaaataagacatagttgaaacagattgctacagttcttttaagagttgacatcttattgttgatttcttaccaccaacttcatccctccctttctttaaaaataaagggaaataataaaatttatttataaaactttgtggcattccacaaaataattctgaaagaattagtatggccaaaaaaatatgtatggtgttttttttttttctatttttaaccaaggaaaaactgtagagtgagtgagtgtgtgtgcatgtgtgtgtgaatgggtgtatttagcagaaaagtagtactgatgaatatcatggaatttatgtgatgttcactgtttcttccttagggcctccaaggatgtccccaaaggcccagcgacatcctcgaaatcacagagtttctgctgggaggggttccatatccagtggcctagaatttgtatcccacaacccacccagtgaagcagctactcctccagtagcaaggaccagtccctcggggggaacgtggtcatcagtggtcagtgggggtaggtaacacttgggcataatgatggtactcattttgtcattacactagatataaagagggctgagctacaactctgtttgaggaagtgtaagtatgtatatgttaaaaatagtagaatcaccaggaattgggaaacccatatttttattctgggctctaccacttattcatcatatattaaagcaagtcagacactcattctgaagttgagatttcgcagtgagtaaagtgttaataattcttgcctagtctacattatgggattgtgatgagattcctataaggttcataaatacagatatattgtaaaactataaagttttgtaaagtacctctctaatatgaggcaaacacagtatgtaacactatttggagggaccgtatttccttatctttttagcagctttgtttatcagtacattctataaacatttatttttggcttacattgtagtgtgtttctatagcatctgtatatggcactaattcccaactatatttccataataaggaatatcaaatacaaataaagggtccaagttttatttgtgattagcataaggaatatgctgacagcagctataaaagtataaaaattaggctgggtgtggtggctcacgcctgtaatcccagcactttgggaggctgaggtgggcggatcacaaggtcaggagatcgagaccatcctggctaacacggtgaaaccccgtccctactaaaagtacaaaaaaaattagccgggcatggtggcgggtgcctgtagtcccagctacttgggaggctgaggcaggagaatggcatgaactcgggaagcggagcttgcagttagctgagatcacgccattgcactccagcatgggcaacagagcaagactctgtctcaaaaaaaaaaaaaaaaaaaaagtttaaaaactagacgttgacatgattttacaataaggctgactgcttttgctactttgccaatcagtccttagtgctttgttcccataactgtggtaagcaagagcttacaaagaatacttaaaacaaacaaacaaacaaacaaaaaaaacactttttctcttttaatcagtccagagaacctttaaaagaaacaagatcggccagttgctgtggctcatgcctgtaatcccagcactttgggaggctgaggtgggtggatcacttgaggtcaggagttcaagactggcctgaccaacatgatgaaaccccatctctactaaaaatacaaaattagctgagtgtggtggctatttgagaggctgaggcaggagaatcatttgaacccaggaggtgaaggttgcagtgagccaagatcacaccattgcactccagtctgggtgacaagagcgaaactctatctcaaaaaaaagaaaaaagaaacaagatcttcaagcttaaggaaacaaaaacaaaactcagctgtgttaaatctgtttttagttgctatacatttctgctcagcttcatgtgatgcacattcatgtaattgtatcctaaattcctttgtactttttattttcttccttggtcttcaattatcttaagactaccaagaaaacaaaaattttaaaaatcttcttcagccggtcaggcgcagtggctcacggctgtaatcccagcacttggggaggctgaggcgggtggatcacgaggtcaggagttcaacaccagcctggccaacatggtgaaacgtcgtctctactaaaaatacaaaaattagctgggcattgtggcgcgttcttgtaatcccagctgctcaggaggctgaggcaggagaattgcttgaaccaggacccgggaggtgtaggttgcggtgagcggagatcgcgccactgcactccagcctgggctatagagtgagactccatttcaaaaaaaaaaaaaaaaatctgcttcagctattctgttaatcttttgacattacttagatggtctggaaataaattttgagaataacatgattagaagtgagagagtataagcatagttttggagatacactcagaatagcattatagattttctctttttactaattggaaaaatggcagttgttgaataatagttttcttccgtgacccttgtgacttaaaaaaaaaaaaacactgaaatgaaataatcgaaccattttctctaaacctttgaatctgagctctgcagttaggtttataatggtatatgaaacctattagatatatacttggaagtcatatgggatacaaaccctgcttttattatcttccccttttgactaacttgggtctcaagtttccttaattactgcacagtggaccttgatgttgctataaagaatgtgtagggctgggcatggtggctcatgcctgtaatcccagcactttgggaggccaaggtaggcagatcacctgaggtcaggagtttgagaccagcctggccagcatggtgaaaccccgtctctactaaaaatacaaaaaaattagctggttgtggtggcgagtgcctttaatcccagctactccagaggctgaggcaggagaatcacttgatacatttagttaggagagaaaatcatacttatgttagtaattgctgctgttcttcatatacttgtggttttgattgccagcaaattcctaacattttggaaaagaaaacagtaatgggataaagggtaagggctagagaggacagttttatttacctagatcttcagagaagcctgaagcctcttttaggaagtaacatttgaactgagaatgtaataaatacattttccctttcttctagttccaagattatcccctaaaactcatagacccaggtctcccagacagaacagtattggaaatacccccagtgggccagttcttgcttctccccaagctggtattattccaactgaagctgttgccatgcctattccagctgcatctcctacgcctgctagtcctgcatcgaacagagctgttaccccttctagtgagggtatgtaacaaagggcttctggatccataatctcagctgtgaaattgaatgttagagggtgatattatatgaaaaaattctaggttatttttattcatagacaagtatttttagtgcacatttaaaagtttatgtaaattttgatgttgtttaatactactaatttaatatagtgtctgtgttacaaaggttaacattcctgggtgtcaaatacctacataaataaaattattggtgtttcatatgacatctgcaaaggaaaaaaagcctctgtttaaatgaaagcattattttccaaaaacataggaaatcaaaattattgttcagtgttttcttgttttgcttttctaacttatctgaattttttttaaaaaattgttttctagctaaagattccaggcttcaagatcagaggcagaactctcctgcagggaataaagaaaatattaaacccaatgaaacatcacctagcttctcaaaagctgaaaacaaaggttagagtttaaagagtcattaagcttaactgtaggaataggaagaagtatgtctaatttcatgcccatacagaatatttttgttcaacatttcttcttactattgtgatagataaatgtattgcttgacaaattccaaaatccaaatttaatatttgaaattattttctgatcttatatcttattctaatttctatcatctcatactaaaaagaatgtgatgttaaagtttaaaaataaacctgtgtcttaacagttcttaattttacaggtatatcaccagttgtttctgaacatagaaaacagattgatgatttaaagaaatttaagaatgattttagggtaagtattgtactaactgatgaatttgagttttagaaaataagcattactaaagatttatctatttataaaaatgcgttatgtatacagtcagaaacatcaaaccatatatgtagaaagcagaacatttttaaagtggtctttgcctatcctttaagtgggataactaaaatcatgagatttggtaacaacaatatgtaggtatcaaatgagagtatagccctgacatttgaaaccaccatagcacagcttactatttgatggtcatttgtactttgttcagtgaagctagatattagtagagcaaggccaagtcattaataatctagtgtggcaaatggaagatgtactggactctggtgttctgaggtagttggagatttatactttgtacacaaatatattgtggtcaaaatctttctgtaacattatttctctgtcttagcacaggctttacttaacatctctccttgattgtcatttcattcttttgcatgttatttactataggtatcgaggtagattttgagaccaaccaataaatcttcttgaaacttagcttcttagaaaggaaaatctaaataccagccttttaaaaaaagtagctgaattaaaggatgagtgaaccaaaggcaaaggtagcctttcctcagcctgtgttttagctttctaaatgttaacaatagcttcattcttgacttattggtaacattcaaaatactacttattatttcatactttagcacatgtatctattcagctttaatgctattaacagttgttaacctaagttttcatttgttggcgggcacggtggctcacacctgtaatcctagcactttgggaggccgaggtgggcagatcacctaaggtcaggagttcgagaccagcctggtcaacatggtgaaaccctgtcttgaccaaaaatagaaaaattagctaggcatggtggcgcacacttgtaatcccagctacttggcaggctgaggcaggataatcgcttgaacccaggagacagaggttgcagtgagccgagatcacaccactccactccatcctgggcgacagagcaagactgcatctcaaaaaaaaaaaaaaaaaaaaaaagtttttcaatttgttaaacaatagttaacacatacaaatgatacaaagaatattgaatatgatcatgtgcccactacccagcttagtaaataaagcattctaacacagttaaactcctcttatgtatctgcccctcctcagctgcttccccctgtttccttccaaaaggaagggtttcttttctgtgcagttctttatatttatactgcatatgaatatatctgtgagcaatagatgatattttgcataatcttaaatttgctataaagtcttttttttttttttaattgatcattcttgggtgtttctcgcagagggggatttggcagggtcataggacaatagtggagggaaggtcagcagataaaaagtgaacaaaggtctctggttttcctaggcagaggaccctgcggccttccgcagtgtttgtgtccctgggtacttgagattagggagtggtgatgactcttaacgagcatgctgccttcaagcatctgtttaacaaagcacatcttgcaccgcccttaatccatttaaccctgagtgacacagcacatgtttcagagagcacagggttgggggtaaggtcatagatcaacaggatcccaaggcagaagaatctttcttagtacagaacaaaatgaaaagtctaccatgtctacttctttctccacagacgcagcaaccatccgatttctcaatcttttccccacctttcccccttttctattccacaaagccgccattgtcatcatggcccgttctcaataagctgttgggtacacctcccagacggggtggtggccgggcagaggggctcctcacttcccagaaggggcggccgggcagaggtgccccccacctcccggacggggcggctggctgggcgggggctgaccccccacctccctcccggatggggcggctggccgggcgggggctgacccccacctccctcccggacgggttggctgccgggtggagatgctcctcacttcccagacggggtggctgccaggcggaggggcttctcacttctcagacggggcggctgccgggcagaggggctcctcacttctcagacggggcggccaggcagagacgctcctcacctcccagacggggtcgcggccgggcagaggcgctcctcacatcccagacggggcagcggggcagaggcgctccccacatctcagacgacgggtggccgggcagagacgctcctcacttcctagacgggatggcggccgggaagaggtgctcctcacttcccagactgggcagccgggcagaggggctcctcacatcccagacgatgggtggccaggcagagacgctcctcacttcccagacggggtggcggccgggcagaggctgcaatctcggcactttgggaggccaaggcaggtggctgggaggtggaggttgtagcgagccgagatcacgccactgcactccagcctgggcaccattgagcactgagtgaacgagactccgtctgcaatcccggcacctcgggaggccgaggctggcagatcactcgcggttaggagctggagaccagcccggccaacacagcgaaaccccgtctccaccaaaaaaatacgaaaaccagtcaggcgtggcggcgcgggcctgcaatcacaggcactaggcaggctgaggcaggagaatcaggcagggaggttgcagtgagccgagatggcagcagtacagtctagcttcggctcggcatcagagggagaccgtggaaagagagggagagggagaccgtggggagaaggagaaggagggggagggggagggggggagagggagagggacaatgatgtcttgctgtaggtattcttccccatttgaattttttcctcagcattattttttttaacatcattcagtctcctcttatactacacttggattgaatttaatatctcatgaagaaaaaacatttctactttgaagcatgtgaattagcatgtttttataacagctttattgagatataatttacatatataaataaaccgtttaaagtgtataaatcagtggtttttaatgagatataatttacatatataaatcaaccatttaaagtgtataaatcagtggtttttaaaatattcacaatgttgtacaaccgtcttctcagttgattttaaaacatactcttcacccccaaaagaaaccccgtgcccagtttagcagtcgttccacatttgcctccagcccttctctttcccctactcccaaccctaagcaaccgttaatctactttctgtctctatggatgggcttatttggggcaaattccatttcatacaaatggaataataaaatatgtggcttttatgactggcttctttcactcagagtagtgttataaaagttcatccatgttggagcatgtttcagtacttcatttctttttgtgactgactaatattccttgatgtggataataccacattttgtttatccattaatcagtttgtagctatttgtggtgttctcactgtttgactattctgaataacactgccacaaacatgagtgtgcagtttttttctcgtcctatcttttcatttcttttgtgtacctacctaggagttgaattgctgggtcatatggcaactgtgtttaaccttttgaggaactaccaagctatttgccaagatatctacactattttacattcccaccagcagggtatgagggtttctgtttctccacatccttgctaacacttattgtcttgtcttttttgattatagtcatccttgtgggtgtgaagtgttaacctcattgtggctttaatgtgcagttctttcatggctaatgatgttgaacatcttttgtgtttattggccatttatatatcttctttggattgatgtctgttcaaatctttacccattttaaaaattgagttgtctttttattattgggttgtgggagttctttatatattgtgtgtacaagtccctgttagatacatggtttgcaaatgttttctcctgttctgttggttgtctttttactttttcatcccttgaagcacaaaaatttttaattttgatgaagtccaatttatctgattttgaagtaagcttttggtgtcgtatctaagaaaatactgtttcatcaatcattaaggtttattactcttctgggtttttttaagaattacatttagaggtgtgatccatttggagcaactttttttttcttttgacacagaatctcgctcttttgcttaggctggagggcagtggtgcaatcttggctcacagcagcctcagcctcctgggctcaaatgagtagctggtactacaggtgtgcaccaccacaccttgctattaataacttttgtatttttttgtagagacagaatttcgccatgttgcccaggctggtctcaaacacttggactcaagtgacacgcccacctcagcctcccaaagtgaaaaattgctttcaccttgcactgcggactcgccctgaattctttcttgtgcaagatccaagagccctctctgggggtctggatcgggacccctttcctataacaatattatgagaataacatttgattttttttaagtgaaacaaattgttattaaaaaattaaaaaaggtcataggagagtgacttggtgctcagcccattttgagcagttatttaatatagcataaggtggggttcaaattcattctttatattaattttttatttctaattgacacataaccatacacttataaccatttttactgtgtaagttcagattcattcttccgtatgtaggtattagttgtcccagcaccatctgttaaaaagactattcttggccaggcacagtggctctcaacgcctgtaatcccagcactttgggagtcccaagcaggcagatcacatgaggtcaggagttcgaaaccagtctgaccaaatggtgaaaccgcatgtctactaaaaatacaaaaattacctgggtgtggtggcgcacacctgtagtctagtcccactactgtagtggctgaggcaggagattcgcttgaacccaggaggtagaggttgcagtgagctgagatcatgcactccagtgtgggcgacagagtgagactccatctcaaaaaaaagactattctttcctccattgaattatcttcacatgcttgttggaagtctgttgactacaaatgtgaaagtttattactggactctgaattgtcctccactgaatctctatgtcttatccttatggcagtaccatactgtcttgattagagttactgtattttaaaaggctgtactttttcagttagcagaaaacattttagctatcagcacaactttctgtaaaccttcattaatgcttgacttaaattccaagaaggagcaacataaaaagtcttatctctttaggagttttagtcttactacttttaggtgcctgaataaccaaatgtattatttagcctcttactaataactccttgatccataggggcataccaggaagaaaagaagtggtttttaaaaaatgagagtgggccgggcacggtggctgatacctataatcctaacactttgggaggctgaggcgggtggatcacttgaggtcaggagtttgagaccagcctggataacatggcgaaaccctatctttattaaaaatatataaattagccgggcatggtggcacatgcctgtaatcccagctactcaggaggctgaggcaggagaatcacttgaatccaggaggtggaggttgcagtgatccgagattgcatcagtgggcgacagagcgagaatctgtctcaaagaaaaaaaaagagagtggaaaaaaaaaatatgtgtcccagaacttaaattttaattaaaaaaaaataaaagagtgaactttctaattgttctcttcagataatataatgttattctcttatgttttattgcgtatttcctgtgtaccagatgctgttcttcatgcttgtatgttaaatcttgtctaacatctctgtcaagcaagttctgtttgtatctgcactgtgtatattaggcagcttgggcaaagagaagttaagtaatctgcccaaactcacatggctagtaagtaagagggctgaccatctggtgtttaagcttctagcagtgctttgaatagtaactaatgcatagtgcatgctgcactgtcagtcagtgattcattagagctaacttcatgacatgctcatagccccaaactgcatttgttcacaaatatctgtagtccttcatttaggcagaaatagaaataccttgtgtgtttgttgttccttcccttttgagccatatgcagagtgctgatagctttatttgtgtaagaattgctagtaatttgatctgttttgggttaataatgtgggttttagaggtaaatggacctaggtttgaatgttggcctctatacatcatgtgcgtaacattgtggcatgctatctacttcccccaagccaaaatgggttaattttagaacctgcttcatagtgttcctgtgagagctcgatgagatattgcctataaagtgtttagcatagtgcctagcacatggtatgtattcaatacatgttcattcttactagcaaaatatagatgacccagtattgtacagagtatgtacaatggtgtcattgtaccatttcatgtggagtcacataagaatttcagttttctgctgggcatgatggctcactcctgtaatcccagcactttgggaggctgaggtggatggatcagctgaggtcaggagttccagaccagcctggccgacatgatgaaaccccatctctactaaaaatacaaaaaattagccaggcgtggtggcaggtgcctgtaatcccagctactcgcaagactgaggcaggagaaatgcttgaacccgggaggcggtggttgccatgagttaagatcgtgccgctgcactccagcctgggcaataagagcgaaactccgtctccaaaaaaaagaaaaaaaaagaacttaagttttccattagatttagtatagtgcagagaggaaatacagcagagtgctatattccatatatagcaatatagcattagaacaatatattccaatacagcagagtgctatattcagataccaactagtggacttgctatttgtaagatggcaataatagtatctacatcaaatagggctgttgtgaagactaaatgaataagtctataaatagtttagaacagtgtctggacaggtacagtggctcatgcctgaatcttagcactttgggaggctgagacaggtggatagcttgagctcaggcattaaagaccaacctgggtaacatggtaaaaccctgtttctacaaaaaaatacacacattagccaggtgtggtggcacatgctaatagtaccagctactcaggaggctgaggtgggagaatcacttgagcctgggagatggaggttgcagtgaggtgagcttgcaccactgcgctccagtctgggcaacggagtcagaccctgtttggaaaaaaaaaaaaaagtgtccaacccatagtaagaaatgcagatgtgtttgacattgtaagaaaaagcaacaccaaaagtctgatttttgccttcactcaagaactcttatgataattaaactccgaagtccttggcaatatatatagttggtctgttatgtggatcgcctctactaaagatttttgtgaacaaatgaaagtttaagtagtaagttcctacatcgtgacttaaattgccagtgtgcccacataaataccctgtcaacatttgcccttagccacttgactctttagctatattggtaatgcagtaaagcttgcgatgcgccagagttgcataatgctgtttgccatgacaccaagagccttggtaatgaaaccattgaaattggtttgcctatactgaggctgaagaggtatcttggctctctaattttaaggcaacctttttggctgtgtaggtttctctttagcttgtttctcaccacctggggctgtggcttaggtccgttgtcctaacctgtggcttaggttctgtttttgttgcttgtacttgctcccccttttttcagccattcctgttttctttcttttgtagaggatgccatcttaaatcatcttcagccagtggtagcattttattttttctggtctgcaaacttaaaaacctcatcacttattttgctaatatctttgtcttctgttctttttgatggtccttggttttgcagtctactttaaaggtttttatttttttatgggtacatagtagacgtattattcatagggtctgtgagatatttagataaaggcatataatgtgtaataatcacattagggtaaatggggtatccatcaccatcatcattcatcatttctttgtgtaatgaacgttgcaattgtactccctcagttattctaaaaagtacaacaaattaatgctgactgtagtcaccctgctttgttgtcaaatactagatcttattcattctttatttaactttttaaattttaaacttattttatttatttatttttagacggagtctcactctgtcgccaggctggagtgcggtggcgcagtctcaactcactgcaacctccgcctccagggttcaagtgattctcctgcctcagcctcctgactagctggaactacaggcacgtgccaccacgcccagctaatttttgtatttttagtagagacggggtttcactatgttggctgggatggtcttgatctcttgaccttgtgatccggctgccacagcctcccaaagtgctggggttgcaggcgtgagccaccgtgcccggcctttaaaattattttaaatcattttaatatctttttcatttctgcctccggtcctgcagagttcttattcgttctttctaaattttctttgcacccactaatcacctcatttcccttcttctccccattacccttcccaacttctggtaaccattctgctatctccatgtgttcaattgtttttatttttagtgcctgcaaacgagtaagaatatgcaaagtttatctttctgtccctggcttattttacttaacataatgtcctccagtgccatctacattgctgcaaatgacaggatctcattcttttttatggctgaatggtaatctattgtgtatatataccacattttctttctccatttgtctgtcagtggacacgtaggttgattccaaatcttggctgttgtgtatatagtgccgtagtaaacatgggagtgcagatattccttcaataaactgatttcctttctgagtatatacctagcagtgcaattgctggatcatatggtagctctatttttagttttttgaggaatttccatactgttctccatagtggttttaccaatttacatgtccaccaacagtgtgtgaaggttcccctttatccacatcgttaccagcatttgttattgcctgtcttttggataaaagccattttaactggggtgagatgatatcttgttgtagttttaatttccatttttctggtgatcagtagtattgaatacctttcatatacctgtttgccattcataaataacgatgaggtcttgctgtttggcccaggctggtctcgaactcctgggctcaagcaatcctcccaccttggcttcccaaaatgctgaaattatagttgtgagccactgcacctggccttgtatgtcttccttttttttttgttttgttttgtttttgagacagagtctcactttgttgcccaggctggagcgtagtggtgtgatcttggctcactgcgccctacacctcccggattcaagcaattctcctgcctcctgccaccatgtctgcctaatttttgtatttttagtagagacgggatttctccttgttgcccaggctggtcttgaactcctaacctcaggtgatttacctgcctcagcctcccaaagtgctaggattacaggcgtgagctgctgcgcccagcctgtatgtcgtcttttgagaaatgtctattcagatcttttgcccatttttaattgagttactaaaattttccctatggagttgcttgagtgccttttatattctggttattgatcccttgtcagatgagtagtttgcaaatattttctcccattctgtgggctgtctcttcactttgttgatggtttcctttgctgtgcagaagctttttaacttgatgtgatcccatttgtccatctttgctttggttgcctgtacttttggggtattactcaagaaatctttgcccagagtaatgtccctgggagtttaatgttttcttttagtagtttcatagtttgaggtcttagatttaaatctttagtccattttgatttgatttttttttaatatggtgggacacaggggtctggtttcattcttctgcatatggatatccagttttcccagcaccatttattgaagagactgtcctttccccagtgtatgttcatggcttctttgtggaaaatgagttcacttagacgtatggattcatttctgagttctctgttctgtttcattgatctatatctttttttatgccagtaccatgccattttggttacaataatttgaagtcagataatgattcctcccgttttgttcattttgctcagtatggcttttgctcttttgggccttttgtggttccctacaaattttagaattatttttgtctacttctgtgaggaatgtcattggtattttgatagggattgcactgaatctgtagattgctttgagtattatcaacattttagcaatattaattcttctaatccataaacatggaatctcttttcatgttttttctgtgtcatcaatttcagtgttttaaagttgtcattatagaaatcttttactcatttggttaagtttattcctaagtattttattatatttgtagctattgtaaatgggattgcgtttaaaaaatttttcagattgtttgctgttaaatataaaaatgctcctgatttttgtgtgttgatttttgtatcctgcaattttactgaatttgtttgtcagttctaataggtttttcttttttggagtctaggtttttccaaatgtaagatcatattatctgcaaacaaggataatttgacttcttccattccagtgtggatgctttttatttctttctgttgtctgattgctccaattaggacttccgagtattatgttgaataacaatggtgaaagtgggcatccttgtcttgttccagatcttagaggaaagcctttcagtttttcccttttcagtatggtactagttatgggtctgtcatatatggcttctgttttgttgaggtatattccttctatacccagttctttggggtttttttgtttgtttgtttttgagatggagtctcactctgtcacccaggctggagtgcagtggcgcaatgttggctcactgcaagctccacctcctgggttcatgccgttctcctgcctcagcctcccgagtagctgggactacaggtgtccgctaacacgcccggctaattttttgtatttttagtagagacggggtttcaccgtgttagccaggatggtctcgaactcctgacctcatgatctgcccgtctcagcctcccaaagtgctgggattacaggcgtgagccaccacgcccggccaagggttttaatcataaggggatgtggcattttatgtgatataaattatatatttatatcatgtgatatatatttatatcatacacagtataaataatatatatatatattttttagtctttgtcttttattctgttaagatgtaccatgtttattgatttgcgtatgtcgaaccatccttgcatccctgggatgaatcccacttagtcatgatgaatgatctttttaatgtgttactgaattcggtttgctagtattatattgaggatttttgcataatgttcttcagagacactggcttctagttttccctttttgatgtgtcctttggttttgtatagggtaatagtggccttgtagaatgagtttagaagtattccctcttcctgtattgtgttggaatagtttgagtaggattggtattagttcttctttaaaggtttagtagaattcagcagtgaagccatcaggtccatggcttttctttgctgggagactatttcttatagctttgatctcgttacttgttattggtctcgttacttgttattgtatttgggttttggatttctttgtggttcagtcttggtaggttgtatgtgtctaggaatttatccatttcttcaaggttttccaatgtatcagcatatagatgctcatagtagtctctaatgatcctttgaatttcggtggtaacaattataatgtctcctttttcatctctcattttattatttgggttttctcttttttttctgagtctggctaaaggtttgtcagttttgtttatctcttcaaaacaatttactgttttattgatcttttgtattttcttcatttcaattttatttatttctgctttgattttttttatttcttctactgattttaggttttgtccttgcttttctagttctttaggatgtattggcagatgaagtttttccacttttttgatgtaggcacttactgctgtaaacattcctcttattgttgcttttactgtatcctataggttttgataagctgtgtttccattttcatttgtttcaaggaattttccagttttcttcttaatttcttcatggacccactggtcattcaggagcatattgcttaattttcatgtatttgtatactttccaaagttcctcttgttatctagtgttattttattttatttttatttttgtttttttgagatggagtctcgctctgtcacccatgctggagtgtagtggcgcgatctcggcttactgcaacctctgcctccccagttcaagtgattcttctgcctcagcctcctgagtagctgggattacaggcatgtaccaccactcctggctaatttttttttgtatttttagtagagagggggtttcaccatgttggtcaagctgatctcgaactcctgacctcagatgatccacccaccttggcctcctaaagtgctggaattacaggcatgagccaccgtgcccggcctctagtgttatcttattgtgatcagagaagatagttgatatgattttaacttttttgaatttttatttatttatttgtttgtttgtttgtttgtttgtaacagagtctcactctgttacccaggctggagtacatgtcatgatcttggctcacctgcaacctccgccttcctggctcaagcaatcctcccaccttagccttccaagtagctgggactacaggcacatgccgtcacatatggctgatatttttggattttttttttttttgtagagatggggctttgcgatgtgtcccagggttgtttcgaactcctgagctcaagcaatccacctatttcggcctcccaaggtgctgggattacagacatgagccactgtgccacgtcaaatctttagacttgttttgtggcttaacatagggtctatctttgagagcaatccatatgttgaggagaagaatgtgtattctatagctgttggacacaatgttctgtaaatatgtattgggcctatttggtctatagagcaaattaggtctaatgtttctttgttgattttctgtctgaatgatctgtccattgctgagagtggggtgttgaagtttccgactgttactgaggtctgtttctcttttttgctctaataatgtttgctttatatatctggatgctccagtattggttgcatatgtatttatacttgttataacctcttgccgaattgatccctttatcattatacaataatcttctttgtctgtttttatagactttgtctcaaaatctattttatctaagcatagctactcctgttcttttctggtttccatttgcatggaatattgttttccagctcttcaattttagtctatgtgtgattttataggtaaagtgtgtttcttgtaggcaatggatctttggtttttttttttttttttttgagacagagttttgctattgttgcccaggctggagggcaatggcgctatctcagctcactgcaacctccgcctcctgagttcaagcgattctcctgcctcagcctcccaagtagctgggattacaggcgcctgccaccaagcccagctaaattttttgtattttcagtagagatggggtttcagtatgttcgtcaggctgttcttgaactcctaacctcaggtgatttgcctgccttggcctcccaaagtcctgggattacaggcgtgagccaccgcacccagccttttttttaaatccatttagccactctgtatcttttgattggagagtttagtcgatttacattcagtgttgttactgattagtgaggacttaactactaccattttgttacttattatctggttgttttgtagtcctactccctcccttcccccttcttttttacttcctcttcgctccttttttccctccctcccttccttgttttgaaagtgattttctctggtggtatgttttaatttcctgctttatattttttgtgtatctgttgtaggtgtttttgatttaagatcaccatgacagctgggtgcagtggttcacacctgtaatcccagcactttgggaggccgaggtgggtggatcaagaggtcaggagattgagaccagcctggctaacatggtgaaaccccatctctactaaaaatacaaaacttagccaggcgtggaggcacgtgcctgtaatctcagatactcaggaggctgaggcaggagaattgcttgaacccaggaggcagaggttgcagtgagtcaatattgtgccactgcaccccagcctgggcgacagagtgagactccgtctcaaaaaaaaaaaaaaaaaagagatcacataagggttgcaaataacattttataacccattattttaaaccaatgacaacttgaaactttgattgcaaaaacaagcaagcaaagagaaaactaataaaaactctacacttcatctgcccgctttttaacttttgttgtttttatttatatctttattatactatgtcttaaaaaactgtagttataagccaggcgcagtggttcacgtgtgtaatcccagcactttgggaggctgaggtgggcggatcacctaaggtcaggagttcgagaccagcctagccaatatggcaaaaccccctctctactaaaaatagaaaaattagccggacatggtggcgggtgcctgtaatcccagctactcggaggctgaggcaggagaatcacttgaacccaggaggcccaggttgcagtgagccgagagtgcgccactgcactccagtctgggcaacagagtaagactgtctcaaaaaacaatacaaaacaaaacaaaaccctggcctagtggctcacgcctaatcccagcactttggaaggcaaaggtggggcgaatcacaaggttaggagttcgagaccagcctgaccaacgtggtgaaactctgtctctactaaaaatacaaaaattagccaggcgtggtggcacgcacctgtaatcctagctactcaggaggctgaggcaggagaatcgcttgaacctgggaggcggaggttgcagttagccgagatcgcgccactgccgtccagcctgggcagcagagcaagactctgtctcacaaaaaaaaaaaaaattgtagttcttatttttgaaaggttcattttttattcttcctgctcaaaatatgagtagtagtttatacaccacaattacagtgttacaatattctgtatttttctgtgtacttgttaccagtgagtttttgcaccttcaggtgatttattattgtttgttaacatccttttcttgcagattgaagaactttttttttttttttttttttttgagacagagtcatgctctgttaccagcctggagtgcagtggtgccatcttggctcactacaacctccaactcccaggttcaagcgattcttctgcctcagcctcccaagtagctgggattacaagcatgtgccaccacgcccagctactttttgtatttttagtaaagacggggttttgccatatttgccaggctggtcttgagctcctgacctcagggtgatccgcccgccttggcatcctaaagtgctaggattataagcgtgagtcatcgtgcccaacttggttgtttattttcaaatagcctgaattcaagctcactaatgttttctgctgcttgatacatttctgctattgagagactgatgcatttttcagtttgtcaattgaatttttccactttgggatttctgcttgattctttttactaataattattgcagtctcttttttaaatttataggattctgaatttgttctctgtattatcttggatttcgttgaactttctcaaagcattcagcttgaattctgtctgaaagttcacatatctcttatcacttgggaattggtcactggtgtcctttatttttagttcatttggtgaggtcatgttttctcagatggccttgatgcttgtggatgttcatcagtgtctgggcattgaagagttgggtattctgttctttgtagtctggttttgtttgtacgcattcttttttttttttttctgtttttgagacagagtctcgctctgtcgcccaggctggagtgcagtggcacagtctttgctcaccgcaacctccgtctcccggattcaagcaattctcctgcctcagcctcctgagtagctgggattacaggtgcgtgccaccacgcctggctaatttttgtatttttagtaaatatggtgtttcaccatgttggtcaggctggtctcgaactcctaacctcgtgatctgtccgccttggcctctcagagtgttgggattacaggcgttagccactgcatccggctcccattcttcttgagaaggtttttcaagtattcaaagggaattaagtgttgtcatctaagtcttcgctcactgcagccatacatgcattagagggcaccccaagactagtaatgttgtgactctgtagaggtatcaccttggtagtcttggggaagatctgggagaattccctgtattaccaggcagtctcttgtcctcttacatttctccaaacaaatggagtctctctttgtgctgagctgcttggagtttggggaagggtgacacaagcactgccatggccaccgtcactggaactgtacttggtctcacccaaggcctgtggcagctattttctggccaccactgatgttaatttaaggcccaagggtgctttagtcagtaggtgaagaatcctgcaagaactgggtctttactttcagtgcagcaggttcccttctggcccagggtgtgtctagaaatgctgcccaggagccagggcctgggatcgggagctttaggaatctgctttattgtactggggctgagctggcacccacttgcaagataaagtcctttttactcttctctcacctcaagcaggtgggtctccccatggacaccacagctgtgaatgtgcggggtcatatctgaagctggcacaatacgacatggcaccttgttttttattcaaggcacaagggctctttagtcagctggtggtgaatcctactaggactaggtatttcccttcaaggcaatgggttcccttctggtccagaatatgtctagaaatgtcatctgggagctatggcctagaattgaggcttcagaactatgcttggtgctttattttactgtggctgaactagtatccacattgcaagacaaagtcctccctactcttccctctcctcccagagctgtgagctgtggtacctggagttgggggaaggctggcacaagcactcccttggccaccctagctggtgtctcagtgggtcacatgtaccccaagtccactgactatgagcccagcacagtaccatgacttgtccaggaattgcagtccttctggtctagactgcctttcaagtttatttaggaccccagaggactttacccacggtggtggggcttaccaaaattaagattcttttggttttttttggcagagtttcgctcttattgcccaggctggagtatagtgacgcaatctcagctcaccacaacctccgcctcccgggttcaaataattctcctacctcagcctcctgagtagctgggattaccggcatgcgctaccacctctggctaatttttttgttttttagtagagatgaggtttctccatgttggtcaggctggtcttgaactcccgacctcaggttatccgtccgcctcggcctcccaaagtgctgggattacagaccatagtgcccagcccgaaattcagattctaatcactgggatggacaattcccctctgactagggctagtctaaatactccctctgtgggtgctggctgaattctgtcctatgctgctttccactgtgacagggcagcactgagtttcaatgcaaaatcccacagtcatttctctctctctcccccgagcacacagattctttctccaccccacactgcattgtgggggaatgtcaggggtgttggaggggcagttcaagactatcttccttatcttttttggtgtctttttccttgataggatgtcaaaactgggtactgtgatcgcttacctaatttttggttcttatgaaggtgctttcttgtgtggatagttgttcaatttggtgctccttgttggggatgatcactggaaggttctgtttggccaccatgctctgtctcttctcccctgccatctcctttttttacttaggggtttagaatgtctaactgaccaatatgtacagtcaggtctcattctgaattcacctacttaatgaccttccaagctgactaggcccagcgcttagtccagcctccatgacggtccctccacatcctaattagcctccctccagttcatttcacacaaagctgctgtgttcacctttctgaactataaatctgcccagtactctaccctacttaaaattccgtatagactgcccatttgccctgagaattaaaagccaaagtcctaaacgtagctttttaaaacttttttttttttttttttaatttttagatggagtcttgctctgtcacccaggctggagtgcagtggtgtgatcttggctcactgcaacctccgcctcctgggttcaagcaattctcatatgtcagcctcccaagtagctgggatttacacgtgtgccatcacgcctggctaattttttttttttatctttagtagagacggagtttcaccatgttggccagtctggtcttaaactcctgacctcaagtgatccacctgccttggcttcccaaagtgctaggatgataggtgttagccactgcacgcagccctgaacatagcttttaagttcctttattgtcatattccttttgacgagtctatcattttctgactcacttgtacatgtgtgtctcacccttggtccagccattggtgcttttctttacttctttatttttgttattttattttattttattattattttttaaatgagacagggtatcactatgttgcccaggctggtcttgaactcctgagcttaagcagtctgcttgtctcagcctcccaaagggctggaattacagtgatgagctactgtgcccagctcattggtgctatctttttttttttttttgagacggagtctcgctctgtcacccaggctggagtgcagtggcgtgatcttggctcactgcagctccacttcccaggttcacaccattctcctacctcagcctcccgagtagcagggactataggcgcctgccaccatgcctggctaatttttgtatttttagtagagatggggtttcagcgtgtgagccaagatggtctcgatctcctgacctcgtgatccgcctgccttggcctcccaaagtgctgggattacaggcgtgagccaccgtgcccggcccccattggtgctattgttttatgtgatagagccagcttctcccttttctttggatttttaaacatactcttccttttacttagactattctccatcccaacacctttcctaaacttctttcacaccttagactagctgacactttactgagaaacctttcttttttataggttgctttttctatagactctcttagcatttactcattttattgtgaagtgtctgatcttatttaaatgacaagtataagaggatagaaactatttcatatttttctcacccagcaggcacaatttctgacatgtggtaagcactcagtaaatattgaactttagaggctaggacatttgagtgctttggtgactgtggttgtgctatataggtactctgttattgttagtttatagtaaaagcattactcttaaagtatgaaaaaagccttattcagaacatttcatgcgtatagttaatattacgtagcttgtgctcatggcaaaaatgtattactaaagttatttaagatatttaagtataattgtttcctttatttagttacagccaagttctacttctgaatctatggatcaactactaaacaaaaatagagagggagaaaaatcaagagatttgatcaaagacaaaattgaaccaagtgctaaggattctttcattgaaaatagcagcagcaactgtaccagtggcagcagcaagccgaatagccccagcatttccccttcaatacttagtaacacggagcacaagaggggacctgaggtcacttcccaaggggttcagacttccagcccagcatgtaaacaagagaaagacgataaggaagagaagaaagacgcagctgagtgagtaaacctggaacttagaccatcctgttactcaattaacttttttttttttaaaggcatttaggtccttccaactgtgaagaatccatctggacttttagactactttatacattgcccttagtttacaaacagctagtccaaacaaatgacatcttaagtaaatgaggttattgcaccctgtgctactcttctgttcttccccttttttgtaccccagggctagaaaaacaaggcataaattaagaaaagtttttctgtaaatgaacaggagttgaaaaattatcaattcaggggacctatctttactggattccactcattagtcaccctcactgtgctgctaggttgaaaaactgccactgtcaaggagagaagcatgcggtgcttctacttggaattcaaaatatttttcatcagaaactgtgttttagttaatgtttagatttgttaagatagacttaattctgcacattcagtatattaattaaatggacttttaggggctaacctcagaacttaactaccattgacttaggtgtttgggtaccaaacaatccagttaaagctgaagttttggaatgcagcttattgataaattggggactgcttattcttgatttgaggcaatttttttttacagccatgactttttccaggtatgtcatgtaaaatatcttctcacataagaattactgcatgctagaatattggtatgttgactggtagctcatacctataatcccagcactctgggaggtccaagcaggtagattacttgaggttaggagttgaagaccagcctggccaacatgtgaaaccctgtctgtactaaaaatacaaaaattagccaggcatggtggtaggtgcctgtatcccagctactcgggaggctgaggcaggagaattgcttgaacccagaaggtggaggctgcagtgagccgagatcatgccactgcactccagcctgggtgacagagcgagactctgtctcaaaaataaataaataaataaataaaaggatactgttatgttaagaattgcttttaaggatatttcataagtagctactgtcttttcagctcaagtgtttgttgattggccaggcgtggtagctcatacctgtaatcccagcactttgggaggctgagtcaggcagatcacttaaggtcagcgtggccaaaatggtgaaaccccatctttactaaaaataaatattaaaaaaaattagctgggcgtggtggcagtctcctgtaatcccagctaatcaggaggctaaggcaagagaatggcttaaactcgggaggcagaggttgcagtgagccaagattgcactgctgcactccaacctgagcaacagagtgggactctgtgaaggaaaaaaaaaaagtattttttgattgcctttgagaggaacggttgtatattactcagatttttaaaaaattgttcttttatggctgtattctttaagggattaaggaatgggcaatataagtgtatatgtttcaataaaaacgattagtgatcttctagtgagaacagtttaaatctatatttagcaattttttttaaattgtcaggtatggaagattttagagcaacgtaaagtccatgtagatttcactggcctttatattttttttaggcaagttaggaaatcaacattgaatcccaatgcaaaggagttcaacccacgttccttctctcaggtaggtttattactttctttgaggttatctagtcccaaaaaaagaaaaattattagtaatagtccttcttccatacctgccatctgaattttgttttagtgtgctgaaccaaccttctttcttttttttacatggccattaatgaatactttttaaacattaaaaaaaggtctttgttttgtcatcaattagatgtgatcttgggcaaatctttgaatttctctgacccagaatttgacgatggttggctagctaggctgtcaggtttatagatacgtcctctgcacctgagggttttgcatcactggattcaaccaaccatggatcaaaaacatagttaggataatctatactgaacacatgcagacgtttccttgtcattattccaaaacaatacagtaaagcatttaccttgttttaggtattataaataatctagagatgatgtaaagtatataggaggatatgcataggttgtatgcgaatactacatgattttatgtaagggacttgagcattccaagactttggtatcttcacagggtactgtaaccaatcccccacagatactaagagatgactgtactattgttattattcgactgagatcataagaagatatatttatttttaatttttaaaaacacttccatcagtttcttaaaaatagctgccactgtttttaatattttttaattgacaaagttttaagttcctactgaaacattttttcttttattgaaatgtgaaaatttatgtgctgtgtttttgttttcaataaaagggacatagttaaagcaagtaaaattagaaagactgggaaaatccgtctttaaattgcaataatagttcatctgttaccttgagataattgaatttattgttgtttttgtagccaaagccttctactaccccaacttcacctcggcctcaagcacaacctagcccatctatggtgggtcatcaacagccaactccagtttatactcagcctgtttgttttgcaccaaatatgatgtatccagtcccagtgagcccaggcgtgcaagtaagtcatagaatttgatgttcacttagcctccccaattgtttgtatctgacaccaagcactctttaggttttcagtgacttgagggtgtgatggttatgcatatgcatttgaaacagacaggcatgcagagattcagtgtgttgttaagtatgaggacctaaatctgagaatgttttctgtgaaaaagatggtttagatttactgtagtttggggtttgttccttttagctgtgggtatgatctaattttttaatgactaatggagaatcaggaaaccttctcatgcctagctctctagcaatataaaactaagagtgacagaataccttgttattatcataggtgcctaatgttaattttttttttaattctctcaagcctttatacccaatacctatgacgcccatgccagtgaatcaagccaagacatatagagcaggtaaaggtgagaataatcctgcctgtgtttgcttgtagtttgcatgctgcatgaattgagtaactaagtttataatgaataaatagttgtagtttagctctgactttttgatgaggctatgcattggcttttgatgaacaacattacatagatattcacatggattttatgaagaaaaacaggggagaaaaaatgcccatcagttgtgattatatagtatcctcttcaaaaagagtaattggaggcctggtgtgatggctcacacctgtaattttagcactttgggaggccaaggcaggaggattgcttgagctcaggagcccaagatcagcctggacaacagagactttgtctctactaaaattcaaaaaaattagctgggcatggtggcatatgcctgtagccccagctgtttgggggactgaggcgagaggatcacttgagcccaggaagtagaggctgcagtgagctgtgattatgccactgccctccagcctgggcgacagagtgagaccccgtctcaaacataaatactggctgggcatggtggcttatgcctgtaatcccagcactttgggaggccgaggtgggtgtatcacctgaggtcagtagtttgagaccagcctggccaacatggcgaaaccccatctctactaaaatacaaaaattagccggacatggtggcacctgccgcctgtaatcccagctactaggtggggctgaggcaggagaattgcttgaacccgggaggcaggggttgcagtgagccaagatcgtgccactgcacttcagcctgggcaacagagtgagactccatctcaaaacaaacaaacaaacaaaaaacaaacaaacaaaaaaaccagactaattggctggacacagtggctccatgcctgatatcccagctggaggatgacttgaacccatgagttcgagagcagcatgggcaatatagtgagaccctatctcaaaaaaaaaaaaaaaagttaattccaaagctttttgatctgaaatctgatttaaatctgaacttaaatttgaagaagagggtttgctagattaatttactagattgctaaccttgctttatatatacctacagttatttccccaaagccagaatttcttttgaagcagaggggcaactaacttcaaccaatgttaagatcctattagaaggatgtttcggctaggcttggtggctcacgtgtaattccagcactttgagaggctgaggtgggcagatcacatgaccgggagttttaagaccagcctgggcaacatggcaaaaacctatctctgcaaaaaaaaaatagaaatcttagccagccgtcatggtgtgctcctgtagtcctagctacttgggagactgaggtgggaggatcaattgaaaccagaaggtccaggctgcagggaactgtgactgcaccactgggctccagcttgggtgaaagagcgaaaccctgcctcaaaaagaaaaataagatggatgtttctgcattaaaattagggagttgtcgtataatgtagttgcataaactagtattctgtgcttgtgtggttaaagagccttcgtagaaaaaatcccacatttttcttaaaaggaaatcttttggccaggtgtggtggctcacatctgtaagcccaacactctgggaagccgaggtgggcagatcacttgaggtcaggagtacaaaaccatcctggccaacatggtgaaaacccgtctctactaaaaatacaaagatcagctgggcatggtggtgcgtgcctgggtgacagagcgagactccgtccaaaaaaaaaaaaaaaaaaaaagagttcttttaatgttggaaaatgctaaagggttttttttttgccaaccagttaatttagagtgattaactgctatcagttgagaaactatagaaagtagaataatttatacagaaaagacatttctcagtgcccaataattgcctttctgacataaagttttcatttttcctgaattaataagatttcctcaatgtgtttttttgggtgttttgtgtgtgtgtgtgtgtgtgtgtgtgtgtgtgtgtgtgtgtgtgtatgtgtttgatacagggtcttgctttgctgctgaggctggaacgcagtggcgctatcatggctcaatgcagccttgacctcctgggctcaagcgatcctcccttctcagtcccctggatagcgggggctacaggtgcacaccaccacacctagctaatttttgtattttttgtagagatgggttttgccatgttgcctaggctggtctcaaactcctgggctcaagcgatctgcctggctctgcttcccaaagtgcctgcgcccagccaattttctccatgtttgacctaattgtgatttcatagatgttaactaaaactcttaattttcgttttctcagtatgctattttttttttttttagccttggaacatatgaacctgttgaaagaactctgcctgaaataatgtaatcaaattatagagtttaatcttattttgagggcctttagaaattctgagaagaaagtgggtttttttttttactgccattttaatgtagtgttaaggtgttcatgtatcaccagcaggtgtagctgttttcaatgattacttaaaacaatgcaatgggaactttttgttgtcattaaaatataaaaggttactgtagtaagagcaagcatgacagtttggctatctgatgggagagtcacattctaacttcaggaggtactgtctttttaatagaaatgatatactcagagtctgggcacggtggctcacgcctgtaatccagcactttgggaggccgaggtgggcagatcacgaggtcaggagatcaagaccatcctggctaatacagtgaaaccgtgtctctactaaaaatacaaacaattagctgagcgtggtggcaggtgcctatagtcccagctactcgggaggctgaggcaggagaatggcatgaacctgggaggcagagctggcagtgagctgagatggtgccactgcactccagcctgggtgacagagcgagactccgtctcaaaaaaaaaaaaaaaaaaaaaatagtagagaaagggctttgccatgttggccgggctggtcttgaactcctggcctcaagtgatccacctccctcggcctcccaaagtgctgggattacaggtgtgagccactgctcctggcctgaatataccacttttacctatcatcagttgatgaacatttggattatttcctttttctggcaatgagtaatgcttttgtggattttcatgtacaaattttcatatgaggctgggagcagtggctcatgcctataatcccagcagtctgggaggctgaggtgggcagatgacttgaggtcaggagtttgagaccagcctggccaacatggtgaaatcccatctctactaaaaatacaaaaattacactggcatggtagcgtgcacctataatcccagctattcaggaggctgaggcaggagcatcagaatcgcttgaacctgggaggcggaggctgcagtgagctgagatcacaccactgcaccccagcctgagtgaaagagtgagtctcaaaaaataaaaaataaaattttttttcatgtggccttagattttcatttctcctaaagtagaaatgctgtgatggaactgccaaacttttccaaagcagctgcatcattttgtatttctaccagtaatgtacaagtgttccagtttctccacatcctcataaataaccgatatgtctttggtttgggttatgtccattctagtggttatgaagtgtcattgtggttttttgtttttttgtattgttttgagatcgtgcccaggctggagcacagtggcacaatctcggctcactgcagccttcgcttcctgggttcaagcaattctcctgcctcaccctcccagatagctggggctgcaggcatacgccaccacaccaggctaatttttatattttttgtagagatggagcttctccgtgcttcccaggctggtctcgaattcctgagctcaagcgatccccctgcgtcagcctccagagtagctggggttataggcgtgcaccaccgcgctcggcccatttttgtatttttagtagagatggaatttcaccatgttggccaggctggtcttgaactcctgacctcaaatgatccgcctgcctcaccttcccaaagtgctgagattttagacgcgaaccaccatgccctgactataggttatctttttacttgcttgatggtgttctttgtaacacagtttttaattttgatgaagttcaatttatctgtttgttttttcttttgttgctgttgctcctgatgtcatatcagacaaagcattgcctaactcaaggccacagagatttactcctatgaaacgcctataaaactcctatgatttttatagtttagctcttaacatttaagtctacaatctcttttgagttaatttttgtgtatgagatgagagtagtggtccaggtttttccttttgcttgtggatatccgttgtccccacctcatttgttgaaaagactattctttcctcttaaattgtttgtttgtttatttatttttgagatggagtgtcgctctgatggagtggcgctaacttagcttcactgcaacctccgcctctcagattcaagcgattcccctgcctcagcctcctgagtagctggaattacaggggtgcgccaccacacccagctaatttttgtatttttagtagagacggggttttaccgtgttggtcaggctggtctcgaactcctgatctcgtgatctgcctgtctcctggcaccctgggaggctgagaggctgaggtgggaggatcacttgagctcaggagtttgagaccagcctgtaccattatgcctggctaattttagaatttatcttaaagtataaaatgtgaatccaatttatcttgttctaaatgactatccaaaatgttttaaccagttttattagtctgtaatttacatacaagaaaatgctcatctttttatgtttacattttaatgagttttgacaaatatatttgctcatgtaactacttgcttcatcagtgaagatggaaaacattgtgcctgttcctcttctctgtccaactgtactttattaccactagctccagttaaccagtaatctgccttcttttactatagattagatttatcctctttagatttctttttctttttttttttttgattaggtttttttttttctttttttacgtaaaaaaatctttttttggagacgtctcattatattgcccaggttggtctcgaactcttgagctcacctcagcctcccagagtgctaggattacagatgtgagccacctcagccagcccctagattttttttttttttttaataaatggaatcaaacagcgtgtaacagaggtgttcaatcttttggcttccctgggtcatattggaagaagaattgtgttgggccacacataaaatacagtaacactaatgatagctgatgaacaaaacaaaaaaaaatagcaaaacttataatgttttaagaaagtttatgaatttgtgttgggccacattcaaagccgtcccaggacgcaagttggacaagcttggtatataatttcatatgtgtgtcctaaacagtgtagtaatttgaatttcatgttagtatcagcttattcctttttgtttgtttgtttgtttttgagatggagtcttgttctgtgtcccagaattggtctgcaattccactgcctcagcctcccaagtagctgggattacaggcacgtgccaccacacctggctaatttttgtctctctctcttttttttttttttttttttttttttagcagagacgggatttcaccatgttggccaggctggtctcaaactcctgaccccaaatgatccacctgccttggcctcccaaagtgctgggattacaggtgtgagtcaccgtgcccagccagcttattcctttttattgctgggtagcatttcattttatgattataccacagttaatttacccattactagtcgatgggcatttgagttattgccagcttttggctattatgaatgaagctgctgtgagcatttgtgtacaagtgtttgtgtttttatttcttttagttaaatacctagaattggaattgctgaggtatggtaagtgcatatttcatttttttaaaaaatttattttattttttatttatttattttttttgagatgaagtctcactctgttgcccaggctggagttcagtggcgtgatttcagctcatggcaacctccctgtcccgggttcaagcaattctcccgcctcagcctcccaagtagctgggattacaggcgcgcaccaccatgcctggctaatttttttgtatttttagtagagacggggtttcaccacgttggccaggctggtctcgaactcctgaccacaagtgatccacccgccccagcctcccaaagtgttgggattacagatgtgagccaccacacactgcctggtaaatacatatttcaattaataagaaactagcaatcttctaaagtgattgtgtcattttacattccaactgatcaggtacatgtgtaggttccatgtgttctgcatccttgccaacacttggtattgtgttatctttttaatttcaacaggtctaatgggtgtcttatggtatctcattgtgatcttaaatgtacatttctctgatgatgactgatccaggagcacctcatcatgtgtgtgtttgttttcagctgtcaacctttttttagtaaatggttcaaatcttttttccattttatttatttatttatttatttgatggaatctcactctattgcccaggctggaacgcagtggtgccatcttggctcactgcaacctccgcctcccaggttcaagcaattcttacgccttagcctcccaagtagctgggattacaggcatgcgccaccatgcctggctaattttgtatttttagtgtaggtggggtttcaccatgttggtcatgctggtctctaactcctgacctcaggtgatctacctgcctcggcctcccaaagtgctgagattacaggtgtgagccactgcgcctgtcctaataatttctttttgtctcaatgtttctgcctgggtgcactggctcacgcctgtaattccagcactttgggaggccaacctggatggatcatttgagccaacagtttgagaccagcctgaggaacatgacaaaaccctgtctttgcaaaaaaaaaaaagaaaaaagaaaaattagccaggcacagaagcgcattcctatggtcccagctacttggggggctgaggtgggacaatcgcttgagcgaggttgcgggggtttggagggcgatggaggggtgatcgaggttgcagtgagctgagattgcactactgcactccagcctgggcaatagagccagaccctgtctcacaaaaaaaagaaaaaaaagtcatgtttcttttcttactgtgaaaataaagttactacttttagtaaattattttaagttatttatatattctggttacaagtcctttctcagaatattgtgaatattttctcccagtctgcggttttttttgaagagccagtattgttaattttaatgaagccttatttatcaagcttttctcttaaggttcatgcttttttgtatcataataagaaatcttttacgtaccctaggttatgaatgtttttatggttaggtatatggttgatttcaggttaggttttgtgtagggtgtgatgtaaaggtctagcttcattttctccaccataaatatttactcggtttctctggcaccagcctctgttttccattggtggctttattttttttctgttcttgaaacaagagtctcgatcttgttacccaggctggagtgcagtagtgtgaccttggctcactgcaacctccacttcccagggtcaagcgattctgcctcagcctctcgagtagctaggattacaggtgcccgccactacacccagctaatttgtattttttttttttttttttttagtagagacagggtctcaccatgttggccaggctagtctcgaactcctgacctcaggtgatctgctcatctcagcctcccaaagttctgggattacaggcatgagccactgcgcccagccatagtagctttattgaattcagttgactgtattgtatgtgtgtctatttgtgaactgttttgttgtattgatctttgtatatatccttatgccaattctctctttattgctgttactttgtaaccaacctttaagttcatatgagtctcccagttttattctcgtcaaaattactcttattctgcgttctttgaatttgcaaataaattttagaatcagcttgggattgtgcactgaatctttatatcagttctgggagaaatatcttaacaatatggaatcttcattgaggtcatcatatactgctccatttatttaagtcttaagtttcaccagtgttttctagttttctttgtatcagttttgtgcctgctttcttaaatttatcccttaatatttcatctgttttgtgctgttgtgagttatattttaaaaactttcaacgtttgtttattcgtaaatagagatgcacttgatttttgaatattgaccttgtgtcttgatgtgttggtaaacccactgtttctggcagccctttaagacttaaacatacaatcatgatctaatcaccatgttggtgtttttgggttttttttttttgtcttattgtactggtgcattactgaaaaaggcatgagattttgccatgctcccatttttaggggtgagacattgtctttcactattaagcatacagttaggtgttacttcagttcctaatttgcagaggtgggtttgttttctttttaatcatgaatggttgttggattatgttcaaatacttatcatctactaagtatatcatattgaccaggaacagtggctcatacctgtaacctcagagctttgggaggccaaggcaggaggatcgcttgaggccaggagttcaagaccaacctgggtgatgtaggaaaaccccatatctacaaaacaatttaaaaatttgctgggtgtggtggcacacacctgtagtcctaactacttgagaggctgaggaaggagaattgcttgagcccagtagtttaaagcagcagtgagctgtgattgtaccactgtactccagcctgggtgacagaaggagaccctgtatttaaagtgtgtgtgtatgcgtgcgcatagatggatagataataatgtaattccattatggtcatacaaactgatatgaaatgccattttatcatataacaagtgtctttttgtggttgaatttgtttctggatttttcactctgcttcactaatctaataggactaccttctcatccactcactgccaacattgattttttttttcagattaccttgaattttctgtttatttttccatatgaactctataattaacttactactaaaaaaatcagttgcctttttaaaaccaactgatctttaaaatatatcttggctgggcccggtggcaggcacctgtaattctagctacttgggagactgaggcagaagaattgcttgaacccaggaggcggaagttgtagttgagttgagattgcgcacctgtactccagcctgggtgacagagcaagattccctcttaaaaaaaaaaaaaaaaaaaagaaacagaaaagataaatctttttacaataatttgttccaattagggtccaagtcaggcttgcaatttggatttgtttatatgttgaagtctttttttttttttaattgtttcatattgtggtaactttttttttttttttttgagatggaatcttggctctgtcacctaggctggagtacagtggcacaatctcaactcactgcaacctccccctctggggttcaagcaattctcctgcctcagcctcccaagtagcccagccttttttttttgagacagagtctcgctctgttgcccaggctggagtgcagtgatgcgatctcggctcactgcaagctccgcctcttgggttcatgccattctcctgcctcagcctcctgagtagctgggactacattcgcccgccaccacacccggctaatttttttgtatttttagtagagacagggtttcaccgtgttagccaggatggtatcgatctcctgacctcgtgatccgcccgcctcggcctcccaaagtgctgggattacaggtgtgagccactgcgcccggccttgtatttttaatagagatggggtttcaccatgttggccagcccggtcttgaactcctgacctcaaatgatccacccgcctcggcctcccaaagtgctgggattacaggtgtgagccatcgctctcagccttgcggtaactttttattacgaatgtattgagacattaataacctaggccagtcatgtttcatccctacccattgtctcttaaaagctttgagtccactggattattctgaagcaaattctagacattgcatcagtttatccaccaacattttagtgtgtatctttaagttggttttggttttgttttttgtttttgagatggggtctggctttgttgcccaggcttggagtgcagtagtgcaatcatagctcactgctgctgcgaattcctggtctcaaaggatcctccctcctcagcctctcaagtaactgtgactacaggcacatgccaccttgccagcttttcttttcttgtcttgtctttcttcttctttgtttttttgtttgttttttgtttttttttgagacagagtctcaccatctttctatcttgcccaggctagtcctaaattccagggcttaagttatctttctacctcagcctcctaaagtgctaggattacaggccagcactttaggaggtgctggatgagccatcacacccagccaagtcataggtttttttgtttgtttgttttttgagacagtgtctaactctgtcacccaagctggagtgcagtggcatgatttcagctcagtgcagtctctaccaattgggcttaggtggtcctcccacctcaacctcccaagtagctgggactaaaggtgcgcgccaccatacctggctaatttttgtattttttgtagagacagggtttcgaattcctgagctcaagcagtctgcctgccttgactcccaaggtgccaggattacaggcatgagccactgcactcagccctcacagttttaattacagtttttcccttagtttttgtcttgttcatatccagcttgtcttgtatttttttcccacgatctgaattttgctgactgtatccctgtgttgatatttaaagtagacttctgtcccctgtaatctttgtaaactgatagtaaataatgaaggcttgatcagattgggttttttttttttttccccaatgtttcacagatgtgtgtactttcagtgaggagtcatgtaatcagtctttttcctgataggagtagtcagtgagttcctagatgttttatctatccaggagataatatgtccctttagcgccttaatttttttggtgtgttttttagcagccattgatgataattgtctagcccaagatcagttatttccttaggggttgtaaaatggtgacattcttttcctttcatcccttcttcaattattgcctggaatatttctataaagaaaaactttcccatatccagctgtttggttaccctgaggtatagctttcttaggaaaagtaatttaaaatgttaatcatttccctttttaaggcagtcttcaaaataatgagttggttttctgttatcctccaaaggtaaccagtgaggtggtttttttgtcgttggttcttactatcagtataaacttctggaattttttttttttttttaattttttggagacaaggtctggctctgttacctaggctggagtgcagtgggatgatctgggcatactgcagcctcaacttcccgagctaaggcaatccccccacctcagcctcccaagtagctgggactacaggcaagcaccaccgtgcctggcttaatttttgtatattttgcagagacagggtttcaccatgttgcccaggctggtgtcgaactcctgagctcaagcagtctgcctgtgtcagcctcacaaagtggtgggactacaggcatgagccaccatggcaggccagaatcacaataaacttataaattaacttgagaagaaatgattgatgtcttcatgatgttgagtcttcctgttcaagaacaaagtataccttcaatagcatattaaagtttatccttggctggatgcagtggctgacgcctgtaatcccacctctttgggaggcagaggtgggcagatcacctgaggtctggagttcgagaccagcctggccaacatggtgaaaccccgtctctactaaaaatattttaaaaaaagtattagctgggtgtggtgtgcacctgtagtcccagctactctggaggctgaggtaggagaatcgcttgaacccaggaggcagagagtgcagtgagtcaagattgcaccactgcactccagcttgggcaaccgagcgacactctgtctcaaagaaaataaataaataaaaataaagtttatctttaaggttttgtacatttttttcagtgtatgccttaggtaggttcttttttaatgttagtgtaacccagggacttctcttccattgcatcttctaagtaattacttatgaagtaccatatatgaaggctattgctgtttatatgttagtttttaccctgctcctttactaaattccaatcctttgaggtattggataaaaatatttttagcatttttcaaataacaggcagagtcaagggcttggtttcttttcttcccctcctgtcccctaccctccccttttttgagacagggtctcacttcttcgccgaggctggagtgcagtggtgcagttacggcttaccgcggcatctgcctccctggctgaaaagttcctcccacctcagcctcctgagtagctgggaccatagatgcacagcaccgcagctggctaatatttttgtattttttgtggaggcagtgtctccccatgttgcccagggtggtcccaaactcatgagctcaagcagtccgctcgccctggcctcctaaagtgtagggattataagcgtgagccactgcgcctggcctggggatcatgttttaacatgagaattagtggagacaaacacatgatatctaaataatagcaccatagtatacttgactagctttttaattattttttaaatatacaggaaggtaataagtaacaaagtaataatagtgaatagtttaagctcagttagcataatcgggcaaactttcatttgataaaagtgataagtagttttcagtggcttttttgtttaccagaaggaggtggtttttaaatacgtgcatccaagataaaatataaaaaaatgttcaggtttgctttcctacatagataaaataatatgtaactagctctcccaaatttcagcaacagttagtgaatgtttagccacaaatttgcagttaattatataatcagttcttaggattttatgaacaagttctatattctttgtgccttatacctagttgtaagcagtcattccacaattattttcctgaagtggcttggttaatgccacaccagaaacaggtcacagacaatagtgctgtaagaaatgtgtgaggaaagaggcacatgggaagtagctagctcgtgctggaggaactggaaaaaaacctcacatgggagatgacagttgagctgaattcttaactagagttgtaacagggcgaggcccttacatgcagaccacctgtgtggattaagataagacataaagtaatcttttaaaagaactattatttagaaacctggtatatgctacatggtgctgtgttatactgggtttgagaaagaatgggaagtgttacaaggattcagtggttggaaattaaggaagatagaaagttagtgttggatctgttttggctctttggtcatgcctttgtttttctcaaaatgaatgcagtgcccgtcccagaaaataccatatgagaagcgatttcataatgctgtgagagtctgttacagggacttgatcaagtctgagggccatgagagaaagtccctctgaggaagttgctttcaagctgacacctgaaggatgaagcagaattatcccagctgggatttgggaactggtgtttgaggctgaggactagcatgcatgataggaaaataacccagagtggcagaagtgggagtggtatgagatggcatcagagacgcagattcagggtcaaatcattcagagcctcctagaccatgtgaacacatgtattatgctgtggagatactgtttaataggcagtctgcttttttttctgcagtaccaaatatgccccaacagcggcaagaccagcatcatcagagtgccatgatgcacccagcgtcagcagcgggcccaccgattgcagccaccccaccagcttactccacgcaatatgttgcctacagtcctcagcagttcccaaatcagccccttgttcagcatgtgccacattatcagtctcaggtaaggctggtaaggcctaactcttaatttttgtaccatataaaaaaacttttaatatggtaaagggattttcctttataatttttgcttttgtgtgatggtagggtagatagctaaggacttggggacccttttcaatatatattcgaaggttactgatgattgtaagaggttcagaggaaacagccaagaaagatttgagagtttacagctgtttctggaaatctggaaaccatggagttaaaaatcttaactaaagtctgcttggctctatttgcagtgttaatgtgctttctttattttttgtttgaacacagcatcctcatgtctatagtcctgtaatacagggtaatgctagaatgatggcaccaccaacacacgcccagcctggtttagtatcttcttcagcaactcagtacggggctcatgagcagacgcatgcgatgtatggtaggaagcactttgtttgtctcttccagtgtgtgtgactcttcttaatttaagtttctgaaaacatactctatctaagaataacctgaccttttatgacattgagggtcaagaatctgaaggaaaagatgaacccatttctttgcctgacttgctttataacttttggcaaatagtttctacttctgtacctggtcttcagatctctttcctgctttaactaaaatgtaatgatgtatataatggcaaagcatctttgtggagaaaggtacctttctcctcttcctcatcaatattatgctttggtatatcctgcctacgacatgcaagagaattttataataataaaagcataaaggtgttctccagcatgaaaacattttgcttcactacttgatctgagggtcactggcattacatattttttttgctgtttgttataatgataatactatgtttctacatcatgctgtattttaatggttgaatattatgtcatattagatatattttagacatgagtcacactttaaatataaccaatgtgaacagaatgctgaaatgaaaatgagaagtattttatgtaaaactaagcagtatttatatgtgagaataataagcaaaaaaacccatcttcgttttgtgactaaacagagaaatttgtgtagatcaacttagcagctgtctaaagtaccaaaataatagatttttcactgttgataatttaaaataaaatgtccatttgtatatcttatgatacagaattaatggattgcttcaaatgtttttcagaatatgtttttaaatagtactgatttcattaagatgttttgttctgaatatttctgagaactaccgtagtgtcgtttagttttcctatttgcgtttttggttgtttggagtaggggataattttggtttattcatacagttgaaaagtgtactgctatgagaatgagattatggttacatgtaactacatgggcatttcatttttaaagcctctttgaactttttgaaatactaagaatataaaatttttattttttaagtttagatgtcctgaacgagtatgtttaggcaaaattgagttatttaagaatttataggctgggcgcagtggctcacgcctgtaatcccagcactttgggaggccaaggctggcggatcatgaggtcaggagatcgagaccagcctggccaacatggtgaaaccccatctctactaaaaatccaaaaaattggccgggtgtggtggcatgtgcctgtagtcccggctacttcggaggctgaggcaacagaattgcttgaacccgggaggcagaggttgcagtgagccgagatcgcgccactacactctagcctgagcgacagagtgagactccatctccaaaaaaaaaaaaaaaaaaaaagaatttacagatttctggcaaaccttcttcttgagacattactacttttcataccacctctgtcctttttgaagaataaaagttttaacattccgtaggttaatgagaataggacttgggcagcagcaatcatccttcctgtcacctgtaacccacagcttatgctttcttcctggaggttcttgtctgccacaaaggctcactgctgataggaatttgtatatgatcaaaggtgtttagttttataaaacagttaagtccagtcttaattttccacattatcactttcaattttgtattgtggattacgcattttaaataaaaaattgtgtgattgctacattttggaaaacatttttttcaagaggcccatccgtaatttaattgtaaaagatactgacaaactaacttggtttattattttggttatgaccccgtcatttgacttgtctttagttgtcttaacggggactgaatatgcgtgcaaaggcacgattgatttatcatgctggcttttatgcaacttgtatatattttaacaattttcctgtttgctaaaggcttaggttaaaagttcattatgattgtttatacatttctggtgaatacatcatgatttaacaagtggaaagaacatctctttccttccattttctggcatactccccttggaatcagatctgaaacttttaagctaaaatttccattgcatttggagagtagttatttgtgtatgcatgcttttgagacattgtagcaataatactgtaatgttgagccgaatctttctcctcattgtgttcattcactgccaacatctggcttcatcttttggatgaatgttcattggttttgaaacagcctatagggtaaatactgtgtttgaggtacagatgattttcataactacttcctagaacatgtccatttgaagagcagtggggccttagaccccaaagtccatttatgtgtgggcaaataggaaatgttgcaaacaaaacaaagcactagatctaatgtccagtgaaatctggaatgaactagtcattagagccggttctttcatgccaggaaaaagttactcagccaaatctgaactactctcctgcagtttacacaggtggtatttaattgctgtctgtatggaggcaggctaggagcaaggctgtggacttgttgtgattgtcactagttaatcaagattccctttgtggtgcttaagaccctaaaaaggacactaggagctgggcatggtggctgacacctgtaatccaagaacttggggaggctgaagtggaggatcgcttagcccaggtgttcaagaccagtctaggcaagatggcgagatcccatctctaccaaaaaaaaaaaaaaaaaaaaaaaaaaaaagcccagtcatggtggcacatgcctgtagtcccacctacacaggaagctgagatgggaggatcacttgagtccaggactttgaggctacagtgagctatcatggcaccactgtaatccagcctgggtgacagagcaagaccctgtctctatttaaaaaaaagaaaacataagaaagaattgttttgttctatgccatcataagccataatttaatctgcttaagcatgttcttcattaaatctgcagtgatttatttgaattattagactttcaaagccttattatatcaaatataaacaaaatttgaagtacattcttataaactacaacaaacttacatagaagtgttaattttatactcatcttccctgaacaatttatattttataaatatattaaatatattgtcataaattttctcaaaggaaccaaatactttgagtatgaattgtgcttttctttttaagctacatcatatctaggtttttaaaacatttaatgcaaacagaagaacatgcacccagatgttggtgacaattttatgtcaccttttctcattcattaattgttatagccatagccaaaggcattgaaaacataggaccactaatgactgcaaaatgaaatcctgattattgtttttaaatttttagtatgtttaatacacatatgctaacattactgaacagttaaatgataaaataggataattattttattctaaaaaagtattgaccttgacctctttctagctatcttagaaagggcttttgtcaaaaaccttatctctttgatgtctctttttttgagatggagtctctccctgtcgcccaggctggagtgcagtggcgtgatctcagctcactgcacgctccgcctcctgcgttcacgccattctcctacctcagcctcccgagtagctaggactacaggcgcccgccaccatgcccggctaattttttgtattttgtttagtagagatggggtttcactgtgttagccaggatggtcttgatctcctgacctcgtgatccgcctgcctcagcctcccaaagtgctgggattacaggcgtgagccactgtgcccagcctctttttttttttttattttttatttattttttattttttttttaatttttgagaaggagtctccctctgccacccaggctggagtgcagtggcgcgatctcagctccctgcaaactccgcctcctgggttcaagcagttctcctgcctcagcctcctgagtagctgggactacaggtgcccgccaccacacctggctaatttttgtgtttttagtagagacagggtttcaccatgttggtcaggctggtcttgaattcccgacctcaggtgatccacccacctcagcctcccaaagtgctgggattacaggcgtgagccactgccccggcctctttgatgtctcttaatctaacttccatcattgcctctaccccatcccttctaagaagttactttaattttttttcctctcacatctactctttttttttttttttttttttttttgaggtagtctcactctgtcacccattctgaagtgcagcggtgcgatctcagctcactgcaacatctgcctcccaggttcaagcggtttttctgcctcagcctcccgagtaggtgggactacaggtgtgcgccaccacgaccggccaatttttgtatttttagtagagacggggtttcaccgtcttggccaggctgatctcgaacttctgaccttgtgatttgtctgcctaggcctcccaaagtgctgggattacagatgtgagccaccacgcccagcctcacatctactcttctaatccatctaattttgttttatggtgatgcttttacctttcagaaacagtaataatacaacttttccgactaactagagccattaggaagaattagatccagaatccttttttgatttgtttttggtagtttaatgcagataagtaagaaaatatagttaagttaaaaaaaaaaaaaatgaaaagcatccataatccctccacctgacaactgccttttaacattttgatgtgtatccttccaggtgtatttaaatacactcaaataccctacccctttatgtagacatgttttaataagaaataatattcatgtttatattcttgctatgatcctaaatttttggatccattactagataatctttcaggataatgacatttccattagtaatgtttttgcaaaattgtgtgtctattgaattaaacttgtaaaatagttttattttggtacatgatttatatcaaggttgttcagtagaatgccatgttggtgtttttattagataatgattttattccttttacttttaagcaagtcagcatgacaacttgacacctaagtacagaagaacagtgtcttccggtttagtcctttcttttaaaattctgtagcagtgtttaaagtgcttgtcatctcttatgaaaatgaattatgcatgaatacaaaaagaaattactaatatgtcaacctttccagaaaatttggaaaatgcacacctcaaaaggctaatttacctttctatttcccaaattcagcatgtcccaaattaccatacaacaaggagacaagcccttctttctactttgccagtgagttgggttttttatactaatttttaattgtacagtaaaacactttttaaaggatacatgttaagggagtagacttgttgaacaatattttccttgtgccagtcaaattattgaaagtacttatatatataaataattcagtttttaaaatggaaatacccaatttaagaaggctggagttaatgaaaaatggagttgtttcagaaatcaatttttgcataccaagcaaatgtgactgggaaatgcctaatattttccttgttagagaaacttcctaaacagctttatacacacacacacacacacacacacacacacacacaaacacacacacccaagccacaagcttggtataaatttaaaatgtttatttatacacacacacacacacacacacacacacacacacaccccaagccacaagcttggtataaacttaaaatgtttatttatattctgataagatgaaatttatgcctaccaggatttttaattgaataggattgatgaaatactaagggaaaaacttttcagtcctgtgcatggctaaaggtttaaaatactcaggaagggccaggcacggtggctcacacctgtaatcccagtgctttgggaggctgaggcgggtggatcatctgaggtcagcagttcaagaccagcctagccaacatggtaaaactccatctctactaaaaaatacaaaaatcagccatgcatgctggcatgcgcctataatctcagctactagggaggctgagacaggagaattgcttgaacttgggaggcagaggttgcagtgagccgaagtcgtgccactccactccagcctgggtggcagagcgaaattctgtctcaaaaaataaaatattcaggaagcagacccctcaggatatcttgagcttaagcaagagatcatgacctctcaggtcattatcttggacagcacaggtcccctctccccacctggcaaaaagtacagaaatagttgctccttcatggagaaagtctgggcagagctttcttctggaaatgaacttttaaggtacatttttcctatttgtagggcaatttgtaaaaataagggccggacgtggtggctcacgcctgtaatcccagtactttgggaggccgaggtgggtggattgcttgaggccaggagttcgagaacagcctggccaacatggtgaaaccctatctctaccaaagcatggtggcacgcacctgtagtcccagctacttgggaggcggaggcacaagagttccatgaaccctggaggtggaggttgcagtgagctgagattgtaccactgcactcaggcctgggcaacagagagagactctgtctcaaaataaaaaataaaaataaggctagtcttggactttggtatttaaataggaaggagtactaatatttgtagaaatcctttagaaatttgtgccattaatattgtcaccttgtatgaaatgttgtgttctagaggatattaaggattcaaattttatgttaggcacattttgagttattttggggtgactcaatgtctgactctactaaatgccatattagcatttaaaatgcatttgaccttaaatctttgttaattatgccatgacttggtatccaaaaataagctgatacatacatacatacatatatgtgtgtgtgtgtgtgtgtgtgtgtatatatatatatatgtatgtgtgtatatataatttatttggtgctaggaaatgttaaatttaatcctttaatagatgctctttaaaaaggagtcttgctgtatgtatatactattaaaggggaaactatgtctgtgattgtagtgtgtaaaagatagtaggtgattttattatgtactcaatttgaggtctcaaatgtagttatcctcaccatcttactgtctctgttagtagtttggtgttgttttcctggtaagtagctaaggtccttaatcattaacacctaagccttaattgccttagcacaacttcccctaaaagggagtatcagtactttttaaaagaaactaacagttgggctgctaatttaatctgctgcttcatttccccctgttctaagccattttatgatggtttggtcaagttgccttttattccccttttagagttttcaactttccttcacttccctttttctgaatttaacatcagatttacaagttggaagattttgttttgttttataagttttgcaatgctggtgatctcttatgacttgtgcatccaaagtcaaaatgacaaaacctagttacaaattaaacacacagctttctgtacttaatttgcttcagtgagatcacagctgaggaaactagttctggaatgtggttagtgttattaaggatttttgactgatcatatgtttagaatcttaaatatttatgtcaaggaacactgagtgggaaacttctggactaggtctggaccaaagaagcatatgtctttgattatctttaatctaaaagattttatgaagactaaagttttataaatagaagtttaactgatgaataaatcagtattacaaataaaattaactttatttttaacctctctgggatctttagccagaatgagcatatataacaaaagcagtgaaataatatgtgtgggtcagaacccactgcccttcccactccactctccttttccctgattctcctgtgttttttccttctttaccttatcttggttcctttttttttttttttcttttgagatggagtctcactctgtcgtccaggctggagtgcagtggtgcgatctcggctcactgcaacctccgcctcctaggttcaagcaattctctgcctcagcttccagagtagctgggattacaggcgcctgctgccacacccagctaattttttttgtatttttagtagagacagggtttcaccatcttggccaggctggtcttgaactcctgacctcgtgatcacctacctcggcccctggttccttttttgtctctcttgtcttccaagctatttttttccttggcttttaaattttcttcctaccctgctttgtgtcactgtcacttaactggcctatcaaggaaccgaactgtatttttgttactagtattgatttaaagtataagtttcacatttctcccaatttattattattatttatttatttatttgtttattttattttttgagacggagtttcgctcttgttgcccaagctggagtgcaatggtgtgatgtcggttcactgcaacctccacctcccgggttcaagctattctccttccccactctccctagtagctgtgattacaggtgcctgccaccacgcccagctaatttttgtatttttagtagagacagggtttcgccgtgttggccaagctggtctcgaactcctaacctcaggtgatccgcccgcctcggcctcccaaaatgctgggattacaagcgtgagccaccgtgcccggctccatttctcccaatttcaaattcaaggaggaaaagaattcctgattaaggtacttctttcagatcttttgagctagaacaaaaaaacaaagggaaatatttctaattaactctttttaaattttgtttacaacgtatgatacatattttacacatcctttgtggtttttgttcgtcttgtttttaatcaatgccttgcaagtttaccggtatttaggtagggaaaggattttgtttttgtttttttaaacaaagcctatgtacattcactcagcttgggtatttgtgctatgcatgcaaattagctatagattagaaaaccgtattatagtctttaaatactggtaaacttaaattgcagagatgccttttaaaaatgcatagtaaaaatatttcatctttacttttctcttcaaatgattttaagatttttacatttttccagttgatgaataacttaaattatgagatttcatgggcataattattttctatatttattgttactttttaatattcttaatactttgcttagaaggtatttaaaagtgaaatttcaaactttttagtacaaaatttcttgaataaataaagttacaaaaaaaaaacaaaaacctctgagattccgtactgtatctttatgaacctccatgaacagaatttgggatttgggaattgcttttccttagacagatttagattgttacaaatgacatttttaagaggctggggtggcggtaggggttagtgctaatggtttaacagtaggggaccatggacaactgtagacatcactatccagtagaacattttgtggctgggcgcggtggctcacgcctgtagtcccagcactttgggaggccaagacaagtggatcacctgaggtcaggagttcaagaccagccagaccaacatggtgaaaccctgtctctactaaaaatacaaaaaagttagccaggcgcgcctgtagtcctagctactcaggaggctgacacaggagaatcgcttgaacccgggaggcagaggttgcggtgagctgatatcacgccactgcactccaccctgggcaacagagcgagactccgtctcaaaacaacaacaaaactgcactgtccaccgtattagctacttagctacatgtggcttttttattattcaaaaataaatttttaggccgggtgcagttgctcacacctgtaatcccaacactttgggaggccgagatggacggatcacttgaggccaggagtttgagaccagcctggccaacatggtgaaaccccgtctctactaaaaatacaaaaattagccaggtaatcccagctactcagaggctgaagcaggagtatcactttaacccaggaggcggaggctgcagtgagccgagatcgctccactgcactccagcctgggtgacagcaagactgggtctcaaaaataaacaaacatggccgggcgcagtggctcatgcctgtaatcccagcactttgggaggccgaggcggatggatcacttgaggccagtagttcgagaccagcctggccaacatggtgaaacccgtctctactaaaaatacaaaaatcagccaggcatggtgatgcttgcctatagttccagctactcggcaggctgaggcaggagaatcgcttgaacccgggaggcggaggttgcagtgagccgagatggtgcccctgcactccagcctgggcaacagagcgagactctgtcaaaaattaaacaaataaatacatttttaaaatgaacgtaagatttttacaagtacaacaaactcaggttcgaaatttacatcaaatcttttagaccaagtcagtgcctatacaacttggaggagctggaagtaaacttaatgagtatgatgatgatggagggcctgttaataagccaccaagttagaaaaaaaggactgtcttatagacttatgggactgtgaagctcaggaaggcttcatcgtttgtacatcatttgttctagctcccagaagacgttcactactcttaaaaacattcagagactatgttgccacagttttcttgttaaaatattctggcatatgttaattcctacagtctggaaaattttcccagtgtataaacaaagctgctgtatccagtctaaactggatatgaaggaatattaatgccagctgtggcattggcagtggatgcacaggtgatcctagaactggctctttgccttgccctttcccctgctaagagatagctttgcagctggagacgtaactgttagggctggagagttggtggcccttagccctacaacacctaggattatagaactgctccatgtgcctagcctaaccctctgcacaccatttacgtggaatatacccagagccgtctatgctggtgactcggcagccttgcctaccagactgctggaactagggtgcctcttcccaaagctgtgcttgcttctctcaccaatcagtcctgcatatgtctgtgtttgctaacacgttatatgaagaatgtggggaactattttggaatcatttctgtgtatgggcttattatcttgagggattttaggatttgtttctcaagagagggctgggaactataccttgctagagttgtcttgagaacgctctattctcagctcattgcctcgtggaggttagttttttatcatcggtgtgctgtccatagtcactggaagcagtgaacacatcctactctgcttctgattctcaacttactgtttttgaagcacatgaacaggccaggcacggtggctcacgtctgtaatcccagcactttgggaggctgaagtgggcggatcatttgaggtcaggagtttgagatcagcctggccagcatggcgaaaccccatctctactaaaaatacaaaaattagctgggcgtggtggcacatgcctgtaatctcagctactcgggaggctgaggcaggagaattgcttgaacctgggaggcagaggttgcagtgagcctgggcaacagagtgagtgagacttatatctcaaaaaaaaacaaaaaacaaaaaactgaaagacatgaagaaatggtttttgtaccaaggtttggcccacgctgagattcacaaagaactggctttcagttcttatctttattttgatttaaactggcccatcatgttgtcctttgaagttagtctagtaaatttctttccaaagggctggggcactcagaagggagtttacttttctatatttatttcataaagcaaagatgggagatcctccattagggcttgggaaagtaaactgagtggcagaagggctcctgtgattagctgagagagactgtggtccttcggccctgatgatagatccctggccttgccacataccatacacagtgcccgcacccccatcccccaccacacccaatatagtctgtgccctcaggacattgctccagggcagtagcatggtgaggttagcctgatgatggccttgagctaaagagtgtgcacctaaaatgcacttgtttgagtagtttctgcctatgccttcaagttgcctttttgggaaaacctagtgaccgttaagagtaaatgcaaactaatttgattttaatatcatatgtagagctgtattatatgaaccaaatgctagtctgttaagcaatagctacacttattttttcaagacaatggatggtttaaatggagtcatctatagaaattggtagtggcgtgagttatgcattgtaaccatcaagaaagttcagttgatgaagtgtagaggagcgatggaggttgtcagacatcggttgtgtacatgctcctttttctttcactttagtttccacgggctcccttgctcagcagtatgcgcaccctaacgctaccctgcacccacatactccacaccctcagccttcagctacccccactggacagcagcaaagccaacatggtggaagtcatcctgcacccagtcctgttcaggtaagggcaactcagaggtctgcatggagtggcttctttatcctagtatctgagtgctttcttcaggtgccaggtatcgcatcgtcagaacacatggcatgtccaccctcgtgaagatggatacagctgtgcccctggggtggtggttttaagaatcacatttaaaggctgggcgcagtggctcacgcctgtaatcccaccactttgggaggccgaggcgggtggatcacgaggtcaggagattgagaccatcctggcgaacactgtgaaactccgtctctaataaaaatacaaaaaaattagccgggcgtggtggtgggcgcctgtagtcccagcttctcgggaggctgaggaaggagaatggcgtgaacccgggaggcggagcttgcagtgagcagagatcgcgccactgcactccagcttggacaacagcgagactctgtctcaaaaaaataaaaaattaaaaaaaatcacatttaagatacatgttgataataaggtgattggataagctctggaaacttgcagtaatgaaaaatcaaatttaacataaagttcataaggcaaattcctatttgcttgggactttttaatttctaaggtttatgtgatgaggttattttcctatgagcttcttgaattatgtttgctaatggaggcagttaaagatgtctttgatatctatcagttccctggggcagtagtcttttttgactttagtatgtatgctcagaagtttctaactgccagactgagaatcaggcttctgtaccctagaaaggagttgtccagatgggaggcacctccagccttgctcttaccaccctgtacattctcctgtactttccagtgaccctcatcataggcccaagtgtgcaaagcttagctttgtgggtatcccttggctgcttttcattaaagaagttttcctctcaattctttcctgtcgctttgcagcaccatcagcaccaggccgcccaggctctccatctggccagtccacagcagcagtcagccatttaccacgcggggcttgcgccaactccaccctccatgacacctgcctccaacacgcagtcgccacagaatagtttcccagcagcacaacagactgtctttacgatccatccttctcacgttcagccggcgtataccaacccaccccacatggcccacgtacctcaggtaataccagctttagccaactttctgtgaaggccaagtagaatgtgaaggttatcagtaagcagctagaggctctcccagctaggaaaccctgtgtgtcatgccatttgcctgtctccctttccctctcaaatacacgtgatctggccctaagggaatgtttgtgtggttttgtcatgggatcagtgaaggtgctgattggtcagtcctttagttttccaactgagaccttaaaaatatctttgactctggaatgcaacccagtccttctttcctttctgtgtctgctttgctatgtctatatagcctcactactatatatatgtgtacatatatattcccctacacacttaccttggaagccaggcagggatgatggccttcacagagtctcagctctccgaagtgactaccggggcctgtcaacttgattgttactcacatgagttccagacacatctctccaattgttttccctggttatccatatatctgctttgaccataagttgtactcttgagagggcttggccttggacattggtgcagtgtaactagaagctggaagcacccaggtggtcccatttttctttaagagcagccctggaagcactttggagctcacctccagtgtaagctgctacaggtgaaaggtgtgcttgccatctcagtggttgctgtctgcatcagctgctgacaaaggtccctgcactccagggcccaggggattgtcttaatgaggagaaggagctgcactgaagttgggctctaacgctggccttgaggccctccctggggctgttacgggtgaattggctgtattagatgtctctgctactttcataacagaactctctgaggcgggtctaagtgagacctgccacaatgaattccatttcctgttaaatagtgcgccagtgaggctctggcaaggtgtgggctagagatgcgactcagttggatctatctctcagaaggctaccttgtaagtagagttccacagctctgggaagtttgggcgtcctcaccctgcaaagtttaggttctgtggtgtagcgcactgcagttgatttgctttttgatagtggggagggaagccggtttggtccgtgtgggccagcgtggtttggtggagtcagcttcataagagctggggtcctgtaggtgtctaccagaggctggtggctaagtaggcatgtgaacttacatgtaagtcagggatccctaaaacctcactctgtttttgtgctgaaagggcaaaaaggttaacacagggaagctcaaatttgccatgtgcccgtttgaatatgtgagagtaaaaacggcatttcatccaaggcttatcgtagtctagaacagtgcacagtgtgggaaaaaggaaacaagggctcttcctggccctgccaaccccctgcagagctggaatccagctgtttgggctgactaaaatcacctttccaacttgacagtgagtgagaccaggttgaacttggtacagagacgctgggctggcccagatgacttcaggttactcctttccatctcactggagccattaaaaactccaactcctcctcctcctcctgctccatcagcatatctctgagagagtcacgggggcctaagagtctcttttcactgcctggtgagcagaccagaagcagagggagagaggcaaatgaacagaggtccaagtaattcacatacttgactgtgacagtctctgcttattaatgtaatctgttttcctatttgaaagggatgttatctgcaaaactacctcaggccccacatggcagcctgattctgaagcatcattgaatcttgtatgatattaagttgagaaagctgcccttggatccagtgtctaatctttgtgaagatcttaccccatacatagaatacaatgatcagaaatgtcaagggttaggacagcacagccctgacttctacccaggctcacttgttgcctgctccctgacccttgcaggatctgcccaaaggtgaagcgcgtcttcaggtcaatagataatctactagagattgtccccagagaacagaactgggccctgaggcccaccgttgccctttcctgagagtcccagcccagtgaaaggaacacagttgacatgttgttgaagccggagatgttgcctgtatgcgtaaaagagctctctgtttcaggctcatgtacagtcaggaatggttccttctcatccaactgcccatgcgccaatgatgctaatgacgacacagccacccggcggtccccaggccgccctcgctcaaagtgcactacagcccattccagtctcgacaacagcgcatttcccctatatgacgcacccttcaggtgaggcgtgtgtgtgcaggggccgccggggcaccccaaagcattctgctcgcacaggtggaatggcaggcagggccagtgcttcaagccccgcatttgagaactagcaagacccgtccaggagtgtgcacaggagggactgtgacgatcagttcagcatcagggcctgaggcttccgggagccgagtctgtgtgtgttctgatggtatacaggatttggcttgatgagaagcagcagcagcagcaacagcagcctgatgcatgcctaggactcagttggccttccttgttatgacaggctggacagggcagtgttttccttcctgagtcccaaaagtctgacatgtggggggttattaccatggcagagtttgattgtagctctggagaagatactgctgagaaagcgctgtggatggactggctttgagtgtagcgttagccccagcccctgaacaggggagagcgccctgtgattgtgctctactacttgatggctgccatggcgatacttcacagtctgacctgttattctgaaagcaatactggtgcttggctaatatttggggagggggtttgttaaggcctttttttctaccccatgaacaagtcttctgggagttttatctgaagtggttttacgtctgactggtttgtttctacccacccacccaaccctccccactttggtgcagatgggagggggaaaagcgaattcaattttgagttttgttcagctagcacgaggatagtttacaatcatgtgctgcagagacactaggctgatgtgtggtgttgccagttttctgtttcaatgttcgcttttctttttacagtacaagcccaccaccaacagcagttgtaaggctgccctggaggaaccgaaaggccaaattccctcctcccttctactgcttctaccaactggaagcacagaaaactagaatttcatttattttgtttttaaaatatatatgttgatttcttgtaacatccaataggaatgctaacagttcacttgcagtggaagatacttggaccgagtagaggcatttaggaacttgggggctattccataattccatatgctgtttcagagtcccgcaggtaccccagctctgcttgccgaaactggaagttatttattttttaataacccttgaaagtcatgaacacatcagctagcaaaagaagtaacaagagtgattcttgctgctattactgctaaaaaaaaaaaaaaaaaaaaatcaagacttggaacgcccttttactaaacttgacaaagtttcagtaaattcttaccgtcaaactgacggattattatttataaatcaagtttgatgaggtgatcactgtctacagtggttcaacttttaagttaagggaaaaacttttactttgtagataatataaaataaaaacttaaaaaaaatttaaaaaataaaaaaagttttaaaaactgatcaagttagtgtgtgtctgtataagctacttctttgtaggatacttaatatcaaagcaggtgtgctaagggtgcattttgaatatcccggaaggtagctgtgaaatgatttttcttcttcacccttagttctggttcaaggtatctctagaaaaagacaagactgagctattctctttggtggattagagatctgcttcaggaggaggaaggttggccagagttgggcagcactgaaattccacatcctcgggctgacaccgattctgtaagcttcctttttaatatctcctgaaccaaaatgagtgtcattagctggaagttcccaattcgggcatttttctactttaccagtagggggcaggagacactcagaaaaaaattgcaataaagaaatccagagggcatgaaggctgaaaagatacaaagatgtacaaagctgcttattgacatggatggactcataagcatttgttagtattcccagattgcaacggggaggacaaagggaagagcgagtatttgggcagggcaaggattttgtagagacaccatggtcttaatagagcctttaaatattatgacagcaaatcaagattctgaaaactttttaattcacatatagcaatttgtacattatagcaaaatttgcattattcaagaataagttacttgtacagtacataaaacaatacataaaaatttgccaaataccttctgcctataatgatacaagatgaatccactttatgttatcacaatgtgctgtatattctaaccaaacacaggatgtcagatgtgtccttgttaatatactcgcaagttcctctagcttgtgggagatgttagagctaacacatttgcagtaagggacttagtcctgaatagaaagcatgaaggaatctcaggcaaccctcagggaagagtccaaggccttgactttaggttaagaaactgttatgtaaaaatagtgttctctggcccaagattttaatgattgctattcctttttcctacggtccagaaatgatcaaaggcagaagatttataccagataaagccatatggattgctggtctaaaattcaaggcaggttagttgacttaattctttggtgctggtgactgttagtttgtaaaagttcaataagtcagatgaaggaagggatggtgccgggagctgtcaagctgtactggtggggtctgtaattagagctaactggagggatcatgatgtctactgtccagtttggtgttgagccatggctctcggtagaagttgccggctggggcctggtcaggactggaaggagagtggtgggatgtgctgtgcctatggtgggctagctgcagccagtggggtgcctgccccacactgctgcccaccccttcatcagctgattctgctcccacataaagaaaggtgttggcttagtgtcacttcttcctagagccatgggagttttctgtcagcatgtttttgagctgtcctggtaacttggacgggaagcagtctggaggtgggtgccttccaaatctctgccacagaatctgaacttgcactttgcagcctgttagtcagagctgctaagtttgctctacctggtgtgcctcttggcaccacctgagagatgtatgtagagaggctgctaagaaatgagtgcccctggcatgaagacgtcatatcccagatgtttaacttctggctggagggagggaacttaatttggttcattatctactgggtacctttcctgtgcggaggggaggaccagtgactttccataataagctttctcctttaaaaaaacttcagactcttacttactcttttggttcacactaattagcattcattttccagagaaagctgcttgactttgaggaaataaagacaggtgtccttaaaaatggactgcaaatctggatcagtgtcaggtctgctttagggtccatgaaatcacccaagagtgttggtactaaaagtggtgtaggctgggcgcggtggctcgcgcctgtaatcccagcactttgggaggccaaggcgggtggatcacctgaggtcagacattcgagaccagcctggccaacatggtgaaaccctgtctctactaaaaatacaaaattagccaggcatggtggctggtgcttgtaatcccagctacttgagaggtcgaggcagaatcgcttgaaccaggaaggtggaggttgcagtgagccaagattgcaccactgcactccagcccggttgacaagagaaactccatctcaaaaaaaaaaaaaagaaaagtgcataggggtttgttcccccaccctctgaaagaccccaaggaaattctagaagcaaaaatttgacctcttggagcacagagactaagtataagtggaagaagcagacctaaccctcctcccaggcagtcagtcctatgagttttaggctgaggtttcattttagcctctgatcgatgtatctgtaaagctgatctaaactcccagtttcctagaagccactgctgtgagcctgggggttgtactgaatggctctgctggcacccaagagcagctgactccactgtcactgcccccgtttctgagcctccagacaggttctgggaggagccagccccctatgaattgtatcacttgtatagatagagatttgacttcaggacctccctggatggtggagattgtgtgtgcccatgtgtgcaaggagatagatagattctcaatccagtgaagcagtagccagctagaacagaacactgattgtgggctattaaaggagtttctcattagttatggcaccagattcccagcttccattttggctcaaaaaaggagcctaaaacccacttgtgggataatttaataagccattagatgcttggagggcaccaagccagccttgttgctgaaggatttactagaaagggcctaggagtccttcttccctttttgcttgctcttcccctagccccagttaatttaactatcactgtaaagctgctgtaaaccagaatccagttttttattcgtaaggcaccaggatagaactgttcttgccaccctcctatttcagtaattgcctgaatttccctgaaagggtgacatacttcacttcttgacatttaggaaggacagtggccactcagtggcaggtgactgtcccgaggatgcagtagacaagccagcatgctggctcagactgtaaattaggtagggtttgcatagctgtttctgactacaaaaatagcatgggtgttagttgaaacagtgcactgaaataagcagtggttaagttttgaacctgaatcctttaaagaaattagtctgaggtaaaatgttttaaatcatttttgaccttcagcttgtgcctctgacagagcttttgtcctaaagctgagagtagaagcaggattagatgtggtcatctgtggtgtggacacagcagacctgccatgtggactgacggtagatgggagaaccgcttgttagtgttctgggcttcctgatgatccccccctcctccccgtagaaagtctgtcatccgctgtgacagtgtcagtgaaaaagagaacaagtttccactgccagctctggccctcaccccaactcctttctctaagagtaacggggactgggcatagggaccccgggcaggagctagcggcatcctctaacaagaactacatctgtaaacaataaggagaaagccaggtggatagatgaaacctacaggagggcccttcaacaggcctaatagaagggtcacttccaaactggcacgagcagttaacagtgtcccttaaatctttctctggaaggaaggaaagatcaattacattcacaagttcacacttctgcctgtgctcctcaagggcagctgttgaggcctggaattcctcactggtcagagaggtgtgtactgattgtctatggcccgcaggtggctccgggaggatgagtccatttcgtagtccgagtcccgggctcgattcacaggctcatgctccaggtgctgcaggctgttggccagttcttcgggcgaaggcaccaggtggaagatctgctcggggggtgaggatcgccctgggagaccctctgggctgagcccccggggacagccagaagaactaaggtggggaaggcccaactctgaaccccagtgaggaagggactctgaatcccagtgaggaagggagaaagggaagaggaccgtgttgcaggaacctaggacaagtgaccaagagagaccacaccatcagtcttgaggcaagtgctgacaggacacagaacaagatacctgtacccctgggtctgcagcaagcctctaccctctacccagtgtcagccacccccttcagcaaagggcagtagggtcagacctggtggttgggagacgactaccacgtagctggagagccggacatcacaggcggcgccgcactcgagtgggatgggcgagcgctggaagtggtggagcatgtccacgaccgagggaaagtggaggtgctgcacacggcactggccccgctctgtcagcgacaggcgcaggtgctgtgggaggagaggatggtgggctcgggctgtccctctaggaccctgaactccagtggagaggggtggcacggtcctgcctgccccaccccaccccaccccaccccataccttggctatcccctgaaagttgaaagtgagcacgtattccccacgccgcgtctcgctctgccgcaccaggaacactccatgagcatcagggccctgcagctgaaccagctgagctgctttcactctggagatggggccgtggaaccaggggtagcaggacaggaaatggtccgtcttctggcaggccgggtccagcagccccccaggagaagcacctgttagataagatgggtgatggtggtcgcagggggctaccttatgtcctgggctgagtctgggttccagcgtacccagaagacaatggcctagctattggtttacccaccttggttaagggaatctgtgctgccccttggggagctggacgtgctaggctctagggctgagggaatatgcatctctgcttctgtgctctccagcctgctggagaagaggctgaggttaaggatctgggcaggtcaggggtggtagcagcaaaggtggtgccagggacgagggcccaggacctcaccctcggcctgtgcactccgagagctcagccatccatgaattcagctgctgctcgtctcccacctcaaagatgatgtctgtccggtccttcacctggcagggaggaagggaacagggttgggtctgctgtatgtgtatgtatttgtattgccccagggtgtgaaaagccttgtcactcaccttcagcacaaaggtgtaaaggttgtcaggcatctcaagccgtgtgcaccaccggacctcctggatgctggagcaagctgcttgtagcttgggccttgaactctacgagaccaagttggggtactcaaggcttgttcctgatgctctttcttccagccaggcctgagtttgtctatagtctccccaggagtcccccttttagagagagtatccatggtgttgctgggcaggctctgagcctgtagtgaggtccagggtgccttcccctagcctcctgaacaccattcacactgagatcccaagaagcatgtgctggcagaaggccagccctcccagcccattggacctggacttggagacattcccactctgccatgtgtctgacatccgtttctcttcccactggtgagcaaacagctccctgcccagccaggtgatagcagctgctgacggtctcatcacaccaagcccaaaggggcagagcctagcatggctagcctaagttatagccactgtaaaaccacaaaatcttggccctggaccttcccaggacacccggcacatagggctgcagggtggataggagttagccactgttcctttgccagcaggaaacctgctcccaggtctcaactgaccctgcagatgcttcctgtgctggggcactctgcagccaaggagccagctgcttccggttgggaatctgctcaggagggggtttgcccctccccttcctcttgtgataagactgaaaagatggccgaaagaagaaaaggggagaaagagatgagataaggaatggacagaagtggccccactgggccccctccattcaggtgttcctggaaaatactacaacccctaacaaactgggagcagggggatggaaagcagaggcagcccaaaggatgttctagcaactgtggcttcaggtgatctgacctccacctcagcccaaaagggcataccttggactggagctgctagtgctgttgaattgacccccaaaaccagatgcttaaccttgctttacacacagagctgccaggtacctctgtcggaaggatcatgacccagtggcctggccacctcctttatcccccttccccacctgcaggagagtcaatgaacagtgaggtaagagggcagcctggcaggagcaggatggccacctgggcccttccagcaggtctcctgggagctcccgggcctgctctggttggcggacacaacaggctgggggagagtaatgactgcaggaatgaccaacactggccacagctcactgcggcctctcactagaaagctgcatgactagaaaattccagcctgaagtgaccagcaccagccagggcattttcacctcctactcccagaggtccagcagccaggatgaggcaggcagagtgaggcctcacatggcatccacacgggcactggacacagcgcagtgtgcagggagtggggcctctgcgctcttgcccatttttacagccagccagccctgcagagccttcatttcctgtctgcaagatgggtaaggtgcgagtggccacttccttctgctacttttccagttggccctgcctggcccccacccttccccctagctgcaggccttaaggatcactgggaggatataggccaggcctggaggggaacgggcctagtctccctttcagttccgctccaggcctagtccccagtgtcagtgctgagattaaccagcagagctgccggtttcactctgactctggcccctgcaagccagctccacccccagcagctgaagaactgctgagcaggcaggcagtggtgaaaagaggattcccctcctcacccacagccagcctggctgccacctgcctgctggctgagcacaacccaggggttcttccccaactccccacagcagcccttgagagccgcccaggcctagagccacaatctcaacccaagcctgccaagtatcagagccggggtccgccacagctacctggtggtatgggtgtcctatgccagaggctccagccaggttgcagcgtgtgggcacatgggcgcaggacaacccctgcttcagtcgaaacctcagcctggacagctcaggctctggccactgcagggaaggaccaccagatgcccatcagattaagctatatggggggatgggtgagaggggagacaagctcaaacctgggggctgtgtcagcagctgtgggggctttaggttccctcctctcacatgcccgctattccacctccctcaaaagtcaagccaggccagcaacagctgctccctggacctgcttaggctctactgtggttgggtgatcaaagtggccagatcatttcaggtatttgtggtttgaacagtagactgtcacccaccacatcctgcagcgtctatttctggggagcaagtcttctccattcccagcatctaaacagatggcttctgtttgttatggccactgtggctccagtgggaataatctatttctttctttgctctggctgctaggaatctcaaagtcaaagacgtaggccagctctgacactaccccaacggtaggacttgtatttatttcaacagctaactttatcccagatgttatagttcttttatcctctagggttttttgtttttgtttttgttttttgagacagattctcactctgttgcccatgctggagtgcagtggcgcaatctcggctcactgcaacctccacctcctgagttcaagcgattctcctgcctcagcttccgcagtagctgggattacaggcacctgccaccacacccagctaatttttgtatttttagtagagctggggtttcaccatgttggttggccaggttggtctcgaacttctgacatcaggtgatccgcctgccttggcctcccaaagtgctgggattttaggcatgagccaccacgccgggccctaccctctaggttttaagattcagccctgaccctgccacttcctatacaaccctggacaaagggttcggctctccatgccttagttgtcatctgtaattcagctcattttttcacaaggtgagctaacacaagcgaaaggcatgactcgcacagctgttaacaggccggtgagtaaagcctgcttggctcccactacactactgacagcatgacagtcccctctgagtagcctagccactgggtacacccccagcttctctcagccttacagaactattgccccattttgtcacatgctcccttaccatcctgcaataaattccacgtaatataaccaacatactaccctaactaattacaagacagggacaacaaaggactgtcacttagccgaaataaaacgtgcttcagtgcaactgtagacaacacaaccaactacttggctgcttctgagtttgttgtgaaaagaaggctaagaacataagggagccaaagggcgggggagctaggaaagccagcctggttccagatccacccagggtccacatggaaatgcagttccaggctcccttcaaatggccctgtgctgtgatcagtccccctgcaaaggtctctgagccacagtcccgtcatctgagaagtgaagatgaaacaccagcctcgtggggtcacgcagctctccctgactcccgcctacctgaggatccctctttatcccacctggctgttcagcccgcctggagggaatgtgacgggctggaggcaacagacccttcctctctaggcctcacttgccctcatgctgttacctggaaactgtcttgctacctactgccccttctgtgtgctgagggacaggggacctgtcttggcacaaacatttatagggccaggatggtccttctagagtcttccgaggtactgggccacaccccaccctgccaggtcctcataaccagcttgagtggggtctgttactggctttgccctcaggcatccagcagagacaggcaagtcggggcagggcagggctggacacaccagtcaaaggccagagctctggtggcgtgaccacacctacgtggagagcaaggctgatggcatggcctcccctggtgagagagcaggaagaggcacaggtgagcctgccacagcagcccccagaagccaccatggggcttcaaggctgtgggaatcagcttgagctttttctaaggtggggaagctcttaacaggagcaggcctgctggctgtccccctcctcctgggacgctggagggcaggacacagggcagcatctgacacaccccagcagcaagggcttggcccagaccagccttggggagagaccgcccacccccgggaacccccaggccacactagctccctggtggtcttaccttccccagagcctttgagcccacattcatcggtgtacagcagcagtgggacaggcctcagtcgaccctccagcaccagccacgcctctgccacacctatgccctcaaggaggcatctggcagcctgggcctagctctgcaggtggttagaagagccctagctctaccacttacttacctttgaaaccttgggcaggacactaactggaggttcagtttgctttcagtaatagggggcccgtaagcaggtcctgttgaccttcttactggaggaggagagggagggggtctgaaaaggcgcagagcaaattccagatcctgtcctggatggctgatccctcaccccagcccagaacctgaagtggatgctgccgggatggatgaatgagcattattatggaaaatacttaatccaagcttactgtctagtatcaaaaagttaacctacttgggaagctgaggcaggagaatcacttgaacctgggagacagaggttgcagtgagctgagatcacaccactgtactctagactggtcgacagagtgagaccctgtcttaaaaaaaaaaaaattccttgccttcttccaaaaatgattttagtcaggttagagacacccagaaagagctgggagacagctgctacaacacagacaagagtccctcttgccacagatttgtctcagcttcctggcagccaatgcaaaggattctccgagagaggacagtcatttgtggaaagagaatgctgctgcttagctccattaaagactctgagaagtcctgcagcagagaaacctattaaacccatgcattacccagactttgacctatttcatagaccttattaccatcccaaggtaatatgggattgaggtgaggaaggtcctcacctcgcaaactctccttaaacgtggtgcgtctcagccattctctggggtgggcagcatcaagactgagcctagttgctaaaagccatccagtatcctgcccagaaatccctcagggctacagaaccatgcagc

SEQ ID NO: 149356 - skipped

SEQ ID NO: 149357 - RNA, 3993 nt, Homo sapiens
  source 1..3993: mol_type = mRNA
cccgagaaagcaacccagcgcgccgcccgctcctcacgtgtccctcccggccccggggccacctcacgttctgcttccgtctgacccctccgacttccgaggtcgaaacagtaacaaaggactgcctcagtctacgatttcttttgatggaatctatgcaaatatgaggatggttcatatacttacatcagttgttggctccaaatgtgaagtacaagtgaaaaatggaggtatatatgaaggagtttttaaaacttacagtccgaagtgtgatttggtacttgatgccgcacatgagaaaagtacagaatccagttcggggccgaaacgtgaagaaataatggagagtattttgttcaaatgttcagactttgttgtggtacagtttaaagatatggactccagttatgcaaaaagagatgcttttactgactctgctatcagtgctaaagtgaatggcgaacacaaagagaaggacctggagccctgggatgcaggtgaactcacagccaatgaggaacttgaggctttggaaaatgacgtatctaatggatgggatcccaatgatatgtttcgatataatgaagaaaattatggtgtagtgtctacgtatgatagcagtttatcttcgtatacagtgcccttagaaagagataactcagaagaatttttaaaacgggaagcaagggcaaaccagttagcagaagaaattgagtcaagtgcccagtacaaagctcgagtggccctggaaaatgatgataggagtgaggaagaaaaatacacagcagttcagagaaattccagtgaacgtgaggggcacagcataaacactagggaaaataaatatattcctcctggacaaagaaatagagaagtcatatcctggggaagtgggagacagaattcaccgcgtatgggccagcctggatcgggctccatgccatcaagatccacttctcacacttcagatttcaacccgaattctggttcagaccaaagagtagttaatggaggtgttccctggccatcgccttgcccatctccttcctctcgcccaccttctcgctaccagtcaggtcccaactctcttccacctcgggcagccacccctacacggccgccctccaggcccccctcgcggccatccagacccccgtctcacccctctgctcatggttctccagctcctgtctctactatgcctaaacgcatgtcttcagaagggcctccaaggatgtccccaaaggcccagcgacatcctcgaaatcacagagtttctgctgggaggggttccatatccagtggcctagaatttgtatcccacaacccacccagtgaagcagctactcctccagtagcaaggaccagtccctcggggggaacgtggtcatcagtggtcagtggggttccaagattatcccctaaaactcatagacccaggtctcccagacagaacagtattggaaatacccccagtgggccagttcttgcttctccccaagctggtattattccaactgaagctgttgccatgcctattccagctgcatctcctacgcctgctagtcctgcatcgaacagagctgttaccccttctagtgaggctaaagattccaggcttcaagatcagaggcagaactctcctgcagggaataaagaaaatattaaacccaatgaaacatcacctagcttctcaaaagctgaaaacaaaggtatatcaccagttgtttctgaacatagaaaacagattgatgatttaaagaaatttaagaatgattttaggttacagccaagttctacttctgaatctatggatcaactactaaacaaaaatagagagggagaaaaatcaagagatttgatcaaagacaaaattgaaccaagtgctaaggattctttcattgaaaatagcagcagcaactgtaccagtggcagcagcaagccgaatagccccagcatttccccttcaatacttagtaacacggagcacaagaggggacctgaggtcacttcccaaggggttcagacttccagcccagcatgtaaacaagagaaagacgataaggaagagaagaaagacgcagctgagcaagttaggaaatcaacattgaatcccaatgcaaaggagttcaacccacgttccttctctcagccaaagccttctactaccccaacttcacctcggcctcaagcacaacctagcccatctatggtgggtcatcaacagccaactccagtttatactcagcctgtttgttttgcaccaaatatgatgtatccagtcccagtgagcccaggcgtgcaacctttatacccaatacctatgacgcccatgccagtgaatcaagccaagacatatagagcagtaccaaatatgccccaacagcggcaagaccagcatcatcagagtgccatgatgcacccagcgtcagcagcgggcccaccgattgcagccaccccaccagcttactccacgcaatatgttgcctacagtcctcagcagttcccaaatcagccccttgttcagcatgtgccacattatcagtctcagcatcctcatgtctatagtcctgtaatacagggtaatgctagaatgatggcaccaccaacacacgcccagcctggtttagtatcttcttcagcaactcagtacggggctcatgagcagacgcatgcgatgtatgcatgtcccaaattaccatacaacaaggagacaagcccttctttctactttgccatttccacgggctcccttgctcagcagtatgcgcaccctaacgctaccctgcacccacatactccacaccctcagccttcagctacccccactggacagcagcaaagccaacatggtggaagtcatcctgcacccagtcctgttcagcaccatcagcaccaggccgcccaggctctccatctggccagtccacagcagcagtcagccatttaccacgcggggcttgcgccaactccaccctccatgacacctgcctccaacacgcagtcgccacagaatagtttcccagcagcacaacagactgtctttacgatccatccttctcacgttcagccggcgtataccaacccaccccacatggcccacgtacctcagtgcgccagtgaggctctggcaaggtgtgggctagagatgcgactcagttggatctatctctcagaaggctaccttgctcatgtacagtcaggaatggttccttctcatccaactgcccatgcgccaatgatgctaatgacgacacagccacccggcggtccccaggccgccctcgctcaaagtgcactacagcccattccagtctcgacaacagcgcatttcccctatatgacgcacccttcagtacaagcccaccaccaacagcagttgtaaggctgccctggaggaaccgaaaggccaaattccctcctcccttctactgcttctaccaactggaagcacagaaaactagaatttcatttattttgtttttaaaatatatatgttgatttcttgtaacatccaataggaatgctaacagttcacttgcagtggaagatacttggaccgagtagaggcatttaggaacttgggggctattccataattccatatgctgtttcagagtcccgcaggtaccccagctctgcttgccgaaactggaagttatttattttttaataacccttgaaagtcatgaacacatcagctagcaaaagaagtaacaagagtgattcttgctgctattactgctaaaaaaaaaaaaaaaaaaaaatcaagacttggaacgcccttttactaaacttgacaaagtttcagtaaattcttaccgtcaaactgacggattattatttataaatcaagtttgatgaggtgatcactgtctacagtggttcaacttttaagttaagggaaaaacttttactttgtagataatataaaataaaaacttaaaaaaaatttaaaaaataaaaaaagttttaaaaactgaaaaaaaaaaa

SEQ ID NO: 149358 - RNA, 3755 nt, Homo sapiens
  source 1..3755: mol_type = mRNA
cccgagaaagcaacccagcgcgccgcccgctcctcacgtgtccctcccggccccggggccacctcacgttctgcttccgtctgacccctccgacttccgatttcttttgatggaatctatgcaaatatgaggatggttcatatacttacatcagttgtttgtgatttggtacttgatgccgcacatgagaaaagtacagaatccagttcggggccgaaacgtgaagaaataatggagagtattttgttcaaatgttcagactttgttgtggtacagtttaaagatatggactccagttatgcaaaaagagatgcttttactgactctgctatcagtgctaaagtgaatggcgaacacaaagagaaggacctggagccctgggatgcaggtgaactcacagccaatgaggaacttgaggctttggaaaatgacgtatctaatggatgggatcccaatgatatgtttcgatataatgaagaaaattatggtgtagtgtctacgtatgatagcagtttatcttcgtatacagtgcccttagaaagagataactcagaagaatttttaaaacgggaagcaagggcaaaccagttagcagaagaaattgagtcaagtgcccagtacaaagctcgagtggccctggaaaatgatgataggagtgaggaagaaaaatacacagcagttcagagaaattccagtgaacgtgaggggcacagcataaacactagggaaaataaatatattcctcctggacaaagaaatagagaagtcatatcctggggaagtgggagacagaattcaccgcgtatgggccagcctggatcgggctccatgccatcaagatccacttctcacacttcagatttcaacccgaattctggttcagaccaaagagtagttaatggaggtgttccctggccatcgccttgcccatctccttcctctcgcccaccttctcgctaccagtcaggtcccaactctcttccacctcgggcagccacccctacacggccgccctccaggcccccctcgcggccatccagacccccgtctcacccctctgctcatggttctccagctcctgtctctactatgcctaaacgcatgtcttcagaagggcctccaaggatgtccccaaaggcccagcgacatcctcgaaatcacagagtttctgctgggaggggttccatatccagtggcctagaatttgtatcccacaacccacccagtgaagcagctactcctccagtagcaaggaccagtccctcggggggaacgtggtcatcagtggtcagtggggttccaagattatcccctaaaactcatagacccaggtctcccagacagaacagtattggaaatacccccagtgggccagttcttgcttctccccaagctggtattattccaactgaagctgttgccatgcctattccagctgcatctcctacgcctgctagtcctgcatcgaacagagctgttaccccttctagtgaggctaaagattccaggcttcaagatcagaggcagaactctcctgcagggaataaagaaaatattaaacccaatgaaacatcacctagcttctcaaaagctgaaaacaaaggtatatcaccagttgtttctgaacatagaaaacagattgatgatttaaagaaatttaagaatgattttaggttacagccaagttctacttctgaatctatggatcaactactaaacaaaaatagagagggagaaaaatcaagagatttgatcaaagacaaaattgaaccaagtgctaaggattctttcattgaaaatagcagcagcaactgtaccagtggcagcagcaagccgaatagccccagcatttccccttcaatacttagtaacacggagcacaagaggggacctgaggtcacttcccaaggggttcagacttccagcccagcatgtaaacaagagaaagacgataaggaagagaagaaagacgcagctgagcaagttaggaaatcaacattgaatcccaatgcaaaggagttcaacccacgttccttctctcagccaaagccttctactaccccaacttcacctcggcctcaagcacaacctagcccatctatggtgggtcatcaacagccaactccagtttatactcagcctgtttgttttgcaccaaatatgatgtatccagtcccagtgagcccaggcgtgcaacctttatacccaatacctatgacgcccatgccagtgaatcaagccaagacatatagagcagtaccaaatatgccccaacagcggcaagaccagcatcatcagagtgccatgatgcacccagcgtcagcagcgggcccaccgattgcagccaccccaccagcttactccacgcaatatgttgcctacagtcctcagcagttcccaaatcagccccttgttcagcatgtgccacattatcagtctcagcatcctcatgtctatagtcctgtaatacagggtaatgctagaatgatggcaccaccaacacacgcccagcctggtttagtatcttcttcagcaactcagtacggggctcatgagcagacgcatgcgatgtatgtttccacgggctcccttgctcagcagtatgcgcaccctaacgctaccctgcacccacatactccacaccctcagccttcagctacccccactggacagcagcaaagccaacatggtggaagtcatcctgcacccagtcctgttcagcaccatcagcaccaggccgcccaggctctccatctggccagtccacagcagcagtcagccatttaccacgcggggcttgcgccaactccaccctccatgacacctgcctccaacacgcagtcgccacagaatagtttcccagcagcacaacagactgtctttacgatccatccttctcacgttcagccggcgtataccaacccaccccacatggcccacgtacctcaggctcatgtacagtcaggaatggttccttctcatccaactgcccatgcgccaatgatgctaatgacgacacagccacccggcggtccccaggccgccctcgctcaaagtgcactacagcccattccagtctcgacaacagcgcatttcccctatatgacgcacccttcagtacaagcccaccaccaacagcagttgtaaggctgccctggaggaaccgaaaggccaaattccctcctcccttctactgcttctaccaactggaagcacagaaaactagaatttcatttattttgtttttaaaatatatatgttgatttcttgtaacatccaataggaatgctaacagttcacttgcagtggaagatacttggaccgagtagaggcatttaggaacttgggggctattccataattccatatgctgtttcagagtcccgcaggtaccccagctctgcttgccgaaactggaagttatttattttttaataacccttgaaagtcatgaacacatcagctagcaaaagaagtaacaagagtgattcttgctgctattactgctaaaaaaaaaaaaaaaaaaaaatcaagacttggaacgcccttttactaaacttgacaaagtttcagtaaattcttaccgtcaaactgacggattattatttataaatcaagtttgatgaggtgatcactgtctacagtggttcaacttttaagttaagggaaaaacttttactttgtagataatataaaataaaaacttaaaaaaaatttaaaaaataaaaaaagttttaaaaactgaaaaaaaaaaa

SEQ ID NO: 149359 - RNA, 4347 nt, Homo sapiens
  source 1..4347: mol_type = mRNA
agagctcgcctccctccgcctcagactgttttggtagcaacggcaacggcggcggcgcgtttcggcccggctcccggcggctccttggtctcggcgggcctccccgccccttcgtcgtcctccttctccccctcgccagcccgggcgcccctccggccgcgccaacccgcgcctccccgctcggcgcccgcgcgtccccgccgcgttccggcgtctccttggcgcgcccggctcccggctgtccccgcccggcgtgcgagccggtgtatgggcccctcaccatgtcgctgaagccccagcagcagcagcagcagcagcagcagcagcagcagcagcaacagcagcagcagcagcagcagcagcagccgccgcccgcggctgccaatgtccgcaagcccggcggcagcggccttctagcgtcgcccgccgccgcgccttcgccgtcctcgtcctcggtctcctcgtcctcggccacggctccctcctcggtggtcgcggcgacctccggcggcgggaggcccggcctgggcagaggtcgaaacagtaacaaaggactgcctcagtctacgatttcttttgatggaatctatgcaaatatgaggatggttcatatacttacatcagttgttggctccaaatgtgaagtacaagtgaaaaatggaggtatatatgaaggagtttttaaaacttacagtccgaagtgtgatttggtacttgatgccgcacatgagaaaagtacagaatccagttcggggccgaaacgtgaagaaataatggagagtattttgttcaaatgttcagactttgttgtggtacagtttaaagatatggactccagttatgcaaaaagagatgcttttactgactctgctatcagtgctaaagtgaatggcgaacacaaagagaaggacctggagccctgggatgcaggtgaactcacagccaatgaggaacttgaggctttggaaaatgacgtatctaatggatgggatcccaatgatatgtttcgatataatgaagaaaattatggtgtagtgtctacgtatgatagcagtttatcttcgtatacagtgcccttagaaagagataactcagaagaatttttaaaacgggaagcaagggcaaaccagttagcagaagaaattgagtcaagtgcccagtacaaagctcgagtggccctggaaaatgatgataggagtgaggaagaaaaatacacagcagttcagagaaattccagtgaacgtgaggggcacagcataaacactagggaaaataaatatattcctcctggacaaagaaatagagaagtcatatcctggggaagtgggagacagaattcaccgcgtatgggccagcctggatcgggctccatgccatcaagatccacttctcacacttcagatttcaacccgaattctggttcagaccaaagagtagttaatggaggtgttccctggccatcgccttgcccatctccttcctctcgcccaccttctcgctaccagtcaggtcccaactctcttccacctcgggcagccacccctacacggccgccctccaggcccccctcgcggccatccagacccccgtctcacccctctgctcatggttctccagctcctgtctctactatgcctaaacgcatgtcttcagaagggcctccaaggatgtccccaaaggcccagcgacatcctcgaaatcacagagtttctgctgggaggggttccatatccagtggcctagaatttgtatcccacaacccacccagtgaagcagctactcctccagtagcaaggaccagtccctcggggggaacgtggtcatcagtggtcagtggggttccaagattatcccctaaaactcatagacccaggtctcccagacagaacagtattggaaatacccccagtgggccagttcttgcttctccccaagctggtattattccaactgaagctgttgccatgcctattccagctgcatctcctacgcctgctagtcctgcatcgaacagagctgttaccccttctagtgaggctaaagattccaggcttcaagatcagaggcagaactctcctgcagggaataaagaaaatattaaacccaatgaaacatcacctagcttctcaaaagctgaaaacaaaggtatatcaccagttgtttctgaacatagaaaacagattgatgatttaaagaaatttaagaatgattttaggttacagccaagttctacttctgaatctatggatcaactactaaacaaaaatagagagggagaaaaatcaagagatttgatcaaagacaaaattgaaccaagtgctaaggattctttcattgaaaatagcagcagcaactgtaccagtggcagcagcaagccgaatagccccagcatttccccttcaatacttagtaacacggagcacaagaggggacctgaggtcacttcccaaggggttcagacttccagcccagcatgtaaacaagagaaagacgataaggaagagaagaaagacgcagctgagcaagttaggaaatcaacattgaatcccaatgcaaaggagttcaacccacgttccttctctcagccaaagccttctactaccccaacttcacctcggcctcaagcacaacctagcccatctatggtgggtcatcaacagccaactccagtttatactcagcctgtttgttttgcaccaaatatgatgtatccagtcccagtgagcccaggcgtgcaacctttatacccaatacctatgacgcccatgccagtgaatcaagccaagacatatagagcaggtaaagtaccaaatatgccccaacagcggcaagaccagcatcatcagagtgccatgatgcacccagcgtcagcagcgggcccaccgattgcagccaccccaccagcttactccacgcaatatgttgcctacagtcctcagcagttcccaaatcagccccttgttcagcatgtgccacattatcagtctcagcatcctcatgtctatagtcctgtaatacagggtaatgctagaatgatggcaccaccaacacacgcccagcctggtttagtatcttcttcagcaactcagtacggggctcatgagcagacgcatgcgatgtatgcatgtcccaaattaccatacaacaaggagacaagcccttctttctactttgccatttccacgggctcccttgctcagcagtatgcgcaccctaacgctaccctgcacccacatactccacaccctcagccttcagctacccccactggacagcagcaaagccaacatggtggaagtcatcctgcacccagtcctgttcagcaccatcagcaccaggccgcccaggctctccatctggccagtccacagcagcagtcagccatttaccacgcggggcttgcgccaactccaccctccatgacacctgcctccaacacgcagtcgccacagaatagtttcccagcagcacaacagactgtctttacgatccatccttctcacgttcagccggcgtataccaacccaccccacatggcccacgtacctcaggctcatgtacagtcaggaatggttccttctcatccaactgcccatgcgccaatgatgctaatgacgacacagccacccggcggtccccaggccgccctcgctcaaagtgcactacagcccattccagtctcgacaacagcgcatttcccctatatgacgcacccttcagtacaagcccaccaccaacagcagttgtaaggctgccctggaggaaccgaaaggccaaattccctcctcccttctactgcttctaccaactggaagcacagaaaactagaatttcatttattttgtttttaaaatatatatgttgatttcttgtaacatccaataggaatgctaacagttcacttgcagtggaagatacttggaccgagtagaggcatttaggaacttgggggctattccataattccatatgctgtttcagagtcccgcaggtaccccagctctgcttgccgaaactggaagttatttattttttaataacccttgaaagtcatgaacacatcagctagcaaaagaagtaacaagagtgattcttgctgctattactgctaaaaaaaaaaaaaaaaaaaaatcaagacttggaacgcccttttactaaacttgacaaagtttcagtaaattcttaccgtcaaactgacggattattatttataaatcaagtttgatgaggtgatcactgtctacagtggttcaacttttaagttaagggaaaaacttttactttgtagataatataaaataaaaacttaaaaaaaatttaaaaaataaaaaaagttttaaaaactga

SEQ ID NO: 149360 - RNA, 4341 nt, Homo sapiens
  source 1..4341: mol_type = mRNA
agagctcgcctccctccgcctcagactgttttggtagcaacggcaacggcggcggcgcgtttcggcccggctcccggcggctccttggtctcggcgggcctccccgccccttcgtcgtcctccttctccccctcgccagcccgggcgcccctccggccgcgccaacccgcgcctccccgctcggcgcccgcgcgtccccgccgcgttccggcgtctccttggcgcgcccggctcccggctgtccccgcccggcgtgcgagccggtgtatgggcccctcaccatgtcgctgaagccccagcagcagcagcagcagcagcagcagcagcagcagcagcaacagcagcagcagcagcagcagcagcagccgccgcccgcggctgccaatgtccgcaagcccggcggcagcggccttctagcgtcgcccgccgccgcgccttcgccgtcctcgtcctcggtctcctcgtcctcggccacggctccctcctcggtggtcgcggcgacctccggcggcgggaggcccggcctgggcagaggtcgaaacagtaacaaaggactgcctcagtctacgatttcttttgatggaatctatgcaaatatgaggatggttcatatacttacatcagttgttggctccaaatgtgaagtacaagtgaaaaatggaggtatatatgaaggagtttttaaaacttacagtccgaagtgtgatttggtacttgatgccgcacatgagaaaagtacagaatccagttcggggccgaaacgtgaagaaataatggagagtattttgttcaaatgttcagactttgttgtggtacagtttaaagatatggactccagttatgcaaaaagagatgcttttactgactctgctatcagtgctaaagtgaatggcgaacacaaagagaaggacctggagccctgggatgcaggtgaactcacagccaatgaggaacttgaggctttggaaaatgacgtatctaatggatgggatcccaatgatatgtttcgatataatgaagaaaattatggtgtagtgtctacgtatgatagcagtttatcttcgtatacagtgcccttagaaagagataactcagaagaatttttaaaacgggaagcaagggcaaaccagttagcagaagaaattgagtcaagtgcccagtacaaagctcgagtggccctggaaaatgatgataggagtgaggaagaaaaatacacagcagttcagagaaattccagtgaacgtgaggggcacagcataaacactagggaaaataaatatattcctcctggacaaagaaatagagaagtcatatcctggggaagtgggagacagaattcaccgcgtatgggccagcctggatcgggctccatgccatcaagatccacttctcacacttcagatttcaacccgaattctggttcagaccaaagagtagttaatggaggtgttccctggccatcgccttgcccatctccttcctctcgcccaccttctcgctaccagtcaggtcccaactctcttccacctcgggcagccacccctacacggccgccctccaggcccccctcgcggccatccagacccccgtctcacccctctgctcatggttctccagctcctgtctctactatgcctaaacgcatgtcttcagaagggcctccaaggatgtccccaaaggcccagcgacatcctcgaaatcacagagtttctgctgggaggggttccatatccagtggcctagaatttgtatcccacaacccacccagtgaagcagctactcctccagtagcaaggaccagtccctcggggggaacgtggtcatcagtggtcagtggggttccaagattatcccctaaaactcatagacccaggtctcccagacagaacagtattggaaatacccccagtgggccagttcttgcttctccccaagctggtattattccaactgaagctgttgccatgcctattccagctgcatctcctacgcctgctagtcctgcatcgaacagagctgttaccccttctagtgaggctaaagattccaggcttcaagatcagaggcagaactctcctgcagggaataaagaaaatattaaacccaatgaaacatcacctagcttctcaaaagctgaaaacaaaggtatatcaccagttgtttctgaacatagaaaacagattgatgatttaaagaaatttaagaatgattttaggttacagccaagttctacttctgaatctatggatcaactactaaacaaaaatagagagggagaaaaatcaagagatttgatcaaagacaaaattgaaccaagtgctaaggattctttcattgaaaatagcagcagcaactgtaccagtggcagcagcaagccgaatagccccagcatttccccttcaatacttagtaacacggagcacaagaggggacctgaggtcacttcccaaggggttcagacttccagcccagcatgtaaacaagagaaagacgataaggaagagaagaaagacgcagctgagcaagttaggaaatcaacattgaatcccaatgcaaaggagttcaacccacgttccttctctcagccaaagccttctactaccccaacttcacctcggcctcaagcacaacctagcccatctatggtgggtcatcaacagccaactccagtttatactcagcctgtttgttttgcaccaaatatgatgtatccagtcccagtgagcccaggcgtgcaacctttatacccaatacctatgacgcccatgccagtgaatcaagccaagacatatagagcagtaccaaatatgccccaacagcggcaagaccagcatcatcagagtgccatgatgcacccagcgtcagcagcgggcccaccgattgcagccaccccaccagcttactccacgcaatatgttgcctacagtcctcagcagttcccaaatcagccccttgttcagcatgtgccacattatcagtctcagcatcctcatgtctatagtcctgtaatacagggtaatgctagaatgatggcaccaccaacacacgcccagcctggtttagtatcttcttcagcaactcagtacggggctcatgagcagacgcatgcgatgtatgcatgtcccaaattaccatacaacaaggagacaagcccttctttctactttgccatttccacgggctcccttgctcagcagtatgcgcaccctaacgctaccctgcacccacatactccacaccctcagccttcagctacccccactggacagcagcaaagccaacatggtggaagtcatcctgcacccagtcctgttcagcaccatcagcaccaggccgcccaggctctccatctggccagtccacagcagcagtcagccatttaccacgcggggcttgcgccaactccaccctccatgacacctgcctccaacacgcagtcgccacagaatagtttcccagcagcacaacagactgtctttacgatccatccttctcacgttcagccggcgtataccaacccaccccacatggcccacgtacctcaggctcatgtacagtcaggaatggttccttctcatccaactgcccatgcgccaatgatgctaatgacgacacagccacccggcggtccccaggccgccctcgctcaaagtgcactacagcccattccagtctcgacaacagcgcatttcccctatatgacgcacccttcagtacaagcccaccaccaacagcagttgtaaggctgccctggaggaaccgaaaggccaaattccctcctcccttctactgcttctaccaactggaagcacagaaaactagaatttcatttattttgtttttaaaatatatatgttgatttcttgtaacatccaataggaatgctaacagttcacttgcagtggaagatacttggaccgagtagaggcatttaggaacttgggggctattccataattccatatgctgtttcagagtcccgcaggtaccccagctctgcttgccgaaactggaagttatttattttttaataacccttgaaagtcatgaacacatcagctagcaaaagaagtaacaagagtgattcttgctgctattactgctaaaaaaaaaaaaaaaaaaaaatcaagacttggaacgcccttttactaaacttgacaaagtttcagtaaattcttaccgtcaaactgacggattattatttataaatcaagtttgatgaggtgatcactgtctacagtggttcaacttttaagttaagggaaaaacttttactttgtagataatataaaataaaaacttaaaaaaaatttaaaaaataaaaaaagttttaaaaactga

SEQ ID NO: 149361 - RNA, 4280 nt, Homo sapiens
  source 1..4280: mol_type = genomic RNA
agagctcgcctccctccgcctcagactgttttggtagcaacggcaacggcggcggcgcgtttcggcccggctcccggcggctccttggtctcggcgggcctccccgccccttcgtcgtcctccttctccccctcgccagcccgggcgcccctccggccgcgccaacccgcgcctccccgctcggcgcccgcgcgtccccgccgcgttccggcgtctccttggcgcgcccggctcccggctgtccccgcccggcgtgcgagccggtgtatgggcccctcaccatgtcgctgaagccccagcagcagcagcagcagcagcagcagcagcagcagcagcaacagcagcagcagcagcagcagcagcagccgccgcccgcggctgccaatgtccgcaagcccggcggcagcggccttctagcgtcgcccgccgccgcgccttcgccgtcctcgtcctcggtctcctcgtcctcggccacggctccctcctcggtggtcgcggcgacctccggcggcgggaggcccggcctgggcagaggtcgaaacagtaacaaaggactgcctcagtctacgatttcttttgatggaatctatgcaaatatgaggatggttcatatacttacatcagttgttggctccaaatgtgaagtacaagtgaaaaatggaggtatatatgaaggagtttttaaaacttacagtccgaagtgtgatttggtacttgatgccgcacatgagaaaagtacagaatccagttcggggccgaaacgtgaagaaataatggagagtattttgttcaaatgttcagactttgttgtggtacagtttaaagatatggactccagttatgcaaaaagagatgcttttactgactctgctatcagtgctaaagtgaatggcgaacacaaagagaaggacctggagccctgggatgcaggtgaactcacagccaatgaggaacttgaggctttggaaaatgacgtatctaatggatgggatcccaatgatatgtttcgatataatgaagaaaattatggtgtagtgtctacgtatgatagcagtttatcttcgtatacagtgcccttagaaagagataactcagaagaatttttaaaacgggaagcaagggcaaaccagttagcagaagaaattgagtcaagtgcccagtacaaagctcgagtggccctggaaaatgatgataggagtgaggaagaaaaatacacagcagttcagagaaattccagtgaacgtgaggggcacagcataaacactagggaaaataaatatattcctcctggacaaagaaatagagaagtcatatcctggggaagtgggagacagaattcaccgcgtatgggccagcctggatcgggctccatgccatcaagatccacttctcacacttcagatttcaacccgaattctggttcagaccaaagagtagttaatggaggtgttccctggccatcgccttgcccatctccttcctctcgcccaccttctcgctaccagtcaggtcccaactctcttccacctcgggcagccacccctacacggccgccctccaggcccccctcgcggccatccagacccccgtctcacccctctgctcatggttctccagctcctgtctctactatgcctaaacgcatgtcttcagaagggcctccaaggatgtccccaaaggcccagcgacatcctcgaaatcacagagtttctgctgggaggggttccatatccagtggcctagaatttgtatcccacaacccacccagtgaagcagctactcctccagtagcaaggaccagtccctcggggggaacgtggtcatcagtggtcagtggggttccaagattatcccctaaaactcatagacccaggtctcccagacagaacagtattggaaatacccccagtgggccagttcttgcttctccccaagctggtattattccaactgaagctgttgccatgcctattccagctgcatctcctacgcctgctagtcctgcatcgaacagagctgttaccccttctagtgaggctaaagattccaggcttcaagatcagaggcagaactctcctgcagggaataaagaaaatattaaacccaatgaaacatcacctagcttctcaaaagctgaaaacaaaggtatatcaccagttgtttctgaacatagaaaacagattgatgatttaaagaaatttaagaatgattttaggttacagccaagttctacttctgaatctatggatcaactactaaacaaaaatagagagggagaaaaatcaagagatttgatcaaagacaaaattgaaccaagtgctaaggattctttcattgaaaatagcagcagcaactgtaccagtggcagcagcaagccgaatagccccagcatttccccttcaatacttagtaacacggagcacaagaggggacctgaggtcacttcccaaggggttcagacttccagcccagcatgtaaacaagagaaagacgataaggaagagaagaaagacgcagctgagcaagttaggaaatcaacattgaatcccaatgcaaaggagttcaacccacgttccttctctcagccaaagccttctactaccccaacttcacctcggcctcaagcacaacctagcccatctatggtgggtcatcaacagccaactccagtttatactcagcctgtttgttttgcaccaaatatgatgtatccagtcccagtgagcccaggcgtgcaataccaaatatgccccaacagcggcaagaccagcatcatcagagtgccatgatgcacccagcgtcagcagcgggcccaccgattgcagccaccccaccagcttactccacgcaatatgttgcctacagtcctcagcagttcccaaatcagccccttgttcagcatgtgccacattatcagtctcagcatcctcatgtctatagtcctgtaatacagggtaatgctagaatgatggcaccaccaacacacgcccagcctggtttagtatcttcttcagcaactcagtacggggctcatgagcagacgcatgcgatgtatgcatgtcccaaattaccatacaacaaggagacaagcccttctttctactttgccatttccacgggctcccttgctcagcagtatgcgcaccctaacgctaccctgcacccacatactccacaccctcagccttcagctacccccactggacagcagcaaagccaacatggtggaagtcatcctgcacccagtcctgttcagcaccatcagcaccaggccgcccaggctctccatctggccagtccacagcagcagtcagccatttaccacgcggggcttgcgccaactccaccctccatgacacctgcctccaacacgcagtcgccacagaatagtttcccagcagcacaacagactgtctttacgatccatccttctcacgttcagccggcgtataccaacccaccccacatggcccacgtacctcaggctcatgtacagtcaggaatggttccttctcatccaactgcccatgcgccaatgatgctaatgacgacacagccacccggcggtccccaggccgccctcgctcaaagtgcactacagcccattccagtctcgacaacagcgcatttcccctatatgacgcacccttcagtacaagcccaccaccaacagcagttgtaaggctgccctggaggaaccgaaaggccaaattccctcctcccttctactgcttctaccaactggaagcacagaaaactagaatttcatttattttgtttttaaaatatatatgttgatttcttgtaacatccaataggaatgctaacagttcacttgcagtggaagatacttggaccgagtagaggcatttaggaacttgggggctattccataattccatatgctgtttcagagtcccgcaggtaccccagctctgcttgccgaaactggaagttatttattttttaataacccttgaaagtcatgaacacatcagctagcaaaagaagtaacaagagtgattcttgctgctattactgctaaaaaaaaaaaaaaaaaaaaatcaagacttggaacgcccttttactaaacttgacaaagtttcagtaaattcttaccgtcaaactgacggattattatttataaatcaagtttgatgaggtgatcactgtctacagtggttcaacttttaagttaagggaaaaacttttactttgtagataatataaaataaaaacttaaaaaaaatttaaaaaataaaaaaagttttaaaaactga

SEQ ID NO: 149362 - DNA, 20 bp, synthetic construct
  source 1..20: mol_type = other DNA
gctgcaggagactacgacgc

SEQ ID NO: 149363 - DNA, 20 bp, synthetic construct
  source 1..20: mol_type = other DNA
cgctgcaggagactacgacg

SEQ ID NO: 149364 - DNA, 20 bp, synthetic construct
  source 1..20: mol_type = other DNA
acgctgcaggagactacgac

SEQ ID NO: 149365 - DNA, 20 bp, synthetic construct
  source 1..20: mol_type = other DNA
gacgctgcaggagactacga

SEQ ID NO: 149366 - DNA, 20 bp, synthetic construct
  source 1..20: mol_type = other DNA
agacgctgcaggagactacg

SEQ ID NO: 149367 - DNA, 20 bp, synthetic construct
  source 1..20: mol_type = other DNA
cagacgctgcaggagactac

SEQ ID NO: 149368 - DNA, 20 bp, synthetic construct
  source 1..20: mol_type = other DNA
ccagacgctgcaggagacta

SEQ ID NO: 149369 - DNA, 20 bp, synthetic construct
  source 1..20: mol_type = other DNA
cccagacgctgcaggagact

SEQ ID NO: 149370 - DNA, 20 bp, synthetic construct
  source 1..20: mol_type = other DNA
ccccagacgctgcaggagac

SEQ ID NO: 149371 - DNA, 20 bp, synthetic construct
  source 1..20: mol_type = other DNA
accccagacgctgcaggaga

SEQ ID NO: 149372 - DNA, 20 bp, synthetic construct
  source 1..20: mol_type = other DNA
aaccccagacgctgcaggag

SEQ ID NO: 149373 - DNA, 20 bp, synthetic construct
  source 1..20: mol_type = other DNA
aaaccccagacgctgcagga

SEQ ID NO: 149374 - DNA, 20 bp, synthetic construct
  source 1..20: mol_type = other DNA
gaaaccccagacgctgcagg

SEQ ID NO: 149375 - DNA, 20 bp, synthetic construct
  source 1..20: mol_type = other DNA
ggaaaccccagacgctgcag

SEQ ID NO: 149376 - DNA, 20 bp, synthetic construct
  source 1..20: mol_type = other DNA
cggaaaccccagacgctgca

SEQ ID NO: 149377 - DNA, 20 bp, synthetic construct
  source 1..20: mol_type = other DNA
acggaaaccccagacgctgc

SEQ ID NO: 149378 - DNA, 20 bp, synthetic construct
  source 1..20: mol_type = other DNA
aacggaaaccccagacgctg

SEQ ID NO: 149379 - DNA, 20 bp, synthetic construct
  source 1..20: mol_type = other DNA
caacggaaaccccagacgct

SEQ ID NO: 149380 - DNA, 20 bp, synthetic construct
  source 1..20: mol_type = other DNA
gcaacggaaaccccagacgc

SEQ ID NO: 149381 - DNA, 20 bp, synthetic construct
  source 1..20: mol_type = other DNA
tgcaacggaaaccccagacg

SEQ ID NO: 149382 - DNA, 20 bp, synthetic construct
  source 1..20: mol_type = other DNA
ctgcaacggaaaccccagac

SEQ ID NO: 149383 - DNA, 20 bp, synthetic construct
  source 1..20: mol_type = other DNA
actgcaacggaaaccccaga

SEQ ID NO: 149384 - DNA, 20 bp, synthetic construct
  source 1..20: mol_type = other DNA
gactgcaacggaaaccccag

SEQ ID NO: 149385 - DNA, 20 bp, synthetic construct
  source 1..20: mol_type = other DNA
ggactgcaacggaaacccca

SEQ ID NO: 149386 - DNA, 20 bp, synthetic construct
  source 1..20: mol_type = other DNA
aggactgcaacggaaacccc

SEQ ID NO: 149387 - DNA, 20 bp, synthetic construct
  source 1..20: mol_type = other DNA
gaggactgcaacggaaaccc

SEQ ID NO: 149388 - DNA, 20 bp, synthetic construct
  source 1..20: mol_type = other DNA
cgaggactgcaacggaaacc

SEQ ID NO: 149389 - DNA, 20 bp, synthetic construct
  source 1..20: mol_type = other DNA
ccgaggactgcaacggaaac

SEQ ID NO: 149390 - DNA, 20 bp, synthetic construct
  source 1..20: mol_type = other DNA
tccgaggactgcaacggaaa

SEQ ID NO: 149391 - DNA, 20 bp, synthetic construct
  source 1..20: mol_type = other DNA
ttccgaggactgcaacggaa

SEQ ID NO: 149392 - DNA, 20 bp, synthetic construct
  source 1..20: mol_type = other DNA
gttccgaggactgcaacgga

SEQ ID NO: 149393 - DNA, 20 bp, synthetic construct
  source 1..20: mol_type = other DNA
ggttccgaggactgcaacgg

SEQ ID NO: 149394 - DNA, 20 bp, synthetic construct
  source 1..20: mol_type = other DNA
tggttccgaggactgcaacg

SEQ ID NO: 149395 - DNA, 20 bp, synthetic construct
  source 1..20: mol_type = other DNA
ctggttccgaggactgcaac

SEQ ID NO: 149396 - DNA, 20 bp, synthetic construct
  source 1..20: mol_type = other DNA
cctggttccgaggactgcaa

SEQ ID NO: 149397 - DNA, 20 bp, synthetic construct
  source 1..20: mol_type = other DNA
tcctggttccgaggactgca

SEQ ID NO: 149398 - DNA, 20 bp, synthetic construct
  source 1..20: mol_type = other DNA
gtcctggttccgaggactgc

SEQ ID NO: 149399 - DNA, 20 bp, synthetic construct
  source 1..20: mol_type = other DNA
ggtcctggttccgaggactg

SEQ ID NO: 149400 - DNA, 20 bp, synthetic construct
  source 1..20: mol_type = other DNA
aggtcctggttccgaggact

SEQ ID NO: 149401 - DNA, 20 bp, synthetic construct
  source 1..20: mol_type = other DNA
gaggtcctggttccgaggac

SEQ ID NO: 149402 - DNA, 20 bp, synthetic construct
  source 1..20: mol_type = other DNA
cgaggtcctggttccgagga

SEQ ID NO: 149403 - DNA, 20 bp, synthetic construct
  source 1..20: mol_type = other DNA
ccgaggtcctggttccgagg

SEQ ID NO: 149404 - DNA, 20 bp, synthetic construct
  source 1..20: mol_type = other DNA
gccgaggtcctggttccgag

SEQ ID NO: 149405 - DNA, 20 bp, synthetic construct
  source 1..20: mol_type = other DNA
cgccgaggtcctggttccga

SEQ ID NO: 149406 - DNA, 20 bp, synthetic construct
  source 1..20: mol_type = other DNA
acgccgaggtcctggttccg

SEQ ID NO: 149407 - DNA, 20 bp, synthetic construct
  source 1..20: mol_type = other DNA
cacgccgaggtcctggttcc

SEQ ID NO: 149408 - DNA, 20 bp, synthetic construct
  source 1..20: mol_type = other DNA
ccacgccgaggtcctggttc

SEQ ID NO: 149409 - DNA, 20 bp, synthetic construct
  source 1..20: mol_type = other DNA
gccacgccgaggtcctggtt

SEQ ID NO: 149410 - DNA, 20 bp, synthetic construct
  source 1..20: mol_type = other DNA
ggccacgccgaggtcctggt

SEQ ID NO: 149411 - DNA, 20 bp, synthetic construct
  source 1..20: mol_type = other DNA
aggccacgccgaggtcctgg

SEQ ID NO: 149412 - DNA, 20 bp, synthetic construct
  source 1..20: mol_type = other DNA
taggccacgccgaggtcctg

SEQ ID NO: 149413 - DNA, 20 bp, synthetic construct
  source 1..20: mol_type = other DNA
ctaggccacgccgaggtcct

SEQ ID NO: 149414 - DNA, 20 bp, synthetic construct
  source 1..20: mol_type = other DNA
gctaggccacgccgaggtcc

SEQ ID NO: 149415 - DNA, 20 bp, synthetic construct
  source 1..20: mol_type = other DNA
cgctaggccacgccgaggtc

SEQ ID NO: 149416 - DNA, 20 bp, synthetic construct
  source 1..20: mol_type = other DNA
tcgctaggccacgccgaggt

SEQ ID NO: 149417 - DNA, 20 bp, synthetic construct
  source 1..20: mol_type = other DNA
ctcgctaggccacgccgagg

SEQ ID NO: 149418 - DNA, 20 bp, synthetic construct
  source 1..20: mol_type = other DNA
actcgctaggccacgccgag

SEQ ID NO: 149419 - DNA, 20 bp, synthetic construct
  source 1..20: mol_type = other DNA
aactcgctaggccacgccga

SEQ ID NO: 149420 - DNA, 20 bp, synthetic construct
  source 1..20: mol_type = other DNA
taactcgctaggccacgccg

SEQ ID NO: 149421 - DNA, 20 bp, synthetic construct
  source 1..20: mol_type = other DNA
ataactcgctaggccacgcc

SEQ ID NO: 149422 - DNA, 20 bp, synthetic construct
  source 1..20: mol_type = other DNA
cataactcgctaggccacgc

SEQ ID NO: 149423 - DNA, 20 bp, synthetic construct
  source 1..20: mol_type = other DNA
ccataactcgctaggccacg

SEQ ID NO: 149424 - DNA, 20 bp, synthetic construct
  source 1..20: mol_type = other DNA
gccataactcgctaggccac

SEQ ID NO: 149425 - DNA, 20 bp, synthetic construct
  source 1..20: mol_type = other DNA
cgccataactcgctaggcca

SEQ ID NO: 149426 - DNA, 20 bp, synthetic construct
  source 1..20: mol_type = other DNA
tcgccataactcgctaggcc

SEQ ID NO: 149427 - DNA, 20 bp, synthetic construct
  source 1..20: mol_type = other DNA
gtcgccataactcgctaggc

SEQ ID NO: 149428 - DNA, 20 bp, synthetic construct
  source 1..20: mol_type = other DNA
cgtcgccataactcgctagg

SEQ ID NO: 149429 - DNA, 20 bp, synthetic construct
  source 1..20: mol_type = other DNA
tcgtcgccataactcgctag

SEQ ID NO: 149430 - DNA, 20 bp, synthetic construct
  source 1..20: mol_type = other DNA
ttcgtcgccataactcgcta

SEQ ID NO: 149431 - DNA, 20 bp, synthetic construct
  source 1..20: mol_type = other DNA
cttcgtcgccataactcgct

SEQ ID NO: 149432 - DNA, 20 bp, synthetic construct
  source 1..20: mol_type = other DNA
ccttcgtcgccataactcgc

SEQ ID NO: 149433 - DNA, 20 bp, synthetic construct
  source 1..20: mol_type = other DNA
gccttcgtcgccataactcg

SEQ ID NO: 149434 - DNA, 20 bp, synthetic construct
  source 1..20: mol_type = other DNA
ggccttcgtcgccataactc

SEQ ID NO: 149435 - DNA, 20 bp, synthetic construct
  source 1..20: mol_type = other DNA
cggccttcgtcgccataact

SEQ ID NO: 149436 - DNA, 20 bp, synthetic construct
  source 1..20: mol_type = other DNA
acggccttcgtcgccataac

SEQ ID NO: 149437 - DNA, 20 bp, synthetic construct
  source 1..20: mol_type = other DNA
cacggccttcgtcgccataa

SEQ ID NO: 149438 - DNA, 20 bp, synthetic construct
  source 1..20: mol_type = other DNA
acacggccttcgtcgccata

SEQ ID NO: 149439 - DNA, 20 bp, synthetic construct
  source 1..20: mol_type = other DNA
cacacggccttcgtcgccat

SEQ ID NO: 149440 - DNA, 20 bp, synthetic construct
  source 1..20: mol_type = other DNA
gcacacggccttcgtcgcca

SEQ ID NO: 149441 - DNA, 20 bp, synthetic construct
  source 1..20: mol_type = other DNA
cgcacacggccttcgtcgcc

SEQ ID NO: 149442 - DNA, 20 bp, synthetic construct
  source 1..20: mol_type = other DNA
acgcacacggccttcgtcgc

SEQ ID NO: 149443 - DNA, 20 bp, synthetic construct
  source 1..20: mol_type = other DNA
cacgcacacggccttcgtcg

SEQ ID NO: 149444 - DNA, 20 bp, synthetic construct
  source 1..20: mol_type = other DNA
gcacgcacacggccttcgtc

SEQ ID NO: 149445 - DNA, 20 bp, synthetic construct
  source 1..20: mol_type = other DNA
agcacgcacacggccttcgt

SEQ ID NO: 149446 - DNA, 20 bp, synthetic construct
  source 1..20: mol_type = other DNA
cagcacgcacacggccttcg

SEQ ID NO: 149447 - DNA, 20 bp, synthetic construct
  source 1..20: mol_type = other DNA
tcagcacgcacacggccttc

SEQ ID NO: 149448 - DNA, 20 bp, synthetic construct
  source 1..20: mol_type = other DNA
ttcagcacgcacacggcctt

SEQ ID NO: 149449 - DNA, 20 bp, synthetic construct
  source 1..20: mol_type = other DNA
cttcagcacgcacacggcct

SEQ ID NO: 149450 - DNA, 20 bp, synthetic construct
  source 1..20: mol_type = other DNA
ccttcagcacgcacacggcc

SEQ ID NO: 149451 - DNA, 20 bp, synthetic construct
  source 1..20: mol_type = other DNA
cccttcagcacgcacacggc

SEQ ID NO: 149452 - DNA, 20 bp, synthetic construct
  source 1..20: mol_type = other DNA
gcccttcagcacgcacacgg

SEQ ID NO: 149453 - DNA, 20 bp, synthetic construct
  source 1..20: mol_type = other DNA
cgcccttcagcacgcacacg

SEQ ID NO: 149454 - DNA, 20 bp, synthetic construct
  source 1..20: mol_type = other DNA
tcgcccttcagcacgcacac

SEQ ID NO: 149455 - DNA, 20 bp, synthetic construct
  source 1..20: mol_type = other DNA
gtcgcccttcagcacgcaca

SEQ ID NO: 149456 - DNA, 20 bp, synthetic construct
  source 1..20: mol_type = other DNA
cgtcgcccttcagcacgcac

SEQ ID NO: 149457 - DNA, 20 bp, synthetic construct
  source 1..20: mol_type = other DNA
ccgtcgcccttcagcacgca

SEQ ID NO: 149458 - DNA, 20 bp, synthetic construct
  source 1..20: mol_type = other DNA
gccgtcgcccttcagcacgc

SEQ ID NO: 149459 - DNA, 20 bp, synthetic construct
  source 1..20: mol_type = other DNA
ggccgtcgcccttcagcacg

SEQ ID NO: 149460 - DNA, 20 bp, synthetic construct
  source 1..20: mol_type = other DNA
gggccgtcgcccttcagcac

SEQ ID NO: 149461 - DNA, 20 bp, synthetic construct
  source 1..20: mol_type = other DNA
tgggccgtcgcccttcagca

SEQ ID NO: 149462 - DNA, 20 bp, synthetic construct
  source 1..20: mol_type = other DNA
ctgggccgtcgcccttcagc

SEQ ID NO: 149463 - DNA, 20 bp, synthetic construct
  source 1..20: mol_type = other DNA
actgggccgtcgcccttcag

SEQ ID NO: 149464 - DNA, 20 bp, synthetic construct
  source 1..20: mol_type = other DNA
cactgggccgtcgcccttca

SEQ ID NO: 149465 - DNA, 20 bp, synthetic construct
  source 1..20: mol_type = other DNA
gcactgggccgtcgcccttc

SEQ ID NO: 149466 - DNA, 20 bp, synthetic construct
  source 1..20: mol_type = other DNA
tgcactgggccgtcgccctt

SEQ ID NO: 149467 - DNA, 20 bp, synthetic construct
  source 1..20: mol_type = other DNA
ctgcactgggccgtcgccct

SEQ ID NO: 149468 - DNA, 20 bp, synthetic construct
  source 1..20: mol_type = other DNA
cctgcactgggccgtcgccc

SEQ ID NO: 149469 - DNA, 20 bp, synthetic construct
  source 1..20: mol_type = other DNA
ccctgcactgggccgtcgcc

SEQ ID NO: 149470 - DNA, 20 bp, synthetic construct
  source 1..20: mol_type = other DNA
gccctgcactgggccgtcgc

SEQ ID NO: 149471 - DNA, 20 bp, synthetic construct
  source 1..20: mol_type = other DNA
tgccctgcactgggccgtcg

SEQ ID NO: 149472 - DNA, 20 bp, synthetic construct
  source 1..20: mol_type = other DNA
atgccctgcactgggccgtc

SEQ ID NO: 149473 - DNA, 20 bp, synthetic construct
  source 1..20: mol_type = other DNA
gatgccctgcactgggccgt

SEQ ID NO: 149474 - DNA, 20 bp, synthetic construct
  source 1..20: mol_type = other DNA
tgatgccctgcactgggccg

SEQ ID NO: 149475 - DNA, 20 bp, synthetic construct
  source 1..20: mol_type = other DNA
atgatgccctgcactgggcc

SEQ ID NO: 149476 - DNA, 20 bp, synthetic construct
  source 1..20: mol_type = other DNA
gatgatgccctgcactgggc

SEQ ID NO: 149477 - DNA, 20 bp, synthetic construct
  source 1..20: mol_type = other DNA
tgatgatgccctgcactggg

SEQ ID NO: 149478 - DNA, 20 bp, synthetic construct
  source 1..20: mol_type = other DNA
ttgatgatgccctgcactgg

SEQ ID NO: 149479 - DNA, 20 bp, synthetic construct
  source 1..20: mol_type = other DNA
attgatgatgccctgcactg

SEQ ID NO: 149480 - DNA, 20 bp, synthetic construct
  source 1..20: mol_type = other DNA
aattgatgatgccctgcact

SEQ ID NO: 149481 - DNA, 20 bp, synthetic construct
  source 1..20: mol_type = other DNA
aaattgatgatgccctgcac

SEQ ID NO: 149482 - DNA, 20 bp, synthetic construct
  source 1..20: mol_type = other DNA
gaaattgatgatgccctgca

SEQ ID NO: 149483 - DNA, 20 bp, synthetic construct
  source 1..20: mol_type = other DNA
cgaaattgatgatgccctgc

SEQ ID NO: 149484 - DNA, 20 bp, synthetic construct
  source 1..20: mol_type = other DNA
tcgaaattgatgatgccctg

SEQ ID NO: 149485 - DNA, 20 bp, synthetic construct
  source 1..20: mol_type = other DNA
ctcgaaattgatgatgccct

SEQ ID NO: 149486 - DNA, 20 bp, synthetic construct
  source 1..20: mol_type = other DNA
gctcgaaattgatgatgccc

SEQ ID NO: 149487 - DNA, 20 bp, synthetic construct
  source 1..20: mol_type = other DNA
tgctcgaaattgatgatgcc

SEQ ID NO: 149488 - DNA, 20 bp, synthetic construct
  source 1..20: mol_type = other DNA
ctgctcgaaattgatgatgc

SEQ ID NO: 149489 - DNA, 20 bp, synthetic construct
  source 1..20: mol_type = other DNA
tctgctcgaaattgatgatg

SEQ ID NO: 149490 - DNA, 20 bp, synthetic construct
  source 1..20: mol_type = other DNA
ttctgctcgaaattgatgat

SEQ ID NO: 149491 - DNA, 20 bp, synthetic construct
  source 1..20: mol_type = other DNA
cttctgctcgaaattgatga

SEQ ID NO: 149492 - DNA, 20 bp, synthetic construct
  source 1..20: mol_type = other DNA
ccttctgctcgaaattgatg

SEQ ID NO: 149493 - DNA, 20 bp, synthetic construct
  source 1..20: mol_type = other DNA
gccttctgctcgaaattgat

SEQ ID NO: 149494 - DNA, 20 bp, synthetic construct
  source 1..20: mol_type = other DNA
tgccttctgctcgaaattga

SEQ ID NO: 149495 - DNA, 20 bp, synthetic construct
  source 1..20: mol_type = other DNA
ttgccttctgctcgaaattg

SEQ ID NO: 149496 - DNA, 20 bp, synthetic construct
  source 1..20: mol_type = other DNA
cttgccttctgctcgaaatt

SEQ ID NO: 149497 - DNA, 20 bp, synthetic construct
  source 1..20: mol_type = other DNA
ccttgccttctgctcgaaat

SEQ ID NO: 149498 - DNA, 20 bp, synthetic construct
  source 1..20: mol_type = other DNA
cccttgccttctgctcgaaa

SEQ ID NO: 149499 - DNA, 20 bp, synthetic construct
  source 1..20: mol_type = other DNA
gcccttgccttctgctcgaa

SEQ ID NO: 149500 - DNA, 20 bp, synthetic construct
  source 1..20: mol_type = other DNA
agcccttgccttctgctcga

SEQ ID NO: 149501 - DNA, 20 bp, synthetic construct
  source 1..20: mol_type = other DNA
cagcccttgccttctgctcg

SEQ ID NO: 149502 - DNA, 20 bp, synthetic construct
  source 1..20: mol_type = other DNA
ccagcccttgccttctgctc

SEQ ID NO: 149503 - DNA, 20 bp, synthetic construct
  source 1..20: mol_type = other DNA
cccagcccttgccttctgct

SEQ ID NO: 149504 - DNA, 20 bp, synthetic construct
  source 1..20: mol_type = other DNA
tcccagcccttgccttctgc

SEQ ID NO: 149505 - DNA, 20 bp, synthetic construct
  source 1..20: mol_type = other DNA
gtcccagcccttgccttctg

SEQ ID NO: 149506 - DNA, 20 bp, synthetic construct
  source 1..20: mol_type = other DNA
cgtcccagcccttgccttct

SEQ ID NO: 149507 - DNA, 20 bp, synthetic construct
  source 1..20: mol_type = other DNA
ccgtcccagcccttgccttc

SEQ ID NO: 149508 - DNA, 20 bp, synthetic construct
  source 1..20: mol_type = other DNA
tccgtcccagcccttgcctt

SEQ ID NO: 149509 - DNA, 20 bp, synthetic construct
  source 1..20: mol_type = other DNA
ctccgtcccagcccttgcct

SEQ ID NO: 149510 - DNA, 20 bp, synthetic construct
  source 1..20: mol_type = other DNA
cctccgtcccagcccttgcc

SEQ ID NO: 149511 - DNA, 20 bp, synthetic construct
  source 1..20: mol_type = other DNA
gcctccgtcccagcccttgc

SEQ ID NO: 149512 - DNA, 20 bp, synthetic construct
  source 1..20: mol_type = other DNA
agcctccgtcccagcccttg

SEQ ID NO: 149513 - DNA, 20 bp, synthetic construct
  source 1..20: mol_type = other DNA
aagcctccgtcccagccctt

SEQ ID NO: 149514 - DNA, 20 bp, synthetic construct
  source 1..20: mol_type = other DNA
caagcctccgtcccagccct

SEQ ID NO: 149515 - DNA, 20 bp, synthetic construct
  source 1..20: mol_type = other DNA
acaagcctccgtcccagccc

SEQ ID NO: 149516 - DNA, 20 bp, synthetic construct
  source 1..20: mol_type = other DNA
aacaagcctccgtcccagcc

SEQ ID NO: 149517 - DNA, 20 bp, synthetic construct
  source 1..20: mol_type = other DNA
aaacaagcctccgtcccagc

SEQ ID NO: 149518 - DNA, 20 bp, synthetic construct
  source 1..20: mol_type = other DNA
caaacaagcctccgtcccag

SEQ ID NO: 149519 - DNA, 20 bp, synthetic construct
  source 1..20: mol_type = other DNA
gcaaacaagcctccgtccca

SEQ ID NO: 149520 - DNA, 20 bp, synthetic construct
  source 1..20: mol_type = other DNA
cgcaaacaagcctccgtccc

SEQ ID NO: 149521 - DNA, 20 bp, synthetic construct
  source 1..20: mol_type = other DNA
tcgcaaacaagcctccgtcc

SEQ ID NO: 149522 - DNA, 20 bp, synthetic construct
  source 1..20: mol_type = other DNA
ctcgcaaacaagcctccgtc

SEQ ID NO: 149523 - DNA, 20 bp, synthetic construct
  source 1..20: mol_type = other DNA
cctcgcaaacaagcctccgt

SEQ ID NO: 149524 - DNA, 20 bp, synthetic construct
  source 1..20: mol_type = other DNA
gcctcgcaaacaagcctccg

SEQ ID NO: 149525 - DNA, 20 bp, synthetic construct
  source 1..20: mol_type = other DNA
ggcctcgcaaacaagcctcc

SEQ ID NO: 149526 - DNA, 20 bp, synthetic construct
  source 1..20: mol_type = other DNA
cggcctcgcaaacaagcctc

SEQ ID NO: 149527 - DNA, 20 bp, synthetic construct
  source 1..20: mol_type = other DNA
gcggcctcgcaaacaagcct

SEQ ID NO: 149528 - DNA, 20 bp, synthetic construct
  source 1..20: mol_type = other DNA
agcggcctcgcaaacaagcc

SEQ ID NO: 149529 - DNA, 20 bp, synthetic construct
  source 1..20: mol_type = other DNA
gagcggcctcgcaaacaagc

SEQ ID NO: 149530 - DNA, 20 bp, synthetic construct
  source 1..20: mol_type = other DNA
ggagcggcctcgcaaacaag

SEQ ID NO: 149531 - DNA, 20 bp, synthetic construct
  source 1..20: mol_type = other DNA
gggagcggcctcgcaaacaa

SEQ ID NO: 149532 - DNA, 20 bp, synthetic construct
  source 1..20: mol_type = other DNA
tgggagcggcctcgcaaaca

SEQ ID NO: 149533 - DNA, 20 bp, synthetic construct
  source 1..20: mol_type = other DNA
gtgggagcggcctcgcaaac

SEQ ID NO: 149534 - DNA, 20 bp, synthetic construct
  source 1..20: mol_type = other DNA
ggtgggagcggcctcgcaaa

SEQ ID NO: 149535 - DNA, 20 bp, synthetic construct
  source 1..20: mol_type = other DNA
gggtgggagcggcctcgcaa

SEQ ID NO: 149536 - DNA, 20 bp, synthetic construct
  source 1..20: mol_type = other DNA
cgggtgggagcggcctcgca

SEQ ID NO: 149537 - DNA, 20 bp, synthetic construct
  source 1..20: mol_type = other DNA
gcgggtgggagcggcctcgc

SEQ ID NO: 149538 - DNA, 20 bp, synthetic construct
  source 1..20: mol_type = other DNA
agcgggtgggagcggcctcg

SEQ ID NO: 149539 - DNA, 20 bp, synthetic construct
  source 1..20: mol_type = other DNA
gagcgggtgggagcggcctc

SEQ ID NO: 149540 - DNA, 20 bp, synthetic construct
  source 1..20: mol_type = other DNA
cgagcgggtgggagcggcct

SEQ ID NO: 149541 - DNA, 20 bp, synthetic construct
  source 1..20: mol_type = other DNA
acgagcgggtgggagcggcc

SEQ ID NO: 149542 - DNA, 20 bp, synthetic construct
  source 1..20: mol_type = other DNA
gacgagcgggtgggagcggc

SEQ ID NO: 149543 - DNA, 20 bp, synthetic construct
  source 1..20: mol_type = other DNA
ggacgagcgggtgggagcgg

SEQ ID NO: 149544 - DNA, 20 bp, synthetic construct
  source 1..20: mol_type = other DNA
gggacgagcgggtgggagcg

SEQ ID NO: 149545 - DNA, 20 bp, synthetic construct
  source 1..20: mol_type = other DNA
ggggacgagcgggtgggagc

SEQ ID NO: 149546 - DNA, 20 bp, synthetic construct
  source 1..20: mol_type = other DNA
gggggacgagcgggtgggag

SEQ ID NO: 149547 - DNA, 20 bp, synthetic construct
  source 1..20: mol_type = other DNA
ggggggacgagcgggtggga

SEQ ID NO: 149548 - DNA, 20 bp, synthetic construct
  source 1..20: mol_type = other DNA
cggggggacgagcgggtggg

SEQ ID NO: 149549 - DNA, 20 bp, synthetic construct
  source 1..20: mol_type = other DNA
gcggggggacgagcgggtgg

SEQ ID NO: 149550 - DNA, 20 bp, synthetic construct
  source 1..20: mol_type = other DNA
cgcggggggacgagcgggtg

SEQ ID NO: 149551 - DNA, 20 bp, synthetic construct
  source 1..20: mol_type = other DNA
gcgcggggggacgagcgggt

SEQ ID NO: 149552 - DNA, 20 bp, synthetic construct
  source 1..20: mol_type = other DNA
tgcgcggggggacgagcggg

SEQ ID NO: 149553 - DNA, 20 bp, synthetic construct
  source 1..20: mol_type = other DNA
gtgcgcggggggacgagcgg

SEQ ID NO: 149554 - DNA, 20 bp, synthetic construct
  source 1..20: mol_type = other DNA
ggtgcgcggggggacgagcg

SEQ ID NO: 149555 - DNA, 20 bp, synthetic construct
  source 1..20: mol_type = other DNA
aggtgcgcggggggacgagc

SEQ ID NO: 149556 - DNA, 20 bp, synthetic construct
  source 1..20: mol_type = other DNA
aaggtgcgcggggggacgag

SEQ ID NO: 149557 - DNA, 20 bp, synthetic construct
  source 1..20: mol_type = other DNA
aaaggtgcgcggggggacga

SEQ ID NO: 149558 - DNA, 20 bp, synthetic construct
  source 1..20: mol_type = other DNA
caaaggtgcgcggggggacg

SEQ ID NO: 149559 - DNA, 20 bp, synthetic construct
  source 1..20: mol_type = other DNA
gcaaaggtgcgcggggggac

SEQ ID NO: 149560 - DNA, 20 bp, synthetic construct
  source 1..20: mol_type = other DNA
agcaaaggtgcgcgggggga

SEQ ID NO: 149561 - DNA, 20 bp, synthetic construct
  source 1..20: mol_type = other DNA
tagcaaaggtgcgcgggggg

SEQ ID NO: 149562 - DNA, 20 bp, synthetic construct
  source 1..20: mol_type = other DNA
ctagcaaaggtgcgcggggg

SEQ ID NO: 149563 - DNA, 20 bp, synthetic construct
  source 1..20: mol_type = other DNA
cctagcaaaggtgcgcgggg

SEQ ID NO: 149564 - DNA, 20 bp, synthetic construct
  source 1..20: mol_type = other DNA
tcctagcaaaggtgcgcggg

SEQ ID NO: 149565 - DNA, 20 bp, synthetic construct
  source 1..20: mol_type = other DNA
ctcctagcaaaggtgcgcgg

SEQ ID NO: 149566 - DNA, 20 bp, synthetic construct
  source 1..20: mol_type = other DNA
gctcctagcaaaggtgcgcg

SEQ ID NO: 149567 - DNA, 20 bp, synthetic construct
  source 1..20: mol_type = other DNA
cgctcctagcaaaggtgcgc

SEQ ID NO: 149568 - DNA, 20 bp, synthetic construct
  source 1..20: mol_type = other DNA
ccgctcctagcaaaggtgcg

SEQ ID NO: 149569 - DNA, 20 bp, synthetic construct
  source 1..20: mol_type = other DNA
cccgctcctagcaaaggtgc

SEQ ID NO: 149570 - DNA, 20 bp, synthetic construct
  source 1..20: mol_type = other DNA
acccgctcctagcaaaggtg

SEQ ID NO: 149571 - DNA, 20 bp, synthetic construct
  source 1..20: mol_type = other DNA
gacccgctcctagcaaaggt

SEQ ID NO: 149572 - DNA, 20 bp, synthetic construct
  source 1..20: mol_type = other DNA
cgacccgctcctagcaaagg

SEQ ID NO: 149573 - DNA, 20 bp, synthetic construct
  source 1..20: mol_type = other DNA
gcgacccgctcctagcaaag

SEQ ID NO: 149574 - DNA, 20 bp, synthetic construct
  source 1..20: mol_type = other DNA
ggcgacccgctcctagcaaa

SEQ ID NO: 149575 - DNA, 20 bp, synthetic construct
  source 1..20: mol_type = other DNA
gggcgacccgctcctagcaa

SEQ ID NO: 149576 - DNA, 20 bp, synthetic construct
  source 1..20: mol_type = other DNA
cgggcgacccgctcctagca

SEQ ID NO: 149577 - DNA, 20 bp, synthetic construct
  source 1..20: mol_type = other DNA
gcgggcgacccgctcctagc

SEQ ID NO: 149578 - DNA, 20 bp, synthetic construct
  source 1..20: mol_type = other DNA
ggcgggcgacccgctcctag

SEQ ID NO: 149579 - DNA, 20 bp, synthetic construct
  source 1..20: mol_type = other DNA
tggcgggcgacccgctccta

SEQ ID NO: 149580 - DNA, 20 bp, synthetic construct
  source 1..20: mol_type = other DNA
ctggcgggcgacccgctcct

SEQ ID NO: 149581 - DNA, 20 bp, synthetic construct
  source 1..20: mol_type = other DNA
cctggcgggcgacccgctcc

SEQ ID NO: 149582 - DNA, 20 bp, synthetic construct
  source 1..20: mol_type = other DNA
gcctggcgggcgacccgctc

SEQ ID NO: 149583 - DNA, 20 bp, synthetic construct
  source 1..20: mol_type = other DNA
ggcctggcgggcgacccgct

SEQ ID NO: 149584 - DNA, 20 bp, synthetic construct
  source 1..20: mol_type = other DNA
aggcctggcgggcgacccgc

SEQ ID NO: 149585 - DNA, 20 bp, synthetic construct
  source 1..20: mol_type = other DNA
gaggcctggcgggcgacccg

SEQ ID NO: 149586 - DNA, 20 bp, synthetic construct
  source 1..20: mol_type = other DNA
cgaggcctggcgggcgaccc

SEQ ID NO: 149587 - DNA, 20 bp, synthetic construct
  source 1..20: mol_type = other DNA
ccgaggcctggcgggcgacc

SEQ ID NO: 149588 - DNA, 20 bp, synthetic construct
  source 1..20: mol_type = other DNA
cccgaggcctggcgggcgac

SEQ ID NO: 149589 - DNA, 20 bp, synthetic construct
  source 1..20: mol_type = other DNA
ccccgaggcctggcgggcga

SEQ ID NO: 149590 - DNA, 20 bp, synthetic construct
  source 1..20: mol_type = other DNA
gccccgaggcctggcgggcg

SEQ ID NO: 149591 - DNA, 20 bp, synthetic construct
  source 1..20: mol_type = other DNA
ggccccgaggcctggcgggc

SEQ ID NO: 149592 - DNA, 20 bp, synthetic construct
  source 1..20: mol_type = other DNA
cggccccgaggcctggcggg

SEQ ID NO: 149593 - DNA, 20 bp, synthetic construct
  source 1..20: mol_type = other DNA
gcggccccgaggcctggcgg

SEQ ID NO: 149594 - DNA, 20 bp, synthetic construct
  source 1..20: mol_type = other DNA
ggcggccccgaggcctggcg

SEQ ID NO: 149595 - DNA, 20 bp, synthetic construct
  source 1..20: mol_type = other DNA
gggcggccccgaggcctggc

SEQ ID NO: 149596 - DNA, 20 bp, synthetic construct
  source 1..20: mol_type = other DNA
agggcggccccgaggcctgg

SEQ ID NO: 149597 - DNA, 20 bp, synthetic construct
  source 1..20: mol_type = other DNA
cagggcggccccgaggcctg

SEQ ID NO: 149598 - DNA, 20 bp, synthetic construct
  source 1..20: mol_type = other DNA
ccagggcggccccgaggcct

SEQ ID NO: 149599 - DNA, 20 bp, synthetic construct
  source 1..20: mol_type = other DNA
accagggcggccccgaggcc

SEQ ID NO: 149600 - DNA, 20 bp, synthetic construct
  source 1..20: mol_type = other DNA
gaccagggcggccccgaggc

SEQ ID NO: 149601 - DNA, 20 bp, synthetic construct
  source 1..20: mol_type = other DNA
ggaccagggcggccccgagg

SEQ ID NO: 149602 - DNA, 20 bp, synthetic construct
  source 1..20: mol_type = other DNA
tggaccagggcggccccgag

SEQ ID NO: 149603 - DNA, 20 bp, synthetic construct
  source 1..20: mol_type = other DNA
ctggaccagggcggccccga

SEQ ID NO: 149604 - DNA, 20 bp, synthetic construct
  source 1..20: mol_type = other DNA
gctggaccagggcggccccg

SEQ ID NO: 149605 - DNA, 20 bp, synthetic construct
  source 1..20: mol_type = other DNA
cgctggaccagggcggcccc

SEQ ID NO: 149606 - DNA, 20 bp, synthetic construct
  source 1..20: mol_type = other DNA
gcgctggaccagggcggccc

SEQ ID NO: 149607 - DNA, 20 bp, synthetic construct
  source 1..20: mol_type = other DNA
ggcgctggaccagggcggcc

SEQ ID NO: 149608 - DNA, 20 bp, synthetic construct
  source 1..20: mol_type = other DNA
gggcgctggaccagggcggc

SEQ ID NO: 149609 - DNA, 20 bp, synthetic construct
  source 1..20: mol_type = other DNA
cgggcgctggaccagggcgg

SEQ ID NO: 149610 - DNA, 20 bp, synthetic construct
  source 1..20: mol_type = other DNA
ccgggcgctggaccagggcg

SEQ ID NO: 149611 - DNA, 20 bp, synthetic construct
  source 1..20: mol_type = other DNA
accgggcgctggaccagggc

SEQ ID NO: 149612 - DNA, 20 bp, synthetic construct
  source 1..20: mol_type = other DNA
gaccgggcgctggaccaggg

SEQ ID NO: 149613 - DNA, 20 bp, synthetic construct
  source 1..20: mol_type = other DNA
ggaccgggcgctggaccagg

SEQ ID NO: 149614 - DNA, 20 bp, synthetic construct
  source 1..20: mol_type = other DNA
gggaccgggcgctggaccag

SEQ ID NO: 149615 - DNA, 20 bp, synthetic construct
  source 1..20: mol_type = other DNA
cgggaccgggcgctggacca

SEQ ID NO: 149616 - DNA, 20 bp, synthetic construct
  source 1..20: mol_type = other DNA
ccgggaccgggcgctggacc

SEQ ID NO: 149617 - DNA, 20 bp, synthetic construct
  source 1..20: mol_type = other DNA
gccgggaccgggcgctggac

SEQ ID NO: 149618 - DNA, 20 bp, synthetic construct
  source 1..20: mol_type = other DNA
ggccgggaccgggcgctgga

SEQ ID NO: 149619 - DNA, 20 bp, synthetic construct
  source 1..20: mol_type = other DNA
gggccgggaccgggcgctgg

SEQ ID NO: 149620 - DNA, 20 bp, synthetic construct
  source 1..20: mol_type = other DNA
cgggccgggaccgggcgctg

SEQ ID NO: 149621 - DNA, 20 bp, synthetic construct
  source 1..20: mol_type = other DNA
acgggccgggaccgggcgct

SEQ ID NO: 149622 - DNA, 20 bp, synthetic construct
  source 1..20: mol_type = other DNA
cacgggccgggaccgggcgc

SEQ ID NO: 149623 - DNA, 20 bp, synthetic construct
  source 1..20: mol_type = other DNA
gcacgggccgggaccgggcg

SEQ ID NO: 149624 - DNA, 20 bp, synthetic construct
  source 1..20: mol_type = other DNA
ggcacgggccgggaccgggc

SEQ ID NO: 149625 - DNA, 20 bp, synthetic construct
  source 1..20: mol_type = other DNA
cggcacgggccgggaccggg

SEQ ID NO: 149626 - DNA, 20 bp, synthetic construct
  source 1..20: mol_type = other DNA
gcggcacgggccgggaccgg

SEQ ID NO: 149627 - DNA, 20 bp, synthetic construct
  source 1..20: mol_type = other DNA
ggcggcacgggccgggaccg

SEQ ID NO: 149628 - DNA, 20 bp, synthetic construct
  source 1..20: mol_type = other DNA
gggcggcacgggccgggacc

SEQ ID NO: 149629 - DNA, 20 bp, synthetic construct
  source 1..20: mol_type = other DNA
cgggcggcacgggccgggac

SEQ ID NO: 149630 - DNA, 20 bp, synthetic construct
  source 1..20: mol_type = other DNA
ccgggcggcacgggccggga

SEQ ID NO: 149631 - DNA, 20 bp, synthetic construct
  source 1..20: mol_type = other DNA
accgggcggcacgggccggg

SEQ ID NO: 149632 - DNA, 20 bp, synthetic construct
  source 1..20: mol_type = other DNA
gaccgggcggcacgggccgg

SEQ ID NO: 149633 - DNA, 20 bp, synthetic construct
  source 1..20: mol_type = other DNA
cgaccgggcggcacgggccg

SEQ ID NO: 149634 - DNA, 20 bp, synthetic construct
  source 1..20: mol_type = other DNA
ccgaccgggcggcacgggcc

SEQ ID NO: 149635 - DNA, 20 bp, synthetic construct
  source 1..20: mol_type = other DNA
accgaccgggcggcacgggc

SEQ ID NO: 149636 - DNA, 20 bp, synthetic construct
  source 1..20: mol_type = other DNA
caccgaccgggcggcacggg

SEQ ID NO: 149637 - DNA, 20 bp, synthetic construct
  source 1..20: mol_type = other DNA
gcaccgaccgggcggcacgg

SEQ ID NO: 149638 - DNA, 20 bp, synthetic construct
  source 1..20: mol_type = other DNA
ggcaccgaccgggcggcacg

SEQ ID NO: 149639 - DNA, 20 bp, synthetic construct
  source 1..20: mol_type = other DNA
aggcaccgaccgggcggcac

SEQ ID NO: 149640 - DNA, 20 bp, synthetic construct
  source 1..20: mol_type = other DNA
aaggcaccgaccgggcggca

SEQ ID NO: 149641 - DNA, 20 bp, synthetic construct
  source 1..20: mol_type = other DNA
gaaggcaccgaccgggcggc

SEQ ID NO: 149642 - DNA, 20 bp, synthetic construct
  source 1..20: mol_type = other DNA
cgaaggcaccgaccgggcgg

SEQ ID NO: 149643 - DNA, 20 bp, synthetic construct
  source 1..20: mol_type = other DNA
gcgaaggcaccgaccgggcg

SEQ ID NO: 149644 - DNA, 20 bp, synthetic construct
  source 1..20: mol_type = other DNA
ggcgaaggcaccgaccgggc

SEQ ID NO: 149645 - DNA, 20 bp, synthetic construct
  source 1..20: mol_type = other DNA
gggcgaaggcaccgaccggg

SEQ ID NO: 149646 - DNA, 20 bp, synthetic construct
  source 1..20: mol_type = other DNA
ggggcgaaggcaccgaccgg

SEQ ID NO: 149647 - DNA, 20 bp, synthetic construct
  source 1..20: mol_type = other DNA
gggggcgaaggcaccgaccg

SEQ ID NO: 149648 - DNA, 20 bp, synthetic construct
  source 1..20: mol_type = other DNA
tgggggcgaaggcaccgacc

SEQ ID NO: 149649 - DNA, 20 bp, synthetic construct
  source 1..20: mol_type = other DNA
ctgggggcgaaggcaccgac

SEQ ID NO: 149650 - DNA, 20 bp, synthetic construct
  source 1..20: mol_type = other DNA
gctgggggcgaaggcaccga

SEQ ID NO: 149651 - DNA, 20 bp, synthetic construct
  source 1..20: mol_type = other DNA
cgctgggggcgaaggcaccg

SEQ ID NO: 149652 - DNA, 20 bp, synthetic construct
  source 1..20: mol_type = other DNA
ccgctgggggcgaaggcacc

SEQ ID NO: 149653 - DNA, 20 bp, synthetic construct
  source 1..20: mol_type = other DNA
accgctgggggcgaaggcac

SEQ ID NO: 149654 - DNA, 20 bp, synthetic construct
  source 1..20: mol_type = other DNA
caccgctgggggcgaaggca

SEQ ID NO: 149655 - DNA, 20 bp, synthetic construct
  source 1..20: mol_type = other DNA
gcaccgctgggggcgaaggc

SEQ ID NO: 149656 - DNA, 20 bp, synthetic construct
  source 1..20: mol_type = other DNA
cgcaccgctgggggcgaagg

SEQ ID NO: 149657 - DNA, 20 bp, synthetic construct
  source 1..20: mol_type = other DNA
ccgcaccgctgggggcgaag

SEQ ID NO: 149658 - DNA, 20 bp, synthetic construct
  source 1..20: mol_type = other DNA
accgcaccgctgggggcgaa

SEQ ID NO: 149659 - DNA, 20 bp, synthetic construct
  source 1..20: mol_type = other DNA
caccgcaccgctgggggcga

SEQ ID NO: 149660 - DNA, 20 bp, synthetic construct
  source 1..20: mol_type = other DNA
gcaccgcaccgctgggggcg

SEQ ID NO: 149661 - DNA, 20 bp, synthetic construct
  source 1..20: mol_type = other DNA
ggcaccgcaccgctgggggc

SEQ ID NO: 149662 - DNA, 20 bp, synthetic construct
  source 1..20: mol_type = other DNA
gggcaccgcaccgctggggg

SEQ ID NO: 149663 - DNA, 20 bp, synthetic construct
  source 1..20: mol_type = other DNA
tgggcaccgcaccgctgggg

SEQ ID NO: 149664 - DNA, 20 bp, synthetic construct
  source 1..20: mol_type = other DNA
ttgggcaccgcaccgctggg

SEQ ID NO: 149665 - DNA, 20 bp, synthetic construct
  source 1..20: mol_type = other DNA
cttgggcaccgcaccgctgg

SEQ ID NO: 149666 - DNA, 20 bp, synthetic construct
  source 1..20: mol_type = other DNA
acttgggcaccgcaccgctg

SEQ ID NO: 149667 - DNA, 20 bp, synthetic construct
  source 1..20: mol_type = other DNA
cacttgggcaccgcaccgct

SEQ ID NO: 149668 - DNA, 20 bp, synthetic construct
  source 1..20: mol_type = other DNA
gcacttgggcaccgcaccgc

SEQ ID NO: 149669 - DNA, 20 bp, synthetic construct
  source 1..20: mol_type = other DNA
agcacttgggcaccgcaccg

SEQ ID NO: 149670 - DNA, 20 bp, synthetic construct
  source 1..20: mol_type = other DNA
cagcacttgggcaccgcacc

SEQ ID NO: 149671 - DNA, 20 bp, synthetic construct
  source 1..20: mol_type = other DNA
tcagcacttgggcaccgcac

SEQ ID NO: 149672 - DNA, 20 bp, synthetic construct
  source 1..20: mol_type = other DNA
ctcagcacttgggcaccgca

SEQ ID NO: 149673 - DNA, 20 bp, synthetic construct
  source 1..20: mol_type = other DNA
actcagcacttgggcaccgc

SEQ ID NO: 149674 - DNA, 20 bp, synthetic construct
  source 1..20: mol_type = other DNA
gactcagcacttgggcaccg

SEQ ID NO: 149675 - DNA, 20 bp, synthetic construct
  source 1..20: mol_type = other DNA
tgactcagcacttgggcacc

SEQ ID NO: 149676 - DNA, 20 bp, synthetic construct
  source 1..20: mol_type = other DNA
gtgactcagcacttgggcac

SEQ ID NO: 149677 - DNA, 20 bp, synthetic construct
  source 1..20: mol_type = other DNA
ggtgactcagcacttgggca

SEQ ID NO: 149678 - DNA, 20 bp, synthetic construct
  source 1..20: mol_type = other DNA
cggtgactcagcacttgggc

SEQ ID NO: 149679 - DNA, 20 bp, synthetic construct
  source 1..20: mol_type = other DNA
ccggtgactcagcacttggg

SEQ ID NO: 149680 - DNA, 20 bp, synthetic construct
  source 1..20: mol_type = other DNA
cccggtgactcagcacttgg

SEQ ID NO: 149681 - DNA, 20 bp, synthetic construct
  source 1..20: mol_type = other DNA
gcccggtgactcagcacttg

SEQ ID NO: 149682 - DNA, 20 bp, synthetic construct
  source 1..20: mol_type = other DNA
cgcccggtgactcagcactt

SEQ ID NO: 149683 - DNA, 20 bp, synthetic construct
  source 1..20: mol_type = other DNA
ccgcccggtgactcagcact

SEQ ID NO: 149684 - DNA, 20 bp, synthetic construct
  source 1..20: mol_type = other DNA
cccgcccggtgactcagcac

SEQ ID NO: 149685 - DNA, 20 bp, synthetic construct
  source 1..20: mol_type = other DNA
gcccgcccggtgactcagca

SEQ ID NO: 149686 - DNA, 20 bp, synthetic construct
  source 1..20: mol_type = other DNA
ggcccgcccggtgactcagc

SEQ ID NO: 149687 - DNA, 20 bp, synthetic construct
  source 1..20: mol_type = other DNA
gggcccgcccggtgactcag

SEQ ID NO: 149688 - DNA, 20 bp, synthetic construct
  source 1..20: mol_type = other DNA
cgggcccgcccggtgactca

SEQ ID NO: 149689 - DNA, 20 bp, synthetic construct
  source 1..20: mol_type = other DNA
ccgggcccgcccggtgactc

SEQ ID NO: 149690 - DNA, 20 bp, synthetic construct
  source 1..20: mol_type = other DNA
cccgggcccgcccggtgact

SEQ ID NO: 149691 - DNA, 20 bp, synthetic construct
  source 1..20: mol_type = other DNA
gcccgggcccgcccggtgac

SEQ ID NO: 149692 - DNA, 20 bp, synthetic construct
  source 1..20: mol_type = other DNA
cgcccgggcccgcccggtga

SEQ ID NO: 149693 - DNA, 20 bp, synthetic construct
  source 1..20: mol_type = other DNA
gcgcccgggcccgcccggtg

SEQ ID NO: 149694 - DNA, 20 bp, synthetic construct
  source 1..20: mol_type = other DNA
cgcgcccgggcccgcccggt

SEQ ID NO: 149695 - DNA, 20 bp, synthetic construct
  source 1..20: mol_type = other DNA
ccgcgcccgggcccgcccgg

SEQ ID NO: 149696 - DNA, 20 bp, synthetic construct
  source 1..20: mol_type = other DNA
cccgcgcccgggcccgcccg

SEQ ID NO: 149697 - DNA, 20 bp, synthetic construct
  source 1..20: mol_type = other DNA
ccccgcgcccgggcccgccc

SEQ ID NO: 149698 - DNA, 20 bp, synthetic construct
  source 1..20: mol_type = other DNA
gccccgcgcccgggcccgcc

SEQ ID NO: 149699 - DNA, 20 bp, synthetic construct
  source 1..20: mol_type = other DNA
cgccccgcgcccgggcccgc

SEQ ID NO: 149700 - DNA, 20 bp, synthetic construct
  source 1..20: mol_type = other DNA
acgccccgcgcccgggcccg

SEQ ID NO: 149701 - DNA, 20 bp, synthetic construct
  source 1..20: mol_type = other DNA
cacgccccgcgcccgggccc

SEQ ID NO: 149702 - DNA, 20 bp, synthetic construct
  source 1..20: mol_type = other DNA
ccacgccccgcgcccgggcc

SEQ ID NO: 149703 - DNA, 20 bp, synthetic construct
  source 1..20: mol_type = other DNA
cccacgccccgcgcccgggc

SEQ ID NO: 149704 - DNA, 20 bp, synthetic construct
  source 1..20: mol_type = other DNA
tcccacgccccgcgcccggg

SEQ ID NO: 149705 - DNA, 20 bp, synthetic construct
  source 1..20: mol_type = other DNA
gtcccacgccccgcgcccgg

SEQ ID NO: 149706 - DNA, 20 bp, synthetic construct
  source 1..20: mol_type = other DNA
ggtcccacgccccgcgcccg

SEQ ID NO: 149707 - DNA, 20 bp, synthetic construct
  source 1..20: mol_type = other DNA
cggtcccacgccccgcgccc

SEQ ID NO: 149708 - DNA, 20 bp, synthetic construct
  source 1..20: mol_type = other DNA
tcggtcccacgccccgcgcc

SEQ ID NO: 149709 - DNA, 20 bp, synthetic construct
  source 1..20: mol_type = other DNA
ctcggtcccacgccccgcgc

SEQ ID NO: 149710 - DNA, 20 bp, synthetic construct
  source 1..20: mol_type = other DNA
cctcggtcccacgccccgcg

SEQ ID NO: 149711 - DNA, 20 bp, synthetic construct
  source 1..20: mol_type = other DNA
gcctcggtcccacgccccgc

SEQ ID NO: 149712 - DNA, 20 bp, synthetic construct
  source 1..20: mol_type = other DNA
ggcctcggtcccacgccccg

SEQ ID NO: 149713 - DNA, 20 bp, synthetic construct
  source 1..20: mol_type = other DNA
cggcctcggtcccacgcccc

SEQ ID NO: 149714 - DNA, 20 bp, synthetic construct
  source 1..20: mol_type = other DNA
gcggcctcggtcccacgccc

SEQ ID NO: 149715 - DNA, 20 bp, synthetic construct
  source 1..20: mol_type = other DNA
ggcggcctcggtcccacgcc

SEQ ID NO: 149716 - DNA, 20 bp, synthetic construct
  source 1..20: mol_type = other DNA
cggcggcctcggtcccacgc

SEQ ID NO: 149717 - DNA, 20 bp, synthetic construct
  source 1..20: mol_type = other DNA
gcggcggcctcggtcccacg

SEQ ID NO: 149718 - DNA, 20 bp, synthetic construct
  source 1..20: mol_type = other DNA
cgcggcggcctcggtcccac

SEQ ID NO: 149719 - DNA, 20 bp, synthetic construct
  source 1..20: mol_type = other DNA
ccgcggcggcctcggtccca

SEQ ID NO: 149720 - DNA, 20 bp, synthetic construct
  source 1..20: mol_type = other DNA
cccgcggcggcctcggtccc

SEQ ID NO: 149721 - DNA, 20 bp, synthetic construct
  source 1..20: mol_type = other DNA
ccccgcggcggcctcggtcc

SEQ ID NO: 149722 - DNA, 20 bp, synthetic construct
  source 1..20: mol_type = other DNA
gccccgcggcggcctcggtc

SEQ ID NO: 149723 - DNA, 20 bp, synthetic construct
  source 1..20: mol_type = other DNA
agccccgcggcggcctcggt

SEQ ID NO: 149724 - DNA, 20 bp, synthetic construct
  source 1..20: mol_type = other DNA
cagccccgcggcggcctcgg

SEQ ID NO: 149725 - DNA, 20 bp, synthetic construct
  source 1..20: mol_type = other DNA
ccagccccgcggcggcctcg

SEQ ID NO: 149726 - DNA, 20 bp, synthetic construct
  source 1..20: mol_type = other DNA
cccagccccgcggcggcctc

SEQ ID NO: 149727 - DNA, 20 bp, synthetic construct
  source 1..20: mol_type = other DNA
gcccagccccgcggcggcct

SEQ ID NO: 149728 - DNA, 20 bp, synthetic construct
  source 1..20: mol_type = other DNA
ggcccagccccgcggcggcc

SEQ ID NO: 149729 - DNA, 20 bp, synthetic construct
  source 1..20: mol_type = other DNA
aggcccagccccgcggcggc

SEQ ID NO: 149730 - DNA, 20 bp, synthetic construct
  source 1..20: mol_type = other DNA
caggcccagccccgcggcgg

SEQ ID NO: 149731 - DNA, 20 bp, synthetic construct
  source 1..20: mol_type = other DNA
gcaggcccagccccgcggcg

SEQ ID NO: 149732 - DNA, 20 bp, synthetic construct
  source 1..20: mol_type = other DNA
cgcaggcccagccccgcggc

SEQ ID NO: 149733 - DNA, 20 bp, synthetic construct
  source 1..20: mol_type = other DNA
gcgcaggcccagccccgcgg

SEQ ID NO: 149734 - DNA, 20 bp, synthetic construct
  source 1..20: mol_type = other DNA
cgcgcaggcccagccccgcg

SEQ ID NO: 149735 - DNA, 20 bp, synthetic construct
  source 1..20: mol_type = other DNA
acgcgcaggcccagccccgc

SEQ ID NO: 149736 - DNA, 20 bp, synthetic construct
  source 1..20: mol_type = other DNA
cacgcgcaggcccagccccg

SEQ ID NO: 149737 - DNA, 20 bp, synthetic construct
  source 1..20: mol_type = other DNA
ccacgcgcaggcccagcccc

SEQ ID NO: 149738 - DNA, 20 bp, synthetic construct
  source 1..20: mol_type = other DNA
gccacgcgcaggcccagccc

SEQ ID NO: 149739 - DNA, 20 bp, synthetic construct
  source 1..20: mol_type = other DNA
cgccacgcgcaggcccagcc

SEQ ID NO: 149740 - DNA, 20 bp, synthetic construct
  source 1..20: mol_type = other DNA
ccgccacgcgcaggcccagc

SEQ ID NO: 149741 - DNA, 20 bp, synthetic construct
  source 1..20: mol_type = other DNA
cccgccacgcgcaggcccag

SEQ ID NO: 149742 - DNA, 20 bp, synthetic construct
  source 1..20: mol_type = other DNA
tcccgccacgcgcaggccca

SEQ ID NO: 149743 - DNA, 20 bp, synthetic construct
  source 1..20: mol_type = other DNA
ctcccgccacgcgcaggccc

SEQ ID NO: 149744 - DNA, 20 bp, synthetic construct
  source 1..20: mol_type = other DNA
gctcccgccacgcgcaggcc

SEQ ID NO: 149745 - DNA, 20 bp, synthetic construct
  source 1..20: mol_type = other DNA
cgctcccgccacgcgcaggc

SEQ ID NO: 149746 - DNA, 20 bp, synthetic construct
  source 1..20: mol_type = other DNA
gcgctcccgccacgcgcagg

SEQ ID NO: 149747 - DNA, 20 bp, synthetic construct
  source 1..20: mol_type = other DNA
cgcgctcccgccacgcgcag

SEQ ID NO: 149748 - DNA, 20 bp, synthetic construct
  source 1..20: mol_type = other DNA
ccgcgctcccgccacgcgca

SEQ ID NO: 149749 - DNA, 20 bp, synthetic construct
  source 1..20: mol_type = other DNA
cccgcgctcccgccacgcgc

SEQ ID NO: 149750 - DNA, 20 bp, synthetic construct
  source 1..20: mol_type = other DNA
ccccgcgctcccgccacgcg

SEQ ID NO: 149751 - DNA, 20 bp, synthetic construct
  source 1..20: mol_type = other DNA
tccccgcgctcccgccacgc

SEQ ID NO: 149752 - DNA, 20 bp, synthetic construct
  source 1..20: mol_type = other DNA
ctccccgcgctcccgccacg

SEQ ID NO: 149753 - DNA, 20 bp, synthetic construct
  source 1..20: mol_type = other DNA
cctccccgcgctcccgccac

SEQ ID NO: 149754 - DNA, 20 bp, synthetic construct
  source 1..20: mol_type = other DNA
ccctccccgcgctcccgcca

SEQ ID NO: 149755 - DNA, 20 bp, synthetic construct
  source 1..20: mol_type = other DNA
tccctccccgcgctcccgcc

SEQ ID NO: 149756 - DNA, 20 bp, synthetic construct
  source 1..20: mol_type = other DNA
atccctccccgcgctcccgc

SEQ ID NO: 149757 - DNA, 20 bp, synthetic construct
  source 1..20: mol_type = other DNA
aatccctccccgcgctcccg

SEQ ID NO: 149758 - DNA, 20 bp, synthetic construct
  source 1..20: mol_type = other DNA
caatccctccccgcgctccc

SEQ ID NO: 149759 - DNA, 20 bp, synthetic construct
  source 1..20: mol_type = other DNA
gcaatccctccccgcgctcc

SEQ ID NO: 149760 - DNA, 20 bp, synthetic construct
  source 1..20: mol_type = other DNA
ggcaatccctccccgcgctc

SEQ ID NO: 149761 - DNA, 20 bp, synthetic construct
  source 1..20: mol_type = other DNA
cggcaatccctccccgcgct

SEQ ID NO: 149762 - DNA, 20 bp, synthetic construct
  source 1..20: mol_type = other DNA
gcggcaatccctccccgcgc

SEQ ID NO: 149763 - DNA, 20 bp, synthetic construct
  source 1..20: mol_type = other DNA
cgcggcaatccctccccgcg

SEQ ID NO: 149764 - DNA, 20 bp, synthetic construct
  source 1..20: mol_type = other DNA
ccgcggcaatccctccccgc

SEQ ID NO: 149765 - DNA, 20 bp, synthetic construct
  source 1..20: mol_type = other DNA
cccgcggcaatccctccccg

SEQ ID NO: 149766 - DNA, 20 bp, synthetic construct
  source 1..20: mol_type = other DNA
gcccgcggcaatccctcccc

SEQ ID NO: 149767 - DNA, 20 bp, synthetic construct
  source 1..20: mol_type = other DNA
ggcccgcggcaatccctccc

SEQ ID NO: 149768 - DNA, 20 bp, synthetic construct
  source 1..20: mol_type = other DNA
cggcccgcggcaatccctcc

SEQ ID NO: 149769 - DNA, 20 bp, synthetic construct
  source 1..20: mol_type = other DNA
ccggcccgcggcaatccctc

SEQ ID NO: 149770 - DNA, 20 bp, synthetic construct
  source 1..20: mol_type = other DNA
cccggcccgcggcaatccct

SEQ ID NO: 149771 - DNA, 20 bp, synthetic construct
  source 1..20: mol_type = other DNA
ccccggcccgcggcaatccc

SEQ ID NO: 149772 - DNA, 20 bp, synthetic construct
  source 1..20: mol_type = other DNA
tccccggcccgcggcaatcc

SEQ ID NO: 149773 - DNA, 20 bp, synthetic construct
  source 1..20: mol_type = other DNA
ctccccggcccgcggcaatc

SEQ ID NO: 149774 - DNA, 20 bp, synthetic construct
  source 1..20: mol_type = other DNA
cctccccggcccgcggcaat

SEQ ID NO: 149775 - DNA, 20 bp, synthetic construct
  source 1..20: mol_type = other DNA
ccctccccggcccgcggcaa

SEQ ID NO: 149776 - DNA, 20 bp, synthetic construct
  source 1..20: mol_type = other DNA
cccctccccggcccgcggca

SEQ ID NO: 149777 - DNA, 20 bp, synthetic construct
  source 1..20: mol_type = other DNA
gcccctccccggcccgcggc

SEQ ID NO: 149778 - DNA, 20 bp, synthetic construct
  source 1..20: mol_type = other DNA
cgcccctccccggcccgcgg

SEQ ID NO: 149779 - DNA, 20 bp, synthetic construct
  source 1..20: mol_type = other DNA
ccgcccctccccggcccgcg

SEQ ID NO: 149780 - DNA, 20 bp, synthetic construct
  source 1..20: mol_type = other DNA
cccgcccctccccggcccgc

SEQ ID NO: 149781 - DNA, 20 bp, synthetic construct
  source 1..20: mol_type = other DNA
ccccgcccctccccggcccg

SEQ ID NO: 149782 - DNA, 20 bp, synthetic construct
  source 1..20: mol_type = other DNA
cccccgcccctccccggccc

SEQ ID NO: 149783 - DNA, 20 bp, synthetic construct
  source 1..20: mol_type = other DNA
gcccccgcccctccccggcc

SEQ ID NO: 149784 - DNA, 20 bp, synthetic construct
  source 1..20: mol_type = other DNA
cgcccccgcccctccccggc

SEQ ID NO: 149785 - DNA, 20 bp, synthetic construct
  source 1..20: mol_type = other DNA
ccgcccccgcccctccccgg

SEQ ID NO: 149786 - DNA, 20 bp, synthetic construct
  source 1..20: mol_type = other DNA
cccgcccccgcccctccccg

SEQ ID NO: 149787 - DNA, 20 bp, synthetic construct
  source 1..20: mol_type = other DNA
gcccgcccccgcccctcccc

SEQ ID NO: 149788 - DNA, 20 bp, synthetic construct
  source 1..20: mol_type = other DNA
cgcccgcccccgcccctccc

SEQ ID NO: 149789 - DNA, 20 bp, synthetic construct
  source 1..20: mol_type = other DNA
acgcccgcccccgcccctcc

SEQ ID NO: 149790 - DNA, 20 bp, synthetic construct
  source 1..20: mol_type = other DNA
cacgcccgcccccgcccctc

SEQ ID NO: 149791 - DNA, 20 bp, synthetic construct
  source 1..20: mol_type = other DNA
gcacgcccgcccccgcccct

SEQ ID NO: 149792 - DNA, 20 bp, synthetic construct
  source 1..20: mol_type = other DNA
agcacgcccgcccccgcccc

SEQ ID NO: 149793 - DNA, 20 bp, synthetic construct
  source 1..20: mol_type = other DNA
cagcacgcccgcccccgccc

SEQ ID NO: 149794 - DNA, 20 bp, synthetic construct
  source 1..20: mol_type = other DNA
gcagcacgcccgcccccgcc

SEQ ID NO: 149795 - DNA, 20 bp, synthetic construct
  source 1..20: mol_type = other DNA
ggcagcacgcccgcccccgc

SEQ ID NO: 149796 - DNA, 20 bp, synthetic construct
  source 1..20: mol_type = other DNA
gggcagcacgcccgcccccg

SEQ ID NO: 149797 - DNA, 20 bp, synthetic construct
  source 1..20: mol_type = other DNA
agggcagcacgcccgccccc

SEQ ID NO: 149798 - DNA, 20 bp, synthetic construct
  source 1..20: mol_type = other DNA
gagggcagcacgcccgcccc

SEQ ID NO: 149799 - DNA, 20 bp, synthetic construct
  source 1..20: mol_type = other DNA
agagggcagcacgcccgccc

SEQ ID NO: 149800 - DNA, 20 bp, synthetic construct
  source 1..20: mol_type = other DNA
cagagggcagcacgcccgcc

SEQ ID NO: 149801 - DNA, 20 bp, synthetic construct
  source 1..20: mol_type = other DNA
acagagggcagcacgcccgc

SEQ ID NO: 149802 - DNA, 20 bp, synthetic construct
  source 1..20: mol_type = other DNA
cacagagggcagcacgcccg

SEQ ID NO: 149803 - DNA, 20 bp, synthetic construct
  source 1..20: mol_type = other DNA
ccacagagggcagcacgccc

SEQ ID NO: 149804 - DNA, 20 bp, synthetic construct
  source 1..20: mol_type = other DNA
accacagagggcagcacgcc

SEQ ID NO: 149805 - DNA, 20 bp, synthetic construct
  source 1..20: mol_type = other DNA
gaccacagagggcagcacgc

SEQ ID NO: 149806 - DNA, 20 bp, synthetic construct
  source 1..20: mol_type = other DNA
ggaccacagagggcagcacg

SEQ ID NO: 149807 - DNA, 20 bp, synthetic construct
  source 1..20: mol_type = other DNA
aggaccacagagggcagcac

SEQ ID NO: 149808 - DNA, 20 bp, synthetic construct
  source 1..20: mol_type = other DNA
aaggaccacagagggcagca

SEQ ID NO: 149809 - DNA, 20 bp, synthetic construct
  source 1..20: mol_type = other DNA
caaggaccacagagggcagc

SEQ ID NO: 149810 - DNA, 20 bp, synthetic construct
  source 1..20: mol_type = other DNA
ccaaggaccacagagggcag

SEQ ID NO: 149811 - DNA, 20 bp, synthetic construct
  source 1..20: mol_type = other DNA
cccaaggaccacagagggca

SEQ ID NO: 149812 - DNA, 20 bp, synthetic construct
  source 1..20: mol_type = other DNA
gcccaaggaccacagagggc

SEQ ID NO: 149813 - DNA, 20 bp, synthetic construct
  source 1..20: mol_type = other DNA
ggcccaaggaccacagaggg

SEQ ID NO: 149814 - DNA, 20 bp, synthetic construct
  source 1..20: mol_type = other DNA
cggcccaaggaccacagagg

SEQ ID NO: 149815 - DNA, 20 bp, synthetic construct
  source 1..20: mol_type = other DNA
gcggcccaaggaccacagag

SEQ ID NO: 149816 - DNA, 20 bp, synthetic construct
  source 1..20: mol_type = other DNA
ggcggcccaaggaccacaga

SEQ ID NO: 149817 - DNA, 20 bp, synthetic construct
  source 1..20: mol_type = other DNA
cggcggcccaaggaccacag

SEQ ID NO: 149818 - DNA, 20 bp, synthetic construct
  source 1..20: mol_type = other DNA
gcggcggcccaaggaccaca

SEQ ID NO: 149819 - DNA, 20 bp, synthetic construct
  source 1..20: mol_type = other DNA
ggcggcggcccaaggaccac

SEQ ID NO: 149820 - DNA, 20 bp, synthetic construct
  source 1..20: mol_type = other DNA
cggcggcggcccaaggacca

SEQ ID NO: 149821 - DNA, 20 bp, synthetic construct
  source 1..20: mol_type = other DNA
gcggcggcggcccaaggacc

SEQ ID NO: 149822 - DNA, 20 bp, synthetic construct
  source 1..20: mol_type = other DNA
cgcggcggcggcccaaggac

SEQ ID NO: 149823 - DNA, 20 bp, synthetic construct
  source 1..20: mol_type = other DNA
ccgcggcggcggcccaagga

SEQ ID NO: 149824 - DNA, 20 bp, synthetic construct
  source 1..20: mol_type = other DNA
cccgcggcggcggcccaagg

SEQ ID NO: 149825 - DNA, 20 bp, synthetic construct
  source 1..20: mol_type = other DNA
acccgcggcggcggcccaag

SEQ ID NO: 149826 - DNA, 20 bp, synthetic construct
  source 1..20: mol_type = other DNA
gacccgcggcggcggcccaa

SEQ ID NO: 149827 - DNA, 20 bp, synthetic construct
  source 1..20: mol_type = other DNA
agacccgcggcggcggccca

SEQ ID NO: 149828 - DNA, 20 bp, synthetic construct
  source 1..20: mol_type = other DNA
cagacccgcggcggcggccc

SEQ ID NO: 149829 - DNA, 20 bp, synthetic construct
  source 1..20: mol_type = other DNA
acagacccgcggcggcggcc

SEQ ID NO: 149830 - DNA, 20 bp, synthetic construct
  source 1..20: mol_type = other DNA
gacagacccgcggcggcggc

SEQ ID NO: 149831 - DNA, 20 bp, synthetic construct
  source 1..20: mol_type = other DNA
cgacagacccgcggcggcgg

SEQ ID NO: 149832 - DNA, 20 bp, synthetic construct
  source 1..20: mol_type = other DNA
acgacagacccgcggcggcg

SEQ ID NO: 149833 - DNA, 20 bp, synthetic construct
  source 1..20: mol_type = other DNA
cacgacagacccgcggcggc

SEQ ID NO: 149834 - DNA, 20 bp, synthetic construct
  source 1..20: mol_type = other DNA
ccacgacagacccgcggcgg

SEQ ID NO: 149835 - DNA, 20 bp, synthetic construct
  source 1..20: mol_type = other DNA
accacgacagacccgcggcg

SEQ ID NO: 149836 - DNA, 20 bp, synthetic construct
  source 1..20: mol_type = other DNA
caccacgacagacccgcggc

SEQ ID NO: 149837 - DNA, 20 bp, synthetic construct
  source 1..20: mol_type = other DNA
gcaccacgacagacccgcgg

SEQ ID NO: 149838 - DNA, 20 bp, synthetic construct
  source 1..20: mol_type = other DNA
ggcaccacgacagacccgcg

SEQ ID NO: 149839 - DNA, 20 bp, synthetic construct
  source 1..20: mol_type = other DNA
aggcaccacgacagacccgc

SEQ ID NO: 149840 - DNA, 20 bp, synthetic construct
  source 1..20: mol_type = other DNA
caggcaccacgacagacccg

SEQ ID NO: 149841 - DNA, 20 bp, synthetic construct
  source 1..20: mol_type = other DNA
ccaggcaccacgacagaccc

SEQ ID NO: 149842 - DNA, 20 bp, synthetic construct
  source 1..20: mol_type = other DNA
tccaggcaccacgacagacc

SEQ ID NO: 149843 - DNA, 20 bp, synthetic construct
  source 1..20: mol_type = other DNA
ctccaggcaccacgacagac

SEQ ID NO: 149844 - DNA, 20 bp, synthetic construct
  source 1..20: mol_type = other DNA
gctccaggcaccacgacaga

SEQ ID NO: 149845 - DNA, 20 bp, synthetic construct
  source 1..20: mol_type = other DNA
cgctccaggcaccacgacag

SEQ ID NO: 149846 - DNA, 20 bp, synthetic construct
  source 1..20: mol_type = other DNA
ccgctccaggcaccacgaca

SEQ ID NO: 149847 - DNA, 20 bp, synthetic construct
  source 1..20: mol_type = other DNA
gccgctccaggcaccacgac

SEQ ID NO: 149848 - DNA, 20 bp, synthetic construct
  source 1..20: mol_type = other DNA
agccgctccaggcaccacga

SEQ ID NO: 149849 - DNA, 20 bp, synthetic construct
  source 1..20: mol_type = other DNA
cagccgctccaggcaccacg

SEQ ID NO: 149850 - DNA, 20 bp, synthetic construct
  source 1..20: mol_type = other DNA
acagccgctccaggcaccac

SEQ ID NO: 149851 - DNA, 20 bp, synthetic construct
  source 1..20: mol_type = other DNA
cacagccgctccaggcacca

SEQ ID NO: 149852 - DNA, 20 bp, synthetic construct
  source 1..20: mol_type = other DNA
gcacagccgctccaggcacc

SEQ ID NO: 149853 - DNA, 20 bp, synthetic construct
  source 1..20: mol_type = other DNA
agcacagccgctccaggcac

SEQ ID NO: 149854 - DNA, 20 bp, synthetic construct
  source 1..20: mol_type = other DNA
gagcacagccgctccaggca

SEQ ID NO: 149855 - DNA, 20 bp, synthetic construct
  source 1..20: mol_type = other DNA
cgagcacagccgctccaggc

SEQ ID NO: 149856 - DNA, 20 bp, synthetic construct
  source 1..20: mol_type = other DNA
acgagcacagccgctccagg

SEQ ID NO: 149857 - DNA, 20 bp, synthetic construct
  source 1..20: mol_type = other DNA
gacgagcacagccgctccag

SEQ ID NO: 149858 - DNA, 20 bp, synthetic construct
  source 1..20: mol_type = other DNA
ggacgagcacagccgctcca

SEQ ID NO: 149859 - DNA, 20 bp, synthetic construct
  source 1..20: mol_type = other DNA
gggacgagcacagccgctcc

SEQ ID NO: 149860 - DNA, 20 bp, synthetic construct
  source 1..20: mol_type = other DNA
agggacgagcacagccgctc

SEQ ID NO: 149861 - DNA, 20 bp, synthetic construct
  source 1..20: mol_type = other DNA
aagggacgagcacagccgct

SEQ ID NO: 149862 - DNA, 20 bp, synthetic construct
  source 1..20: mol_type = other DNA
caagggacgagcacagccgc

SEQ ID NO: 149863 - DNA, 20 bp, synthetic construct
  source 1..20: mol_type = other DNA
gcaagggacgagcacagccg

SEQ ID NO: 149864 - DNA, 20 bp, synthetic construct
  source 1..20: mol_type = other DNA
agcaagggacgagcacagcc

SEQ ID NO: 149865 - DNA, 20 bp, synthetic construct
  source 1..20: mol_type = other DNA
aagcaagggacgagcacagc

SEQ ID NO: 149866 - DNA, 20 bp, synthetic construct
  source 1..20: mol_type = other DNA
caagcaagggacgagcacag

SEQ ID NO: 149867 - DNA, 20 bp, synthetic construct
  source 1..20: mol_type = other DNA
ccaagcaagggacgagcaca

SEQ ID NO: 149868 - DNA, 20 bp, synthetic construct
  source 1..20: mol_type = other DNA
gccaagcaagggacgagcac

SEQ ID NO: 149869 - DNA, 20 bp, synthetic construct
  source 1..20: mol_type = other DNA
ggccaagcaagggacgagca

SEQ ID NO: 149870 - DNA, 20 bp, synthetic construct
  source 1..20: mol_type = other DNA
cggccaagcaagggacgagc

SEQ ID NO: 149871 - DNA, 20 bp, synthetic construct
  source 1..20: mol_type = other DNA
acggccaagcaagggacgag

SEQ ID NO: 149872 - DNA, 20 bp, synthetic construct
  source 1..20: mol_type = other DNA
cacggccaagcaagggacga

SEQ ID NO: 149873 - DNA, 20 bp, synthetic construct
  source 1..20: mol_type = other DNA
acacggccaagcaagggacg

SEQ ID NO: 149874 - DNA, 20 bp, synthetic construct
  source 1..20: mol_type = other DNA
aacacggccaagcaagggac

SEQ ID NO: 149875 - DNA, 20 bp, synthetic construct
  source 1..20: mol_type = other DNA
gaacacggccaagcaaggga

SEQ ID NO: 149876 - DNA, 20 bp, synthetic construct
  source 1..20: mol_type = other DNA
agaacacggccaagcaaggg

SEQ ID NO: 149877 - DNA, 20 bp, synthetic construct
  source 1..20: mol_type = other DNA
gagaacacggccaagcaagg

SEQ ID NO: 149878 - DNA, 20 bp, synthetic construct
  source 1..20: mol_type = other DNA
cgagaacacggccaagcaag

SEQ ID NO: 149879 - DNA, 20 bp, synthetic construct
  source 1..20: mol_type = other DNA
acgagaacacggccaagcaa

SEQ ID NO: 149880 - DNA, 20 bp, synthetic construct
  source 1..20: mol_type = other DNA
aacgagaacacggccaagca

SEQ ID NO: 149881 - DNA, 20 bp, synthetic construct
  source 1..20: mol_type = other DNA
gaacgagaacacggccaagc

SEQ ID NO: 149882 - DNA, 20 bp, synthetic construct
  source 1..20: mol_type = other DNA
ggaacgagaacacggccaag

SEQ ID NO: 149883 - DNA, 20 bp, synthetic construct
  source 1..20: mol_type = other DNA
aggaacgagaacacggccaa

SEQ ID NO: 149884 - DNA, 20 bp, synthetic construct
  source 1..20: mol_type = other DNA
caggaacgagaacacggcca

SEQ ID NO: 149885 - DNA, 20 bp, synthetic construct
  source 1..20: mol_type = other DNA
tcaggaacgagaacacggcc

SEQ ID NO: 149886 - DNA, 20 bp, synthetic construct
  source 1..20: mol_type = other DNA
ctcaggaacgagaacacggc

SEQ ID NO: 149887 - DNA, 20 bp, synthetic construct
  source 1..20: mol_type = other DNA
cctcaggaacgagaacacgg

SEQ ID NO: 149888 - DNA, 20 bp, synthetic construct
  source 1..20: mol_type = other DNA
ccctcaggaacgagaacacg

SEQ ID NO: 149889 - DNA, 20 bp, synthetic construct
  source 1..20: mol_type = other DNA
accctcaggaacgagaacac

SEQ ID NO: 149890 - DNA, 20 bp, synthetic construct
  source 1..20: mol_type = other DNA
gaccctcaggaacgagaaca

SEQ ID NO: 149891 - DNA, 20 bp, synthetic construct
  source 1..20: mol_type = other DNA
ggaccctcaggaacgagaac

SEQ ID NO: 149892 - DNA, 20 bp, synthetic construct
  source 1..20: mol_type = other DNA
gggaccctcaggaacgagaa

SEQ ID NO: 149893 - DNA, 20 bp, synthetic construct
  source 1..20: mol_type = other DNA
cgggaccctcaggaacgaga

SEQ ID NO: 149894 - DNA, 20 bp, synthetic construct
  source 1..20: mol_type = other DNA
gcgggaccctcaggaacgag

SEQ ID NO: 149895 - DNA, 20 bp, synthetic construct
  source 1..20: mol_type = other DNA
cgcgggaccctcaggaacga

SEQ ID NO: 149896 - DNA, 20 bp, synthetic construct
  source 1..20: mol_type = other DNA
ccgcgggaccctcaggaacg

SEQ ID NO: 149897 - DNA, 20 bp, synthetic construct
  source 1..20: mol_type = other DNA
tccgcgggaccctcaggaac

SEQ ID NO: 149898 - DNA, 20 bp, synthetic construct
  source 1..20: mol_type = other DNA
gtccgcgggaccctcaggaa

SEQ ID NO: 149899 - DNA, 20 bp, synthetic construct
  source 1..20: mol_type = other DNA
tgtccgcgggaccctcagga

SEQ ID NO: 149900 - DNA, 20 bp, synthetic construct
  source 1..20: mol_type = other DNA
gtgtccgcgggaccctcagg

SEQ ID NO: 149901 - DNA, 20 bp, synthetic construct
  source 1..20: mol_type = other DNA
ggtgtccgcgggaccctcag

SEQ ID NO: 149902 - DNA, 20 bp, synthetic construct
  source 1..20: mol_type = other DNA
cggtgtccgcgggaccctca

SEQ ID NO: 149903 - DNA, 20 bp, synthetic construct
  source 1..20: mol_type = other DNA
tcggtgtccgcgggaccctc

SEQ ID NO: 149904 - DNA, 20 bp, synthetic construct
  source 1..20: mol_type = other DNA
ctcggtgtccgcgggaccct

SEQ ID NO: 149905 - DNA, 20 bp, synthetic construct
  source 1..20: mol_type = other DNA
actcggtgtccgcgggaccc

SEQ ID NO: 149906 - DNA, 20 bp, synthetic construct
  source 1..20: mol_type = other DNA
cactcggtgtccgcgggacc

SEQ ID NO: 149907 - DNA, 20 bp, synthetic construct
  source 1..20: mol_type = other DNA
ccactcggtgtccgcgggac

SEQ ID NO: 149908 - DNA, 20 bp, synthetic construct
  source 1..20: mol_type = other DNA
gccactcggtgtccgcggga

SEQ ID NO: 149909 - DNA, 20 bp, synthetic construct
  source 1..20: mol_type = other DNA
cgccactcggtgtccgcggg

SEQ ID NO: 149910 - DNA, 20 bp, synthetic construct
  source 1..20: mol_type = other DNA
gcgccactcggtgtccgcgg

SEQ ID NO: 149911 - DNA, 20 bp, synthetic construct
  source 1..20: mol_type = other DNA
tgcgccactcggtgtccgcg

SEQ ID NO: 149912 - DNA, 20 bp, synthetic construct
  source 1..20: mol_type = other DNA
ctgcgccactcggtgtccgc

SEQ ID NO: 149913 - DNA, 20 bp, synthetic construct
  source 1..20: mol_type = other DNA
actgcgccactcggtgtccg

SEQ ID NO: 149914 - DNA, 20 bp, synthetic construct
  source 1..20: mol_type = other DNA
cactgcgccactcggtgtcc

SEQ ID NO: 149915 - DNA, 20 bp, synthetic construct
  source 1..20: mol_type = other DNA
gcactgcgccactcggtgtc

SEQ ID NO: 149916 - DNA, 20 bp, synthetic construct
  source 1..20: mol_type = other DNA
ggcactgcgccactcggtgt

SEQ ID NO: 149917 - DNA, 20 bp, synthetic construct
  source 1..20: mol_type = other DNA
tggcactgcgccactcggtg

SEQ ID NO: 149918 - DNA, 20 bp, synthetic construct
  source 1..20: mol_type = other DNA
ctggcactgcgccactcggt

SEQ ID NO: 149919 - DNA, 20 bp, synthetic construct
  source 1..20: mol_type = other DNA
cctggcactgcgccactcgg

SEQ ID NO: 149920 - DNA, 20 bp, synthetic construct
  source 1..20: mol_type = other DNA
gcctggcactgcgccactcg

SEQ ID NO: 149921 - DNA, 20 bp, synthetic construct
  source 1..20: mol_type = other DNA
ggcctggcactgcgccactc

SEQ ID NO: 149922 - DNA, 20 bp, synthetic construct
  source 1..20: mol_type = other DNA
gggcctggcactgcgccact

SEQ ID NO: 149923 - DNA, 20 bp, synthetic construct
  source 1..20: mol_type = other DNA
tgggcctggcactgcgccac

SEQ ID NO: 149924 - DNA, 20 bp, synthetic construct
  source 1..20: mol_type = other DNA
ctgggcctggcactgcgcca

SEQ ID NO: 149925 - DNA, 20 bp, synthetic construct
  source 1..20: mol_type = other DNA
gctgggcctggcactgcgcc

SEQ ID NO: 149926 - DNA, 20 bp, synthetic construct
  source 1..20: mol_type = other DNA
ggctgggcctggcactgcgc

SEQ ID NO: 149927 - DNA, 20 bp, synthetic construct
  source 1..20: mol_type = other DNA
gggctgggcctggcactgcg

SEQ ID NO: 149928 - DNA, 20 bp, synthetic construct
  source 1..20: mol_type = other DNA
cgggctgggcctggcactgc

SEQ ID NO: 149929 - DNA, 20 bp, synthetic construct
  source 1..20: mol_type = other DNA
ccgggctgggcctggcactg

SEQ ID NO: 149930 - DNA, 20 bp, synthetic construct
  source 1..20: mol_type = other DNA
cccgggctgggcctggcact

SEQ ID NO: 149931 - DNA, 20 bp, synthetic construct
  source 1..20: mol_type = other DNA
ccccgggctgggcctggcac

SEQ ID NO: 149932 - DNA, 20 bp, synthetic construct
  source 1..20: mol_type = other DNA
tccccgggctgggcctggca

SEQ ID NO: 149933 - DNA, 20 bp, synthetic construct
  source 1..20: mol_type = other DNA
atccccgggctgggcctggc

SEQ ID NO: 149934 - DNA, 20 bp, synthetic construct
  source 1..20: mol_type = other DNA
catccccgggctgggcctgg

SEQ ID NO: 149935 - DNA, 20 bp, synthetic construct
  source 1..20: mol_type = other DNA
ccatccccgggctgggcctg

SEQ ID NO: 149936 - DNA, 20 bp, synthetic construct
  source 1..20: mol_type = other DNA
gccatccccgggctgggcct

SEQ ID NO: 149937 - DNA, 20 bp, synthetic construct
  source 1..20: mol_type = other DNA
cgccatccccgggctgggcc

SEQ ID NO: 149938 - DNA, 20 bp, synthetic construct
  source 1..20: mol_type = other DNA
tcgccatccccgggctgggc

SEQ ID NO: 149939 - DNA, 20 bp, synthetic construct
  source 1..20: mol_type = other DNA
gtcgccatccccgggctggg

SEQ ID NO: 149940 - DNA, 20 bp, synthetic construct
  source 1..20: mol_type = other DNA
agtcgccatccccgggctgg

SEQ ID NO: 149941 - DNA, 20 bp, synthetic construct
  source 1..20: mol_type = other DNA
cagtcgccatccccgggctg

SEQ ID NO: 149942 - DNA, 20 bp, synthetic construct
  source 1..20: mol_type = other DNA
gcagtcgccatccccgggct

SEQ ID NO: 149943 - DNA, 20 bp, synthetic construct
  source 1..20: mol_type = other DNA
cgcagtcgccatccccgggc

SEQ ID NO: 149944 - DNA, 20 bp, synthetic construct
  source 1..20: mol_type = other DNA
gcgcagtcgccatccccggg

SEQ ID NO: 149945 - DNA, 20 bp, synthetic construct
  source 1..20: mol_type = other DNA
ggcgcagtcgccatccccgg

SEQ ID NO: 149946 - DNA, 20 bp, synthetic construct
  source 1..20: mol_type = other DNA
aggcgcagtcgccatccccg

SEQ ID NO: 149947 - DNA, 20 bp, synthetic construct
  source 1..20: mol_type = other DNA
caggcgcagtcgccatcccc

SEQ ID NO: 149948 - DNA, 20 bp, synthetic construct
  source 1..20: mol_type = other DNA
ccaggcgcagtcgccatccc

SEQ ID NO: 149949 - DNA, 20 bp, synthetic construct
  source 1..20: mol_type = other DNA
cccaggcgcagtcgccatcc

SEQ ID NO: 149950 - DNA, 20 bp, synthetic construct
  source 1..20: mol_type = other DNA
gcccaggcgcagtcgccatc

SEQ ID NO: 149951 - DNA, 20 bp, synthetic construct
  source 1..20: mol_type = other DNA
ggcccaggcgcagtcgccat

SEQ ID NO: 149952 - DNA, 20 bp, synthetic construct
  source 1..20: mol_type = other DNA
gggcccaggcgcagtcgcca

SEQ ID NO: 149953 - DNA, 20 bp, synthetic construct
  source 1..20: mol_type = other DNA
cgggcccaggcgcagtcgcc

SEQ ID NO: 149954 - DNA, 20 bp, synthetic construct
  source 1..20: mol_type = other DNA
gcgggcccaggcgcagtcgc

SEQ ID NO: 149955 - DNA, 20 bp, synthetic construct
  source 1..20: mol_type = other DNA
ggcgggcccaggcgcagtcg

SEQ ID NO: 149956 - DNA, 20 bp, synthetic construct
  source 1..20: mol_type = other DNA
aggcgggcccaggcgcagtc

SEQ ID NO: 149957 - DNA, 20 bp, synthetic construct
  source 1..20: mol_type = other DNA
caggcgggcccaggcgcagt

SEQ ID NO: 149958 - DNA, 20 bp, synthetic construct
  source 1..20: mol_type = other DNA
ccaggcgggcccaggcgcag

SEQ ID NO: 149959 - DNA, 20 bp, synthetic construct
  source 1..20: mol_type = other DNA
accaggcgggcccaggcgca

SEQ ID NO: 149960 - DNA, 20 bp, synthetic construct
  source 1..20: mol_type = other DNA
caccaggcgggcccaggcgc

SEQ ID NO: 149961 - DNA, 20 bp, synthetic construct
  source 1..20: mol_type = other DNA
acaccaggcgggcccaggcg

SEQ ID NO: 149962 - DNA, 20 bp, synthetic construct
  source 1..20: mol_type = other DNA
gacaccaggcgggcccaggc

SEQ ID NO: 149963 - DNA, 20 bp, synthetic construct
  source 1..20: mol_type = other DNA
agacaccaggcgggcccagg

SEQ ID NO: 149964 - DNA, 20 bp, synthetic construct
  source 1..20: mol_type = other DNA
aagacaccaggcgggcccag

SEQ ID NO: 149965 - DNA, 20 bp, synthetic construct
  source 1..20: mol_type = other DNA
gaagacaccaggcgggccca

SEQ ID NO: 149966 - DNA, 20 bp, synthetic construct
  source 1..20: mol_type = other DNA
cgaagacaccaggcgggccc

SEQ ID NO: 149967 - DNA, 20 bp, synthetic construct
  source 1..20: mol_type = other DNA
gcgaagacaccaggcgggcc

SEQ ID NO: 149968 - DNA, 20 bp, synthetic construct
  source 1..20: mol_type = other DNA
tgcgaagacaccaggcgggc

SEQ ID NO: 149969 - DNA, 20 bp, synthetic construct
  source 1..20: mol_type = other DNA
atgcgaagacaccaggcggg

SEQ ID NO: 149970 - DNA, 20 bp, synthetic construct
  source 1..20: mol_type = other DNA
gatgcgaagacaccaggcgg

SEQ ID NO: 149971 - DNA, 20 bp, synthetic construct
  source 1..20: mol_type = other DNA
ggatgcgaagacaccaggcg

SEQ ID NO: 149972 - DNA, 20 bp, synthetic construct
  source 1..20: mol_type = other DNA
gggatgcgaagacaccaggc

SEQ ID NO: 149973 - DNA, 20 bp, synthetic construct
  source 1..20: mol_type = other DNA
agggatgcgaagacaccagg

SEQ ID NO: 149974 - DNA, 20 bp, synthetic construct
  source 1..20: mol_type = other DNA
gagggatgcgaagacaccag

SEQ ID NO: 149975 - DNA, 20 bp, synthetic construct
  source 1..20: mol_type = other DNA
agagggatgcgaagacacca

SEQ ID NO: 149976 - DNA, 20 bp, synthetic construct
  source 1..20: mol_type = other DNA
gagagggatgcgaagacacc

SEQ ID NO: 149977 - DNA, 20 bp, synthetic construct
  source 1..20: mol_type = other DNA
ggagagggatgcgaagacac

SEQ ID NO: 149978 - DNA, 20 bp, synthetic construct
  source 1..20: mol_type = other DNA
cggagagggatgcgaagaca

SEQ ID NO: 149979 - DNA, 20 bp, synthetic construct
  source 1..20: mol_type = other DNA
gcggagagggatgcgaagac

SEQ ID NO: 149980 - DNA, 20 bp, synthetic construct
  source 1..20: mol_type = other DNA
agcggagagggatgcgaaga

SEQ ID NO: 149981 - DNA, 20 bp, synthetic construct
  source 1..20: mol_type = other DNA
aagcggagagggatgcgaag

SEQ ID NO: 149982 - DNA, 20 bp, synthetic construct
  source 1..20: mol_type = other DNA
aaagcggagagggatgcgaa

SEQ ID NO: 149983 - DNA, 20 bp, synthetic construct
  source 1..20: mol_type = other DNA
gaaagcggagagggatgcga

SEQ ID NO: 149984 - DNA, 20 bp, synthetic construct
  source 1..20: mol_type = other DNA
ggaaagcggagagggatgcg

SEQ ID NO: 149985 - DNA, 20 bp, synthetic construct
  source 1..20: mol_type = other DNA
cggaaagcggagagggatgc

SEQ ID NO: 149986 - DNA, 20 bp, synthetic construct
  source 1..20: mol_type = other DNA
ccggaaagcggagagggatg

SEQ ID NO: 149987 - DNA, 20 bp, synthetic construct
  source 1..20: mol_type = other DNA
gccggaaagcggagagggat

SEQ ID NO: 149988 - DNA, 20 bp, synthetic construct
  source 1..20: mol_type = other DNA
agccggaaagcggagaggga

SEQ ID NO: 149989 - DNA, 20 bp, synthetic construct
  source 1..20: mol_type = other DNA
aagccggaaagcggagaggg

SEQ ID NO: 149990 - DNA, 20 bp, synthetic construct
  source 1..20: mol_type = other DNA
gaagccggaaagcggagagg

SEQ ID NO: 149991 - DNA, 20 bp, synthetic construct
  source 1..20: mol_type = other DNA
tgaagccggaaagcggagag

SEQ ID NO: 149992 - DNA, 20 bp, synthetic construct
  source 1..20: mol_type = other DNA
ctgaagccggaaagcggaga

SEQ ID NO: 149993 - DNA, 20 bp, synthetic construct
  source 1..20: mol_type = other DNA
gctgaagccggaaagcggag

SEQ ID NO: 149994 - DNA, 20 bp, synthetic construct
  source 1..20: mol_type = other DNA
cgctgaagccggaaagcgga

SEQ ID NO: 149995 - DNA, 20 bp, synthetic construct
  source 1..20: mol_type = other DNA
gcgctgaagccggaaagcgg

SEQ ID NO: 149996 - DNA, 20 bp, synthetic construct
  source 1..20: mol_type = other DNA
agcgctgaagccggaaagcg

SEQ ID NO: 149997 - DNA, 20 bp, synthetic construct
  source 1..20: mol_type = other DNA
gagcgctgaagccggaaagc

SEQ ID NO: 149998 - DNA, 20 bp, synthetic construct
  source 1..20: mol_type = other DNA
agagcgctgaagccggaaag

SEQ ID NO: 149999 - DNA, 20 bp, synthetic construct
  source 1..20: mol_type = other DNA
tagagcgctgaagccggaaa

SEQ ID NO: 150000 - DNA, 20 bp, synthetic construct
  source 1..20: mol_type = other DNA
ctagagcgctgaagccggaa

SEQ ID NO: 150001 - DNA, 20 bp, synthetic construct
  source 1..20: mol_type = other DNA
cctagagcgctgaagccgga

SEQ ID NO: 150002 - DNA, 20 bp, synthetic construct
  source 1..20: mol_type = other DNA
acctagagcgctgaagccgg

SEQ ID NO: 150003 - DNA, 20 bp, synthetic construct
  source 1..20: mol_type = other DNA
gacctagagcgctgaagccg

SEQ ID NO: 150004 - DNA, 20 bp, synthetic construct
  source 1..20: mol_type = other DNA
tgacctagagcgctgaagcc

SEQ ID NO: 150005 - DNA, 20 bp, synthetic construct
  source 1..20: mol_type = other DNA
ctgacctagagcgctgaagc

SEQ ID NO: 150006 - DNA, 20 bp, synthetic construct
  source 1..20: mol_type = other DNA
cctgacctagagcgctgaag

SEQ ID NO: 150007 - DNA, 20 bp, synthetic construct
  source 1..20: mol_type = other DNA
ccctgacctagagcgctgaa

SEQ ID NO: 150008 - DNA, 20 bp, synthetic construct
  source 1..20: mol_type = other DNA
tccctgacctagagcgctga

SEQ ID NO: 150009 - DNA, 20 bp, synthetic construct
  source 1..20: mol_type = other DNA
ctccctgacctagagcgctg

SEQ ID NO: 150010 - DNA, 20 bp, synthetic construct
  source 1..20: mol_type = other DNA
actccctgacctagagcgct

SEQ ID NO: 150011 - DNA, 20 bp, synthetic construct
  source 1..20: mol_type = other DNA
gactccctgacctagagcgc

SEQ ID NO: 150012 - DNA, 20 bp, synthetic construct
  source 1..20: mol_type = other DNA
agactccctgacctagagcg

SEQ ID NO: 150013 - DNA, 20 bp, synthetic construct
  source 1..20: mol_type = other DNA
aagactccctgacctagagc

SEQ ID NO: 150014 - DNA, 20 bp, synthetic construct
  source 1..20: mol_type = other DNA
gaagactccctgacctagag

SEQ ID NO: 150015 - DNA, 20 bp, synthetic construct
  source 1..20: mol_type = other DNA
cgaagactccctgacctaga

SEQ ID NO: 150016 - DNA, 20 bp, synthetic construct
  source 1..20: mol_type = other DNA
gcgaagactccctgacctag

SEQ ID NO: 150017 - DNA, 20 bp, synthetic construct
  source 1..20: mol_type = other DNA
agcgaagactccctgaccta

SEQ ID NO: 150018 - DNA, 20 bp, synthetic construct
  source 1..20: mol_type = other DNA
aagcgaagactccctgacct

SEQ ID NO: 150019 - DNA, 20 bp, synthetic construct
  source 1..20: mol_type = other DNA
aaagcgaagactccctgacc

SEQ ID NO: 150020 - DNA, 20 bp, synthetic construct
  source 1..20: mol_type = other DNA
aaaagcgaagactccctgac

SEQ ID NO: 150021 - DNA, 20 bp, synthetic construct
  source 1..20: mol_type = other DNA
caaaagcgaagactccctga

SEQ ID NO: 150022 - DNA, 20 bp, synthetic construct
  source 1..20: mol_type = other DNA
acaaaagcgaagactccctg

SEQ ID NO: 150023 - DNA, 20 bp, synthetic construct
  source 1..20: mol_type = other DNA
tacaaaagcgaagactccct

SEQ ID NO: 150024 - DNA, 20 bp, synthetic construct
  source 1..20: mol_type = other DNA
gtacaaaagcgaagactccc

SEQ ID NO: 150025 - DNA, 20 bp, synthetic construct
  source 1..20: mol_type = other DNA
tgtacaaaagcgaagactcc

SEQ ID NO: 150026 - DNA, 20 bp, synthetic construct
  source 1..20: mol_type = other DNA
ctgtacaaaagcgaagactc

SEQ ID NO: 150027 - DNA, 20 bp, synthetic construct
  source 1..20: mol_type = other DNA
gctgtacaaaagcgaagact

SEQ ID NO: 150028 - DNA, 20 bp, synthetic construct
  source 1..20: mol_type = other DNA
agctgtacaaaagcgaagac

SEQ ID NO: 150029 - DNA, 20 bp, synthetic construct
  source 1..20: mol_type = other DNA
gagctgtacaaaagcgaaga

SEQ ID NO: 150030 - DNA, 20 bp, synthetic construct
  source 1..20: mol_type = other DNA
agagctgtacaaaagcgaag

SEQ ID NO: 150031 - DNA, 20 bp, synthetic construct
  source 1..20: mol_type = other DNA
tagagctgtacaaaagcgaa

SEQ ID NO: 150032 - DNA, 20 bp, synthetic construct
  source 1..20: mol_type = other DNA
ttagagctgtacaaaagcga

SEQ ID NO: 150033 - DNA, 20 bp, synthetic construct
  source 1..20: mol_type = other DNA
cttagagctgtacaaaagcg

SEQ ID NO: 150034 - DNA, 20 bp, synthetic construct
  source 1..20: mol_type = other DNA
ccttagagctgtacaaaagc

SEQ ID NO: 150035 - DNA, 20 bp, synthetic construct
  source 1..20: mol_type = other DNA
gccttagagctgtacaaaag

SEQ ID NO: 150036 - DNA, 20 bp, synthetic construct
  source 1..20: mol_type = other DNA
agccttagagctgtacaaaa

SEQ ID NO: 150037 - DNA, 20 bp, synthetic construct
  source 1..20: mol_type = other DNA
tagccttagagctgtacaaa

SEQ ID NO: 150038 - DNA, 20 bp, synthetic construct
  source 1..20: mol_type = other DNA
ctagccttagagctgtacaa

SEQ ID NO: 150039 - DNA, 20 bp, synthetic construct
  source 1..20: mol_type = other DNA
cctagccttagagctgtaca

SEQ ID NO: 150040 - DNA, 20 bp, synthetic construct
  source 1..20: mol_type = other DNA
tcctagccttagagctgtac

SEQ ID NO: 150041 - DNA, 20 bp, synthetic construct
  source 1..20: mol_type = other DNA
ttcctagccttagagctgta

SEQ ID NO: 150042 - DNA, 20 bp, synthetic construct
  source 1..20: mol_type = other DNA
attcctagccttagagctgt

SEQ ID NO: 150043 - DNA, 20 bp, synthetic construct
  source 1..20: mol_type = other DNA
cattcctagccttagagctg

SEQ ID NO: 150044 - DNA, 20 bp, synthetic construct
  source 1..20: mol_type = other DNA
ccattcctagccttagagct

SEQ ID NO: 150045 - DNA, 20 bp, synthetic construct
  source 1..20: mol_type = other DNA
accattcctagccttagagc

SEQ ID NO: 150046 - DNA, 20 bp, synthetic construct
  source 1..20: mol_type = other DNA
aaccattcctagccttagag

SEQ ID NO: 150047 - DNA, 20 bp, synthetic construct
  source 1..20: mol_type = other DNA
aaaccattcctagccttaga

SEQ ID NO: 150048 - DNA, 20 bp, synthetic construct
  source 1..20: mol_type = other DNA
aaaaccattcctagccttag

SEQ ID NO: 150049 - DNA, 20 bp, synthetic construct
  source 1..20: mol_type = other DNA
aaaaaccattcctagcctta

SEQ ID NO: 150050 - DNA, 20 bp, synthetic construct
  source 1..20: mol_type = other DNA
taaaaaccattcctagcctt

SEQ ID NO: 150051 - DNA, 20 bp, synthetic construct
  source 1..20: mol_type = other DNA
ataaaaaccattcctagcct

SEQ ID NO: 150052 - DNA, 20 bp, synthetic construct
  source 1..20: mol_type = other DNA
tataaaaaccattcctagcc

SEQ ID NO: 150053 - DNA, 20 bp, synthetic construct
  source 1..20: mol_type = other DNA
atataaaaaccattcctagc

SEQ ID NO: 150054 - DNA, 20 bp, synthetic construct
  source 1..20: mol_type = other DNA
aatataaaaaccattcctag

SEQ ID NO: 150055 - DNA, 20 bp, synthetic construct
  source 1..20: mol_type = other DNA
aaatataaaaaccattccta

SEQ ID NO: 150056 - DNA, 20 bp, synthetic construct
  source 1..20: mol_type = other DNA
aaaatataaaaaccattcct

SEQ ID NO: 150057 - DNA, 20 bp, synthetic construct
  source 1..20: mol_type = other DNA
aaaaatataaaaaccattcc

SEQ ID NO: 150058 - DNA, 20 bp, synthetic construct
  source 1..20: mol_type = other DNA
taaaaatataaaaaccattc

SEQ ID NO: 150059 - DNA, 20 bp, synthetic construct
  source 1..20: mol_type = other DNA
ttaaaaatataaaaaccatt

SEQ ID NO: 150060 - DNA, 20 bp, synthetic construct
  source 1..20: mol_type = other DNA
tttaaaaatataaaaaccat

SEQ ID NO: 150061 - DNA, 20 bp, synthetic construct
  source 1..20: mol_type = other DNA
ttttaaaaatataaaaacca

SEQ ID NO: 150062 - DNA, 20 bp, synthetic construct
  source 1..20: mol_type = other DNA
cttttaaaaatataaaaacc

SEQ ID NO: 150063 - DNA, 20 bp, synthetic construct
  source 1..20: mol_type = other DNA
ccttttaaaaatataaaaac

SEQ ID NO: 150064 - DNA, 20 bp, synthetic construct
  source 1..20: mol_type = other DNA
gccttttaaaaatataaaaa

SEQ ID NO: 150065 - DNA, 20 bp, synthetic construct
  source 1..20: mol_type = other DNA
agccttttaaaaatataaaa

SEQ ID NO: 150066 - DNA, 20 bp, synthetic construct
  source 1..20: mol_type = other DNA
aagccttttaaaaatataaa

SEQ ID NO: 150067 - DNA, 20 bp, synthetic construct
  source 1..20: mol_type = other DNA
aaagccttttaaaaatataa

SEQ ID NO: 150068 - DNA, 20 bp, synthetic construct
  source 1..20: mol_type = other DNA
caaagccttttaaaaatata

SEQ ID NO: 150069 - DNA, 20 bp, synthetic construct
  source 1..20: mol_type = other DNA
ccaaagccttttaaaaatat

SEQ ID NO: 150070 - DNA, 20 bp, synthetic construct
  source 1..20: mol_type = other DNA
tccaaagccttttaaaaata

SEQ ID NO: 150071 - DNA, 20 bp, synthetic construct
  source 1..20: mol_type = other DNA
ttccaaagccttttaaaaat

SEQ ID NO: 150072 - DNA, 20 bp, synthetic construct
  source 1..20: mol_type = other DNA
tttccaaagccttttaaaaa

SEQ ID NO: 150073 - DNA, 20 bp, synthetic construct
  source 1..20: mol_type = other DNA
ttttccaaagccttttaaaa

SEQ ID NO: 150074 - DNA, 20 bp, synthetic construct
  source 1..20: mol_type = other DNA
gttttccaaagccttttaaa

SEQ ID NO: 150075 - DNA, 20 bp, synthetic construct
  source 1..20: mol_type = other DNA
tgttttccaaagccttttaa

SEQ ID NO: 150076 - DNA, 20 bp, synthetic construct
  source 1..20: mol_type = other DNA
ttgttttccaaagcctttta

SEQ ID NO: 150077 - DNA, 20 bp, synthetic construct
  source 1..20: mol_type = other DNA
tttgttttccaaagcctttt

SEQ ID NO: 150078 - DNA, 20 bp, synthetic construct
  source 1..20: mol_type = other DNA
ttttgttttccaaagccttt

SEQ ID NO: 150079 - DNA, 20 bp, synthetic construct
  source 1..20: mol_type = other DNA
tttttgttttccaaagcctt

SEQ ID NO: 150080 - DNA, 20 bp, synthetic construct
  source 1..20: mol_type = other DNA
atttttgttttccaaagcct

SEQ ID NO: 150081 - DNA, 20 bp, synthetic construct
  source 1..20: mol_type = other DNA
tatttttgttttccaaagcc

SEQ ID NO: 150082 - DNA, 20 bp, synthetic construct
  source 1..20: mol_type = other DNA
gtatttttgttttccaaagc

SEQ ID NO: 150083 - DNA, 20 bp, synthetic construct
  source 1..20: mol_type = other DNA
cgtatttttgttttccaaag

SEQ ID NO: 150084 - DNA, 20 bp, synthetic construct
  source 1..20: mol_type = other DNA
gcgtatttttgttttccaaa

SEQ ID NO: 150085 - DNA, 20 bp, synthetic construct
  source 1..20: mol_type = other DNA
tgcgtatttttgttttccaa

SEQ ID NO: 150086 - DNA, 20 bp, synthetic construct
  source 1..20: mol_type = other DNA
ttgcgtatttttgttttcca

SEQ ID NO: 150087 - DNA, 20 bp, synthetic construct
  source 1..20: mol_type = other DNA
gttgcgtatttttgttttcc

SEQ ID NO: 150088 - DNA, 20 bp, synthetic construct
  source 1..20: mol_type = other DNA
tgttgcgtatttttgttttc

SEQ ID NO: 150089 - DNA, 20 bp, synthetic construct
  source 1..20: mol_type = other DNA
ctgttgcgtatttttgtttt

SEQ ID NO: 150090 - DNA, 20 bp, synthetic construct
  source 1..20: mol_type = other DNA
tctgttgcgtatttttgttt

SEQ ID NO: 150091 - DNA, 20 bp, synthetic construct
  source 1..20: mol_type = other DNA
ctctgttgcgtatttttgtt

SEQ ID NO: 150092 - DNA, 20 bp, synthetic construct
  source 1..20: mol_type = other DNA
tctctgttgcgtatttttgt

SEQ ID NO: 150093 - DNA, 20 bp, synthetic construct
  source 1..20: mol_type = other DNA
gtctctgttgcgtatttttg

SEQ ID NO: 150094 - DNA, 20 bp, synthetic construct
  source 1..20: mol_type = other DNA
ggtctctgttgcgtattttt

SEQ ID NO: 150095 - DNA, 20 bp, synthetic construct
  source 1..20: mol_type = other DNA
cggtctctgttgcgtatttt

SEQ ID NO: 150096 - DNA, 20 bp, synthetic construct
  source 1..20: mol_type = other DNA
acggtctctgttgcgtattt

SEQ ID NO: 150097 - DNA, 20 bp, synthetic construct
  source 1..20: mol_type = other DNA
aacggtctctgttgcgtatt

SEQ ID NO: 150098 - DNA, 20 bp, synthetic construct
  source 1..20: mol_type = other DNA
aaacggtctctgttgcgtat

SEQ ID NO: 150099 - DNA, 20 bp, synthetic construct
  source 1..20: mol_type = other DNA
caaacggtctctgttgcgta

SEQ ID NO: 150100 - DNA, 20 bp, synthetic construct
  source 1..20: mol_type = other DNA
acaaacggtctctgttgcgt

SEQ ID NO: 150101 - DNA, 20 bp, synthetic construct
  source 1..20: mol_type = other DNA
cacaaacggtctctgttgcg

SEQ ID NO: 150102 - DNA, 20 bp, synthetic construct
  source 1..20: mol_type = other DNA
acacaaacggtctctgttgc

SEQ ID NO: 150103 - DNA, 20 bp, synthetic construct
  source 1..20: mol_type = other DNA
cacacaaacggtctctgttg

SEQ ID NO: 150104 - DNA, 20 bp, synthetic construct
  source 1..20: mol_type = other DNA
tcacacaaacggtctctgtt

SEQ ID NO: 150105 - DNA, 20 bp, synthetic construct
  source 1..20: mol_type = other DNA
gtcacacaaacggtctctgt

SEQ ID NO: 150106 - DNA, 20 bp, synthetic construct
  source 1..20: mol_type = other DNA
tgtcacacaaacggtctctg

SEQ ID NO: 150107 - DNA, 20 bp, synthetic construct
  source 1..20: mol_type = other DNA
gtgtcacacaaacggtctct

SEQ ID NO: 150108 - DNA, 20 bp, synthetic construct
  source 1..20: mol_type = other DNA
agtgtcacacaaacggtctc

SEQ ID NO: 150109 - DNA, 20 bp, synthetic construct
  source 1..20: mol_type = other DNA
aagtgtcacacaaacggtct

SEQ ID NO: 150110 - DNA, 20 bp, synthetic construct
  source 1..20: mol_type = other DNA
aaagtgtcacacaaacggtc

SEQ ID NO: 150111 - DNA, 20 bp, synthetic construct
  source 1..20: mol_type = other DNA
caaagtgtcacacaaacggt

SEQ ID NO: 150112 - DNA, 20 bp, synthetic construct
  source 1..20: mol_type = other DNA
gcaaagtgtcacacaaacgg

SEQ ID NO: 150113 - DNA, 20 bp, synthetic construct
  source 1..20: mol_type = other DNA
tgcaaagtgtcacacaaacg

SEQ ID NO: 150114 - DNA, 20 bp, synthetic construct
  source 1..20: mol_type = other DNA
ctgcaaagtgtcacacaaac

SEQ ID NO: 150115 - DNA, 20 bp, synthetic construct
  source 1..20: mol_type = other DNA
cctgcaaagtgtcacacaaa

SEQ ID NO: 150116 - DNA, 20 bp, synthetic construct
  source 1..20: mol_type = other DNA
ccctgcaaagtgtcacacaa

SEQ ID NO: 150117 - DNA, 20 bp, synthetic construct
  source 1..20: mol_type = other DNA
tccctgcaaagtgtcacaca

SEQ ID NO: 150118 - DNA, 20 bp, synthetic construct
  source 1..20: mol_type = other DNA
ttccctgcaaagtgtcacac

SEQ ID NO: 150119 - DNA, 20 bp, synthetic construct
  source 1..20: mol_type = other DNA
cttccctgcaaagtgtcaca

SEQ ID NO: 150120 - DNA, 20 bp, synthetic construct
  source 1..20: mol_type = other DNA
acttccctgcaaagtgtcac

SEQ ID NO: 150121 - DNA, 20 bp, synthetic construct
  source 1..20: mol_type = other DNA
aacttccctgcaaagtgtca

SEQ ID NO: 150122 - DNA, 20 bp, synthetic construct
  source 1..20: mol_type = other DNA
aaacttccctgcaaagtgtc

SEQ ID NO: 150123 - DNA, 20 bp, synthetic construct
  source 1..20: mol_type = other DNA
caaacttccctgcaaagtgt

SEQ ID NO: 150124 - DNA, 20 bp, synthetic construct
  source 1..20: mol_type = other DNA
gcaaacttccctgcaaagtg

SEQ ID NO: 150125 - DNA, 20 bp, synthetic construct
  source 1..20: mol_type = other DNA
agcaaacttccctgcaaagt

SEQ ID NO: 150126 - DNA, 20 bp, synthetic construct
  source 1..20: mol_type = other DNA
cagcaaacttccctgcaaag

SEQ ID NO: 150127 - DNA, 20 bp, synthetic construct
  source 1..20: mol_type = other DNA
ccagcaaacttccctgcaaa

SEQ ID NO: 150128 - DNA, 20 bp, synthetic construct
  source 1..20: mol_type = other DNA
gccagcaaacttccctgcaa

SEQ ID NO: 150129 - DNA, 20 bp, synthetic construct
  source 1..20: mol_type = other DNA
ggccagcaaacttccctgca

SEQ ID NO: 150130 - DNA, 20 bp, synthetic construct
  source 1..20: mol_type = other DNA
aggccagcaaacttccctgc

SEQ ID NO: 150131 - DNA, 20 bp, synthetic construct
  source 1..20: mol_type = other DNA
gaggccagcaaacttccctg

SEQ ID NO: 150132 - DNA, 20 bp, synthetic construct
  source 1..20: mol_type = other DNA
agaggccagcaaacttccct

SEQ ID NO: 150133 - DNA, 20 bp, synthetic construct
  source 1..20: mol_type = other DNA
cagaggccagcaaacttccc

SEQ ID NO: 150134 - DNA, 20 bp, synthetic construct
  source 1..20: mol_type = other DNA
acagaggccagcaaacttcc

SEQ ID NO: 150135 - DNA, 20 bp, synthetic construct
  source 1..20: mol_type = other DNA
aacagaggccagcaaacttc

SEQ ID NO: 150136 - DNA, 20 bp, synthetic construct
  source 1..20: mol_type = other DNA
gaacagaggccagcaaactt

SEQ ID NO: 150137 - DNA, 20 bp, synthetic construct
  source 1..20: mol_type = other DNA
agaacagaggccagcaaact

SEQ ID NO: 150138 - DNA, 20 bp, synthetic construct
  source 1..20: mol_type = other DNA
tagaacagaggccagcaaac

SEQ ID NO: 150139 - DNA, 20 bp, synthetic construct
  source 1..20: mol_type = other DNA
ctagaacagaggccagcaaa

SEQ ID NO: 150140 - DNA, 20 bp, synthetic construct
  source 1..20: mol_type = other DNA
cctagaacagaggccagcaa

SEQ ID NO: 150141 - DNA, 20 bp, synthetic construct
  source 1..20: mol_type = other DNA
acctagaacagaggccagca

SEQ ID NO: 150142 - DNA, 20 bp, synthetic construct
  source 1..20: mol_type = other DNA
gacctagaacagaggccagc

SEQ ID NO: 150143 - DNA, 20 bp, synthetic construct
  source 1..20: mol_type = other DNA
tgacctagaacagaggccag

SEQ ID NO: 150144 - DNA, 20 bp, synthetic construct
  source 1..20: mol_type = other DNA
atgacctagaacagaggcca

SEQ ID NO: 150145 - DNA, 20 bp, synthetic construct
  source 1..20: mol_type = other DNA
catgacctagaacagaggcc

SEQ ID NO: 150146 - DNA, 20 bp, synthetic construct
  source 1..20: mol_type = other DNA
tcatgacctagaacagaggc

SEQ ID NO: 150147 - DNA, 20 bp, synthetic construct
  source 1..20: mol_type = other DNA
atcatgacctagaacagagg

SEQ ID NO: 150148 - DNA, 20 bp, synthetic construct
  source 1..20: mol_type = other DNA
aatcatgacctagaacagag

SEQ ID NO: 150149 - DNA, 20 bp, synthetic construct
  source 1..20: mol_type = other DNA
caatcatgacctagaacaga

SEQ ID NO: 150150 - DNA, 20 bp, synthetic construct
  source 1..20: mol_type = other DNA
ccaatcatgacctagaacag

SEQ ID NO: 150151 - DNA, 20 bp, synthetic construct
  source 1..20: mol_type = other DNA
cccaatcatgacctagaaca

SEQ ID NO: 150152 - DNA, 20 bp, synthetic construct
  source 1..20: mol_type = other DNA
gcccaatcatgacctagaac

SEQ ID NO: 150153 - DNA, 20 bp, synthetic construct
  source 1..20: mol_type = other DNA
agcccaatcatgacctagaa

SEQ ID NO: 150154 - DNA, 20 bp, synthetic construct
  source 1..20: mol_type = other DNA
cagcccaatcatgacctaga

SEQ ID NO: 150155 - DNA, 20 bp, synthetic construct
  source 1..20: mol_type = other DNA
gcagcccaatcatgacctag

SEQ ID NO: 150156 - DNA, 20 bp, synthetic construct
  source 1..20: mol_type = other DNA
tgcagcccaatcatgaccta

SEQ ID NO: 150157 - DNA, 20 bp, synthetic construct
  source 1..20: mol_type = other DNA
ttgcagcccaatcatgacct

SEQ ID NO: 150158 - DNA, 20 bp, synthetic construct
  source 1..20: mol_type = other DNA
cttgcagcccaatcatgacc

SEQ ID NO: 150159 - DNA, 20 bp, synthetic construct
  source 1..20: mol_type = other DNA
ccttgcagcccaatcatgac

SEQ ID NO: 150160 - DNA, 20 bp, synthetic construct
  source 1..20: mol_type = other DNA
cccttgcagcccaatcatga

SEQ ID NO: 150161 - DNA, 20 bp, synthetic construct
  source 1..20: mol_type = other DNA
gcccttgcagcccaatcatg

SEQ ID NO: 150162 - DNA, 20 bp, synthetic construct
  source 1..20: mol_type = other DNA
tgcccttgcagcccaatcat

SEQ ID NO: 150163 - DNA, 20 bp, synthetic construct
  source 1..20: mol_type = other DNA
ctgcccttgcagcccaatca

SEQ ID NO: 150164 - DNA, 20 bp, synthetic construct
  source 1..20: mol_type = other DNA
tctgcccttgcagcccaatc

SEQ ID NO: 150165 - DNA, 20 bp, synthetic construct
  source 1..20: mol_type = other DNA
ctctgcccttgcagcccaat

SEQ ID NO: 150166 - DNA, 20 bp, synthetic construct
  source 1..20: mol_type = other DNA
tctctgcccttgcagcccaa

SEQ ID NO: 150167 - DNA, 20 bp, synthetic construct
  source 1..20: mol_type = other DNA
ttctctgcccttgcagccca

SEQ ID NO: 150168 - DNA, 20 bp, synthetic construct
  source 1..20: mol_type = other DNA
cttctctgcccttgcagccc

SEQ ID NO: 150169 - DNA, 20 bp, synthetic construct
  source 1..20: mol_type = other DNA
ccttctctgcccttgcagcc

SEQ ID NO: 150170 - DNA, 20 bp, synthetic construct
  source 1..20: mol_type = other DNA
accttctctgcccttgcagc

SEQ ID NO: 150171 - DNA, 20 bp, synthetic construct
  source 1..20: mol_type = other DNA
taccttctctgcccttgcag

SEQ ID NO: 150172 - DNA, 20 bp, synthetic construct
  source 1..20: mol_type = other DNA
ctaccttctctgcccttgca

SEQ ID NO: 150173 - DNA, 20 bp, synthetic construct
  source 1..20: mol_type = other DNA
gctaccttctctgcccttgc

SEQ ID NO: 150174 - DNA, 20 bp, synthetic construct
  source 1..20: mol_type = other DNA
ggctaccttctctgcccttg

SEQ ID NO: 150175 - DNA, 20 bp, synthetic construct
  source 1..20: mol_type = other DNA
aggctaccttctctgccctt

SEQ ID NO: 150176 - DNA, 20 bp, synthetic construct
  source 1..20: mol_type = other DNA
aaggctaccttctctgccct

SEQ ID NO: 150177 - DNA, 20 bp, synthetic construct
  source 1..20: mol_type = other DNA
caaggctaccttctctgccc

SEQ ID NO: 150178 - DNA, 20 bp, synthetic construct
  source 1..20: mol_type = other DNA
tcaaggctaccttctctgcc

SEQ ID NO: 150179 - DNA, 20 bp, synthetic construct
  source 1..20: mol_type = other DNA
ttcaaggctaccttctctgc

SEQ ID NO: 150180 - DNA, 20 bp, synthetic construct
  source 1..20: mol_type = other DNA
gttcaaggctaccttctctg

SEQ ID NO: 150181 - DNA, 20 bp, synthetic construct
  source 1..20: mol_type = other DNA
tgttcaaggctaccttctct

SEQ ID NO: 150182 - DNA, 20 bp, synthetic construct
  source 1..20: mol_type = other DNA
ctgttcaaggctaccttctc

SEQ ID NO: 150183 - DNA, 20 bp, synthetic construct
  source 1..20: mol_type = other DNA
tctgttcaaggctaccttct

SEQ ID NO: 150184 - DNA, 20 bp, synthetic construct
  source 1..20: mol_type = other DNA
ctctgttcaaggctaccttc

SEQ ID NO: 150185 - DNA, 20 bp, synthetic construct
  source 1..20: mol_type = other DNA
cctctgttcaaggctacctt

SEQ ID NO: 150186 - DNA, 20 bp, synthetic construct
  source 1..20: mol_type = other DNA
acctctgttcaaggctacct

SEQ ID NO: 150187 - DNA, 20 bp, synthetic construct
  source 1..20: mol_type = other DNA
gacctctgttcaaggctacc

SEQ ID NO: 150188 - DNA, 20 bp, synthetic construct
  source 1..20: mol_type = other DNA
ggacctctgttcaaggctac

SEQ ID NO: 150189 - DNA, 20 bp, synthetic construct
  source 1..20: mol_type = other DNA
aggacctctgttcaaggcta

SEQ ID NO: 150190 - DNA, 20 bp, synthetic construct
  source 1..20: mol_type = other DNA
aaggacctctgttcaaggct

SEQ ID NO: 150191 - DNA, 20 bp, synthetic construct
  source 1..20: mol_type = other DNA
aaaggacctctgttcaaggc

SEQ ID NO: 150192 - DNA, 20 bp, synthetic construct
  source 1..20: mol_type = other DNA
aaaaggacctctgttcaagg

SEQ ID NO: 150193 - DNA, 20 bp, synthetic construct
  source 1..20: mol_type = other DNA
gaaaaggacctctgttcaag

SEQ ID NO: 150194 - DNA, 20 bp, synthetic construct
  source 1..20: mol_type = other DNA
ggaaaaggacctctgttcaa

SEQ ID NO: 150195 - DNA, 20 bp, synthetic construct
  source 1..20: mol_type = other DNA
aggaaaaggacctctgttca

SEQ ID NO: 150196 - DNA, 20 bp, synthetic construct
  source 1..20: mol_type = other DNA
gaggaaaaggacctctgttc

SEQ ID NO: 150197 - DNA, 20 bp, synthetic construct
  source 1..20: mol_type = other DNA
ggaggaaaaggacctctgtt

SEQ ID NO: 150198 - DNA, 20 bp, synthetic construct
  source 1..20: mol_type = other DNA
aggaggaaaaggacctctgt

SEQ ID NO: 150199 - DNA, 20 bp, synthetic construct
  source 1..20: mol_type = other DNA
gaggaggaaaaggacctctg

SEQ ID NO: 150200 - DNA, 20 bp, synthetic construct
  source 1..20: mol_type = other DNA
ggaggaggaaaaggacctct

SEQ ID NO: 150201 - DNA, 20 bp, synthetic construct
  source 1..20: mol_type = other DNA
aggaggaggaaaaggacctc

SEQ ID NO: 150202 - DNA, 20 bp, synthetic construct
  source 1..20: mol_type = other DNA
taggaggaggaaaaggacct

SEQ ID NO: 150203 - DNA, 20 bp, synthetic construct
  source 1..20: mol_type = other DNA
ttaggaggaggaaaaggacc

SEQ ID NO: 150204 - DNA, 20 bp, synthetic construct
  source 1..20: mol_type = other DNA
cttaggaggaggaaaaggac

SEQ ID NO: 150205 - DNA, 20 bp, synthetic construct
  source 1..20: mol_type = other DNA
gcttaggaggaggaaaagga

SEQ ID NO: 150206 - DNA, 20 bp, synthetic construct
  source 1..20: mol_type = other DNA
agcttaggaggaggaaaagg

SEQ ID NO: 150207 - DNA, 20 bp, synthetic construct
  source 1..20: mol_type = other DNA
gagcttaggaggaggaaaag

SEQ ID NO: 150208 - DNA, 20 bp, synthetic construct
  source 1..20: mol_type = other DNA
ggagcttaggaggaggaaaa

SEQ ID NO: 150209 - DNA, 20 bp, synthetic construct
  source 1..20: mol_type = other DNA
cggagcttaggaggaggaaa

SEQ ID NO: 150210 - DNA, 20 bp, synthetic construct
  source 1..20: mol_type = other DNA
ccggagcttaggaggaggaa

SEQ ID NO: 150211 - DNA, 20 bp, synthetic construct
  source 1..20: mol_type = other DNA
cccggagcttaggaggagga

SEQ ID NO: 150212 - DNA, 20 bp, synthetic construct
  source 1..20: mol_type = other DNA
tcccggagcttaggaggagg

SEQ ID NO: 150213 - DNA, 20 bp, synthetic construct
  source 1..20: mol_type = other DNA
ctcccggagcttaggaggag

SEQ ID NO: 150214 - DNA, 20 bp, synthetic construct
  source 1..20: mol_type = other DNA
gctcccggagcttaggagga

SEQ ID NO: 150215 - DNA, 20 bp, synthetic construct
  source 1..20: mol_type = other DNA
ggctcccggagcttaggagg

SEQ ID NO: 150216 - DNA, 20 bp, synthetic construct
  source 1..20: mol_type = other DNA
tggctcccggagcttaggag

SEQ ID NO: 150217 - DNA, 20 bp, synthetic construct
  source 1..20: mol_type = other DNA
ctggctcccggagcttagga

SEQ ID NO: 150218 - DNA, 20 bp, synthetic construct
  source 1..20: mol_type = other DNA
tctggctcccggagcttagg

SEQ ID NO: 150219 - DNA, 20 bp, synthetic construct
  source 1..20: mol_type = other DNA
ctctggctcccggagcttag

SEQ ID NO: 150220 - DNA, 20 bp, synthetic construct
  source 1..20: mol_type = other DNA
cctctggctcccggagctta

SEQ ID NO: 150221 - DNA, 20 bp, synthetic construct
  source 1..20: mol_type = other DNA
acctctggctcccggagctt

SEQ ID NO: 150222 - DNA, 20 bp, synthetic construct
  source 1..20: mol_type = other DNA
aacctctggctcccggagct

SEQ ID NO: 150223 - DNA, 20 bp, synthetic construct
  source 1..20: mol_type = other DNA
aaacctctggctcccggagc

SEQ ID NO: 150224 - DNA, 20 bp, synthetic construct
  source 1..20: mol_type = other DNA
taaacctctggctcccggag

SEQ ID NO: 150225 - DNA, 20 bp, synthetic construct
  source 1..20: mol_type = other DNA
ttaaacctctggctcccgga

SEQ ID NO: 150226 - DNA, 20 bp, synthetic construct
  source 1..20: mol_type = other DNA
gttaaacctctggctcccgg

SEQ ID NO: 150227 - DNA, 20 bp, synthetic construct
  source 1..20: mol_type = other DNA
agttaaacctctggctcccg

SEQ ID NO: 150228 - DNA, 20 bp, synthetic construct
  source 1..20: mol_type = other DNA
cagttaaacctctggctccc

SEQ ID NO: 150229 - DNA, 20 bp, synthetic construct
  source 1..20: mol_type = other DNA
tcagttaaacctctggctcc

SEQ ID NO: 150230 - DNA, 20 bp, synthetic construct
  source 1..20: mol_type = other DNA
gtcagttaaacctctggctc

SEQ ID NO: 150231 - DNA, 20 bp, synthetic construct
  source 1..20: mol_type = other DNA
ggtcagttaaacctctggct

SEQ ID NO: 150232 - DNA, 20 bp, synthetic construct
  source 1..20: mol_type = other DNA
gggtcagttaaacctctggc

SEQ ID NO: 150233 - DNA, 20 bp, synthetic construct
  source 1..20: mol_type = other DNA
agggtcagttaaacctctgg

SEQ ID NO: 150234 - DNA, 20 bp, synthetic construct
  source 1..20: mol_type = other DNA
aagggtcagttaaacctctg

SEQ ID NO: 150235 - DNA, 20 bp, synthetic construct
  source 1..20: mol_type = other DNA
aaagggtcagttaaacctct

SEQ ID NO: 150236 - DNA, 20 bp, synthetic construct
  source 1..20: mol_type = other DNA
aaaagggtcagttaaacctc

SEQ ID NO: 150237 - DNA, 20 bp, synthetic construct
  source 1..20: mol_type = other DNA
caaaagggtcagttaaacct

SEQ ID NO: 150238 - DNA, 20 bp, synthetic construct
  source 1..20: mol_type = other DNA
ccaaaagggtcagttaaacc

SEQ ID NO: 150239 - DNA, 20 bp, synthetic construct
  source 1..20: mol_type = other DNA
cccaaaagggtcagttaaac

SEQ ID NO: 150240 - DNA, 20 bp, synthetic construct
  source 1..20: mol_type = other DNA
ccccaaaagggtcagttaaa

SEQ ID NO: 150241 - DNA, 20 bp, synthetic construct
  source 1..20: mol_type = other DNA
tccccaaaagggtcagttaa

SEQ ID NO: 150242 - DNA, 20 bp, synthetic construct
  source 1..20: mol_type = other DNA
atccccaaaagggtcagtta

SEQ ID NO: 150243 - DNA, 20 bp, synthetic construct
  source 1..20: mol_type = other DNA
aatccccaaaagggtcagtt

SEQ ID NO: 150244 - DNA, 20 bp, synthetic construct
  source 1..20: mol_type = other DNA
aaatccccaaaagggtcagt

SEQ ID NO: 150245 - DNA, 20 bp, synthetic construct
  source 1..20: mol_type = other DNA
aaaatccccaaaagggtcag

SEQ ID NO: 150246 - DNA, 20 bp, synthetic construct
  source 1..20: mol_type = other DNA
aaaaatccccaaaagggtca

SEQ ID NO: 150247 - DNA, 20 bp, synthetic construct
  source 1..20: mol_type = other DNA
caaaaatccccaaaagggtc

SEQ ID NO: 150248 - DNA, 20 bp, synthetic construct
  source 1..20: mol_type = other DNA
tcaaaaatccccaaaagggt

SEQ ID NO: 150249 - DNA, 20 bp, synthetic construct
  source 1..20: mol_type = other DNA
ctcaaaaatccccaaaaggg

SEQ ID NO: 150250 - DNA, 20 bp, synthetic construct
  source 1..20: mol_type = other DNA
cctcaaaaatccccaaaagg

SEQ ID NO: 150251 - DNA, 20 bp, synthetic construct
  source 1..20: mol_type = other DNA
ccctcaaaaatccccaaaag

SEQ ID NO: 150252 - DNA, 20 bp, synthetic construct
  source 1..20: mol_type = other DNA
gccctcaaaaatccccaaaa

SEQ ID NO: 150253 - DNA, 20 bp, synthetic construct
  source 1..20: mol_type = other DNA
tgccctcaaaaatccccaaa

SEQ ID NO: 150254 - DNA, 20 bp, synthetic construct
  source 1..20: mol_type = other DNA
ctgccctcaaaaatccccaa

SEQ ID NO: 150255 - DNA, 20 bp, synthetic construct
  source 1..20: mol_type = other DNA
actgccctcaaaaatcccca

SEQ ID NO: 150256 - DNA, 20 bp, synthetic construct
  source 1..20: mol_type = other DNA
cactgccctcaaaaatcccc

SEQ ID NO: 150257 - DNA, 20 bp, synthetic construct
  source 1..20: mol_type = other DNA
tcactgccctcaaaaatccc

SEQ ID NO: 150258 - DNA, 20 bp, synthetic construct
  source 1..20: mol_type = other DNA
atcactgccctcaaaaatcc

SEQ ID NO: 150259 - DNA, 20 bp, synthetic construct
  source 1..20: mol_type = other DNA
gatcactgccctcaaaaatc

SEQ ID NO: 150260 - DNA, 20 bp, synthetic construct
  source 1..20: mol_type = other DNA
agatcactgccctcaaaaat

SEQ ID NO: 150261 - DNA, 20 bp, synthetic construct
  source 1..20: mol_type = other DNA
aagatcactgccctcaaaaa

SEQ ID NO: 150262 - DNA, 20 bp, synthetic construct
  source 1..20: mol_type = other DNA
taagatcactgccctcaaaa

SEQ ID NO: 150263 - DNA, 20 bp, synthetic construct
  source 1..20: mol_type = other DNA
ttaagatcactgccctcaaa

SEQ ID NO: 150264 - DNA, 20 bp, synthetic construct
  source 1..20: mol_type = other DNA
gttaagatcactgccctcaa

SEQ ID NO: 150265 - DNA, 20 bp, synthetic construct
  source 1..20: mol_type = other DNA
agttaagatcactgccctca

SEQ ID NO: 150266 - DNA, 20 bp, synthetic construct
  source 1..20: mol_type = other DNA
aagttaagatcactgccctc

SEQ ID NO: 150267 - DNA, 20 bp, synthetic construct
  source 1..20: mol_type = other DNA
aaagttaagatcactgccct

SEQ ID NO: 150268 - DNA, 20 bp, synthetic construct
  source 1..20: mol_type = other DNA
caaagttaagatcactgccc

SEQ ID NO: 150269 - DNA, 20 bp, synthetic construct
  source 1..20: mol_type = other DNA
ccaaagttaagatcactgcc

SEQ ID NO: 150270 - DNA, 20 bp, synthetic construct
  source 1..20: mol_type = other DNA
cccaaagttaagatcactgc

SEQ ID NO: 150271 - DNA, 20 bp, synthetic construct
  source 1..20: mol_type = other DNA
acccaaagttaagatcactg

SEQ ID NO: 150272 - DNA, 20 bp, synthetic construct
  source 1..20: mol_type = other DNA
cacccaaagttaagatcact

SEQ ID NO: 150273 - DNA, 20 bp, synthetic construct
  source 1..20: mol_type = other DNA
gcacccaaagttaagatcac

SEQ ID NO: 150274 - DNA, 20 bp, synthetic construct
  source 1..20: mol_type = other DNA
tgcacccaaagttaagatca

SEQ ID NO: 150275 - DNA, 20 bp, synthetic construct
  source 1..20: mol_type = other DNA
gtgcacccaaagttaagatc

SEQ ID NO: 150276 - DNA, 20 bp, synthetic construct
  source 1..20: mol_type = other DNA
tgtgcacccaaagttaagat

SEQ ID NO: 150277 - DNA, 20 bp, synthetic construct
  source 1..20: mol_type = other DNA
ctgtgcacccaaagttaaga

SEQ ID NO: 150278 - DNA, 20 bp, synthetic construct
  source 1..20: mol_type = other DNA
actgtgcacccaaagttaag

SEQ ID NO: 150279 - DNA, 20 bp, synthetic construct
  source 1..20: mol_type = other DNA
aactgtgcacccaaagttaa

SEQ ID NO: 150280 - DNA, 20 bp, synthetic construct
  source 1..20: mol_type = other DNA
taactgtgcacccaaagtta

SEQ ID NO: 150281 - DNA, 20 bp, synthetic construct
  source 1..20: mol_type = other DNA
ctaactgtgcacccaaagtt

SEQ ID NO: 150282 - DNA, 20 bp, synthetic construct
  source 1..20: mol_type = other DNA
gctaactgtgcacccaaagt

SEQ ID NO: 150283 - DNA, 20 bp, synthetic construct
  source 1..20: mol_type = other DNA
agctaactgtgcacccaaag

SEQ ID NO: 150284 - DNA, 20 bp, synthetic construct
  source 1..20: mol_type = other DNA
aagctaactgtgcacccaaa

SEQ ID NO: 150285 - DNA, 20 bp, synthetic construct
  source 1..20: mol_type = other DNA
taagctaactgtgcacccaa

SEQ ID NO: 150286 - DNA, 20 bp, synthetic construct
  source 1..20: mol_type = other DNA
ataagctaactgtgcaccca

SEQ ID NO: 150287 - DNA, 20 bp, synthetic construct
  source 1..20: mol_type = other DNA
aataagctaactgtgcaccc

SEQ ID NO: 150288 - DNA, 20 bp, synthetic construct
  source 1..20: mol_type = other DNA
aaataagctaactgtgcacc

SEQ ID NO: 150289 - DNA, 20 bp, synthetic construct
  source 1..20: mol_type = other DNA
caaataagctaactgtgcac

SEQ ID NO: 150290 - DNA, 20 bp, synthetic construct
  source 1..20: mol_type = other DNA
tcaaataagctaactgtgca

SEQ ID NO: 150291 - DNA, 20 bp, synthetic construct
  source 1..20: mol_type = other DNA
ttcaaataagctaactgtgc

SEQ ID NO: 150292 - DNA, 20 bp, synthetic construct
  source 1..20: mol_type = other DNA
cttcaaataagctaactgtg

SEQ ID NO: 150293 - DNA, 20 bp, synthetic construct
  source 1..20: mol_type = other DNA
tcttcaaataagctaactgt

SEQ ID NO: 150294 - DNA, 20 bp, synthetic construct
  source 1..20: mol_type = other DNA
atcttcaaataagctaactg

SEQ ID NO: 150295 - DNA, 20 bp, synthetic construct
  source 1..20: mol_type = other DNA
gatcttcaaataagctaact

SEQ ID NO: 150296 - DNA, 20 bp, synthetic construct
  source 1..20: mol_type = other DNA
agatcttcaaataagctaac

SEQ ID NO: 150297 - DNA, 20 bp, synthetic construct
  source 1..20: mol_type = other DNA
aagatcttcaaataagctaa

SEQ ID NO: 150298 - DNA, 20 bp, synthetic construct
  source 1..20: mol_type = other DNA
taagatcttcaaataagcta

SEQ ID NO: 150299 - DNA, 20 bp, synthetic construct
  source 1..20: mol_type = other DNA
gtaagatcttcaaataagct

SEQ ID NO: 150300 - DNA, 20 bp, synthetic construct
  source 1..20: mol_type = other DNA
agtaagatcttcaaataagc

SEQ ID NO: 150301 - DNA, 20 bp, synthetic construct
  source 1..20: mol_type = other DNA
tagtaagatcttcaaataag

SEQ ID NO: 150302 - DNA, 20 bp, synthetic construct
  source 1..20: mol_type = other DNA
ttagtaagatcttcaaataa

SEQ ID NO: 150303 - DNA, 20 bp, synthetic construct
  source 1..20: mol_type = other DNA
tttagtaagatcttcaaata

SEQ ID NO: 150304 - DNA, 20 bp, synthetic construct
  source 1..20: mol_type = other DNA
ttttagtaagatcttcaaat

SEQ ID NO: 150305 - DNA, 20 bp, synthetic construct
  source 1..20: mol_type = other DNA
tttttagtaagatcttcaaa

SEQ ID NO: 150306 - DNA, 20 bp, synthetic construct
  source 1..20: mol_type = other DNA
atttttagtaagatcttcaa

SEQ ID NO: 150307 - DNA, 20 bp, synthetic construct
  source 1..20: mol_type = other DNA
tatttttagtaagatcttca

SEQ ID NO: 150308 - DNA, 20 bp, synthetic construct
  source 1..20: mol_type = other DNA
gtatttttagtaagatcttc

SEQ ID NO: 150309 - DNA, 20 bp, synthetic construct
  source 1..20: mol_type = other DNA
tgtatttttagtaagatctt

SEQ ID NO: 150310 - DNA, 20 bp, synthetic construct
  source 1..20: mol_type = other DNA
gtgtatttttagtaagatct

SEQ ID NO: 150311 - DNA, 20 bp, synthetic construct
  source 1..20: mol_type = other DNA
ggtgtatttttagtaagatc

SEQ ID NO: 150312 - DNA, 20 bp, synthetic construct
  source 1..20: mol_type = other DNA
tggtgtatttttagtaagat

SEQ ID NO: 150313 - DNA, 20 bp, synthetic construct
  source 1..20: mol_type = other DNA
ctggtgtatttttagtaaga

SEQ ID NO: 150314 - DNA, 20 bp, synthetic construct
  source 1..20: mol_type = other DNA
tctggtgtatttttagtaag

SEQ ID NO: 150315 - DNA, 20 bp, synthetic construct
  source 1..20: mol_type = other DNA
ctctggtgtatttttagtaa

SEQ ID NO: 150316 - DNA, 20 bp, synthetic construct
  source 1..20: mol_type = other DNA
gctctggtgtatttttagta

SEQ ID NO: 150317 - DNA, 20 bp, synthetic construct
  source 1..20: mol_type = other DNA
ggctctggtgtatttttagt

SEQ ID NO: 150318 - DNA, 20 bp, synthetic construct
  source 1..20: mol_type = other DNA
gggctctggtgtatttttag

SEQ ID NO: 150319 - DNA, 20 bp, synthetic construct
  source 1..20: mol_type = other DNA
tgggctctggtgtattttta

SEQ ID NO: 150320 - DNA, 20 bp, synthetic construct
  source 1..20: mol_type = other DNA
ttgggctctggtgtattttt

SEQ ID NO: 150321 - DNA, 20 bp, synthetic construct
  source 1..20: mol_type = other DNA
gttgggctctggtgtatttt

SEQ ID NO: 150322 - DNA, 20 bp, synthetic construct
  source 1..20: mol_type = other DNA
ggttgggctctggtgtattt

SEQ ID NO: 150323 - DNA, 20 bp, synthetic construct
  source 1..20: mol_type = other DNA
aggttgggctctggtgtatt

SEQ ID NO: 150324 - DNA, 20 bp, synthetic construct
  source 1..20: mol_type = other DNA
gaggttgggctctggtgtat

SEQ ID NO: 150325 - DNA, 20 bp, synthetic construct
  source 1..20: mol_type = other DNA
ggaggttgggctctggtgta

SEQ ID NO: 150326 - DNA, 20 bp, synthetic construct
  source 1..20: mol_type = other DNA
cggaggttgggctctggtgt

SEQ ID NO: 150327 - DNA, 20 bp, synthetic construct
  source 1..20: mol_type = other DNA
tcggaggttgggctctggtg

SEQ ID NO: 150328 - DNA, 20 bp, synthetic construct
  source 1..20: mol_type = other DNA
gtcggaggttgggctctggt

SEQ ID NO: 150329 - DNA, 20 bp, synthetic construct
  source 1..20: mol_type = other DNA
ggtcggaggttgggctctgg

SEQ ID NO: 150330 - DNA, 20 bp, synthetic construct
  source 1..20: mol_type = other DNA
tggtcggaggttgggctctg

SEQ ID NO: 150331 - DNA, 20 bp, synthetic construct
  source 1..20: mol_type = other DNA
ttggtcggaggttgggctct

SEQ ID NO: 150332 - DNA, 20 bp, synthetic construct
  source 1..20: mol_type = other DNA
attggtcggaggttgggctc

SEQ ID NO: 150333 - DNA, 20 bp, synthetic construct
  source 1..20: mol_type = other DNA
aattggtcggaggttgggct

SEQ ID NO: 150334 - DNA, 20 bp, synthetic construct
  source 1..20: mol_type = other DNA
taattggtcggaggttgggc

SEQ ID NO: 150335 - DNA, 20 bp, synthetic construct
  source 1..20: mol_type = other DNA
gtaattggtcggaggttggg

SEQ ID NO: 150336 - DNA, 20 bp, synthetic construct
  source 1..20: mol_type = other DNA
tgtaattggtcggaggttgg

SEQ ID NO: 150337 - DNA, 20 bp, synthetic construct
  source 1..20: mol_type = other DNA
atgtaattggtcggaggttg

SEQ ID NO: 150338 - DNA, 20 bp, synthetic construct
  source 1..20: mol_type = other DNA
gatgtaattggtcggaggtt

SEQ ID NO: 150339 - DNA, 20 bp, synthetic construct
  source 1..20: mol_type = other DNA
tgatgtaattggtcggaggt

SEQ ID NO: 150340 - DNA, 20 bp, synthetic construct
  source 1..20: mol_type = other DNA
ttgatgtaattggtcggagg

SEQ ID NO: 150341 - DNA, 20 bp, synthetic construct
  source 1..20: mol_type = other DNA
tttgatgtaattggtcggag

SEQ ID NO: 150342 - DNA, 20 bp, synthetic construct
  source 1..20: mol_type = other DNA
ttttgatgtaattggtcgga

SEQ ID NO: 150343 - DNA, 20 bp, synthetic construct
  source 1..20: mol_type = other DNA
gttttgatgtaattggtcgg

SEQ ID NO: 150344 - DNA, 20 bp, synthetic construct
  source 1..20: mol_type = other DNA
ggttttgatgtaattggtcg

SEQ ID NO: 150345 - DNA, 20 bp, synthetic construct
  source 1..20: mol_type = other DNA
aggttttgatgtaattggtc

SEQ ID NO: 150346 - DNA, 20 bp, synthetic construct
  source 1..20: mol_type = other DNA
caggttttgatgtaattggt

SEQ ID NO: 150347 - DNA, 20 bp, synthetic construct
  source 1..20: mol_type = other DNA
acaggttttgatgtaattgg

SEQ ID NO: 150348 - DNA, 20 bp, synthetic construct
  source 1..20: mol_type = other DNA
gacaggttttgatgtaattg

SEQ ID NO: 150349 - DNA, 20 bp, synthetic construct
  source 1..20: mol_type = other DNA
ggacaggttttgatgtaatt

SEQ ID NO: 150350 - DNA, 20 bp, synthetic construct
  source 1..20: mol_type = other DNA
aggacaggttttgatgtaat

SEQ ID NO: 150351 - DNA, 20 bp, synthetic construct
  source 1..20: mol_type = other DNA
taggacaggttttgatgtaa

SEQ ID NO: 150352 - DNA, 20 bp, synthetic construct
  source 1..20: mol_type = other DNA
ctaggacaggttttgatgta

SEQ ID NO: 150353 - DNA, 20 bp, synthetic construct
  source 1..20: mol_type = other DNA
actaggacaggttttgatgt

SEQ ID NO: 150354 - DNA, 20 bp, synthetic construct
  source 1..20: mol_type = other DNA
cactaggacaggttttgatg

SEQ ID NO: 150355 - DNA, 20 bp, synthetic construct
  source 1..20: mol_type = other DNA
gcactaggacaggttttgat

SEQ ID NO: 150356 - DNA, 20 bp, synthetic construct
  source 1..20: mol_type = other DNA
tgcactaggacaggttttga

SEQ ID NO: 150357 - DNA, 20 bp, synthetic construct
  source 1..20: mol_type = other DNA
ctgcactaggacaggttttg

SEQ ID NO: 150358 - DNA, 20 bp, synthetic construct
  source 1..20: mol_type = other DNA
cctgcactaggacaggtttt

SEQ ID NO: 150359 - DNA, 20 bp, synthetic construct
  source 1..20: mol_type = other DNA
ccctgcactaggacaggttt

SEQ ID NO: 150360 - DNA, 20 bp, synthetic construct
  source 1..20: mol_type = other DNA
accctgcactaggacaggtt

SEQ ID NO: 150361 - DNA, 20 bp, synthetic construct
  source 1..20: mol_type = other DNA
caccctgcactaggacaggt

SEQ ID NO: 150362 - DNA, 20 bp, synthetic construct
  source 1..20: mol_type = other DNA
tcaccctgcactaggacagg

SEQ ID NO: 150363 - DNA, 20 bp, synthetic construct
  source 1..20: mol_type = other DNA
ctcaccctgcactaggacag

SEQ ID NO: 150364 - DNA, 20 bp, synthetic construct
  source 1..20: mol_type = other DNA
actcaccctgcactaggaca

SEQ ID NO: 150365 - DNA, 20 bp, synthetic construct
  source 1..20: mol_type = other DNA
tactcaccctgcactaggac

SEQ ID NO: 150366 - DNA, 20 bp, synthetic construct
  source 1..20: mol_type = other DNA
atactcaccctgcactagga

SEQ ID NO: 150367 - DNA, 20 bp, synthetic construct
  source 1..20: mol_type = other DNA
aatactcaccctgcactagg

SEQ ID NO: 150368 - DNA, 20 bp, synthetic construct
  source 1..20: mol_type = other DNA
caatactcaccctgcactag

SEQ ID NO: 150369 - DNA, 20 bp, synthetic construct
  source 1..20: mol_type = other DNA
gcaatactcaccctgcacta

SEQ ID NO: 150370 - DNA, 20 bp, synthetic construct
  source 1..20: mol_type = other DNA
agcaatactcaccctgcact

SEQ ID NO: 150371 - DNA, 20 bp, synthetic construct
  source 1..20: mol_type = other DNA
cagcaatactcaccctgcac

SEQ ID NO: 150372 - DNA, 20 bp, synthetic construct
  source 1..20: mol_type = other DNA
acagcaatactcaccctgca

SEQ ID NO: 150373 - DNA, 20 bp, synthetic construct
  source 1..20: mol_type = other DNA
aacagcaatactcaccctgc

SEQ ID NO: 150374 - DNA, 20 bp, synthetic construct
  source 1..20: mol_type = other DNA
aaacagcaatactcaccctg

SEQ ID NO: 150375 - DNA, 20 bp, synthetic construct
  source 1..20: mol_type = other DNA
aaaacagcaatactcaccct

SEQ ID NO: 150376 - DNA, 20 bp, synthetic construct
  source 1..20: mol_type = other DNA
aaaaacagcaatactcaccc

SEQ ID NO: 150377 - DNA, 20 bp, synthetic construct
  source 1..20: mol_type = other DNA
aaaaaacagcaatactcacc

SEQ ID NO: 150378 - DNA, 20 bp, synthetic construct
  source 1..20: mol_type = other DNA
caaaaaacagcaatactcac

SEQ ID NO: 150379 - DNA, 20 bp, synthetic construct
  source 1..20: mol_type = other DNA
tcaaaaaacagcaatactca

SEQ ID NO: 150380 - DNA, 20 bp, synthetic construct
  source 1..20: mol_type = other DNA
ttcaaaaaacagcaatactc

SEQ ID NO: 150381 - DNA, 20 bp, synthetic construct
  source 1..20: mol_type = other DNA
tttcaaaaaacagcaatact

SEQ ID NO: 150382 - DNA, 20 bp, synthetic construct
  source 1..20: mol_type = other DNA
ctttcaaaaaacagcaatac

SEQ ID NO: 150383 - DNA, 20 bp, synthetic construct
  source 1..20: mol_type = other DNA
actttcaaaaaacagcaata

SEQ ID NO: 150384 - DNA, 20 bp, synthetic construct
  source 1..20: mol_type = other DNA
aactttcaaaaaacagcaat

SEQ ID NO: 150385 - DNA, 20 bp, synthetic construct
  source 1..20: mol_type = other DNA
aaactttcaaaaaacagcaa

SEQ ID NO: 150386 - DNA, 20 bp, synthetic construct
  source 1..20: mol_type = other DNA
gaaactttcaaaaaacagca

SEQ ID NO: 150387 - DNA, 20 bp, synthetic construct
  source 1..20: mol_type = other DNA
ggaaactttcaaaaaacagc

SEQ ID NO: 150388 - DNA, 20 bp, synthetic construct
  source 1..20: mol_type = other DNA
tggaaactttcaaaaaacag

SEQ ID NO: 150389 - DNA, 20 bp, synthetic construct
  source 1..20: mol_type = other DNA
ttggaaactttcaaaaaaca

SEQ ID NO: 150390 - DNA, 20 bp, synthetic construct
  source 1..20: mol_type = other DNA
tttggaaactttcaaaaaac

SEQ ID NO: 150391 - DNA, 20 bp, synthetic construct
  source 1..20: mol_type = other DNA
ttttggaaactttcaaaaaa

SEQ ID NO: 150392 - DNA, 20 bp, synthetic construct
  source 1..20: mol_type = other DNA
cttttggaaactttcaaaaa

SEQ ID NO: 150393 - DNA, 20 bp, synthetic construct
  source 1..20: mol_type = other DNA
acttttggaaactttcaaaa

SEQ ID NO: 150394 - DNA, 20 bp, synthetic construct
  source 1..20: mol_type = other DNA
cacttttggaaactttcaaa

SEQ ID NO: 150395 - DNA, 20 bp, synthetic construct
  source 1..20: mol_type = other DNA
tcacttttggaaactttcaa

SEQ ID NO: 150396 - DNA, 20 bp, synthetic construct
  source 1..20: mol_type = other DNA
atcacttttggaaactttca

SEQ ID NO: 150397 - DNA, 20 bp, synthetic construct
  source 1..20: mol_type = other DNA
aatcacttttggaaactttc

SEQ ID NO: 150398 - DNA, 20 bp, synthetic construct
  source 1..20: mol_type = other DNA
aaatcacttttggaaacttt

SEQ ID NO: 150399 - DNA, 20 bp, synthetic construct
  source 1..20: mol_type = other DNA
aaaatcacttttggaaactt

SEQ ID NO: 150400 - DNA, 20 bp, synthetic construct
  source 1..20: mol_type = other DNA
caaaatcacttttggaaact

SEQ ID NO: 150401 - DNA, 20 bp, synthetic construct
  source 1..20: mol_type = other DNA
tcaaaatcacttttggaaac

SEQ ID NO: 150402 - DNA, 20 bp, synthetic construct
  source 1..20: mol_type = other DNA
atcaaaatcacttttggaaa

SEQ ID NO: 150403 - DNA, 20 bp, synthetic construct
  source 1..20: mol_type = other DNA
catcaaaatcacttttggaa

SEQ ID NO: 150404 - DNA, 20 bp, synthetic construct
  source 1..20: mol_type = other DNA
acatcaaaatcacttttgga

SEQ ID NO: 150405 - DNA, 20 bp, synthetic construct
  source 1..20: mol_type = other DNA
cacatcaaaatcacttttgg

SEQ ID NO: 150406 - DNA, 20 bp, synthetic construct
  source 1..20: mol_type = other DNA
gcacatcaaaatcacttttg

SEQ ID NO: 150407 - DNA, 20 bp, synthetic construct
  source 1..20: mol_type = other DNA
tgcacatcaaaatcactttt

SEQ ID NO: 150408 - DNA, 20 bp, synthetic construct
  source 1..20: mol_type = other DNA
gtgcacatcaaaatcacttt

SEQ ID NO: 150409 - DNA, 20 bp, synthetic construct
  source 1..20: mol_type = other DNA
ggtgcacatcaaaatcactt

SEQ ID NO: 150410 - DNA, 20 bp, synthetic construct
  source 1..20: mol_type = other DNA
aggtgcacatcaaaatcact

SEQ ID NO: 150411 - DNA, 20 bp, synthetic construct
  source 1..20: mol_type = other DNA
taggtgcacatcaaaatcac

SEQ ID NO: 150412 - DNA, 20 bp, synthetic construct
  source 1..20: mol_type = other DNA
gtaggtgcacatcaaaatca

SEQ ID NO: 150413 - DNA, 20 bp, synthetic construct
  source 1..20: mol_type = other DNA
cgtaggtgcacatcaaaatc

SEQ ID NO: 150414 - DNA, 20 bp, synthetic construct
  source 1..20: mol_type = other DNA
tcgtaggtgcacatcaaaat

SEQ ID NO: 150415 - DNA, 20 bp, synthetic construct
  source 1..20: mol_type = other DNA
atcgtaggtgcacatcaaaa

SEQ ID NO: 150416 - DNA, 20 bp, synthetic construct
  source 1..20: mol_type = other DNA
aatcgtaggtgcacatcaaa

SEQ ID NO: 150417 - DNA, 20 bp, synthetic construct
  source 1..20: mol_type = other DNA
caatcgtaggtgcacatcaa

SEQ ID NO: 150418 - DNA, 20 bp, synthetic construct
  source 1..20: mol_type = other DNA
tcaatcgtaggtgcacatca

SEQ ID NO: 150419 - DNA, 20 bp, synthetic construct
  source 1..20: mol_type = other DNA
ctcaatcgtaggtgcacatc

SEQ ID NO: 150420 - DNA, 20 bp, synthetic construct
  source 1..20: mol_type = other DNA
tctcaatcgtaggtgcacat

SEQ ID NO: 150421 - DNA, 20 bp, synthetic construct
  source 1..20: mol_type = other DNA
ttctcaatcgtaggtgcaca

SEQ ID NO: 150422 - DNA, 20 bp, synthetic construct
  source 1..20: mol_type = other DNA
gttctcaatcgtaggtgcac

SEQ ID NO: 150423 - DNA, 20 bp, synthetic construct
  source 1..20: mol_type = other DNA
agttctcaatcgtaggtgca

SEQ ID NO: 150424 - DNA, 20 bp, synthetic construct
  source 1..20: mol_type = other DNA
cagttctcaatcgtaggtgc

SEQ ID NO: 150425 - DNA, 20 bp, synthetic construct
  source 1..20: mol_type = other DNA
acagttctcaatcgtaggtg

SEQ ID NO: 150426 - DNA, 20 bp, synthetic construct
  source 1..20: mol_type = other DNA
gacagttctcaatcgtaggt

SEQ ID NO: 150427 - DNA, 20 bp, synthetic construct
  source 1..20: mol_type = other DNA
cgacagttctcaatcgtagg

SEQ ID NO: 150428 - DNA, 20 bp, synthetic construct
  source 1..20: mol_type = other DNA
acgacagttctcaatcgtag

SEQ ID NO: 150429 - DNA, 20 bp, synthetic construct
  source 1..20: mol_type = other DNA
aacgacagttctcaatcgta

SEQ ID NO: 150430 - DNA, 20 bp, synthetic construct
  source 1..20: mol_type = other DNA
aaacgacagttctcaatcgt

SEQ ID NO: 150431 - DNA, 20 bp, synthetic construct
  source 1..20: mol_type = other DNA
caaacgacagttctcaatcg

SEQ ID NO: 150432 - DNA, 20 bp, synthetic construct
  source 1..20: mol_type = other DNA
tcaaacgacagttctcaatc

SEQ ID NO: 150433 - DNA, 20 bp, synthetic construct
  source 1..20: mol_type = other DNA
ctcaaacgacagttctcaat

SEQ ID NO: 150434 - DNA, 20 bp, synthetic construct
  source 1..20: mol_type = other DNA
cctcaaacgacagttctcaa

SEQ ID NO: 150435 - DNA, 20 bp, synthetic construct
  source 1..20: mol_type = other DNA
tcctcaaacgacagttctca

SEQ ID NO: 150436 - DNA, 20 bp, synthetic construct
  source 1..20: mol_type = other DNA
gtcctcaaacgacagttctc

SEQ ID NO: 150437 - DNA, 20 bp, synthetic construct
  source 1..20: mol_type = other DNA
tgtcctcaaacgacagttct

SEQ ID NO: 150438 - DNA, 20 bp, synthetic construct
  source 1..20: mol_type = other DNA
ctgtcctcaaacgacagttc

SEQ ID NO: 150439 - DNA, 20 bp, synthetic construct
  source 1..20: mol_type = other DNA
actgtcctcaaacgacagtt

SEQ ID NO: 150440 - DNA, 20 bp, synthetic construct
  source 1..20: mol_type = other DNA
cactgtcctcaaacgacagt

SEQ ID NO: 150441 - DNA, 20 bp, synthetic construct
  source 1..20: mol_type = other DNA
ccactgtcctcaaacgacag

SEQ ID NO: 150442 - DNA, 20 bp, synthetic construct
  source 1..20: mol_type = other DNA
cccactgtcctcaaacgaca

SEQ ID NO: 150443 - DNA, 20 bp, synthetic construct
  source 1..20: mol_type = other DNA
acccactgtcctcaaacgac

SEQ ID NO: 150444 - DNA, 20 bp, synthetic construct
  source 1..20: mol_type = other DNA
cacccactgtcctcaaacga

SEQ ID NO: 150445 - DNA, 20 bp, synthetic construct
  source 1..20: mol_type = other DNA
ccacccactgtcctcaaacg

SEQ ID NO: 150446 - DNA, 20 bp, synthetic construct
  source 1..20: mol_type = other DNA
tccacccactgtcctcaaac

SEQ ID NO: 150447 - DNA, 20 bp, synthetic construct
  source 1..20: mol_type = other DNA
ctccacccactgtcctcaaa

SEQ ID NO: 150448 - DNA, 20 bp, synthetic construct
  source 1..20: mol_type = other DNA
actccacccactgtcctcaa

SEQ ID NO: 150449 - DNA, 20 bp, synthetic construct
  source 1..20: mol_type = other DNA
aactccacccactgtcctca

SEQ ID NO: 150450 - DNA, 20 bp, synthetic construct
  source 1..20: mol_type = other DNA
aaactccacccactgtcctc

SEQ ID NO: 150451 - DNA, 20 bp, synthetic construct
  source 1..20: mol_type = other DNA
gaaactccacccactgtcct

SEQ ID NO: 150452 - DNA, 20 bp, synthetic construct
  source 1..20: mol_type = other DNA
cgaaactccacccactgtcc

SEQ ID NO: 150453 - DNA, 20 bp, synthetic construct
  source 1..20: mol_type = other DNA
acgaaactccacccactgtc

SEQ ID NO: 150454 - DNA, 20 bp, synthetic construct
  source 1..20: mol_type = other DNA
tacgaaactccacccactgt

SEQ ID NO: 150455 - DNA, 20 bp, synthetic construct
  source 1..20: mol_type = other DNA
atacgaaactccacccactg

SEQ ID NO: 150456 - DNA, 20 bp, synthetic construct
  source 1..20: mol_type = other DNA
aatacgaaactccacccact

SEQ ID NO: 150457 - DNA, 20 bp, synthetic construct
  source 1..20: mol_type = other DNA
aaatacgaaactccacccac

SEQ ID NO: 150458 - DNA, 20 bp, synthetic construct
  source 1..20: mol_type = other DNA
caaatacgaaactccaccca

SEQ ID NO: 150459 - DNA, 20 bp, synthetic construct
  source 1..20: mol_type = other DNA
ccaaatacgaaactccaccc

SEQ ID NO: 150460 - DNA, 20 bp, synthetic construct
  source 1..20: mol_type = other DNA
tccaaatacgaaactccacc

SEQ ID NO: 150461 - DNA, 20 bp, synthetic construct
  source 1..20: mol_type = other DNA
ttccaaatacgaaactccac

SEQ ID NO: 150462 - DNA, 20 bp, synthetic construct
  source 1..20: mol_type = other DNA
tttccaaatacgaaactcca

SEQ ID NO: 150463 - DNA, 20 bp, synthetic construct
  source 1..20: mol_type = other DNA
atttccaaatacgaaactcc

SEQ ID NO: 150464 - DNA, 20 bp, synthetic construct
  source 1..20: mol_type = other DNA
aatttccaaatacgaaactc

SEQ ID NO: 150465 - DNA, 20 bp, synthetic construct
  source 1..20: mol_type = other DNA
taatttccaaatacgaaact

SEQ ID NO: 150466 - DNA, 20 bp, synthetic construct
  source 1..20: mol_type = other DNA
ctaatttccaaatacgaaac

SEQ ID NO: 150467 - DNA, 20 bp, synthetic construct
  source 1..20: mol_type = other DNA
tctaatttccaaatacgaaa

SEQ ID NO: 150468 - DNA, 20 bp, synthetic construct
  source 1..20: mol_type = other DNA
ttctaatttccaaatacgaa

SEQ ID NO: 150469 - DNA, 20 bp, synthetic construct
  source 1..20: mol_type = other DNA
cttctaatttccaaatacga

SEQ ID NO: 150470 - DNA, 20 bp, synthetic construct
  source 1..20: mol_type = other DNA
tcttctaatttccaaatacg

SEQ ID NO: 150471 - DNA, 20 bp, synthetic construct
  source 1..20: mol_type = other DNA
gtcttctaatttccaaatac

SEQ ID NO: 150472 - DNA, 20 bp, synthetic construct
  source 1..20: mol_type = other DNA
ggtcttctaatttccaaata

SEQ ID NO: 150473 - DNA, 20 bp, synthetic construct
  source 1..20: mol_type = other DNA
aggtcttctaatttccaaat

SEQ ID NO: 150474 - DNA, 20 bp, synthetic construct
  source 1..20: mol_type = other DNA
caggtcttctaatttccaaa

SEQ ID NO: 150475 - DNA, 20 bp, synthetic construct
  source 1..20: mol_type = other DNA
ccaggtcttctaatttccaa

SEQ ID NO: 150476 - DNA, 20 bp, synthetic construct
  source 1..20: mol_type = other DNA
tccaggtcttctaatttcca

SEQ ID NO: 150477 - DNA, 20 bp, synthetic construct
  source 1..20: mol_type = other DNA
ctccaggtcttctaatttcc

SEQ ID NO: 150478 - DNA, 20 bp, synthetic construct
  source 1..20: mol_type = other DNA
actccaggtcttctaatttc

SEQ ID NO: 150479 - DNA, 20 bp, synthetic construct
  source 1..20: mol_type = other DNA
aactccaggtcttctaattt

SEQ ID NO: 150480 - DNA, 20 bp, synthetic construct
  source 1..20: mol_type = other DNA
aaactccaggtcttctaatt

SEQ ID NO: 150481 - DNA, 20 bp, synthetic construct
  source 1..20: mol_type = other DNA
gaaactccaggtcttctaat

SEQ ID NO: 150482 - DNA, 20 bp, synthetic construct
  source 1..20: mol_type = other DNA
ggaaactccaggtcttctaa

SEQ ID NO: 150483 - DNA, 20 bp, synthetic construct
  source 1..20: mol_type = other DNA
tggaaactccaggtcttcta

SEQ ID NO: 150484 - DNA, 20 bp, synthetic construct
  source 1..20: mol_type = other DNA
atggaaactccaggtcttct

SEQ ID NO: 150485 - DNA, 20 bp, synthetic construct
  source 1..20: mol_type = other DNA
aatggaaactccaggtcttc

SEQ ID NO: 150486 - DNA, 20 bp, synthetic construct
  source 1..20: mol_type = other DNA
taatggaaactccaggtctt

SEQ ID NO: 150487 - DNA, 20 bp, synthetic construct
  source 1..20: mol_type = other DNA
gtaatggaaactccaggtct

SEQ ID NO: 150488 - DNA, 20 bp, synthetic construct
  source 1..20: mol_type = other DNA
tgtaatggaaactccaggtc

SEQ ID NO: 150489 - DNA, 20 bp, synthetic construct
  source 1..20: mol_type = other DNA
gtgtaatggaaactccaggt

SEQ ID NO: 150490 - DNA, 20 bp, synthetic construct
  source 1..20: mol_type = other DNA
ggtgtaatggaaactccagg

SEQ ID NO: 150491 - DNA, 20 bp, synthetic construct
  source 1..20: mol_type = other DNA
cggtgtaatggaaactccag

SEQ ID NO: 150492 - DNA, 20 bp, synthetic construct
  source 1..20: mol_type = other DNA
tcggtgtaatggaaactcca

SEQ ID NO: 150493 - DNA, 20 bp, synthetic construct
  source 1..20: mol_type = other DNA
ttcggtgtaatggaaactcc

SEQ ID NO: 150494 - DNA, 20 bp, synthetic construct
  source 1..20: mol_type = other DNA
attcggtgtaatggaaactc

SEQ ID NO: 150495 - DNA, 20 bp, synthetic construct
  source 1..20: mol_type = other DNA
aattcggtgtaatggaaact

SEQ ID NO: 150496 - DNA, 20 bp, synthetic construct
  source 1..20: mol_type = other DNA
caattcggtgtaatggaaac

SEQ ID NO: 150497 - DNA, 20 bp, synthetic construct
  source 1..20: mol_type = other DNA
ccaattcggtgtaatggaaa

SEQ ID NO: 150498 - DNA, 20 bp, synthetic construct
  source 1..20: mol_type = other DNA
gccaattcggtgtaatggaa

SEQ ID NO: 150499 - DNA, 20 bp, synthetic construct
  source 1..20: mol_type = other DNA
tgccaattcggtgtaatgga

SEQ ID NO: 150500 - DNA, 20 bp, synthetic construct
  source 1..20: mol_type = other DNA
gtgccaattcggtgtaatgg

SEQ ID NO: 150501 - DNA, 20 bp, synthetic construct
  source 1..20: mol_type = other DNA
agtgccaattcggtgtaatg

SEQ ID NO: 150502 - DNA, 20 bp, synthetic construct
  source 1..20: mol_type = other DNA
aagtgccaattcggtgtaat

SEQ ID NO: 150503 - DNA, 20 bp, synthetic construct
  source 1..20: mol_type = other DNA
taagtgccaattcggtgtaa

SEQ ID NO: 150504 - DNA, 20 bp, synthetic construct
  source 1..20: mol_type = other DNA
ttaagtgccaattcggtgta

SEQ ID NO: 150505 - DNA, 20 bp, synthetic construct
  source 1..20: mol_type = other DNA
attaagtgccaattcggtgt

SEQ ID NO: 150506 - DNA, 20 bp, synthetic construct
  source 1..20: mol_type = other DNA
tattaagtgccaattcggtg

SEQ ID NO: 150507 - DNA, 20 bp, synthetic construct
  source 1..20: mol_type = other DNA
ttattaagtgccaattcggt

SEQ ID NO: 150508 - DNA, 20 bp, synthetic construct
  source 1..20: mol_type = other DNA
gttattaagtgccaattcgg

SEQ ID NO: 150509 - DNA, 20 bp, synthetic construct
  source 1..20: mol_type = other DNA
agttattaagtgccaattcg

SEQ ID NO: 150510 - DNA, 20 bp, synthetic construct
  source 1..20: mol_type = other DNA
cagttattaagtgccaattc

SEQ ID NO: 150511 - DNA, 20 bp, synthetic construct
  source 1..20: mol_type = other DNA
acagttattaagtgccaatt

SEQ ID NO: 150512 - DNA, 20 bp, synthetic construct
  source 1..20: mol_type = other DNA
aacagttattaagtgccaat

SEQ ID NO: 150513 - DNA, 20 bp, synthetic construct
  source 1..20: mol_type = other DNA
caacagttattaagtgccaa

SEQ ID NO: 150514 - DNA, 20 bp, synthetic construct
  source 1..20: mol_type = other DNA
acaacagttattaagtgcca

SEQ ID NO: 150515 - DNA, 20 bp, synthetic construct
  source 1..20: mol_type = other DNA
gacaacagttattaagtgcc

SEQ ID NO: 150516 - DNA, 20 bp, synthetic construct
  source 1..20: mol_type = other DNA
cgacaacagttattaagtgc

SEQ ID NO: 150517 - DNA, 20 bp, synthetic construct
  source 1..20: mol_type = other DNA
ccgacaacagttattaagtg

SEQ ID NO: 150518 - DNA, 20 bp, synthetic construct
  source 1..20: mol_type = other DNA
tccgacaacagttattaagt

SEQ ID NO: 150519 - DNA, 20 bp, synthetic construct
  source 1..20: mol_type = other DNA
ctccgacaacagttattaag

SEQ ID NO: 150520 - DNA, 20 bp, synthetic construct
  source 1..20: mol_type = other DNA
gctccgacaacagttattaa

SEQ ID NO: 150521 - DNA, 20 bp, synthetic construct
  source 1..20: mol_type = other DNA
tgctccgacaacagttatta

SEQ ID NO: 150522 - DNA, 20 bp, synthetic construct
  source 1..20: mol_type = other DNA
atgctccgacaacagttatt

SEQ ID NO: 150523 - DNA, 20 bp, synthetic construct
  source 1..20: mol_type = other DNA
aatgctccgacaacagttat

SEQ ID NO: 150524 - DNA, 20 bp, synthetic construct
  source 1..20: mol_type = other DNA
aaatgctccgacaacagtta

SEQ ID NO: 150525 - DNA, 20 bp, synthetic construct
  source 1..20: mol_type = other DNA
gaaatgctccgacaacagtt

SEQ ID NO: 150526 - DNA, 20 bp, synthetic construct
  source 1..20: mol_type = other DNA
agaaatgctccgacaacagt

SEQ ID NO: 150527 - DNA, 20 bp, synthetic construct
  source 1..20: mol_type = other DNA
aagaaatgctccgacaacag

SEQ ID NO: 150528 - DNA, 20 bp, synthetic construct
  source 1..20: mol_type = other DNA
taagaaatgctccgacaaca

SEQ ID NO: 150529 - DNA, 20 bp, synthetic construct
  source 1..20: mol_type = other DNA
ttaagaaatgctccgacaac

SEQ ID NO: 150530 - DNA, 20 bp, synthetic construct
  source 1..20: mol_type = other DNA
cttaagaaatgctccgacaa

SEQ ID NO: 150531 - DNA, 20 bp, synthetic construct
  source 1..20: mol_type = other DNA
gcttaagaaatgctccgaca

SEQ ID NO: 150532 - DNA, 20 bp, synthetic construct
  source 1..20: mol_type = other DNA
ggcttaagaaatgctccgac

SEQ ID NO: 150533 - DNA, 20 bp, synthetic construct
  source 1..20: mol_type = other DNA
tggcttaagaaatgctccga

SEQ ID NO: 150534 - DNA, 20 bp, synthetic construct
  source 1..20: mol_type = other DNA
gtggcttaagaaatgctccg

SEQ ID NO: 150535 - DNA, 20 bp, synthetic construct
  source 1..20: mol_type = other DNA
tgtggcttaagaaatgctcc

SEQ ID NO: 150536 - DNA, 20 bp, synthetic construct
  source 1..20: mol_type = other DNA
atgtggcttaagaaatgctc

SEQ ID NO: 150537 - DNA, 20 bp, synthetic construct
  source 1..20: mol_type = other DNA
aatgtggcttaagaaatgct

SEQ ID NO: 150538 - DNA, 20 bp, synthetic construct
  source 1..20: mol_type = other DNA
aaatgtggcttaagaaatgc

SEQ ID NO: 150539 - DNA, 20 bp, synthetic construct
  source 1..20: mol_type = other DNA
aaaatgtggcttaagaaatg

SEQ ID NO: 150540 - DNA, 20 bp, synthetic construct
  source 1..20: mol_type = other DNA
gaaaatgtggcttaagaaat

SEQ ID NO: 150541 - DNA, 20 bp, synthetic construct
  source 1..20: mol_type = other DNA
cgaaaatgtggcttaagaaa

SEQ ID NO: 150542 - DNA, 20 bp, synthetic construct
  source 1..20: mol_type = other DNA
acgaaaatgtggcttaagaa

SEQ ID NO: 150543 - DNA, 20 bp, synthetic construct
  source 1..20: mol_type = other DNA
tacgaaaatgtggcttaaga

SEQ ID NO: 150544 - DNA, 20 bp, synthetic construct
  source 1..20: mol_type = other DNA
ttacgaaaatgtggcttaag

SEQ ID NO: 150545 - DNA, 20 bp, synthetic construct
  source 1..20: mol_type = other DNA
tttacgaaaatgtggcttaa

SEQ ID NO: 150546 - DNA, 20 bp, synthetic construct
  source 1..20: mol_type = other DNA
ctttacgaaaatgtggctta

SEQ ID NO: 150547 - DNA, 20 bp, synthetic construct
  source 1..20: mol_type = other DNA
actttacgaaaatgtggctt

SEQ ID NO: 150548 - DNA, 20 bp, synthetic construct
  source 1..20: mol_type = other DNA
cactttacgaaaatgtggct

SEQ ID NO: 150549 - DNA, 20 bp, synthetic construct
  source 1..20: mol_type = other DNA
ccactttacgaaaatgtggc

SEQ ID NO: 150550 - DNA, 20 bp, synthetic construct
  source 1..20: mol_type = other DNA
gccactttacgaaaatgtgg

SEQ ID NO: 150551 - DNA, 20 bp, synthetic construct
  source 1..20: mol_type = other DNA
agccactttacgaaaatgtg

SEQ ID NO: 150552 - DNA, 20 bp, synthetic construct
  source 1..20: mol_type = other DNA
aagccactttacgaaaatgt

SEQ ID NO: 150553 - DNA, 20 bp, synthetic construct
  source 1..20: mol_type = other DNA
aaagccactttacgaaaatg

SEQ ID NO: 150554 - DNA, 20 bp, synthetic construct
  source 1..20: mol_type = other DNA
taaagccactttacgaaaat

SEQ ID NO: 150555 - DNA, 20 bp, synthetic construct
  source 1..20: mol_type = other DNA
ttaaagccactttacgaaaa

SEQ ID NO: 150556 - DNA, 20 bp, synthetic construct
  source 1..20: mol_type = other DNA
tttaaagccactttacgaaa

SEQ ID NO: 150557 - DNA, 20 bp, synthetic construct
  source 1..20: mol_type = other DNA
ttttaaagccactttacgaa

SEQ ID NO: 150558 - DNA, 20 bp, synthetic construct
  source 1..20: mol_type = other DNA
attttaaagccactttacga

SEQ ID NO: 150559 - DNA, 20 bp, synthetic construct
  source 1..20: mol_type = other DNA
aattttaaagccactttacg

SEQ ID NO: 150560 - DNA, 20 bp, synthetic construct
  source 1..20: mol_type = other DNA
caattttaaagccactttac

SEQ ID NO: 150561 - DNA, 20 bp, synthetic construct
  source 1..20: mol_type = other DNA
gcaattttaaagccacttta

SEQ ID NO: 150562 - DNA, 20 bp, synthetic construct
  source 1..20: mol_type = other DNA
agcaattttaaagccacttt

SEQ ID NO: 150563 - DNA, 20 bp, synthetic construct
  source 1..20: mol_type = other DNA
gagcaattttaaagccactt

SEQ ID NO: 150564 - DNA, 20 bp, synthetic construct
  source 1..20: mol_type = other DNA
agagcaattttaaagccact

SEQ ID NO: 150565 - DNA, 20 bp, synthetic construct
  source 1..20: mol_type = other DNA
cagagcaattttaaagccac

SEQ ID NO: 150566 - DNA, 20 bp, synthetic construct
  source 1..20: mol_type = other DNA
gcagagcaattttaaagcca

SEQ ID NO: 150567 - DNA, 20 bp, synthetic construct
  source 1..20: mol_type = other DNA
ggcagagcaattttaaagcc

SEQ ID NO: 150568 - DNA, 20 bp, synthetic construct
  source 1..20: mol_type = other DNA
tggcagagcaattttaaagc

SEQ ID NO: 150569 - DNA, 20 bp, synthetic construct
  source 1..20: mol_type = other DNA
ctggcagagcaattttaaag

SEQ ID NO: 150570 - DNA, 20 bp, synthetic construct
  source 1..20: mol_type = other DNA
actggcagagcaattttaaa

SEQ ID NO: 150571 - DNA, 20 bp, synthetic construct
  source 1..20: mol_type = other DNA
tactggcagagcaattttaa

SEQ ID NO: 150572 - DNA, 20 bp, synthetic construct
  source 1..20: mol_type = other DNA
ctactggcagagcaatttta

SEQ ID NO: 150573 - DNA, 20 bp, synthetic construct
  source 1..20: mol_type = other DNA
cctactggcagagcaatttt

SEQ ID NO: 150574 - DNA, 20 bp, synthetic construct
  source 1..20: mol_type = other DNA
gcctactggcagagcaattt

SEQ ID NO: 150575 - DNA, 20 bp, synthetic construct
  source 1..20: mol_type = other DNA
tgcctactggcagagcaatt

SEQ ID NO: 150576 - DNA, 20 bp, synthetic construct
  source 1..20: mol_type = other DNA
ctgcctactggcagagcaat

SEQ ID NO: 150577 - DNA, 20 bp, synthetic construct
  source 1..20: mol_type = other DNA
cctgcctactggcagagcaa

SEQ ID NO: 150578 - DNA, 20 bp, synthetic construct
  source 1..20: mol_type = other DNA
acctgcctactggcagagca

SEQ ID NO: 150579 - DNA, 20 bp, synthetic construct
  source 1..20: mol_type = other DNA
aacctgcctactggcagagc

SEQ ID NO: 150580 - DNA, 20 bp, synthetic construct
  source 1..20: mol_type = other DNA
caacctgcctactggcagag

SEQ ID NO: 150581 - DNA, 20 bp, synthetic construct
  source 1..20: mol_type = other DNA
gcaacctgcctactggcaga

SEQ ID NO: 150582 - DNA, 20 bp, synthetic construct
  source 1..20: mol_type = other DNA
agcaacctgcctactggcag

SEQ ID NO: 150583 - DNA, 20 bp, synthetic construct
  source 1..20: mol_type = other DNA
tagcaacctgcctactggca

SEQ ID NO: 150584 - DNA, 20 bp, synthetic construct
  source 1..20: mol_type = other DNA
ttagcaacctgcctactggc

SEQ ID NO: 150585 - DNA, 20 bp, synthetic construct
  source 1..20: mol_type = other DNA
cttagcaacctgcctactgg

SEQ ID NO: 150586 - DNA, 20 bp, synthetic construct
  source 1..20: mol_type = other DNA
tcttagcaacctgcctactg

SEQ ID NO: 150587 - DNA, 20 bp, synthetic construct
  source 1..20: mol_type = other DNA
atcttagcaacctgcctact

SEQ ID NO: 150588 - DNA, 20 bp, synthetic construct
  source 1..20: mol_type = other DNA
catcttagcaacctgcctac

SEQ ID NO: 150589 - DNA, 20 bp, synthetic construct
  source 1..20: mol_type = other DNA
ccatcttagcaacctgccta

SEQ ID NO: 150590 - DNA, 20 bp, synthetic construct
  source 1..20: mol_type = other DNA
accatcttagcaacctgcct

SEQ ID NO: 150591 - DNA, 20 bp, synthetic construct
  source 1..20: mol_type = other DNA
gaccatcttagcaacctgcc

SEQ ID NO: 150592 - DNA, 20 bp, synthetic construct
  source 1..20: mol_type = other DNA
tgaccatcttagcaacctgc

SEQ ID NO: 150593 - DNA, 20 bp, synthetic construct
  source 1..20: mol_type = other DNA
ctgaccatcttagcaacctg

SEQ ID NO: 150594 - DNA, 20 bp, synthetic construct
  source 1..20: mol_type = other DNA
tctgaccatcttagcaacct

SEQ ID NO: 150595 - DNA, 20 bp, synthetic construct
  source 1..20: mol_type = other DNA
ctctgaccatcttagcaacc

SEQ ID NO: 150596 - DNA, 20 bp, synthetic construct
  source 1..20: mol_type = other DNA
tctctgaccatcttagcaac

SEQ ID NO: 150597 - DNA, 20 bp, synthetic construct
  source 1..20: mol_type = other DNA
gtctctgaccatcttagcaa

SEQ ID NO: 150598 - DNA, 20 bp, synthetic construct
  source 1..20: mol_type = other DNA
tgtctctgaccatcttagca

SEQ ID NO: 150599 - DNA, 20 bp, synthetic construct
  source 1..20: mol_type = other DNA
ttgtctctgaccatcttagc

SEQ ID NO: 150600 - DNA, 20 bp, synthetic construct
  source 1..20: mol_type = other DNA
tttgtctctgaccatcttag

SEQ ID NO: 150601 - DNA, 20 bp, synthetic construct
  source 1..20: mol_type = other DNA
gtttgtctctgaccatctta

SEQ ID NO: 150602 - DNA, 20 bp, synthetic construct
  source 1..20: mol_type = other DNA
agtttgtctctgaccatctt

SEQ ID NO: 150603 - DNA, 20 bp, synthetic construct
  source 1..20: mol_type = other DNA
aagtttgtctctgaccatct

SEQ ID NO: 150604 - DNA, 20 bp, synthetic construct
  source 1..20: mol_type = other DNA
gaagtttgtctctgaccatc

SEQ ID NO: 150605 - DNA, 20 bp, synthetic construct
  source 1..20: mol_type = other DNA
agaagtttgtctctgaccat

SEQ ID NO: 150606 - DNA, 20 bp, synthetic construct
  source 1..20: mol_type = other DNA
cagaagtttgtctctgacca

SEQ ID NO: 150607 - DNA, 20 bp, synthetic construct
  source 1..20: mol_type = other DNA
tcagaagtttgtctctgacc

SEQ ID NO: 150608 - DNA, 20 bp, synthetic construct
  source 1..20: mol_type = other DNA
ttcagaagtttgtctctgac

SEQ ID NO: 150609 - DNA, 20 bp, synthetic construct
  source 1..20: mol_type = other DNA
gttcagaagtttgtctctga

SEQ ID NO: 150610 - DNA, 20 bp, synthetic construct
  source 1..20: mol_type = other DNA
cgttcagaagtttgtctctg

SEQ ID NO: 150611 - DNA, 20 bp, synthetic construct
  source 1..20: mol_type = other DNA
tcgttcagaagtttgtctct

SEQ ID NO: 150612 - DNA, 20 bp, synthetic construct
  source 1..20: mol_type = other DNA
gtcgttcagaagtttgtctc

SEQ ID NO: 150613 - DNA, 20 bp, synthetic construct
  source 1..20: mol_type = other DNA
agtcgttcagaagtttgtct

SEQ ID NO: 150614 - DNA, 20 bp, synthetic construct
  source 1..20: mol_type = other DNA
gagtcgttcagaagtttgtc

SEQ ID NO: 150615 - DNA, 20 bp, synthetic construct
  source 1..20: mol_type = other DNA
agagtcgttcagaagtttgt

SEQ ID NO: 150616 - DNA, 20 bp, synthetic construct
  source 1..20: mol_type = other DNA
aagagtcgttcagaagtttg

SEQ ID NO: 150617 - DNA, 20 bp, synthetic construct
  source 1..20: mol_type = other DNA
caagagtcgttcagaagttt

SEQ ID NO: 150618 - DNA, 20 bp, synthetic construct
  source 1..20: mol_type = other DNA
acaagagtcgttcagaagtt

SEQ ID NO: 150619 - DNA, 20 bp, synthetic construct
  source 1..20: mol_type = other DNA
tacaagagtcgttcagaagt

SEQ ID NO: 150620 - DNA, 20 bp, synthetic construct
  source 1..20: mol_type = other DNA
ttacaagagtcgttcagaag

SEQ ID NO: 150621 - DNA, 20 bp, synthetic construct
  source 1..20: mol_type = other DNA
tttacaagagtcgttcagaa

SEQ ID NO: 150622 - DNA, 20 bp, synthetic construct
  source 1..20: mol_type = other DNA
ttttacaagagtcgttcaga

SEQ ID NO: 150623 - DNA, 20 bp, synthetic construct
  source 1..20: mol_type = other DNA
attttacaagagtcgttcag

SEQ ID NO: 150624 - DNA, 20 bp, synthetic construct
  source 1..20: mol_type = other DNA
tattttacaagagtcgttca

SEQ ID NO: 150625 - DNA, 20 bp, synthetic construct
  source 1..20: mol_type = other DNA
atattttacaagagtcgttc

SEQ ID NO: 150626 - DNA, 20 bp, synthetic construct
  source 1..20: mol_type = other DNA
tatattttacaagagtcgtt

SEQ ID NO: 150627 - DNA, 20 bp, synthetic construct
  source 1..20: mol_type = other DNA
gtatattttacaagagtcgt

SEQ ID NO: 150628 - DNA, 20 bp, synthetic construct
  source 1..20: mol_type = other DNA
tgtatattttacaagagtcg

SEQ ID NO: 150629 - DNA, 20 bp, synthetic construct
  source 1..20: mol_type = other DNA
ctgtatattttacaagagtc

SEQ ID NO: 150630 - DNA, 20 bp, synthetic construct
  source 1..20: mol_type = other DNA
tctgtatattttacaagagt

SEQ ID NO: 150631 - DNA, 20 bp, synthetic construct
  source 1..20: mol_type = other DNA
ttctgtatattttacaagag

SEQ ID NO: 150632 - DNA, 20 bp, synthetic construct
  source 1..20: mol_type = other DNA
tttctgtatattttacaaga

SEQ ID NO: 150633 - DNA, 20 bp, synthetic construct
  source 1..20: mol_type = other DNA
atttctgtatattttacaag

SEQ ID NO: 150634 - DNA, 20 bp, synthetic construct
  source 1..20: mol_type = other DNA
tatttctgtatattttacaa

SEQ ID NO: 150635 - DNA, 20 bp, synthetic construct
  source 1..20: mol_type = other DNA
atatttctgtatattttaca

SEQ ID NO: 150636 - DNA, 20 bp, synthetic construct
  source 1..20: mol_type = other DNA
aatatttctgtatattttac

SEQ ID NO: 150637 - DNA, 20 bp, synthetic construct
  source 1..20: mol_type = other DNA
aaatatttctgtatatttta

SEQ ID NO: 150638 - DNA, 20 bp, synthetic construct
  source 1..20: mol_type = other DNA
aaaatatttctgtatatttt

SEQ ID NO: 150639 - DNA, 20 bp, synthetic construct
  source 1..20: mol_type = other DNA
gaaaatatttctgtatattt

SEQ ID NO: 150640 - DNA, 20 bp, synthetic construct
  source 1..20: mol_type = other DNA
tgaaaatatttctgtatatt

SEQ ID NO: 150641 - DNA, 20 bp, synthetic construct
  source 1..20: mol_type = other DNA
ctgaaaatatttctgtatat

SEQ ID NO: 150642 - DNA, 20 bp, synthetic construct
  source 1..20: mol_type = other DNA
tctgaaaatatttctgtata

SEQ ID NO: 150643 - DNA, 20 bp, synthetic construct
  source 1..20: mol_type = other DNA
ttctgaaaatatttctgtat

SEQ ID NO: 150644 - DNA, 20 bp, synthetic construct
  source 1..20: mol_type = other DNA
gttctgaaaatatttctgta

SEQ ID NO: 150645 - DNA, 20 bp, synthetic construct
  source 1..20: mol_type = other DNA
agttctgaaaatatttctgt

SEQ ID NO: 150646 - DNA, 20 bp, synthetic construct
  source 1..20: mol_type = other DNA
aagttctgaaaatatttctg

SEQ ID NO: 150647 - DNA, 20 bp, synthetic construct
  source 1..20: mol_type = other DNA
aaagttctgaaaatatttct

SEQ ID NO: 150648 - DNA, 20 bp, synthetic construct
  source 1..20: mol_type = other DNA
aaaagttctgaaaatatttc

SEQ ID NO: 150649 - DNA, 20 bp, synthetic construct
  source 1..20: mol_type = other DNA
taaaagttctgaaaatattt

SEQ ID NO: 150650 - DNA, 20 bp, synthetic construct
  source 1..20: mol_type = other DNA
ataaaagttctgaaaatatt

SEQ ID NO: 150651 - DNA, 20 bp, synthetic construct
  source 1..20: mol_type = other DNA
gataaaagttctgaaaatat

SEQ ID NO: 150652 - DNA, 20 bp, synthetic construct
  source 1..20: mol_type = other DNA
tgataaaagttctgaaaata

SEQ ID NO: 150653 - DNA, 20 bp, synthetic construct
  source 1..20: mol_type = other DNA
ctgataaaagttctgaaaat

SEQ ID NO: 150654 - DNA, 20 bp, synthetic construct
  source 1..20: mol_type = other DNA
actgataaaagttctgaaaa

SEQ ID NO: 150655 - DNA, 20 bp, synthetic construct
  source 1..20: mol_type = other DNA
tactgataaaagttctgaaa

SEQ ID NO: 150656 - DNA, 20 bp, synthetic construct
  source 1..20: mol_type = other DNA
ttactgataaaagttctgaa

SEQ ID NO: 150657 - DNA, 20 bp, synthetic construct
  source 1..20: mol_type = other DNA
tttactgataaaagttctga

SEQ ID NO: 150658 - DNA, 20 bp, synthetic construct
  source 1..20: mol_type = other DNA
ttttactgataaaagttctg

SEQ ID NO: 150659 - DNA, 20 bp, synthetic construct
  source 1..20: mol_type = other DNA
attttactgataaaagttct

SEQ ID NO: 150660 - DNA, 20 bp, synthetic construct
  source 1..20: mol_type = other DNA
aattttactgataaaagttc

SEQ ID NO: 150661 - DNA, 20 bp, synthetic construct
  source 1..20: mol_type = other DNA
taattttactgataaaagtt

SEQ ID NO: 150662 - DNA, 20 bp, synthetic construct
  source 1..20: mol_type = other DNA
gtaattttactgataaaagt

SEQ ID NO: 150663 - DNA, 20 bp, synthetic construct
  source 1..20: mol_type = other DNA
tgtaattttactgataaaag

SEQ ID NO: 150664 - DNA, 20 bp, synthetic construct
  source 1..20: mol_type = other DNA
ttgtaattttactgataaaa

SEQ ID NO: 150665 - DNA, 20 bp, synthetic construct
  source 1..20: mol_type = other DNA
tttgtaattttactgataaa

SEQ ID NO: 150666 - DNA, 20 bp, synthetic construct
  source 1..20: mol_type = other DNA
ttttgtaattttactgataa

SEQ ID NO: 150667 - DNA, 20 bp, synthetic construct
  source 1..20: mol_type = other DNA
gttttgtaattttactgata

SEQ ID NO: 150668 - DNA, 20 bp, synthetic construct
  source 1..20: mol_type = other DNA
cgttttgtaattttactgat

SEQ ID NO: 150669 - DNA, 20 bp, synthetic construct
  source 1..20: mol_type = other DNA
acgttttgtaattttactga

SEQ ID NO: 150670 - DNA, 20 bp, synthetic construct
  source 1..20: mol_type = other DNA
cacgttttgtaattttactg

SEQ ID NO: 150671 - DNA, 20 bp, synthetic construct
  source 1..20: mol_type = other DNA
acacgttttgtaattttact

SEQ ID NO: 150672 - DNA, 20 bp, synthetic construct
  source 1..20: mol_type = other DNA
aacacgttttgtaattttac

SEQ ID NO: 150673 - DNA, 20 bp, synthetic construct
  source 1..20: mol_type = other DNA
caacacgttttgtaatttta

SEQ ID NO: 150674 - DNA, 20 bp, synthetic construct
  source 1..20: mol_type = other DNA
gcaacacgttttgtaatttt

SEQ ID NO: 150675 - DNA, 20 bp, synthetic construct
  source 1..20: mol_type = other DNA
tgcaacacgttttgtaattt

SEQ ID NO: 150676 - DNA, 20 bp, synthetic construct
  source 1..20: mol_type = other DNA
ttgcaacacgttttgtaatt

SEQ ID NO: 150677 - DNA, 20 bp, synthetic construct
  source 1..20: mol_type = other DNA
cttgcaacacgttttgtaat

SEQ ID NO: 150678 - DNA, 20 bp, synthetic construct
  source 1..20: mol_type = other DNA
ccttgcaacacgttttgtaa

SEQ ID NO: 150679 - DNA, 20 bp, synthetic construct
  source 1..20: mol_type = other DNA
tccttgcaacacgttttgta

SEQ ID NO: 150680 - DNA, 20 bp, synthetic construct
  source 1..20: mol_type = other DNA
ttccttgcaacacgttttgt

SEQ ID NO: 150681 - DNA, 20 bp, synthetic construct
  source 1..20: mol_type = other DNA
cttccttgcaacacgttttg

SEQ ID NO: 150682 - DNA, 20 bp, synthetic construct
  source 1..20: mol_type = other DNA
ccttccttgcaacacgtttt

SEQ ID NO: 150683 - DNA, 20 bp, synthetic construct
  source 1..20: mol_type = other DNA
accttccttgcaacacgttt

SEQ ID NO: 150684 - DNA, 20 bp, synthetic construct
  source 1..20: mol_type = other DNA
caccttccttgcaacacgtt

SEQ ID NO: 150685 - DNA, 20 bp, synthetic construct
  source 1..20: mol_type = other DNA
gcaccttccttgcaacacgt

SEQ ID NO: 150686 - DNA, 20 bp, synthetic construct
  source 1..20: mol_type = other DNA
agcaccttccttgcaacacg

SEQ ID NO: 150687 - DNA, 20 bp, synthetic construct
  source 1..20: mol_type = other DNA
aagcaccttccttgcaacac

SEQ ID NO: 150688 - DNA, 20 bp, synthetic construct
  source 1..20: mol_type = other DNA
caagcaccttccttgcaaca

SEQ ID NO: 150689 - DNA, 20 bp, synthetic construct
  source 1..20: mol_type = other DNA
acaagcaccttccttgcaac

SEQ ID NO: 150690 - DNA, 20 bp, synthetic construct
  source 1..20: mol_type = other DNA
cacaagcaccttccttgcaa

SEQ ID NO: 150691 - DNA, 20 bp, synthetic construct
  source 1..20: mol_type = other DNA
tcacaagcaccttccttgca

SEQ ID NO: 150692 - DNA, 20 bp, synthetic construct
  source 1..20: mol_type = other DNA
atcacaagcaccttccttgc

SEQ ID NO: 150693 - DNA, 20 bp, synthetic construct
  source 1..20: mol_type = other DNA
tatcacaagcaccttccttg

SEQ ID NO: 150694 - DNA, 20 bp, synthetic construct
  source 1..20: mol_type = other DNA
ttatcacaagcaccttcctt

SEQ ID NO: 150695 - DNA, 20 bp, synthetic construct
  source 1..20: mol_type = other DNA
gttatcacaagcaccttcct

SEQ ID NO: 150696 - DNA, 20 bp, synthetic construct
  source 1..20: mol_type = other DNA
tgttatcacaagcaccttcc

SEQ ID NO: 150697 - DNA, 20 bp, synthetic construct
  source 1..20: mol_type = other DNA
gtgttatcacaagcaccttc

SEQ ID NO: 150698 - DNA, 20 bp, synthetic construct
  source 1..20: mol_type = other DNA
agtgttatcacaagcacctt

SEQ ID NO: 150699 - DNA, 20 bp, synthetic construct
  source 1..20: mol_type = other DNA
cagtgttatcacaagcacct

SEQ ID NO: 150700 - DNA, 20 bp, synthetic construct
  source 1..20: mol_type = other DNA
acagtgttatcacaagcacc

SEQ ID NO: 150701 - DNA, 20 bp, synthetic construct
  source 1..20: mol_type = other DNA
gacagtgttatcacaagcac

SEQ ID NO: 150702 - DNA, 20 bp, synthetic construct
  source 1..20: mol_type = other DNA
ggacagtgttatcacaagca

SEQ ID NO: 150703 - DNA, 20 bp, synthetic construct
  source 1..20: mol_type = other DNA
gggacagtgttatcacaagc

SEQ ID NO: 150704 - DNA, 20 bp, synthetic construct
  source 1..20: mol_type = other DNA
ggggacagtgttatcacaag

SEQ ID NO: 150705 - DNA, 20 bp, synthetic construct
  source 1..20: mol_type = other DNA
tggggacagtgttatcacaa

SEQ ID NO: 150706 - DNA, 20 bp, synthetic construct
  source 1..20: mol_type = other DNA
ctggggacagtgttatcaca

SEQ ID NO: 150707 - DNA, 20 bp, synthetic construct
  source 1..20: mol_type = other DNA
tctggggacagtgttatcac

SEQ ID NO: 150708 - DNA, 20 bp, synthetic construct
  source 1..20: mol_type = other DNA
ttctggggacagtgttatca

SEQ ID NO: 150709 - DNA, 20 bp, synthetic construct
  source 1..20: mol_type = other DNA
gttctggggacagtgttatc

SEQ ID NO: 150710 - DNA, 20 bp, synthetic construct
  source 1..20: mol_type = other DNA
ggttctggggacagtgttat

SEQ ID NO: 150711 - DNA, 20 bp, synthetic construct
  source 1..20: mol_type = other DNA
aggttctggggacagtgtta

SEQ ID NO: 150712 - DNA, 20 bp, synthetic construct
  source 1..20: mol_type = other DNA
aaggttctggggacagtgtt

SEQ ID NO: 150713 - DNA, 20 bp, synthetic construct
  source 1..20: mol_type = other DNA
taaggttctggggacagtgt

SEQ ID NO: 150714 - DNA, 20 bp, synthetic construct
  source 1..20: mol_type = other DNA
ctaaggttctggggacagtg

SEQ ID NO: 150715 - DNA, 20 bp, synthetic construct
  source 1..20: mol_type = other DNA
actaaggttctggggacagt

SEQ ID NO: 150716 - DNA, 20 bp, synthetic construct
  source 1..20: mol_type = other DNA
cactaaggttctggggacag

SEQ ID NO: 150717 - DNA, 20 bp, synthetic construct
  source 1..20: mol_type = other DNA
tcactaaggttctggggaca

SEQ ID NO: 150718 - DNA, 20 bp, synthetic construct
  source 1..20: mol_type = other DNA
ttcactaaggttctggggac

SEQ ID NO: 150719 - DNA, 20 bp, synthetic construct
  source 1..20: mol_type = other DNA
cttcactaaggttctgggga

SEQ ID NO: 150720 - DNA, 20 bp, synthetic construct
  source 1..20: mol_type = other DNA
acttcactaaggttctgggg

SEQ ID NO: 150721 - DNA, 20 bp, synthetic construct
  source 1..20: mol_type = other DNA
aacttcactaaggttctggg

SEQ ID NO: 150722 - DNA, 20 bp, synthetic construct
  source 1..20: mol_type = other DNA
taacttcactaaggttctgg

SEQ ID NO: 150723 - DNA, 20 bp, synthetic construct
  source 1..20: mol_type = other DNA
gtaacttcactaaggttctg

SEQ ID NO: 150724 - DNA, 20 bp, synthetic construct
  source 1..20: mol_type = other DNA
ggtaacttcactaaggttct

SEQ ID NO: 150725 - DNA, 20 bp, synthetic construct
  source 1..20: mol_type = other DNA
tggtaacttcactaaggttc

SEQ ID NO: 150726 - DNA, 20 bp, synthetic construct
  source 1..20: mol_type = other DNA
ttggtaacttcactaaggtt

SEQ ID NO: 150727 - DNA, 20 bp, synthetic construct
  source 1..20: mol_type = other DNA
gttggtaacttcactaaggt

SEQ ID NO: 150728 - DNA, 20 bp, synthetic construct
  source 1..20: mol_type = other DNA
agttggtaacttcactaagg

SEQ ID NO: 150729 - DNA, 20 bp, synthetic construct
  source 1..20: mol_type = other DNA
cagttggtaacttcactaag

SEQ ID NO: 150730 - DNA, 20 bp, synthetic construct
  source 1..20: mol_type = other DNA
ccagttggtaacttcactaa

SEQ ID NO: 150731 - DNA, 20 bp, synthetic construct
  source 1..20: mol_type = other DNA
accagttggtaacttcacta

SEQ ID NO: 150732 - DNA, 20 bp, synthetic construct
  source 1..20: mol_type = other DNA
caccagttggtaacttcact

SEQ ID NO: 150733 - DNA, 20 bp, synthetic construct
  source 1..20: mol_type = other DNA
ccaccagttggtaacttcac

SEQ ID NO: 150734 - DNA, 20 bp, synthetic construct
  source 1..20: mol_type = other DNA
tccaccagttggtaacttca

SEQ ID NO: 150735 - DNA, 20 bp, synthetic construct
  source 1..20: mol_type = other DNA
ttccaccagttggtaacttc

SEQ ID NO: 150736 - DNA, 20 bp, synthetic construct
  source 1..20: mol_type = other DNA
tttccaccagttggtaactt

SEQ ID NO: 150737 - DNA, 20 bp, synthetic construct
  source 1..20: mol_type = other DNA
ttttccaccagttggtaact

SEQ ID NO: 150738 - DNA, 20 bp, synthetic construct
  source 1..20: mol_type = other DNA
attttccaccagttggtaac

SEQ ID NO: 150739 - DNA, 20 bp, synthetic construct
  source 1..20: mol_type = other DNA
aattttccaccagttggtaa

SEQ ID NO: 150740 - DNA, 20 bp, synthetic construct
  source 1..20: mol_type = other DNA
aaattttccaccagttggta

SEQ ID NO: 150741 - DNA, 20 bp, synthetic construct
  source 1..20: mol_type = other DNA
aaaattttccaccagttggt

SEQ ID NO: 150742 - DNA, 20 bp, synthetic construct
  source 1..20: mol_type = other DNA
gaaaattttccaccagttgg

SEQ ID NO: 150743 - DNA, 20 bp, synthetic construct
  source 1..20: mol_type = other DNA
agaaaattttccaccagttg

SEQ ID NO: 150744 - DNA, 20 bp, synthetic construct
  source 1..20: mol_type = other DNA
gagaaaattttccaccagtt

SEQ ID NO: 150745 - DNA, 20 bp, synthetic construct
  source 1..20: mol_type = other DNA
agagaaaattttccaccagt

SEQ ID NO: 150746 - DNA, 20 bp, synthetic construct
  source 1..20: mol_type = other DNA
aagagaaaattttccaccag

SEQ ID NO: 150747 - DNA, 20 bp, synthetic construct
  source 1..20: mol_type = other DNA
caagagaaaattttccacca

SEQ ID NO: 150748 - DNA, 20 bp, synthetic construct
  source 1..20: mol_type = other DNA
gcaagagaaaattttccacc

SEQ ID NO: 150749 - DNA, 20 bp, synthetic construct
  source 1..20: mol_type = other DNA
tgcaagagaaaattttccac

SEQ ID NO: 150750 - DNA, 20 bp, synthetic construct
  source 1..20: mol_type = other DNA
gtgcaagagaaaattttcca

SEQ ID NO: 150751 - DNA, 20 bp, synthetic construct
  source 1..20: mol_type = other DNA
agtgcaagagaaaattttcc

SEQ ID NO: 150752 - DNA, 20 bp, synthetic construct
  source 1..20: mol_type = other DNA
gagtgcaagagaaaattttc

SEQ ID NO: 150753 - DNA, 20 bp, synthetic construct
  source 1..20: mol_type = other DNA
cgagtgcaagagaaaatttt

SEQ ID NO: 150754 - DNA, 20 bp, synthetic construct
  source 1..20: mol_type = other DNA
ccgagtgcaagagaaaattt

SEQ ID NO: 150755 - DNA, 20 bp, synthetic construct
  source 1..20: mol_type = other DNA
gccgagtgcaagagaaaatt

SEQ ID NO: 150756 - DNA, 20 bp, synthetic construct
  source 1..20: mol_type = other DNA
agccgagtgcaagagaaaat

SEQ ID NO: 150757 - DNA, 20 bp, synthetic construct
  source 1..20: mol_type = other DNA
aagccgagtgcaagagaaaa

SEQ ID NO: 150758 - DNA, 20 bp, synthetic construct
  source 1..20: mol_type = other DNA
taagccgagtgcaagagaaa

SEQ ID NO: 150759 - DNA, 20 bp, synthetic construct
  source 1..20: mol_type = other DNA
ttaagccgagtgcaagagaa

SEQ ID NO: 150760 - DNA, 20 bp, synthetic construct
  source 1..20: mol_type = other DNA
tttaagccgagtgcaagaga

SEQ ID NO: 150761 - DNA, 20 bp, synthetic construct
  source 1..20: mol_type = other DNA
ttttaagccgagtgcaagag

SEQ ID NO: 150762 - DNA, 20 bp, synthetic construct
  source 1..20: mol_type = other DNA
tttttaagccgagtgcaaga

SEQ ID NO: 150763 - DNA, 20 bp, synthetic construct
  source 1..20: mol_type = other DNA
atttttaagccgagtgcaag

SEQ ID NO: 150764 - DNA, 20 bp, synthetic construct
  source 1..20: mol_type = other DNA
gatttttaagccgagtgcaa

SEQ ID NO: 150765 - DNA, 20 bp, synthetic construct
  source 1..20: mol_type = other DNA
tgatttttaagccgagtgca

SEQ ID NO: 150766 - DNA, 20 bp, synthetic construct
  source 1..20: mol_type = other DNA
atgatttttaagccgagtgc

SEQ ID NO: 150767 - DNA, 20 bp, synthetic construct
  source 1..20: mol_type = other DNA
catgatttttaagccgagtg

SEQ ID NO: 150768 - DNA, 20 bp, synthetic construct
  source 1..20: mol_type = other DNA
tcatgatttttaagccgagt

SEQ ID NO: 150769 - DNA, 20 bp, synthetic construct
  source 1..20: mol_type = other DNA
ctcatgatttttaagccgag

SEQ ID NO: 150770 - DNA, 20 bp, synthetic construct
  source 1..20: mol_type = other DNA
cctcatgatttttaagccga

SEQ ID NO: 150771 - DNA, 20 bp, synthetic construct
  source 1..20: mol_type = other DNA
ccctcatgatttttaagccg

SEQ ID NO: 150772 - DNA, 20 bp, synthetic construct
  source 1..20: mol_type = other DNA
tccctcatgatttttaagcc

SEQ ID NO: 150773 - DNA, 20 bp, synthetic construct
  source 1..20: mol_type = other DNA
ttccctcatgatttttaagc

SEQ ID NO: 150774 - DNA, 20 bp, synthetic construct
  source 1..20: mol_type = other DNA
attccctcatgatttttaag

SEQ ID NO: 150775 - DNA, 20 bp, synthetic construct
  source 1..20: mol_type = other DNA
tattccctcatgatttttaa

SEQ ID NO: 150776 - DNA, 20 bp, synthetic construct
  source 1..20: mol_type = other DNA
atattccctcatgattttta

SEQ ID NO: 150777 - DNA, 20 bp, synthetic construct
  source 1..20: mol_type = other DNA
aatattccctcatgattttt

SEQ ID NO: 150778 - DNA, 20 bp, synthetic construct
  source 1..20: mol_type = other DNA
aaatattccctcatgatttt

SEQ ID NO: 150779 - DNA, 20 bp, synthetic construct
  source 1..20: mol_type = other DNA
taaatattccctcatgattt

SEQ ID NO: 150780 - DNA, 20 bp, synthetic construct
  source 1..20: mol_type = other DNA
gtaaatattccctcatgatt

SEQ ID NO: 150781 - DNA, 20 bp, synthetic construct
  source 1..20: mol_type = other DNA
agtaaatattccctcatgat

SEQ ID NO: 150782 - DNA, 20 bp, synthetic construct
  source 1..20: mol_type = other DNA
tagtaaatattccctcatga

SEQ ID NO: 150783 - DNA, 20 bp, synthetic construct
  source 1..20: mol_type = other DNA
atagtaaatattccctcatg

SEQ ID NO: 150784 - DNA, 20 bp, synthetic construct
  source 1..20: mol_type = other DNA
tatagtaaatattccctcat

SEQ ID NO: 150785 - DNA, 20 bp, synthetic construct
  source 1..20: mol_type = other DNA
gtatagtaaatattccctca

SEQ ID NO: 150786 - DNA, 20 bp, synthetic construct
  source 1..20: mol_type = other DNA
cgtatagtaaatattccctc

SEQ ID NO: 150787 - DNA, 20 bp, synthetic construct
  source 1..20: mol_type = other DNA
tcgtatagtaaatattccct

SEQ ID NO: 150788 - DNA, 20 bp, synthetic construct
  source 1..20: mol_type = other DNA
ttcgtatagtaaatattccc

SEQ ID NO: 150789 - DNA, 20 bp, synthetic construct
  source 1..20: mol_type = other DNA
attcgtatagtaaatattcc

SEQ ID NO: 150790 - DNA, 20 bp, synthetic construct
  source 1..20: mol_type = other DNA
cattcgtatagtaaatattc

SEQ ID NO: 150791 - DNA, 20 bp, synthetic construct
  source 1..20: mol_type = other DNA
tcattcgtatagtaaatatt

SEQ ID NO: 150792 - DNA, 20 bp, synthetic construct
  source 1..20: mol_type = other DNA
ctcattcgtatagtaaatat

SEQ ID NO: 150793 - DNA, 20 bp, synthetic construct
  source 1..20: mol_type = other DNA
tctcattcgtatagtaaata

SEQ ID NO: 150794 - DNA, 20 bp, synthetic construct
  source 1..20: mol_type = other DNA
atctcattcgtatagtaaat

SEQ ID NO: 150795 - DNA, 20 bp, synthetic construct
  source 1..20: mol_type = other DNA
aatctcattcgtatagtaaa

SEQ ID NO: 150796 - DNA, 20 bp, synthetic construct
  source 1..20: mol_type = other DNA
gaatctcattcgtatagtaa

SEQ ID NO: 150797 - DNA, 20 bp, synthetic construct
  source 1..20: mol_type = other DNA
tgaatctcattcgtatagta

SEQ ID NO: 150798 - DNA, 20 bp, synthetic construct
  source 1..20: mol_type = other DNA
ctgaatctcattcgtatagt

SEQ ID NO: 150799 - DNA, 20 bp, synthetic construct
  source 1..20: mol_type = other DNA
actgaatctcattcgtatag

SEQ ID NO: 150800 - DNA, 20 bp, synthetic construct
  source 1..20: mol_type = other DNA
gactgaatctcattcgtata

SEQ ID NO: 150801 - DNA, 20 bp, synthetic construct
  source 1..20: mol_type = other DNA
agactgaatctcattcgtat

SEQ ID NO: 150802 - DNA, 20 bp, synthetic construct
  source 1..20: mol_type = other DNA
aagactgaatctcattcgta

SEQ ID NO: 150803 - DNA, 20 bp, synthetic construct
  source 1..20: mol_type = other DNA
aaagactgaatctcattcgt

SEQ ID NO: 150804 - DNA, 20 bp, synthetic construct
  source 1..20: mol_type = other DNA
taaagactgaatctcattcg

SEQ ID NO: 150805 - DNA, 20 bp, synthetic construct
  source 1..20: mol_type = other DNA
ttaaagactgaatctcattc

SEQ ID NO: 150806 - DNA, 20 bp, synthetic construct
  source 1..20: mol_type = other DNA
tttaaagactgaatctcatt

SEQ ID NO: 150807 - DNA, 20 bp, synthetic construct
  source 1..20: mol_type = other DNA
ctttaaagactgaatctcat

SEQ ID NO: 150808 - DNA, 20 bp, synthetic construct
  source 1..20: mol_type = other DNA
cctttaaagactgaatctca

SEQ ID NO: 150809 - DNA, 20 bp, synthetic construct
  source 1..20: mol_type = other DNA
ccctttaaagactgaatctc

SEQ ID NO: 150810 - DNA, 20 bp, synthetic construct
  source 1..20: mol_type = other DNA
cccctttaaagactgaatct

SEQ ID NO: 150811 - DNA, 20 bp, synthetic construct
  source 1..20: mol_type = other DNA
acccctttaaagactgaatc

SEQ ID NO: 150812 - DNA, 20 bp, synthetic construct
  source 1..20: mol_type = other DNA
aacccctttaaagactgaat

SEQ ID NO: 150813 - DNA, 20 bp, synthetic construct
  source 1..20: mol_type = other DNA
aaacccctttaaagactgaa

SEQ ID NO: 150814 - DNA, 20 bp, synthetic construct
  source 1..20: mol_type = other DNA
taaacccctttaaagactga

SEQ ID NO: 150815 - DNA, 20 bp, synthetic construct
  source 1..20: mol_type = other DNA
gtaaacccctttaaagactg

SEQ ID NO: 150816 - DNA, 20 bp, synthetic construct
  source 1..20: mol_type = other DNA
tgtaaacccctttaaagact

SEQ ID NO: 150817 - DNA, 20 bp, synthetic construct
  source 1..20: mol_type = other DNA
ctgtaaacccctttaaagac

SEQ ID NO: 150818 - DNA, 20 bp, synthetic construct
  source 1..20: mol_type = other DNA
tctgtaaacccctttaaaga

SEQ ID NO: 150819 - DNA, 20 bp, synthetic construct
  source 1..20: mol_type = other DNA
ttctgtaaacccctttaaag

SEQ ID NO: 150820 - DNA, 20 bp, synthetic construct
  source 1..20: mol_type = other DNA
tttctgtaaacccctttaaa

SEQ ID NO: 150821 - DNA, 20 bp, synthetic construct
  source 1..20: mol_type = other DNA
gtttctgtaaacccctttaa

SEQ ID NO: 150822 - DNA, 20 bp, synthetic construct
  source 1..20: mol_type = other DNA
cgtttctgtaaaccccttta

SEQ ID NO: 150823 - DNA, 20 bp, synthetic construct
  source 1..20: mol_type = other DNA
acgtttctgtaaaccccttt

SEQ ID NO: 150824 - DNA, 20 bp, synthetic construct
  source 1..20: mol_type = other DNA
cacgtttctgtaaacccctt

SEQ ID NO: 150825 - DNA, 20 bp, synthetic construct
  source 1..20: mol_type = other DNA
tcacgtttctgtaaacccct

SEQ ID NO: 150826 - DNA, 20 bp, synthetic construct
  source 1..20: mol_type = other DNA
ctcacgtttctgtaaacccc

SEQ ID NO: 150827 - DNA, 20 bp, synthetic construct
  source 1..20: mol_type = other DNA
tctcacgtttctgtaaaccc

SEQ ID NO: 150828 - DNA, 20 bp, synthetic construct
  source 1..20: mol_type = other DNA
ctctcacgtttctgtaaacc

SEQ ID NO: 150829 - DNA, 20 bp, synthetic construct
  source 1..20: mol_type = other DNA
cctctcacgtttctgtaaac

SEQ ID NO: 150830 - DNA, 20 bp, synthetic construct
  source 1..20: mol_type = other DNA
tcctctcacgtttctgtaaa

SEQ ID NO: 150831 - DNA, 20 bp, synthetic construct
  source 1..20: mol_type = other DNA
gtcctctcacgtttctgtaa

SEQ ID NO: 150832 - DNA, 20 bp, synthetic construct
  source 1..20: mol_type = other DNA
tgtcctctcacgtttctgta

SEQ ID NO: 150833 - DNA, 20 bp, synthetic construct
  source 1..20: mol_type = other DNA
ctgtcctctcacgtttctgt

SEQ ID NO: 150834 - DNA, 20 bp, synthetic construct
  source 1..20: mol_type = other DNA
cctgtcctctcacgtttctg

SEQ ID NO: 150835 - DNA, 20 bp, synthetic construct
  source 1..20: mol_type = other DNA
tcctgtcctctcacgtttct

SEQ ID NO: 150836 - DNA, 20 bp, synthetic construct
  source 1..20: mol_type = other DNA
ttcctgtcctctcacgtttc

SEQ ID NO: 150837 - DNA, 20 bp, synthetic construct
  source 1..20: mol_type = other DNA
gttcctgtcctctcacgttt

SEQ ID NO: 150838 - DNA, 20 bp, synthetic construct
  source 1..20: mol_type = other DNA
tgttcctgtcctctcacgtt

SEQ ID NO: 150839 - DNA, 20 bp, synthetic construct
  source 1..20: mol_type = other DNA
ctgttcctgtcctctcacgt

SEQ ID NO: 150840 - DNA, 20 bp, synthetic construct
  source 1..20: mol_type = other DNA
actgttcctgtcctctcacg

SEQ ID NO: 150841 - DNA, 20 bp, synthetic construct
  source 1..20: mol_type = other DNA
aactgttcctgtcctctcac

SEQ ID NO: 150842 - DNA, 20 bp, synthetic construct
  source 1..20: mol_type = other DNA
taactgttcctgtcctctca

SEQ ID NO: 150843 - DNA, 20 bp, synthetic construct
  source 1..20: mol_type = other DNA
ctaactgttcctgtcctctc

SEQ ID NO: 150844 - DNA, 20 bp, synthetic construct
  source 1..20: mol_type = other DNA
actaactgttcctgtcctct

SEQ ID NO: 150845 - DNA, 20 bp, synthetic construct
  source 1..20: mol_type = other DNA
gactaactgttcctgtcctc

SEQ ID NO: 150846 - DNA, 20 bp, synthetic construct
  source 1..20: mol_type = other DNA
agactaactgttcctgtcct

SEQ ID NO: 150847 - DNA, 20 bp, synthetic construct
  source 1..20: mol_type = other DNA
cagactaactgttcctgtcc

SEQ ID NO: 150848 - DNA, 20 bp, synthetic construct
  source 1..20: mol_type = other DNA
acagactaactgttcctgtc

SEQ ID NO: 150849 - DNA, 20 bp, synthetic construct
  source 1..20: mol_type = other DNA
cacagactaactgttcctgt

SEQ ID NO: 150850 - DNA, 20 bp, synthetic construct
  source 1..20: mol_type = other DNA
acacagactaactgttcctg

SEQ ID NO: 150851 - DNA, 20 bp, synthetic construct
  source 1..20: mol_type = other DNA
tacacagactaactgttcct

SEQ ID NO: 150852 - DNA, 20 bp, synthetic construct
  source 1..20: mol_type = other DNA
ttacacagactaactgttcc

SEQ ID NO: 150853 - DNA, 20 bp, synthetic construct
  source 1..20: mol_type = other DNA
tttacacagactaactgttc

SEQ ID NO: 150854 - DNA, 20 bp, synthetic construct
  source 1..20: mol_type = other DNA
atttacacagactaactgtt

SEQ ID NO: 150855 - DNA, 20 bp, synthetic construct
  source 1..20: mol_type = other DNA
catttacacagactaactgt

SEQ ID NO: 150856 - DNA, 20 bp, synthetic construct
  source 1..20: mol_type = other DNA
acatttacacagactaactg

SEQ ID NO: 150857 - DNA, 20 bp, synthetic construct
  source 1..20: mol_type = other DNA
gacatttacacagactaact

SEQ ID NO: 150858 - DNA, 20 bp, synthetic construct
  source 1..20: mol_type = other DNA
agacatttacacagactaac

SEQ ID NO: 150859 - DNA, 20 bp, synthetic construct
  source 1..20: mol_type = other DNA
cagacatttacacagactaa

SEQ ID NO: 150860 - DNA, 20 bp, synthetic construct
  source 1..20: mol_type = other DNA
tcagacatttacacagacta

SEQ ID NO: 150861 - DNA, 20 bp, synthetic construct
  source 1..20: mol_type = other DNA
ttcagacatttacacagact

SEQ ID NO: 150862 - DNA, 20 bp, synthetic construct
  source 1..20: mol_type = other DNA
tttcagacatttacacagac

SEQ ID NO: 150863 - DNA, 20 bp, synthetic construct
  source 1..20: mol_type = other DNA
atttcagacatttacacaga

SEQ ID NO: 150864 - DNA, 20 bp, synthetic construct
  source 1..20: mol_type = other DNA
tatttcagacatttacacag

SEQ ID NO: 150865 - DNA, 20 bp, synthetic construct
  source 1..20: mol_type = other DNA
atatttcagacatttacaca

SEQ ID NO: 150866 - DNA, 20 bp, synthetic construct
  source 1..20: mol_type = other DNA
tatatttcagacatttacac

SEQ ID NO: 150867 - DNA, 20 bp, synthetic construct
  source 1..20: mol_type = other DNA
atatatttcagacatttaca

SEQ ID NO: 150868 - DNA, 20 bp, synthetic construct
  source 1..20: mol_type = other DNA
catatatttcagacatttac

SEQ ID NO: 150869 - DNA, 20 bp, synthetic construct
  source 1..20: mol_type = other DNA
acatatatttcagacattta

SEQ ID NO: 150870 - DNA, 20 bp, synthetic construct
  source 1..20: mol_type = other DNA
cacatatatttcagacattt

SEQ ID NO: 150871 - DNA, 20 bp, synthetic construct
  source 1..20: mol_type = other DNA
tcacatatatttcagacatt

SEQ ID NO: 150872 - DNA, 20 bp, synthetic construct
  source 1..20: mol_type = other DNA
ctcacatatatttcagacat

SEQ ID NO: 150873 - DNA, 20 bp, synthetic construct
  source 1..20: mol_type = other DNA
cctcacatatatttcagaca

SEQ ID NO: 150874 - DNA, 20 bp, synthetic construct
  source 1..20: mol_type = other DNA
ccctcacatatatttcagac

SEQ ID NO: 150875 - DNA, 20 bp, synthetic construct
  source 1..20: mol_type = other DNA
tccctcacatatatttcaga

SEQ ID NO: 150876 - DNA, 20 bp, synthetic construct
  source 1..20: mol_type = other DNA
ctccctcacatatatttcag

SEQ ID NO: 150877 - DNA, 20 bp, synthetic construct
  source 1..20: mol_type = other DNA
tctccctcacatatatttca

SEQ ID NO: 150878 - DNA, 20 bp, synthetic construct
  source 1..20: mol_type = other DNA
atctccctcacatatatttc

SEQ ID NO: 150879 - DNA, 20 bp, synthetic construct
  source 1..20: mol_type = other DNA
tatctccctcacatatattt

SEQ ID NO: 150880 - DNA, 20 bp, synthetic construct
  source 1..20: mol_type = other DNA
ttatctccctcacatatatt

SEQ ID NO: 150881 - DNA, 20 bp, synthetic construct
  source 1..20: mol_type = other DNA
attatctccctcacatatat

SEQ ID NO: 150882 - DNA, 20 bp, synthetic construct
  source 1..20: mol_type = other DNA
cattatctccctcacatata

SEQ ID NO: 150883 - DNA, 20 bp, synthetic construct
  source 1..20: mol_type = other DNA
tcattatctccctcacatat

SEQ ID NO: 150884 - DNA, 20 bp, synthetic construct
  source 1..20: mol_type = other DNA
ctcattatctccctcacata

SEQ ID NO: 150885 - DNA, 20 bp, synthetic construct
  source 1..20: mol_type = other DNA
actcattatctccctcacat

SEQ ID NO: 150886 - DNA, 20 bp, synthetic construct
  source 1..20: mol_type = other DNA
aactcattatctccctcaca

SEQ ID NO: 150887 - DNA, 20 bp, synthetic construct
  source 1..20: mol_type = other DNA
aaactcattatctccctcac

SEQ ID NO: 150888 - DNA, 20 bp, synthetic construct
  source 1..20: mol_type = other DNA
taaactcattatctccctca

SEQ ID NO: 150889 - DNA, 20 bp, synthetic construct
  source 1..20: mol_type = other DNA
ctaaactcattatctccctc

SEQ ID NO: 150890 - DNA, 20 bp, synthetic construct
  source 1..20: mol_type = other DNA
gctaaactcattatctccct

SEQ ID NO: 150891 - DNA, 20 bp, synthetic construct
  source 1..20: mol_type = other DNA
ggctaaactcattatctccc

SEQ ID NO: 150892 - DNA, 20 bp, synthetic construct
  source 1..20: mol_type = other DNA
aggctaaactcattatctcc

SEQ ID NO: 150893 - DNA, 20 bp, synthetic construct
  source 1..20: mol_type = other DNA
aaggctaaactcattatctc

SEQ ID NO: 150894 - DNA, 20 bp, synthetic construct
  source 1..20: mol_type = other DNA
aaaggctaaactcattatct

SEQ ID NO: 150895 - DNA, 20 bp, synthetic construct
  source 1..20: mol_type = other DNA
aaaaggctaaactcattatc

SEQ ID NO: 150896 - DNA, 20 bp, synthetic construct
  source 1..20: mol_type = other DNA
aaaaaggctaaactcattat

SEQ ID NO: 150897 - DNA, 20 bp, synthetic construct
  source 1..20: mol_type = other DNA
gaaaaaggctaaactcatta

SEQ ID NO: 150898 - DNA, 20 bp, synthetic construct
  source 1..20: mol_type = other DNA
agaaaaaggctaaactcatt

SEQ ID NO: 150899 - DNA, 20 bp, synthetic construct
  source 1..20: mol_type = other DNA
aagaaaaaggctaaactcat

SEQ ID NO: 150900 - DNA, 20 bp, synthetic construct
  source 1..20: mol_type = other DNA
aaagaaaaaggctaaactca

SEQ ID NO: 150901 - DNA, 20 bp, synthetic construct
  source 1..20: mol_type = other DNA
taaagaaaaaggctaaactc

SEQ ID NO: 150902 - DNA, 20 bp, synthetic construct
  source 1..20: mol_type = other DNA
ttaaagaaaaaggctaaact

SEQ ID NO: 150903 - DNA, 20 bp, synthetic construct
  source 1..20: mol_type = other DNA
attaaagaaaaaggctaaac

SEQ ID NO: 150904 - DNA, 20 bp, synthetic construct
  source 1..20: mol_type = other DNA
tattaaagaaaaaggctaaa

SEQ ID NO: 150905 - DNA, 20 bp, synthetic construct
  source 1..20: mol_type = other DNA
ctattaaagaaaaaggctaa

SEQ ID NO: 150906 - DNA, 20 bp, synthetic construct
  source 1..20: mol_type = other DNA
cctattaaagaaaaaggcta

SEQ ID NO: 150907 - DNA, 20 bp, synthetic construct
  source 1..20: mol_type = other DNA
acctattaaagaaaaaggct

SEQ ID NO: 150908 - DNA, 20 bp, synthetic construct
  source 1..20: mol_type = other DNA
gacctattaaagaaaaaggc

SEQ ID NO: 150909 - DNA, 20 bp, synthetic construct
  source 1..20: mol_type = other DNA
agacctattaaagaaaaagg

SEQ ID NO: 150910 - DNA, 20 bp, synthetic construct
  source 1..20: mol_type = other DNA
gagacctattaaagaaaaag

SEQ ID NO: 150911 - DNA, 20 bp, synthetic construct
  source 1..20: mol_type = other DNA
ggagacctattaaagaaaaa

SEQ ID NO: 150912 - DNA, 20 bp, synthetic construct
  source 1..20: mol_type = other DNA
tggagacctattaaagaaaa

SEQ ID NO: 150913 - DNA, 20 bp, synthetic construct
  source 1..20: mol_type = other DNA
ctggagacctattaaagaaa

SEQ ID NO: 150914 - DNA, 20 bp, synthetic construct
  source 1..20: mol_type = other DNA
tctggagacctattaaagaa

SEQ ID NO: 150915 - DNA, 20 bp, synthetic construct
  source 1..20: mol_type = other DNA
atctggagacctattaaaga

SEQ ID NO: 150916 - DNA, 20 bp, synthetic construct
  source 1..20: mol_type = other DNA
aatctggagacctattaaag

SEQ ID NO: 150917 - DNA, 20 bp, synthetic construct
  source 1..20: mol_type = other DNA
aaatctggagacctattaaa

SEQ ID NO: 150918 - DNA, 20 bp, synthetic construct
  source 1..20: mol_type = other DNA
aaaatctggagacctattaa

SEQ ID NO: 150919 - DNA, 20 bp, synthetic construct
  source 1..20: mol_type = other DNA
gaaaatctggagacctatta

SEQ ID NO: 150920 - DNA, 20 bp, synthetic construct
  source 1..20: mol_type = other DNA
agaaaatctggagacctatt

SEQ ID NO: 150921 - DNA, 20 bp, synthetic construct
  source 1..20: mol_type = other DNA
cagaaaatctggagacctat

SEQ ID NO: 150922 - DNA, 20 bp, synthetic construct
  source 1..20: mol_type = other DNA
ccagaaaatctggagaccta

SEQ ID NO: 150923 - DNA, 20 bp, synthetic construct
  source 1..20: mol_type = other DNA
tccagaaaatctggagacct

SEQ ID NO: 150924 - DNA, 20 bp, synthetic construct
  source 1..20: mol_type = other DNA
ttccagaaaatctggagacc

SEQ ID NO: 150925 - DNA, 20 bp, synthetic construct
  source 1..20: mol_type = other DNA
tttccagaaaatctggagac

SEQ ID NO: 150926 - DNA, 20 bp, synthetic construct
  source 1..20: mol_type = other DNA
ttttccagaaaatctggaga

SEQ ID NO: 150927 - DNA, 20 bp, synthetic construct
  source 1..20: mol_type = other DNA
cttttccagaaaatctggag

SEQ ID NO: 150928 - DNA, 20 bp, synthetic construct
  source 1..20: mol_type = other DNA
ccttttccagaaaatctgga

SEQ ID NO: 150929 - DNA, 20 bp, synthetic construct
  source 1..20: mol_type = other DNA
accttttccagaaaatctgg

SEQ ID NO: 150930 - DNA, 20 bp, synthetic construct
  source 1..20: mol_type = other DNA
aaccttttccagaaaatctg

SEQ ID NO: 150931 - DNA, 20 bp, synthetic construct
  source 1..20: mol_type = other DNA
gaaccttttccagaaaatct

SEQ ID NO: 150932 - DNA, 20 bp, synthetic construct
  source 1..20: mol_type = other DNA
agaaccttttccagaaaatc

SEQ ID NO: 150933 - DNA, 20 bp, synthetic construct
  source 1..20: mol_type = other DNA
aagaaccttttccagaaaat

SEQ ID NO: 150934 - DNA, 20 bp, synthetic construct
  source 1..20: mol_type = other DNA
aaagaaccttttccagaaaa

SEQ ID NO: 150935 - DNA, 20 bp, synthetic construct
  source 1..20: mol_type = other DNA
caaagaaccttttccagaaa

SEQ ID NO: 150936 - DNA, 20 bp, synthetic construct
  source 1..20: mol_type = other DNA
ccaaagaaccttttccagaa

SEQ ID NO: 150937 - DNA, 20 bp, synthetic construct
  source 1..20: mol_type = other DNA
gccaaagaaccttttccaga

SEQ ID NO: 150938 - DNA, 20 bp, synthetic construct
  source 1..20: mol_type = other DNA
tgccaaagaaccttttccag

SEQ ID NO: 150939 - DNA, 20 bp, synthetic construct
  source 1..20: mol_type = other DNA
atgccaaagaaccttttcca

SEQ ID NO: 150940 - DNA, 20 bp, synthetic construct
  source 1..20: mol_type = other DNA
aatgccaaagaaccttttcc

SEQ ID NO: 150941 - DNA, 20 bp, synthetic construct
  source 1..20: mol_type = other DNA
aaatgccaaagaaccttttc

SEQ ID NO: 150942 - DNA, 20 bp, synthetic construct
  source 1..20: mol_type = other DNA
caaatgccaaagaacctttt

SEQ ID NO: 150943 - DNA, 20 bp, synthetic construct
  source 1..20: mol_type = other DNA
tcaaatgccaaagaaccttt

SEQ ID NO: 150944 - DNA, 20 bp, synthetic construct
  source 1..20: mol_type = other DNA
gtcaaatgccaaagaacctt

SEQ ID NO: 150945 - DNA, 20 bp, synthetic construct
  source 1..20: mol_type = other DNA
agtcaaatgccaaagaacct

SEQ ID NO: 150946 - DNA, 20 bp, synthetic construct
  source 1..20: mol_type = other DNA
gagtcaaatgccaaagaacc

SEQ ID NO: 150947 - DNA, 20 bp, synthetic construct
  source 1..20: mol_type = other DNA
ggagtcaaatgccaaagaac

SEQ ID NO: 150948 - DNA, 20 bp, synthetic construct
  source 1..20: mol_type = other DNA
tggagtcaaatgccaaagaa

SEQ ID NO: 150949 - DNA, 20 bp, synthetic construct
  source 1..20: mol_type = other DNA
atggagtcaaatgccaaaga

SEQ ID NO: 150950 - DNA, 20 bp, synthetic construct
  source 1..20: mol_type = other DNA
aatggagtcaaatgccaaag

SEQ ID NO: 150951 - DNA, 20 bp, synthetic construct
  source 1..20: mol_type = other DNA
aaatggagtcaaatgccaaa

SEQ ID NO: 150952 - DNA, 20 bp, synthetic construct
  source 1..20: mol_type = other DNA
aaaatggagtcaaatgccaa

SEQ ID NO: 150953 - DNA, 20 bp, synthetic construct
  source 1..20: mol_type = other DNA
caaaatggagtcaaatgcca

SEQ ID NO: 150954 - DNA, 20 bp, synthetic construct
  source 1..20: mol_type = other DNA
gcaaaatggagtcaaatgcc

SEQ ID NO: 150955 - DNA, 20 bp, synthetic construct
  source 1..20: mol_type = other DNA
agcaaaatggagtcaaatgc

SEQ ID NO: 150956 - DNA, 20 bp, synthetic construct
  source 1..20: mol_type = other DNA
cagcaaaatggagtcaaatg

SEQ ID NO: 150957 - DNA, 20 bp, synthetic construct
  source 1..20: mol_type = other DNA
acagcaaaatggagtcaaat

SEQ ID NO: 150958 - DNA, 20 bp, synthetic construct
  source 1..20: mol_type = other DNA
aacagcaaaatggagtcaaa

SEQ ID NO: 150959 - DNA, 20 bp, synthetic construct
  source 1..20: mol_type = other DNA
aaacagcaaaatggagtcaa

SEQ ID NO: 150960 - DNA, 20 bp, synthetic construct
  source 1..20: mol_type = other DNA
gaaacagcaaaatggagtca

SEQ ID NO: 150961 - DNA, 20 bp, synthetic construct
  source 1..20: mol_type = other DNA
tgaaacagcaaaatggagtc

SEQ ID NO: 150962 - DNA, 20 bp, synthetic construct
  source 1..20: mol_type = other DNA
atgaaacagcaaaatggagt

SEQ ID NO: 150963 - DNA, 20 bp, synthetic construct
  source 1..20: mol_type = other DNA
aatgaaacagcaaaatggag

SEQ ID NO: 150964 - DNA, 20 bp, synthetic construct
  source 1..20: mol_type = other DNA
aaatgaaacagcaaaatgga

SEQ ID NO: 150965 - DNA, 20 bp, synthetic construct
  source 1..20: mol_type = other DNA
caaatgaaacagcaaaatgg

SEQ ID NO: 150966 - DNA, 20 bp, synthetic construct
  source 1..20: mol_type = other DNA
acaaatgaaacagcaaaatg

SEQ ID NO: 150967 - DNA, 20 bp, synthetic construct
  source 1..20: mol_type = other DNA
gacaaatgaaacagcaaaat

SEQ ID NO: 150968 - DNA, 20 bp, synthetic construct
  source 1..20: mol_type = other DNA
tgacaaatgaaacagcaaaa

SEQ ID NO: 150969 - DNA, 20 bp, synthetic construct
  source 1..20: mol_type = other DNA
ctgacaaatgaaacagcaaa

SEQ ID NO: 150970 - DNA, 20 bp, synthetic construct
  source 1..20: mol_type = other DNA
tctgacaaatgaaacagcaa

SEQ ID NO: 150971 - DNA, 20 bp, synthetic construct
  source 1..20: mol_type = other DNA
gtctgacaaatgaaacagca

SEQ ID NO: 150972 - DNA, 20 bp, synthetic construct
  source 1..20: mol_type = other DNA
agtctgacaaatgaaacagc

SEQ ID NO: 150973 - DNA, 20 bp, synthetic construct
  source 1..20: mol_type = other DNA
aagtctgacaaatgaaacag

SEQ ID NO: 150974 - DNA, 20 bp, synthetic construct
  source 1..20: mol_type = other DNA
gaagtctgacaaatgaaaca

SEQ ID NO: 150975 - DNA, 20 bp, synthetic construct
  source 1..20: mol_type = other DNA
agaagtctgacaaatgaaac

SEQ ID NO: 150976 - DNA, 20 bp, synthetic construct
  source 1..20: mol_type = other DNA
aagaagtctgacaaatgaaa

SEQ ID NO: 150977 - DNA, 20 bp, synthetic construct
  source 1..20: mol_type = other DNA
aaagaagtctgacaaatgaa

SEQ ID NO: 150978 - DNA, 20 bp, synthetic construct
  source 1..20: mol_type = other DNA
aaaagaagtctgacaaatga

SEQ ID NO: 150979 - DNA, 20 bp, synthetic construct
  source 1..20: mol_type = other DNA
aaaaagaagtctgacaaatg

SEQ ID NO: 150980 - DNA, 20 bp, synthetic construct
  source 1..20: mol_type = other DNA
caaaaagaagtctgacaaat

SEQ ID NO: 150981 - DNA, 20 bp, synthetic construct
  source 1..20: mol_type = other DNA
acaaaaagaagtctgacaaa

SEQ ID NO: 150982 - DNA, 20 bp, synthetic construct
  source 1..20: mol_type = other DNA
gacaaaaagaagtctgacaa

SEQ ID NO: 150983 - DNA, 20 bp, synthetic construct
  source 1..20: mol_type = other DNA
ggacaaaaagaagtctgaca

SEQ ID NO: 150984 - DNA, 20 bp, synthetic construct
  source 1..20: mol_type = other DNA
gggacaaaaagaagtctgac

SEQ ID NO: 150985 - DNA, 20 bp, synthetic construct
  source 1..20: mol_type = other DNA
agggacaaaaagaagtctga

SEQ ID NO: 150986 - DNA, 20 bp, synthetic construct
  source 1..20: mol_type = other DNA
gagggacaaaaagaagtctg

SEQ ID NO: 150987 - DNA, 20 bp, synthetic construct
  source 1..20: mol_type = other DNA
agagggacaaaaagaagtct

SEQ ID NO: 150988 - DNA, 20 bp, synthetic construct
  source 1..20: mol_type = other DNA
aagagggacaaaaagaagtc

SEQ ID NO: 150989 - DNA, 20 bp, synthetic construct
  source 1..20: mol_type = other DNA
aaagagggacaaaaagaagt

SEQ ID NO: 150990 - DNA, 20 bp, synthetic construct
  source 1..20: mol_type = other DNA
taaagagggacaaaaagaag

SEQ ID NO: 150991 - DNA, 20 bp, synthetic construct
  source 1..20: mol_type = other DNA
gtaaagagggacaaaaagaa

SEQ ID NO: 150992 - DNA, 20 bp, synthetic construct
  source 1..20: mol_type = other DNA
agtaaagagggacaaaaaga

SEQ ID NO: 150993 - DNA, 20 bp, synthetic construct
  source 1..20: mol_type = other DNA
aagtaaagagggacaaaaag

SEQ ID NO: 150994 - DNA, 20 bp, synthetic construct
  source 1..20: mol_type = other DNA
gaagtaaagagggacaaaaa

SEQ ID NO: 150995 - DNA, 20 bp, synthetic construct
  source 1..20: mol_type = other DNA
agaagtaaagagggacaaaa

SEQ ID NO: 150996 - DNA, 20 bp, synthetic construct
  source 1..20: mol_type = other DNA
gagaagtaaagagggacaaa

SEQ ID NO: 150997 - DNA, 20 bp, synthetic construct
  source 1..20: mol_type = other DNA
ggagaagtaaagagggacaa

SEQ ID NO: 150998 - DNA, 20 bp, synthetic construct
  source 1..20: mol_type = other DNA
gggagaagtaaagagggaca

SEQ ID NO: 150999 - DNA, 20 bp, synthetic construct
  source 1..20: mol_type = other DNA
ggggagaagtaaagagggac

SEQ ID NO: 151000 - DNA, 20 bp, synthetic construct
  source 1..20: mol_type = other DNA
tggggagaagtaaagaggga

SEQ ID NO: 151001 - DNA, 20 bp, synthetic construct
  source 1..20: mol_type = other DNA
gtggggagaagtaaagaggg

SEQ ID NO: 151002 - DNA, 20 bp, synthetic construct
  source 1..20: mol_type = other DNA
tgtggggagaagtaaagagg

SEQ ID NO: 151003 - DNA, 20 bp, synthetic construct
  source 1..20: mol_type = other DNA
atgtggggagaagtaaagag

SEQ ID NO: 151004 - DNA, 20 bp, synthetic construct
  source 1..20: mol_type = other DNA
tatgtggggagaagtaaaga

SEQ ID NO: 151005 - DNA, 20 bp, synthetic construct
  source 1..20: mol_type = other DNA
ttatgtggggagaagtaaag

SEQ ID NO: 151006 - DNA, 20 bp, synthetic construct
  source 1..20: mol_type = other DNA
attatgtggggagaagtaaa

SEQ ID NO: 151007 - DNA, 20 bp, synthetic construct
  source 1..20: mol_type = other DNA
aattatgtggggagaagtaa

SEQ ID NO: 151008 - DNA, 20 bp, synthetic construct
  source 1..20: mol_type = other DNA
gaattatgtggggagaagta

SEQ ID NO: 151009 - DNA, 20 bp, synthetic construct
  source 1..20: mol_type = other DNA
tgaattatgtggggagaagt

SEQ ID NO: 151010 - DNA, 20 bp, synthetic construct
  source 1..20: mol_type = other DNA
gtgaattatgtggggagaag

SEQ ID NO: 151011 - DNA, 20 bp, synthetic construct
  source 1..20: mol_type = other DNA
ggtgaattatgtggggagaa

SEQ ID NO: 151012 - DNA, 20 bp, synthetic construct
  source 1..20: mol_type = other DNA
tggtgaattatgtggggaga

SEQ ID NO: 151013 - DNA, 20 bp, synthetic construct
  source 1..20: mol_type = other DNA
ctggtgaattatgtggggag

SEQ ID NO: 151014 - DNA, 20 bp, synthetic construct
  source 1..20: mol_type = other DNA
actggtgaattatgtgggga

SEQ ID NO: 151015 - DNA, 20 bp, synthetic construct
  source 1..20: mol_type = other DNA
tactggtgaattatgtgggg

SEQ ID NO: 151016 - DNA, 20 bp, synthetic construct
  source 1..20: mol_type = other DNA
gtactggtgaattatgtggg

SEQ ID NO: 151017 - DNA, 20 bp, synthetic construct
  source 1..20: mol_type = other DNA
agtactggtgaattatgtgg

SEQ ID NO: 151018 - DNA, 20 bp, synthetic construct
  source 1..20: mol_type = other DNA
tagtactggtgaattatgtg

SEQ ID NO: 151019 - DNA, 20 bp, synthetic construct
  source 1..20: mol_type = other DNA
ctagtactggtgaattatgt

SEQ ID NO: 151020 - DNA, 20 bp, synthetic construct
  source 1..20: mol_type = other DNA
actagtactggtgaattatg

SEQ ID NO: 151021 - DNA, 20 bp, synthetic construct
  source 1..20: mol_type = other DNA
cactagtactggtgaattat

SEQ ID NO: 151022 - DNA, 20 bp, synthetic construct
  source 1..20: mol_type = other DNA
acactagtactggtgaatta

SEQ ID NO: 151023 - DNA, 20 bp, synthetic construct
  source 1..20: mol_type = other DNA
aacactagtactggtgaatt

SEQ ID NO: 151024 - DNA, 20 bp, synthetic construct
  source 1..20: mol_type = other DNA
aaacactagtactggtgaat

SEQ ID NO: 151025 - DNA, 20 bp, synthetic construct
  source 1..20: mol_type = other DNA
aaaacactagtactggtgaa

SEQ ID NO: 151026 - DNA, 20 bp, synthetic construct
  source 1..20: mol_type = other DNA
caaaacactagtactggtga

SEQ ID NO: 151027 - DNA, 20 bp, synthetic construct
  source 1..20: mol_type = other DNA
acaaaacactagtactggtg

SEQ ID NO: 151028 - DNA, 20 bp, synthetic construct
  source 1..20: mol_type = other DNA
aacaaaacactagtactggt

SEQ ID NO: 151029 - DNA, 20 bp, synthetic construct
  source 1..20: mol_type = other DNA
aaacaaaacactagtactgg

SEQ ID NO: 151030 - DNA, 20 bp, synthetic construct
  source 1..20: mol_type = other DNA
aaaacaaaacactagtactg

SEQ ID NO: 151031 - DNA, 20 bp, synthetic construct
  source 1..20: mol_type = other DNA
aaaaacaaaacactagtact

SEQ ID NO: 151032 - DNA, 20 bp, synthetic construct
  source 1..20: mol_type = other DNA
gaaaaacaaaacactagtac

SEQ ID NO: 151033 - DNA, 20 bp, synthetic construct
  source 1..20: mol_type = other DNA
tgaaaaacaaaacactagta

SEQ ID NO: 151034 - DNA, 20 bp, synthetic construct
  source 1..20: mol_type = other DNA
ctgaaaaacaaaacactagt

SEQ ID NO: 151035 - DNA, 20 bp, synthetic construct
  source 1..20: mol_type = other DNA
tctgaaaaacaaaacactag

SEQ ID NO: 151036 - DNA, 20 bp, synthetic construct
  source 1..20: mol_type = other DNA
gtctgaaaaacaaaacacta

SEQ ID NO: 151037 - DNA, 20 bp, synthetic construct
  source 1..20: mol_type = other DNA
ggtctgaaaaacaaaacact

SEQ ID NO: 151038 - DNA, 20 bp, synthetic construct
  source 1..20: mol_type = other DNA
tggtctgaaaaacaaaacac

SEQ ID NO: 151039 - DNA, 20 bp, synthetic construct
  source 1..20: mol_type = other DNA
ttggtctgaaaaacaaaaca

SEQ ID NO: 151040 - DNA, 20 bp, synthetic construct
  source 1..20: mol_type = other DNA
cttggtctgaaaaacaaaac

SEQ ID NO: 151041 - DNA, 20 bp, synthetic construct
  source 1..20: mol_type = other DNA
acttggtctgaaaaacaaaa

SEQ ID NO: 151042 - DNA, 20 bp, synthetic construct
  source 1..20: mol_type = other DNA
gacttggtctgaaaaacaaa

SEQ ID NO: 151043 - DNA, 20 bp, synthetic construct
  source 1..20: mol_type = other DNA
agacttggtctgaaaaacaa

SEQ ID NO: 151044 - DNA, 20 bp, synthetic construct
  source 1..20: mol_type = other DNA
gagacttggtctgaaaaaca

SEQ ID NO: 151045 - DNA, 20 bp, synthetic construct
  source 1..20: mol_type = other DNA
cgagacttggtctgaaaaac

SEQ ID NO: 151046 - DNA, 20 bp, synthetic construct
  source 1..20: mol_type = other DNA
gcgagacttggtctgaaaaa

SEQ ID NO: 151047 - DNA, 20 bp, synthetic construct
  source 1..20: mol_type = other DNA
agcgagacttggtctgaaaa

SEQ ID NO: 151048 - DNA, 20 bp, synthetic construct
  source 1..20: mol_type = other DNA
gagcgagacttggtctgaaa

SEQ ID NO: 151049 - DNA, 20 bp, synthetic construct
  source 1..20: mol_type = other DNA
agagcgagacttggtctgaa

SEQ ID NO: 151050 - DNA, 20 bp, synthetic construct
  source 1..20: mol_type = other DNA
cagagcgagacttggtctga

SEQ ID NO: 151051 - DNA, 20 bp, synthetic construct
  source 1..20: mol_type = other DNA
acagagcgagacttggtctg

SEQ ID NO: 151052 - DNA, 20 bp, synthetic construct
  source 1..20: mol_type = other DNA
gacagagcgagacttggtct

SEQ ID NO: 151053 - DNA, 20 bp, synthetic construct
  source 1..20: mol_type = other DNA
cgacagagcgagacttggtc

SEQ ID NO: 151054 - DNA, 20 bp, synthetic construct
  source 1..20: mol_type = other DNA
gcgacagagcgagacttggt

SEQ ID NO: 151055 - DNA, 20 bp, synthetic construct
  source 1..20: mol_type = other DNA
ggcgacagagcgagacttgg

SEQ ID NO: 151056 - DNA, 20 bp, synthetic construct
  source 1..20: mol_type = other DNA
gggcgacagagcgagacttg

SEQ ID NO: 151057 - DNA, 20 bp, synthetic construct
  source 1..20: mol_type = other DNA
tgggcgacagagcgagactt

SEQ ID NO: 151058 - DNA, 20 bp, synthetic construct
  source 1..20: mol_type = other DNA
ctgggcgacagagcgagact

SEQ ID NO: 151059 - DNA, 20 bp, synthetic construct
  source 1..20: mol_type = other DNA
cctgggcgacagagcgagac

SEQ ID NO: 151060 - DNA, 20 bp, synthetic construct
  source 1..20: mol_type = other DNA
gcctgggcgacagagcgaga

SEQ ID NO: 151061 - DNA, 20 bp, synthetic construct
  source 1..20: mol_type = other DNA
agcctgggcgacagagcgag

SEQ ID NO: 151062 - DNA, 20 bp, synthetic construct
  source 1..20: mol_type = other DNA
cagcctgggcgacagagcga

SEQ ID NO: 151063 - DNA, 20 bp, synthetic construct
  source 1..20: mol_type = other DNA
ccagcctgggcgacagagcg

SEQ ID NO: 151064 - DNA, 20 bp, synthetic construct
  source 1..20: mol_type = other DNA
tccagcctgggcgacagagc

SEQ ID NO: 151065 - DNA, 20 bp, synthetic construct
  source 1..20: mol_type = other DNA
ctccagcctgggcgacagag

SEQ ID NO: 151066 - DNA, 20 bp, synthetic construct
  source 1..20: mol_type = other DNA
actccagcctgggcgacaga

SEQ ID NO: 151067 - DNA, 20 bp, synthetic construct
  source 1..20: mol_type = other DNA
cactccagcctgggcgacag

SEQ ID NO: 151068 - DNA, 20 bp, synthetic construct
  source 1..20: mol_type = other DNA
gcactccagcctgggcgaca

SEQ ID NO: 151069 - DNA, 20 bp, synthetic construct
  source 1..20: mol_type = other DNA
tgcactccagcctgggcgac

SEQ ID NO: 151070 - DNA, 20 bp, synthetic construct
  source 1..20: mol_type = other DNA
ctgcactccagcctgggcga

SEQ ID NO: 151071 - DNA, 20 bp, synthetic construct
  source 1..20: mol_type = other DNA
actgcactccagcctgggcg

SEQ ID NO: 151072 - DNA, 20 bp, synthetic construct
  source 1..20: mol_type = other DNA
cactgcactccagcctgggc

SEQ ID NO: 151073 - DNA, 20 bp, synthetic construct
  source 1..20: mol_type = other DNA
ccactgcactccagcctggg

SEQ ID NO: 151074 - DNA, 20 bp, synthetic construct
  source 1..20: mol_type = other DNA
gccactgcactccagcctgg

SEQ ID NO: 151075 - DNA, 20 bp, synthetic construct
  source 1..20: mol_type = other DNA
cgccactgcactccagcctg

SEQ ID NO: 151076 - DNA, 20 bp, synthetic construct
  source 1..20: mol_type = other DNA
gcgccactgcactccagcct

SEQ ID NO: 151077 - DNA, 20 bp, synthetic construct
  source 1..20: mol_type = other DNA
cgcgccactgcactccagcc

SEQ ID NO: 151078 - DNA, 20 bp, synthetic construct
  source 1..20: mol_type = other DNA
tcgcgccactgcactccagc

SEQ ID NO: 151079 - DNA, 20 bp, synthetic construct
  source 1..20: mol_type = other DNA
atcgcgccactgcactccag

SEQ ID NO: 151080 - DNA, 20 bp, synthetic construct
  source 1..20: mol_type = other DNA
gatcgcgccactgcactcca

SEQ ID NO: 151081 - DNA, 20 bp, synthetic construct
  source 1..20: mol_type = other DNA
agatcgcgccactgcactcc

SEQ ID NO: 151082 - DNA, 20 bp, synthetic construct
  source 1..20: mol_type = other DNA
gagatcgcgccactgcactc

SEQ ID NO: 151083 - DNA, 20 bp, synthetic construct
  source 1..20: mol_type = other DNA
tgagatcgcgccactgcact

SEQ ID NO: 151084 - DNA, 20 bp, synthetic construct
  source 1..20: mol_type = other DNA
ctgagatcgcgccactgcac

SEQ ID NO: 151085 - DNA, 20 bp, synthetic construct
  source 1..20: mol_type = other DNA
gctgagatcgcgccactgca

SEQ ID NO: 151086 - DNA, 20 bp, synthetic construct
  source 1..20: mol_type = other DNA
agctgagatcgcgccactgc

SEQ ID NO: 151087 - DNA, 20 bp, synthetic construct
  source 1..20: mol_type = other DNA
gagctgagatcgcgccactg

SEQ ID NO: 151088 - DNA, 20 bp, synthetic construct
  source 1..20: mol_type = other DNA
tgagctgagatcgcgccact

SEQ ID NO: 151089 - DNA, 20 bp, synthetic construct
  source 1..20: mol_type = other DNA
gtgagctgagatcgcgccac

SEQ ID NO: 151090 - DNA, 20 bp, synthetic construct
  source 1..20: mol_type = other DNA
agtgagctgagatcgcgcca

SEQ ID NO: 151091 - DNA, 20 bp, synthetic construct
  source 1..20: mol_type = other DNA
cagtgagctgagatcgcgcc

SEQ ID NO: 151092 - DNA, 20 bp, synthetic construct
  source 1..20: mol_type = other DNA
gcagtgagctgagatcgcgc

SEQ ID NO: 151093 - DNA, 20 bp, synthetic construct
  source 1..20: mol_type = other DNA
tgcagtgagctgagatcgcg

SEQ ID NO: 151094 - DNA, 20 bp, synthetic construct
  source 1..20: mol_type = other DNA
ttgcagtgagctgagatcgc

SEQ ID NO: 151095 - DNA, 20 bp, synthetic construct
  source 1..20: mol_type = other DNA
gttgcagtgagctgagatcg

SEQ ID NO: 151096 - DNA, 20 bp, synthetic construct
  source 1..20: mol_type = other DNA
ggttgcagtgagctgagatc

SEQ ID NO: 151097 - DNA, 20 bp, synthetic construct
  source 1..20: mol_type = other DNA
aggttgcagtgagctgagat

SEQ ID NO: 151098 - DNA, 20 bp, synthetic construct
  source 1..20: mol_type = other DNA
gaggttgcagtgagctgaga

SEQ ID NO: 151099 - DNA, 20 bp, synthetic construct
  source 1..20: mol_type = other DNA
ggaggttgcagtgagctgag

SEQ ID NO: 151100 - DNA, 20 bp, synthetic construct
  source 1..20: mol_type = other DNA
cggaggttgcagtgagctga

SEQ ID NO: 151101 - DNA, 20 bp, synthetic construct
  source 1..20: mol_type = other DNA
gcggaggttgcagtgagctg

SEQ ID NO: 151102 - DNA, 20 bp, synthetic construct
  source 1..20: mol_type = other DNA
ggcggaggttgcagtgagct

SEQ ID NO: 151103 - DNA, 20 bp, synthetic construct
  source 1..20: mol_type = other DNA
aggcggaggttgcagtgagc

SEQ ID NO: 151104 - DNA, 20 bp, synthetic construct
  source 1..20: mol_type = other DNA
gaggcggaggttgcagtgag

SEQ ID NO: 151105 - DNA, 20 bp, synthetic construct
  source 1..20: mol_type = other DNA
ggaggcggaggttgcagtga

SEQ ID NO: 151106 - DNA, 20 bp, synthetic construct
  source 1..20: mol_type = other DNA
gggaggcggaggttgcagtg

SEQ ID NO: 151107 - DNA, 20 bp, synthetic construct
  source 1..20: mol_type = other DNA
tgggaggcggaggttgcagt

SEQ ID NO: 151108 - DNA, 20 bp, synthetic construct
  source 1..20: mol_type = other DNA
ctgggaggcggaggttgcag

SEQ ID NO: 151109 - DNA, 20 bp, synthetic construct
  source 1..20: mol_type = other DNA
cctgggaggcggaggttgca

SEQ ID NO: 151110 - DNA, 20 bp, synthetic construct
  source 1..20: mol_type = other DNA
acctgggaggcggaggttgc

SEQ ID NO: 151111 - DNA, 20 bp, synthetic construct
  source 1..20: mol_type = other DNA
aacctgggaggcggaggttg

SEQ ID NO: 151112 - DNA, 20 bp, synthetic construct
  source 1..20: mol_type = other DNA
gaacctgggaggcggaggtt

SEQ ID NO: 151113 - DNA, 20 bp, synthetic construct
  source 1..20: mol_type = other DNA
tgaacctgggaggcggaggt

SEQ ID NO: 151114 - DNA, 20 bp, synthetic construct
  source 1..20: mol_type = other DNA
ttgaacctgggaggcggagg

SEQ ID NO: 151115 - DNA, 20 bp, synthetic construct
  source 1..20: mol_type = other DNA
cttgaacctgggaggcggag

SEQ ID NO: 151116 - DNA, 20 bp, synthetic construct
  source 1..20: mol_type = other DNA
gcttgaacctgggaggcgga

SEQ ID NO: 151117 - DNA, 20 bp, synthetic construct
  source 1..20: mol_type = other DNA
tgcttgaacctgggaggcgg

SEQ ID NO: 151118 - DNA, 20 bp, synthetic construct
  source 1..20: mol_type = other DNA
ttgcttgaacctgggaggcg

SEQ ID NO: 151119 - DNA, 20 bp, synthetic construct
  source 1..20: mol_type = other DNA
attgcttgaacctgggaggc

SEQ ID NO: 151120 - DNA, 20 bp, synthetic construct
  source 1..20: mol_type = other DNA
aattgcttgaacctgggagg

SEQ ID NO: 151121 - DNA, 20 bp, synthetic construct
  source 1..20: mol_type = other DNA
gaattgcttgaacctgggag

SEQ ID NO: 151122 - DNA, 20 bp, synthetic construct
  source 1..20: mol_type = other DNA
agaattgcttgaacctggga

SEQ ID NO: 151123 - DNA, 20 bp, synthetic construct
  source 1..20: mol_type = other DNA
gagaattgcttgaacctggg

SEQ ID NO: 151124 - DNA, 20 bp, synthetic construct
  source 1..20: mol_type = other DNA
ggagaattgcttgaacctgg

SEQ ID NO: 151125 - DNA, 20 bp, synthetic construct
  source 1..20: mol_type = other DNA
aggagaattgcttgaacctg

SEQ ID NO: 151126 - DNA, 20 bp, synthetic construct
  source 1..20: mol_type = other DNA
caggagaattgcttgaacct

SEQ ID NO: 151127 - DNA, 20 bp, synthetic construct
  source 1..20: mol_type = other DNA
gcaggagaattgcttgaacc

SEQ ID NO: 151128 - DNA, 20 bp, synthetic construct
  source 1..20: mol_type = other DNA
ggcaggagaattgcttgaac

SEQ ID NO: 151129 - DNA, 20 bp, synthetic construct
  source 1..20: mol_type = other DNA
aggcaggagaattgcttgaa

SEQ ID NO: 151130 - DNA, 20 bp, synthetic construct
  source 1..20: mol_type = other DNA
gaggcaggagaattgcttga

SEQ ID NO: 151131 - DNA, 20 bp, synthetic construct
  source 1..20: mol_type = other DNA
tgaggcaggagaattgcttg

SEQ ID NO: 151132 - DNA, 20 bp, synthetic construct
  source 1..20: mol_type = other DNA
ctgaggcaggagaattgctt

SEQ ID NO: 151133 - DNA, 20 bp, synthetic construct
  source 1..20: mol_type = other DNA
gctgaggcaggagaattgct

SEQ ID NO: 151134 - DNA, 20 bp, synthetic construct
  source 1..20: mol_type = other DNA
ggctgaggcaggagaattgc

SEQ ID NO: 151135 - DNA, 20 bp, synthetic construct
  source 1..20: mol_type = other DNA
aggctgaggcaggagaattg

SEQ ID NO: 151136 - DNA, 20 bp, synthetic construct
  source 1..20: mol_type = other DNA
gaggctgaggcaggagaatt

SEQ ID NO: 151137 - DNA, 20 bp, synthetic construct
  source 1..20: mol_type = other DNA
ggaggctgaggcaggagaat

SEQ ID NO: 151138 - DNA, 20 bp, synthetic construct
  source 1..20: mol_type = other DNA
gggaggctgaggcaggagaa

SEQ ID NO: 151139 - DNA, 20 bp, synthetic construct
  source 1..20: mol_type = other DNA
cgggaggctgaggcaggaga

SEQ ID NO: 151140 - DNA, 20 bp, synthetic construct
  source 1..20: mol_type = other DNA
ccgggaggctgaggcaggag

SEQ ID NO: 151141 - DNA, 20 bp, synthetic construct
  source 1..20: mol_type = other DNA
cccgggaggctgaggcagga

SEQ ID NO: 151142 - DNA, 20 bp, synthetic construct
  source 1..20: mol_type = other DNA
acccgggaggctgaggcagg

SEQ ID NO: 151143 - DNA, 20 bp, synthetic construct
  source 1..20: mol_type = other DNA
tacccgggaggctgaggcag

SEQ ID NO: 151144 - DNA, 20 bp, synthetic construct
  source 1..20: mol_type = other DNA
ctacccgggaggctgaggca

SEQ ID NO: 151145 - DNA, 20 bp, synthetic construct
  source 1..20: mol_type = other DNA
gctacccgggaggctgaggc

SEQ ID NO: 151146 - DNA, 20 bp, synthetic construct
  source 1..20: mol_type = other DNA
agctacccgggaggctgagg

SEQ ID NO: 151147 - DNA, 20 bp, synthetic construct
  source 1..20: mol_type = other DNA
cagctacccgggaggctgag

SEQ ID NO: 151148 - DNA, 20 bp, synthetic construct
  source 1..20: mol_type = other DNA
ccagctacccgggaggctga

SEQ ID NO: 151149 - DNA, 20 bp, synthetic construct
  source 1..20: mol_type = other DNA
cccagctacccgggaggctg

SEQ ID NO: 151150 - DNA, 20 bp, synthetic construct
  source 1..20: mol_type = other DNA
tcccagctacccgggaggct

SEQ ID NO: 151151 - DNA, 20 bp, synthetic construct
  source 1..20: mol_type = other DNA
gtcccagctacccgggaggc

SEQ ID NO: 151152 - DNA, 20 bp, synthetic construct
  source 1..20: mol_type = other DNA
agtcccagctacccgggagg

SEQ ID NO: 151153 - DNA, 20 bp, synthetic construct
  source 1..20: mol_type = other DNA
tagtcccagctacccgggag

SEQ ID NO: 151154 - DNA, 20 bp, synthetic construct
  source 1..20: mol_type = other DNA
gtagtcccagctacccggga

SEQ ID NO: 151155 - DNA, 20 bp, synthetic construct
  source 1..20: mol_type = other DNA
tgtagtcccagctacccggg

SEQ ID NO: 151156 - DNA, 20 bp, synthetic construct
  source 1..20: mol_type = other DNA
ctgtagtcccagctacccgg

SEQ ID NO: 151157 - DNA, 20 bp, synthetic construct
  source 1..20: mol_type = other DNA
cctgtagtcccagctacccg

SEQ ID NO: 151158 - DNA, 20 bp, synthetic construct
  source 1..20: mol_type = other DNA
gcctgtagtcccagctaccc

SEQ ID NO: 151159 - DNA, 20 bp, synthetic construct
  source 1..20: mol_type = other DNA
cgcctgtagtcccagctacc

SEQ ID NO: 151160 - DNA, 20 bp, synthetic construct
  source 1..20: mol_type = other DNA
gcgcctgtagtcccagctac

SEQ ID NO: 151161 - DNA, 20 bp, synthetic construct
  source 1..20: mol_type = other DNA
cgcgcctgtagtcccagcta

SEQ ID NO: 151162 - DNA, 20 bp, synthetic construct
  source 1..20: mol_type = other DNA
gcgcgcctgtagtcccagct

SEQ ID NO: 151163 - DNA, 20 bp, synthetic construct
  source 1..20: mol_type = other DNA
cgcgcgcctgtagtcccagc

SEQ ID NO: 151164 - DNA, 20 bp, synthetic construct
  source 1..20: mol_type = other DNA
gcgcgcgcctgtagtcccag

SEQ ID NO: 151165 - DNA, 20 bp, synthetic construct
  source 1..20: mol_type = other DNA
ggcgcgcgcctgtagtccca

SEQ ID NO: 151166 - DNA, 20 bp, synthetic construct
  source 1..20: mol_type = other DNA
cggcgcgcgcctgtagtccc

SEQ ID NO: 151167 - DNA, 20 bp, synthetic construct
  source 1..20: mol_type = other DNA
gcggcgcgcgcctgtagtcc

SEQ ID NO: 151168 - DNA, 20 bp, synthetic construct
  source 1..20: mol_type = other DNA
ggcggcgcgcgcctgtagtc

SEQ ID NO: 151169 - DNA, 20 bp, synthetic construct
  source 1..20: mol_type = other DNA
tggcggcgcgcgcctgtagt

SEQ ID NO: 151170 - DNA, 20 bp, synthetic construct
  source 1..20: mol_type = other DNA
gtggcggcgcgcgcctgtag

SEQ ID NO: 151171 - DNA, 20 bp, synthetic construct
  source 1..20: mol_type = other DNA
cgtggcggcgcgcgcctgta

SEQ ID NO: 151172 - DNA, 20 bp, synthetic construct
  source 1..20: mol_type = other DNA
gcgtggcggcgcgcgcctgt

SEQ ID NO: 151173 - DNA, 20 bp, synthetic construct
  source 1..20: mol_type = other DNA
ggcgtggcggcgcgcgcctg

SEQ ID NO: 151174 - DNA, 20 bp, synthetic construct
  source 1..20: mol_type = other DNA
aggcgtggcggcgcgcgcct

SEQ ID NO: 151175 - DNA, 20 bp, synthetic construct
  source 1..20: mol_type = other DNA
caggcgtggcggcgcgcgcc

SEQ ID NO: 151176 - DNA, 20 bp, synthetic construct
  source 1..20: mol_type = other DNA
ccaggcgtggcggcgcgcgc

SEQ ID NO: 151177 - DNA, 20 bp, synthetic construct
  source 1..20: mol_type = other DNA
gccaggcgtggcggcgcgcg

SEQ ID NO: 151178 - DNA, 20 bp, synthetic construct
  source 1..20: mol_type = other DNA
agccaggcgtggcggcgcgc

SEQ ID NO: 151179 - DNA, 20 bp, synthetic construct
  source 1..20: mol_type = other DNA
tagccaggcgtggcggcgcg

SEQ ID NO: 151180 - DNA, 20 bp, synthetic construct
  source 1..20: mol_type = other DNA
ttagccaggcgtggcggcgc

SEQ ID NO: 151181 - DNA, 20 bp, synthetic construct
  source 1..20: mol_type = other DNA
attagccaggcgtggcggcg

SEQ ID NO: 151182 - DNA, 20 bp, synthetic construct
  source 1..20: mol_type = other DNA
aattagccaggcgtggcggc

SEQ ID NO: 151183 - DNA, 20 bp, synthetic construct
  source 1..20: mol_type = other DNA
aaattagccaggcgtggcgg

SEQ ID NO: 151184 - DNA, 20 bp, synthetic construct
  source 1..20: mol_type = other DNA
aaaattagccaggcgtggcg

SEQ ID NO: 151185 - DNA, 20 bp, synthetic construct
  source 1..20: mol_type = other DNA
aaaaattagccaggcgtggc

SEQ ID NO: 151186 - DNA, 20 bp, synthetic construct
  source 1..20: mol_type = other DNA
aaaaaattagccaggcgtgg

SEQ ID NO: 151187 - DNA, 20 bp, synthetic construct
  source 1..20: mol_type = other DNA
taaaaaattagccaggcgtg

SEQ ID NO: 151188 - DNA, 20 bp, synthetic construct
  source 1..20: mol_type = other DNA
ataaaaaattagccaggcgt

SEQ ID NO: 151189 - DNA, 20 bp, synthetic construct
  source 1..20: mol_type = other DNA
tataaaaaattagccaggcg

SEQ ID NO: 151190 - DNA, 20 bp, synthetic construct
  source 1..20: mol_type = other DNA
atataaaaaattagccaggc

SEQ ID NO: 151191 - DNA, 20 bp, synthetic construct
  source 1..20: mol_type = other DNA
aatataaaaaattagccagg

SEQ ID NO: 151192 - DNA, 20 bp, synthetic construct
  source 1..20: mol_type = other DNA
aaatataaaaaattagccag

SEQ ID NO: 151193 - DNA, 20 bp, synthetic construct
  source 1..20: mol_type = other DNA
aaaatataaaaaattagcca

SEQ ID NO: 151194 - DNA, 20 bp, synthetic construct
  source 1..20: mol_type = other DNA
taaaatataaaaaattagcc

SEQ ID NO: 151195 - DNA, 20 bp, synthetic construct
  source 1..20: mol_type = other DNA
ctaaaatataaaaaattagc

SEQ ID NO: 151196 - DNA, 20 bp, synthetic construct
  source 1..20: mol_type = other DNA
actaaaatataaaaaattag

SEQ ID NO: 151197 - DNA, 20 bp, synthetic construct
  source 1..20: mol_type = other DNA
tactaaaatataaaaaatta

SEQ ID NO: 151198 - DNA, 20 bp, synthetic construct
  source 1..20: mol_type = other DNA
ctactaaaatataaaaaatt

SEQ ID NO: 151199 - DNA, 20 bp, synthetic construct
  source 1..20: mol_type = other DNA
tctactaaaatataaaaaat

SEQ ID NO: 151200 - DNA, 20 bp, synthetic construct
  source 1..20: mol_type = other DNA
ctctactaaaatataaaaaa

SEQ ID NO: 151201 - DNA, 20 bp, synthetic construct
  source 1..20: mol_type = other DNA
tctctactaaaatataaaaa

SEQ ID NO: 151202 - DNA, 20 bp, synthetic construct
  source 1..20: mol_type = other DNA
gtctctactaaaatataaaa

SEQ ID NO: 151203 - DNA, 20 bp, synthetic construct
  source 1..20: mol_type = other DNA
cgtctctactaaaatataaa

SEQ ID NO: 151204 - DNA, 20 bp, synthetic construct
  source 1..20: mol_type = other DNA
ccgtctctactaaaatataa

SEQ ID NO: 151205 - DNA, 20 bp, synthetic construct
  source 1..20: mol_type = other DNA
gccgtctctactaaaatata

SEQ ID NO: 151206 - DNA, 20 bp, synthetic construct
  source 1..20: mol_type = other DNA
cgccgtctctactaaaatat

SEQ ID NO: 151207 - DNA, 20 bp, synthetic construct
  source 1..20: mol_type = other DNA
acgccgtctctactaaaata

SEQ ID NO: 151208 - DNA, 20 bp, synthetic construct
  source 1..20: mol_type = other DNA
aacgccgtctctactaaaat

SEQ ID NO: 151209 - DNA, 20 bp, synthetic construct
  source 1..20: mol_type = other DNA
aaacgccgtctctactaaaa

SEQ ID NO: 151210 - DNA, 20 bp, synthetic construct
  source 1..20: mol_type = other DNA
gaaacgccgtctctactaaa

SEQ ID NO: 151211 - DNA, 20 bp, synthetic construct
  source 1..20: mol_type = other DNA
tgaaacgccgtctctactaa

SEQ ID NO: 151212 - DNA, 20 bp, synthetic construct
  source 1..20: mol_type = other DNA
gtgaaacgccgtctctacta

SEQ ID NO: 151213 - DNA, 20 bp, synthetic construct
  source 1..20: mol_type = other DNA
ggtgaaacgccgtctctact

SEQ ID NO: 151214 - DNA, 20 bp, synthetic construct
  source 1..20: mol_type = other DNA
tggtgaaacgccgtctctac

SEQ ID NO: 151215 - DNA, 20 bp, synthetic construct
  source 1..20: mol_type = other DNA
atggtgaaacgccgtctcta

SEQ ID NO: 151216 - DNA, 20 bp, synthetic construct
  source 1..20: mol_type = other DNA
catggtgaaacgccgtctct

SEQ ID NO: 151217 - DNA, 20 bp, synthetic construct
  source 1..20: mol_type = other DNA
acatggtgaaacgccgtctc

SEQ ID NO: 151218 - DNA, 20 bp, synthetic construct
  source 1..20: mol_type = other DNA
aacatggtgaaacgccgtct

SEQ ID NO: 151219 - DNA, 20 bp, synthetic construct
  source 1..20: mol_type = other DNA
caacatggtgaaacgccgtc

SEQ ID NO: 151220 - DNA, 20 bp, synthetic construct
  source 1..20: mol_type = other DNA
ccaacatggtgaaacgccgt

SEQ ID NO: 151221 - DNA, 20 bp, synthetic construct
  source 1..20: mol_type = other DNA
gccaacatggtgaaacgccg

SEQ ID NO: 151222 - DNA, 20 bp, synthetic construct
  source 1..20: mol_type = other DNA
ggccaacatggtgaaacgcc

SEQ ID NO: 151223 - DNA, 20 bp, synthetic construct
  source 1..20: mol_type = other DNA
tggccaacatggtgaaacgc

SEQ ID NO: 151224 - DNA, 20 bp, synthetic construct
  source 1..20: mol_type = other DNA
ctggccaacatggtgaaacg

SEQ ID NO: 151225 - DNA, 20 bp, synthetic construct
  source 1..20: mol_type = other DNA
cctggccaacatggtgaaac

SEQ ID NO: 151226 - DNA, 20 bp, synthetic construct
  source 1..20: mol_type = other DNA
tcctggccaacatggtgaaa

SEQ ID NO: 151227 - DNA, 20 bp, synthetic construct
  source 1..20: mol_type = other DNA
atcctggccaacatggtgaa

SEQ ID NO: 151228 - DNA, 20 bp, synthetic construct
  source 1..20: mol_type = other DNA
catcctggccaacatggtga

SEQ ID NO: 151229 - DNA, 20 bp, synthetic construct
  source 1..20: mol_type = other DNA
ccatcctggccaacatggtg

SEQ ID NO: 151230 - DNA, 20 bp, synthetic construct
  source 1..20: mol_type = other DNA
accatcctggccaacatggt

SEQ ID NO: 151231 - DNA, 20 bp, synthetic construct
  source 1..20: mol_type = other DNA
gaccatcctggccaacatgg

SEQ ID NO: 151232 - DNA, 20 bp, synthetic construct
  source 1..20: mol_type = other DNA
agaccatcctggccaacatg

SEQ ID NO: 151233 - DNA, 20 bp, synthetic construct
  source 1..20: mol_type = other DNA
gagaccatcctggccaacat

SEQ ID NO: 151234 - DNA, 20 bp, synthetic construct
  source 1..20: mol_type = other DNA
cgagaccatcctggccaaca

SEQ ID NO: 151235 - DNA, 20 bp, synthetic construct
  source 1..20: mol_type = other DNA
tcgagaccatcctggccaac

SEQ ID NO: 151236 - DNA, 20 bp, synthetic construct
  source 1..20: mol_type = other DNA
atcgagaccatcctggccaa

SEQ ID NO: 151237 - DNA, 20 bp, synthetic construct
  source 1..20: mol_type = other DNA
gatcgagaccatcctggcca

SEQ ID NO: 151238 - DNA, 20 bp, synthetic construct
  source 1..20: mol_type = other DNA
agatcgagaccatcctggcc

SEQ ID NO: 151239 - DNA, 20 bp, synthetic construct
  source 1..20: mol_type = other DNA
cagatcgagaccatcctggc

SEQ ID NO: 151240 - DNA, 20 bp, synthetic construct
  source 1..20: mol_type = other DNA
acagatcgagaccatcctgg

SEQ ID NO: 151241 - DNA, 20 bp, synthetic construct
  source 1..20: mol_type = other DNA
aacagatcgagaccatcctg

SEQ ID NO: 151242 - DNA, 20 bp, synthetic construct
  source 1..20: mol_type = other DNA
caacagatcgagaccatcct

SEQ ID NO: 151243 - DNA, 20 bp, synthetic construct
  source 1..20: mol_type = other DNA
tcaacagatcgagaccatcc

SEQ ID NO: 151244 - DNA, 20 bp, synthetic construct
  source 1..20: mol_type = other DNA
gtcaacagatcgagaccatc

SEQ ID NO: 151245 - DNA, 20 bp, synthetic construct
  source 1..20: mol_type = other DNA
cgtcaacagatcgagaccat

SEQ ID NO: 151246 - DNA, 20 bp, synthetic construct
  source 1..20: mol_type = other DNA
acgtcaacagatcgagacca

SEQ ID NO: 151247 - DNA, 20 bp, synthetic construct
  source 1..20: mol_type = other DNA
gacgtcaacagatcgagacc

SEQ ID NO: 151248 - DNA, 20 bp, synthetic construct
  source 1..20: mol_type = other DNA
cgacgtcaacagatcgagac

SEQ ID NO: 151249 - DNA, 20 bp, synthetic construct
  source 1..20: mol_type = other DNA
acgacgtcaacagatcgaga

SEQ ID NO: 151250 - DNA, 20 bp, synthetic construct
  source 1..20: mol_type = other DNA
cacgacgtcaacagatcgag

SEQ ID NO: 151251 - DNA, 20 bp, synthetic construct
  source 1..20: mol_type = other DNA
tcacgacgtcaacagatcga

SEQ ID NO: 151252 - DNA, 20 bp, synthetic construct
  source 1..20: mol_type = other DNA
atcacgacgtcaacagatcg

SEQ ID NO: 151253 - DNA, 20 bp, synthetic construct
  source 1..20: mol_type = other DNA
gatcacgacgtcaacagatc

SEQ ID NO: 151254 - DNA, 20 bp, synthetic construct
  source 1..20: mol_type = other DNA
ggatcacgacgtcaacagat

SEQ ID NO: 151255 - DNA, 20 bp, synthetic construct
  source 1..20: mol_type = other DNA
tggatcacgacgtcaacaga

SEQ ID NO: 151256 - DNA, 20 bp, synthetic construct
  source 1..20: mol_type = other DNA
gtggatcacgacgtcaacag

SEQ ID NO: 151257 - DNA, 20 bp, synthetic construct
  source 1..20: mol_type = other DNA
ggtggatcacgacgtcaaca

SEQ ID NO: 151258 - DNA, 20 bp, synthetic construct
  source 1..20: mol_type = other DNA
gggtggatcacgacgtcaac

SEQ ID NO: 151259 - DNA, 20 bp, synthetic construct
  source 1..20: mol_type = other DNA
cgggtggatcacgacgtcaa

SEQ ID NO: 151260 - DNA, 20 bp, synthetic construct
  source 1..20: mol_type = other DNA
gcgggtggatcacgacgtca

SEQ ID NO: 151261 - DNA, 20 bp, synthetic construct
  source 1..20: mol_type = other DNA
ggcgggtggatcacgacgtc

SEQ ID NO: 151262 - DNA, 20 bp, synthetic construct
  source 1..20: mol_type = other DNA
aggcgggtggatcacgacgt

SEQ ID NO: 151263 - DNA, 20 bp, synthetic construct
  source 1..20: mol_type = other DNA
gaggcgggtggatcacgacg

SEQ ID NO: 151264 - DNA, 20 bp, synthetic construct
  source 1..20: mol_type = other DNA
cgaggcgggtggatcacgac

SEQ ID NO: 151265 - DNA, 20 bp, synthetic construct
  source 1..20: mol_type = other DNA
ccgaggcgggtggatcacga

SEQ ID NO: 151266 - DNA, 20 bp, synthetic construct
  source 1..20: mol_type = other DNA
gccgaggcgggtggatcacg

SEQ ID NO: 151267 - DNA, 20 bp, synthetic construct
  source 1..20: mol_type = other DNA
ggccgaggcgggtggatcac

SEQ ID NO: 151268 - DNA, 20 bp, synthetic construct
  source 1..20: mol_type = other DNA
aggccgaggcgggtggatca

SEQ ID NO: 151269 - DNA, 20 bp, synthetic construct
  source 1..20: mol_type = other DNA
gaggccgaggcgggtggatc

SEQ ID NO: 151270 - DNA, 20 bp, synthetic construct
  source 1..20: mol_type = other DNA
ggaggccgaggcgggtggat

SEQ ID NO: 151271 - DNA, 20 bp, synthetic construct
  source 1..20: mol_type = other DNA
gggaggccgaggcgggtgga

SEQ ID NO: 151272 - DNA, 20 bp, synthetic construct
  source 1..20: mol_type = other DNA
tgggaggccgaggcgggtgg

SEQ ID NO: 151273 - DNA, 20 bp, synthetic construct
  source 1..20: mol_type = other DNA
ttgggaggccgaggcgggtg

SEQ ID NO: 151274 - DNA, 20 bp, synthetic construct
  source 1..20: mol_type = other DNA
tttgggaggccgaggcgggt

SEQ ID NO: 151275 - DNA, 20 bp, synthetic construct
  source 1..20: mol_type = other DNA
ctttgggaggccgaggcggg

SEQ ID NO: 151276 - DNA, 20 bp, synthetic construct
  source 1..20: mol_type = other DNA
actttgggaggccgaggcgg

SEQ ID NO: 151277 - DNA, 20 bp, synthetic construct
  source 1..20: mol_type = other DNA
cactttgggaggccgaggcg

SEQ ID NO: 151278 - DNA, 20 bp, synthetic construct
  source 1..20: mol_type = other DNA
gcactttgggaggccgaggc

SEQ ID NO: 151279 - DNA, 20 bp, synthetic construct
  source 1..20: mol_type = other DNA
agcactttgggaggccgagg

SEQ ID NO: 151280 - DNA, 20 bp, synthetic construct
  source 1..20: mol_type = other DNA
cagcactttgggaggccgag

SEQ ID NO: 151281 - DNA, 20 bp, synthetic construct
  source 1..20: mol_type = other DNA
ccagcactttgggaggccga

SEQ ID NO: 151282 - DNA, 20 bp, synthetic construct
  source 1..20: mol_type = other DNA
cccagcactttgggaggccg

SEQ ID NO: 151283 - DNA, 20 bp, synthetic construct
  source 1..20: mol_type = other DNA
tcccagcactttgggaggcc

SEQ ID NO: 151284 - DNA, 20 bp, synthetic construct
  source 1..20: mol_type = other DNA
atcccagcactttgggaggc

SEQ ID NO: 151285 - DNA, 20 bp, synthetic construct
  source 1..20: mol_type = other DNA
aatcccagcactttgggagg

SEQ ID NO: 151286 - DNA, 20 bp, synthetic construct
  source 1..20: mol_type = other DNA
taatcccagcactttgggag

SEQ ID NO: 151287 - DNA, 20 bp, synthetic construct
  source 1..20: mol_type = other DNA
gtaatcccagcactttggga

SEQ ID NO: 151288 - DNA, 20 bp, synthetic construct
  source 1..20: mol_type = other DNA
tgtaatcccagcactttggg

SEQ ID NO: 151289 - DNA, 20 bp, synthetic construct
  source 1..20: mol_type = other DNA
ctgtaatcccagcactttgg

SEQ ID NO: 151290 - DNA, 20 bp, synthetic construct
  source 1..20: mol_type = other DNA
cctgtaatcccagcactttg

SEQ ID NO: 151291 - DNA, 20 bp, synthetic construct
  source 1..20: mol_type = other DNA
gcctgtaatcccagcacttt

SEQ ID NO: 151292 - DNA, 20 bp, synthetic construct
  source 1..20: mol_type = other DNA
cgcctgtaatcccagcactt

SEQ ID NO: 151293 - DNA, 20 bp, synthetic construct
  source 1..20: mol_type = other DNA
acgcctgtaatcccagcact

SEQ ID NO: 151294 - DNA, 20 bp, synthetic construct
  source 1..20: mol_type = other DNA
cacgcctgtaatcccagcac

SEQ ID NO: 151295 - DNA, 20 bp, synthetic construct
  source 1..20: mol_type = other DNA
tcacgcctgtaatcccagca

SEQ ID NO: 151296 - DNA, 20 bp, synthetic construct
  source 1..20: mol_type = other DNA
ctcacgcctgtaatcccagc

SEQ ID NO: 151297 - DNA, 20 bp, synthetic construct
  source 1..20: mol_type = other DNA
gctcacgcctgtaatcccag

SEQ ID NO: 151298 - DNA, 20 bp, synthetic construct
  source 1..20: mol_type = other DNA
ggctcacgcctgtaatccca

SEQ ID NO: 151299 - DNA, 20 bp, synthetic construct
  source 1..20: mol_type = other DNA
tggctcacgcctgtaatccc

SEQ ID NO: 151300 - DNA, 20 bp, synthetic construct
  source 1..20: mol_type = other DNA
gtggctcacgcctgtaatcc

SEQ ID NO: 151301 - DNA, 20 bp, synthetic construct
  source 1..20: mol_type = other DNA
ggtggctcacgcctgtaatc

SEQ ID NO: 151302 - DNA, 20 bp, synthetic construct
  source 1..20: mol_type = other DNA
gggtggctcacgcctgtaat

SEQ ID NO: 151303 - DNA, 20 bp, synthetic construct
  source 1..20: mol_type = other DNA
ggggtggctcacgcctgtaa

SEQ ID NO: 151304 - DNA, 20 bp, synthetic construct
  source 1..20: mol_type = other DNA
cggggtggctcacgcctgta

SEQ ID NO: 151305 - DNA, 20 bp, synthetic construct
  source 1..20: mol_type = other DNA
gcggggtggctcacgcctgt

SEQ ID NO: 151306 - DNA, 20 bp, synthetic construct
  source 1..20: mol_type = other DNA
ggcggggtggctcacgcctg

SEQ ID NO: 151307 - DNA, 20 bp, synthetic construct
  source 1..20: mol_type = other DNA
gggcggggtggctcacgcct

SEQ ID NO: 151308 - DNA, 20 bp, synthetic construct
  source 1..20: mol_type = other DNA
cgggcggggtggctcacgcc

SEQ ID NO: 151309 - DNA, 20 bp, synthetic construct
  source 1..20: mol_type = other DNA
ccgggcggggtggctcacgc

SEQ ID NO: 151310 - DNA, 20 bp, synthetic construct
  source 1..20: mol_type = other DNA
gccgggcggggtggctcacg

SEQ ID NO: 151311 - DNA, 20 bp, synthetic construct
  source 1..20: mol_type = other DNA
ggccgggcggggtggctcac

SEQ ID NO: 151312 - DNA, 20 bp, synthetic construct
  source 1..20: mol_type = other DNA
tggccgggcggggtggctca

SEQ ID NO: 151313 - DNA, 20 bp, synthetic construct
  source 1..20: mol_type = other DNA
gtggccgggcggggtggctc

SEQ ID NO: 151314 - DNA, 20 bp, synthetic construct
  source 1..20: mol_type = other DNA
ggtggccgggcggggtggct

SEQ ID NO: 151315 - DNA, 20 bp, synthetic construct
  source 1..20: mol_type = other DNA
tggtggccgggcggggtggc

SEQ ID NO: 151316 - DNA, 20 bp, synthetic construct
  source 1..20: mol_type = other DNA
ctggtggccgggcggggtgg

SEQ ID NO: 151317 - DNA, 20 bp, synthetic construct
  source 1..20: mol_type = other DNA
actggtggccgggcggggtg

SEQ ID NO: 151318 - DNA, 20 bp, synthetic construct
  source 1..20: mol_type = other DNA
cactggtggccgggcggggt

SEQ ID NO: 151319 - DNA, 20 bp, synthetic construct
  source 1..20: mol_type = other DNA
gcactggtggccgggcgggg

SEQ ID NO: 151320 - DNA, 20 bp, synthetic construct
  source 1..20: mol_type = other DNA
agcactggtggccgggcggg

SEQ ID NO: 151321 - DNA, 20 bp, synthetic construct
  source 1..20: mol_type = other DNA
tagcactggtggccgggcgg

SEQ ID NO: 151322 - DNA, 20 bp, synthetic construct
  source 1..20: mol_type = other DNA
atagcactggtggccgggcg

SEQ ID NO: 151323 - DNA, 20 bp, synthetic construct
  source 1..20: mol_type = other DNA
aatagcactggtggccgggc

SEQ ID NO: 151324 - DNA, 20 bp, synthetic construct
  source 1..20: mol_type = other DNA
gaatagcactggtggccggg

SEQ ID NO: 151325 - DNA, 20 bp, synthetic construct
  source 1..20: mol_type = other DNA
agaatagcactggtggccgg

SEQ ID NO: 151326 - DNA, 20 bp, synthetic construct
  source 1..20: mol_type = other DNA
aagaatagcactggtggccg

SEQ ID NO: 151327 - DNA, 20 bp, synthetic construct
  source 1..20: mol_type = other DNA
taagaatagcactggtggcc

SEQ ID NO: 151328 - DNA, 20 bp, synthetic construct
  source 1..20: mol_type = other DNA
ttaagaatagcactggtggc

SEQ ID NO: 151329 - DNA, 20 bp, synthetic construct
  source 1..20: mol_type = other DNA
cttaagaatagcactggtgg

SEQ ID NO: 151330 - DNA, 20 bp, synthetic construct
  source 1..20: mol_type = other DNA
tcttaagaatagcactggtg

SEQ ID NO: 151331 - DNA, 20 bp, synthetic construct
  source 1..20: mol_type = other DNA
gtcttaagaatagcactggt

SEQ ID NO: 151332 - DNA, 20 bp, synthetic construct
  source 1..20: mol_type = other DNA
cgtcttaagaatagcactgg

SEQ ID NO: 151333 - DNA, 20 bp, synthetic construct
  source 1..20: mol_type = other DNA
gcgtcttaagaatagcactg

SEQ ID NO: 151334 - DNA, 20 bp, synthetic construct
  source 1..20: mol_type = other DNA
ggcgtcttaagaatagcact

SEQ ID NO: 151335 - DNA, 20 bp, synthetic construct
  source 1..20: mol_type = other DNA
aggcgtcttaagaatagcac

SEQ ID NO: 151336 - DNA, 20 bp, synthetic construct
  source 1..20: mol_type = other DNA
gaggcgtcttaagaatagca

SEQ ID NO: 151337 - DNA, 20 bp, synthetic construct
  source 1..20: mol_type = other DNA
agaggcgtcttaagaatagc

SEQ ID NO: 151338 - DNA, 20 bp, synthetic construct
  source 1..20: mol_type = other DNA
cagaggcgtcttaagaatag

SEQ ID NO: 151339 - DNA, 20 bp, synthetic construct
  source 1..20: mol_type = other DNA
tcagaggcgtcttaagaata

SEQ ID NO: 151340 - DNA, 20 bp, synthetic construct
  source 1..20: mol_type = other DNA
ctcagaggcgtcttaagaat

SEQ ID NO: 151341 - DNA, 20 bp, synthetic construct
  source 1..20: mol_type = other DNA
cctcagaggcgtcttaagaa

SEQ ID NO: 151342 - DNA, 20 bp, synthetic construct
  source 1..20: mol_type = other DNA
tcctcagaggcgtcttaaga

SEQ ID NO: 151343 - DNA, 20 bp, synthetic construct
  source 1..20: mol_type = other DNA
ttcctcagaggcgtcttaag

SEQ ID NO: 151344 - DNA, 20 bp, synthetic construct
  source 1..20: mol_type = other DNA
attcctcagaggcgtcttaa

SEQ ID NO: 151345 - DNA, 20 bp, synthetic construct
  source 1..20: mol_type = other DNA
gattcctcagaggcgtctta

SEQ ID NO: 151346 - DNA, 20 bp, synthetic construct
  source 1..20: mol_type = other DNA
ggattcctcagaggcgtctt

SEQ ID NO: 151347 - DNA, 20 bp, synthetic construct
  source 1..20: mol_type = other DNA
gggattcctcagaggcgtct

SEQ ID NO: 151348 - DNA, 20 bp, synthetic construct
  source 1..20: mol_type = other DNA
agggattcctcagaggcgtc

SEQ ID NO: 151349 - DNA, 20 bp, synthetic construct
  source 1..20: mol_type = other DNA
aagggattcctcagaggcgt

SEQ ID NO: 151350 - DNA, 20 bp, synthetic construct
  source 1..20: mol_type = other DNA
gaagggattcctcagaggcg

SEQ ID NO: 151351 - DNA, 20 bp, synthetic construct
  source 1..20: mol_type = other DNA
agaagggattcctcagaggc

SEQ ID NO: 151352 - DNA, 20 bp, synthetic construct
  source 1..20: mol_type = other DNA
gagaagggattcctcagagg

SEQ ID NO: 151353 - DNA, 20 bp, synthetic construct
  source 1..20: mol_type = other DNA
ggagaagggattcctcagag

SEQ ID NO: 151354 - DNA, 20 bp, synthetic construct
  source 1..20: mol_type = other DNA
gggagaagggattcctcaga

SEQ ID NO: 151355 - DNA, 20 bp, synthetic construct
  source 1..20: mol_type = other DNA
agggagaagggattcctcag

SEQ ID NO: 151356 - DNA, 20 bp, synthetic construct
  source 1..20: mol_type = other DNA
cagggagaagggattcctca

SEQ ID NO: 151357 - DNA, 20 bp, synthetic construct
  source 1..20: mol_type = other DNA
ccagggagaagggattcctc

SEQ ID NO: 151358 - DNA, 20 bp, synthetic construct
  source 1..20: mol_type = other DNA
gccagggagaagggattcct

SEQ ID NO: 151359 - DNA, 20 bp, synthetic construct
  source 1..20: mol_type = other DNA
ggccagggagaagggattcc

SEQ ID NO: 151360 - DNA, 20 bp, synthetic construct
  source 1..20: mol_type = other DNA
tggccagggagaagggattc

SEQ ID NO: 151361 - DNA, 20 bp, synthetic construct
  source 1..20: mol_type = other DNA
atggccagggagaagggatt

SEQ ID NO: 151362 - DNA, 20 bp, synthetic construct
  source 1..20: mol_type = other DNA
aatggccagggagaagggat

SEQ ID NO: 151363 - DNA, 20 bp, synthetic construct
  source 1..20: mol_type = other DNA
caatggccagggagaaggga

SEQ ID NO: 151364 - DNA, 20 bp, synthetic construct
  source 1..20: mol_type = other DNA
tcaatggccagggagaaggg

SEQ ID NO: 151365 - DNA, 20 bp, synthetic construct
  source 1..20: mol_type = other DNA
ctcaatggccagggagaagg

SEQ ID NO: 151366 - DNA, 20 bp, synthetic construct
  source 1..20: mol_type = other DNA
tctcaatggccagggagaag

SEQ ID NO: 151367 - DNA, 20 bp, synthetic construct
  source 1..20: mol_type = other DNA
ttctcaatggccagggagaa

SEQ ID NO: 151368 - DNA, 20 bp, synthetic construct
  source 1..20: mol_type = other DNA
attctcaatggccagggaga

SEQ ID NO: 151369 - DNA, 20 bp, synthetic construct
  source 1..20: mol_type = other DNA
gattctcaatggccagggag

SEQ ID NO: 151370 - DNA, 20 bp, synthetic construct
  source 1..20: mol_type = other DNA
ggattctcaatggccaggga

SEQ ID NO: 151371 - DNA, 20 bp, synthetic construct
  source 1..20: mol_type = other DNA
tggattctcaatggccaggg

SEQ ID NO: 151372 - DNA, 20 bp, synthetic construct
  source 1..20: mol_type = other DNA
atggattctcaatggccagg

SEQ ID NO: 151373 - DNA, 20 bp, synthetic construct
  source 1..20: mol_type = other DNA
catggattctcaatggccag

SEQ ID NO: 151374 - DNA, 20 bp, synthetic construct
  source 1..20: mol_type = other DNA
gcatggattctcaatggcca

SEQ ID NO: 151375 - DNA, 20 bp, synthetic construct
  source 1..20: mol_type = other DNA
tgcatggattctcaatggcc

SEQ ID NO: 151376 - DNA, 20 bp, synthetic construct
  source 1..20: mol_type = other DNA
atgcatggattctcaatggc

SEQ ID NO: 151377 - DNA, 20 bp, synthetic construct
  source 1..20: mol_type = other DNA
catgcatggattctcaatgg

SEQ ID NO: 151378 - DNA, 20 bp, synthetic construct
  source 1..20: mol_type = other DNA
tcatgcatggattctcaatg

SEQ ID NO: 151379 - DNA, 20 bp, synthetic construct
  source 1..20: mol_type = other DNA
ttcatgcatggattctcaat

SEQ ID NO: 151380 - DNA, 20 bp, synthetic construct
  source 1..20: mol_type = other DNA
gttcatgcatggattctcaa

SEQ ID NO: 151381 - DNA, 20 bp, synthetic construct
  source 1..20: mol_type = other DNA
ggttcatgcatggattctca

SEQ ID NO: 151382 - DNA, 20 bp, synthetic construct
  source 1..20: mol_type = other DNA
gggttcatgcatggattctc

SEQ ID NO: 151383 - DNA, 20 bp, synthetic construct
  source 1..20: mol_type = other DNA
tgggttcatgcatggattct

SEQ ID NO: 151384 - DNA, 20 bp, synthetic construct
  source 1..20: mol_type = other DNA
ctgggttcatgcatggattc

SEQ ID NO: 151385 - DNA, 20 bp, synthetic construct
  source 1..20: mol_type = other DNA
cctgggttcatgcatggatt

SEQ ID NO: 151386 - DNA, 20 bp, synthetic construct
  source 1..20: mol_type = other DNA
acctgggttcatgcatggat

SEQ ID NO: 151387 - DNA, 20 bp, synthetic construct
  source 1..20: mol_type = other DNA
aacctgggttcatgcatgga

SEQ ID NO: 151388 - DNA, 20 bp, synthetic construct
  source 1..20: mol_type = other DNA
aaacctgggttcatgcatgg

SEQ ID NO: 151389 - DNA, 20 bp, synthetic construct
  source 1..20: mol_type = other DNA
aaaacctgggttcatgcatg

SEQ ID NO: 151390 - DNA, 20 bp, synthetic construct
  source 1..20: mol_type = other DNA
gaaaacctgggttcatgcat

SEQ ID NO: 151391 - DNA, 20 bp, synthetic construct
  source 1..20: mol_type = other DNA
ggaaaacctgggttcatgca

SEQ ID NO: 151392 - DNA, 20 bp, synthetic construct
  source 1..20: mol_type = other DNA
tggaaaacctgggttcatgc

SEQ ID NO: 151393 - DNA, 20 bp, synthetic construct
  source 1..20: mol_type = other DNA
gtggaaaacctgggttcatg

SEQ ID NO: 151394 - DNA, 20 bp, synthetic construct
  source 1..20: mol_type = other DNA
ggtggaaaacctgggttcat

SEQ ID NO: 151395 - DNA, 20 bp, synthetic construct
  source 1..20: mol_type = other DNA
aggtggaaaacctgggttca

SEQ ID NO: 151396 - DNA, 20 bp, synthetic construct
  source 1..20: mol_type = other DNA
aaggtggaaaacctgggttc

SEQ ID NO: 151397 - DNA, 20 bp, synthetic construct
  source 1..20: mol_type = other DNA
gaaggtggaaaacctgggtt

SEQ ID NO: 151398 - DNA, 20 bp, synthetic construct
  source 1..20: mol_type = other DNA
ggaaggtggaaaacctgggt

SEQ ID NO: 151399 - DNA, 20 bp, synthetic construct
  source 1..20: mol_type = other DNA
gggaaggtggaaaacctggg

SEQ ID NO: 151400 - DNA, 20 bp, synthetic construct
  source 1..20: mol_type = other DNA
agggaaggtggaaaacctgg

SEQ ID NO: 151401 - DNA, 20 bp, synthetic construct
  source 1..20: mol_type = other DNA
cagggaaggtggaaaacctg

SEQ ID NO: 151402 - DNA, 20 bp, synthetic construct
  source 1..20: mol_type = other DNA
tcagggaaggtggaaaacct

SEQ ID NO: 151403 - DNA, 20 bp, synthetic construct
  source 1..20: mol_type = other DNA
ctcagggaaggtggaaaacc

SEQ ID NO: 151404 - DNA, 20 bp, synthetic construct
  source 1..20: mol_type = other DNA
gctcagggaaggtggaaaac

SEQ ID NO: 151405 - DNA, 20 bp, synthetic construct
  source 1..20: mol_type = other DNA
tgctcagggaaggtggaaaa

SEQ ID NO: 151406 - DNA, 20 bp, synthetic construct
  source 1..20: mol_type = other DNA
ctgctcagggaaggtggaaa

SEQ ID NO: 151407 - DNA, 20 bp, synthetic construct
  source 1..20: mol_type = other DNA
gctgctcagggaaggtggaa

SEQ ID NO: 151408 - DNA, 20 bp, synthetic construct
  source 1..20: mol_type = other DNA
agctgctcagggaaggtgga

SEQ ID NO: 151409 - DNA, 20 bp, synthetic construct
  source 1..20: mol_type = other DNA
aagctgctcagggaaggtgg

SEQ ID NO: 151410 - DNA, 20 bp, synthetic construct
  source 1..20: mol_type = other DNA
caagctgctcagggaaggtg

SEQ ID NO: 151411 - DNA, 20 bp, synthetic construct
  source 1..20: mol_type = other DNA
gcaagctgctcagggaaggt

SEQ ID NO: 151412 - DNA, 20 bp, synthetic construct
  source 1..20: mol_type = other DNA
tgcaagctgctcagggaagg

SEQ ID NO: 151413 - DNA, 20 bp, synthetic construct
  source 1..20: mol_type = other DNA
atgcaagctgctcagggaag

SEQ ID NO: 151414 - DNA, 20 bp, synthetic construct
  source 1..20: mol_type = other DNA
tatgcaagctgctcagggaa

SEQ ID NO: 151415 - DNA, 20 bp, synthetic construct
  source 1..20: mol_type = other DNA
ctatgcaagctgctcaggga

SEQ ID NO: 151416 - DNA, 20 bp, synthetic construct
  source 1..20: mol_type = other DNA
actatgcaagctgctcaggg

SEQ ID NO: 151417 - DNA, 20 bp, synthetic construct
  source 1..20: mol_type = other DNA
aactatgcaagctgctcagg

SEQ ID NO: 151418 - DNA, 20 bp, synthetic construct
  source 1..20: mol_type = other DNA
gaactatgcaagctgctcag

SEQ ID NO: 151419 - DNA, 20 bp, synthetic construct
  source 1..20: mol_type = other DNA
ggaactatgcaagctgctca

SEQ ID NO: 151420 - DNA, 20 bp, synthetic construct
  source 1..20: mol_type = other DNA
aggaactatgcaagctgctc

SEQ ID NO: 151421 - DNA, 20 bp, synthetic construct
  source 1..20: mol_type = other DNA
aaggaactatgcaagctgct

SEQ ID NO: 151422 - DNA, 20 bp, synthetic construct
  source 1..20: mol_type = other DNA
gaaggaactatgcaagctgc

SEQ ID NO: 151423 - DNA, 20 bp, synthetic construct
  source 1..20: mol_type = other DNA
agaaggaactatgcaagctg

SEQ ID NO: 151424 - DNA, 20 bp, synthetic construct
  source 1..20: mol_type = other DNA
aagaaggaactatgcaagct

SEQ ID NO: 151425 - DNA, 20 bp, synthetic construct
  source 1..20: mol_type = other DNA
aaagaaggaactatgcaagc

SEQ ID NO: 151426 - DNA, 20 bp, synthetic construct
  source 1..20: mol_type = other DNA
aaaagaaggaactatgcaag

SEQ ID NO: 151427 - DNA, 20 bp, synthetic construct
  source 1..20: mol_type = other DNA
taaaagaaggaactatgcaa

SEQ ID NO: 151428 - DNA, 20 bp, synthetic construct
  source 1..20: mol_type = other DNA
ttaaaagaaggaactatgca

SEQ ID NO: 151429 - DNA, 20 bp, synthetic construct
  source 1..20: mol_type = other DNA
cttaaaagaaggaactatgc

SEQ ID NO: 151430 - DNA, 20 bp, synthetic construct
  source 1..20: mol_type = other DNA
gcttaaaagaaggaactatg

SEQ ID NO: 151431 - DNA, 20 bp, synthetic construct
  source 1..20: mol_type = other DNA
cgcttaaaagaaggaactat

SEQ ID NO: 151432 - DNA, 20 bp, synthetic construct
  source 1..20: mol_type = other DNA
gcgcttaaaagaaggaacta

SEQ ID NO: 151433 - DNA, 20 bp, synthetic construct
  source 1..20: mol_type = other DNA
ggcgcttaaaagaaggaact

SEQ ID NO: 151434 - DNA, 20 bp, synthetic construct
  source 1..20: mol_type = other DNA
aggcgcttaaaagaaggaac

SEQ ID NO: 151435 - DNA, 20 bp, synthetic construct
  source 1..20: mol_type = other DNA
caggcgcttaaaagaaggaa

SEQ ID NO: 151436 - DNA, 20 bp, synthetic construct
  source 1..20: mol_type = other DNA
tcaggcgcttaaaagaagga

SEQ ID NO: 151437 - DNA, 20 bp, synthetic construct
  source 1..20: mol_type = other DNA
gtcaggcgcttaaaagaagg

SEQ ID NO: 151438 - DNA, 20 bp, synthetic construct
  source 1..20: mol_type = other DNA
agtcaggcgcttaaaagaag

SEQ ID NO: 151439 - DNA, 20 bp, synthetic construct
  source 1..20: mol_type = other DNA
aagtcaggcgcttaaaagaa

SEQ ID NO: 151440 - DNA, 20 bp, synthetic construct
  source 1..20: mol_type = other DNA
gaagtcaggcgcttaaaaga

SEQ ID NO: 151441 - DNA, 20 bp, synthetic construct
  source 1..20: mol_type = other DNA
cgaagtcaggcgcttaaaag

SEQ ID NO: 151442 - DNA, 20 bp, synthetic construct
  source 1..20: mol_type = other DNA
acgaagtcaggcgcttaaaa

SEQ ID NO: 151443 - DNA, 20 bp, synthetic construct
  source 1..20: mol_type = other DNA
aacgaagtcaggcgcttaaa

SEQ ID NO: 151444 - DNA, 20 bp, synthetic construct
  source 1..20: mol_type = other DNA
aaacgaagtcaggcgcttaa

SEQ ID NO: 151445 - DNA, 20 bp, synthetic construct
  source 1..20: mol_type = other DNA
aaaacgaagtcaggcgctta

SEQ ID NO: 151446 - DNA, 20 bp, synthetic construct
  source 1..20: mol_type = other DNA
caaaacgaagtcaggcgctt

SEQ ID NO: 151447 - DNA, 20 bp, synthetic construct
  source 1..20: mol_type = other DNA
acaaaacgaagtcaggcgct

SEQ ID NO: 151448 - DNA, 20 bp, synthetic construct
  source 1..20: mol_type = other DNA
aacaaaacgaagtcaggcgc

SEQ ID NO: 151449 - DNA, 20 bp, synthetic construct
  source 1..20: mol_type = other DNA
aaacaaaacgaagtcaggcg

SEQ ID NO: 151450 - DNA, 20 bp, synthetic construct
  source 1..20: mol_type = other DNA
caaacaaaacgaagtcaggc

SEQ ID NO: 151451 - DNA, 20 bp, synthetic construct
  source 1..20: mol_type = other DNA
ccaaacaaaacgaagtcagg

SEQ ID NO: 151452 - DNA, 20 bp, synthetic construct
  source 1..20: mol_type = other DNA
accaaacaaaacgaagtcag

SEQ ID NO: 151453 - DNA, 20 bp, synthetic construct
  source 1..20: mol_type = other DNA
caccaaacaaaacgaagtca

SEQ ID NO: 151454 - DNA, 20 bp, synthetic construct
  source 1..20: mol_type = other DNA
gcaccaaacaaaacgaagtc

SEQ ID NO: 151455 - DNA, 20 bp, synthetic construct
  source 1..20: mol_type = other DNA
ggcaccaaacaaaacgaagt

SEQ ID NO: 151456 - DNA, 20 bp, synthetic construct
  source 1..20: mol_type = other DNA
gggcaccaaacaaaacgaag

SEQ ID NO: 151457 - DNA, 20 bp, synthetic construct
  source 1..20: mol_type = other DNA
cgggcaccaaacaaaacgaa

SEQ ID NO: 151458 - DNA, 20 bp, synthetic construct
  source 1..20: mol_type = other DNA
acgggcaccaaacaaaacga

SEQ ID NO: 151459 - DNA, 20 bp, synthetic construct
  source 1..20: mol_type = other DNA
aacgggcaccaaacaaaacg

SEQ ID NO: 151460 - DNA, 20 bp, synthetic construct
  source 1..20: mol_type = other DNA
caacgggcaccaaacaaaac

SEQ ID NO: 151461 - DNA, 20 bp, synthetic construct
  source 1..20: mol_type = other DNA
acaacgggcaccaaacaaaa

SEQ ID NO: 151462 - DNA, 20 bp, synthetic construct
  source 1..20: mol_type = other DNA
tacaacgggcaccaaacaaa

SEQ ID NO: 151463 - DNA, 20 bp, synthetic construct
  source 1..20: mol_type = other DNA
gtacaacgggcaccaaacaa

SEQ ID NO: 151464 - DNA, 20 bp, synthetic construct
  source 1..20: mol_type = other DNA
ggtacaacgggcaccaaaca

SEQ ID NO: 151465 - DNA, 20 bp, synthetic construct
  source 1..20: mol_type = other DNA
aggtacaacgggcaccaaac

SEQ ID NO: 151466 - DNA, 20 bp, synthetic construct
  source 1..20: mol_type = other DNA
caggtacaacgggcaccaaa

SEQ ID NO: 151467 - DNA, 20 bp, synthetic construct
  source 1..20: mol_type = other DNA
tcaggtacaacgggcaccaa

SEQ ID NO: 151468 - DNA, 20 bp, synthetic construct
  source 1..20: mol_type = other DNA
ctcaggtacaacgggcacca

SEQ ID NO: 151469 - DNA, 20 bp, synthetic construct
  source 1..20: mol_type = other DNA
tctcaggtacaacgggcacc

SEQ ID NO: 151470 - DNA, 20 bp, synthetic construct
  source 1..20: mol_type = other DNA
ttctcaggtacaacgggcac

SEQ ID NO: 151471 - DNA, 20 bp, synthetic construct
  source 1..20: mol_type = other DNA
attctcaggtacaacgggca

SEQ ID NO: 151472 - DNA, 20 bp, synthetic construct
  source 1..20: mol_type = other DNA
cattctcaggtacaacgggc

SEQ ID NO: 151473 - DNA, 20 bp, synthetic construct
  source 1..20: mol_type = other DNA
tcattctcaggtacaacggg

SEQ ID NO: 151474 - DNA, 20 bp, synthetic construct
  source 1..20: mol_type = other DNA
ctcattctcaggtacaacgg

SEQ ID NO: 151475 - DNA, 20 bp, synthetic construct
  source 1..20: mol_type = other DNA
gctcattctcaggtacaacg

SEQ ID NO: 151476 - DNA, 20 bp, synthetic construct
  source 1..20: mol_type = other DNA
ggctcattctcaggtacaac

SEQ ID NO: 151477 - DNA, 20 bp, synthetic construct
  source 1..20: mol_type = other DNA
aggctcattctcaggtacaa

SEQ ID NO: 151478 - DNA, 20 bp, synthetic construct
  source 1..20: mol_type = other DNA
aaggctcattctcaggtaca

SEQ ID NO: 151479 - DNA, 20 bp, synthetic construct
  source 1..20: mol_type = other DNA
caaggctcattctcaggtac

SEQ ID NO: 151480 - DNA, 20 bp, synthetic construct
  source 1..20: mol_type = other DNA
ccaaggctcattctcaggta

SEQ ID NO: 151481 - DNA, 20 bp, synthetic construct
  source 1..20: mol_type = other DNA
tccaaggctcattctcaggt

SEQ ID NO: 151482 - DNA, 20 bp, synthetic construct
  source 1..20: mol_type = other DNA
atccaaggctcattctcagg

SEQ ID NO: 151483 - DNA, 20 bp, synthetic construct
  source 1..20: mol_type = other DNA
tatccaaggctcattctcag

SEQ ID NO: 151484 - DNA, 20 bp, synthetic construct
  source 1..20: mol_type = other DNA
ctatccaaggctcattctca

SEQ ID NO: 151485 - DNA, 20 bp, synthetic construct
  source 1..20: mol_type = other DNA
actatccaaggctcattctc

SEQ ID NO: 151486 - DNA, 20 bp, synthetic construct
  source 1..20: mol_type = other DNA
cactatccaaggctcattct

SEQ ID NO: 151487 - DNA, 20 bp, synthetic construct
  source 1..20: mol_type = other DNA
ccactatccaaggctcattc

SEQ ID NO: 151488 - DNA, 20 bp, synthetic construct
  source 1..20: mol_type = other DNA
tccactatccaaggctcatt

SEQ ID NO: 151489 - DNA, 20 bp, synthetic construct
  source 1..20: mol_type = other DNA
ctccactatccaaggctcat

SEQ ID NO: 151490 - DNA, 20 bp, synthetic construct
  source 1..20: mol_type = other DNA
gctccactatccaaggctca

SEQ ID NO: 151491 - DNA, 20 bp, synthetic construct
  source 1..20: mol_type = other DNA
tgctccactatccaaggctc

SEQ ID NO: 151492 - DNA, 20 bp, synthetic construct
  source 1..20: mol_type = other DNA
atgctccactatccaaggct

SEQ ID NO: 151493 - DNA, 20 bp, synthetic construct
  source 1..20: mol_type = other DNA
aatgctccactatccaaggc

SEQ ID NO: 151494 - DNA, 20 bp, synthetic construct
  source 1..20: mol_type = other DNA
gaatgctccactatccaagg

SEQ ID NO: 151495 - DNA, 20 bp, synthetic construct
  source 1..20: mol_type = other DNA
ggaatgctccactatccaag

SEQ ID NO: 151496 - DNA, 20 bp, synthetic construct
  source 1..20: mol_type = other DNA
tggaatgctccactatccaa

SEQ ID NO: 151497 - DNA, 20 bp, synthetic construct
  source 1..20: mol_type = other DNA
ctggaatgctccactatcca

SEQ ID NO: 151498 - DNA, 20 bp, synthetic construct
  source 1..20: mol_type = other DNA
gctggaatgctccactatcc

SEQ ID NO: 151499 - DNA, 20 bp, synthetic construct
  source 1..20: mol_type = other DNA
agctggaatgctccactatc

SEQ ID NO: 151500 - DNA, 20 bp, synthetic construct
  source 1..20: mol_type = other DNA
aagctggaatgctccactat

SEQ ID NO: 151501 - DNA, 20 bp, synthetic construct
  source 1..20: mol_type = other DNA
aaagctggaatgctccacta

SEQ ID NO: 151502 - DNA, 20 bp, synthetic construct
  source 1..20: mol_type = other DNA
gaaagctggaatgctccact

SEQ ID NO: 151503 - DNA, 20 bp, synthetic construct
  source 1..20: mol_type = other DNA
ggaaagctggaatgctccac

SEQ ID NO: 151504 - DNA, 20 bp, synthetic construct
  source 1..20: mol_type = other DNA
tggaaagctggaatgctcca

SEQ ID NO: 151505 - DNA, 20 bp, synthetic construct
  source 1..20: mol_type = other DNA
ctggaaagctggaatgctcc

SEQ ID NO: 151506 - DNA, 20 bp, synthetic construct
  source 1..20: mol_type = other DNA
tctggaaagctggaatgctc

SEQ ID NO: 151507 - DNA, 20 bp, synthetic construct
  source 1..20: mol_type = other DNA
atctggaaagctggaatgct

SEQ ID NO: 151508 - DNA, 20 bp, synthetic construct
  source 1..20: mol_type = other DNA
tatctggaaagctggaatgc

SEQ ID NO: 151509 - DNA, 20 bp, synthetic construct
  source 1..20: mol_type = other DNA
atatctggaaagctggaatg

SEQ ID NO: 151510 - DNA, 20 bp, synthetic construct
  source 1..20: mol_type = other DNA
catatctggaaagctggaat

SEQ ID NO: 151511 - DNA, 20 bp, synthetic construct
  source 1..20: mol_type = other DNA
gcatatctggaaagctggaa

SEQ ID NO: 151512 - DNA, 20 bp, synthetic construct
  source 1..20: mol_type = other DNA
tgcatatctggaaagctgga

SEQ ID NO: 151513 - DNA, 20 bp, synthetic construct
  source 1..20: mol_type = other DNA
ctgcatatctggaaagctgg

SEQ ID NO: 151514 - DNA, 20 bp, synthetic construct
  source 1..20: mol_type = other DNA
tctgcatatctggaaagctg

SEQ ID NO: 151515 - DNA, 20 bp, synthetic construct
  source 1..20: mol_type = other DNA
ctctgcatatctggaaagct

SEQ ID NO: 151516 - DNA, 20 bp, synthetic construct
  source 1..20: mol_type = other DNA
tctctgcatatctggaaagc

SEQ ID NO: 151517 - DNA, 20 bp, synthetic construct
  source 1..20: mol_type = other DNA
atctctgcatatctggaaag

SEQ ID NO: 151518 - DNA, 20 bp, synthetic construct
  source 1..20: mol_type = other DNA
tatctctgcatatctggaaa

SEQ ID NO: 151519 - DNA, 20 bp, synthetic construct
  source 1..20: mol_type = other DNA
ttatctctgcatatctggaa

SEQ ID NO: 151520 - DNA, 20 bp, synthetic construct
  source 1..20: mol_type = other DNA
attatctctgcatatctgga

SEQ ID NO: 151521 - DNA, 20 bp, synthetic construct
  source 1..20: mol_type = other DNA
tattatctctgcatatctgg

SEQ ID NO: 151522 - DNA, 20 bp, synthetic construct
  source 1..20: mol_type = other DNA
gtattatctctgcatatctg

SEQ ID NO: 151523 - DNA, 20 bp, synthetic construct
  source 1..20: mol_type = other DNA
tgtattatctctgcatatct

SEQ ID NO: 151524 - DNA, 20 bp, synthetic construct
  source 1..20: mol_type = other DNA
atgtattatctctgcatatc

SEQ ID NO: 151525 - DNA, 20 bp, synthetic construct
  source 1..20: mol_type = other DNA
aatgtattatctctgcatat

SEQ ID NO: 151526 - DNA, 20 bp, synthetic construct
  source 1..20: mol_type = other DNA
caatgtattatctctgcata

SEQ ID NO: 151527 - DNA, 20 bp, synthetic construct
  source 1..20: mol_type = other DNA
ccaatgtattatctctgcat

SEQ ID NO: 151528 - DNA, 20 bp, synthetic construct
  source 1..20: mol_type = other DNA
gccaatgtattatctctgca

SEQ ID NO: 151529 - DNA, 20 bp, synthetic construct
  source 1..20: mol_type = other DNA
agccaatgtattatctctgc

SEQ ID NO: 151530 - DNA, 20 bp, synthetic construct
  source 1..20: mol_type = other DNA
tagccaatgtattatctctg

SEQ ID NO: 151531 - DNA, 20 bp, synthetic construct
  source 1..20: mol_type = other DNA
atagccaatgtattatctct

SEQ ID NO: 151532 - DNA, 20 bp, synthetic construct
  source 1..20: mol_type = other DNA
gatagccaatgtattatctc

SEQ ID NO: 151533 - DNA, 20 bp, synthetic construct
  source 1..20: mol_type = other DNA
tgatagccaatgtattatct

SEQ ID NO: 151534 - DNA, 20 bp, synthetic construct
  source 1..20: mol_type = other DNA
ctgatagccaatgtattatc

SEQ ID NO: 151535 - DNA, 20 bp, synthetic construct
  source 1..20: mol_type = other DNA
gctgatagccaatgtattat

SEQ ID NO: 151536 - DNA, 20 bp, synthetic construct
  source 1..20: mol_type = other DNA
agctgatagccaatgtatta

SEQ ID NO: 151537 - DNA, 20 bp, synthetic construct
  source 1..20: mol_type = other DNA
tagctgatagccaatgtatt

SEQ ID NO: 151538 - DNA, 20 bp, synthetic construct
  source 1..20: mol_type = other DNA
gtagctgatagccaatgtat

SEQ ID NO: 151539 - DNA, 20 bp, synthetic construct
  source 1..20: mol_type = other DNA
agtagctgatagccaatgta

SEQ ID NO: 151540 - DNA, 20 bp, synthetic construct
  source 1..20: mol_type = other DNA
aagtagctgatagccaatgt

SEQ ID NO: 151541 - DNA, 20 bp, synthetic construct
  source 1..20: mol_type = other DNA
caagtagctgatagccaatg

SEQ ID NO: 151542 - DNA, 20 bp, synthetic construct
  source 1..20: mol_type = other DNA
ccaagtagctgatagccaat

SEQ ID NO: 151543 - DNA, 20 bp, synthetic construct
  source 1..20: mol_type = other DNA
gccaagtagctgatagccaa

SEQ ID NO: 151544 - DNA, 20 bp, synthetic construct
  source 1..20: mol_type = other DNA
agccaagtagctgatagcca

SEQ ID NO: 151545 - DNA, 20 bp, synthetic construct
  source 1..20: mol_type = other DNA
aagccaagtagctgatagcc

SEQ ID NO: 151546 - DNA, 20 bp, synthetic construct
  source 1..20: mol_type = other DNA
caagccaagtagctgatagc

SEQ ID NO: 151547 - DNA, 20 bp, synthetic construct
  source 1..20: mol_type = other DNA
ccaagccaagtagctgatag

SEQ ID NO: 151548 - DNA, 20 bp, synthetic construct
  source 1..20: mol_type = other DNA
gccaagccaagtagctgata

SEQ ID NO: 151549 - DNA, 20 bp, synthetic construct
  source 1..20: mol_type = other DNA
ggccaagccaagtagctgat

SEQ ID NO: 151550 - DNA, 20 bp, synthetic construct
  source 1..20: mol_type = other DNA
aggccaagccaagtagctga

SEQ ID NO: 151551 - DNA, 20 bp, synthetic construct
  source 1..20: mol_type = other DNA
taggccaagccaagtagctg

SEQ ID NO: 151552 - DNA, 20 bp, synthetic construct
  source 1..20: mol_type = other DNA
ataggccaagccaagtagct

SEQ ID NO: 151553 - DNA, 20 bp, synthetic construct
  source 1..20: mol_type = other DNA
aataggccaagccaagtagc

SEQ ID NO: 151554 - DNA, 20 bp, synthetic construct
  source 1..20: mol_type = other DNA
gaataggccaagccaagtag

SEQ ID NO: 151555 - DNA, 20 bp, synthetic construct
  source 1..20: mol_type = other DNA
ggaataggccaagccaagta

SEQ ID NO: 151556 - DNA, 20 bp, synthetic construct
  source 1..20: mol_type = other DNA
cggaataggccaagccaagt

SEQ ID NO: 151557 - DNA, 20 bp, synthetic construct
  source 1..20: mol_type = other DNA
acggaataggccaagccaag

SEQ ID NO: 151558 - DNA, 20 bp, synthetic construct
  source 1..20: mol_type = other DNA
cacggaataggccaagccaa

SEQ ID NO: 151559 - DNA, 20 bp, synthetic construct
  source 1..20: mol_type = other DNA
acacggaataggccaagcca

SEQ ID NO: 151560 - DNA, 20 bp, synthetic construct
  source 1..20: mol_type = other DNA
aacacggaataggccaagcc

SEQ ID NO: 151561 - DNA, 20 bp, synthetic construct
  source 1..20: mol_type = other DNA
aaacacggaataggccaagc

SEQ ID NO: 151562 - DNA, 20 bp, synthetic construct
  source 1..20: mol_type = other DNA
taaacacggaataggccaag

SEQ ID NO: 151563 - DNA, 20 bp, synthetic construct
  source 1..20: mol_type = other DNA
ttaaacacggaataggccaa

SEQ ID NO: 151564 - DNA, 20 bp, synthetic construct
  source 1..20: mol_type = other DNA
tttaaacacggaataggcca

SEQ ID NO: 151565 - DNA, 20 bp, synthetic construct
  source 1..20: mol_type = other DNA
ttttaaacacggaataggcc

SEQ ID NO: 151566 - DNA, 20 bp, synthetic construct
  source 1..20: mol_type = other DNA
attttaaacacggaataggc

SEQ ID NO: 151567 - DNA, 20 bp, synthetic construct
  source 1..20: mol_type = other DNA
gattttaaacacggaatagg

SEQ ID NO: 151568 - DNA, 20 bp, synthetic construct
  source 1..20: mol_type = other DNA
agattttaaacacggaatag

SEQ ID NO: 151569 - DNA, 20 bp, synthetic construct
  source 1..20: mol_type = other DNA
aagattttaaacacggaata

SEQ ID NO: 151570 - DNA, 20 bp, synthetic construct
  source 1..20: mol_type = other DNA
caagattttaaacacggaat

SEQ ID NO: 151571 - DNA, 20 bp, synthetic construct
  source 1..20: mol_type = other DNA
ccaagattttaaacacggaa

SEQ ID NO: 151572 - DNA, 20 bp, synthetic construct
  source 1..20: mol_type = other DNA
tccaagattttaaacacgga

SEQ ID NO: 151573 - DNA, 20 bp, synthetic construct
  source 1..20: mol_type = other DNA
gtccaagattttaaacacgg

SEQ ID NO: 151574 - DNA, 20 bp, synthetic construct
  source 1..20: mol_type = other DNA
agtccaagattttaaacacg

SEQ ID NO: 151575 - DNA, 20 bp, synthetic construct
  source 1..20: mol_type = other DNA
gagtccaagattttaaacac

SEQ ID NO: 151576 - DNA, 20 bp, synthetic construct
  source 1..20: mol_type = other DNA
agagtccaagattttaaaca

SEQ ID NO: 151577 - DNA, 20 bp, synthetic construct
  source 1..20: mol_type = other DNA
aagagtccaagattttaaac

SEQ ID NO: 151578 - DNA, 20 bp, synthetic construct
  source 1..20: mol_type = other DNA
aaagagtccaagattttaaa

SEQ ID NO: 151579 - DNA, 20 bp, synthetic construct
  source 1..20: mol_type = other DNA
caaagagtccaagattttaa

SEQ ID NO: 151580 - DNA, 20 bp, synthetic construct
  source 1..20: mol_type = other DNA
gcaaagagtccaagatttta

SEQ ID NO: 151581 - DNA, 20 bp, synthetic construct
  source 1..20: mol_type = other DNA
agcaaagagtccaagatttt

SEQ ID NO: 151582 - DNA, 20 bp, synthetic construct
  source 1..20: mol_type = other DNA
tagcaaagagtccaagattt

SEQ ID NO: 151583 - DNA, 20 bp, synthetic construct
  source 1..20: mol_type = other DNA
ctagcaaagagtccaagatt

SEQ ID NO: 151584 - DNA, 20 bp, synthetic construct
  source 1..20: mol_type = other DNA
actagcaaagagtccaagat

SEQ ID NO: 151585 - DNA, 20 bp, synthetic construct
  source 1..20: mol_type = other DNA
aactagcaaagagtccaaga

SEQ ID NO: 151586 - DNA, 20 bp, synthetic construct
  source 1..20: mol_type = other DNA
aaactagcaaagagtccaag

SEQ ID NO: 151587 - DNA, 20 bp, synthetic construct
  source 1..20: mol_type = other DNA
aaaactagcaaagagtccaa

SEQ ID NO: 151588 - DNA, 20 bp, synthetic construct
  source 1..20: mol_type = other DNA
aaaaactagcaaagagtcca

SEQ ID NO: 151589 - DNA, 20 bp, synthetic construct
  source 1..20: mol_type = other DNA
taaaaactagcaaagagtcc

SEQ ID NO: 151590 - DNA, 20 bp, synthetic construct
  source 1..20: mol_type = other DNA
gtaaaaactagcaaagagtc

SEQ ID NO: 151591 - DNA, 20 bp, synthetic construct
  source 1..20: mol_type = other DNA
tgtaaaaactagcaaagagt

SEQ ID NO: 151592 - DNA, 20 bp, synthetic construct
  source 1..20: mol_type = other DNA
ctgtaaaaactagcaaagag

SEQ ID NO: 151593 - DNA, 20 bp, synthetic construct
  source 1..20: mol_type = other DNA
tctgtaaaaactagcaaaga

SEQ ID NO: 151594 - DNA, 20 bp, synthetic construct
  source 1..20: mol_type = other DNA
atctgtaaaaactagcaaag

SEQ ID NO: 151595 - DNA, 20 bp, synthetic construct
  source 1..20: mol_type = other DNA
gatctgtaaaaactagcaaa

SEQ ID NO: 151596 - DNA, 20 bp, synthetic construct
  source 1..20: mol_type = other DNA
tgatctgtaaaaactagcaa

SEQ ID NO: 151597 - DNA, 20 bp, synthetic construct
  source 1..20: mol_type = other DNA
ctgatctgtaaaaactagca

SEQ ID NO: 151598 - DNA, 20 bp, synthetic construct
  source 1..20: mol_type = other DNA
tctgatctgtaaaaactagc

SEQ ID NO: 151599 - DNA, 20 bp, synthetic construct
  source 1..20: mol_type = other DNA
ttctgatctgtaaaaactag

SEQ ID NO: 151600 - DNA, 20 bp, synthetic construct
  source 1..20: mol_type = other DNA
attctgatctgtaaaaacta

SEQ ID NO: 151601 - DNA, 20 bp, synthetic construct
  source 1..20: mol_type = other DNA
aattctgatctgtaaaaact

SEQ ID NO: 151602 - DNA, 20 bp, synthetic construct
  source 1..20: mol_type = other DNA
aaattctgatctgtaaaaac

SEQ ID NO: 151603 - DNA, 20 bp, synthetic construct
  source 1..20: mol_type = other DNA
aaaattctgatctgtaaaaa

SEQ ID NO: 151604 - DNA, 20 bp, synthetic construct
  source 1..20: mol_type = other DNA
aaaaattctgatctgtaaaa

SEQ ID NO: 151605 - DNA, 20 bp, synthetic construct
  source 1..20: mol_type = other DNA
gaaaaattctgatctgtaaa

SEQ ID NO: 151606 - DNA, 20 bp, synthetic construct
  source 1..20: mol_type = other DNA
tgaaaaattctgatctgtaa

SEQ ID NO: 151607 - DNA, 20 bp, synthetic construct
  source 1..20: mol_type = other DNA
gtgaaaaattctgatctgta

SEQ ID NO: 151608 - DNA, 20 bp, synthetic construct
  source 1..20: mol_type = other DNA
cgtgaaaaattctgatctgt

SEQ ID NO: 151609 - DNA, 20 bp, synthetic construct
  source 1..20: mol_type = other DNA
acgtgaaaaattctgatctg

SEQ ID NO: 151610 - DNA, 20 bp, synthetic construct
  source 1..20: mol_type = other DNA
tacgtgaaaaattctgatct

SEQ ID NO: 151611 - DNA, 20 bp, synthetic construct
  source 1..20: mol_type = other DNA
atacgtgaaaaattctgatc

SEQ ID NO: 151612 - DNA, 20 bp, synthetic construct
  source 1..20: mol_type = other DNA
aatacgtgaaaaattctgat

SEQ ID NO: 151613 - DNA, 20 bp, synthetic construct
  source 1..20: mol_type = other DNA
taatacgtgaaaaattctga

SEQ ID NO: 151614 - DNA, 20 bp, synthetic construct
  source 1..20: mol_type = other DNA
ttaatacgtgaaaaattctg

SEQ ID NO: 151615 - DNA, 20 bp, synthetic construct
  source 1..20: mol_type = other DNA
attaatacgtgaaaaattct

SEQ ID NO: 151616 - DNA, 20 bp, synthetic construct
  source 1..20: mol_type = other DNA
gattaatacgtgaaaaattc

SEQ ID NO: 151617 - DNA, 20 bp, synthetic construct
  source 1..20: mol_type = other DNA
ggattaatacgtgaaaaatt

SEQ ID NO: 151618 - DNA, 20 bp, synthetic construct
  source 1..20: mol_type = other DNA
tggattaatacgtgaaaaat

SEQ ID NO: 151619 - DNA, 20 bp, synthetic construct
  source 1..20: mol_type = other DNA
ctggattaatacgtgaaaaa

SEQ ID NO: 151620 - DNA, 20 bp, synthetic construct
  source 1..20: mol_type = other DNA
actggattaatacgtgaaaa

SEQ ID NO: 151621 - DNA, 20 bp, synthetic construct
  source 1..20: mol_type = other DNA
aactggattaatacgtgaaa

SEQ ID NO: 151622 - DNA, 20 bp, synthetic construct
  source 1..20: mol_type = other DNA
aaactggattaatacgtgaa

SEQ ID NO: 151623 - DNA, 20 bp, synthetic construct
  source 1..20: mol_type = other DNA
aaaactggattaatacgtga

SEQ ID NO: 151624 - DNA, 20 bp, synthetic construct
  source 1..20: mol_type = other DNA
gaaaactggattaatacgtg

SEQ ID NO: 151625 - DNA, 20 bp, synthetic construct
  source 1..20: mol_type = other DNA
ggaaaactggattaatacgt

SEQ ID NO: 151626 - DNA, 20 bp, synthetic construct
  source 1..20: mol_type = other DNA
aggaaaactggattaatacg

SEQ ID NO: 151627 - DNA, 20 bp, synthetic construct
  source 1..20: mol_type = other DNA
taggaaaactggattaatac

SEQ ID NO: 151628 - DNA, 20 bp, synthetic construct
  source 1..20: mol_type = other DNA
ctaggaaaactggattaata

SEQ ID NO: 151629 - DNA, 20 bp, synthetic construct
  source 1..20: mol_type = other DNA
gctaggaaaactggattaat

SEQ ID NO: 151630 - DNA, 20 bp, synthetic construct
  source 1..20: mol_type = other DNA
agctaggaaaactggattaa

SEQ ID NO: 151631 - DNA, 20 bp, synthetic construct
  source 1..20: mol_type = other DNA
aagctaggaaaactggatta

SEQ ID NO: 151632 - DNA, 20 bp, synthetic construct
  source 1..20: mol_type = other DNA
gaagctaggaaaactggatt

SEQ ID NO: 151633 - DNA, 20 bp, synthetic construct
  source 1..20: mol_type = other DNA
agaagctaggaaaactggat

SEQ ID NO: 151634 - DNA, 20 bp, synthetic construct
  source 1..20: mol_type = other DNA
gagaagctaggaaaactgga

SEQ ID NO: 151635 - DNA, 20 bp, synthetic construct
  source 1..20: mol_type = other DNA
agagaagctaggaaaactgg

SEQ ID NO: 151636 - DNA, 20 bp, synthetic construct
  source 1..20: mol_type = other DNA
aagagaagctaggaaaactg

SEQ ID NO: 151637 - DNA, 20 bp, synthetic construct
  source 1..20: mol_type = other DNA
caagagaagctaggaaaact

SEQ ID NO: 151638 - DNA, 20 bp, synthetic construct
  source 1..20: mol_type = other DNA
tcaagagaagctaggaaaac

SEQ ID NO: 151639 - DNA, 20 bp, synthetic construct
  source 1..20: mol_type = other DNA
ttcaagagaagctaggaaaa

SEQ ID NO: 151640 - DNA, 20 bp, synthetic construct
  source 1..20: mol_type = other DNA
cttcaagagaagctaggaaa

SEQ ID NO: 151641 - DNA, 20 bp, synthetic construct
  source 1..20: mol_type = other DNA
tcttcaagagaagctaggaa

SEQ ID NO: 151642 - DNA, 20 bp, synthetic construct
  source 1..20: mol_type = other DNA
ttcttcaagagaagctagga

SEQ ID NO: 151643 - DNA, 20 bp, synthetic construct
  source 1..20: mol_type = other DNA
attcttcaagagaagctagg

SEQ ID NO: 151644 - DNA, 20 bp, synthetic construct
  source 1..20: mol_type = other DNA
aattcttcaagagaagctag

SEQ ID NO: 151645 - DNA, 20 bp, synthetic construct
  source 1..20: mol_type = other DNA
aaattcttcaagagaagcta

SEQ ID NO: 151646 - DNA, 20 bp, synthetic construct
  source 1..20: mol_type = other DNA
aaaattcttcaagagaagct

SEQ ID NO: 151647 - DNA, 20 bp, synthetic construct
  source 1..20: mol_type = other DNA
aaaaattcttcaagagaagc

SEQ ID NO: 151648 - DNA, 20 bp, synthetic construct
  source 1..20: mol_type = other DNA
caaaaattcttcaagagaag

SEQ ID NO: 151649 - DNA, 20 bp, synthetic construct
  source 1..20: mol_type = other DNA
ccaaaaattcttcaagagaa

SEQ ID NO: 151650 - DNA, 20 bp, synthetic construct
  source 1..20: mol_type = other DNA
tccaaaaattcttcaagaga

SEQ ID NO: 151651 - DNA, 20 bp, synthetic construct
  source 1..20: mol_type = other DNA
ctccaaaaattcttcaagag

SEQ ID NO: 151652 - DNA, 20 bp, synthetic construct
  source 1..20: mol_type = other DNA
tctccaaaaattcttcaaga

SEQ ID NO: 151653 - DNA, 20 bp, synthetic construct
  source 1..20: mol_type = other DNA
atctccaaaaattcttcaag

SEQ ID NO: 151654 - DNA, 20 bp, synthetic construct
  source 1..20: mol_type = other DNA
gatctccaaaaattcttcaa

SEQ ID NO: 151655 - DNA, 20 bp, synthetic construct
  source 1..20: mol_type = other DNA
agatctccaaaaattcttca

SEQ ID NO: 151656 - DNA, 20 bp, synthetic construct
  source 1..20: mol_type = other DNA
gagatctccaaaaattcttc

SEQ ID NO: 151657 - DNA, 20 bp, synthetic construct
  source 1..20: mol_type = other DNA
agagatctccaaaaattctt

SEQ ID NO: 151658 - DNA, 20 bp, synthetic construct
  source 1..20: mol_type = other DNA
aagagatctccaaaaattct

SEQ ID NO: 151659 - DNA, 20 bp, synthetic construct
  source 1..20: mol_type = other DNA
gaagagatctccaaaaattc

SEQ ID NO: 151660 - DNA, 20 bp, synthetic construct
  source 1..20: mol_type = other DNA
tgaagagatctccaaaaatt

SEQ ID NO: 151661 - DNA, 20 bp, synthetic construct
  source 1..20: mol_type = other DNA
atgaagagatctccaaaaat

SEQ ID NO: 151662 - DNA, 20 bp, synthetic construct
  source 1..20: mol_type = other DNA
tatgaagagatctccaaaaa

SEQ ID NO: 151663 - DNA, 20 bp, synthetic construct
  source 1..20: mol_type = other DNA
gtatgaagagatctccaaaa

SEQ ID NO: 151664 - DNA, 20 bp, synthetic construct
  source 1..20: mol_type = other DNA
agtatgaagagatctccaaa

SEQ ID NO: 151665 - DNA, 20 bp, synthetic construct
  source 1..20: mol_type = other DNA
cagtatgaagagatctccaa

SEQ ID NO: 151666 - DNA, 20 bp, synthetic construct
  source 1..20: mol_type = other DNA
tcagtatgaagagatctcca

SEQ ID NO: 151667 - DNA, 20 bp, synthetic construct
  source 1..20: mol_type = other DNA
ctcagtatgaagagatctcc

SEQ ID NO: 151668 - DNA, 20 bp, synthetic construct
  source 1..20: mol_type = other DNA
gctcagtatgaagagatctc

SEQ ID NO: 151669 - DNA, 20 bp, synthetic construct
  source 1..20: mol_type = other DNA
ggctcagtatgaagagatct

SEQ ID NO: 151670 - DNA, 20 bp, synthetic construct
  source 1..20: mol_type = other DNA
aggctcagtatgaagagatc

SEQ ID NO: 151671 - DNA, 20 bp, synthetic construct
  source 1..20: mol_type = other DNA
aaggctcagtatgaagagat

SEQ ID NO: 151672 - DNA, 20 bp, synthetic construct
  source 1..20: mol_type = other DNA
gaaggctcagtatgaagaga

SEQ ID NO: 151673 - DNA, 20 bp, synthetic construct
  source 1..20: mol_type = other DNA
tgaaggctcagtatgaagag

SEQ ID NO: 151674 - DNA, 20 bp, synthetic construct
  source 1..20: mol_type = other DNA
atgaaggctcagtatgaaga

SEQ ID NO: 151675 - DNA, 20 bp, synthetic construct
  source 1..20: mol_type = other DNA
aatgaaggctcagtatgaag

SEQ ID NO: 151676 - DNA, 20 bp, synthetic construct
  source 1..20: mol_type = other DNA
taatgaaggctcagtatgaa

SEQ ID NO: 151677 - DNA, 20 bp, synthetic construct
  source 1..20: mol_type = other DNA
ctaatgaaggctcagtatga

SEQ ID NO: 151678 - DNA, 20 bp, synthetic construct
  source 1..20: mol_type = other DNA
gctaatgaaggctcagtatg

SEQ ID NO: 151679 - DNA, 20 bp, synthetic construct
  source 1..20: mol_type = other DNA
ggctaatgaaggctcagtat

SEQ ID NO: 151680 - DNA, 20 bp, synthetic construct
  source 1..20: mol_type = other DNA
gggctaatgaaggctcagta

SEQ ID NO: 151681 - DNA, 20 bp, synthetic construct
  source 1..20: mol_type = other DNA
tgggctaatgaaggctcagt

SEQ ID NO: 151682 - DNA, 20 bp, synthetic construct
  source 1..20: mol_type = other DNA
ctgggctaatgaaggctcag

SEQ ID NO: 151683 - DNA, 20 bp, synthetic construct
  source 1..20: mol_type = other DNA
cctgggctaatgaaggctca

SEQ ID NO: 151684 - DNA, 20 bp, synthetic construct
  source 1..20: mol_type = other DNA
tcctgggctaatgaaggctc

SEQ ID NO: 151685 - DNA, 20 bp, synthetic construct
  source 1..20: mol_type = other DNA
gtcctgggctaatgaaggct

SEQ ID NO: 151686 - DNA, 20 bp, synthetic construct
  source 1..20: mol_type = other DNA
tgtcctgggctaatgaaggc

SEQ ID NO: 151687 - DNA, 20 bp, synthetic construct
  source 1..20: mol_type = other DNA
ctgtcctgggctaatgaagg

SEQ ID NO: 151688 - DNA, 20 bp, synthetic construct
  source 1..20: mol_type = other DNA
actgtcctgggctaatgaag

SEQ ID NO: 151689 - DNA, 20 bp, synthetic construct
  source 1..20: mol_type = other DNA
tactgtcctgggctaatgaa

SEQ ID NO: 151690 - DNA, 20 bp, synthetic construct
  source 1..20: mol_type = other DNA
gtactgtcctgggctaatga

SEQ ID NO: 151691 - DNA, 20 bp, synthetic construct
  source 1..20: mol_type = other DNA
agtactgtcctgggctaatg

SEQ ID NO: 151692 - DNA, 20 bp, synthetic construct
  source 1..20: mol_type = other DNA
cagtactgtcctgggctaat

SEQ ID NO: 151693 - DNA, 20 bp, synthetic construct
  source 1..20: mol_type = other DNA
gcagtactgtcctgggctaa

SEQ ID NO: 151694 - DNA, 20 bp, synthetic construct
  source 1..20: mol_type = other DNA
agcagtactgtcctgggcta

SEQ ID NO: 151695 - DNA, 20 bp, synthetic construct
  source 1..20: mol_type = other DNA
cagcagtactgtcctgggct

SEQ ID NO: 151696 - DNA, 20 bp, synthetic construct
  source 1..20: mol_type = other DNA
acagcagtactgtcctgggc

SEQ ID NO: 151697 - DNA, 20 bp, synthetic construct
  source 1..20: mol_type = other DNA
tacagcagtactgtcctggg

SEQ ID NO: 151698 - DNA, 20 bp, synthetic construct
  source 1..20: mol_type = other DNA
ctacagcagtactgtcctgg

SEQ ID NO: 151699 - DNA, 20 bp, synthetic construct
  source 1..20: mol_type = other DNA
gctacagcagtactgtcctg

SEQ ID NO: 151700 - DNA, 20 bp, synthetic construct
  source 1..20: mol_type = other DNA
tgctacagcagtactgtcct

SEQ ID NO: 151701 - DNA, 20 bp, synthetic construct
  source 1..20: mol_type = other DNA
ctgctacagcagtactgtcc

SEQ ID NO: 151702 - DNA, 20 bp, synthetic construct
  source 1..20: mol_type = other DNA
actgctacagcagtactgtc

SEQ ID NO: 151703 - DNA, 20 bp, synthetic construct
  source 1..20: mol_type = other DNA
aactgctacagcagtactgt

SEQ ID NO: 151704 - DNA, 20 bp, synthetic construct
  source 1..20: mol_type = other DNA
gaactgctacagcagtactg

SEQ ID NO: 151705 - DNA, 20 bp, synthetic construct
  source 1..20: mol_type = other DNA
tgaactgctacagcagtact

SEQ ID NO: 151706 - DNA, 20 bp, synthetic construct
  source 1..20: mol_type = other DNA
atgaactgctacagcagtac

SEQ ID NO: 151707 - DNA, 20 bp, synthetic construct
  source 1..20: mol_type = other DNA
tatgaactgctacagcagta

SEQ ID NO: 151708 - DNA, 20 bp, synthetic construct
  source 1..20: mol_type = other DNA
atatgaactgctacagcagt

SEQ ID NO: 151709 - DNA, 20 bp, synthetic construct
  source 1..20: mol_type = other DNA
tatatgaactgctacagcag

SEQ ID NO: 151710 - DNA, 20 bp, synthetic construct
  source 1..20: mol_type = other DNA
atatatgaactgctacagca

SEQ ID NO: 151711 - DNA, 20 bp, synthetic construct
  source 1..20: mol_type = other DNA
aatatatgaactgctacagc

SEQ ID NO: 151712 - DNA, 20 bp, synthetic construct
  source 1..20: mol_type = other DNA
aaatatatgaactgctacag

SEQ ID NO: 151713 - DNA, 20 bp, synthetic construct
  source 1..20: mol_type = other DNA
aaaatatatgaactgctaca

SEQ ID NO: 151714 - DNA, 20 bp, synthetic construct
  source 1..20: mol_type = other DNA
aaaaatatatgaactgctac

SEQ ID NO: 151715 - DNA, 20 bp, synthetic construct
  source 1..20: mol_type = other DNA
aaaaaatatatgaactgcta

SEQ ID NO: 151716 - DNA, 20 bp, synthetic construct
  source 1..20: mol_type = other DNA
gaaaaaatatatgaactgct

SEQ ID NO: 151717 - DNA, 20 bp, synthetic construct
  source 1..20: mol_type = other DNA
cgaaaaaatatatgaactgc

SEQ ID NO: 151718 - DNA, 20 bp, synthetic construct
  source 1..20: mol_type = other DNA
gcgaaaaaatatatgaactg

SEQ ID NO: 151719 - DNA, 20 bp, synthetic construct
  source 1..20: mol_type = other DNA
agcgaaaaaatatatgaact

SEQ ID NO: 151720 - DNA, 20 bp, synthetic construct
  source 1..20: mol_type = other DNA
aagcgaaaaaatatatgaac

SEQ ID NO: 151721 - DNA, 20 bp, synthetic construct
  source 1..20: mol_type = other DNA
gaagcgaaaaaatatatgaa

SEQ ID NO: 151722 - DNA, 20 bp, synthetic construct
  source 1..20: mol_type = other DNA
ggaagcgaaaaaatatatga

SEQ ID NO: 151723 - DNA, 20 bp, synthetic construct
  source 1..20: mol_type = other DNA
gggaagcgaaaaaatatatg

SEQ ID NO: 151724 - DNA, 20 bp, synthetic construct
  source 1..20: mol_type = other DNA
tgggaagcgaaaaaatatat

SEQ ID NO: 151725 - DNA, 20 bp, synthetic construct
  source 1..20: mol_type = other DNA
ctgggaagcgaaaaaatata

SEQ ID NO: 151726 - DNA, 20 bp, synthetic construct
  source 1..20: mol_type = other DNA
cctgggaagcgaaaaaatat

SEQ ID NO: 151727 - DNA, 20 bp, synthetic construct
  source 1..20: mol_type = other DNA
gcctgggaagcgaaaaaata

SEQ ID NO: 151728 - DNA, 20 bp, synthetic construct
  source 1..20: mol_type = other DNA
ggcctgggaagcgaaaaaat

SEQ ID NO: 151729 - DNA, 20 bp, synthetic construct
  source 1..20: mol_type = other DNA
aggcctgggaagcgaaaaaa

SEQ ID NO: 151730 - DNA, 20 bp, synthetic construct
  source 1..20: mol_type = other DNA
caggcctgggaagcgaaaaa

SEQ ID NO: 151731 - DNA, 20 bp, synthetic construct
  source 1..20: mol_type = other DNA
acaggcctgggaagcgaaaa

SEQ ID NO: 151732 - DNA, 20 bp, synthetic construct
  source 1..20: mol_type = other DNA
cacaggcctgggaagcgaaa

SEQ ID NO: 151733 - DNA, 20 bp, synthetic construct
  source 1..20: mol_type = other DNA
acacaggcctgggaagcgaa

SEQ ID NO: 151734 - DNA, 20 bp, synthetic construct
  source 1..20: mol_type = other DNA
aacacaggcctgggaagcga

SEQ ID NO: 151735 - DNA, 20 bp, synthetic construct
  source 1..20: mol_type = other DNA
taacacaggcctgggaagcg

SEQ ID NO: 151736 - DNA, 20 bp, synthetic construct
  source 1..20: mol_type = other DNA
ataacacaggcctgggaagc

SEQ ID NO: 151737 - DNA, 20 bp, synthetic construct
  source 1..20: mol_type = other DNA
aataacacaggcctgggaag

SEQ ID NO: 151738 - DNA, 20 bp, synthetic construct
  source 1..20: mol_type = other DNA
gaataacacaggcctgggaa

SEQ ID NO: 151739 - DNA, 20 bp, synthetic construct
  source 1..20: mol_type = other DNA
tgaataacacaggcctggga

SEQ ID NO: 151740 - DNA, 20 bp, synthetic construct
  source 1..20: mol_type = other DNA
gtgaataacacaggcctggg

SEQ ID NO: 151741 - DNA, 20 bp, synthetic construct
  source 1..20: mol_type = other DNA
agtgaataacacaggcctgg

SEQ ID NO: 151742 - DNA, 20 bp, synthetic construct
  source 1..20: mol_type = other DNA
aagtgaataacacaggcctg

SEQ ID NO: 151743 - DNA, 20 bp, synthetic construct
  source 1..20: mol_type = other DNA
taagtgaataacacaggcct

SEQ ID NO: 151744 - DNA, 20 bp, synthetic construct
  source 1..20: mol_type = other DNA
ttaagtgaataacacaggcc

SEQ ID NO: 151745 - DNA, 20 bp, synthetic construct
  source 1..20: mol_type = other DNA
cttaagtgaataacacaggc

SEQ ID NO: 151746 - DNA, 20 bp, synthetic construct
  source 1..20: mol_type = other DNA
acttaagtgaataacacagg

SEQ ID NO: 151747 - DNA, 20 bp, synthetic construct
  source 1..20: mol_type = other DNA
aacttaagtgaataacacag

SEQ ID NO: 151748 - DNA, 20 bp, synthetic construct
  source 1..20: mol_type = other DNA
gaacttaagtgaataacaca

SEQ ID NO: 151749 - DNA, 20 bp, synthetic construct
  source 1..20: mol_type = other DNA
tgaacttaagtgaataacac

SEQ ID NO: 151750 - DNA, 20 bp, synthetic construct
  source 1..20: mol_type = other DNA
atgaacttaagtgaataaca

SEQ ID NO: 151751 - DNA, 20 bp, synthetic construct
  source 1..20: mol_type = other DNA
tatgaacttaagtgaataac

SEQ ID NO: 151752 - DNA, 20 bp, synthetic construct
  source 1..20: mol_type = other DNA
ctatgaacttaagtgaataa

SEQ ID NO: 151753 - DNA, 20 bp, synthetic construct
  source 1..20: mol_type = other DNA
gctatgaacttaagtgaata

SEQ ID NO: 151754 - DNA, 20 bp, synthetic construct
  source 1..20: mol_type = other DNA
ggctatgaacttaagtgaat

SEQ ID NO: 151755 - DNA, 20 bp, synthetic construct
  source 1..20: mol_type = other DNA
aggctatgaacttaagtgaa

SEQ ID NO: 151756 - DNA, 20 bp, synthetic construct
  source 1..20: mol_type = other DNA
caggctatgaacttaagtga

SEQ ID NO: 151757 - DNA, 20 bp, synthetic construct
  source 1..20: mol_type = other DNA
ccaggctatgaacttaagtg

SEQ ID NO: 151758 - DNA, 20 bp, synthetic construct
  source 1..20: mol_type = other DNA
accaggctatgaacttaagt

SEQ ID NO: 151759 - DNA, 20 bp, synthetic construct
  source 1..20: mol_type = other DNA
gaccaggctatgaacttaag

SEQ ID NO: 151760 - DNA, 20 bp, synthetic construct
  source 1..20: mol_type = other DNA
ggaccaggctatgaacttaa

SEQ ID NO: 151761 - DNA, 20 bp, synthetic construct
  source 1..20: mol_type = other DNA
gggaccaggctatgaactta

SEQ ID NO: 151762 - DNA, 20 bp, synthetic construct
  source 1..20: mol_type = other DNA
agggaccaggctatgaactt

SEQ ID NO: 151763 - DNA, 20 bp, synthetic construct
  source 1..20: mol_type = other DNA
cagggaccaggctatgaact

SEQ ID NO: 151764 - DNA, 20 bp, synthetic construct
  source 1..20: mol_type = other DNA
gcagggaccaggctatgaac

SEQ ID NO: 151765 - DNA, 20 bp, synthetic construct
  source 1..20: mol_type = other DNA
tgcagggaccaggctatgaa

SEQ ID NO: 151766 - DNA, 20 bp, synthetic construct
  source 1..20: mol_type = other DNA
ctgcagggaccaggctatga

SEQ ID NO: 151767 - DNA, 20 bp, synthetic construct
  source 1..20: mol_type = other DNA
cctgcagggaccaggctatg

SEQ ID NO: 151768 - DNA, 20 bp, synthetic construct
  source 1..20: mol_type = other DNA
ccctgcagggaccaggctat

SEQ ID NO: 151769 - DNA, 20 bp, synthetic construct
  source 1..20: mol_type = other DNA
accctgcagggaccaggcta

SEQ ID NO: 151770 - DNA, 20 bp, synthetic construct
  source 1..20: mol_type = other DNA
aaccctgcagggaccaggct

SEQ ID NO: 151771 - DNA, 20 bp, synthetic construct
  source 1..20: mol_type = other DNA
caaccctgcagggaccaggc

SEQ ID NO: 151772 - DNA, 20 bp, synthetic construct
  source 1..20: mol_type = other DNA
acaaccctgcagggaccagg

SEQ ID NO: 151773 - DNA, 20 bp, synthetic construct
  source 1..20: mol_type = other DNA
tacaaccctgcagggaccag

SEQ ID NO: 151774 - DNA, 20 bp, synthetic construct
  source 1..20: mol_type = other DNA
gtacaaccctgcagggacca

SEQ ID NO: 151775 - DNA, 20 bp, synthetic construct
  source 1..20: mol_type = other DNA
ggtacaaccctgcagggacc

SEQ ID NO: 151776 - DNA, 20 bp, synthetic construct
  source 1..20: mol_type = other DNA
gggtacaaccctgcagggac

SEQ ID NO: 151777 - DNA, 20 bp, synthetic construct
  source 1..20: mol_type = other DNA
cgggtacaaccctgcaggga

SEQ ID NO: 151778 - DNA, 20 bp, synthetic construct
  source 1..20: mol_type = other DNA
tcgggtacaaccctgcaggg

SEQ ID NO: 151779 - DNA, 20 bp, synthetic construct
  source 1..20: mol_type = other DNA
ctcgggtacaaccctgcagg

SEQ ID NO: 151780 - DNA, 20 bp, synthetic construct
  source 1..20: mol_type = other DNA
gctcgggtacaaccctgcag

SEQ ID NO: 151781 - DNA, 20 bp, synthetic construct
  source 1..20: mol_type = other DNA
tgctcgggtacaaccctgca

SEQ ID NO: 151782 - DNA, 20 bp, synthetic construct
  source 1..20: mol_type = other DNA
gtgctcgggtacaaccctgc

SEQ ID NO: 151783 - DNA, 20 bp, synthetic construct
  source 1..20: mol_type = other DNA
tgtgctcgggtacaaccctg

SEQ ID NO: 151784 - DNA, 20 bp, synthetic construct
  source 1..20: mol_type = other DNA
ctgtgctcgggtacaaccct

SEQ ID NO: 151785 - DNA, 20 bp, synthetic construct
  source 1..20: mol_type = other DNA
gctgtgctcgggtacaaccc

SEQ ID NO: 151786 - DNA, 20 bp, synthetic construct
  source 1..20: mol_type = other DNA
agctgtgctcgggtacaacc

SEQ ID NO: 151787 - DNA, 20 bp, synthetic construct
  source 1..20: mol_type = other DNA
tagctgtgctcgggtacaac

SEQ ID NO: 151788 - DNA, 20 bp, synthetic construct
  source 1..20: mol_type = other DNA
gtagctgtgctcgggtacaa

SEQ ID NO: 151789 - DNA, 20 bp, synthetic construct
  source 1..20: mol_type = other DNA
agtagctgtgctcgggtaca

SEQ ID NO: 151790 - DNA, 20 bp, synthetic construct
  source 1..20: mol_type = other DNA
aagtagctgtgctcgggtac

SEQ ID NO: 151791 - DNA, 20 bp, synthetic construct
  source 1..20: mol_type = other DNA
taagtagctgtgctcgggta

SEQ ID NO: 151792 - DNA, 20 bp, synthetic construct
  source 1..20: mol_type = other DNA
ctaagtagctgtgctcgggt

SEQ ID NO: 151793 - DNA, 20 bp, synthetic construct
  source 1..20: mol_type = other DNA
tctaagtagctgtgctcggg

SEQ ID NO: 151794 - DNA, 20 bp, synthetic construct
  source 1..20: mol_type = other DNA
atctaagtagctgtgctcgg

SEQ ID NO: 151795 - DNA, 20 bp, synthetic construct
  source 1..20: mol_type = other DNA
catctaagtagctgtgctcg

SEQ ID NO: 151796 - DNA, 20 bp, synthetic construct
  source 1..20: mol_type = other DNA
acatctaagtagctgtgctc

SEQ ID NO: 151797 - DNA, 20 bp, synthetic construct
  source 1..20: mol_type = other DNA
gacatctaagtagctgtgct

SEQ ID NO: 151798 - DNA, 20 bp, synthetic construct
  source 1..20: mol_type = other DNA
ggacatctaagtagctgtgc

SEQ ID NO: 151799 - DNA, 20 bp, synthetic construct
  source 1..20: mol_type = other DNA
aggacatctaagtagctgtg

SEQ ID NO: 151800 - DNA, 20 bp, synthetic construct
  source 1..20: mol_type = other DNA
caggacatctaagtagctgt

SEQ ID NO: 151801 - DNA, 20 bp, synthetic construct
  source 1..20: mol_type = other DNA
tcaggacatctaagtagctg

SEQ ID NO: 151802 - DNA, 20 bp, synthetic construct
  source 1..20: mol_type = other DNA
ttcaggacatctaagtagct

SEQ ID NO: 151803 - DNA, 20 bp, synthetic construct
  source 1..20: mol_type = other DNA
attcaggacatctaagtagc

SEQ ID NO: 151804 - DNA, 20 bp, synthetic construct
  source 1..20: mol_type = other DNA
cattcaggacatctaagtag

SEQ ID NO: 151805 - DNA, 20 bp, synthetic construct
  source 1..20: mol_type = other DNA
acattcaggacatctaagta

SEQ ID NO: 151806 - DNA, 20 bp, synthetic construct
  source 1..20: mol_type = other DNA
tacattcaggacatctaagt

SEQ ID NO: 151807 - DNA, 20 bp, synthetic construct
  source 1..20: mol_type = other DNA
atacattcaggacatctaag

SEQ ID NO: 151808 - DNA, 20 bp, synthetic construct
  source 1..20: mol_type = other DNA
aatacattcaggacatctaa

SEQ ID NO: 151809 - DNA, 20 bp, synthetic construct
  source 1..20: mol_type = other DNA
taatacattcaggacatcta

SEQ ID NO: 151810 - DNA, 20 bp, synthetic construct
  source 1..20: mol_type = other DNA
gtaatacattcaggacatct

SEQ ID NO: 151811 - DNA, 20 bp, synthetic construct
  source 1..20: mol_type = other DNA
ggtaatacattcaggacatc

SEQ ID NO: 151812 - DNA, 20 bp, synthetic construct
  source 1..20: mol_type = other DNA
cggtaatacattcaggacat

SEQ ID NO: 151813 - DNA, 20 bp, synthetic construct
  source 1..20: mol_type = other DNA
ccggtaatacattcaggaca

SEQ ID NO: 151814 - DNA, 20 bp, synthetic construct
  source 1..20: mol_type = other DNA
accggtaatacattcaggac

SEQ ID NO: 151815 - DNA, 20 bp, synthetic construct
  source 1..20: mol_type = other DNA
aaccggtaatacattcagga

SEQ ID NO: 151816 - DNA, 20 bp, synthetic construct
  source 1..20: mol_type = other DNA
taaccggtaatacattcagg

SEQ ID NO: 151817 - DNA, 20 bp, synthetic construct
  source 1..20: mol_type = other DNA
ttaaccggtaatacattcag

SEQ ID NO: 151818 - DNA, 20 bp, synthetic construct
  source 1..20: mol_type = other DNA
tttaaccggtaatacattca

SEQ ID NO: 151819 - DNA, 20 bp, synthetic construct
  source 1..20: mol_type = other DNA
atttaaccggtaatacattc

SEQ ID NO: 151820 - DNA, 20 bp, synthetic construct
  source 1..20: mol_type = other DNA
catttaaccggtaatacatt

SEQ ID NO: 151821 - DNA, 20 bp, synthetic construct
  source 1..20: mol_type = other DNA
ccatttaaccggtaatacat

SEQ ID NO: 151822 - DNA, 20 bp, synthetic construct
  source 1..20: mol_type = other DNA
tccatttaaccggtaataca

SEQ ID NO: 151823 - DNA, 20 bp, synthetic construct
  source 1..20: mol_type = other DNA
ctccatttaaccggtaatac

SEQ ID NO: 151824 - DNA, 20 bp, synthetic construct
  source 1..20: mol_type = other DNA
cctccatttaaccggtaata

SEQ ID NO: 151825 - DNA, 20 bp, synthetic construct
  source 1..20: mol_type = other DNA
acctccatttaaccggtaat

SEQ ID NO: 151826 - DNA, 20 bp, synthetic construct
  source 1..20: mol_type = other DNA
aacctccatttaaccggtaa

SEQ ID NO: 151827 - DNA, 20 bp, synthetic construct
  source 1..20: mol_type = other DNA
aaacctccatttaaccggta

SEQ ID NO: 151828 - DNA, 20 bp, synthetic construct
  source 1..20: mol_type = other DNA
gaaacctccatttaaccggt

SEQ ID NO: 151829 - DNA, 20 bp, synthetic construct
  source 1..20: mol_type = other DNA
tgaaacctccatttaaccgg

SEQ ID NO: 151830 - DNA, 20 bp, synthetic construct
  source 1..20: mol_type = other DNA
ttgaaacctccatttaaccg

SEQ ID NO: 151831 - DNA, 20 bp, synthetic construct
  source 1..20: mol_type = other DNA
tttgaaacctccatttaacc

SEQ ID NO: 151832 - DNA, 20 bp, synthetic construct
  source 1..20: mol_type = other DNA
ctttgaaacctccatttaac

SEQ ID NO: 151833 - DNA, 20 bp, synthetic construct
  source 1..20: mol_type = other DNA
tctttgaaacctccatttaa

SEQ ID NO: 151834 - DNA, 20 bp, synthetic construct
  source 1..20: mol_type = other DNA
ttctttgaaacctccattta

SEQ ID NO: 151835 - DNA, 20 bp, synthetic construct
  source 1..20: mol_type = other DNA
gttctttgaaacctccattt

SEQ ID NO: 151836 - DNA, 20 bp, synthetic construct
  source 1..20: mol_type = other DNA
ggttctttgaaacctccatt

SEQ ID NO: 151837 - DNA, 20 bp, synthetic construct
  source 1..20: mol_type = other DNA
aggttctttgaaacctccat

SEQ ID NO: 151838 - DNA, 20 bp, synthetic construct
  source 1..20: mol_type = other DNA
caggttctttgaaacctcca

SEQ ID NO: 151839 - DNA, 20 bp, synthetic construct
  source 1..20: mol_type = other DNA
gcaggttctttgaaacctcc

SEQ ID NO: 151840 - DNA, 20 bp, synthetic construct
  source 1..20: mol_type = other DNA
agcaggttctttgaaacctc

SEQ ID NO: 151841 - DNA, 20 bp, synthetic construct
  source 1..20: mol_type = other DNA
cagcaggttctttgaaacct

SEQ ID NO: 151842 - DNA, 20 bp, synthetic construct
  source 1..20: mol_type = other DNA
acagcaggttctttgaaacc

SEQ ID NO: 151843 - DNA, 20 bp, synthetic construct
  source 1..20: mol_type = other DNA
aacagcaggttctttgaaac

SEQ ID NO: 151844 - DNA, 20 bp, synthetic construct
  source 1..20: mol_type = other DNA
aaacagcaggttctttgaaa

SEQ ID NO: 151845 - DNA, 20 bp, synthetic construct
  source 1..20: mol_type = other DNA
aaaacagcaggttctttgaa

SEQ ID NO: 151846 - DNA, 20 bp, synthetic construct
  source 1..20: mol_type = other DNA
aaaaacagcaggttctttga

SEQ ID NO: 151847 - DNA, 20 bp, synthetic construct
  source 1..20: mol_type = other DNA
caaaaacagcaggttctttg

SEQ ID NO: 151848 - DNA, 20 bp, synthetic construct
  source 1..20: mol_type = other DNA
ccaaaaacagcaggttcttt

SEQ ID NO: 151849 - DNA, 20 bp, synthetic construct
  source 1..20: mol_type = other DNA
gccaaaaacagcaggttctt

SEQ ID NO: 151850 - DNA, 20 bp, synthetic construct
  source 1..20: mol_type = other DNA
ggccaaaaacagcaggttct

SEQ ID NO: 151851 - DNA, 20 bp, synthetic construct
  source 1..20: mol_type = other DNA
gggccaaaaacagcaggttc

SEQ ID NO: 151852 - DNA, 20 bp, synthetic construct
  source 1..20: mol_type = other DNA
agggccaaaaacagcaggtt

SEQ ID NO: 151853 - DNA, 20 bp, synthetic construct
  source 1..20: mol_type = other DNA
cagggccaaaaacagcaggt

SEQ ID NO: 151854 - DNA, 20 bp, synthetic construct
  source 1..20: mol_type = other DNA
acagggccaaaaacagcagg

SEQ ID NO: 151855 - DNA, 20 bp, synthetic construct
  source 1..20: mol_type = other DNA
cacagggccaaaaacagcag

SEQ ID NO: 151856 - DNA, 20 bp, synthetic construct
  source 1..20: mol_type = other DNA
gcacagggccaaaaacagca

SEQ ID NO: 151857 - DNA, 20 bp, synthetic construct
  source 1..20: mol_type = other DNA
agcacagggccaaaaacagc

SEQ ID NO: 151858 - DNA, 20 bp, synthetic construct
  source 1..20: mol_type = other DNA
gagcacagggccaaaaacag

SEQ ID NO: 151859 - DNA, 20 bp, synthetic construct
  source 1..20: mol_type = other DNA
agagcacagggccaaaaaca

SEQ ID NO: 151860 - DNA, 20 bp, synthetic construct
  source 1..20: mol_type = other DNA
aagagcacagggccaaaaac

SEQ ID NO: 151861 - DNA, 20 bp, synthetic construct
  source 1..20: mol_type = other DNA
caagagcacagggccaaaaa

SEQ ID NO: 151862 - DNA, 20 bp, synthetic construct
  source 1..20: mol_type = other DNA
tcaagagcacagggccaaaa

SEQ ID NO: 151863 - DNA, 20 bp, synthetic construct
  source 1..20: mol_type = other DNA
atcaagagcacagggccaaa

SEQ ID NO: 151864 - DNA, 20 bp, synthetic construct
  source 1..20: mol_type = other DNA
tatcaagagcacagggccaa

SEQ ID NO: 151865 - DNA, 20 bp, synthetic construct
  source 1..20: mol_type = other DNA
ttatcaagagcacagggcca

SEQ ID NO: 151866 - DNA, 20 bp, synthetic construct
  source 1..20: mol_type = other DNA
gttatcaagagcacagggcc

SEQ ID NO: 151867 - DNA, 20 bp, synthetic construct
  source 1..20: mol_type = other DNA
tgttatcaagagcacagggc

SEQ ID NO: 151868 - DNA, 20 bp, synthetic construct
  source 1..20: mol_type = other DNA
ctgttatcaagagcacaggg

SEQ ID NO: 151869 - DNA, 20 bp, synthetic construct
  source 1..20: mol_type = other DNA
tctgttatcaagagcacagg

SEQ ID NO: 151870 - DNA, 20 bp, synthetic construct
  source 1..20: mol_type = other DNA
ctctgttatcaagagcacag

SEQ ID NO: 151871 - DNA, 20 bp, synthetic construct
  source 1..20: mol_type = other DNA
actctgttatcaagagcaca

SEQ ID NO: 151872 - DNA, 20 bp, synthetic construct
  source 1..20: mol_type = other DNA
cactctgttatcaagagcac

SEQ ID NO: 151873 - DNA, 20 bp, synthetic construct
  source 1..20: mol_type = other DNA
acactctgttatcaagagca

SEQ ID NO: 151874 - DNA, 20 bp, synthetic construct
  source 1..20: mol_type = other DNA
aacactctgttatcaagagc

SEQ ID NO: 151875 - DNA, 20 bp, synthetic construct
  source 1..20: mol_type = other DNA
aaacactctgttatcaagag

SEQ ID NO: 151876 - DNA, 20 bp, synthetic construct
  source 1..20: mol_type = other DNA
caaacactctgttatcaaga

SEQ ID NO: 151877 - DNA, 20 bp, synthetic construct
  source 1..20: mol_type = other DNA
tcaaacactctgttatcaag

SEQ ID NO: 151878 - DNA, 20 bp, synthetic construct
  source 1..20: mol_type = other DNA
ctcaaacactctgttatcaa

SEQ ID NO: 151879 - DNA, 20 bp, synthetic construct
  source 1..20: mol_type = other DNA
cctcaaacactctgttatca

SEQ ID NO: 151880 - DNA, 20 bp, synthetic construct
  source 1..20: mol_type = other DNA
ccctcaaacactctgttatc

SEQ ID NO: 151881 - DNA, 20 bp, synthetic construct
  source 1..20: mol_type = other DNA
tccctcaaacactctgttat

SEQ ID NO: 151882 - DNA, 20 bp, synthetic construct
  source 1..20: mol_type = other DNA
gtccctcaaacactctgtta

SEQ ID NO: 151883 - DNA, 20 bp, synthetic construct
  source 1..20: mol_type = other DNA
tgtccctcaaacactctgtt

SEQ ID NO: 151884 - DNA, 20 bp, synthetic construct
  source 1..20: mol_type = other DNA
ttgtccctcaaacactctgt

SEQ ID NO: 151885 - DNA, 20 bp, synthetic construct
  source 1..20: mol_type = other DNA
gttgtccctcaaacactctg

SEQ ID NO: 151886 - DNA, 20 bp, synthetic construct
  source 1..20: mol_type = other DNA
agttgtccctcaaacactct

SEQ ID NO: 151887 - DNA, 20 bp, synthetic construct
  source 1..20: mol_type = other DNA
aagttgtccctcaaacactc

SEQ ID NO: 151888 - DNA, 20 bp, synthetic construct
  source 1..20: mol_type = other DNA
aaagttgtccctcaaacact

SEQ ID NO: 151889 - DNA, 20 bp, synthetic construct
  source 1..20: mol_type = other DNA
gaaagttgtccctcaaacac

SEQ ID NO: 151890 - DNA, 20 bp, synthetic construct
  source 1..20: mol_type = other DNA
tgaaagttgtccctcaaaca

SEQ ID NO: 151891 - DNA, 20 bp, synthetic construct
  source 1..20: mol_type = other DNA
gtgaaagttgtccctcaaac

SEQ ID NO: 151892 - DNA, 20 bp, synthetic construct
  source 1..20: mol_type = other DNA
tgtgaaagttgtccctcaaa

SEQ ID NO: 151893 - DNA, 20 bp, synthetic construct
  source 1..20: mol_type = other DNA
atgtgaaagttgtccctcaa

SEQ ID NO: 151894 - DNA, 20 bp, synthetic construct
  source 1..20: mol_type = other DNA
aatgtgaaagttgtccctca

SEQ ID NO: 151895 - DNA, 20 bp, synthetic construct
  source 1..20: mol_type = other DNA
aaatgtgaaagttgtccctc

SEQ ID NO: 151896 - DNA, 20 bp, synthetic construct
  source 1..20: mol_type = other DNA
caaatgtgaaagttgtccct

SEQ ID NO: 151897 - DNA, 20 bp, synthetic construct
  source 1..20: mol_type = other DNA
tcaaatgtgaaagttgtccc

SEQ ID NO: 151898 - DNA, 20 bp, synthetic construct
  source 1..20: mol_type = other DNA
ctcaaatgtgaaagttgtcc

SEQ ID NO: 151899 - DNA, 20 bp, synthetic construct
  source 1..20: mol_type = other DNA
actcaaatgtgaaagttgtc

SEQ ID NO: 151900 - DNA, 20 bp, synthetic construct
  source 1..20: mol_type = other DNA
aactcaaatgtgaaagttgt

SEQ ID NO: 151901 - DNA, 20 bp, synthetic construct
  source 1..20: mol_type = other DNA
aaactcaaatgtgaaagttg

SEQ ID NO: 151902 - DNA, 20 bp, synthetic construct
  source 1..20: mol_type = other DNA
aaaactcaaatgtgaaagtt

SEQ ID NO: 151903 - DNA, 20 bp, synthetic construct
  source 1..20: mol_type = other DNA
aaaaactcaaatgtgaaagt

SEQ ID NO: 151904 - DNA, 20 bp, synthetic construct
  source 1..20: mol_type = other DNA
gaaaaactcaaatgtgaaag

SEQ ID NO: 151905 - DNA, 20 bp, synthetic construct
  source 1..20: mol_type = other DNA
ggaaaaactcaaatgtgaaa

SEQ ID NO: 151906 - DNA, 20 bp, synthetic construct
  source 1..20: mol_type = other DNA
tggaaaaactcaaatgtgaa

SEQ ID NO: 151907 - DNA, 20 bp, synthetic construct
  source 1..20: mol_type = other DNA
ttggaaaaactcaaatgtga

SEQ ID NO: 151908 - DNA, 20 bp, synthetic construct
  source 1..20: mol_type = other DNA
tttggaaaaactcaaatgtg

SEQ ID NO: 151909 - DNA, 20 bp, synthetic construct
  source 1..20: mol_type = other DNA
ttttggaaaaactcaaatgt

SEQ ID NO: 151910 - DNA, 20 bp, synthetic construct
  source 1..20: mol_type = other DNA
attttggaaaaactcaaatg

SEQ ID NO: 151911 - DNA, 20 bp, synthetic construct
  source 1..20: mol_type = other DNA
aattttggaaaaactcaaat

SEQ ID NO: 151912 - DNA, 20 bp, synthetic construct
  source 1..20: mol_type = other DNA
taattttggaaaaactcaaa

SEQ ID NO: 151913 - DNA, 20 bp, synthetic construct
  source 1..20: mol_type = other DNA
ttaattttggaaaaactcaa

SEQ ID NO: 151914 - DNA, 20 bp, synthetic construct
  source 1..20: mol_type = other DNA
tttaattttggaaaaactca

SEQ ID NO: 151915 - DNA, 20 bp, synthetic construct
  source 1..20: mol_type = other DNA
ctttaattttggaaaaactc

SEQ ID NO: 151916 - DNA, 20 bp, synthetic construct
  source 1..20: mol_type = other DNA
cctttaattttggaaaaact

SEQ ID NO: 151917 - DNA, 20 bp, synthetic construct
  source 1..20: mol_type = other DNA
acctttaattttggaaaaac

SEQ ID NO: 151918 - DNA, 20 bp, synthetic construct
  source 1..20: mol_type = other DNA
aacctttaattttggaaaaa

SEQ ID NO: 151919 - DNA, 20 bp, synthetic construct
  source 1..20: mol_type = other DNA
caacctttaattttggaaaa

SEQ ID NO: 151920 - DNA, 20 bp, synthetic construct
  source 1..20: mol_type = other DNA
acaacctttaattttggaaa

SEQ ID NO: 151921 - DNA, 20 bp, synthetic construct
  source 1..20: mol_type = other DNA
tacaacctttaattttggaa

SEQ ID NO: 151922 - DNA, 20 bp, synthetic construct
  source 1..20: mol_type = other DNA
ctacaacctttaattttgga

SEQ ID NO: 151923 - DNA, 20 bp, synthetic construct
  source 1..20: mol_type = other DNA
tctacaacctttaattttgg

SEQ ID NO: 151924 - DNA, 20 bp, synthetic construct
  source 1..20: mol_type = other DNA
ttctacaacctttaattttg

SEQ ID NO: 151925 - DNA, 20 bp, synthetic construct
  source 1..20: mol_type = other DNA
cttctacaacctttaatttt

SEQ ID NO: 151926 - DNA, 20 bp, synthetic construct
  source 1..20: mol_type = other DNA
tcttctacaacctttaattt

SEQ ID NO: 151927 - DNA, 20 bp, synthetic construct
  source 1..20: mol_type = other DNA
ctcttctacaacctttaatt

SEQ ID NO: 151928 - DNA, 20 bp, synthetic construct
  source 1..20: mol_type = other DNA
actcttctacaacctttaat

SEQ ID NO: 151929 - DNA, 20 bp, synthetic construct
  source 1..20: mol_type = other DNA
gactcttctacaacctttaa

SEQ ID NO: 151930 - DNA, 20 bp, synthetic construct
  source 1..20: mol_type = other DNA
tgactcttctacaaccttta

SEQ ID NO: 151931 - DNA, 20 bp, synthetic construct
  source 1..20: mol_type = other DNA
gtgactcttctacaaccttt

SEQ ID NO: 151932 - DNA, 20 bp, synthetic construct
  source 1..20: mol_type = other DNA
tgtgactcttctacaacctt

SEQ ID NO: 151933 - DNA, 20 bp, synthetic construct
  source 1..20: mol_type = other DNA
ctgtgactcttctacaacct

SEQ ID NO: 151934 - DNA, 20 bp, synthetic construct
  source 1..20: mol_type = other DNA
actgtgactcttctacaacc

SEQ ID NO: 151935 - DNA, 20 bp, synthetic construct
  source 1..20: mol_type = other DNA
tactgtgactcttctacaac

SEQ ID NO: 151936 - DNA, 20 bp, synthetic construct
  source 1..20: mol_type = other DNA
atactgtgactcttctacaa

SEQ ID NO: 151937 - DNA, 20 bp, synthetic construct
  source 1..20: mol_type = other DNA
gatactgtgactcttctaca

SEQ ID NO: 151938 - DNA, 20 bp, synthetic construct
  source 1..20: mol_type = other DNA
agatactgtgactcttctac

SEQ ID NO: 151939 - DNA, 20 bp, synthetic construct
  source 1..20: mol_type = other DNA
tagatactgtgactcttcta

SEQ ID NO: 151940 - DNA, 20 bp, synthetic construct
  source 1..20: mol_type = other DNA
atagatactgtgactcttct

SEQ ID NO: 151941 - DNA, 20 bp, synthetic construct
  source 1..20: mol_type = other DNA
aatagatactgtgactcttc

SEQ ID NO: 151942 - DNA, 20 bp, synthetic construct
  source 1..20: mol_type = other DNA
caatagatactgtgactctt

SEQ ID NO: 151943 - DNA, 20 bp, synthetic construct
  source 1..20: mol_type = other DNA
acaatagatactgtgactct

SEQ ID NO: 151944 - DNA, 20 bp, synthetic construct
  source 1..20: mol_type = other DNA
gacaatagatactgtgactc

SEQ ID NO: 151945 - DNA, 20 bp, synthetic construct
  source 1..20: mol_type = other DNA
tgacaatagatactgtgact

SEQ ID NO: 151946 - DNA, 20 bp, synthetic construct
  source 1..20: mol_type = other DNA
ttgacaatagatactgtgac

SEQ ID NO: 151947 - DNA, 20 bp, synthetic construct
  source 1..20: mol_type = other DNA
tttgacaatagatactgtga

SEQ ID NO: 151948 - DNA, 20 bp, synthetic construct
  source 1..20: mol_type = other DNA
ttttgacaatagatactgtg

SEQ ID NO: 151949 - DNA, 20 bp, synthetic construct
  source 1..20: mol_type = other DNA
tttttgacaatagatactgt

SEQ ID NO: 151950 - DNA, 20 bp, synthetic construct
  source 1..20: mol_type = other DNA
ctttttgacaatagatactg

SEQ ID NO: 151951 - DNA, 20 bp, synthetic construct
  source 1..20: mol_type = other DNA
tctttttgacaatagatact

SEQ ID NO: 151952 - DNA, 20 bp, synthetic construct
  source 1..20: mol_type = other DNA
ttctttttgacaatagatac

SEQ ID NO: 151953 - DNA, 20 bp, synthetic construct
  source 1..20: mol_type = other DNA
tttctttttgacaatagata

SEQ ID NO: 151954 - DNA, 20 bp, synthetic construct
  source 1..20: mol_type = other DNA
ttttctttttgacaatagat

SEQ ID NO: 151955 - DNA, 20 bp, synthetic construct
  source 1..20: mol_type = other DNA
cttttctttttgacaataga

SEQ ID NO: 151956 - DNA, 20 bp, synthetic construct
  source 1..20: mol_type = other DNA
tcttttctttttgacaatag

SEQ ID NO: 151957 - DNA, 20 bp, synthetic construct
  source 1..20: mol_type = other DNA
ttcttttctttttgacaata

SEQ ID NO: 151958 - DNA, 20 bp, synthetic construct
  source 1..20: mol_type = other DNA
attcttttctttttgacaat

SEQ ID NO: 151959 - DNA, 20 bp, synthetic construct
  source 1..20: mol_type = other DNA
aattcttttctttttgacaa

SEQ ID NO: 151960 - DNA, 20 bp, synthetic construct
  source 1..20: mol_type = other DNA
aaattcttttctttttgaca

SEQ ID NO: 151961 - DNA, 20 bp, synthetic construct
  source 1..20: mol_type = other DNA
taaattcttttctttttgac

SEQ ID NO: 151962 - DNA, 20 bp, synthetic construct
  source 1..20: mol_type = other DNA
ttaaattcttttctttttga

SEQ ID NO: 151963 - DNA, 20 bp, synthetic construct
  source 1..20: mol_type = other DNA
tttaaattcttttctttttg

SEQ ID NO: 151964 - DNA, 20 bp, synthetic construct
  source 1..20: mol_type = other DNA
ttttaaattcttttcttttt

SEQ ID NO: 151965 - DNA, 20 bp, synthetic construct
  source 1..20: mol_type = other DNA
tttttaaattcttttctttt

SEQ ID NO: 151966 - DNA, 20 bp, synthetic construct
  source 1..20: mol_type = other DNA
ctttttaaattcttttcttt

SEQ ID NO: 151967 - DNA, 20 bp, synthetic construct
  source 1..20: mol_type = other DNA
cctttttaaattcttttctt

SEQ ID NO: 151968 - DNA, 20 bp, synthetic construct
  source 1..20: mol_type = other DNA
gcctttttaaattcttttct

SEQ ID NO: 151969 - DNA, 20 bp, synthetic construct
  source 1..20: mol_type = other DNA
tgcctttttaaattcttttc

SEQ ID NO: 151970 - DNA, 20 bp, synthetic construct
  source 1..20: mol_type = other DNA
ctgcctttttaaattctttt

SEQ ID NO: 151971 - DNA, 20 bp, synthetic construct
  source 1..20: mol_type = other DNA
gctgcctttttaaattcttt

SEQ ID NO: 151972 - DNA, 20 bp, synthetic construct
  source 1..20: mol_type = other DNA
tgctgcctttttaaattctt

SEQ ID NO: 151973 - DNA, 20 bp, synthetic construct
  source 1..20: mol_type = other DNA
ttgctgcctttttaaattct

SEQ ID NO: 151974 - DNA, 20 bp, synthetic construct
  source 1..20: mol_type = other DNA
attgctgcctttttaaattc

SEQ ID NO: 151975 - DNA, 20 bp, synthetic construct
  source 1..20: mol_type = other DNA
aattgctgcctttttaaatt

SEQ ID NO: 151976 - DNA, 20 bp, synthetic construct
  source 1..20: mol_type = other DNA
caattgctgcctttttaaat

SEQ ID NO: 151977 - DNA, 20 bp, synthetic construct
  source 1..20: mol_type = other DNA
gcaattgctgcctttttaaa

SEQ ID NO: 151978 - DNA, 20 bp, synthetic construct
  source 1..20: mol_type = other DNA
ggcaattgctgcctttttaa

SEQ ID NO: 151979 - DNA, 20 bp, synthetic construct
  source 1..20: mol_type = other DNA
tggcaattgctgccttttta

SEQ ID NO: 151980 - DNA, 20 bp, synthetic construct
  source 1..20: mol_type = other DNA
ctggcaattgctgccttttt

SEQ ID NO: 151981 - DNA, 20 bp, synthetic construct
  source 1..20: mol_type = other DNA
cctggcaattgctgcctttt

SEQ ID NO: 151982 - DNA, 20 bp, synthetic construct
  source 1..20: mol_type = other DNA
tcctggcaattgctgccttt

SEQ ID NO: 151983 - DNA, 20 bp, synthetic construct
  source 1..20: mol_type = other DNA
atcctggcaattgctgcctt

SEQ ID NO: 151984 - DNA, 20 bp, synthetic construct
  source 1..20: mol_type = other DNA
tatcctggcaattgctgcct

SEQ ID NO: 151985 - DNA, 20 bp, synthetic construct
  source 1..20: mol_type = other DNA
gtatcctggcaattgctgcc

SEQ ID NO: 151986 - DNA, 20 bp, synthetic construct
  source 1..20: mol_type = other DNA
agtatcctggcaattgctgc

SEQ ID NO: 151987 - DNA, 20 bp, synthetic construct
  source 1..20: mol_type = other DNA
aagtatcctggcaattgctg

SEQ ID NO: 151988 - DNA, 20 bp, synthetic construct
  source 1..20: mol_type = other DNA
gaagtatcctggcaattgct

SEQ ID NO: 151989 - DNA, 20 bp, synthetic construct
  source 1..20: mol_type = other DNA
tgaagtatcctggcaattgc

SEQ ID NO: 151990 - DNA, 20 bp, synthetic construct
  source 1..20: mol_type = other DNA
atgaagtatcctggcaattg

SEQ ID NO: 151991 - DNA, 20 bp, synthetic construct
  source 1..20: mol_type = other DNA
aatgaagtatcctggcaatt

SEQ ID NO: 151992 - DNA, 20 bp, synthetic construct
  source 1..20: mol_type = other DNA
aaatgaagtatcctggcaat

SEQ ID NO: 151993 - DNA, 20 bp, synthetic construct
  source 1..20: mol_type = other DNA
caaatgaagtatcctggcaa

SEQ ID NO: 151994 - DNA, 20 bp, synthetic construct
  source 1..20: mol_type = other DNA
tcaaatgaagtatcctggca

SEQ ID NO: 151995 - DNA, 20 bp, synthetic construct
  source 1..20: mol_type = other DNA
ctcaaatgaagtatcctggc

SEQ ID NO: 151996 - DNA, 20 bp, synthetic construct
  source 1..20: mol_type = other DNA
gctcaaatgaagtatcctgg

SEQ ID NO: 151997 - DNA, 20 bp, synthetic construct
  source 1..20: mol_type = other DNA
tgctcaaatgaagtatcctg

SEQ ID NO: 151998 - DNA, 20 bp, synthetic construct
  source 1..20: mol_type = other DNA
ttgctcaaatgaagtatcct

SEQ ID NO: 151999 - DNA, 20 bp, synthetic construct
  source 1..20: mol_type = other DNA
attgctcaaatgaagtatcc

SEQ ID NO: 152000 - DNA, 20 bp, synthetic construct
  source 1..20: mol_type = other DNA
cattgctcaaatgaagtatc

SEQ ID NO: 152001 - DNA, 20 bp, synthetic construct
  source 1..20: mol_type = other DNA
tcattgctcaaatgaagtat

SEQ ID NO: 152002 - DNA, 20 bp, synthetic construct
  source 1..20: mol_type = other DNA
atcattgctcaaatgaagta

SEQ ID NO: 152003 - DNA, 20 bp, synthetic construct
  source 1..20: mol_type = other DNA
tatcattgctcaaatgaagt

SEQ ID NO: 152004 - DNA, 20 bp, synthetic construct
  source 1..20: mol_type = other DNA
atatcattgctcaaatgaag

SEQ ID NO: 152005 - DNA, 20 bp, synthetic construct
  source 1..20: mol_type = other DNA
aatatcattgctcaaatgaa

SEQ ID NO: 152006 - DNA, 20 bp, synthetic construct
  source 1..20: mol_type = other DNA
aaatatcattgctcaaatga

SEQ ID NO: 152007 - DNA, 20 bp, synthetic construct
  source 1..20: mol_type = other DNA
aaaatatcattgctcaaatg

SEQ ID NO: 152008 - DNA, 20 bp, synthetic construct
  source 1..20: mol_type = other DNA
gaaaatatcattgctcaaat

SEQ ID NO: 152009 - DNA, 20 bp, synthetic construct
  source 1..20: mol_type = other DNA
ggaaaatatcattgctcaaa

SEQ ID NO: 152010 - DNA, 20 bp, synthetic construct
  source 1..20: mol_type = other DNA
tggaaaatatcattgctcaa

SEQ ID NO: 152011 - DNA, 20 bp, synthetic construct
  source 1..20: mol_type = other DNA
ctggaaaatatcattgctca

SEQ ID NO: 152012 - DNA, 20 bp, synthetic construct
  source 1..20: mol_type = other DNA
actggaaaatatcattgctc

SEQ ID NO: 152013 - DNA, 20 bp, synthetic construct
  source 1..20: mol_type = other DNA
cactggaaaatatcattgct

SEQ ID NO: 152014 - DNA, 20 bp, synthetic construct
  source 1..20: mol_type = other DNA
ccactggaaaatatcattgc

SEQ ID NO: 152015 - DNA, 20 bp, synthetic construct
  source 1..20: mol_type = other DNA
tccactggaaaatatcattg

SEQ ID NO: 152016 - DNA, 20 bp, synthetic construct
  source 1..20: mol_type = other DNA
ttccactggaaaatatcatt

SEQ ID NO: 152017 - DNA, 20 bp, synthetic construct
  source 1..20: mol_type = other DNA
tttccactggaaaatatcat

SEQ ID NO: 152018 - DNA, 20 bp, synthetic construct
  source 1..20: mol_type = other DNA
ctttccactggaaaatatca

SEQ ID NO: 152019 - DNA, 20 bp, synthetic construct
  source 1..20: mol_type = other DNA
actttccactggaaaatatc

SEQ ID NO: 152020 - DNA, 20 bp, synthetic construct
  source 1..20: mol_type = other DNA
gactttccactggaaaatat

SEQ ID NO: 152021 - DNA, 20 bp, synthetic construct
  source 1..20: mol_type = other DNA
tgactttccactggaaaata

SEQ ID NO: 152022 - DNA, 20 bp, synthetic construct
  source 1..20: mol_type = other DNA
gtgactttccactggaaaat

SEQ ID NO: 152023 - DNA, 20 bp, synthetic construct
  source 1..20: mol_type = other DNA
tgtgactttccactggaaaa

SEQ ID NO: 152024 - DNA, 20 bp, synthetic construct
  source 1..20: mol_type = other DNA
atgtgactttccactggaaa

SEQ ID NO: 152025 - DNA, 20 bp, synthetic construct
  source 1..20: mol_type = other DNA
gatgtgactttccactggaa

SEQ ID NO: 152026 - DNA, 20 bp, synthetic construct
  source 1..20: mol_type = other DNA
agatgtgactttccactgga

SEQ ID NO: 152027 - DNA, 20 bp, synthetic construct
  source 1..20: mol_type = other DNA
aagatgtgactttccactgg

SEQ ID NO: 152028 - DNA, 20 bp, synthetic construct
  source 1..20: mol_type = other DNA
taagatgtgactttccactg

SEQ ID NO: 152029 - DNA, 20 bp, synthetic construct
  source 1..20: mol_type = other DNA
ttaagatgtgactttccact

SEQ ID NO: 152030 - DNA, 20 bp, synthetic construct
  source 1..20: mol_type = other DNA
cttaagatgtgactttccac

SEQ ID NO: 152031 - DNA, 20 bp, synthetic construct
  source 1..20: mol_type = other DNA
ccttaagatgtgactttcca

SEQ ID NO: 152032 - DNA, 20 bp, synthetic construct
  source 1..20: mol_type = other DNA
cccttaagatgtgactttcc

SEQ ID NO: 152033 - DNA, 20 bp, synthetic construct
  source 1..20: mol_type = other DNA
acccttaagatgtgactttc

SEQ ID NO: 152034 - DNA, 20 bp, synthetic construct
  source 1..20: mol_type = other DNA
aacccttaagatgtgacttt

SEQ ID NO: 152035 - DNA, 20 bp, synthetic construct
  source 1..20: mol_type = other DNA
taacccttaagatgtgactt

SEQ ID NO: 152036 - DNA, 20 bp, synthetic construct
  source 1..20: mol_type = other DNA
ttaacccttaagatgtgact

SEQ ID NO: 152037 - DNA, 20 bp, synthetic construct
  source 1..20: mol_type = other DNA
attaacccttaagatgtgac

SEQ ID NO: 152038 - DNA, 20 bp, synthetic construct
  source 1..20: mol_type = other DNA
cattaacccttaagatgtga

SEQ ID NO: 152039 - DNA, 20 bp, synthetic construct
  source 1..20: mol_type = other DNA
gcattaacccttaagatgtg

SEQ ID NO: 152040 - DNA, 20 bp, synthetic construct
  source 1..20: mol_type = other DNA
ggcattaacccttaagatgt

SEQ ID NO: 152041 - DNA, 20 bp, synthetic construct
  source 1..20: mol_type = other DNA
gggcattaacccttaagatg

SEQ ID NO: 152042 - DNA, 20 bp, synthetic construct
  source 1..20: mol_type = other DNA
ggggcattaacccttaagat

SEQ ID NO: 152043 - DNA, 20 bp, synthetic construct
  source 1..20: mol_type = other DNA
aggggcattaacccttaaga

SEQ ID NO: 152044 - DNA, 20 bp, synthetic construct
  source 1..20: mol_type = other DNA
aaggggcattaacccttaag

SEQ ID NO: 152045 - DNA, 20 bp, synthetic construct
  source 1..20: mol_type = other DNA
taaggggcattaacccttaa

SEQ ID NO: 152046 - DNA, 20 bp, synthetic construct
  source 1..20: mol_type = other DNA
ttaaggggcattaaccctta

SEQ ID NO: 152047 - DNA, 20 bp, synthetic construct
  source 1..20: mol_type = other DNA
gttaaggggcattaaccctt

SEQ ID NO: 152048 - DNA, 20 bp, synthetic construct
  source 1..20: mol_type = other DNA
agttaaggggcattaaccct

SEQ ID NO: 152049 - DNA, 20 bp, synthetic construct
  source 1..20: mol_type = other DNA
cagttaaggggcattaaccc

SEQ ID NO: 152050 - DNA, 20 bp, synthetic construct
  source 1..20: mol_type = other DNA
acagttaaggggcattaacc

SEQ ID NO: 152051 - DNA, 20 bp, synthetic construct
  source 1..20: mol_type = other DNA
aacagttaaggggcattaac

SEQ ID NO: 152052 - DNA, 20 bp, synthetic construct
  source 1..20: mol_type = other DNA
caacagttaaggggcattaa

SEQ ID NO: 152053 - DNA, 20 bp, synthetic construct
  source 1..20: mol_type = other DNA
ccaacagttaaggggcatta

SEQ ID NO: 152054 - DNA, 20 bp, synthetic construct
  source 1..20: mol_type = other DNA
gccaacagttaaggggcatt

SEQ ID NO: 152055 - DNA, 20 bp, synthetic construct
  source 1..20: mol_type = other DNA
ggccaacagttaaggggcat

SEQ ID NO: 152056 - DNA, 20 bp, synthetic construct
  source 1..20: mol_type = other DNA
cggccaacagttaaggggca

SEQ ID NO: 152057 - DNA, 20 bp, synthetic construct
  source 1..20: mol_type = other DNA
acggccaacagttaaggggc

SEQ ID NO: 152058 - DNA, 20 bp, synthetic construct
  source 1..20: mol_type = other DNA
tacggccaacagttaagggg

SEQ ID NO: 152059 - DNA, 20 bp, synthetic construct
  source 1..20: mol_type = other DNA
atacggccaacagttaaggg

SEQ ID NO: 152060 - DNA, 20 bp, synthetic construct
  source 1..20: mol_type = other DNA
aatacggccaacagttaagg

SEQ ID NO: 152061 - DNA, 20 bp, synthetic construct
  source 1..20: mol_type = other DNA
aaatacggccaacagttaag

SEQ ID NO: 152062 - DNA, 20 bp, synthetic construct
  source 1..20: mol_type = other DNA
caaatacggccaacagttaa

SEQ ID NO: 152063 - DNA, 20 bp, synthetic construct
  source 1..20: mol_type = other DNA
tcaaatacggccaacagtta

SEQ ID NO: 152064 - DNA, 20 bp, synthetic construct
  source 1..20: mol_type = other DNA
ttcaaatacggccaacagtt

SEQ ID NO: 152065 - DNA, 20 bp, synthetic construct
  source 1..20: mol_type = other DNA
tttcaaatacggccaacagt

SEQ ID NO: 152066 - DNA, 20 bp, synthetic construct
  source 1..20: mol_type = other DNA
ttttcaaatacggccaacag

SEQ ID NO: 152067 - DNA, 20 bp, synthetic construct
  source 1..20: mol_type = other DNA
gttttcaaatacggccaaca

SEQ ID NO: 152068 - DNA, 20 bp, synthetic construct
  source 1..20: mol_type = other DNA
tgttttcaaatacggccaac

SEQ ID NO: 152069 - DNA, 20 bp, synthetic construct
  source 1..20: mol_type = other DNA
ttgttttcaaatacggccaa

SEQ ID NO: 152070 - DNA, 20 bp, synthetic construct
  source 1..20: mol_type = other DNA
tttgttttcaaatacggcca

SEQ ID NO: 152071 - DNA, 20 bp, synthetic construct
  source 1..20: mol_type = other DNA
gtttgttttcaaatacggcc

SEQ ID NO: 152072 - DNA, 20 bp, synthetic construct
  source 1..20: mol_type = other DNA
ggtttgttttcaaatacggc

SEQ ID NO: 152073 - DNA, 20 bp, synthetic construct
  source 1..20: mol_type = other DNA
tggtttgttttcaaatacgg

SEQ ID NO: 152074 - DNA, 20 bp, synthetic construct
  source 1..20: mol_type = other DNA
ttggtttgttttcaaatacg

SEQ ID NO: 152075 - DNA, 20 bp, synthetic construct
  source 1..20: mol_type = other DNA
cttggtttgttttcaaatac

SEQ ID NO: 152076 - DNA, 20 bp, synthetic construct
  source 1..20: mol_type = other DNA
gcttggtttgttttcaaata

SEQ ID NO: 152077 - DNA, 20 bp, synthetic construct
  source 1..20: mol_type = other DNA
agcttggtttgttttcaaat

SEQ ID NO: 152078 - DNA, 20 bp, synthetic construct
  source 1..20: mol_type = other DNA
tagcttggtttgttttcaaa

SEQ ID NO: 152079 - DNA, 20 bp, synthetic construct
  source 1..20: mol_type = other DNA
ttagcttggtttgttttcaa

SEQ ID NO: 152080 - DNA, 20 bp, synthetic construct
  source 1..20: mol_type = other DNA
tttagcttggtttgttttca

SEQ ID NO: 152081 - DNA, 20 bp, synthetic construct
  source 1..20: mol_type = other DNA
ttttagcttggtttgttttc

SEQ ID NO: 152082 - DNA, 20 bp, synthetic construct
  source 1..20: mol_type = other DNA
tttttagcttggtttgtttt

SEQ ID NO: 152083 - DNA, 20 bp, synthetic construct
  source 1..20: mol_type = other DNA
gtttttagcttggtttgttt

SEQ ID NO: 152084 - DNA, 20 bp, synthetic construct
  source 1..20: mol_type = other DNA
tgtttttagcttggtttgtt

SEQ ID NO: 152085 - DNA, 20 bp, synthetic construct
  source 1..20: mol_type = other DNA
ttgtttttagcttggtttgt

SEQ ID NO: 152086 - DNA, 20 bp, synthetic construct
  source 1..20: mol_type = other DNA
cttgtttttagcttggtttg

SEQ ID NO: 152087 - DNA, 20 bp, synthetic construct
  source 1..20: mol_type = other DNA
tcttgtttttagcttggttt

SEQ ID NO: 152088 - DNA, 20 bp, synthetic construct
  source 1..20: mol_type = other DNA
ctcttgtttttagcttggtt

SEQ ID NO: 152089 - DNA, 20 bp, synthetic construct
  source 1..20: mol_type = other DNA
tctcttgtttttagcttggt

SEQ ID NO: 152090 - DNA, 20 bp, synthetic construct
  source 1..20: mol_type = other DNA
gtctcttgtttttagcttgg

SEQ ID NO: 152091 - DNA, 20 bp, synthetic construct
  source 1..20: mol_type = other DNA
tgtctcttgtttttagcttg

SEQ ID NO: 152092 - DNA, 20 bp, synthetic construct
  source 1..20: mol_type = other DNA
gtgtctcttgtttttagctt

SEQ ID NO: 152093 - DNA, 20 bp, synthetic construct
  source 1..20: mol_type = other DNA
agtgtctcttgtttttagct

SEQ ID NO: 152094 - DNA, 20 bp, synthetic construct
  source 1..20: mol_type = other DNA
cagtgtctcttgtttttagc

SEQ ID NO: 152095 - DNA, 20 bp, synthetic construct
  source 1..20: mol_type = other DNA
tcagtgtctcttgtttttag

SEQ ID NO: 152096 - DNA, 20 bp, synthetic construct
  source 1..20: mol_type = other DNA
gtcagtgtctcttgttttta

SEQ ID NO: 152097 - DNA, 20 bp, synthetic construct
  source 1..20: mol_type = other DNA
tgtcagtgtctcttgttttt

SEQ ID NO: 152098 - DNA, 20 bp, synthetic construct
  source 1..20: mol_type = other DNA
atgtcagtgtctcttgtttt

SEQ ID NO: 152099 - DNA, 20 bp, synthetic construct
  source 1..20: mol_type = other DNA
catgtcagtgtctcttgttt

SEQ ID NO: 152100 - DNA, 20 bp, synthetic construct
  source 1..20: mol_type = other DNA
acatgtcagtgtctcttgtt

SEQ ID NO: 152101 - DNA, 20 bp, synthetic construct
  source 1..20: mol_type = other DNA
aacatgtcagtgtctcttgt

SEQ ID NO: 152102 - DNA, 20 bp, synthetic construct
  source 1..20: mol_type = other DNA
caacatgtcagtgtctcttg

SEQ ID NO: 152103 - DNA, 20 bp, synthetic construct
  source 1..20: mol_type = other DNA
acaacatgtcagtgtctctt

SEQ ID NO: 152104 - DNA, 20 bp, synthetic construct
  source 1..20: mol_type = other DNA
tacaacatgtcagtgtctct

SEQ ID NO: 152105 - DNA, 20 bp, synthetic construct
  source 1..20: mol_type = other DNA
atacaacatgtcagtgtctc

SEQ ID NO: 152106 - DNA, 20 bp, synthetic construct
  source 1..20: mol_type = other DNA
catacaacatgtcagtgtct

SEQ ID NO: 152107 - DNA, 20 bp, synthetic construct
  source 1..20: mol_type = other DNA
tcatacaacatgtcagtgtc

SEQ ID NO: 152108 - DNA, 20 bp, synthetic construct
  source 1..20: mol_type = other DNA
gtcatacaacatgtcagtgt

SEQ ID NO: 152109 - DNA, 20 bp, synthetic construct
  source 1..20: mol_type = other DNA
cgtcatacaacatgtcagtg

SEQ ID NO: 152110 - DNA, 20 bp, synthetic construct
  source 1..20: mol_type = other DNA
ccgtcatacaacatgtcagt

SEQ ID NO: 152111 - DNA, 20 bp, synthetic construct
  source 1..20: mol_type = other DNA
accgtcatacaacatgtcag

SEQ ID NO: 152112 - DNA, 20 bp, synthetic construct
  source 1..20: mol_type = other DNA
caccgtcatacaacatgtca

SEQ ID NO: 152113 - DNA, 20 bp, synthetic construct
  source 1..20: mol_type = other DNA
acaccgtcatacaacatgtc

SEQ ID NO: 152114 - DNA, 20 bp, synthetic construct
  source 1..20: mol_type = other DNA
cacaccgtcatacaacatgt

SEQ ID NO: 152115 - DNA, 20 bp, synthetic construct
  source 1..20: mol_type = other DNA
ccacaccgtcatacaacatg

SEQ ID NO: 152116 - DNA, 20 bp, synthetic construct
  source 1..20: mol_type = other DNA
accacaccgtcatacaacat

SEQ ID NO: 152117 - DNA, 20 bp, synthetic construct
  source 1..20: mol_type = other DNA
caccacaccgtcatacaaca

SEQ ID NO: 152118 - DNA, 20 bp, synthetic construct
  source 1..20: mol_type = other DNA
acaccacaccgtcatacaac

SEQ ID NO: 152119 - DNA, 20 bp, synthetic construct
  source 1..20: mol_type = other DNA
cacaccacaccgtcatacaa

SEQ ID NO: 152120 - DNA, 20 bp, synthetic construct
  source 1..20: mol_type = other DNA
ccacaccacaccgtcataca

SEQ ID NO: 152121 - DNA, 20 bp, synthetic construct
  source 1..20: mol_type = other DNA
tccacaccacaccgtcatac

SEQ ID NO: 152122 - DNA, 20 bp, synthetic construct
  source 1..20: mol_type = other DNA
atccacaccacaccgtcata

SEQ ID NO: 152123 - DNA, 20 bp, synthetic construct
  source 1..20: mol_type = other DNA
catccacaccacaccgtcat

SEQ ID NO: 152124 - DNA, 20 bp, synthetic construct
  source 1..20: mol_type = other DNA
acatccacaccacaccgtca

SEQ ID NO: 152125 - DNA, 20 bp, synthetic construct
  source 1..20: mol_type = other DNA
aacatccacaccacaccgtc

SEQ ID NO: 152126 - DNA, 20 bp, synthetic construct
  source 1..20: mol_type = other DNA
caacatccacaccacaccgt

SEQ ID NO: 152127 - DNA, 20 bp, synthetic construct
  source 1..20: mol_type = other DNA
acaacatccacaccacaccg

SEQ ID NO: 152128 - DNA, 20 bp, synthetic construct
  source 1..20: mol_type = other DNA
cacaacatccacaccacacc

SEQ ID NO: 152129 - DNA, 20 bp, synthetic construct
  source 1..20: mol_type = other DNA
acacaacatccacaccacac

SEQ ID NO: 152130 - DNA, 20 bp, synthetic construct
  source 1..20: mol_type = other DNA
aacacaacatccacaccaca

SEQ ID NO: 152131 - DNA, 20 bp, synthetic construct
  source 1..20: mol_type = other DNA
aaacacaacatccacaccac

SEQ ID NO: 152132 - DNA, 20 bp, synthetic construct
  source 1..20: mol_type = other DNA
taaacacaacatccacacca

SEQ ID NO: 152133 - DNA, 20 bp, synthetic construct
  source 1..20: mol_type = other DNA
ataaacacaacatccacacc

SEQ ID NO: 152134 - DNA, 20 bp, synthetic construct
  source 1..20: mol_type = other DNA
aataaacacaacatccacac

SEQ ID NO: 152135 - DNA, 20 bp, synthetic construct
  source 1..20: mol_type = other DNA
aaataaacacaacatccaca

SEQ ID NO: 152136 - DNA, 20 bp, synthetic construct
  source 1..20: mol_type = other DNA
aaaataaacacaacatccac

SEQ ID NO: 152137 - DNA, 20 bp, synthetic construct
  source 1..20: mol_type = other DNA
taaaataaacacaacatcca

SEQ ID NO: 152138 - DNA, 20 bp, synthetic construct
  source 1..20: mol_type = other DNA
ctaaaataaacacaacatcc

SEQ ID NO: 152139 - DNA, 20 bp, synthetic construct
  source 1..20: mol_type = other DNA
actaaaataaacacaacatc

SEQ ID NO: 152140 - DNA, 20 bp, synthetic construct
  source 1..20: mol_type = other DNA
gactaaaataaacacaacat

SEQ ID NO: 152141 - DNA, 20 bp, synthetic construct
  source 1..20: mol_type = other DNA
ggactaaaataaacacaaca

SEQ ID NO: 152142 - DNA, 20 bp, synthetic construct
  source 1..20: mol_type = other DNA
aggactaaaataaacacaac

SEQ ID NO: 152143 - DNA, 20 bp, synthetic construct
  source 1..20: mol_type = other DNA
caggactaaaataaacacaa

SEQ ID NO: 152144 - DNA, 20 bp, synthetic construct
  source 1..20: mol_type = other DNA
tcaggactaaaataaacaca

SEQ ID NO: 152145 - DNA, 20 bp, synthetic construct
  source 1..20: mol_type = other DNA
ctcaggactaaaataaacac

SEQ ID NO: 152146 - DNA, 20 bp, synthetic construct
  source 1..20: mol_type = other DNA
tctcaggactaaaataaaca

SEQ ID NO: 152147 - DNA, 20 bp, synthetic construct
  source 1..20: mol_type = other DNA
atctcaggactaaaataaac

SEQ ID NO: 152148 - DNA, 20 bp, synthetic construct
  source 1..20: mol_type = other DNA
gatctcaggactaaaataaa

SEQ ID NO: 152149 - DNA, 20 bp, synthetic construct
  source 1..20: mol_type = other DNA
agatctcaggactaaaataa

SEQ ID NO: 152150 - DNA, 20 bp, synthetic construct
  source 1..20: mol_type = other DNA
tagatctcaggactaaaata

SEQ ID NO: 152151 - DNA, 20 bp, synthetic construct
  source 1..20: mol_type = other DNA
ctagatctcaggactaaaat

SEQ ID NO: 152152 - DNA, 20 bp, synthetic construct
  source 1..20: mol_type = other DNA
actagatctcaggactaaaa

SEQ ID NO: 152153 - DNA, 20 bp, synthetic construct
  source 1..20: mol_type = other DNA
aactagatctcaggactaaa

SEQ ID NO: 152154 - DNA, 20 bp, synthetic construct
  source 1..20: mol_type = other DNA
caactagatctcaggactaa

SEQ ID NO: 152155 - DNA, 20 bp, synthetic construct
  source 1..20: mol_type = other DNA
acaactagatctcaggacta

SEQ ID NO: 152156 - DNA, 20 bp, synthetic construct
  source 1..20: mol_type = other DNA
tacaactagatctcaggact

SEQ ID NO: 152157 - DNA, 20 bp, synthetic construct
  source 1..20: mol_type = other DNA
ttacaactagatctcaggac

SEQ ID NO: 152158 - DNA, 20 bp, synthetic construct
  source 1..20: mol_type = other DNA
gttacaactagatctcagga

SEQ ID NO: 152159 - DNA, 20 bp, synthetic construct
  source 1..20: mol_type = other DNA
agttacaactagatctcagg

SEQ ID NO: 152160 - DNA, 20 bp, synthetic construct
  source 1..20: mol_type = other DNA
aagttacaactagatctcag

SEQ ID NO: 152161 - DNA, 20 bp, synthetic construct
  source 1..20: mol_type = other DNA
gaagttacaactagatctca

SEQ ID NO: 152162 - DNA, 20 bp, synthetic construct
  source 1..20: mol_type = other DNA
ggaagttacaactagatctc

SEQ ID NO: 152163 - DNA, 20 bp, synthetic construct
  source 1..20: mol_type = other DNA
aggaagttacaactagatct

SEQ ID NO: 152164 - DNA, 20 bp, synthetic construct
  source 1..20: mol_type = other DNA
aaggaagttacaactagatc

SEQ ID NO: 152165 - DNA, 20 bp, synthetic construct
  source 1..20: mol_type = other DNA
caaggaagttacaactagat

SEQ ID NO: 152166 - DNA, 20 bp, synthetic construct
  source 1..20: mol_type = other DNA
tcaaggaagttacaactaga

SEQ ID NO: 152167 - DNA, 20 bp, synthetic construct
  source 1..20: mol_type = other DNA
atcaaggaagttacaactag

SEQ ID NO: 152168 - DNA, 20 bp, synthetic construct
  source 1..20: mol_type = other DNA
aatcaaggaagttacaacta

SEQ ID NO: 152169 - DNA, 20 bp, synthetic construct
  source 1..20: mol_type = other DNA
aaatcaaggaagttacaact

SEQ ID NO: 152170 - DNA, 20 bp, synthetic construct
  source 1..20: mol_type = other DNA
gaaatcaaggaagttacaac

SEQ ID NO: 152171 - DNA, 20 bp, synthetic construct
  source 1..20: mol_type = other DNA
agaaatcaaggaagttacaa

SEQ ID NO: 152172 - DNA, 20 bp, synthetic construct
  source 1..20: mol_type = other DNA
cagaaatcaaggaagttaca

SEQ ID NO: 152173 - DNA, 20 bp, synthetic construct
  source 1..20: mol_type = other DNA
acagaaatcaaggaagttac

SEQ ID NO: 152174 - DNA, 20 bp, synthetic construct
  source 1..20: mol_type = other DNA
tacagaaatcaaggaagtta

SEQ ID NO: 152175 - DNA, 20 bp, synthetic construct
  source 1..20: mol_type = other DNA
atacagaaatcaaggaagtt

SEQ ID NO: 152176 - DNA, 20 bp, synthetic construct
  source 1..20: mol_type = other DNA
catacagaaatcaaggaagt

SEQ ID NO: 152177 - DNA, 20 bp, synthetic construct
  source 1..20: mol_type = other DNA
acatacagaaatcaaggaag

SEQ ID NO: 152178 - DNA, 20 bp, synthetic construct
  source 1..20: mol_type = other DNA
tacatacagaaatcaaggaa

SEQ ID NO: 152179 - DNA, 20 bp, synthetic construct
  source 1..20: mol_type = other DNA
ctacatacagaaatcaagga

SEQ ID NO: 152180 - DNA, 20 bp, synthetic construct
  source 1..20: mol_type = other DNA
gctacatacagaaatcaagg

SEQ ID NO: 152181 - DNA, 20 bp, synthetic construct
  source 1..20: mol_type = other DNA
ggctacatacagaaatcaag

SEQ ID NO: 152182 - DNA, 20 bp, synthetic construct
  source 1..20: mol_type = other DNA
tggctacatacagaaatcaa

SEQ ID NO: 152183 - DNA, 20 bp, synthetic construct
  source 1..20: mol_type = other DNA
gtggctacatacagaaatca

SEQ ID NO: 152184 - DNA, 20 bp, synthetic construct
  source 1..20: mol_type = other DNA
cgtggctacatacagaaatc

SEQ ID NO: 152185 - DNA, 20 bp, synthetic construct
  source 1..20: mol_type = other DNA
ccgtggctacatacagaaat

SEQ ID NO: 152186 - DNA, 20 bp, synthetic construct
  source 1..20: mol_type = other DNA
tccgtggctacatacagaaa

SEQ ID NO: 152187 - DNA, 20 bp, synthetic construct
  source 1..20: mol_type = other DNA
ctccgtggctacatacagaa

SEQ ID NO: 152188 - DNA, 20 bp, synthetic construct
  source 1..20: mol_type = other DNA
gctccgtggctacatacaga

SEQ ID NO: 152189 - DNA, 20 bp, synthetic construct
  source 1..20: mol_type = other DNA
tgctccgtggctacatacag

SEQ ID NO: 152190 - DNA, 20 bp, synthetic construct
  source 1..20: mol_type = other DNA
gtgctccgtggctacataca

SEQ ID NO: 152191 - DNA, 20 bp, synthetic construct
  source 1..20: mol_type = other DNA
ggtgctccgtggctacatac

SEQ ID NO: 152192 - DNA, 20 bp, synthetic construct
  source 1..20: mol_type = other DNA
tggtgctccgtggctacata

SEQ ID NO: 152193 - DNA, 20 bp, synthetic construct
  source 1..20: mol_type = other DNA
atggtgctccgtggctacat

SEQ ID NO: 152194 - DNA, 20 bp, synthetic construct
  source 1..20: mol_type = other DNA
aatggtgctccgtggctaca

SEQ ID NO: 152195 - DNA, 20 bp, synthetic construct
  source 1..20: mol_type = other DNA
taatggtgctccgtggctac

SEQ ID NO: 152196 - DNA, 20 bp, synthetic construct
  source 1..20: mol_type = other DNA
gtaatggtgctccgtggcta

SEQ ID NO: 152197 - DNA, 20 bp, synthetic construct
  source 1..20: mol_type = other DNA
ggtaatggtgctccgtggct

SEQ ID NO: 152198 - DNA, 20 bp, synthetic construct
  source 1..20: mol_type = other DNA
aggtaatggtgctccgtggc

SEQ ID NO: 152199 - DNA, 20 bp, synthetic construct
  source 1..20: mol_type = other DNA
caggtaatggtgctccgtgg

SEQ ID NO: 152200 - DNA, 20 bp, synthetic construct
  source 1..20: mol_type = other DNA
acaggtaatggtgctccgtg

SEQ ID NO: 152201 - DNA, 20 bp, synthetic construct
  source 1..20: mol_type = other DNA
gacaggtaatggtgctccgt

SEQ ID NO: 152202 - DNA, 20 bp, synthetic construct
  source 1..20: mol_type = other DNA
tgacaggtaatggtgctccg

SEQ ID NO: 152203 - DNA, 20 bp, synthetic construct
  source 1..20: mol_type = other DNA
gtgacaggtaatggtgctcc

SEQ ID NO: 152204 - DNA, 20 bp, synthetic construct
  source 1..20: mol_type = other DNA
ggtgacaggtaatggtgctc

SEQ ID NO: 152205 - DNA, 20 bp, synthetic construct
  source 1..20: mol_type = other DNA
tggtgacaggtaatggtgct

SEQ ID NO: 152206 - DNA, 20 bp, synthetic construct
  source 1..20: mol_type = other DNA
atggtgacaggtaatggtgc

SEQ ID NO: 152207 - DNA, 20 bp, synthetic construct
  source 1..20: mol_type = other DNA
aatggtgacaggtaatggtg

SEQ ID NO: 152208 - DNA, 20 bp, synthetic construct
  source 1..20: mol_type = other DNA
taatggtgacaggtaatggt

SEQ ID NO: 152209 - DNA, 20 bp, synthetic construct
  source 1..20: mol_type = other DNA
gtaatggtgacaggtaatgg

SEQ ID NO: 152210 - DNA, 20 bp, synthetic construct
  source 1..20: mol_type = other DNA
ggtaatggtgacaggtaatg

SEQ ID NO: 152211 - DNA, 20 bp, synthetic construct
  source 1..20: mol_type = other DNA
aggtaatggtgacaggtaat

SEQ ID NO: 152212 - DNA, 20 bp, synthetic construct
  source 1..20: mol_type = other DNA
caggtaatggtgacaggtaa

SEQ ID NO: 152213 - DNA, 20 bp, synthetic construct
  source 1..20: mol_type = other DNA
tcaggtaatggtgacaggta

SEQ ID NO: 152214 - DNA, 20 bp, synthetic construct
  source 1..20: mol_type = other DNA
ttcaggtaatggtgacaggt

SEQ ID NO: 152215 - DNA, 20 bp, synthetic construct
  source 1..20: mol_type = other DNA
attcaggtaatggtgacagg

SEQ ID NO: 152216 - DNA, 20 bp, synthetic construct
  source 1..20: mol_type = other DNA
cattcaggtaatggtgacag

SEQ ID NO: 152217 - DNA, 20 bp, synthetic construct
  source 1..20: mol_type = other DNA
ccattcaggtaatggtgaca

SEQ ID NO: 152218 - DNA, 20 bp, synthetic construct
  source 1..20: mol_type = other DNA
gccattcaggtaatggtgac

SEQ ID NO: 152219 - DNA, 20 bp, synthetic construct
  source 1..20: mol_type = other DNA
agccattcaggtaatggtga

SEQ ID NO: 152220 - DNA, 20 bp, synthetic construct
  source 1..20: mol_type = other DNA
tagccattcaggtaatggtg

SEQ ID NO: 152221 - DNA, 20 bp, synthetic construct
  source 1..20: mol_type = other DNA
atagccattcaggtaatggt

SEQ ID NO: 152222 - DNA, 20 bp, synthetic construct
  source 1..20: mol_type = other DNA
tatagccattcaggtaatgg

SEQ ID NO: 152223 - DNA, 20 bp, synthetic construct
  source 1..20: mol_type = other DNA
gtatagccattcaggtaatg

SEQ ID NO: 152224 - DNA, 20 bp, synthetic construct
  source 1..20: mol_type = other DNA
agtatagccattcaggtaat

SEQ ID NO: 152225 - DNA, 20 bp, synthetic construct
  source 1..20: mol_type = other DNA
cagtatagccattcaggtaa

SEQ ID NO: 152226 - DNA, 20 bp, synthetic construct
  source 1..20: mol_type = other DNA
gcagtatagccattcaggta

SEQ ID NO: 152227 - DNA, 20 bp, synthetic construct
  source 1..20: mol_type = other DNA
agcagtatagccattcaggt

SEQ ID NO: 152228 - DNA, 20 bp, synthetic construct
  source 1..20: mol_type = other DNA
aagcagtatagccattcagg

SEQ ID NO: 152229 - DNA, 20 bp, synthetic construct
  source 1..20: mol_type = other DNA
caagcagtatagccattcag

SEQ ID NO: 152230 - DNA, 20 bp, synthetic construct
  source 1..20: mol_type = other DNA
gcaagcagtatagccattca

SEQ ID NO: 152231 - DNA, 20 bp, synthetic construct
  source 1..20: mol_type = other DNA
agcaagcagtatagccattc

SEQ ID NO: 152232 - DNA, 20 bp, synthetic construct
  source 1..20: mol_type = other DNA
aagcaagcagtatagccatt

SEQ ID NO: 152233 - DNA, 20 bp, synthetic construct
  source 1..20: mol_type = other DNA
aaagcaagcagtatagccat

SEQ ID NO: 152234 - DNA, 20 bp, synthetic construct
  source 1..20: mol_type = other DNA
gaaagcaagcagtatagcca

SEQ ID NO: 152235 - DNA, 20 bp, synthetic construct
  source 1..20: mol_type = other DNA
tgaaagcaagcagtatagcc

SEQ ID NO: 152236 - DNA, 20 bp, synthetic construct
  source 1..20: mol_type = other DNA
atgaaagcaagcagtatagc

SEQ ID NO: 152237 - DNA, 20 bp, synthetic construct
  source 1..20: mol_type = other DNA
aatgaaagcaagcagtatag

SEQ ID NO: 152238 - DNA, 20 bp, synthetic construct
  source 1..20: mol_type = other DNA
aaatgaaagcaagcagtata

SEQ ID NO: 152239 - DNA, 20 bp, synthetic construct
  source 1..20: mol_type = other DNA
aaaatgaaagcaagcagtat

SEQ ID NO: 152240 - DNA, 20 bp, synthetic construct
  source 1..20: mol_type = other DNA
caaaatgaaagcaagcagta

SEQ ID NO: 152241 - DNA, 20 bp, synthetic construct
  source 1..20: mol_type = other DNA
ccaaaatgaaagcaagcagt

SEQ ID NO: 152242 - DNA, 20 bp, synthetic construct
  source 1..20: mol_type = other DNA
accaaaatgaaagcaagcag

SEQ ID NO: 152243 - DNA, 20 bp, synthetic construct
  source 1..20: mol_type = other DNA
taccaaaatgaaagcaagca

SEQ ID NO: 152244 - DNA, 20 bp, synthetic construct
  source 1..20: mol_type = other DNA
ctaccaaaatgaaagcaagc

SEQ ID NO: 152245 - DNA, 20 bp, synthetic construct
  source 1..20: mol_type = other DNA
tctaccaaaatgaaagcaag

SEQ ID NO: 152246 - DNA, 20 bp, synthetic construct
  source 1..20: mol_type = other DNA
ctctaccaaaatgaaagcaa

SEQ ID NO: 152247 - DNA, 20 bp, synthetic construct
  source 1..20: mol_type = other DNA
actctaccaaaatgaaagca

SEQ ID NO: 152248 - DNA, 20 bp, synthetic construct
  source 1..20: mol_type = other DNA
cactctaccaaaatgaaagc

SEQ ID NO: 152249 - DNA, 20 bp, synthetic construct
  source 1..20: mol_type = other DNA
ccactctaccaaaatgaaag

SEQ ID NO: 152250 - DNA, 20 bp, synthetic construct
  source 1..20: mol_type = other DNA
tccactctaccaaaatgaaa

SEQ ID NO: 152251 - DNA, 20 bp, synthetic construct
  source 1..20: mol_type = other DNA
ttccactctaccaaaatgaa

SEQ ID NO: 152252 - DNA, 20 bp, synthetic construct
  source 1..20: mol_type = other DNA
tttccactctaccaaaatga

SEQ ID NO: 152253 - DNA, 20 bp, synthetic construct
  source 1..20: mol_type = other DNA
ctttccactctaccaaaatg

SEQ ID NO: 152254 - DNA, 20 bp, synthetic construct
  source 1..20: mol_type = other DNA
cctttccactctaccaaaat

SEQ ID NO: 152255 - DNA, 20 bp, synthetic construct
  source 1..20: mol_type = other DNA
acctttccactctaccaaaa

SEQ ID NO: 152256 - DNA, 20 bp, synthetic construct
  source 1..20: mol_type = other DNA
aacctttccactctaccaaa

SEQ ID NO: 152257 - DNA, 20 bp, synthetic construct
  source 1..20: mol_type = other DNA
taacctttccactctaccaa

SEQ ID NO: 152258 - DNA, 20 bp, synthetic construct
  source 1..20: mol_type = other DNA
gtaacctttccactctacca

SEQ ID NO: 152259 - DNA, 20 bp, synthetic construct
  source 1..20: mol_type = other DNA
ggtaacctttccactctacc

SEQ ID NO: 152260 - DNA, 20 bp, synthetic construct
  source 1..20: mol_type = other DNA
aggtaacctttccactctac

SEQ ID NO: 152261 - DNA, 20 bp, synthetic construct
  source 1..20: mol_type = other DNA
taggtaacctttccactcta

SEQ ID NO: 152262 - DNA, 20 bp, synthetic construct
  source 1..20: mol_type = other DNA
ctaggtaacctttccactct

SEQ ID NO: 152263 - DNA, 20 bp, synthetic construct
  source 1..20: mol_type = other DNA
cctaggtaacctttccactc

SEQ ID NO: 152264 - DNA, 20 bp, synthetic construct
  source 1..20: mol_type = other DNA
acctaggtaacctttccact

SEQ ID NO: 152265 - DNA, 20 bp, synthetic construct
  source 1..20: mol_type = other DNA
aacctaggtaacctttccac

SEQ ID NO: 152266 - DNA, 20 bp, synthetic construct
  source 1..20: mol_type = other DNA
aaacctaggtaacctttcca

SEQ ID NO: 152267 - DNA, 20 bp, synthetic construct
  source 1..20: mol_type = other DNA
gaaacctaggtaacctttcc

SEQ ID NO: 152268 - DNA, 20 bp, synthetic construct
  source 1..20: mol_type = other DNA
tgaaacctaggtaacctttc

SEQ ID NO: 152269 - DNA, 20 bp, synthetic construct
  source 1..20: mol_type = other DNA
ctgaaacctaggtaaccttt

SEQ ID NO: 152270 - DNA, 20 bp, synthetic construct
  source 1..20: mol_type = other DNA
actgaaacctaggtaacctt

SEQ ID NO: 152271 - DNA, 20 bp, synthetic construct
  source 1..20: mol_type = other DNA
cactgaaacctaggtaacct

SEQ ID NO: 152272 - DNA, 20 bp, synthetic construct
  source 1..20: mol_type = other DNA
gcactgaaacctaggtaacc

SEQ ID NO: 152273 - DNA, 20 bp, synthetic construct
  source 1..20: mol_type = other DNA
agcactgaaacctaggtaac

SEQ ID NO: 152274 - DNA, 20 bp, synthetic construct
  source 1..20: mol_type = other DNA
aagcactgaaacctaggtaa

SEQ ID NO: 152275 - DNA, 20 bp, synthetic construct
  source 1..20: mol_type = other DNA
caagcactgaaacctaggta

SEQ ID NO: 152276 - DNA, 20 bp, synthetic construct
  source 1..20: mol_type = other DNA
tcaagcactgaaacctaggt

SEQ ID NO: 152277 - DNA, 20 bp, synthetic construct
  source 1..20: mol_type = other DNA
ttcaagcactgaaacctagg

SEQ ID NO: 152278 - DNA, 20 bp, synthetic construct
  source 1..20: mol_type = other DNA
tttcaagcactgaaacctag

SEQ ID NO: 152279 - DNA, 20 bp, synthetic construct
  source 1..20: mol_type = other DNA
ttttcaagcactgaaaccta

SEQ ID NO: 152280 - DNA, 20 bp, synthetic construct
  source 1..20: mol_type = other DNA
cttttcaagcactgaaacct

SEQ ID NO: 152281 - DNA, 20 bp, synthetic construct
  source 1..20: mol_type = other DNA
tcttttcaagcactgaaacc

SEQ ID NO: 152282 - DNA, 20 bp, synthetic construct
  source 1..20: mol_type = other DNA
atcttttcaagcactgaaac

SEQ ID NO: 152283 - DNA, 20 bp, synthetic construct
  source 1..20: mol_type = other DNA
aatcttttcaagcactgaaa

SEQ ID NO: 152284 - DNA, 20 bp, synthetic construct
  source 1..20: mol_type = other DNA
aaatcttttcaagcactgaa

SEQ ID NO: 152285 - DNA, 20 bp, synthetic construct
  source 1..20: mol_type = other DNA
gaaatcttttcaagcactga

SEQ ID NO: 152286 - DNA, 20 bp, synthetic construct
  source 1..20: mol_type = other DNA
tgaaatcttttcaagcactg

SEQ ID NO: 152287 - DNA, 20 bp, synthetic construct
  source 1..20: mol_type = other DNA
ctgaaatcttttcaagcact

SEQ ID NO: 152288 - DNA, 20 bp, synthetic construct
  source 1..20: mol_type = other DNA
tctgaaatcttttcaagcac

SEQ ID NO: 152289 - DNA, 20 bp, synthetic construct
  source 1..20: mol_type = other DNA
ttctgaaatcttttcaagca

SEQ ID NO: 152290 - DNA, 20 bp, synthetic construct
  source 1..20: mol_type = other DNA
tttctgaaatcttttcaagc

SEQ ID NO: 152291 - DNA, 20 bp, synthetic construct
  source 1..20: mol_type = other DNA
ctttctgaaatcttttcaag

SEQ ID NO: 152292 - DNA, 20 bp, synthetic construct
  source 1..20: mol_type = other DNA
gctttctgaaatcttttcaa

SEQ ID NO: 152293 - DNA, 20 bp, synthetic construct
  source 1..20: mol_type = other DNA
tgctttctgaaatcttttca

SEQ ID NO: 152294 - DNA, 20 bp, synthetic construct
  source 1..20: mol_type = other DNA
ctgctttctgaaatcttttc

SEQ ID NO: 152295 - DNA, 20 bp, synthetic construct
  source 1..20: mol_type = other DNA
actgctttctgaaatctttt

SEQ ID NO: 152296 - DNA, 20 bp, synthetic construct
  source 1..20: mol_type = other DNA
tactgctttctgaaatcttt

SEQ ID NO: 152297 - DNA, 20 bp, synthetic construct
  source 1..20: mol_type = other DNA
ctactgctttctgaaatctt

SEQ ID NO: 152298 - DNA, 20 bp, synthetic construct
  source 1..20: mol_type = other DNA
actactgctttctgaaatct

SEQ ID NO: 152299 - DNA, 20 bp, synthetic construct
  source 1..20: mol_type = other DNA
tactactgctttctgaaatc

SEQ ID NO: 152300 - DNA, 20 bp, synthetic construct
  source 1..20: mol_type = other DNA
gtactactgctttctgaaat

SEQ ID NO: 152301 - DNA, 20 bp, synthetic construct
  source 1..20: mol_type = other DNA
cgtactactgctttctgaaa

SEQ ID NO: 152302 - DNA, 20 bp, synthetic construct
  source 1..20: mol_type = other DNA
acgtactactgctttctgaa

SEQ ID NO: 152303 - DNA, 20 bp, synthetic construct
  source 1..20: mol_type = other DNA
gacgtactactgctttctga

SEQ ID NO: 152304 - DNA, 20 bp, synthetic construct
  source 1..20: mol_type = other DNA
agacgtactactgctttctg

SEQ ID NO: 152305 - DNA, 20 bp, synthetic construct
  source 1..20: mol_type = other DNA
cagacgtactactgctttct

SEQ ID NO: 152306 - DNA, 20 bp, synthetic construct
  source 1..20: mol_type = other DNA
ccagacgtactactgctttc

SEQ ID NO: 152307 - DNA, 20 bp, synthetic construct
  source 1..20: mol_type = other DNA
accagacgtactactgcttt

SEQ ID NO: 152308 - DNA, 20 bp, synthetic construct
  source 1..20: mol_type = other DNA
aaccagacgtactactgctt

SEQ ID NO: 152309 - DNA, 20 bp, synthetic construct
  source 1..20: mol_type = other DNA
taaccagacgtactactgct

SEQ ID NO: 152310 - DNA, 20 bp, synthetic construct
  source 1..20: mol_type = other DNA
ctaaccagacgtactactgc

SEQ ID NO: 152311 - DNA, 20 bp, synthetic construct
  source 1..20: mol_type = other DNA
tctaaccagacgtactactg

SEQ ID NO: 152312 - DNA, 20 bp, synthetic construct
  source 1..20: mol_type = other DNA
gtctaaccagacgtactact

SEQ ID NO: 152313 - DNA, 20 bp, synthetic construct
  source 1..20: mol_type = other DNA
agtctaaccagacgtactac

SEQ ID NO: 152314 - DNA, 20 bp, synthetic construct
  source 1..20: mol_type = other DNA
tagtctaaccagacgtacta

SEQ ID NO: 152315 - DNA, 20 bp, synthetic construct
  source 1..20: mol_type = other DNA
ctagtctaaccagacgtact

SEQ ID NO: 152316 - DNA, 20 bp, synthetic construct
  source 1..20: mol_type = other DNA
tctagtctaaccagacgtac

SEQ ID NO: 152317 - DNA, 20 bp, synthetic construct
  source 1..20: mol_type = other DNA
ttctagtctaaccagacgta

SEQ ID NO: 152318 - DNA, 20 bp, synthetic construct
  source 1..20: mol_type = other DNA
attctagtctaaccagacgt

SEQ ID NO: 152319 - DNA, 20 bp, synthetic construct
  source 1..20: mol_type = other DNA
gattctagtctaaccagacg

SEQ ID NO: 152320 - DNA, 20 bp, synthetic construct
  source 1..20: mol_type = other DNA
tgattctagtctaaccagac

SEQ ID NO: 152321 - DNA, 20 bp, synthetic construct
  source 1..20: mol_type = other DNA
ctgattctagtctaaccaga

SEQ ID NO: 152322 - DNA, 20 bp, synthetic construct
  source 1..20: mol_type = other DNA
actgattctagtctaaccag

SEQ ID NO: 152323 - DNA, 20 bp, synthetic construct
  source 1..20: mol_type = other DNA
gactgattctagtctaacca

SEQ ID NO: 152324 - DNA, 20 bp, synthetic construct
  source 1..20: mol_type = other DNA
ggactgattctagtctaacc

SEQ ID NO: 152325 - DNA, 20 bp, synthetic construct
  source 1..20: mol_type = other DNA
aggactgattctagtctaac

SEQ ID NO: 152326 - DNA, 20 bp, synthetic construct
  source 1..20: mol_type = other DNA
gaggactgattctagtctaa

SEQ ID NO: 152327 - DNA, 20 bp, synthetic construct
  source 1..20: mol_type = other DNA
agaggactgattctagtcta

SEQ ID NO: 152328 - DNA, 20 bp, synthetic construct
  source 1..20: mol_type = other DNA
gagaggactgattctagtct

SEQ ID NO: 152329 - DNA, 20 bp, synthetic construct
  source 1..20: mol_type = other DNA
ggagaggactgattctagtc

SEQ ID NO: 152330 - DNA, 20 bp, synthetic construct
  source 1..20: mol_type = other DNA
aggagaggactgattctagt

SEQ ID NO: 152331 - DNA, 20 bp, synthetic construct
  source 1..20: mol_type = other DNA
caggagaggactgattctag

SEQ ID NO: 152332 - DNA, 20 bp, synthetic construct
  source 1..20: mol_type = other DNA
ccaggagaggactgattcta

SEQ ID NO: 152333 - DNA, 20 bp, synthetic construct
  source 1..20: mol_type = other DNA
cccaggagaggactgattct

SEQ ID NO: 152334 - DNA, 20 bp, synthetic construct
  source 1..20: mol_type = other DNA
ccccaggagaggactgattc

SEQ ID NO: 152335 - DNA, 20 bp, synthetic construct
  source 1..20: mol_type = other DNA
cccccaggagaggactgatt

SEQ ID NO: 152336 - DNA, 20 bp, synthetic construct
  source 1..20: mol_type = other DNA
gcccccaggagaggactgat

SEQ ID NO: 152337 - DNA, 20 bp, synthetic construct
  source 1..20: mol_type = other DNA
tgcccccaggagaggactga

SEQ ID NO: 152338 - DNA, 20 bp, synthetic construct
  source 1..20: mol_type = other DNA
ctgcccccaggagaggactg

SEQ ID NO: 152339 - DNA, 20 bp, synthetic construct
  source 1..20: mol_type = other DNA
actgcccccaggagaggact

SEQ ID NO: 152340 - DNA, 20 bp, synthetic construct
  source 1..20: mol_type = other DNA
cactgcccccaggagaggac

SEQ ID NO: 152341 - DNA, 20 bp, synthetic construct
  source 1..20: mol_type = other DNA
ccactgcccccaggagagga

SEQ ID NO: 152342 - DNA, 20 bp, synthetic construct
  source 1..20: mol_type = other DNA
tccactgcccccaggagagg

SEQ ID NO: 152343 - DNA, 20 bp, synthetic construct
  source 1..20: mol_type = other DNA
ttccactgcccccaggagag

SEQ ID NO: 152344 - DNA, 20 bp, synthetic construct
  source 1..20: mol_type = other DNA
attccactgcccccaggaga

SEQ ID NO: 152345 - DNA, 20 bp, synthetic construct
  source 1..20: mol_type = other DNA
tattccactgcccccaggag

SEQ ID NO: 152346 - DNA, 20 bp, synthetic construct
  source 1..20: mol_type = other DNA
atattccactgcccccagga

SEQ ID NO: 152347 - DNA, 20 bp, synthetic construct
  source 1..20: mol_type = other DNA
tatattccactgcccccagg

SEQ ID NO: 152348 - DNA, 20 bp, synthetic construct
  source 1..20: mol_type = other DNA
ttatattccactgcccccag

SEQ ID NO: 152349 - DNA, 20 bp, synthetic construct
  source 1..20: mol_type = other DNA
attatattccactgccccca

SEQ ID NO: 152350 - DNA, 20 bp, synthetic construct
  source 1..20: mol_type = other DNA
tattatattccactgccccc

SEQ ID NO: 152351 - DNA, 20 bp, synthetic construct
  source 1..20: mol_type = other DNA
atattatattccactgcccc

SEQ ID NO: 152352 - DNA, 20 bp, synthetic construct
  source 1..20: mol_type = other DNA
aatattatattccactgccc

SEQ ID NO: 152353 - DNA, 20 bp, synthetic construct
  source 1..20: mol_type = other DNA
aaatattatattccactgcc

SEQ ID NO: 152354 - DNA, 20 bp, synthetic construct
  source 1..20: mol_type = other DNA
aaaatattatattccactgc

SEQ ID NO: 152355 - DNA, 20 bp, synthetic construct
  source 1..20: mol_type = other DNA
gaaaatattatattccactg

SEQ ID NO: 152356 - DNA, 20 bp, synthetic construct
  source 1..20: mol_type = other DNA
agaaaatattatattccact

SEQ ID NO: 152357 - DNA, 20 bp, synthetic construct
  source 1..20: mol_type = other DNA
cagaaaatattatattccac

SEQ ID NO: 152358 - DNA, 20 bp, synthetic construct
  source 1..20: mol_type = other DNA
tcagaaaatattatattcca

SEQ ID NO: 152359 - DNA, 20 bp, synthetic construct
  source 1..20: mol_type = other DNA
gtcagaaaatattatattcc

SEQ ID NO: 152360 - DNA, 20 bp, synthetic construct
  source 1..20: mol_type = other DNA
agtcagaaaatattatattc

SEQ ID NO: 152361 - DNA, 20 bp, synthetic construct
  source 1..20: mol_type = other DNA
cagtcagaaaatattatatt

SEQ ID NO: 152362 - DNA, 20 bp, synthetic construct
  source 1..20: mol_type = other DNA
gcagtcagaaaatattatat

SEQ ID NO: 152363 - DNA, 20 bp, synthetic construct
  source 1..20: mol_type = other DNA
agcagtcagaaaatattata

SEQ ID NO: 152364 - DNA, 20 bp, synthetic construct
  source 1..20: mol_type = other DNA
tagcagtcagaaaatattat

SEQ ID NO: 152365 - DNA, 20 bp, synthetic construct
  source 1..20: mol_type = other DNA
ttagcagtcagaaaatatta

SEQ ID NO: 152366 - DNA, 20 bp, synthetic construct
  source 1..20: mol_type = other DNA
attagcagtcagaaaatatt

SEQ ID NO: 152367 - DNA, 20 bp, synthetic construct
  source 1..20: mol_type = other DNA
aattagcagtcagaaaatat

SEQ ID NO: 152368 - DNA, 20 bp, synthetic construct
  source 1..20: mol_type = other DNA
taattagcagtcagaaaata

SEQ ID NO: 152369 - DNA, 20 bp, synthetic construct
  source 1..20: mol_type = other DNA
ttaattagcagtcagaaaat

SEQ ID NO: 152370 - DNA, 20 bp, synthetic construct
  source 1..20: mol_type = other DNA
tttaattagcagtcagaaaa

SEQ ID NO: 152371 - DNA, 20 bp, synthetic construct
  source 1..20: mol_type = other DNA
ttttaattagcagtcagaaa

SEQ ID NO: 152372 - DNA, 20 bp, synthetic construct
  source 1..20: mol_type = other DNA
tttttaattagcagtcagaa

SEQ ID NO: 152373 - DNA, 20 bp, synthetic construct
  source 1..20: mol_type = other DNA
atttttaattagcagtcaga

SEQ ID NO: 152374 - DNA, 20 bp, synthetic construct
  source 1..20: mol_type = other DNA
tatttttaattagcagtcag

SEQ ID NO: 152375 - DNA, 20 bp, synthetic construct
  source 1..20: mol_type = other DNA
gtatttttaattagcagtca

SEQ ID NO: 152376 - DNA, 20 bp, synthetic construct
  source 1..20: mol_type = other DNA
ggtatttttaattagcagtc

SEQ ID NO: 152377 - DNA, 20 bp, synthetic construct
  source 1..20: mol_type = other DNA
aggtatttttaattagcagt

SEQ ID NO: 152378 - DNA, 20 bp, synthetic construct
  source 1..20: mol_type = other DNA
caggtatttttaattagcag

SEQ ID NO: 152379 - DNA, 20 bp, synthetic construct
  source 1..20: mol_type = other DNA
acaggtatttttaattagca

SEQ ID NO: 152380 - DNA, 20 bp, synthetic construct
  source 1..20: mol_type = other DNA
cacaggtatttttaattagc

SEQ ID NO: 152381 - DNA, 20 bp, synthetic construct
  source 1..20: mol_type = other DNA
tcacaggtatttttaattag

SEQ ID NO: 152382 - DNA, 20 bp, synthetic construct
  source 1..20: mol_type = other DNA
atcacaggtatttttaatta

SEQ ID NO: 152383 - DNA, 20 bp, synthetic construct
  source 1..20: mol_type = other DNA
tatcacaggtatttttaatt

SEQ ID NO: 152384 - DNA, 20 bp, synthetic construct
  source 1..20: mol_type = other DNA
ctatcacaggtatttttaat

SEQ ID NO: 152385 - DNA, 20 bp, synthetic construct
  source 1..20: mol_type = other DNA
gctatcacaggtatttttaa

SEQ ID NO: 152386 - DNA, 20 bp, synthetic construct
  source 1..20: mol_type = other DNA
ggctatcacaggtattttta

SEQ ID NO: 152387 - DNA, 20 bp, synthetic construct
  source 1..20: mol_type = other DNA
cggctatcacaggtattttt

SEQ ID NO: 152388 - DNA, 20 bp, synthetic construct
  source 1..20: mol_type = other DNA
ccggctatcacaggtatttt

SEQ ID NO: 152389 - DNA, 20 bp, synthetic construct
  source 1..20: mol_type = other DNA
cccggctatcacaggtattt

SEQ ID NO: 152390 - DNA, 20 bp, synthetic construct
  source 1..20: mol_type = other DNA
gcccggctatcacaggtatt

SEQ ID NO: 152391 - DNA, 20 bp, synthetic construct
  source 1..20: mol_type = other DNA
cgcccggctatcacaggtat

SEQ ID NO: 152392 - DNA, 20 bp, synthetic construct
  source 1..20: mol_type = other DNA
acgcccggctatcacaggta

SEQ ID NO: 152393 - DNA, 20 bp, synthetic construct
  source 1..20: mol_type = other DNA
cacgcccggctatcacaggt

SEQ ID NO: 152394 - DNA, 20 bp, synthetic construct
  source 1..20: mol_type = other DNA
ccacgcccggctatcacagg

SEQ ID NO: 152395 - DNA, 20 bp, synthetic construct
  source 1..20: mol_type = other DNA
accacgcccggctatcacag

SEQ ID NO: 152396 - DNA, 20 bp, synthetic construct
  source 1..20: mol_type = other DNA
caccacgcccggctatcaca

SEQ ID NO: 152397 - DNA, 20 bp, synthetic construct
  source 1..20: mol_type = other DNA
ccaccacgcccggctatcac

SEQ ID NO: 152398 - DNA, 20 bp, synthetic construct
  source 1..20: mol_type = other DNA
gccaccacgcccggctatca

SEQ ID NO: 152399 - DNA, 20 bp, synthetic construct
  source 1..20: mol_type = other DNA
agccaccacgcccggctatc

SEQ ID NO: 152400 - DNA, 20 bp, synthetic construct
  source 1..20: mol_type = other DNA
aagccaccacgcccggctat

SEQ ID NO: 152401 - DNA, 20 bp, synthetic construct
  source 1..20: mol_type = other DNA
taagccaccacgcccggcta

SEQ ID NO: 152402 - DNA, 20 bp, synthetic construct
  source 1..20: mol_type = other DNA
gtaagccaccacgcccggct

SEQ ID NO: 152403 - DNA, 20 bp, synthetic construct
  source 1..20: mol_type = other DNA
cgtaagccaccacgcccggc

SEQ ID NO: 152404 - DNA, 20 bp, synthetic construct
  source 1..20: mol_type = other DNA
gcgtaagccaccacgcccgg

SEQ ID NO: 152405 - DNA, 20 bp, synthetic construct
  source 1..20: mol_type = other DNA
ggcgtaagccaccacgcccg

SEQ ID NO: 152406 - DNA, 20 bp, synthetic construct
  source 1..20: mol_type = other DNA
aggcgtaagccaccacgccc

SEQ ID NO: 152407 - DNA, 20 bp, synthetic construct
  source 1..20: mol_type = other DNA
caggcgtaagccaccacgcc

SEQ ID NO: 152408 - DNA, 20 bp, synthetic construct
  source 1..20: mol_type = other DNA
acaggcgtaagccaccacgc

SEQ ID NO: 152409 - DNA, 20 bp, synthetic construct
  source 1..20: mol_type = other DNA
tacaggcgtaagccaccacg

SEQ ID NO: 152410 - DNA, 20 bp, synthetic construct
  source 1..20: mol_type = other DNA
ttacaggcgtaagccaccac

SEQ ID NO: 152411 - DNA, 20 bp, synthetic construct
  source 1..20: mol_type = other DNA
attacaggcgtaagccacca

SEQ ID NO: 152412 - DNA, 20 bp, synthetic construct
  source 1..20: mol_type = other DNA
gattacaggcgtaagccacc

SEQ ID NO: 152413 - DNA, 20 bp, synthetic construct
  source 1..20: mol_type = other DNA
ggattacaggcgtaagccac

SEQ ID NO: 152414 - DNA, 20 bp, synthetic construct
  source 1..20: mol_type = other DNA
gggattacaggcgtaagcca

SEQ ID NO: 152415 - DNA, 20 bp, synthetic construct
  source 1..20: mol_type = other DNA
tgggattacaggcgtaagcc

SEQ ID NO: 152416 - DNA, 20 bp, synthetic construct
  source 1..20: mol_type = other DNA
ctgggattacaggcgtaagc

SEQ ID NO: 152417 - DNA, 20 bp, synthetic construct
  source 1..20: mol_type = other DNA
gctgggattacaggcgtaag

SEQ ID NO: 152418 - DNA, 20 bp, synthetic construct
  source 1..20: mol_type = other DNA
tgctgggattacaggcgtaa

SEQ ID NO: 152419 - DNA, 20 bp, synthetic construct
  source 1..20: mol_type = other DNA
gtgctgggattacaggcgta

SEQ ID NO: 152420 - DNA, 20 bp, synthetic construct
  source 1..20: mol_type = other DNA
agtgctgggattacaggcgt

SEQ ID NO: 152421 - DNA, 20 bp, synthetic construct
  source 1..20: mol_type = other DNA
aagtgctgggattacaggcg

SEQ ID NO: 152422 - DNA, 20 bp, synthetic construct
  source 1..20: mol_type = other DNA
aaagtgctgggattacaggc

SEQ ID NO: 152423 - DNA, 20 bp, synthetic construct
  source 1..20: mol_type = other DNA
caaagtgctgggattacagg

SEQ ID NO: 152424 - DNA, 20 bp, synthetic construct
  source 1..20: mol_type = other DNA
ccaaagtgctgggattacag

SEQ ID NO: 152425 - DNA, 20 bp, synthetic construct
  source 1..20: mol_type = other DNA
cccaaagtgctgggattaca

SEQ ID NO: 152426 - DNA, 20 bp, synthetic construct
  source 1..20: mol_type = other DNA
tcccaaagtgctgggattac

SEQ ID NO: 152427 - DNA, 20 bp, synthetic construct
  source 1..20: mol_type = other DNA
ctcccaaagtgctgggatta

SEQ ID NO: 152428 - DNA, 20 bp, synthetic construct
  source 1..20: mol_type = other DNA
cctcccaaagtgctgggatt

SEQ ID NO: 152429 - DNA, 20 bp, synthetic construct
  source 1..20: mol_type = other DNA
gcctcccaaagtgctgggat

SEQ ID NO: 152430 - DNA, 20 bp, synthetic construct
  source 1..20: mol_type = other DNA
ggcctcccaaagtgctggga

SEQ ID NO: 152431 - DNA, 20 bp, synthetic construct
  source 1..20: mol_type = other DNA
cggcctcccaaagtgctggg

SEQ ID NO: 152432 - DNA, 20 bp, synthetic construct
  source 1..20: mol_type = other DNA
tcggcctcccaaagtgctgg

SEQ ID NO: 152433 - DNA, 20 bp, synthetic construct
  source 1..20: mol_type = other DNA
ctcggcctcccaaagtgctg

SEQ ID NO: 152434 - DNA, 20 bp, synthetic construct
  source 1..20: mol_type = other DNA
tctcggcctcccaaagtgct

SEQ ID NO: 152435 - DNA, 20 bp, synthetic construct
  source 1..20: mol_type = other DNA
gtctcggcctcccaaagtgc

SEQ ID NO: 152436 - DNA, 20 bp, synthetic construct
  source 1..20: mol_type = other DNA
cgtctcggcctcccaaagtg

SEQ ID NO: 152437 - DNA, 20 bp, synthetic construct
  source 1..20: mol_type = other DNA
ccgtctcggcctcccaaagt

SEQ ID NO: 152438 - DNA, 20 bp, synthetic construct
  source 1..20: mol_type = other DNA
cccgtctcggcctcccaaag

SEQ ID NO: 152439 - DNA, 20 bp, synthetic construct
  source 1..20: mol_type = other DNA
acccgtctcggcctcccaaa

SEQ ID NO: 152440 - DNA, 20 bp, synthetic construct
  source 1..20: mol_type = other DNA
cacccgtctcggcctcccaa

SEQ ID NO: 152441 - DNA, 20 bp, synthetic construct
  source 1..20: mol_type = other DNA
ccacccgtctcggcctccca

SEQ ID NO: 152442 - DNA, 20 bp, synthetic construct
  source 1..20: mol_type = other DNA
tccacccgtctcggcctccc

SEQ ID NO: 152443 - DNA, 20 bp, synthetic construct
  source 1..20: mol_type = other DNA
atccacccgtctcggcctcc

SEQ ID NO: 152444 - DNA, 20 bp, synthetic construct
  source 1..20: mol_type = other DNA
gatccacccgtctcggcctc

SEQ ID NO: 152445 - DNA, 20 bp, synthetic construct
  source 1..20: mol_type = other DNA
tgatccacccgtctcggcct

SEQ ID NO: 152446 - DNA, 20 bp, synthetic construct
  source 1..20: mol_type = other DNA
gtgatccacccgtctcggcc

SEQ ID NO: 152447 - DNA, 20 bp, synthetic construct
  source 1..20: mol_type = other DNA
cgtgatccacccgtctcggc

SEQ ID NO: 152448 - DNA, 20 bp, synthetic construct
  source 1..20: mol_type = other DNA
tcgtgatccacccgtctcgg

SEQ ID NO: 152449 - DNA, 20 bp, synthetic construct
  source 1..20: mol_type = other DNA
ctcgtgatccacccgtctcg

SEQ ID NO: 152450 - DNA, 20 bp, synthetic construct
  source 1..20: mol_type = other DNA
cctcgtgatccacccgtctc

SEQ ID NO: 152451 - DNA, 20 bp, synthetic construct
  source 1..20: mol_type = other DNA
acctcgtgatccacccgtct

SEQ ID NO: 152452 - DNA, 20 bp, synthetic construct
  source 1..20: mol_type = other DNA
gacctcgtgatccacccgtc

SEQ ID NO: 152453 - DNA, 20 bp, synthetic construct
  source 1..20: mol_type = other DNA
tgacctcgtgatccacccgt

SEQ ID NO: 152454 - DNA, 20 bp, synthetic construct
  source 1..20: mol_type = other DNA
ctgacctcgtgatccacccg

SEQ ID NO: 152455 - DNA, 20 bp, synthetic construct
  source 1..20: mol_type = other DNA
gctgacctcgtgatccaccc

SEQ ID NO: 152456 - DNA, 20 bp, synthetic construct
  source 1..20: mol_type = other DNA
tgctgacctcgtgatccacc

SEQ ID NO: 152457 - DNA, 20 bp, synthetic construct
  source 1..20: mol_type = other DNA
ctgctgacctcgtgatccac

SEQ ID NO: 152458 - DNA, 20 bp, synthetic construct
  source 1..20: mol_type = other DNA
tctgctgacctcgtgatcca

SEQ ID NO: 152459 - DNA, 20 bp, synthetic construct
  source 1..20: mol_type = other DNA
atctgctgacctcgtgatcc

SEQ ID NO: 152460 - DNA, 20 bp, synthetic construct
  source 1..20: mol_type = other DNA
catctgctgacctcgtgatc

SEQ ID NO: 152461 - DNA, 20 bp, synthetic construct
  source 1..20: mol_type = other DNA
ccatctgctgacctcgtgat

SEQ ID NO: 152462 - DNA, 20 bp, synthetic construct
  source 1..20: mol_type = other DNA
tccatctgctgacctcgtga

SEQ ID NO: 152463 - DNA, 20 bp, synthetic construct
  source 1..20: mol_type = other DNA
ctccatctgctgacctcgtg

SEQ ID NO: 152464 - DNA, 20 bp, synthetic construct
  source 1..20: mol_type = other DNA
tctccatctgctgacctcgt

SEQ ID NO: 152465 - DNA, 20 bp, synthetic construct
  source 1..20: mol_type = other DNA
gtctccatctgctgacctcg

SEQ ID NO: 152466 - DNA, 20 bp, synthetic construct
  source 1..20: mol_type = other DNA
ggtctccatctgctgacctc

SEQ ID NO: 152467 - DNA, 20 bp, synthetic construct
  source 1..20: mol_type = other DNA
tggtctccatctgctgacct

SEQ ID NO: 152468 - DNA, 20 bp, synthetic construct
  source 1..20: mol_type = other DNA
atggtctccatctgctgacc

SEQ ID NO: 152469 - DNA, 20 bp, synthetic construct
  source 1..20: mol_type = other DNA
gatggtctccatctgctgac

SEQ ID NO: 152470 - DNA, 20 bp, synthetic construct
  source 1..20: mol_type = other DNA
ggatggtctccatctgctga

SEQ ID NO: 152471 - DNA, 20 bp, synthetic construct
  source 1..20: mol_type = other DNA
aggatggtctccatctgctg

SEQ ID NO: 152472 - DNA, 20 bp, synthetic construct
  source 1..20: mol_type = other DNA
caggatggtctccatctgct

SEQ ID NO: 152473 - DNA, 20 bp, synthetic construct
  source 1..20: mol_type = other DNA
ccaggatggtctccatctgc

SEQ ID NO: 152474 - DNA, 20 bp, synthetic construct
  source 1..20: mol_type = other DNA
gccaggatggtctccatctg

SEQ ID NO: 152475 - DNA, 20 bp, synthetic construct
  source 1..20: mol_type = other DNA
agccaggatggtctccatct

SEQ ID NO: 152476 - DNA, 20 bp, synthetic construct
  source 1..20: mol_type = other DNA
tagccaggatggtctccatc

SEQ ID NO: 152477 - DNA, 20 bp, synthetic construct
  source 1..20: mol_type = other DNA
ttagccaggatggtctccat

SEQ ID NO: 152478 - DNA, 20 bp, synthetic construct
  source 1..20: mol_type = other DNA
gttagccaggatggtctcca

SEQ ID NO: 152479 - DNA, 20 bp, synthetic construct
  source 1..20: mol_type = other DNA
tgttagccaggatggtctcc

SEQ ID NO: 152480 - DNA, 20 bp, synthetic construct
  source 1..20: mol_type = other DNA
gtgttagccaggatggtctc

SEQ ID NO: 152481 - DNA, 20 bp, synthetic construct
  source 1..20: mol_type = other DNA
cgtgttagccaggatggtct

SEQ ID NO: 152482 - DNA, 20 bp, synthetic construct
  source 1..20: mol_type = other DNA
ccgtgttagccaggatggtc

SEQ ID NO: 152483 - DNA, 20 bp, synthetic construct
  source 1..20: mol_type = other DNA
accgtgttagccaggatggt

SEQ ID NO: 152484 - DNA, 20 bp, synthetic construct
  source 1..20: mol_type = other DNA
caccgtgttagccaggatgg

SEQ ID NO: 152485 - DNA, 20 bp, synthetic construct
  source 1..20: mol_type = other DNA
tcaccgtgttagccaggatg

SEQ ID NO: 152486 - DNA, 20 bp, synthetic construct
  source 1..20: mol_type = other DNA
ttcaccgtgttagccaggat

SEQ ID NO: 152487 - DNA, 20 bp, synthetic construct
  source 1..20: mol_type = other DNA
tttcaccgtgttagccagga

SEQ ID NO: 152488 - DNA, 20 bp, synthetic construct
  source 1..20: mol_type = other DNA
gtttcaccgtgttagccagg

SEQ ID NO: 152489 - DNA, 20 bp, synthetic construct
  source 1..20: mol_type = other DNA
ggtttcaccgtgttagccag

SEQ ID NO: 152490 - DNA, 20 bp, synthetic construct
  source 1..20: mol_type = other DNA
gggtttcaccgtgttagcca

SEQ ID NO: 152491 - DNA, 20 bp, synthetic construct
  source 1..20: mol_type = other DNA
ggggtttcaccgtgttagcc

SEQ ID NO: 152492 - DNA, 20 bp, synthetic construct
  source 1..20: mol_type = other DNA
cggggtttcaccgtgttagc

SEQ ID NO: 152493 - DNA, 20 bp, synthetic construct
  source 1..20: mol_type = other DNA
acggggtttcaccgtgttag

SEQ ID NO: 152494 - DNA, 20 bp, synthetic construct
  source 1..20: mol_type = other DNA
gacggggtttcaccgtgtta

SEQ ID NO: 152495 - DNA, 20 bp, synthetic construct
  source 1..20: mol_type = other DNA
agacggggtttcaccgtgtt

SEQ ID NO: 152496 - DNA, 20 bp, synthetic construct
  source 1..20: mol_type = other DNA
gagacggggtttcaccgtgt

SEQ ID NO: 152497 - DNA, 20 bp, synthetic construct
  source 1..20: mol_type = other DNA
agagacggggtttcaccgtg

SEQ ID NO: 152498 - DNA, 20 bp, synthetic construct
  source 1..20: mol_type = other DNA
tagagacggggtttcaccgt

SEQ ID NO: 152499 - DNA, 20 bp, synthetic construct
  source 1..20: mol_type = other DNA
gtagagacggggtttcaccg

SEQ ID NO: 152500 - DNA, 20 bp, synthetic construct
  source 1..20: mol_type = other DNA
agtagagacggggtttcacc

SEQ ID NO: 152501 - DNA, 20 bp, synthetic construct
  source 1..20: mol_type = other DNA
tagtagagacggggtttcac

SEQ ID NO: 152502 - DNA, 20 bp, synthetic construct
  source 1..20: mol_type = other DNA
ttagtagagacggggtttca

SEQ ID NO: 152503 - DNA, 20 bp, synthetic construct
  source 1..20: mol_type = other DNA
tttagtagagacggggtttc

SEQ ID NO: 152504 - DNA, 20 bp, synthetic construct
  source 1..20: mol_type = other DNA
ttttagtagagacggggttt

SEQ ID NO: 152505 - DNA, 20 bp, synthetic construct
  source 1..20: mol_type = other DNA
tttttagtagagacggggtt

SEQ ID NO: 152506 - DNA, 20 bp, synthetic construct
  source 1..20: mol_type = other DNA
atttttagtagagacggggt

SEQ ID NO: 152507 - DNA, 20 bp, synthetic construct
  source 1..20: mol_type = other DNA
catttttagtagagacgggg

SEQ ID NO: 152508 - DNA, 20 bp, synthetic construct
  source 1..20: mol_type = other DNA
gcatttttagtagagacggg

SEQ ID NO: 152509 - DNA, 20 bp, synthetic construct
  source 1..20: mol_type = other DNA
tgcatttttagtagagacgg

SEQ ID NO: 152510 - DNA, 20 bp, synthetic construct
  source 1..20: mol_type = other DNA
ttgcatttttagtagagacg

SEQ ID NO: 152511 - DNA, 20 bp, synthetic construct
  source 1..20: mol_type = other DNA
tttgcatttttagtagagac

SEQ ID NO: 152512 - DNA, 20 bp, synthetic construct
  source 1..20: mol_type = other DNA
ttttgcatttttagtagaga

SEQ ID NO: 152513 - DNA, 20 bp, synthetic construct
  source 1..20: mol_type = other DNA
tttttgcatttttagtagag

SEQ ID NO: 152514 - DNA, 20 bp, synthetic construct
  source 1..20: mol_type = other DNA
ttttttgcatttttagtaga

SEQ ID NO: 152515 - DNA, 20 bp, synthetic construct
  source 1..20: mol_type = other DNA
tttttttgcatttttagtag

SEQ ID NO: 152516 - DNA, 20 bp, synthetic construct
  source 1..20: mol_type = other DNA
atttttttgcatttttagta

SEQ ID NO: 152517 - DNA, 20 bp, synthetic construct
  source 1..20: mol_type = other DNA
aatttttttgcatttttagt

SEQ ID NO: 152518 - DNA, 20 bp, synthetic construct
  source 1..20: mol_type = other DNA
taatttttttgcatttttag

SEQ ID NO: 152519 - DNA, 20 bp, synthetic construct
  source 1..20: mol_type = other DNA
ctaatttttttgcattttta

SEQ ID NO: 152520 - DNA, 20 bp, synthetic construct
  source 1..20: mol_type = other DNA
gctaatttttttgcattttt

SEQ ID NO: 152521 - DNA, 20 bp, synthetic construct
  source 1..20: mol_type = other DNA
ggctaatttttttgcatttt

SEQ ID NO: 152522 - DNA, 20 bp, synthetic construct
  source 1..20: mol_type = other DNA
cggctaatttttttgcattt

SEQ ID NO: 152523 - DNA, 20 bp, synthetic construct
  source 1..20: mol_type = other DNA
ccggctaatttttttgcatt

SEQ ID NO: 152524 - DNA, 20 bp, synthetic construct
  source 1..20: mol_type = other DNA
cccggctaatttttttgcat

SEQ ID NO: 152525 - DNA, 20 bp, synthetic construct
  source 1..20: mol_type = other DNA
acccggctaatttttttgca

SEQ ID NO: 152526 - DNA, 20 bp, synthetic construct
  source 1..20: mol_type = other DNA
cacccggctaatttttttgc

SEQ ID NO: 152527 - DNA, 20 bp, synthetic construct
  source 1..20: mol_type = other DNA
acacccggctaatttttttg

SEQ ID NO: 152528 - DNA, 20 bp, synthetic construct
  source 1..20: mol_type = other DNA
cacacccggctaattttttt

SEQ ID NO: 152529 - DNA, 20 bp, synthetic construct
  source 1..20: mol_type = other DNA
ccacacccggctaatttttt

SEQ ID NO: 152530 - DNA, 20 bp, synthetic construct
  source 1..20: mol_type = other DNA
accacacccggctaattttt

SEQ ID NO: 152531 - DNA, 20 bp, synthetic construct
  source 1..20: mol_type = other DNA
caccacacccggctaatttt

SEQ ID NO: 152532 - DNA, 20 bp, synthetic construct
  source 1..20: mol_type = other DNA
ccaccacacccggctaattt

SEQ ID NO: 152533 - DNA, 20 bp, synthetic construct
  source 1..20: mol_type = other DNA
accaccacacccggctaatt

SEQ ID NO: 152534 - DNA, 20 bp, synthetic construct
  source 1..20: mol_type = other DNA
caccaccacacccggctaat

SEQ ID NO: 152535 - DNA, 20 bp, synthetic construct
  source 1..20: mol_type = other DNA
ccaccaccacacccggctaa

SEQ ID NO: 152536 - DNA, 20 bp, synthetic construct
  source 1..20: mol_type = other DNA
cccaccaccacacccggcta

SEQ ID NO: 152537 - DNA, 20 bp, synthetic construct
  source 1..20: mol_type = other DNA
gcccaccaccacacccggct

SEQ ID NO: 152538 - DNA, 20 bp, synthetic construct
  source 1..20: mol_type = other DNA
cgcccaccaccacacccggc

SEQ ID NO: 152539 - DNA, 20 bp, synthetic construct
  source 1..20: mol_type = other DNA
gcgcccaccaccacacccgg

SEQ ID NO: 152540 - DNA, 20 bp, synthetic construct
  source 1..20: mol_type = other DNA
ggcgcccaccaccacacccg

SEQ ID NO: 152541 - DNA, 20 bp, synthetic construct
  source 1..20: mol_type = other DNA
aggcgcccaccaccacaccc

SEQ ID NO: 152542 - DNA, 20 bp, synthetic construct
  source 1..20: mol_type = other DNA
caggcgcccaccaccacacc

SEQ ID NO: 152543 - DNA, 20 bp, synthetic construct
  source 1..20: mol_type = other DNA
acaggcgcccaccaccacac

SEQ ID NO: 152544 - DNA, 20 bp, synthetic construct
  source 1..20: mol_type = other DNA
tacaggcgcccaccaccaca

SEQ ID NO: 152545 - DNA, 20 bp, synthetic construct
  source 1..20: mol_type = other DNA
ctacaggcgcccaccaccac

SEQ ID NO: 152546 - DNA, 20 bp, synthetic construct
  source 1..20: mol_type = other DNA
actacaggcgcccaccacca

SEQ ID NO: 152547 - DNA, 20 bp, synthetic construct
  source 1..20: mol_type = other DNA
gactacaggcgcccaccacc

SEQ ID NO: 152548 - DNA, 20 bp, synthetic construct
  source 1..20: mol_type = other DNA
ggactacaggcgcccaccac

SEQ ID NO: 152549 - DNA, 20 bp, synthetic construct
  source 1..20: mol_type = other DNA
gggactacaggcgcccacca

SEQ ID NO: 152550 - DNA, 20 bp, synthetic construct
  source 1..20: mol_type = other DNA
tgggactacaggcgcccacc

SEQ ID NO: 152551 - DNA, 20 bp, synthetic construct
  source 1..20: mol_type = other DNA
ctgggactacaggcgcccac

SEQ ID NO: 152552 - DNA, 20 bp, synthetic construct
  source 1..20: mol_type = other DNA
gctgggactacaggcgccca

SEQ ID NO: 152553 - DNA, 20 bp, synthetic construct
  source 1..20: mol_type = other DNA
agctgggactacaggcgccc

SEQ ID NO: 152554 - DNA, 20 bp, synthetic construct
  source 1..20: mol_type = other DNA
tagctgggactacaggcgcc

SEQ ID NO: 152555 - DNA, 20 bp, synthetic construct
  source 1..20: mol_type = other DNA
gtagctgggactacaggcgc

SEQ ID NO: 152556 - DNA, 20 bp, synthetic construct
  source 1..20: mol_type = other DNA
agtagctgggactacaggcg

SEQ ID NO: 152557 - DNA, 20 bp, synthetic construct
  source 1..20: mol_type = other DNA
gagtagctgggactacaggc

SEQ ID NO: 152558 - DNA, 20 bp, synthetic construct
  source 1..20: mol_type = other DNA
tgagtagctgggactacagg

SEQ ID NO: 152559 - DNA, 20 bp, synthetic construct
  source 1..20: mol_type = other DNA
ctgagtagctgggactacag

SEQ ID NO: 152560 - DNA, 20 bp, synthetic construct
  source 1..20: mol_type = other DNA
cctgagtagctgggactaca

SEQ ID NO: 152561 - DNA, 20 bp, synthetic construct
  source 1..20: mol_type = other DNA
tcctgagtagctgggactac

SEQ ID NO: 152562 - DNA, 20 bp, synthetic construct
  source 1..20: mol_type = other DNA
ctcctgagtagctgggacta

SEQ ID NO: 152563 - DNA, 20 bp, synthetic construct
  source 1..20: mol_type = other DNA
cctcctgagtagctgggact

SEQ ID NO: 152564 - DNA, 20 bp, synthetic construct
  source 1..20: mol_type = other DNA
gcctcctgagtagctgggac

SEQ ID NO: 152565 - DNA, 20 bp, synthetic construct
  source 1..20: mol_type = other DNA
agcctcctgagtagctggga

SEQ ID NO: 152566 - DNA, 20 bp, synthetic construct
  source 1..20: mol_type = other DNA
cagcctcctgagtagctggg

SEQ ID NO: 152567 - DNA, 20 bp, synthetic construct
  source 1..20: mol_type = other DNA
tcagcctcctgagtagctgg

SEQ ID NO: 152568 - DNA, 20 bp, synthetic construct
  source 1..20: mol_type = other DNA
ctcagcctcctgagtagctg

SEQ ID NO: 152569 - DNA, 20 bp, synthetic construct
  source 1..20: mol_type = other DNA
cctcagcctcctgagtagct

SEQ ID NO: 152570 - DNA, 20 bp, synthetic construct
  source 1..20: mol_type = other DNA
gcctcagcctcctgagtagc

SEQ ID NO: 152571 - DNA, 20 bp, synthetic construct
  source 1..20: mol_type = other DNA
tgcctcagcctcctgagtag

SEQ ID NO: 152572 - DNA, 20 bp, synthetic construct
  source 1..20: mol_type = other DNA
ctgcctcagcctcctgagta

SEQ ID NO: 152573 - DNA, 20 bp, synthetic construct
  source 1..20: mol_type = other DNA
cctgcctcagcctcctgagt

SEQ ID NO: 152574 - DNA, 20 bp, synthetic construct
  source 1..20: mol_type = other DNA
tcctgcctcagcctcctgag

SEQ ID NO: 152575 - DNA, 20 bp, synthetic construct
  source 1..20: mol_type = other DNA
ctcctgcctcagcctcctga

SEQ ID NO: 152576 - DNA, 20 bp, synthetic construct
  source 1..20: mol_type = other DNA
tctcctgcctcagcctcctg

SEQ ID NO: 152577 - DNA, 20 bp, synthetic construct
  source 1..20: mol_type = other DNA
ttctcctgcctcagcctcct

SEQ ID NO: 152578 - DNA, 20 bp, synthetic construct
  source 1..20: mol_type = other DNA
attctcctgcctcagcctcc

SEQ ID NO: 152579 - DNA, 20 bp, synthetic construct
  source 1..20: mol_type = other DNA
cattctcctgcctcagcctc

SEQ ID NO: 152580 - DNA, 20 bp, synthetic construct
  source 1..20: mol_type = other DNA
ccattctcctgcctcagcct

SEQ ID NO: 152581 - DNA, 20 bp, synthetic construct
  source 1..20: mol_type = other DNA
gccattctcctgcctcagcc

SEQ ID NO: 152582 - DNA, 20 bp, synthetic construct
  source 1..20: mol_type = other DNA
tgccattctcctgcctcagc

SEQ ID NO: 152583 - DNA, 20 bp, synthetic construct
  source 1..20: mol_type = other DNA
atgccattctcctgcctcag

SEQ ID NO: 152584 - DNA, 20 bp, synthetic construct
  source 1..20: mol_type = other DNA
catgccattctcctgcctca

SEQ ID NO: 152585 - DNA, 20 bp, synthetic construct
  source 1..20: mol_type = other DNA
tcatgccattctcctgcctc

SEQ ID NO: 152586 - DNA, 20 bp, synthetic construct
  source 1..20: mol_type = other DNA
ttcatgccattctcctgcct

SEQ ID NO: 152587 - DNA, 20 bp, synthetic construct
  source 1..20: mol_type = other DNA
gttcatgccattctcctgcc

SEQ ID NO: 152588 - DNA, 20 bp, synthetic construct
  source 1..20: mol_type = other DNA
ggttcatgccattctcctgc

SEQ ID NO: 152589 - DNA, 20 bp, synthetic construct
  source 1..20: mol_type = other DNA
aggttcatgccattctcctg

SEQ ID NO: 152590 - DNA, 20 bp, synthetic construct
  source 1..20: mol_type = other DNA
caggttcatgccattctcct

SEQ ID NO: 152591 - DNA, 20 bp, synthetic construct
  source 1..20: mol_type = other DNA
ccaggttcatgccattctcc

SEQ ID NO: 152592 - DNA, 20 bp, synthetic construct
  source 1..20: mol_type = other DNA
cccaggttcatgccattctc

SEQ ID NO: 152593 - DNA, 20 bp, synthetic construct
  source 1..20: mol_type = other DNA
tcccaggttcatgccattct

SEQ ID NO: 152594 - DNA, 20 bp, synthetic construct
  source 1..20: mol_type = other DNA
ctcccaggttcatgccattc

SEQ ID NO: 152595 - DNA, 20 bp, synthetic construct
  source 1..20: mol_type = other DNA
cctcccaggttcatgccatt

SEQ ID NO: 152596 - DNA, 20 bp, synthetic construct
  source 1..20: mol_type = other DNA
gcctcccaggttcatgccat

SEQ ID NO: 152597 - DNA, 20 bp, synthetic construct
  source 1..20: mol_type = other DNA
cgcctcccaggttcatgcca

SEQ ID NO: 152598 - DNA, 20 bp, synthetic construct
  source 1..20: mol_type = other DNA
ccgcctcccaggttcatgcc

SEQ ID NO: 152599 - DNA, 20 bp, synthetic construct
  source 1..20: mol_type = other DNA
tccgcctcccaggttcatgc

SEQ ID NO: 152600 - DNA, 20 bp, synthetic construct
  source 1..20: mol_type = other DNA
ctccgcctcccaggttcatg

SEQ ID NO: 152601 - DNA, 20 bp, synthetic construct
  source 1..20: mol_type = other DNA
gctccgcctcccaggttcat

SEQ ID NO: 152602 - DNA, 20 bp, synthetic construct
  source 1..20: mol_type = other DNA
agctccgcctcccaggttca

SEQ ID NO: 152603 - DNA, 20 bp, synthetic construct
  source 1..20: mol_type = other DNA
aagctccgcctcccaggttc

SEQ ID NO: 152604 - DNA, 20 bp, synthetic construct
  source 1..20: mol_type = other DNA
caagctccgcctcccaggtt

SEQ ID NO: 152605 - DNA, 20 bp, synthetic construct
  source 1..20: mol_type = other DNA
gcaagctccgcctcccaggt

SEQ ID NO: 152606 - DNA, 20 bp, synthetic construct
  source 1..20: mol_type = other DNA
tgcaagctccgcctcccagg

SEQ ID NO: 152607 - DNA, 20 bp, synthetic construct
  source 1..20: mol_type = other DNA
ctgcaagctccgcctcccag

SEQ ID NO: 152608 - DNA, 20 bp, synthetic construct
  source 1..20: mol_type = other DNA
actgcaagctccgcctccca

SEQ ID NO: 152609 - DNA, 20 bp, synthetic construct
  source 1..20: mol_type = other DNA
cactgcaagctccgcctccc

SEQ ID NO: 152610 - DNA, 20 bp, synthetic construct
  source 1..20: mol_type = other DNA
tcactgcaagctccgcctcc

SEQ ID NO: 152611 - DNA, 20 bp, synthetic construct
  source 1..20: mol_type = other DNA
ctcactgcaagctccgcctc

SEQ ID NO: 152612 - DNA, 20 bp, synthetic construct
  source 1..20: mol_type = other DNA
gctcactgcaagctccgcct

SEQ ID NO: 152613 - DNA, 20 bp, synthetic construct
  source 1..20: mol_type = other DNA
ggctcactgcaagctccgcc

SEQ ID NO: 152614 - DNA, 20 bp, synthetic construct
  source 1..20: mol_type = other DNA
cggctcactgcaagctccgc

SEQ ID NO: 152615 - DNA, 20 bp, synthetic construct
  source 1..20: mol_type = other DNA
tcggctcactgcaagctccg

SEQ ID NO: 152616 - DNA, 20 bp, synthetic construct
  source 1..20: mol_type = other DNA
ctcggctcactgcaagctcc

SEQ ID NO: 152617 - DNA, 20 bp, synthetic construct
  source 1..20: mol_type = other DNA
tctcggctcactgcaagctc

SEQ ID NO: 152618 - DNA, 20 bp, synthetic construct
  source 1..20: mol_type = other DNA
atctcggctcactgcaagct

SEQ ID NO: 152619 - DNA, 20 bp, synthetic construct
  source 1..20: mol_type = other DNA
gatctcggctcactgcaagc

SEQ ID NO: 152620 - DNA, 20 bp, synthetic construct
  source 1..20: mol_type = other DNA
tgatctcggctcactgcaag

SEQ ID NO: 152621 - DNA, 20 bp, synthetic construct
  source 1..20: mol_type = other DNA
atgatctcggctcactgcaa

SEQ ID NO: 152622 - DNA, 20 bp, synthetic construct
  source 1..20: mol_type = other DNA
catgatctcggctcactgca

SEQ ID NO: 152623 - DNA, 20 bp, synthetic construct
  source 1..20: mol_type = other DNA
acatgatctcggctcactgc

SEQ ID NO: 152624 - DNA, 20 bp, synthetic construct
  source 1..20: mol_type = other DNA
gacatgatctcggctcactg

SEQ ID NO: 152625 - DNA, 20 bp, synthetic construct
  source 1..20: mol_type = other DNA
tgacatgatctcggctcact

SEQ ID NO: 152626 - DNA, 20 bp, synthetic construct
  source 1..20: mol_type = other DNA
gtgacatgatctcggctcac

SEQ ID NO: 152627 - DNA, 20 bp, synthetic construct
  source 1..20: mol_type = other DNA
agtgacatgatctcggctca

SEQ ID NO: 152628 - DNA, 20 bp, synthetic construct
  source 1..20: mol_type = other DNA
cagtgacatgatctcggctc

SEQ ID NO: 152629 - DNA, 20 bp, synthetic construct
  source 1..20: mol_type = other DNA
gcagtgacatgatctcggct

SEQ ID NO: 152630 - DNA, 20 bp, synthetic construct
  source 1..20: mol_type = other DNA
tgcagtgacatgatctcggc

SEQ ID NO: 152631 - DNA, 20 bp, synthetic construct
  source 1..20: mol_type = other DNA
gtgcagtgacatgatctcgg

SEQ ID NO: 152632 - DNA, 20 bp, synthetic construct
  source 1..20: mol_type = other DNA
agtgcagtgacatgatctcg

SEQ ID NO: 152633 - DNA, 20 bp, synthetic construct
  source 1..20: mol_type = other DNA
gagtgcagtgacatgatctc

SEQ ID NO: 152634 - DNA, 20 bp, synthetic construct
  source 1..20: mol_type = other DNA
ggagtgcagtgacatgatct

SEQ ID NO: 152635 - DNA, 20 bp, synthetic construct
  source 1..20: mol_type = other DNA
tggagtgcagtgacatgatc

SEQ ID NO: 152636 - DNA, 20 bp, synthetic construct
  source 1..20: mol_type = other DNA
ctggagtgcagtgacatgat

SEQ ID NO: 152637 - DNA, 20 bp, synthetic construct
  source 1..20: mol_type = other DNA
gctggagtgcagtgacatga

SEQ ID NO: 152638 - DNA, 20 bp, synthetic construct
  source 1..20: mol_type = other DNA
ggctggagtgcagtgacatg

SEQ ID NO: 152639 - DNA, 20 bp, synthetic construct
  source 1..20: mol_type = other DNA
aggctggagtgcagtgacat

SEQ ID NO: 152640 - DNA, 20 bp, synthetic construct
  source 1..20: mol_type = other DNA
caggctggagtgcagtgaca

SEQ ID NO: 152641 - DNA, 20 bp, synthetic construct
  source 1..20: mol_type = other DNA
ccaggctggagtgcagtgac

SEQ ID NO: 152642 - DNA, 20 bp, synthetic construct
  source 1..20: mol_type = other DNA
cccaggctggagtgcagtga

SEQ ID NO: 152643 - DNA, 20 bp, synthetic construct
  source 1..20: mol_type = other DNA
gcccaggctggagtgcagtg

SEQ ID NO: 152644 - DNA, 20 bp, synthetic construct
  source 1..20: mol_type = other DNA
cgcccaggctggagtgcagt

SEQ ID NO: 152645 - DNA, 20 bp, synthetic construct
  source 1..20: mol_type = other DNA
tcgcccaggctggagtgcag

SEQ ID NO: 152646 - DNA, 20 bp, synthetic construct
  source 1..20: mol_type = other DNA
gtcgcccaggctggagtgca

SEQ ID NO: 152647 - DNA, 20 bp, synthetic construct
  source 1..20: mol_type = other DNA
tgtcgcccaggctggagtgc

SEQ ID NO: 152648 - DNA, 20 bp, synthetic construct
  source 1..20: mol_type = other DNA
ctgtcgcccaggctggagtg

SEQ ID NO: 152649 - DNA, 20 bp, synthetic construct
  source 1..20: mol_type = other DNA
tctgtcgcccaggctggagt

SEQ ID NO: 152650 - DNA, 20 bp, synthetic construct
  source 1..20: mol_type = other DNA
ctctgtcgcccaggctggag

SEQ ID NO: 152651 - DNA, 20 bp, synthetic construct
  source 1..20: mol_type = other DNA
gctctgtcgcccaggctgga

SEQ ID NO: 152652 - DNA, 20 bp, synthetic construct
  source 1..20: mol_type = other DNA
cgctctgtcgcccaggctgg

SEQ ID NO: 152653 - DNA, 20 bp, synthetic construct
  source 1..20: mol_type = other DNA
tcgctctgtcgcccaggctg

SEQ ID NO: 152654 - DNA, 20 bp, synthetic construct
  source 1..20: mol_type = other DNA
ctcgctctgtcgcccaggct

SEQ ID NO: 152655 - DNA, 20 bp, synthetic construct
  source 1..20: mol_type = other DNA
tctcgctctgtcgcccaggc

SEQ ID NO: 152656 - DNA, 20 bp, synthetic construct
  source 1..20: mol_type = other DNA
gtctcgctctgtcgcccagg

SEQ ID NO: 152657 - DNA, 20 bp, synthetic construct
  source 1..20: mol_type = other DNA
agtctcgctctgtcgcccag

SEQ ID NO: 152658 - DNA, 20 bp, synthetic construct
  source 1..20: mol_type = other DNA
gagtctcgctctgtcgccca

SEQ ID NO: 152659 - DNA, 20 bp, synthetic construct
  source 1..20: mol_type = other DNA
cgagtctcgctctgtcgccc

SEQ ID NO: 152660 - DNA, 20 bp, synthetic construct
  source 1..20: mol_type = other DNA
acgagtctcgctctgtcgcc

SEQ ID NO: 152661 - DNA, 20 bp, synthetic construct
  source 1..20: mol_type = other DNA
gacgagtctcgctctgtcgc

SEQ ID NO: 152662 - DNA, 20 bp, synthetic construct
  source 1..20: mol_type = other DNA
agacgagtctcgctctgtcg

SEQ ID NO: 152663 - DNA, 20 bp, synthetic construct
  source 1..20: mol_type = other DNA
gagacgagtctcgctctgtc

SEQ ID NO: 152664 - DNA, 20 bp, synthetic construct
  source 1..20: mol_type = other DNA
tgagacgagtctcgctctgt

SEQ ID NO: 152665 - DNA, 20 bp, synthetic construct
  source 1..20: mol_type = other DNA
ttgagacgagtctcgctctg

SEQ ID NO: 152666 - DNA, 20 bp, synthetic construct
  source 1..20: mol_type = other DNA
tttgagacgagtctcgctct

SEQ ID NO: 152667 - DNA, 20 bp, synthetic construct
  source 1..20: mol_type = other DNA
ttttgagacgagtctcgctc

SEQ ID NO: 152668 - DNA, 20 bp, synthetic construct
  source 1..20: mol_type = other DNA
tttttgagacgagtctcgct

SEQ ID NO: 152669 - DNA, 20 bp, synthetic construct
  source 1..20: mol_type = other DNA
ttttttgagacgagtctcgc

SEQ ID NO: 152670 - DNA, 20 bp, synthetic construct
  source 1..20: mol_type = other DNA
tttttttgagacgagtctcg

SEQ ID NO: 152671 - DNA, 20 bp, synthetic construct
  source 1..20: mol_type = other DNA
ttttttttgagacgagtctc

SEQ ID NO: 152672 - DNA, 20 bp, synthetic construct
  source 1..20: mol_type = other DNA
tttttttttgagacgagtct

SEQ ID NO: 152673 - DNA, 20 bp, synthetic construct
  source 1..20: mol_type = other DNA
ttttttttttgagacgagtc

SEQ ID NO: 152674 - DNA, 20 bp, synthetic construct
  source 1..20: mol_type = other DNA
tttttttttttgagacgagt

SEQ ID NO: 152675 - DNA, 20 bp, synthetic construct
  source 1..20: mol_type = other DNA
ctttttttttttgagacgag

SEQ ID NO: 152676 - DNA, 20 bp, synthetic construct
  source 1..20: mol_type = other DNA
tctttttttttttgagacga

SEQ ID NO: 152677 - DNA, 20 bp, synthetic construct
  source 1..20: mol_type = other DNA
ttctttttttttttgagacg

SEQ ID NO: 152678 - DNA, 20 bp, synthetic construct
  source 1..20: mol_type = other DNA
tttctttttttttttgagac

SEQ ID NO: 152679 - DNA, 20 bp, synthetic construct
  source 1..20: mol_type = other DNA
ttttctttttttttttgaga

SEQ ID NO: 152680 - DNA, 20 bp, synthetic construct
  source 1..20: mol_type = other DNA
tttttctttttttttttgag

SEQ ID NO: 152681 - DNA, 20 bp, synthetic construct
  source 1..20: mol_type = other DNA
ttttttctttttttttttga

SEQ ID NO: 152682 - DNA, 20 bp, synthetic construct
  source 1..20: mol_type = other DNA
tttttttctttttttttttg

SEQ ID NO: 152683 - DNA, 20 bp, synthetic construct
  source 1..20: mol_type = other DNA
gtttttttcttttttttttt

SEQ ID NO: 152684 - DNA, 20 bp, synthetic construct
  source 1..20: mol_type = other DNA
agtttttttctttttttttt

SEQ ID NO: 152685 - DNA, 20 bp, synthetic construct
  source 1..20: mol_type = other DNA
aagtttttttcttttttttt

SEQ ID NO: 152686 - DNA, 20 bp, synthetic construct
  source 1..20: mol_type = other DNA
taagtttttttctttttttt

SEQ ID NO: 152687 - DNA, 20 bp, synthetic construct
  source 1..20: mol_type = other DNA
ataagtttttttcttttttt

SEQ ID NO: 152688 - DNA, 20 bp, synthetic construct
  source 1..20: mol_type = other DNA
cataagtttttttctttttt

SEQ ID NO: 152689 - DNA, 20 bp, synthetic construct
  source 1..20: mol_type = other DNA
tcataagtttttttcttttt

SEQ ID NO: 152690 - DNA, 20 bp, synthetic construct
  source 1..20: mol_type = other DNA
atcataagtttttttctttt

SEQ ID NO: 152691 - DNA, 20 bp, synthetic construct
  source 1..20: mol_type = other DNA
catcataagtttttttcttt

SEQ ID NO: 152692 - DNA, 20 bp, synthetic construct
  source 1..20: mol_type = other DNA
ccatcataagtttttttctt

SEQ ID NO: 152693 - DNA, 20 bp, synthetic construct
  source 1..20: mol_type = other DNA
tccatcataagtttttttct

SEQ ID NO: 152694 - DNA, 20 bp, synthetic construct
  source 1..20: mol_type = other DNA
gtccatcataagtttttttc

SEQ ID NO: 152695 - DNA, 20 bp, synthetic construct
  source 1..20: mol_type = other DNA
tgtccatcataagttttttt

SEQ ID NO: 152696 - DNA, 20 bp, synthetic construct
  source 1..20: mol_type = other DNA
gtgtccatcataagtttttt

SEQ ID NO: 152697 - DNA, 20 bp, synthetic construct
  source 1..20: mol_type = other DNA
agtgtccatcataagttttt

SEQ ID NO: 152698 - DNA, 20 bp, synthetic construct
  source 1..20: mol_type = other DNA
aagtgtccatcataagtttt

SEQ ID NO: 152699 - DNA, 20 bp, synthetic construct
  source 1..20: mol_type = other DNA
taagtgtccatcataagttt

SEQ ID NO: 152700 - DNA, 20 bp, synthetic construct
  source 1..20: mol_type = other DNA
ttaagtgtccatcataagtt

SEQ ID NO: 152701 - DNA, 20 bp, synthetic construct
  source 1..20: mol_type = other DNA
tttaagtgtccatcataagt

SEQ ID NO: 152702 - DNA, 20 bp, synthetic construct
  source 1..20: mol_type = other DNA
ttttaagtgtccatcataag

SEQ ID NO: 152703 - DNA, 20 bp, synthetic construct
  source 1..20: mol_type = other DNA
tttttaagtgtccatcataa

SEQ ID NO: 152704 - DNA, 20 bp, synthetic construct
  source 1..20: mol_type = other DNA
gtttttaagtgtccatcata

SEQ ID NO: 152705 - DNA, 20 bp, synthetic construct
  source 1..20: mol_type = other DNA
tgtttttaagtgtccatcat

SEQ ID NO: 152706 - DNA, 20 bp, synthetic construct
  source 1..20: mol_type = other DNA
gtgtttttaagtgtccatca

SEQ ID NO: 152707 - DNA, 20 bp, synthetic construct
  source 1..20: mol_type = other DNA
agtgtttttaagtgtccatc

SEQ ID NO: 152708 - DNA, 20 bp, synthetic construct
  source 1..20: mol_type = other DNA
gagtgtttttaagtgtccat

SEQ ID NO: 152709 - DNA, 20 bp, synthetic construct
  source 1..20: mol_type = other DNA
tgagtgtttttaagtgtcca

SEQ ID NO: 152710 - DNA, 20 bp, synthetic construct
  source 1..20: mol_type = other DNA
gtgagtgtttttaagtgtcc

SEQ ID NO: 152711 - DNA, 20 bp, synthetic construct
  source 1..20: mol_type = other DNA
agtgagtgtttttaagtgtc

SEQ ID NO: 152712 - DNA, 20 bp, synthetic construct
  source 1..20: mol_type = other DNA
cagtgagtgtttttaagtgt

SEQ ID NO: 152713 - DNA, 20 bp, synthetic construct
  source 1..20: mol_type = other DNA
tcagtgagtgtttttaagtg

SEQ ID NO: 152714 - DNA, 20 bp, synthetic construct
  source 1..20: mol_type = other DNA
ctcagtgagtgtttttaagt

SEQ ID NO: 152715 - DNA, 20 bp, synthetic construct
  source 1..20: mol_type = other DNA
actcagtgagtgtttttaag

SEQ ID NO: 152716 - DNA, 20 bp, synthetic construct
  source 1..20: mol_type = other DNA
cactcagtgagtgtttttaa

SEQ ID NO: 152717 - DNA, 20 bp, synthetic construct
  source 1..20: mol_type = other DNA
ccactcagtgagtgttttta

SEQ ID NO: 152718 - DNA, 20 bp, synthetic construct
  source 1..20: mol_type = other DNA
cccactcagtgagtgttttt

SEQ ID NO: 152719 - DNA, 20 bp, synthetic construct
  source 1..20: mol_type = other DNA
ccccactcagtgagtgtttt

SEQ ID NO: 152720 - DNA, 20 bp, synthetic construct
  source 1..20: mol_type = other DNA
tccccactcagtgagtgttt

SEQ ID NO: 152721 - DNA, 20 bp, synthetic construct
  source 1..20: mol_type = other DNA
ctccccactcagtgagtgtt

SEQ ID NO: 152722 - DNA, 20 bp, synthetic construct
  source 1..20: mol_type = other DNA
actccccactcagtgagtgt

SEQ ID NO: 152723 - DNA, 20 bp, synthetic construct
  source 1..20: mol_type = other DNA
cactccccactcagtgagtg

SEQ ID NO: 152724 - DNA, 20 bp, synthetic construct
  source 1..20: mol_type = other DNA
ccactccccactcagtgagt

SEQ ID NO: 152725 - DNA, 20 bp, synthetic construct
  source 1..20: mol_type = other DNA
tccactccccactcagtgag

SEQ ID NO: 152726 - DNA, 20 bp, synthetic construct
  source 1..20: mol_type = other DNA
ctccactccccactcagtga

SEQ ID NO: 152727 - DNA, 20 bp, synthetic construct
  source 1..20: mol_type = other DNA
tctccactccccactcagtg

SEQ ID NO: 152728 - DNA, 20 bp, synthetic construct
  source 1..20: mol_type = other DNA
ctctccactccccactcagt

SEQ ID NO: 152729 - DNA, 20 bp, synthetic construct
  source 1..20: mol_type = other DNA
gctctccactccccactcag

SEQ ID NO: 152730 - DNA, 20 bp, synthetic construct
  source 1..20: mol_type = other DNA
tgctctccactccccactca

SEQ ID NO: 152731 - DNA, 20 bp, synthetic construct
  source 1..20: mol_type = other DNA
ctgctctccactccccactc

SEQ ID NO: 152732 - DNA, 20 bp, synthetic construct
  source 1..20: mol_type = other DNA
cctgctctccactccccact

SEQ ID NO: 152733 - DNA, 20 bp, synthetic construct
  source 1..20: mol_type = other DNA
ccctgctctccactccccac

SEQ ID NO: 152734 - DNA, 20 bp, synthetic construct
  source 1..20: mol_type = other DNA
cccctgctctccactcccca

SEQ ID NO: 152735 - DNA, 20 bp, synthetic construct
  source 1..20: mol_type = other DNA
acccctgctctccactcccc

SEQ ID NO: 152736 - DNA, 20 bp, synthetic construct
  source 1..20: mol_type = other DNA
gacccctgctctccactccc

SEQ ID NO: 152737 - DNA, 20 bp, synthetic construct
  source 1..20: mol_type = other DNA
ggacccctgctctccactcc

SEQ ID NO: 152738 - DNA, 20 bp, synthetic construct
  source 1..20: mol_type = other DNA
gggacccctgctctccactc

SEQ ID NO: 152739 - DNA, 20 bp, synthetic construct
  source 1..20: mol_type = other DNA
tgggacccctgctctccact

SEQ ID NO: 152740 - DNA, 20 bp, synthetic construct
  source 1..20: mol_type = other DNA
ctgggacccctgctctccac

SEQ ID NO: 152741 - DNA, 20 bp, synthetic construct
  source 1..20: mol_type = other DNA
cctgggacccctgctctcca

SEQ ID NO: 152742 - DNA, 20 bp, synthetic construct
  source 1..20: mol_type = other DNA
ccctgggacccctgctctcc

SEQ ID NO: 152743 - DNA, 20 bp, synthetic construct
  source 1..20: mol_type = other DNA
accctgggacccctgctctc

SEQ ID NO: 152744 - DNA, 20 bp, synthetic construct
  source 1..20: mol_type = other DNA
taccctgggacccctgctct

SEQ ID NO: 152745 - DNA, 20 bp, synthetic construct
  source 1..20: mol_type = other DNA
ctaccctgggacccctgctc

SEQ ID NO: 152746 - DNA, 20 bp, synthetic construct
  source 1..20: mol_type = other DNA
gctaccctgggacccctgct

SEQ ID NO: 152747 - DNA, 20 bp, synthetic construct
  source 1..20: mol_type = other DNA
ggctaccctgggacccctgc

SEQ ID NO: 152748 - DNA, 20 bp, synthetic construct
  source 1..20: mol_type = other DNA
aggctaccctgggacccctg

SEQ ID NO: 152749 - DNA, 20 bp, synthetic construct
  source 1..20: mol_type = other DNA
caggctaccctgggacccct

SEQ ID NO: 152750 - DNA, 20 bp, synthetic construct
  source 1..20: mol_type = other DNA
acaggctaccctgggacccc

SEQ ID NO: 152751 - DNA, 20 bp, synthetic construct
  source 1..20: mol_type = other DNA
aacaggctaccctgggaccc

SEQ ID NO: 152752 - DNA, 20 bp, synthetic construct
  source 1..20: mol_type = other DNA
caacaggctaccctgggacc

SEQ ID NO: 152753 - DNA, 20 bp, synthetic construct
  source 1..20: mol_type = other DNA
ccaacaggctaccctgggac

SEQ ID NO: 152754 - DNA, 20 bp, synthetic construct
  source 1..20: mol_type = other DNA
tccaacaggctaccctggga

SEQ ID NO: 152755 - DNA, 20 bp, synthetic construct
  source 1..20: mol_type = other DNA
gtccaacaggctaccctggg

SEQ ID NO: 152756 - DNA, 20 bp, synthetic construct
  source 1..20: mol_type = other DNA
tgtccaacaggctaccctgg

SEQ ID NO: 152757 - DNA, 20 bp, synthetic construct
  source 1..20: mol_type = other DNA
atgtccaacaggctaccctg

SEQ ID NO: 152758 - DNA, 20 bp, synthetic construct
  source 1..20: mol_type = other DNA
aatgtccaacaggctaccct

SEQ ID NO: 152759 - DNA, 20 bp, synthetic construct
  source 1..20: mol_type = other DNA
aaatgtccaacaggctaccc

SEQ ID NO: 152760 - DNA, 20 bp, synthetic construct
  source 1..20: mol_type = other DNA
gaaatgtccaacaggctacc

SEQ ID NO: 152761 - DNA, 20 bp, synthetic construct
  source 1..20: mol_type = other DNA
ggaaatgtccaacaggctac

SEQ ID NO: 152762 - DNA, 20 bp, synthetic construct
  source 1..20: mol_type = other DNA
tggaaatgtccaacaggcta

SEQ ID NO: 152763 - DNA, 20 bp, synthetic construct
  source 1..20: mol_type = other DNA
ctggaaatgtccaacaggct

SEQ ID NO: 152764 - DNA, 20 bp, synthetic construct
  source 1..20: mol_type = other DNA
cctggaaatgtccaacaggc

SEQ ID NO: 152765 - DNA, 20 bp, synthetic construct
  source 1..20: mol_type = other DNA
ccctggaaatgtccaacagg

SEQ ID NO: 152766 - DNA, 20 bp, synthetic construct
  source 1..20: mol_type = other DNA
gccctggaaatgtccaacag

SEQ ID NO: 152767 - DNA, 20 bp, synthetic construct
  source 1..20: mol_type = other DNA
cgccctggaaatgtccaaca

SEQ ID NO: 152768 - DNA, 20 bp, synthetic construct
  source 1..20: mol_type = other DNA
tcgccctggaaatgtccaac

SEQ ID NO: 152769 - DNA, 20 bp, synthetic construct
  source 1..20: mol_type = other DNA
gtcgccctggaaatgtccaa

SEQ ID NO: 152770 - DNA, 20 bp, synthetic construct
  source 1..20: mol_type = other DNA
agtcgccctggaaatgtcca

SEQ ID NO: 152771 - DNA, 20 bp, synthetic construct
  source 1..20: mol_type = other DNA
aagtcgccctggaaatgtcc

SEQ ID NO: 152772 - DNA, 20 bp, synthetic construct
  source 1..20: mol_type = other DNA
aaagtcgccctggaaatgtc

SEQ ID NO: 152773 - DNA, 20 bp, synthetic construct
  source 1..20: mol_type = other DNA
aaaagtcgccctggaaatgt

SEQ ID NO: 152774 - DNA, 20 bp, synthetic construct
  source 1..20: mol_type = other DNA
aaaaagtcgccctggaaatg

SEQ ID NO: 152775 - DNA, 20 bp, synthetic construct
  source 1..20: mol_type = other DNA
gaaaaagtcgccctggaaat

SEQ ID NO: 152776 - DNA, 20 bp, synthetic construct
  source 1..20: mol_type = other DNA
agaaaaagtcgccctggaaa

SEQ ID NO: 152777 - DNA, 20 bp, synthetic construct
  source 1..20: mol_type = other DNA
aagaaaaagtcgccctggaa

SEQ ID NO: 152778 - DNA, 20 bp, synthetic construct
  source 1..20: mol_type = other DNA
aaagaaaaagtcgccctgga

SEQ ID NO: 152779 - DNA, 20 bp, synthetic construct
  source 1..20: mol_type = other DNA
aaaagaaaaagtcgccctgg

SEQ ID NO: 152780 - DNA, 20 bp, synthetic construct
  source 1..20: mol_type = other DNA
aaaaagaaaaagtcgccctg

SEQ ID NO: 152781 - DNA, 20 bp, synthetic construct
  source 1..20: mol_type = other DNA
aaaaaagaaaaagtcgccct

SEQ ID NO: 152782 - DNA, 20 bp, synthetic construct
  source 1..20: mol_type = other DNA
aaaaaaagaaaaagtcgccc

SEQ ID NO: 152783 - DNA, 20 bp, synthetic construct
  source 1..20: mol_type = other DNA
aaaaaaaagaaaaagtcgcc

SEQ ID NO: 152784 - DNA, 20 bp, synthetic construct
  source 1..20: mol_type = other DNA
aaaaaaaaagaaaaagtcgc

SEQ ID NO: 152785 - DNA, 20 bp, synthetic construct
  source 1..20: mol_type = other DNA
aaaaaaaaaagaaaaagtcg

SEQ ID NO: 152786 - DNA, 20 bp, synthetic construct
  source 1..20: mol_type = other DNA
aaaaaaaaaaagaaaaagtc

SEQ ID NO: 152787 - DNA, 20 bp, synthetic construct
  source 1..20: mol_type = other DNA
aaaaaaaaaaaagaaaaagt

SEQ ID NO: 152788 - DNA, 20 bp, synthetic construct
  source 1..20: mol_type = other DNA
aaaaaaaaaaaaagaaaaag

SEQ ID NO: 152789 - DNA, 20 bp, synthetic construct
  source 1..20: mol_type = other DNA
taaaaaaaaaaaaagaaaaa

SEQ ID NO: 152790 - DNA, 20 bp, synthetic construct
  source 1..20: mol_type = other DNA
ttaaaaaaaaaaaaagaaaa

SEQ ID NO: 152791 - DNA, 20 bp, synthetic construct
  source 1..20: mol_type = other DNA
tttaaaaaaaaaaaaagaaa

SEQ ID NO: 152792 - DNA, 20 bp, synthetic construct
  source 1..20: mol_type = other DNA
ctttaaaaaaaaaaaaagaa

SEQ ID NO: 152793 - DNA, 20 bp, synthetic construct
  source 1..20: mol_type = other DNA
actttaaaaaaaaaaaaaga

SEQ ID NO: 152794 - DNA, 20 bp, synthetic construct
  source 1..20: mol_type = other DNA
gactttaaaaaaaaaaaaag

SEQ ID NO: 152795 - DNA, 20 bp, synthetic construct
  source 1..20: mol_type = other DNA
tgactttaaaaaaaaaaaaa

SEQ ID NO: 152796 - DNA, 20 bp, synthetic construct
  source 1..20: mol_type = other DNA
ttgactttaaaaaaaaaaaa

SEQ ID NO: 152797 - DNA, 20 bp, synthetic construct
  source 1..20: mol_type = other DNA
cttgactttaaaaaaaaaaa

SEQ ID NO: 152798 - DNA, 20 bp, synthetic construct
  source 1..20: mol_type = other DNA
acttgactttaaaaaaaaaa

SEQ ID NO: 152799 - DNA, 20 bp, synthetic construct
  source 1..20: mol_type = other DNA
cacttgactttaaaaaaaaa

SEQ ID NO: 152800 - DNA, 20 bp, synthetic construct
  source 1..20: mol_type = other DNA
tcacttgactttaaaaaaaa

SEQ ID NO: 152801 - DNA, 20 bp, synthetic construct
  source 1..20: mol_type = other DNA
ctcacttgactttaaaaaaa

SEQ ID NO: 152802 - DNA, 20 bp, synthetic construct
  source 1..20: mol_type = other DNA
actcacttgactttaaaaaa

SEQ ID NO: 152803 - DNA, 20 bp, synthetic construct
  source 1..20: mol_type = other DNA
tactcacttgactttaaaaa

SEQ ID NO: 152804 - DNA, 20 bp, synthetic construct
  source 1..20: mol_type = other DNA
atactcacttgactttaaaa

SEQ ID NO: 152805 - DNA, 20 bp, synthetic construct
  source 1..20: mol_type = other DNA
catactcacttgactttaaa

SEQ ID NO: 152806 - DNA, 20 bp, synthetic construct
  source 1..20: mol_type = other DNA
gcatactcacttgactttaa

SEQ ID NO: 152807 - DNA, 20 bp, synthetic construct
  source 1..20: mol_type = other DNA
ggcatactcacttgacttta

SEQ ID NO: 152808 - DNA, 20 bp, synthetic construct
  source 1..20: mol_type = other DNA
tggcatactcacttgacttt

SEQ ID NO: 152809 - DNA, 20 bp, synthetic construct
  source 1..20: mol_type = other DNA
atggcatactcacttgactt

SEQ ID NO: 152810 - DNA, 20 bp, synthetic construct
  source 1..20: mol_type = other DNA
tatggcatactcacttgact

SEQ ID NO: 152811 - DNA, 20 bp, synthetic construct
  source 1..20: mol_type = other DNA
atatggcatactcacttgac

SEQ ID NO: 152812 - DNA, 20 bp, synthetic construct
  source 1..20: mol_type = other DNA
catatggcatactcacttga

SEQ ID NO: 152813 - DNA, 20 bp, synthetic construct
  source 1..20: mol_type = other DNA
ccatatggcatactcacttg

SEQ ID NO: 152814 - DNA, 20 bp, synthetic construct
  source 1..20: mol_type = other DNA
tccatatggcatactcactt

SEQ ID NO: 152815 - DNA, 20 bp, synthetic construct
  source 1..20: mol_type = other DNA
ttccatatggcatactcact

SEQ ID NO: 152816 - DNA, 20 bp, synthetic construct
  source 1..20: mol_type = other DNA
tttccatatggcatactcac

SEQ ID NO: 152817 - DNA, 20 bp, synthetic construct
  source 1..20: mol_type = other DNA
ttttccatatggcatactca

SEQ ID NO: 152818 - DNA, 20 bp, synthetic construct
  source 1..20: mol_type = other DNA
cttttccatatggcatactc

SEQ ID NO: 152819 - DNA, 20 bp, synthetic construct
  source 1..20: mol_type = other DNA
ccttttccatatggcatact

SEQ ID NO: 152820 - DNA, 20 bp, synthetic construct
  source 1..20: mol_type = other DNA
cccttttccatatggcatac

SEQ ID NO: 152821 - DNA, 20 bp, synthetic construct
  source 1..20: mol_type = other DNA
acccttttccatatggcata

SEQ ID NO: 152822 - DNA, 20 bp, synthetic construct
  source 1..20: mol_type = other DNA
cacccttttccatatggcat

SEQ ID NO: 152823 - DNA, 20 bp, synthetic construct
  source 1..20: mol_type = other DNA
acacccttttccatatggca

SEQ ID NO: 152824 - DNA, 20 bp, synthetic construct
  source 1..20: mol_type = other DNA
cacacccttttccatatggc

SEQ ID NO: 152825 - DNA, 20 bp, synthetic construct
  source 1..20: mol_type = other DNA
gcacacccttttccatatgg

SEQ ID NO: 152826 - DNA, 20 bp, synthetic construct
  source 1..20: mol_type = other DNA
cgcacacccttttccatatg

SEQ ID NO: 152827 - DNA, 20 bp, synthetic construct
  source 1..20: mol_type = other DNA
acgcacacccttttccatat

SEQ ID NO: 152828 - DNA, 20 bp, synthetic construct
  source 1..20: mol_type = other DNA
cacgcacacccttttccata

SEQ ID NO: 152829 - DNA, 20 bp, synthetic construct
  source 1..20: mol_type = other DNA
ccacgcacacccttttccat

SEQ ID NO: 152830 - DNA, 20 bp, synthetic construct
  source 1..20: mol_type = other DNA
tccacgcacacccttttcca

SEQ ID NO: 152831 - DNA, 20 bp, synthetic construct
  source 1..20: mol_type = other DNA
ctccacgcacacccttttcc

SEQ ID NO: 152832 - DNA, 20 bp, synthetic construct
  source 1..20: mol_type = other DNA
tctccacgcacacccttttc

SEQ ID NO: 152833 - DNA, 20 bp, synthetic construct
  source 1..20: mol_type = other DNA
ttctccacgcacaccctttt

SEQ ID NO: 152834 - DNA, 20 bp, synthetic construct
  source 1..20: mol_type = other DNA
tttctccacgcacacccttt

SEQ ID NO: 152835 - DNA, 20 bp, synthetic construct
  source 1..20: mol_type = other DNA
ttttctccacgcacaccctt

SEQ ID NO: 152836 - DNA, 20 bp, synthetic construct
  source 1..20: mol_type = other DNA
tttttctccacgcacaccct

SEQ ID NO: 152837 - DNA, 20 bp, synthetic construct
  source 1..20: mol_type = other DNA
ctttttctccacgcacaccc

SEQ ID NO: 152838 - DNA, 20 bp, synthetic construct
  source 1..20: mol_type = other DNA
gctttttctccacgcacacc

SEQ ID NO: 152839 - DNA, 20 bp, synthetic construct
  source 1..20: mol_type = other DNA
tgctttttctccacgcacac

SEQ ID NO: 152840 - DNA, 20 bp, synthetic construct
  source 1..20: mol_type = other DNA
ttgctttttctccacgcaca

SEQ ID NO: 152841 - DNA, 20 bp, synthetic construct
  source 1..20: mol_type = other DNA
cttgctttttctccacgcac

SEQ ID NO: 152842 - DNA, 20 bp, synthetic construct
  source 1..20: mol_type = other DNA
ccttgctttttctccacgca

SEQ ID NO: 152843 - DNA, 20 bp, synthetic construct
  source 1..20: mol_type = other DNA
cccttgctttttctccacgc

SEQ ID NO: 152844 - DNA, 20 bp, synthetic construct
  source 1..20: mol_type = other DNA
ccccttgctttttctccacg

SEQ ID NO: 152845 - DNA, 20 bp, synthetic construct
  source 1..20: mol_type = other DNA
gccccttgctttttctccac

SEQ ID NO: 152846 - DNA, 20 bp, synthetic construct
  source 1..20: mol_type = other DNA
agccccttgctttttctcca

SEQ ID NO: 152847 - DNA, 20 bp, synthetic construct
  source 1..20: mol_type = other DNA
gagccccttgctttttctcc

SEQ ID NO: 152848 - DNA, 20 bp, synthetic construct
  source 1..20: mol_type = other DNA
ggagccccttgctttttctc

SEQ ID NO: 152849 - DNA, 20 bp, synthetic construct
  source 1..20: mol_type = other DNA
tggagccccttgctttttct

SEQ ID NO: 152850 - DNA, 20 bp, synthetic construct
  source 1..20: mol_type = other DNA
ctggagccccttgctttttc

SEQ ID NO: 152851 - DNA, 20 bp, synthetic construct
  source 1..20: mol_type = other DNA
tctggagccccttgcttttt

SEQ ID NO: 152852 - DNA, 20 bp, synthetic construct
  source 1..20: mol_type = other DNA
ctctggagccccttgctttt

SEQ ID NO: 152853 - DNA, 20 bp, synthetic construct
  source 1..20: mol_type = other DNA
actctggagccccttgcttt

SEQ ID NO: 152854 - DNA, 20 bp, synthetic construct
  source 1..20: mol_type = other DNA
cactctggagccccttgctt

SEQ ID NO: 152855 - DNA, 20 bp, synthetic construct
  source 1..20: mol_type = other DNA
acactctggagccccttgct

SEQ ID NO: 152856 - DNA, 20 bp, synthetic construct
  source 1..20: mol_type = other DNA
tacactctggagccccttgc

SEQ ID NO: 152857 - DNA, 20 bp, synthetic construct
  source 1..20: mol_type = other DNA
ctacactctggagccccttg

SEQ ID NO: 152858 - DNA, 20 bp, synthetic construct
  source 1..20: mol_type = other DNA
cctacactctggagcccctt

SEQ ID NO: 152859 - DNA, 20 bp, synthetic construct
  source 1..20: mol_type = other DNA
tcctacactctggagcccct

SEQ ID NO: 152860 - DNA, 20 bp, synthetic construct
  source 1..20: mol_type = other DNA
atcctacactctggagcccc

SEQ ID NO: 152861 - DNA, 20 bp, synthetic construct
  source 1..20: mol_type = other DNA
catcctacactctggagccc

SEQ ID NO: 152862 - DNA, 20 bp, synthetic construct
  source 1..20: mol_type = other DNA
tcatcctacactctggagcc

SEQ ID NO: 152863 - DNA, 20 bp, synthetic construct
  source 1..20: mol_type = other DNA
ctcatcctacactctggagc

SEQ ID NO: 152864 - DNA, 20 bp, synthetic construct
  source 1..20: mol_type = other DNA
tctcatcctacactctggag

SEQ ID NO: 152865 - DNA, 20 bp, synthetic construct
  source 1..20: mol_type = other DNA
gtctcatcctacactctgga

SEQ ID NO: 152866 - DNA, 20 bp, synthetic construct
  source 1..20: mol_type = other DNA
tgtctcatcctacactctgg

SEQ ID NO: 152867 - DNA, 20 bp, synthetic construct
  source 1..20: mol_type = other DNA
atgtctcatcctacactctg

SEQ ID NO: 152868 - DNA, 20 bp, synthetic construct
  source 1..20: mol_type = other DNA
tatgtctcatcctacactct

SEQ ID NO: 152869 - DNA, 20 bp, synthetic construct
  source 1..20: mol_type = other DNA
gtatgtctcatcctacactc

SEQ ID NO: 152870 - DNA, 20 bp, synthetic construct
  source 1..20: mol_type = other DNA
tgtatgtctcatcctacact

SEQ ID NO: 152871 - DNA, 20 bp, synthetic construct
  source 1..20: mol_type = other DNA
gtgtatgtctcatcctacac

SEQ ID NO: 152872 - DNA, 20 bp, synthetic construct
  source 1..20: mol_type = other DNA
ggtgtatgtctcatcctaca

SEQ ID NO: 152873 - DNA, 20 bp, synthetic construct
  source 1..20: mol_type = other DNA
aggtgtatgtctcatcctac

SEQ ID NO: 152874 - DNA, 20 bp, synthetic construct
  source 1..20: mol_type = other DNA
aaggtgtatgtctcatccta

SEQ ID NO: 152875 - DNA, 20 bp, synthetic construct
  source 1..20: mol_type = other DNA
aaaggtgtatgtctcatcct

SEQ ID NO: 152876 - DNA, 20 bp, synthetic construct
  source 1..20: mol_type = other DNA
aaaaggtgtatgtctcatcc

SEQ ID NO: 152877 - DNA, 20 bp, synthetic construct
  source 1..20: mol_type = other DNA
caaaaggtgtatgtctcatc

SEQ ID NO: 152878 - DNA, 20 bp, synthetic construct
  source 1..20: mol_type = other DNA
ccaaaaggtgtatgtctcat

SEQ ID NO: 152879 - DNA, 20 bp, synthetic construct
  source 1..20: mol_type = other DNA
cccaaaaggtgtatgtctca

SEQ ID NO: 152880 - DNA, 20 bp, synthetic construct
  source 1..20: mol_type = other DNA
acccaaaaggtgtatgtctc

SEQ ID NO: 152881 - DNA, 20 bp, synthetic construct
  source 1..20: mol_type = other DNA
aacccaaaaggtgtatgtct

SEQ ID NO: 152882 - DNA, 20 bp, synthetic construct
  source 1..20: mol_type = other DNA
taacccaaaaggtgtatgtc

SEQ ID NO: 152883 - DNA, 20 bp, synthetic construct
  source 1..20: mol_type = other DNA
ttaacccaaaaggtgtatgt

SEQ ID NO: 152884 - DNA, 20 bp, synthetic construct
  source 1..20: mol_type = other DNA
tttaacccaaaaggtgtatg

SEQ ID NO: 152885 - DNA, 20 bp, synthetic construct
  source 1..20: mol_type = other DNA
ttttaacccaaaaggtgtat

SEQ ID NO: 152886 - DNA, 20 bp, synthetic construct
  source 1..20: mol_type = other DNA
tttttaacccaaaaggtgta

SEQ ID NO: 152887 - DNA, 20 bp, synthetic construct
  source 1..20: mol_type = other DNA
ctttttaacccaaaaggtgt

SEQ ID NO: 152888 - DNA, 20 bp, synthetic construct
  source 1..20: mol_type = other DNA
cctttttaacccaaaaggtg

SEQ ID NO: 152889 - DNA, 20 bp, synthetic construct
  source 1..20: mol_type = other DNA
gcctttttaacccaaaaggt

SEQ ID NO: 152890 - DNA, 20 bp, synthetic construct
  source 1..20: mol_type = other DNA
agcctttttaacccaaaagg

SEQ ID NO: 152891 - DNA, 20 bp, synthetic construct
  source 1..20: mol_type = other DNA
cagcctttttaacccaaaag

SEQ ID NO: 152892 - DNA, 20 bp, synthetic construct
  source 1..20: mol_type = other DNA
tcagcctttttaacccaaaa

SEQ ID NO: 152893 - DNA, 20 bp, synthetic construct
  source 1..20: mol_type = other DNA
ctcagcctttttaacccaaa

SEQ ID NO: 152894 - DNA, 20 bp, synthetic construct
  source 1..20: mol_type = other DNA
cctcagcctttttaacccaa

SEQ ID NO: 152895 - DNA, 20 bp, synthetic construct
  source 1..20: mol_type = other DNA
gcctcagcctttttaaccca

SEQ ID NO: 152896 - DNA, 20 bp, synthetic construct
  source 1..20: mol_type = other DNA
tgcctcagcctttttaaccc

SEQ ID NO: 152897 - DNA, 20 bp, synthetic construct
  source 1..20: mol_type = other DNA
ctgcctcagcctttttaacc

SEQ ID NO: 152898 - DNA, 20 bp, synthetic construct
  source 1..20: mol_type = other DNA
cctgcctcagcctttttaac

SEQ ID NO: 152899 - DNA, 20 bp, synthetic construct
  source 1..20: mol_type = other DNA
tcctgcctcagcctttttaa

SEQ ID NO: 152900 - DNA, 20 bp, synthetic construct
  source 1..20: mol_type = other DNA
ctcctgcctcagccttttta

SEQ ID NO: 152901 - DNA, 20 bp, synthetic construct
  source 1..20: mol_type = other DNA
tctcctgcctcagccttttt

SEQ ID NO: 152902 - DNA, 20 bp, synthetic construct
  source 1..20: mol_type = other DNA
ttctcctgcctcagcctttt

SEQ ID NO: 152903 - DNA, 20 bp, synthetic construct
  source 1..20: mol_type = other DNA
attctcctgcctcagccttt

SEQ ID NO: 152904 - DNA, 20 bp, synthetic construct
  source 1..20: mol_type = other DNA
cattctcctgcctcagcctt

SEQ ID NO: 152905 - DNA, 20 bp, synthetic construct
  source 1..20: mol_type = other DNA
ccattctcctgcctcagcct

SEQ ID NO: 152906 - DNA, 20 bp, synthetic construct
  source 1..20: mol_type = other DNA
gccattctcctgcctcagcc

SEQ ID NO: 152907 - DNA, 20 bp, synthetic construct
  source 1..20: mol_type = other DNA
cgccattctcctgcctcagc

SEQ ID NO: 152908 - DNA, 20 bp, synthetic construct
  source 1..20: mol_type = other DNA
acgccattctcctgcctcag
